United States Patent Application Publication US 2020/0163878 A1 - sequence listing, part 20

SEQ ID NO: 71221 - RNA, 1701 nt, Artificial Sequence
  derived and/or modified CDS sequence (opt1) from hemagglutinin__InfluenzaA__AEO01092
augaaggccauccuggugguccuccuguacaccuucgccaccgcgaacgccgacacgcugugcaucggcuaccacgccaacaacagcaccgacaccguggacaccgugcucgagaagaacgucacggugacccacuccgugaaccugcuggaggacaagcacaacgggaagcucugcaagcugcgcggcgucgcgccccugcaccucgggaagugcaacaucgccggcuggauccuggggaacccggagugcgagagccuguccaccgccagcuccuggagcuacaucguggagaccuccagcuccgacaacggcacgugcuaccccggcgacuucaucgacuacgaggagcuccgggagcagcugagcuccgugagcuccuucgagcgcuucgagaucuuccccaagaccagcuccuggcccaaccacgacagcaacaagggggucaccgccgccugcccgcacgccggcgcgaaguccuucuacaagaaccugaucuggcucgugaagaaggggaacagcuaccccaagcuguccaagagcuacaucaacgacaagggcaaggaggugcugguccucugggggauccaccaccccagcaccuccgccgaccagcagagccuguaccagaacgccgacgccuacguguucgugggcacgucccgguacagcaagaaguucaagcccgagaucgccauccgcccgaagguccgggaccaggagggccgcaugaacuacuacuggacccugguggagcccggggacaagaucaccuucgaggcgaccggcaaccucguggucccccgguacgccuucgccauggagcgcaacgccggguccggcaucaucaucagcgacacgcccgugcacgacugcaacacgaccugccagaccccgaagggcgccaucaacaccucccugcccuuccagaacauccaccccaucaccaucgggaagugccccaaguacgucaagagcaccaagcugcggcucgcgaccggccugcgcaacgugccguccauccagagccgggggcuguucggcgccaucgccggguucaucgagggcggcuggacggggaugguggacggcugguacggguaccaccaccagaacgagcagggcuccggguacgccgccgaccucaagagcacccagaacgcgaucgacgagaucaccaacaaggugaacuccgucaucgagaagaugaacacccaguucacggccgugggcaaggaguucaaccaccuggagaagcgcaucgagaaccugaacaagaaggucgacgacggcuuccucgacaucuggaccuacaacgccgagcugcuggugcuccuggagaacgagcggacccuggacuaccacgacagcaacgugaagaaccucuacgagcgcguccggucccagcugaagaacaacgccaaggagaucgggaacggcugcuucgaguucuaccacaagugcgacaacacgugcauggagagcgugaagaacgggaccuacgacuaccccaaguacuccgaggaggccaagcugaaccgcgaggagaucgacggcgugaagcucgagagcacccggaucuaccagauccuggcgaucuacuccaccgucgccagcagccuggugcucguggucucccugggggccaucagcuucuggaugugcuccaacggcagccugcagugccgcaucugcaucuga

SEQ ID NO: 71222 - RNA, 1701 nt, Artificial Sequence; identical to SEQ ID NO: 66693
  derived and/or modified CDS sequence (opt1) from hemagglutinin__InfluenzaA__AEO01093

SEQ ID NO: 71223 - RNA, 1701 nt, Artificial Sequence; identical to SEQ ID NO: 66693
  derived and/or modified CDS sequence (opt1) from hemagglutinin__InfluenzaA__AEO01094

SEQ ID NO: 71224 - RNA, 1701 nt, Artificial Sequence; identical to SEQ ID NO: 69900
  derived and/or modified CDS sequence (opt1) from hemagglutinin__InfluenzaA__AEO01095

SEQ ID NO: 71225 - RNA, 1701 nt, Artificial Sequence; identical to SEQ ID NO: 67046
  derived and/or modified CDS sequence (opt1) from hemagglutinin__InfluenzaA__AEO01096

SEQ ID NO: 71226 - RNA, 1701 nt, Artificial Sequence; identical to SEQ ID NO: 67046
  derived and/or modified CDS sequence (opt1) from hemagglutinin__InfluenzaA__AEO01097

SEQ ID NO: 71227 - RNA, 1701 nt, Artificial Sequence; identical to SEQ ID NO: 67046
  derived and/or modified CDS sequence (opt1) from hemagglutinin__InfluenzaA__AEO01098

SEQ ID NO: 71228 - RNA, 1701 nt, Artificial Sequence; identical to SEQ ID NO: 66693
  derived and/or modified CDS sequence (opt1) from hemagglutinin__InfluenzaA__AEO01099

SEQ ID NO: 71229 - RNA, 1701 nt, Artificial Sequence; identical to SEQ ID NO: 66935
  derived and/or modified CDS sequence (opt1) from hemagglutinin__InfluenzaA__AEO01100

SEQ ID NO: 71230 - RNA, 1701 nt, Artificial Sequence; identical to SEQ ID NO: 66693
  derived and/or modified CDS sequence (opt1) from hemagglutinin__InfluenzaA__AEO01101

SEQ ID NO: 71231 - RNA, 1701 nt, Artificial Sequence; identical to SEQ ID NO: 66693
  derived and/or modified CDS sequence (opt1) from hemagglutinin__InfluenzaA__AEO01102

SEQ ID NO: 71232 - RNA, 1701 nt, Artificial Sequence; identical to SEQ ID NO: 67046
  derived and/or modified CDS sequence (opt1) from hemagglutinin__InfluenzaA__AEO01103

SEQ ID NO: 71233 - RNA, 1701 nt, Artificial Sequence; identical to SEQ ID NO: 67046
  derived and/or modified CDS sequence (opt1) from hemagglutinin__InfluenzaA__AEO01104

SEQ ID NO: 71234 - RNA, 1701 nt, Artificial Sequence
  derived and/or modified CDS sequence (opt1) from hemagglutinin__InfluenzaA__AEO01105
augaaggccauccuggugguccuccuguacaccuucgccaccgcgaacgccgacacgcugugcaucggcuaccacgccaacaacagcaccgacaccguggacaccgugcucgagaagaacgucacggugacccacuccgugaaccugcuggaggacaagcacaacgggaagcucugcaagcugcgcggcgucgcgccccugcaccucgggaagugcaacaucgccggcuggauccuggggaacccggagugcgagagccuguccaccgcgagcuccuggagcuacaucguggagaccuccagcuccgacaacggcacgugcuaccccggcgacuucaucgacuacgaggagcuccgggagcagcugagcuccgugagcuccuucgagcgcuucgagaucuuccccaagaccagcuccuggcccaaccacgacagcuccaagggggucaccgccgccugcccgcacgccggcgccaagagcuucuacaagaaccugaucuggcucgugaagaaggggaacuccuaccccaagcugagcaagagcuacaucaacgacaagggcaaggaggugcugguccucugggggauccaccaccccuccaccagcgccgaccagcagucccuguaccagaacgccgacgccuacguguucgugggcacgagccgguacuccaagaaguucaagcccgagaucgccauccgcccgaagguccgggaccaggagggccgcaugaacuacuacuggacccugguggagcccggggacaagaucaccuucgaggcgaccggcaaccucguggucccccgguacgccuucgccauggagcgcaacgccgggagcggcaucaucaucuccgacacgcccgugcacgacugcaacacgaccugccagaccccgaagggcgccaucaacaccagccugcccuuccagaacauccaccccaucaccaucgggaagugccccaaguacgugaaguccaccaagcugcggcucgcgaccggccugcgcaacgucccgagcauccagucccgggggcuguucggcgccaucgccggguucaucgagggcggcuggacggggaugguggacggcugguacggguaccaccaccagaacgagcagggcagcggguacgccgccgaccucaaguccacccagaacgcgaucgacgagaucaccaacaaggugaacagcgucaucgagaagaugaacacccaguucacggccgugggcaaggaguucaaccaccuggagaagcgcaucgagaaccugaacaagaaggucgacgacggcuuccucgacaucuggaccuacaacgccgagcugcuggugcuccuggagaacgagcggacccuggacuaccacgacuccaacgugaagaaccucuacgagaagguccgcagccagcugaagaacaacgccaaggagaucgggaacggcugcuucgaguucuaccacaagugcgacaacacgugcauggaguccgugaagaacgggaccuacgacuaccccaaguacagcgaggaggccaagcugaaccgggaggagaucgacggcgugaagcucgaguccacccgcaucuaccagauccuggcgaucuacagcaccgucgccagcucccuggugcucguggucagccugggggccaucuccuucuggaugugcagcaacggcucccugcagugccggaucugcaucuga

SEQ ID NO: 71235 - RNA, 1701 nt, Artificial Sequence; identical to SEQ ID NO: 67046
  derived and/or modified CDS sequence (opt1) from hemagglutinin__InfluenzaA__AEO01106

SEQ ID NO: 71236 - RNA, 1701 nt, Artificial Sequence; identical to SEQ ID NO: 66693
  derived and/or modified CDS sequence (opt1) from hemagglutinin__InfluenzaA__AEO01107

SEQ ID NO: 71237 - RNA, 1701 nt, Artificial Sequence; identical to SEQ ID NO: 66693
  derived and/or modified CDS sequence (opt1) from hemagglutinin__InfluenzaA__AEO01108

SEQ ID NO: 71238 - RNA, 1701 nt, Artificial Sequence; identical to SEQ ID NO: 66693
  derived and/or modified CDS sequence (opt1) from hemagglutinin__InfluenzaA__AEO01109

SEQ ID NO: 71239 - RNA, 1701 nt, Artificial Sequence; identical to SEQ ID NO: 66693
  derived and/or modified CDS sequence (opt1) from hemagglutinin__InfluenzaA__AEO01110

SEQ ID NO: 71240 - RNA, 1701 nt, Artificial Sequence; identical to SEQ ID NO: 66693
  derived and/or modified CDS sequence (opt1) from hemagglutinin__InfluenzaA__AEO01111

SEQ ID NO: 71241 - RNA, 1701 nt, Artificial Sequence; identical to SEQ ID NO: 66693
  derived and/or modified CDS sequence (opt1) from hemagglutinin__InfluenzaA__AEO01112

SEQ ID NO: 71242 - RNA, 1701 nt, Artificial Sequence
  derived and/or modified CDS sequence (opt1) from hemagglutinin__InfluenzaA__AEO01113
augaaggccauccuggugguccuccuguacaccuucgccaccgcgaacgccgacacgcugugcaucggcuaccacgccaacaacagcaccgacaccguggacaccgugcucgagaagaacgucacggugacccacuccgugaaccugcuggaggacaagcacaacgggaagcucugcaagcugcgcggcgucgcgccccugcaccucgggaagugcaacaucgccggcuggauccuggggaacccggagugcgagagccuguccaccgccagcuccuggagcuacaucguggagaccuccagcuccgacaacggcacgugcuaccccggcgacuucaucgacuacgaggagcuccgggagcagcugagcuccgugagcuccuucgagcgcuucgagaucuuccccaagaccagcuccuggcccaaccacgacagcaacaagggggucaccgccgccugccugcacgccggcgcgaaguccuucuacaagaaccucaucuggcuggugaagaaggggaacagcuacccgaagcuguccaagagcuacaucaacgacaagggcaaggaggugcucguccugugggggauccaccaccccagcaccuccgccgaccagcagagccuguaccagaacgccgacgccuacguguucgugggcacgucccgguacagcaagaaguucaagcccgagaucgccauccgccccaagguccgggaccaggagggccgcaugaacuacuacuggacccucguggagccgggggacaagaucaccuucgaggcgaccggcaaccugguggucccccgguacgccuucgccauggagcgcaacgccggguccggcaucaucaucagcgacacgcccgugcacgacugcaacacgaccugccagacccccaagggcgccaucaacaccucccugccguuccagaacauccaccccaucaccaucgggaagugccccaaguacgucaagagcaccaagcuccggcuggcgaccggccugcgcaacgugcccuccauccagagccgggggcuguucggcgccaucgccggguucaucgagggcggcuggacggggaugguggacggcugguacggguaccaccaccagaacgagcagggcuccggguacgccgccgaccucaagagcacccagaacgcgaucgacgagaucaccaacaaggugaacuccgucaucgagaagaugaacacccaguucacggccgugggcaaggaguucaaccaccuggagaagcgcaucgagaaccucaacaagaaggucgacgacggcuuccuggacaucuggaccuacaacgccgagcugcucgugcugcuggagaacgagcggacccucgacuaccacgacagcaacgugaagaaccuguacgagaagguccgcucccagcugaagaacaacgccaaggagaucgggaacggcugcuucgaguucuaccacaagugcgacaacacgugcauggagagcgugaagaacgggaccuacgacuacccgaaguacuccgaggaggccaagcucaaccgggaggagaucgacggcgugaagcuggagagcacccgcaucuaccagauccuggcgaucuacuccaccgucgccagcagccucgugcugguggucucccugggggccaucagcuucuggaugugcuccaacggcagccuccagugccggaucugcaucuga

SEQ ID NO: 71243 - RNA, 1701 nt, Artificial Sequence; identical to SEQ ID NO: 66935
  derived and/or modified CDS sequence (opt1) from hemagglutinin__InfluenzaA__AEO01114

SEQ ID NO: 71244 - RNA, 1701 nt, Artificial Sequence
  derived and/or modified CDS sequence (opt1) from hemagglutinin__InfluenzaA__AEO01115
auggaggccauccuggugguccuccuguacaccuucgccaccgcgaacgccgacacgcugugcaucggcuaccacgccaacaacagcaccgacaccguggacaccgugcucgagaagaacgucacggugacccacuccgugaaccugcuggaggacaagcacaacgggaagcucugcaagcugcgcggcgucgcgccccugcaccucgggaagugcaacaucgccggcuggauccuggggaacccggagugcgagagccuguccaccgccagcuccuggagcuacaucguggagaccuccagcuccgacaacggcacgugcuaccccggcgacuucaucgacuacgaggagcuccgggagcagcugagcuccgugagcuccuucgagcgcuucgagaucuuccccaagaccagcuccuggcccaaccacgacagcaacaagggggucaccgccgccugccugcacgccggcgcgaaguccuucuacaagaaccucaucuggcuggugaagaaggggaacagcuacccgaagcuguccaagagcuacaucaacgacaagggcaaggaggugcucguccugugggggauccaccaccccagcaccuccgccgaccagcagagccuguaccagaacgccgacgccuacguguucgugggcacgucccgguacagcaagaaguucaagcccgagaucgccauccgccccaagguccgggaccaggagggccgcaugaacuacuacuggacccucguggagccgggggacaagaucaccuucgaggcgaccggcaaccugguggucccccgguacgccuucgccauggagcgcaacgccggguccggcaucaucaucagcgacacgcccgugcacgacugcaacacgaccugccagacccccaagggcgccaucaacaccucccugccguuccacaacauccaccccaucaccaucgggaagugccccaaguacgucaagagcaccaagcuccggcuggcgaccggccugcgcaacgugcccuccauccagagccgggggcuguucggcgccaucgccggguucaucgagggcggcuggacggggaugguggacggcugguacggguaccaccaccagaacgagcagggcuccggguacgccgccgaccucaagagcacccagaacgcgaucgacgagaucaccaacaaggugaacuccgucaucgagaagaugaacacccaguucacggccgugggcaaggaguucaaccaccuggagaagcgcaucgagaaccucaacaagaaggucgacgacggcuuccuggacaucuggaccuacaacgccgagcugcucgugcugcuggagaacgagcggacccucgacuaccacgacagcaacgugaagaaccuguacgagaagguccgcucccagcugaagaacaacgccaaggagaucgggaacggcugcuucgaguucuaccacaagugcgacaacacgugcauggagagcgugaagaacgggaccuacgacuacccgaaguacuccgaggaggccaagcucaaccgggaggagaucgacggcgugaagcuggagagcacccgcaucuaccagauccuggcgaucuacuccaccgucgccagcagccucgugcugguggucucccugggggccaucagcuucuggaugugcuccaacggcagccuccagugccggaucugcaucuga

SEQ ID NO: 71245 - RNA, 1701 nt, Artificial Sequence; identical to SEQ ID NO: 66693
  derived and/or modified CDS sequence (opt1) from hemagglutinin__InfluenzaA__AEO01116

SEQ ID NO: 71246 - RNA, 1701 nt, Artificial Sequence; identical to SEQ ID NO: 66693
  derived and/or modified CDS sequence (opt1) from hemagglutinin__InfluenzaA__AEO01117

SEQ ID NO: 71247 - RNA, 1701 nt, Artificial Sequence; identical to SEQ ID NO: 67559
  derived and/or modified CDS sequence (opt1) from hemagglutinin__InfluenzaA__AEO01118

SEQ ID NO: 71248 - RNA, 1701 nt, Artificial Sequence; identical to SEQ ID NO: 66693
  derived and/or modified CDS sequence (opt1) from hemagglutinin__InfluenzaA__AEO01119

SEQ ID NO: 71249 - RNA, 1701 nt, Artificial Sequence
  derived and/or modified CDS sequence (opt1) from hemagglutinin__InfluenzaA__AEO01120
augaaggccauccuggugguccuccuguacaccuucgccaccgcgaacgccgacacgcugugcaucggcuaccacgccaacaacagcaccgacaccguggacaccgugcucgagaagaacgucacggugacccacuccgugaaccugcuggaggacaagcacaacgggaagcucugcaagcugcgcggcgucgcgccccugcaccucgggaagugcaacaucgccggcuggauccuggggaacccggagugcgagagccuguccaccgccagcuccuggagcuacaucguggagaccuccagcuccgacaacggcacgugcuaccccggcgacuucaucgacuacgaggagcuccgggagcagcugagcuccgugagcuccuucgagcgcuucgagaucuuccccaagaccagcuccuggcccaaccacgacagcaacaagggggucaccgccgccugcccgcacgccggcgcgaaguccuucuacaagaaccugaucuggcucgugaagaaggggaacagcuaccccaagcuguccaagagcuacaucaacgacaagggcaaggaggugcugguccucugggggauccaccaccccagcaccuccgccgaccagcagagccuguaccagaacgccgacgccuacguguucgugggcacgucccgguacagcaagaaguucaagcccgagaucgccauccgcccgaagguccgggagcaggagggccgcaugaacuacuacuggacccugguggagcccggggacaagaucaccuucgaggcgaccggcaaccucguggucccccgguacgccuucgccauggagcgcaacgccggguccggcaucaucaucagcgacacgcccgugcacgacugcaacacgaccugccagaccccgaagggcgccaucaacaccucccugcccuuccagaacauccaccccaucaccaucgggaagugccccaaguacgucaagagcaccaagcugcggcucgcgaccggccugcgcaacaucccguccauccagagccgggggcuguucggcgccaucgccggguucaucgagggcggcuggacggggaugguggacggcugguacggguaccaccaccagaacgagcagggcuccggguacgccgccgaccucaagagcacccagaacgcgaucgacgagaucaccaacaaggugaacuccgugaucgagaagaugaacacccaguucacggccgucggcaaggaguucaaccaccuggagaagcgcaucgagaaccugaacaagaagguggacgacggcuuccucgacgucuggaccuacaacgccgagcugcuggugcuccuggagaacgagcggacccuggacuaccacgacagcaacgugaagaaccucuacgagaagguccgcucccagcugaagaacaacgccaaggagaucgggaacggcugcuucgaguucuaccacaagugcgacaacacgugcauggagagcgugaagaacgggaccuacgacuaccccaaguacuccgaggaggccaagcugaaccgggaggagaucgacggcgugaagcucgagagcacccgcaucuaccagauccuggcgaucuacuccaccgucgccagcagccuggugcucguggucucccugggggccaucagcuucuggaugugcuccaacggcagccugcagugccggaucugcaucuga

SEQ ID NO: 71250 - RNA, 1701 nt, Artificial Sequence; identical to SEQ ID NO: 66693
  derived and/or modified CDS sequence (opt1) from hemagglutinin__InfluenzaA__AEO01121

SEQ ID NO: 71251 - RNA, 1701 nt, Artificial Sequence; identical to SEQ ID NO: 67046
  derived and/or modified CDS sequence (opt1) from hemagglutinin__InfluenzaA__AEO01122

SEQ ID NO: 71252 - RNA, 1701 nt, Artificial Sequence; identical to SEQ ID NO: 66693
  derived and/or modified CDS sequence (opt1) from hemagglutinin__InfluenzaA__AEO01123

SEQ ID NO: 71253 - RNA, 1701 nt, Artificial Sequence; identical to SEQ ID NO: 66693
  derived and/or modified CDS sequence (opt1) from hemagglutinin__InfluenzaA__AEO01124

SEQ ID NO: 71254 - RNA, 1701 nt, Artificial Sequence; identical to SEQ ID NO: 67046
  derived and/or modified CDS sequence (opt1) from hemagglutinin__InfluenzaA__AEO01125

SEQ ID NO: 71255 - RNA, 1701 nt, Artificial Sequence
  derived and/or modified CDS sequence (opt1) from hemagglutinin__InfluenzaA__AEO01126
augaaggccacccuggugguccuccuguacaccuucgccacggcgaacgccgacacccugugcaucggcuaccacgccaacaacagcaccgacaccguggacacggugcucgagaagaacgucaccgugacccacuccgugaaccugcuggaggacaagcacaacgggaagcucugcaagcugcgcggcgucgcgccccugcaccucgggaagugcaacaucgccggcuggauccuggggaacccggagugcgagagccuguccaccgccagcuccuggagcuacaucguggagacguccagcuccgacaacgggaccugcuaccccggcgacuucaucgacuacgaggagcuccgggagcagcugagcuccgugagcuccuucgagcgcuucgagaucuuccccaagaccagcuccuggcccaaccacgacagcaacaagggcgucaccgccgccugcccgcacgccggcgcgaaguccuucuacaagaaccugaucuggcucgugaagaaggggaacagcuaccccaagcuguccaagagcuacaucaacgacaagggcaaggaggugcugguccucugggggauccaccaccccagcacguccgccgaccagcagagccuguaccagaacgccgacgccuacguguucgugggcaccucccgguacagcaagaaguucaagcccgagaucgccauccgcccgaagguccgggagcaggagggccgcaugaacuacuacuggacccugguggagcccggggacaagaucaccuucgaggcgacgggcaaccucguggucccccgguacgccuucgccauggagcgcaacgccggguccggcaucaucaucagcgacacccccgugcacgacugcaacacgaccugccagaccccgaagggcgccaucaacaccucccugcccuuccagaacauccaccccaucaccaucgggaagugccccaaguacgucaagagcaccaagcugcggcucgcgacgggccugcgcaacgugccguccauccagagccgggggcuguucggcgccaucgccggguucaucgagggcggcuggaccgggaugguggacggcugguacggguaccaccaccagaacgagcagggcuccggguacgccgccgaccucaagagcacccagaacgcgaucgacgagaucaccaacaaggugaacuccgucaucgagaagaugaacacgcaguucaccgccgugggcaaggaguucaaccaccuggagaagcgcaucgagaaccugaacaagaaggucgacgacggcuuccucgacaucuggaccuacaacgccgagcugcuggugcuccuggagaacgagcggacccuggacuaccacgacagcaacgugaagaaccucuacgagaagguccgcucccagcugaagaacaacgccaaggagaucgggaacggcugcuucgaguucuaccacaagugcgacaacacgugcauggagagcgugaagaacgggaccuacgacuaccccaaguacuccgaggaggccaagcugaaccgggaggagaucgacggcgugaagcucgagagcacccgcaucuaccagauccuggcgaucuacuccaccgucgccagcagccuggugcucguggucucccugggggccaucagcuucuggaugugcuccaacggcagccugcagugccggaucugcaucuga

SEQ ID NO: 71256 - RNA, 1701 nt, Artificial Sequence; identical to SEQ ID NO: 66693
  derived and/or modified CDS sequence (opt1) from hemagglutinin__InfluenzaA__AEO01127

SEQ ID NO: 71257 - RNA, 1701 nt, Artificial Sequence; identical to SEQ ID NO: 66693
  derived and/or modified CDS sequence (opt1) from hemagglutinin__InfluenzaA__AEO01128

SEQ ID NO: 71258 - RNA, 1701 nt, Artificial Sequence; identical to SEQ ID NO: 67046
  derived and/or modified CDS sequence (opt1) from hemagglutinin__InfluenzaA__AEO01129

SEQ ID NO: 71259 - RNA, 1701 nt, Artificial Sequence; identical to SEQ ID NO: 66693
  derived and/or modified CDS sequence (opt1) from hemagglutinin__InfluenzaA__AEO01130

SEQ ID NO: 71260 - RNA, 1701 nt, Artificial Sequence; identical to SEQ ID NO: 67046
  derived and/or modified CDS sequence (opt1) from hemagglutinin__InfluenzaA__AEO01131

SEQ ID NO: 71261 - RNA, 1701 nt, Artificial Sequence; identical to SEQ ID NO: 66693
  derived and/or modified CDS sequence (opt1) from hemagglutinin__InfluenzaA__AEO01132

SEQ ID NO: 71262 - RNA, 1701 nt, Artificial Sequence
  derived and/or modified CDS sequence (opt1) from hemagglutinin__InfluenzaA__AEO01133
augaaggccauccuggugguccuccuguacaccuucgccaccgcgaacgccgacacgcugugcaucggcuaccacgccaacaacagcaccgacaccguggacaccgugcucgagaagaacgucacggugacccacuccgugaacauccuggaggacaagcacaacgggaagcugugcaagcuccgcggcgucgcgccccugcaccuggggaagugcaacaucgccggcuggauccucgggaacccggagugcgagagccuguccaccgccagcuccuggagcuacaucguggagaccuccagcuccgacaacggcacgugcuaccccggcgacuucaucgacuacgaggagcugcgggagcagcucagcuccgugagcuccuucgagcgcuucgagaucuuccccaagaccagcuccuggcccaaccacgacagcaacaagggggucaccgccgccugcccgcacgccggcgcgaaguccuucuacaagaaccugaucuggcuggugaagaaggggaacagcuaccccaagcucuccaagagcuacaucaacgacaagggcaaggaggugcugguccugugggggauccaccaccccagcaccuccgccgaccagcagagccucuaccagaacgccgacgccuacguguucgugggcuccagccgguacuccaagaaguucaagcccgagaucgccauccgcccgaagguccgggaccaggagggccgcaugaacuacuacuggacgcugguggagcccggggacaagaucaccuucgaggcgaccggcaaccugguggucccccgguacgccuucgccauggagcgcaacgccgggagcggcaucaucaucuccgacacccccgugcacgacugcaacacgaccugccagaccccgaagggcgccaucaacaccagccuccccuuccagaacauccaccccaucacgaucgggaagugccccaaguacgugaaguccaccaagcugcggcuggcgaccggccuccgcaacgucccgagcauccagucccgggggcuguucggcgccaucgccggguucaucgagggcggcuggaccgggaugguggacggcugguacggguaccaccaccagaacgagcagggcagcggguacgccgccgaccugaaguccacgcagaacgcgaucgacgagaucaccaacaaggugaacagcgucaucgagaagaugaacacccaguucaccgccgugggcaaggaguucaaccaccucgagaagcgcaucgagaaccugaacaagaaggucgacgacggcuuccuggacaucuggacguacaacgccgagcuccuggugcugcucgagaacgagcggacccuggacuaccacgacuccaacgugaagaaccuguacgagaagguccgcagccagcucaagaacaacgccaaggagaucgggaacggcugcuucgaguucuaccacaagugcgacaacacgugcauggaguccgugaagaacgggaccuacgacuaccccaaguacagcgaggaggccaagcugaaccgggaggagaucgacggcgugaagcuggaguccaccaugaucuaccagauccucgcgaucuacagcaccgucgccagcucccuggugcugguggucagccucggggccaucuccuucuggaugugcagcaacggcucccugcagugccgcaucugcaucuga

SEQ ID NO: 71263 - RNA, 1701 nt, Artificial Sequence; identical to SEQ ID NO: 67046
  derived and/or modified CDS sequence (opt1) from hemagglutinin__InfluenzaA__AEO01134

SEQ ID NO: 71264 - RNA, 1701 nt, Artificial Sequence; identical to SEQ ID NO: 67046
  derived and/or modified CDS sequence (opt1) from hemagglutinin__InfluenzaA__AEO01135

SEQ ID NO: 71265 - RNA, 1701 nt, Artificial Sequence; identical to SEQ ID NO: 66693
  derived and/or modified CDS sequence (opt1) from hemagglutinin__InfluenzaA__AEO01136

SEQ ID NO: 71266 - RNA, 1701 nt, Artificial Sequence; identical to SEQ ID NO: 67140
  derived and/or modified CDS sequence (opt1) from hemagglutinin__InfluenzaA__AEO01137

SEQ ID NO: 71267 - RNA, 1701 nt, Artificial Sequence; identical to SEQ ID NO: 67140
  derived and/or modified CDS sequence (opt1) from hemagglutinin__InfluenzaA__AEO01138

SEQ ID NO: 71268 - RNA, 1701 nt, Artificial Sequence; identical to SEQ ID NO: 66693
  derived and/or modified CDS sequence (opt1) from hemagglutinin__InfluenzaA__AEO01139

SEQ ID NO: 71269 - RNA, 1701 nt, Artificial Sequence; identical to SEQ ID NO: 66693
  derived and/or modified CDS sequence (opt1) from hemagglutinin__InfluenzaA__AEO01140

SEQ ID NO: 71270 - RNA, 1701 nt, Artificial Sequence; identical to SEQ ID NO: 66693
  derived and/or modified CDS sequence (opt1) from hemagglutinin__InfluenzaA__AEO01141

SEQ ID NO: 71271 - RNA, 1701 nt, Artificial Sequence; identical to SEQ ID NO: 66693
  derived and/or modified CDS sequence (opt1) from hemagglutinin__InfluenzaA__AEO01142

SEQ ID NO: 71272 - RNA, 1701 nt, Artificial Sequence
  derived and/or modified CDS sequence (opt1) from hemagglutinin__InfluenzaA__AEO01144
augaaggccauccuggugguccuccuguacaccuucgccaccgcgaacgccgacacgcugugcaucggcuaccacgccaacaacagcaccgacaccguggacaccgugcucgagaagaacgucacggugacccacuccgugaaccugcuggaggacaagcacaacgggaagcucugcaagcugcgcggcgucgcgccccugcaccucgggaagugcaacaucgccggcuggauccuggggaacccggagugcgagagccuguccaccgccagcuccuggagcuacaucguggagaccuccaucagcgacaacggcacgugcuaccccggcgacuucaucgacuacgaggagcuccgggagcagcuguccagcguguccagcuucgagcgcuucgagaucuuccccaagaccuccagcuggcccaaccacgacuccaacaagggggucaccgccgccugcccgcacgccggcgcgaagggguucuacaagaaccugaucuggcucgugaagaagggcaacagcuaccccaagcuguccaagagcuacaucaacgacaaggggaaggaggugcugguccucuggggcauccaccaccccuccaccagcgccgaccagcagagccuguaccagaacgccgacgccuacguguucgugggcacgucccgguacagcaagaaguucaagcccgagaucgccauccgcccgaagguccgggaccaggaggggcgcaugaacuacuacuggacccugguggagcccggcgacaagaucaccuucgaggcgaccgggaaccucguggucccccgguacgccuucgccauggagcgcaacgccggcuccggcaucaucaucagcgacacgcccgugcacgacugcaacacgaccugccagaccccgaagggggccaucaacaccucccugcccuuccagaacauccaccccaucaccaucggcaagugccccaaguacgucaagagcaccaagcugcggcucgcgaccgggcugcgcaacgugccguccauccagagccggggccuguucggggccaucgccggcuucaucgagggcggguggacgggcaugguggacgggugguacggcuaccaccaccagaacgagcagggguccggcuacgccgccgaccucaagagcacccagaacgcgaucgacgagaucaccaacaaggugaacuccgucaucgagaagaugaacacccaguucacggccgugggcaaggaguucaaccaccuggagaagcgcaucgagaaccugaacaagaaggucgacgacggguuccucgacaucuggaccuacaacgccgagcugcuggugcuccuggagaacgagcggacccuggacuaccacgacagcaacgugaagaaccucuacgagaagguccgcucccagcugaagaacaacgccaaggagaucggcaacgggugcuucgaguucuaccacaagugcgacaacacgugcauggagagcgugaagaacggcaccuacgacuaccccaaguacuccgaggaggccaagcugaaccgggaggagaucgacggggugaagcucgagagcacccgcaucuaccagauccuggcgaucuacuccaccgucgccagcucccuggugcucguggucagccugggcgccaucagcuucuggaugugcuccaacggcagccugcagugccggaucugcaucuga

SEQ ID NO: 71273 - RNA, 1701 nt, Artificial Sequence; identical to SEQ ID NO: 66873
  derived and/or modified CDS sequence (opt1) from hemagglutinin__InfluenzaA__AEO01145

SEQ ID NO: 71274 - RNA, 1701 nt, Artificial Sequence
  derived and/or modified CDS sequence (opt1) from hemagglutinin__InfluenzaA__AEO01146
augaaggccauccuggugguccuccuguacaccuucgccaccgcgaacgccgacacgcugugcaucggcuaccacgccaacaacagcaccgacaccguggacaccgugcucgagaagaacgucacggugacccacuccgugaaccugcuggaggacaagcacaacgggaagcucugcaagcugcgcggcgucgcgccccugcaccucgggaagugcaacaucgccggcuggauccuggggaacccggagugcgagagccuguccaccgccagcuccuggagcuacaucguggagaccuccagcuccgacaacggcacgugcuaccccggcgacuucaucgacuacgaggagcuccgggagcagcugagcuccgugagcuccuucgagcgcuucgagaucuuccccaagaccagcuccuggcccaaccacgacagcaacaagggggucaccgccgccugcccgcacgccggcgcgaaguccuucuacaagaaccugaucuggcucgugaagaaggggaacagcuaccccaagcuguccaagagcuacaucaacgacaagggcaaggaggugcugguccucugggggauccaccaccccagcaccuccgccgaccagcagagccuguaccagaacgccgacgccuacguguucgugggcacgucccgguacagcaagaaguucaaccccgagaucgccauccgcccgaagguccgggaccaggagggccgcaugaacuacuacuggacccugguggagcccggggacaagaucaccuucgaggcgaccggcaaccucguggucccccgguacgccuucgccauggagcgcaacgccggguccggcaucaucaucagcgacacgcccgugcacgacugcaacacgaccugccagaccccgaagggcgccaucaacaccucccugcccuuccagaacauccaccccaucaccaucgggaagugccccaaguacgucaagagcaccaagcugcggcucgcgaccggccugcgcaacgugccguccauccagagccgggggcuguucggcgccaucgccggguucaucgagggcggcuggacggggaugguggacggcugguacggguaccaccaccagaacgagcagggcuccggguacgccgccgaccucaagagcacccagaacgcgaucgacgagaucaccaacaaggugaacuccgucaucgagaagaugaacacccaguucacggccgugggcaaggaguucaaccaccuggagaagcgcaucgagaaccugaacaagaaggucgacgacggcuuccucgacaucuggaccuacaacgccgagcugcuggugcuccuggagaacgagcggacccuggacuaccacgacagcaacgugaagaaccucuacgagaagguccgcucccagcugaagaacaacgccaaggagaucgggaacggcugcuucgaguucuaccacaagugcgacaacacgugcauggagagcgugaagaacgggaccuacgacuaccccaaguacuccgaggaggccaagcugaaccgggaggagaucgacggcgugaagcucgagagcacccgcaucuaccagauccuggcgaucuacuccaccgucgccagcagccuggugcucguggucucccugggggccaucagcuucuggaugugcuccaacggcagccugcagugccggaucugcaucuga

SEQ ID NO: 71275 - RNA, 1701 nt, Artificial Sequence; identical to SEQ ID NO: 66693
  derived and/or modified CDS sequence (opt1) from hemagglutinin__InfluenzaA__AEO01147

SEQ ID NO: 71276 - RNA, 1701 nt, Artificial Sequence; identical to SEQ ID NO: 67046
  derived and/or modified CDS sequence (opt1) from hemagglutinin__InfluenzaA__AEO01148

SEQ ID NO: 71277 - RNA, 1701 nt, Artificial Sequence; identical to SEQ ID NO: 67046
  derived and/or modified CDS sequence (opt1) from hemagglutinin__InfluenzaA__AEO01149

SEQ ID NO: 71278 - RNA, 1701 nt, Artificial Sequence; identical to SEQ ID NO: 69900
  derived and/or modified CDS sequence (opt1) from hemagglutinin__InfluenzaA__AEO01150

SEQ ID NO: 71279 - RNA, 1701 nt, Artificial Sequence; identical to SEQ ID NO: 66693
  derived and/or modified CDS sequence (opt1) from hemagglutinin__InfluenzaA__AEO01151

SEQ ID NO: 71280 - RNA, 1701 nt, Artificial Sequence
  derived and/or modified CDS sequence (opt1) from hemagglutinin__InfluenzaA__AEO01152
augaaggccauccugaucgugcuccuguacaccuucgccaccgcgaacgccgacacgcugugcaucggcuaccacgccaacaacagcaccgacaccgucgacaccgugcucgagaagaacgugacggucacccacuccgugaaccugcuggaggacaagcacaacgggaagcucugcaagcugcgcggcguggcgccccugcaccucgggaagugcaacaucgccggcuggauccuggggaacccggagugcgagagccuguccaccgccagcuccuggagcuacaucgucgagaccuccagcuccgacaacggcacgugcuaccccggcgacuucaucgacuacgaggagcuccgggagcagcugagcuccgugagcuccuucgagcgcuucgagaucuuccccaagaccagcuccuggcccaaccacgacagcaacaagggggugaccgccgccugcccgcacgccggcgcgaaguccuucuacaagaaccugaucuggcucgucaagaaggggaacagcuaccccaagcuguccaagagcuacaucaacgacaagggcaaggaggugcuggugcucugggggauccaccaccccagcaccuccgccgaccagcagagccuguaccagaacgccgacgccuacgucuucgugggcacgucccgguacagcaagaaguucaagcccgagaucgccauccgcccgaaggugcggggccaggaggggcgcaugaacuacuacuggacccuggucgagcccggcgacaagaucaccuucgaggcgaccgggaaccucguggugccccgguacgccuucgccauggagcgcaacgccggcuccggcaucaucaucagcgacacgcccguccacgacugcaacacgaccugccagaccccgaagggggccaucaacaccucccugcccuuccagaacauccaccccaucaccaucggcaagugccccaaguacgucaagagcaccaagcugcggcucgcgaccgggcugcgcaacgugccguccauccagagccggggccuguucggggccaucgccggcuucaucgagggcggguggacgggcaugguggacgggugguacggcuaccaccaccagaacgagcagggguccggcuacgccgccgaccucaagagcacccagaacgcgaucgacgagaucaccaacaaggugaacuccgugaucgagaagaugaacacccaguucacggccgucggcaaggaguucaaccaccuggagaagcgcaucgagaaccugaacaagaagguggacgacggguuccucgacaucuggaccuacaacgccgagcugcugguccuccuggagaacgagcggacccuggacuaccacgacagcaacgugaagaaccucuacgagaaggugcgcucccagcugaagaacaacgccaaggagaucggcaacgggugcuucgaguucuaccacaagugcgacaacacgugcauggagagcgucaagaacggcaccuacgacuaccccaaguacuccgaggaggccaagcugaaccgggaggagaucgacggggugaagcucgagagcacccgcaucuaccagauccuggcgaucuacuccaccguggccagcagccugguccucguggugucccugggcgccaucagcuucuggaugugcuccaacggcagccugcagugccggaucugcaucuga

SEQ ID NO: 71281 - RNA, 1701 nt, Artificial Sequence
  derived and/or modified CDS sequence (opt1) from hemagglutinin__InfluenzaA__AEO01153
augaaggccauccuggugguccuccuguacaccuucgccaccgcgaacgccgacacgcugugcaucggcuaccacgccaacaacagcaccgacaccguggacaccgugcucgagaagaacgucacggugacccacuccgugaaccugcuggaggacaagcacaacgggaagcucugcaagcugcgcggcgucgcgccccugcaccucgggaagugcaacaucgccggcuggauccuggggaacccggagugcgagagccuguccaccgccagcuccuggagcuacaucguggagaccuccagcuccgacaacggcacgugcuaccccggcgacuucaucgacuacgaggagcuccgggagcagcugagcuccgugagcuccuucgagcgcuucgagaucuuccccaagaccagcuccuggcccaaccacgacagcaacaagggggucaccgccgccugcccgcacgccggcgcgaaguccuucuacaagaaccugaucuggcucgugaagaaggggaacagcuaccccaagcuguccaagagcuacaucaacaacaagggcaaggaggugcugguccucugggggauccaccaccccagcaccuccgccgaccagcagagccuguaccagaacgccgacgccuacguguucgugggcacgucccgguacagcaagaaguucaagcccgagaucgccauccgcccgaagguccgggaccaggagggccgcaugaacuacuacuggacccugguggagcccggggacaagaucaccuucgaggcgaccggcaaccucguggucccccgguacgccuucgccauggagcgcaacgccggguccggcaucaucaucagcaacacgcccgugcacgacugcaacacgaccugccagaccccgaagggcgccaucaacaccucccugcccuuccagaacauccaccccaucaccaucgggaagugccccaaguacgucaagagcaccaagcugcggcucgcgaccggccugcgcaacgugccguccauccagagccgggggcuguucggcgccaucgccggguucaucgagggcggcuggacggggaugguggacggcugguacggguaccaccaccagaacgagcagggcuccggguacgccgccgaccucaagagcacccagaacgcgaucgacgagaucaccaacaaggugaacuccgucaucgagaagaugaacacccaguucacggccgugggcaaggaguucaaccaccuggagaagcgcaucgagaaccugaacaagaaggucgacgacggcuuccucgacaucuggaccuacaacgccgagcugcuggugcuccuggagaacgagcggacccuggacuaccacgacagcaacgugaagaaccucuacgagaagguccgcucccagcugaagaacaacgccaaggagaucgggaacggcugcuucgaguucuaccacaagugcgacaacacgugcauggagagcgugaagaacgggaccuacgacuaccccaaguacuccgaggaggccaagcugaaccgggaggagaucgacggcgugaagcucgagagcacccgcaucuaccagauccuggcgaucuacuccaccgucgccagcagccuggugcucguggucucccugggggccaucagcuucuggaugugcuccaacggcagccugcagugccggaucugcaucuga

SEQ ID NO: 71282 - RNA, 1701 nt, Artificial Sequence; identical to SEQ ID NO: 66693
  derived and/or modified CDS sequence (opt1) from hemagglutinin__InfluenzaA__AEO01154

SEQ ID NO: 71283 - RNA, 1701 nt, Artificial Sequence; identical to SEQ ID NO: 67046
  derived and/or modified CDS sequence (opt1) from hemagglutinin__InfluenzaA__AEO01155

SEQ ID NO: 71284 - RNA, 1701 nt, Artificial Sequence; identical to SEQ ID NO: 67046
  derived and/or modified CDS sequence (opt1) from hemagglutinin__InfluenzaA__AEO01156

SEQ ID NO: 71285 - RNA, 1701 nt, Artificial Sequence; identical to SEQ ID NO: 66693
  derived and/or modified CDS sequence (opt1) from hemagglutinin__InfluenzaA__AEO01157

SEQ ID NO: 71286 - RNA, 1701 nt, Artificial Sequence; identical to SEQ ID NO: 66693
  derived and/or modified CDS sequence (opt1) from hemagglutinin__InfluenzaA__AEO01158

SEQ ID NO: 71287 - RNA, 1701 nt, Artificial Sequence; identical to SEQ ID NO: 66693
  derived and/or modified CDS sequence (opt1) from hemagglutinin__InfluenzaA__AEO01159

SEQ ID NO: 71288 - RNA, 1701 nt, Artificial Sequence
  derived and/or modified CDS sequence (opt1) from hemagglutinin__InfluenzaA__AEO01160
augaaggccauccugguggcccuccuguacaccuucgcgaccgccaacgccgacacgcugugcaucggcuaccacgccaacaacagcaccgacaccgucgacaccgugcucgagaagaacgugacggucacccacuccgugaaccugcuggaggacaagcacaacgggaagcucugcaagcugcgcggcguggcgccccugcaccucgggaagugcaacaucgccggcuggauccuggggaacccggagugcgagagccuguccaccgccagcuccuggagcuacaucgucgagaccuccagcuccgacaacggcacgugcuaccccggcgacuucaucgacuacgaggagcuccgggagcagcugagcuccgugagcuccuucgagcgcuucgagaucuuccccaagaccagcuccuggcccaaccacgacagcaacaagggggugaccgccgccugcccgcacgcgggcgccaaguccuucuacaagaaccugaucuggcucgucaagaaggggaacagcuaccccaagcuguccaagagcuacaucaacgacaagggcaaggaggugcuggugcucugggggauccaccaccccagcaccuccgccgaccagcagagccuguaccagaacgccgacgccuacgucuucgugggcacgucccgguacagcaagaaguucaagcccgagaucgcgauccgcccgaaggugcgggagcaggagggccgcaugaacuacuacuggacccuggucgagcccggggacaagaucaccuucgaggccaccggcaaccucguggugccccgguacgccuucgccauggagcgcaacgccggguccggcaucaucaucagcgacacgcccguccacgacugcaacacgaccugccagaccccgaagggcgcgaucaacaccucccugcccuuccagaacauccaccccaucaccaucgggaagugccccaaguacgucaagagcaccaagcugcggcucgccaccggccugcgcaacgugccguccauccagagccgggggcuguucggcgccaucgccggguucaucgagggcggcuggacggggaugguggacggcugguacggguaccaccaccagaacgagcagggcuccggguacgccgcggaccucaagagcacccagaacgccaucgacgagaucaccaacaaggugaacuccgugaucgagaagaugaacacccaguucacggccgucggcaaggaguucaaccaccuggagaagcgcaucgagaaccugaacaagaagguggacgacggcuuccucgacaucuggaccuacaacgccgagcugcugguccuccuggagaacgagcggacccuggacuaccacgacagcaacgugaagaaccucuacgagaaggugcgcucccagcugaagaacaacgccaaggagaucgggaacggcugcuucgaguucuaccacaagugcgacaacacgugcauggagagcgucaagaacgggaccuacgacuaccccaaguacuccgaggaggcgaagcugaaccgggaggagaucgacggcgugaagcucgagagcacccgcaucuaccagauccuggccaucuacuccaccguggccagcagccugguccucguggugucccugggggccaucagcuucuggaugugcuccaacggcagccugcagugccggaucugcaucuga

SEQ ID NO: 71289 - RNA, 1701 nt, Artificial Sequence; identical to SEQ ID NO: 66693
  derived and/or modified CDS sequence (opt1) from hemagglutinin__InfluenzaA__AEO01161

SEQ ID NO: 71290 - RNA, 1701 nt, Artificial Sequence; identical to SEQ ID NO: 67046
  derived and/or modified CDS sequence (opt1) from hemagglutinin__InfluenzaA__AEO01162

SEQ ID NO: 71291 - RNA, 1701 nt, Artificial Sequence; identical to SEQ ID NO: 67046
  derived and/or modified CDS sequence (opt1) from hemagglutinin__InfluenzaA__AEO01163

SEQ ID NO: 71292 - RNA, 1701 nt, Artificial Sequence; identical to SEQ ID NO: 67046
  derived and/or modified CDS sequence (opt1) from hemagglutinin__InfluenzaA__AEO01164

SEQ ID NO: 71293 - RNA, 1701 nt, Artificial Sequence
  derived and/or modified CDS sequence (opt1) from hemagglutinin__InfluenzaA__AEO01165
augaaggccauccuggugguccuccuguacaccuucgccaccgcgaacgccgacacgcugugcaucggcuaccacgccaacaacagcaccgacaccguggacaccgugcucgagaagaacgucacggugacccacuccgugaaccugcuggaggacaagcacaacgggaagcucugcaagcugcgcggcgucgcgccccugcaccucgggaagugcaacaucgccggcuggauccuggggaacccggagugcgagagccuguccaccgccagcuccuggagcuacaucguggagaccuccagcuccgacaacggcacgugcuaccccggcgacuucaucgacuacgaggagcuccgggagcagcugagcuccgugagcuccuucgagcgcuucgagaucuuccccaagaccagcuccuggcccaaccacgacagcaacaagggggucaccgccgccugcccgcacgccggcgcgaaguccuucuacaagaaccugaucuggcucgugaagaaggggaacagcuaccccaaguucuccaagagcuacaucaacgacaagggcaaggaggugcugguccugugggggauccaccaccccagcaccuccgccgaccagcagagccucuaccagaacgccgacgccuacguguucgugggcacgucccgguacagcaagaaguucaagcccgagaucgccauccgcccgaagguccgggaccaggagggccgcaugaacuacuacuggacccugguggagcccggggacaagaucaccuucgaggcgaccggcaaccugguggucccccgguacgccuucgccauggagcgcaacgccggguccggcaucaucaucagcgacacgcccgugcacgacugcaacacgaccugccagaccccgaagggcgccaucaacaccucccuccccuuccagaacauccaccccaucaccaucgggaagugccccaaguacgucaagagcaccaagcugcggcuggcgaccggccuccgcaacgugccguccauccagagccgggggcuguucggcgccaucgccggguucaucgagggcggcuggacggggaugguggacggcugguacggguaccaccaccagaacgagcagggcuccggguacgccgccgaccucaagagcacccagaacgcgaucgacgagaucaccaacaaggugaacuccgucaucgagaagaugaacacccaguucacggccgugggcaaggaguucaaccaccuggagaagcgcaucgagaaccugaacaagaaggucgacgacggcuuccuggacaucuggaccuacaacgccgagcuccuggugcugcucgagaacgagcggacccuggacuaccacgacagcaacgugaagaaccuguacgagaagguccgcucccagcucaagaacaacgccaaggagaucgggaacggcugcuucgaguucuaccacaagugcgacaacacgugcauggagagcgugaagaacgggaccuacgacuaccccaaguacuccgaggaggccaagcugaaccgggaggagaucgacggcgugaagcuggagagcacccgcaucuaccagauccucgcgaucuacuccaccgucgccagcagccuggugcugguggucucccucggggccaucagcuucuggaugugcuccaacggcagccugcagugccggaucugcaucuga

SEQ ID NO: 71294 - RNA, 1701 nt, Artificial Sequence; identical to SEQ ID NO: 67046
  derived and/or modified CDS sequence (opt1) from hemagglutinin__InfluenzaA__AEO01166

SEQ ID NO: 71295 - RNA, 1701 nt, Artificial Sequence
  derived and/or modified CDS sequence (opt1) from hemagglutinin__InfluenzaA__AEO01167
augaaggccauccuggugguccuccuguacaccuucgccaccgcgaacgccgacacgcugugcaucggcuaccacgccaacaacagcaccgacaccguggacaccgugcucgagaagaacgucacggugacccacuccgugaaccugcuggaggacaagcacaacgggaagcucugcaagcugcgcggcgucgcgccccugcaccucgggaagugcaacaucgccggcuggauccuggggaacccggagugcgagagccuguccaccgccagcuccuggagcuacaucguggagaccuccagcuccgacaacggcacgugcuaccccggcgacuucaucgacuacgaggagcuccgggagcagcugagcuccgugagcuccuucgagcgcuucgagaucuuccccaagaccagcuccuggcccaaccacgacagcaacaagggggucaccgccgccugcccgcacgccggcgcgaaguccuucuacaagaaccugaucuggcucgugaagaaggggaacagcuaccccaagcuguccaagagcuacaucaacgacaagggcaaggaggugcugguccucugggggauccaccaccccagcaccuccgccgaccagcagagccuguaccagaacgccgacgccuacguguucgugggcacgucccgguacagcaagaaguucaagcccgagaucgccauccgcccgaagguccgggagcaggagggccgcaugaacuacuacuggacccugguggagcccggggacaagaucaccuucgaggcgaccggcaaccucguggucccccgguacgccuucgccauggagcgcaacgccggguccggcaucaucaucagcgacacguccgugcacgacugcaacacgaccugccagacccccaagggcgccaucaacaccagccugccguuccagaacauccaccccaucaccaucgggaagugccccaaguacgugaaguccaccaagcugcggcucgcgaccggccugcgcaacguccccagcauccagucccgggggcuguucggcgccaucgccggguucaucgagggcggcuggacggggaugguggacggcugguacggguaccaccaccagaacgagcagggcagcggguacgccgccgaccucaaguccacccagaacgcgaucgacgagaucaccaacaaggugaacagcgucaucgagaagaugaacacccaguucacggccgugggcaaggaguucaaccaccuggagaagcgcaucgagaaccugaacaagaaggucgacgacggcuuccucgacaucuggaccuacaacgccgagcugcuggugcuccuggagaacgagcggacccuggacuaccacgacuccaacgugaagaaccucuacgagaagguccgcagccagcugaagaacaacgccaaggagaucgggaacggcugcuucgaguucuaccacaagugcgacaacacgugcauggaguccgugaagaacgggaccuacgacuacccgaaguacagcgaggaggccaagcugaaccgggaggagaucgacggcgugaagcucgaguccacccgcaucuaccagauccuggcgaucuacagcaccgucgccagcucccuggugcucguggucagccugggggccaucuccuucuggaugugcagcaacggcucccugcagugccggaucugcaucuga

SEQ ID NO: 71296 - RNA, 1701 nt, Artificial Sequence; identical to SEQ ID NO: 66693
  derived and/or modified CDS sequence (opt1) from hemagglutinin__InfluenzaA__AEO01168

SEQ ID NO: 71297 - RNA, 1701 nt, Artificial Sequence; identical to SEQ ID NO: 67046
  derived and/or modified CDS sequence (opt1) from hemagglutinin__InfluenzaA__AEO01169

SEQ ID NO: 71298 - RNA, 1701 nt, Artificial Sequence; identical to SEQ ID NO: 67046
  derived and/or modified CDS sequence (opt1) from hemagglutinin__InfluenzaA__AEO01170

SEQ ID NO: 71299 - RNA, 1701 nt, Artificial Sequence; identical to SEQ ID NO: 67046
  derived and/or modified CDS sequence (opt1) from hemagglutinin__InfluenzaA__AEO01171

SEQ ID NO: 71300 - RNA, 1701 nt, Artificial Sequence; identical to SEQ ID NO: 66693
  derived and/or modified CDS sequence (opt1) from hemagglutinin__InfluenzaA__AEO01172

SEQ ID NO: 71301 - RNA, 1701 nt, Artificial Sequence
  derived and/or modified CDS sequence (opt1) from hemagglutinin__InfluenzaA__AEO01173
augaaggccauccuggugguccuccuguacaccuucgccaccgcgaacgccgacacgcugugcaucggcuaccacgccaacaacagcaccgacaccguggacaccgugcucgagaagaacgucacggugacccacuccgugaaccugcuggaggacaagcacaacgggaagcucugcaagcugcgcggcgucgcgccccugcaccucgggaagugcaacaucgccggcuggauccuggggaacccggagugcgagagccuguccaccgccagcuccuggagcuacaucguggagaccuccagcuccgacaacggcacgugcuaccccggcgacuucaucgacuacgaggagcuccgggagcagcugagcuccgugagcuccuucgagcgcuucgagaucuuccccaagaccagcuccuggcccaaccacgacagcaacaagggggucaccgccgccugcccgcacgccggcgcgaaguccuucuacaagaaccugaucuggcucgugaagaaggggaacagcuaccccaagcuguccaagagcuacaucaacgacaagggcaaggaggugcugguccucugggggauccaccaccccagcaccuccgccgaccagcagagccuguaccagaacgccgacgccuacguguucgugggcacgucccgguacagcaagaaguucaagcccgagaucgccauccgcccgaagguccgggaccaggagggccgcaugaacuacuacuggacccugguggagcccgggggcaagaucaccuucgaggcgaccgggaaccucguggucccccgguacgccuucgccauggagcgcaacgccggcuccggcaucaucaucagcgacacgcccgugcacgacugcaacacgaccugccagaccccgaagggggccaucaacaccucccugcccuuccagaacauccaccccaucaccaucggcaagugccccaaguacgucaagagcaccaagcugcggcucgcgaccgggcugcgcaacgugccguccauccagagccggggccuguucggggccaucgccggcuucaucgagggcggguggacgggcaugguggacgggugguacggcuaccaccaccagaacgagcagggguccggcuacgccgccgaccucaagagcacccagaacgcgaucgacgagaucaccaacaaggugaacuccgucaucgagaagaugaacacccaguucacggccgugggcaaggaguucaaccaccuggagaagcgcaucgagaaccugaacaagaaggucgacgacggguuccucgacaucuggaccuacaacgccgagcugcuggugcuccuggagaacgagcggacccuggacuaccacgacagcaacgugaagaaccucuacgagaagguccgcucccagcugaagaacaacgccaaggagaucggcaacgggugcuucgaguucuaccacaagugcgacaacacgugcauggagagcgugaagaacggcaccuacgacuaccccaaguacuccgaggaggccaagcugaaccgggaggagaucgacggggugaagcucgagagcacccgcaucuaccagauccuggcgaucuacuccaccgucgccagcagccuggugcucguggucucccugggcgccaucagcuucuggaugugcuccaacggcagccugcagugccggaucugcaucuga

SEQ ID NO: 71302 - RNA, 1701 nt, Artificial Sequence
  derived and/or modified CDS sequence (opt1) from hemagglutinin__InfluenzaA__AEO01174
augaaggccauccuggugguccuccuguacaccuucgccaccgcgaacgccgacacgcugugcaucggcuaccacgccaacaacagcaccgacaccguggacaccgugcucgagaagaacgucacggugacccacuccgugaaccugcuggaggacaagcacaacgggaagcucugcaagcugcgcggcgucgcgccccugcaccucgggaagugcaacaucgccggcuggauccuggggaacccggagugcgagagccuguccaccgccagcuccuggagcuacaucguggagaccuccagcuccggcaacggcacgugcuaccccggggacuucaucgacuacgaggagcuccgggagcagcugagcuccgugagcuccuucgagcgcuucgagaucuuccccaagaccagcuccuggcccaaccacgacagcaacaagggcgucaccgccgccugcccgcacgccggggcgaaguccuucuacaagaaccugaucuggcucgugaagaagggcaacagcuaccccaagcuguccaagagcuacaucaacgacaaggggaaggaggugcugguccucuggggcauccaccaccccagcaccuccgccgaccagcagagccuguaccagaacgccgacgccuacguguucgugggcacgucccgguacagcaagaaguucaagcccgagaucgccauccgcccgaagguccgggagcaggaggggcgcaugaacuacuacuggacccugguggagcccggcgacaagaucaccuucgaggcgaccgggaaccucguggucccccgguacgccuucgccauggagcgcaacgccggcuccggcaucaucaucagcgacacgcccgugcacgacugcaacacgaccugccagaccccgaagggggccaucaacaccucccugcccuuccagaacauccaccccaucaccaucggcaagugccccaaguacgucaagagcaccaagcugcggcucgcgaccgggcugcgcaacgugccguccauccagagccggggccuguucggggccaucgccggcuucaucgagggcggguggacgggcaugguggacgggugguacggcuaccaccaccagaacgagcagggguccggcuacgccgccgaccucaagagcacccagaacgcgaucgacgagaucaccaacaaggugaacuccgucaucgagaagaugaacacccaguucacggccgugggcaaggaguucaaccaccuggagaagcgcaucgagaaccugaacaagaaggucgacgacggguuccucgacaucuggaccuacaacgccgagcugcuggugcuccuggagaacgagcggacccuggacuaccacgacagcaacgugaagaaccucuacgagaagguccgcucccagcugaagaacaacgccaaggagaucggcaacgggugcuucgaguucuaccacaagugcgacaacacgugcauggagagcgugaagaacggcaccuacgacuaccccaaguacuccgaggaggccaagcugaaccgggaggagaucgacggggugaagcucgagagcacccgcaucuaccagauccuggcgaucuacuccaccgucgccagcagccuggugcucguggucucccugggcgccaucagcuucuggaugugcuccaacggcagccugcagugccggaucugcaucuga

SEQ ID NO: 71303 - RNA, 1701 nt, Artificial Sequence; identical to SEQ ID NO: 66693
  derived and/or modified CDS sequence (opt1) from hemagglutinin__InfluenzaA__AEO01176

SEQ ID NO: 71304 - RNA, 1701 nt, Artificial Sequence; identical to SEQ ID NO: 66693
  derived and/or modified CDS sequence (opt1) from hemagglutinin__InfluenzaA__AEO01177

SEQ ID NO: 71305 - RNA, 1701 nt, Artificial Sequence; identical to SEQ ID NO: 67046
  derived and/or modified CDS sequence (opt1) from hemagglutinin__InfluenzaA__AEO01179

SEQ ID NO: 71306 - RNA, 1701 nt, Artificial Sequence; identical to SEQ ID NO: 67046
  derived and/or modified CDS sequence (opt1) from hemagglutinin__InfluenzaA__AEO01180

SEQ ID NO: 71307 - RNA, 1701 nt, Artificial Sequence; identical to SEQ ID NO: 67046
  derived and/or modified CDS sequence (opt1) from hemagglutinin__InfluenzaA__AEO01181

SEQ ID NO: 71308 - RNA, 1701 nt, Artificial Sequence; identical to SEQ ID NO: 67046
  derived and/or modified CDS sequence (opt1) from hemagglutinin__InfluenzaA__AEO01182

SEQ ID NO: 71309 - RNA, 1701 nt, Artificial Sequence; identical to SEQ ID NO: 66693
  derived and/or modified CDS sequence (opt1) from hemagglutinin__InfluenzaA__AEO01183

SEQ ID NO: 71310 - RNA, 1701 nt, Artificial Sequence; identical to SEQ ID NO: 67046
  derived and/or modified CDS sequence (opt1) from hemagglutinin__InfluenzaA__AEO01184

SEQ ID NO: 71311 - RNA, 1701 nt, Artificial Sequence; identical to SEQ ID NO: 66693
  derived and/or modified CDS sequence (opt1) from hemagglutinin__InfluenzaA__AEO01185

SEQ ID NO: 71312 - RNA, 1701 nt, Artificial Sequence; identical to SEQ ID NO: 66693
  derived and/or modified CDS sequence (opt1) from hemagglutinin__InfluenzaA__AEO01186

SEQ ID NO: 71313 - RNA, 1701 nt, Artificial Sequence; identical to SEQ ID NO: 66693
  derived and/or modified CDS sequence (opt1) from hemagglutinin__InfluenzaA__AEO01187

SEQ ID NO: 71314 - RNA, 1701 nt, Artificial Sequence; identical to SEQ ID NO: 66693
  derived and/or modified CDS sequence (opt1) from hemagglutinin__InfluenzaA__AEO01188

SEQ ID NO: 71315 - RNA, 1701 nt, Artificial Sequence; identical to SEQ ID NO: 66693
  derived and/or modified CDS sequence (opt1) from hemagglutinin__InfluenzaA__AEO01189

SEQ ID NO: 71316 - RNA, 1701 nt, Artificial Sequence; identical to SEQ ID NO: 66693
  derived and/or modified CDS sequence (opt1) from hemagglutinin__InfluenzaA__AEO01191

SEQ ID NO: 71317 - RNA, 1701 nt, Artificial Sequence; identical to SEQ ID NO: 66693
  derived and/or modified CDS sequence (opt1) from hemagglutinin__InfluenzaA__AEO01192

SEQ ID NO: 71318 - RNA, 1701 nt, Artificial Sequence; identical to SEQ ID NO: 68007
  derived and/or modified CDS sequence (opt1) from hemagglutinin__InfluenzaA__AEO01193

SEQ ID NO: 71319 - RNA, 1701 nt, Artificial Sequence; identical to SEQ ID NO: 67046
  derived and/or modified CDS sequence (opt1) from hemagglutinin__InfluenzaA__AEO01194

SEQ ID NO: 71320 - RNA, 1701 nt, Artificial Sequence; identical to SEQ ID NO: 67046
  derived and/or modified CDS sequence (opt1) from hemagglutinin__InfluenzaA__AEO01195

SEQ ID NO: 71321 - RNA, 1701 nt, Artificial Sequence; identical to SEQ ID NO: 66693
  derived and/or modified CDS sequence (opt1) from hemagglutinin__InfluenzaA__AEO01196

SEQ ID NO: 71322 - RNA, 1701 nt, Artificial Sequence; identical to SEQ ID NO: 66693
  derived and/or modified CDS sequence (opt1) from hemagglutinin__InfluenzaA__AEO01197

SEQ ID NO: 71323 - RNA, 1701 nt, Artificial Sequence; identical to SEQ ID NO: 67046
  derived and/or modified CDS sequence (opt1) from hemagglutinin__InfluenzaA__AEO01198

SEQ ID NO: 71324 - RNA, 1701 nt, Artificial Sequence; identical to SEQ ID NO: 67559
  derived and/or modified CDS sequence (opt1) from hemagglutinin__InfluenzaA__AEO01200

SEQ ID NO: 71325 - RNA, 1701 nt, Artificial Sequence
  derived and/or modified CDS sequence (opt1) from hemagglutinin__InfluenzaA__AEO01201
augaaggccauccuggugguccuccuguacaccuucgccaccgcgaacgccgacacgcugugcaucggcuaccacgccaacaacagcaccgacaccguggacaccgugcucgagaagaacgucacggugacccacuccgugaaccugcuggaggagaagcacaacgggaagcucugcaagcugcgcggcgucgcgccccugcaccucgggaagugcaacaucgccggcuggauccuggggaacccggagugcgagagccuguccaccgccagcuccuggagcuacaucguggagaccuccagcuccgacaacggcacgugcuaccccggcgacuucaucgacuacgaggagcuccgggagcagcugagcuccgugagcuccuucgagcgcuucgagaucuuccccaagaccagcuccuggcccaaccacgacagcaacaagggggucaccgccgccugcccgcacgccggcgcgaaguccuucuacaagaaccugaucuggcucgugaagaaggggaacagcuaccccaagcuguccaagagcuacaucaacgacaagggcaaggaggugcugguccucugggggauccaccaccccagcaccuccgccgaccagcagagccuguaccagaacgccgacgccuacguguucgugggcacgucccgguacagcaagaaguucaagcccgagaucgccauccgcccgaagguccgggagcaggagggccgcaugaacuacuacuggacccugguggagcccggggacaagaucaccuucgaggcgaccggcaaccucguggucccccgguacgccuucgccauggagcgcaacgccggguccggcaucaucaucagcgacacgcccgugcacgacugcaacacgaccugccagaccccgaagggcgccaucaacaccucccugcccuuccagaacauccaccccaucaccaucgggaagugccccaaguacgucaagagcaccaagcugcggcucgcgaccggccugcgcaacgugccguccauccagagccgggggcuguucggcgccaucgccggguucaucgagggcggcuggacggggaugguggacggcugguacggguaccaccaccagaacgagcagggcuccggguacgccgccgaccucaagagcacccagaacgcgaucgacgagaucaccaacaaggugaacuccgucaucgagaagaugaacacccaguucacggccgugggcaaggaguucaaccaccuggagaagcgcaucgagaaccugaacaagaaggucgacgacggcuuccucgacaucuggaccuacaacgccgagcugcuggugcuccuggagaacgagcggacccuggacuaccacgacagcaacgugaagaaccucuacgagaagguccgcucccagcugaagaacaacgccaaggagaucgggaacggcugcuucgaguucuaccacaagugcgacaacacgugcauggagagcgugaagaacgggaccuacgacuaccccaaguacuccgaggaggccaagcugaaccgggaggagaucgacggcgugaagcucgagagcacccgcaucuaccagauccuggcgaucuacuccaccgucgccagcagccuggugcucguggucucccugggggccaucagcuucuggaugugcuccaacggcagccugcagugccggaucugcaucuga

SEQ ID NO: 71326 - RNA, 1701 nt, Artificial Sequence; identical to SEQ ID NO: 66693
  derived and/or modified CDS sequence (opt1) from hemagglutinin__InfluenzaA__AEO01202

SEQ ID NO: 71327 - RNA, 1701 nt, Artificial Sequence; identical to SEQ ID NO: 68329
  derived and/or modified CDS sequence (opt1) from hemagglutinin__InfluenzaA__AEO01203

SEQ ID NO: 71328 - RNA, 1701 nt, Artificial Sequence; identical to SEQ ID NO: 66693
  derived and/or modified CDS sequence (opt1) from hemagglutinin__InfluenzaA__AEO01204

SEQ ID NO: 71329 - RNA, 1701 nt, Artificial Sequence; identical to SEQ ID NO: 66693
  derived and/or modified CDS sequence (opt1) from hemagglutinin__InfluenzaA__AEO01205

SEQ ID NO: 71330 - RNA, 1701 nt, Artificial Sequence; identical to SEQ ID NO: 66693
  derived and/or modified CDS sequence (opt1) from hemagglutinin__InfluenzaA__AEO01206

SEQ ID NO: 71331 - RNA, 1701 nt, Artificial Sequence; identical to SEQ ID NO: 66693
  derived and/or modified CDS sequence (opt1) from hemagglutinin__InfluenzaA__AEO01207

SEQ ID NO: 71332 - RNA, 1701 nt, Artificial Sequence; identical to SEQ ID NO: 66693
  derived and/or modified CDS sequence (opt1) from hemagglutinin__InfluenzaA__AEO01208

SEQ ID NO: 71333 - RNA, 1701 nt, Artificial Sequence; identical to SEQ ID NO: 67046
  derived and/or modified CDS sequence (opt1) from hemagglutinin__InfluenzaA__AEO01209

SEQ ID NO: 71334 - RNA, 1701 nt, Artificial Sequence; identical to SEQ ID NO: 66693
  derived and/or modified CDS sequence (opt1) from hemagglutinin__InfluenzaA__AEO01210

SEQ ID NO: 71335 - RNA, 1701 nt, Artificial Sequence; identical to SEQ ID NO: 67046
  derived and/or modified CDS sequence (opt1) from hemagglutinin__InfluenzaA__AEO01211

SEQ ID NO: 71336 - RNA, 1701 nt, Artificial Sequence; identical to SEQ ID NO: 66693
  derived and/or modified CDS sequence (opt1) from hemagglutinin__InfluenzaA__AEO01212

SEQ ID NO: 71337 - RNA, 1701 nt, Artificial Sequence; identical to SEQ ID NO: 66693
  derived and/or modified CDS sequence (opt1) from hemagglutinin__InfluenzaA__AEO01213

SEQ ID NO: 71338 - RNA, 1701 nt, Artificial Sequence
  derived and/or modified CDS sequence (opt1) from hemagglutinin__InfluenzaA__AEO01214
augaaggccauccuggugguccuccuguacaccuucgccaccgcgaacgccgacacgcugugcaucggcuaccacgccaacaacagcaccgacaccguggacaccgugcucgagaagaacgucacggugacccacuccgugaaccugcuggaggacaagcacaacgggaagcucugcaagcugcgcggcgucgcgccccugcaccucgggaagugcaacaucgccggcuggauccuggggaacccggagugcgagagccuguccaccgccagcuccuggagcuacaucguggagaccuccagcuccgacaacggcacgugcuaccccggcgacuucaucgacuacgaggagcuccgggagcagcugagcuccgugagcuccuucgagcgcuucgagaucuuccccaagaccagcuccuggcccaaccacgacagcaacaagggggucaccgccgccugcccgcacgccggcgcgaaguccuucuacaagaaccugaucuggcucgugaagaaggggaacagcuaccccaagcuguccaagagcuacaucaacgacaagggcaaggaggugcugguccucugggggauccaccaccccagcaccuccgccgaccagcagagccuguaccagaacgccgacgccuacguguucgugggcacgucccgguacagcaagaaguucaagcccgagaucgccauccgcccgaagguccgggaccaggagggccgcaugaacuacuacuggacccugguggagcccggggacaagaucaccuucgaggcgaccggcaaccucguggcgccccgguacgccuucgccauggagcgcaacgccggguccggcaucaucaucagcgacacgcccguccacgacugcaacacgaccugccagaccccgaagggcgccaucaacaccucccugcccuuccagaacauccaccccaucaccaucgggaagugccccaaguacgucaagagcaccaagcugcggcucgccaccggccugcgcaacgugccguccauccagagccgggggcuguucggcgccaucgccggguucaucgagggcggcuggacggggaugguggacggcugguacggguaccaccaccagaacgagcagggcuccggguacgccgcggaccucaagagcacccagaacgccaucgacgagaucaccaacaaggugaacuccgugaucgagaagaugaacacccaguucacggccgucggcaaggaguucaaccaccuggagaagcgcaucgagaaccugaacaagaagguggacgacggcuuccucgacaucuggaccuacaacgccgagcugcugguccuccuggagaacgagcggacccuggacuaccacgacagcaacgugaagaaccucuacgagaaggugcgcucccagcugaagaacaacgccaaggagaucgggaacggcugcuucgaguucuaccacaagugcgacaacacgugcauggagagcgucaagaacgggaccuacgacuaccccaaguacuccgaggaggcgaagcugaaccgggaggagaucgacggcgugaagcucgagagcacccgcaucuaccagauccuggccaucuacuccaccguggccagcagccugguccucguggugucccugggggccaucagcuucuggaugugcuccaacggcagccugcagugccggaucugcaucuga

SEQ ID NO: 71339 - RNA, 1701 nt, Artificial Sequence; identical to SEQ ID NO: 67046
  derived and/or modified CDS sequence (opt1) from hemagglutinin__InfluenzaA__AEO01215

SEQ ID NO: 71340 - RNA, 1701 nt, Artificial Sequence
  derived and/or modified CDS sequence (opt1) from hemagglutinin__InfluenzaA__AEO01216
augaaggccauccuggugguccuccuguacaccuucgccaccgcgaacgccgacacgcugugcaucggcuaccacgccaacaacagcaccgacaccguggacaccgugcucgagaagaacgucacggugacccacuccgugaaccugcuggaggacaagcacaacgggaagcucugcaagcugcgcggcgucgcgccccugcaccucgggaagugcaacaucgccggcuggauccuggggaacccggagugcgagagccuguccaccgccagcuccuggagcuacaucguggagaccuccagcuccgacaacggcacgugcuaccccggcgacuucaucgacuacgaggagcuccgggagcagcugagcuccgugagcuccuucgagcgcuucgagaucuuccccaagaccagcuccuggcccaaccacgacagcaacaagggggucaccgccgccugcccgcacgccggcgcgaaguccuucuacaagaaccugaucuggcucgugaagaaggggaacagcuaccccaagcuguccaagagcuacaucaacgacaagggcaaggaggugcugguccucugggggauccaccaccccagcaccuccgccgaccagcagagccuguaccagaacgccgacgccuacguguucgugggcacgucccgguacagcaagaaguucaagcccgagaucgccauccgcccgaagguccgggagcaggagggccgcaugaacuacuacuggacccugguggagcccggggacaagaucaccuucgaggcgaccggcaaccucguggucccccgguacgccuucgccauggagcgcaacgccggguccggcaucaucaucagcgacacgcccgugcacgacugcaacacgaccugccagaccccgaagggcgccaucaacaccucccugcccuuccagaacauccaccccaucaccaucgggaagugccccaaguacgucaagagcaccaagcugcggcucgcgaccggccugcgcaacgugccguccauccagagccgggggcuguucggcgccaucgccggguucaucgagggcggcuggacggggaugguggacggcugguacggguaccaccaccagaacgagcagggcuccggguacgccgccgaccucaagagcacccagaacgcgaucgacgagaucaccaacaaggugaacuccgucaucgagaagaugaacacccaguucacggccgugggcaaggaguucaaccaccuggagaagcgcgucgagaaccugaacaagaagguggacgacggcuuccucgacaucuggaccuacaacgccgagcugcuggugcuccuggagaacgagcggacccuggacuaccacgacagcaacgucaagaaccucuacgagaaggugcgcucccagcugaagaacaacgccaaggagaucgggaacggcugcuucgaguucuaccacaagugcgacaacacgugcauggagagcgugaagaacgggaccuacgacuaccccaaguacuccgaggaggccaagcugaaccgggaggagaucgacggcgucaagcucgagagcacccgcaucuaccagauccuggcgaucuacuccaccguggccagcagccuggugcucgucgugucccugggggccaucagcuucuggaugugcuccaacggcagccugcagugccggaucugcaucuga

SEQ ID NO: 71341 - RNA, 1701 nt, Artificial Sequence; identical to SEQ ID NO: 67046
  derived and/or modified CDS sequence (opt1) from hemagglutinin__InfluenzaA__AEO01217

SEQ ID NO: 71342 - RNA, 1701 nt, Artificial Sequence; identical to SEQ ID NO: 67046
  derived and/or modified CDS sequence (opt1) from hemagglutinin__InfluenzaA__AEO01218

SEQ ID NO: 71343 - RNA, 1701 nt, Artificial Sequence; identical to SEQ ID NO: 67046
  derived and/or modified CDS sequence (opt1) from hemagglutinin__InfluenzaA__AEO01219

SEQ ID NO: 71344 - RNA, 1701 nt, Artificial Sequence; identical to SEQ ID NO: 66784
  derived and/or modified CDS sequence (opt1) from hemagglutinin__InfluenzaA__AEO01220

SEQ ID NO: 71345 - RNA, 1701 nt, Artificial Sequence; identical to SEQ ID NO: 66693
  derived and/or modified CDS sequence (opt1) from hemagglutinin__InfluenzaA__AEO01221

SEQ ID NO: 71346 - RNA, 1701 nt, Artificial Sequence; identical to SEQ ID NO: 66693
  derived and/or modified CDS sequence (opt1) from hemagglutinin__InfluenzaA__AEO01222

SEQ ID NO: 71347 - RNA, 1701 nt, Artificial Sequence; identical to SEQ ID NO: 67046
  derived and/or modified CDS sequence (opt1) from hemagglutinin__InfluenzaA__AEO01223

SEQ ID NO: 71348 - RNA, 1701 nt, Artificial Sequence
  derived and/or modified CDS sequence (opt1) from hemagglutinin__InfluenzaA__AEO01224
augaaggccauccuggugguccuccuguacaccuucgccaccgcgaacgccgacacgcugugcaucggcuaccacgccaacaacagcaccgacaccguggacaccgugcucgagaagaacgucacggugacccacuccgugaaccugcuggaggacaagcacaacgggaagcucugcaagcugcgcggcgucgcgccccugcaccucgggaagugcaacaucgccggcuggauccuggggaacccggagugcgagagccuguccaccgccagcuccuggagcuacaucguggagaccuccagcuccgacaacggcacgugcuaccccggcgacuucaucgacuacgaggagcuccgggagcagcugagcuccgugagcuccuucgagcgcuucgagaucuuccccaagaccagcuccuggcccaaccacgacagcaacaagggggucaccgccgccugcccgcacgccggcgcgaaguccuucuacaagaaccugaucuggcucgugaagaaggggaacagcuaccccaagcuguccaagagcuacaucaacgacaagggcaaggaggugcugguccucugggggauccaccaccccagcaccuccgccgaccagcagagccuguaccagaacgccgacgccuacguguucgugggcacgucccgguacagcaagaaguucaagcccgagaucgccauccgcccgaagguccgggaccaggagggccgcaugaacuacuacuggacccugguggagcccggggacaagaucaccuucgaggcgaccggcaaccucguggucccccgguacgccuucgccacggagcgcaacgccggguccggcaucaucaucagcgacacccccgugcacgacugcaacacgaccugccagaccccgaagggcgccaucaacaccucccugcccuuccagaacauccaccccaucaccaucgggaagugccccaaguacgucaagagcaccaagcugcggcucgcgacgggccugcgcaacgugccguccauccagagccgggggcuguucggcgccaucgccggguucaucgagggcggcuggaccgggaugguggacggcugguacggguaccaccaccagaacgagcagggcuccggguacgccgccgaccucaagagcacccagaacgcgaucgacgagaucaccaacaaggugaacuccgucaucgagaagaugaacacgcaguucaccgccgugggcaaggaguucaaccaccuggagaagcgcaucgagaaccugaacaagaaggucgacgacggcuuccucgacaucuggaccuacaacgccgagcugcuggugcuccuggagaacgagcggacccuggacuaccacgacagcaacgugaagaaccucuacgagaagguccgcucccagcugaagaacaacgccaaggagaucgggaacggcugcuucgaguucuaccacaagugcgacaacacgugcauggagagcgugaagaacgggaccuacgacuaccccaaguacuccgaggaggccaagcugaaccgggaggagaucgacggcgugaagcucgagagcacccgcaucuaccagauccuggcgaucuacuccaccgucgccagcagccuggugcucguggucucccugggggccaucagcuucuggaugugcuccaacggcagccugcagugccggaucugcaucuga

SEQ ID NO: 71349 - RNA, 1701 nt, Artificial Sequence
  derived and/or modified CDS sequence (opt1) from hemagglutinin__InfluenzaA__AEO01225
augaaggccauccuggugguccuccuguacaccuucgccaccgcgaacgccgacacgcugugcaucggcuaccacgccaacaacagcaccgacaccguggacaccgugcucgagaagaacgucacggugacccacuccgugaaccugcuggaggacaagcacaacgggaagcucugcaagcugcgcggcgucgcgccccugcaccucgggaagugcaacaucgccggcuggauccuggggaacccggagugcgagagccuguccaccgccagcuccuggagcuacaucguggagaccuccagcuccgacaacggcacgugcuaccccggcgacuucaucgacuacgaggagcuccgggagcagcugagcuccgugagcuccuucgagcgcuucgagaucuuccccaagaccagcuccuggcccaaccacgacagcaacaagggggucaccgccgccugcccgcacgccggcgcgaaguccuucuacaagaaccugaucuggcucgugaagaaggggaacagcuaccccaagcuguccaagagcuacaucaacgacaagggcaaggaggugcugguccucugggggauccaccaccccagcaccuccgccgaccagcagagccuguaccagaacgccgacgccuacguguucgugggcacgucccgguacagcaagaaguucaagcccgagaucgccauccgcccgaagguccgggaccaggagggccgcaugaacuacuacuggaccgugguggagcccggggacaagaucaccuucgaggcgaccggcaaccuggucgugccccgguacgccuucgccauggagcgcaacgccggguccggcaucaucaucagcgacacgcccgugcacgacugcaacacgaccugccagaccccgaagggcgccaucaacaccucccuccccuuccagaacauccaccccaucaccaucgggaagugccccaaguacgucaagagcaccaagcugcggcuggcgaccggccuccgcaacgugccguccauccagagccgggggcuguucggcgccaucgccggguucaucgagggcggcuggacggggaugguggacggcugguacggguaccaccaccagaacgagcagggcuccggguacgccgccgaccucaagagcacccagaacgcgaucgacgagaucaccaacaaggucaacuccgugaucgagaagaugaacacccaguucacggccgucggcaaggaguucaaccaccuggagaagcgcaucgagaaccugaacaagaagguggacgacggcuuccuggacaucuggaccuacaacgccgagcuccuggugcugcucgagaacgagcggacccuggacuaccacgacagcaacgucaagaaccuguacgagaaggugcgcucccagcucaagaacaacgccaaggagaucgggaacggcugcuucgaguucuaccacaagugcgacaacacgugcauggagagcgugaagaacgggaccuacgacuaccccaaguacuccgaggaggccaagcugaaccgggaggagaucgacggcgucaagcuggagagcacccgcaucuaccagauccucgcgaucuacuccaccguggccagcagccuggugcuggucgugucccucggggccaucagcuucuggaugugcuccaacggcagccugcagugccggaucugcaucuga

SEQ ID NO: 71350 - RNA, 1701 nt, Artificial Sequence
  derived and/or modified CDS sequence (opt1) from hemagglutinin__InfluenzaA__AEO01226
augaaggccauccuggugguccuccuguacaccuucgccaccgcgaacgccgacacgcugugcaucggcuaccacgccaacaacagcaccgacaccguggacaccgugcucgagaagaacgucacggugacccacuccgugaaccugcuggaggacaagcacaacgggaagcucugcaagcugcgcggcgucgcgccccugcaccucgggaagugcaacaucgccggcuggauccuggggaacccggagugcgagagccuguccaccgccagcuccuggagcuacaucguggagaccuccagcuccgacaacggcacgugcuaccccggcgacuucaucgacuacgaggagcuccgggagcagcugagcuccgugagcuccuucgagcgcuucgagaucuuccccaagaccagcuccuggcccaaccacgacagcaacaagggggucaccgccgccugcccgcacgccggcgcgaaguccuucuacaagaaccugaucuggcucgugaagaaggggaacagcuaccccaagcuguccaagagcuacaucaacgacaagggcaaggaggugcugguccucugggggauccaccaccccagcaccuccgccgaccagcagagccuguaccagaacgccgacgccuacguguucgugggcacgucccgguacagcaagaaguucaagcccgagaucgccauccgcccgaagguccgggaccaggagggccgcaugaacuacuacuggacccugguggagcccggggacaagaucaccuucgaggcgaccggcaaccucguggucccccgguacgccuucgccauggagcgcaacgacggguccggcaucaucaucagcgacacgcccgugcacgacugcaacacgaccugccagaccccgaagggcgccaucaacaccucccugcccuuccagaacauccaccccaucaccaucgggaagugccccaaguacgucaagagcaccaagcugcggcucgccaccggccugcgcaacgugccguccauccagagccgggggcuguucggcgcgaucgccggguucaucgagggcggcuggacggggaugguggacggcugguacggguaccaccaccagaacgagcagggcuccggguacgccgccgaccucaagagcacccagaacgccaucgacgagaucaccaacaaggugaacuccgucaucgagaagaugaacacccaguucacggcggugggcaaggaguucaaccaccuggagaagcgcaucgagaaccugaacaagaaggucgacgacggcuuccucgacaucuggaccuacaacgccgagcugcuggugcuccuggagaacgagcggacccuggacuaccacgacagcaacgugaagaaccucuacgagaagguccgcucccagcugaagaacaacgccaaggagaucgggaacggcugcuucgaguucuaccacaagugcgacaacacgugcauggagagcgugaagaacgggaccuacgacuaccccaaguacuccgaggaggccaagcugaaccgggaggagaucgacggcgugaagcucgagagcacccgcaucuaccagauccuggccaucuacuccaccgucgcgagcagccuggugcucguggucucccugggggccaucagcuucuggaugugcuccaacggcagccugcagugccggaucugcaucuga

SEQ ID NO: 71351 - RNA, 1701 nt, Artificial Sequence; identical to SEQ ID NO: 68860
  derived and/or modified CDS sequence (opt1) from hemagglutinin__InfluenzaA__AEO01227

SEQ ID NO: 71352 - RNA, 1701 nt, Artificial Sequence; identical to SEQ ID NO: 66693
  derived and/or modified CDS sequence (opt1) from hemagglutinin__InfluenzaA__AEO01228

SEQ ID NO: 71353 - RNA, 1701 nt, Artificial Sequence; identical to SEQ ID NO: 66693
  derived and/or modified CDS sequence (opt1) from hemagglutinin__InfluenzaA__AEO01229

SEQ ID NO: 71354 - RNA, 1701 nt, Artificial Sequence
  derived and/or modified CDS sequence (opt1) from hemagglutinin__InfluenzaA__AEO01230
augaaggccauccuggugguccuccuguacaccuucgccaccgcgaacgccgacacgcugugcaucggcuaccacgccaacaacagcaccgacaccguggacaccgugcucgagcgcaacgucacggugacccacuccgugaaccugcuggaggacaagcacaacgggaagcucugcaagcugcggggcgucgcgccccugcaccucgggaagugcaacaucgccggcuggauccuggggaacccggagugcgagagccuguccaccgccagcuccuggagcuacaucguggagaccuccagcuccgacaacggcacgugcuaccccggcgacuucaucgacuacgaggagcuccgcgagcagcugagcuccgugagcuccuucgagcgguucgagaucuuccccaagaccagcuccuggcccaaccacgacagcaacaagggggucaccgccgccugcccgcacgccggcgcgaaguccuucuacaagaaccugaucuggcucgugaagaaggggaacagcuaccccaagcuguccaagagcuacaucaacgacaagggcaaggaggugcugguccucugggggauccaccaccccagcaccuccgccgaccagcagagccuguaccagaacgccgacgccuacguguucgugggcacgucccgcuacagcaagaaguucaagcccgagaucgccauccggccgaagguccgcgaccaggagggccggaugaacuacuacuggacccugguggagcccggggacaagaucaccuucgaggcgaccggcaaccucguggucccccgcuacgccuucgccauggagcggaacgccggguccggcaucaucaucagcgacacgcccgugcacgacugcaacacgaccugccagaccccgaagggcgccaucaacaccucccugcccuuccagaacauccaccccaucaccaucgggaagugccccaaguacgucaagagcaccaagcugcgccucgcgaccggccugcggaacgugccguccauccagagccgcgggcuguucggcgccaucgccggguucaucgagggcggcuggacggggaugguggacggcugguacggguaccaccaccagaacgagcagggcuccggguacgccgccgaccucaagagcacccagaacgcgaucgacgagaucaccaacaaggugaacuccgucaucgagaagaugaacacccaguucacggccgugggcaaggaguucaaccaccuggagaagcggaucgagaaccugaacaagaaggucgacgacggcuuccucgacaucuggaccuacaacgccgagcugcuggugcuccuggagaacgagcgcacccuggacuaccacgacagcaacgugaagaaccucuacgagaagguccggucccagcugaagaacaacgccaaggagaucgggaacggcugcuucgaguucuaccacaagugcgacaacacgugcauggagagcgugaagaacgggaccuacgacuaccccaaguacuccaaggaggccaagcugaaccgcgaggagaucgacggcgugaagcucgagagcacccggaucuaccagauccuggcgaucuacuccaccgucgccagcagccuggugcucguggucucccugggggccaucagcuucuggaugugcuccaacggcagccugcagugccgcaucugcaucuga

SEQ ID NO: 71355 - RNA, 1701 nt, Artificial Sequence; identical to SEQ ID NO: 66693
  derived and/or modified CDS sequence (opt1) from hemagglutinin__InfluenzaA__AEO01231

SEQ ID NO: 71356 - RNA, 1701 nt, Artificial Sequence; identical to SEQ ID NO: 67046
  derived and/or modified CDS sequence (opt1) from hemagglutinin__InfluenzaA__AEO01232

SEQ ID NO: 71357 - RNA, 1701 nt, Artificial Sequence; identical to SEQ ID NO: 66693
  derived and/or modified CDS sequence (opt1) from hemagglutinin__InfluenzaA__AEO01233

SEQ ID NO: 71358 - RNA, 1701 nt, Artificial Sequence; identical to SEQ ID NO: 66693
  derived and/or modified CDS sequence (opt1) from hemagglutinin__InfluenzaA__AEO01234

SEQ ID NO: 71359 - RNA, 1701 nt, Artificial Sequence; identical to SEQ ID NO: 66693
  derived and/or modified CDS sequence (opt1) from hemagglutinin__InfluenzaA__AEO01235

SEQ ID NO: 71360 - RNA, 1701 nt, Artificial Sequence; identical to SEQ ID NO: 70565
  derived and/or modified CDS sequence (opt1) from hemagglutinin__InfluenzaA__AEO01236

SEQ ID NO: 71361 - RNA, 1701 nt, Artificial Sequence; identical to SEQ ID NO: 66693
  derived and/or modified CDS sequence (opt1) from hemagglutinin__InfluenzaA__AEO01237

SEQ ID NO: 71362 - RNA, 1701 nt, Artificial Sequence; identical to SEQ ID NO: 66693
  derived and/or modified CDS sequence (opt1) from hemagglutinin__InfluenzaA__AEO01238

SEQ ID NO: 71363 - RNA, 1701 nt, Artificial Sequence; identical to SEQ ID NO: 66693
  derived and/or modified CDS sequence (opt1) from hemagglutinin__InfluenzaA__AEO01240

SEQ ID NO: 71364 - RNA, 1701 nt, Artificial Sequence; identical to SEQ ID NO: 67046
  derived and/or modified CDS sequence (opt1) from hemagglutinin__InfluenzaA__AEO01241

SEQ ID NO: 71365 - RNA, 1701 nt, Artificial Sequence; identical to SEQ ID NO: 66693
  derived and/or modified CDS sequence (opt1) from hemagglutinin__InfluenzaA__AEO01242

SEQ ID NO: 71366 - RNA, 1701 nt, Artificial Sequence
  derived and/or modified CDS sequence (opt1) from hemagglutinin__InfluenzaA__AEO01244
augaaggccauccuggugguccuccuguacaccuucgccaccgcgaacgccgacacgcugugcaucggcuaccacgccaacaacagcaccgacaccguggacaccgugcucgagaagaacgucacggugacccacuccgugaaccugcuggaggacaagcacaacgggaagcucugcaagcugcgcggcgucgcgccccugcaccucgggaagugcaacaucgccggcuggauccuggggaacccggagugcgagagccuguccaccgccagcuccuggagcuacaucguggagaccuccagcuccgacaacggcacgugcuaccccggcgacuucaucgacuacgaggagcuccgggagcagcugagcuccgugagcuccuucgagcgcuucgagaucuuccccaagaccagcuccuggcccaaccacgacagcaacaagggggucaccgccgccugcccgcacgccggcgcgaaguccuucuacaagaaccugaucuggcucgugaagaaggggaacagcuaccccaagcuguccaagagcuacaucaacgacaagggcaaggaggugcugguccucugggggauccaccaccccagcaccuccgccgaccagcagagccuguaccagaacgccgacgccuacguguucgugggcacguccaaguacagcaagaaguucaagcccgagaucgccauccggccgaagguccgcggccaggaggggcggaugaacuacuacuggacccugguggagcccggcgacaagaucaccuucgaggcgaccgggaaccucguggucccccgcuacgccuucgccauggagcggaacgccggcuccggcaucaucaucagcgacacgcccgugcacgacugcaacacgaccugccagaccccgaagggggccaucaacaccucccugcccuuccagaacauccaccccaucaccaucggcaagugccccaaguacgucaagagcaccaagcugcgccucgcgaccgggcugcggaacgugccguccauccagagccgcggccuguucggggccaucgccggcuucaucgagggcggguggacgggcaugguggacgggugguacggcuaccaccaccagaacgagcagggguccggcuacgccgccgaccucaagagcacccagaacgcgaucgacgagaucaccaacaaggugaacuccgucaucgagaagaugaacacccaguucacggccgugggcaaggaguucaaccaccuggagaagcggaucgagaaccugaacaagaaggucgacgacggguuccucgacaucuggaccuacaacgccgagcugcuggugcuccuggagaacgagcgcacccuggacuaccacgacagcaacgugaagaaccucuacgagaagguccggucccagcugaagaacaacgccaaggagaucggcaacgggugcuucgaguucuaccacaagugcgacaacacgugcauggagagcgugaagaacggcaccuacgacuaccccaaguacuccgaggaggccaagcugaaccgcgaggagaucgacggggugaagcucgagagcacccggaucuaccagauccuggcgaucuacuccaccgucgccagcagccuggugcucguggucucccugggcgccaucagcuucuggaugugcuccaacggcagccugcagugccgcaucugcaucuga

SEQ ID NO: 71367 - RNA, 1701 nt, Artificial Sequence; identical to SEQ ID NO: 66693
  derived and/or modified CDS sequence (opt1) from hemagglutinin__InfluenzaA__AEO01245

SEQ ID NO: 71368 - RNA, 1701 nt, Artificial Sequence
  derived and/or modified CDS sequence (opt1) from hemagglutinin__InfluenzaA__AEO01247
augaaggccauccuggugguccuccuguacaccuucgccaccgcgaacgccgacacgcugugcaucggcuaccacgccaacaacagcaccgacaccguggacaccgugcucgagaagaacgucacggugacccacuccgugaaccugcuggaggacaagcacaacgggaagcucugcaagcugcgcggcgucgcgccccugcaccucgggaagugcaacaucgccggcuggauccuggggaacccggagugcgagagccuguccaccgccagcuccuggagcuacaucguggagaccuccagcuccgacaacggcacgugcuaccccggcgacuucaucgacuacgaggagcuccgggagcagcugagcuccgugagcuccuucgagcgcuucgagaucuuccccaagaccagcuccuggcccaaccacgacagcaacaagggggucaccgccgccugcccgcacgccggcgcgaaguccuucuacaagaaccugaucuggcucgugaagaaggggaacagcuaccccaagcuguccaagagcuacaucaacgacaagggcaaggaggugcugguccucugggggauccaccaccccagcaccuccgccgaccagcagagccuguaccagaacgccgacgccuacguguucgugggcacgucccgguacagcaagaaguucaagcccgagaucgccauccgcccgaagguccgggaccaggagggccgcaugaacuacuacuggacccugguggagcccggggacaagaucaccuucgaggcgaccggcaaccucguggucccccgguacgccuucgccauggagcgcaacgccggguccggcauccugaucagcgacacgcccgugcacgacugcaacacgaccugccagaccccgaagggcgccaucaacaccucccugcccuuccagaacauccaccccaucaccaucgggaagugccccaaguacgucaagagcaccaagcuccggcuggcgaccggccugcgcaacgugccguccauccagagccgggggcuguucggcgccaucgccggguucaucgagggcggcuggacggggaugguggacggcugguacggguaccaccaccagaacgagcagggcuccggguacgccgccgaccucaagagcacccagcacgcgaucgacgagaucaccaacaaggugaacuccgucaucgagaagaugaacacccaguucacggccgugggcaaggaguucaaccaccuggagaagcgcaucgagaaccucaacaagaaggucgacgacggcuuccuggacaucuggaccuacaacgccgagcugcucgugcugcuggagaacgagcggacccucgacuaccacgacagcaacgugaagaaccuguacgagaagguccgcucccagcugaagaacaacgccaaggagaucgggaacggcugcuucgaguucuaccacaagugcgacaacacgugcauggagagcgugaagaacgggaccuacgacuaccccaaguacuccgaggaggccaagcucaaccgggaggagaucgacggcgugaagcuggagagcacccgcaucuaccagauccuggcgaucuacuccaccgucgccagcagccucgugcugguggucucccugggggccaucagcuucuggaugugcuccaacggcagccuccagugccggaucugcaucuga

SEQ ID NO: 71369 - RNA, 1701 nt, Artificial Sequence; identical to SEQ ID NO: 66693
  derived and/or modified CDS sequence (opt1) from hemagglutinin__InfluenzaA__AEO01248

SEQ ID NO: 71370 - RNA, 1701 nt, Artificial Sequence; identical to SEQ ID NO: 66693
  derived and/or modified CDS sequence (opt1) from hemagglutinin__InfluenzaA__AEO01249

SEQ ID NO: 71371 - RNA, 1701 nt, Artificial Sequence
  derived and/or modified CDS sequence (opt1) from hemagglutinin__InfluenzaA__AEO01250
augaaggccauccuggugguccuccuguacaccuucgccaccgcgaacgccgacacgcugugcaucggcuaccacgccaacaacagcaccgacaccguggacaccgugcucgagaagaacgucacggugacccacuccgugaaccugcuggaggacaagcacaacgggaagcucugcaagcugcgcggcgucgcgccccugcaccucgggaagugcaacaucgccggcuggauccuggggaacccggagugcgagagccuguccaccgccagcuccuggagcuacaucguggagaccuccagcuccgacaacggcacgugcuaccccggcgacuucaucgacuacgaggagcuccgggagcagcugagcuccgugagcuccuucgagcgcuucgagaucuuccccaagaccagcuccuggcccaaccacgacagcaacaagggggucaccgccgccugcccgcacgccggcgcgaaguccuucuacaagaaccugaucuggcucgugaagaaggggaacagcuaccccaagcuguccaagagcuacaucaacgacaagggcaaggaggugcugguccucugggggauccaccaccccagcaccuccgccgaccagcagagccuguaccagaacgaggacgccuacguguucgugggcacgucccgguacagcaagaaguucaagcccgagaucgccauccgcccgaagguccgggaccaggagggccgcaugaacuacuacuggacccugguggagcccggggacaagaucaccuucgaggccaccggcaaccucguggucccccgguacgcguucgccauggagcgcaacgccggguccggcaucaucaucagcgacacgcccgugcacgacugcaacacgaccugccagaccccgaagggcgccaucaacaccucccugcccuuccagaacauccaccccaucaccaucgggaagugccccaaguacgucaagagcaccaagcugcggcucgccaccggccugcgcaacgugccguccauccagagccgggggcuguucggcgcgaucgccggguucaucgagggcggcuggacggggaugguggacggcugguacggguaccaccaccagaacgagcagggcuccggguacgccgccgaccucaagagcacccagaacgccaucgacgagaucaccaacaaggugaacuccgucaucgagaagaugaacacccaguucacggcggugggcaaggaguucaaccaccuggagaagcgcaucgagaaccugaacaagaaggucgacgacggcuuccucgacaucuggaccuacaacgccgagcugcuggugcuccuggagaacgagcggacccuggacuaccacgacagcaacgugaagaaccucuacgagaagguccgcucccagcugaagaacaacgccaaggagaucgggaacggcugcuucgaguucuaccacaagugcgacaacacgugcauggagagcgugaagaacgggaccuacgacuaccccaaguacuccgaggaggccaagcugaaccgggaggagaucgacggcgugaagcucgagagcacccgcaucuaccagauccuggccaucuacuccaccgucgcgagcagccuggugcucguggucucccugggggccaucagcuucuggaugugcuccaacggcagccugcagugccggaucugcaucuga

SEQ ID NO: 71372 - RNA, 1701 nt, Artificial Sequence; identical to SEQ ID NO: 68290
  derived and/or modified CDS sequence (opt1) from hemagglutinin__InfluenzaA__AEO01251

SEQ ID NO: 71373 - RNA, 1701 nt, Artificial Sequence; identical to SEQ ID NO: 66693
  derived and/or modified CDS sequence (opt1) from hemagglutinin__InfluenzaA__AEO01252

SEQ ID NO: 71374 - RNA, 1701 nt, Artificial Sequence; identical to SEQ ID NO: 66693
  derived and/or modified CDS sequence (opt1) from hemagglutinin__InfluenzaA__AEO01253

SEQ ID NO: 71375 - RNA, 1701 nt, Artificial Sequence
  derived and/or modified CDS sequence (opt1) from hemagglutinin__InfluenzaA__AEO01254
augaaggccauccuggugguccuccuguacaccuucgccaccgcgaacgccgacacgcugugcaucggcuaccacgccaacaacagcaccgacaccguggacaccgugcucgagaagaacgucacggugacccacuccgugaaccugcuggaggacaagcacaacgggaagcucugcaagcugcgcggcgucgcgccccugcaccucgggaagugcaacaucgccggcuggauccuggggaacccggagugcgagagccuguccaccgccagcuccuggagcuacaucguggagaccuccagcuccgacaacggcacgugcuaccccggcgacuucaucgacuacgaggagcuccgggagcagcugagcuccgugagcuccuucgagcgcuucgagaucuuccccaagaccagcuccuggcccaaccacgacagcaacaagggggucaccgccgccugcccgcacgccggcgcgaaguccuucuacaagaaccugaucuggcucgugaagaaggggaacagcuaccccaagcuguccaagagcuacaucaacaacaagggcaaggaggugcugguccucugggggauccaccaccccagcaccuccgccgaccagcagagccuguaccagaacgccgacgccuacguguucgugggcacgucccgguacagcaagaaguucaagcccgagaucgccauccgcccgaagguccgggaccaggagggccgcaugaacuacuacuggacccugguggagcccggggacaagaucaccuucgaggcgaccggcaaccucguggucccccgguacgccuucgccauggagcgcaacgccggguccggcaucaucaucagcgacacgcccgugcacgacugcaacacgaccugccagaccccgaagggcgccaucaacaccucccugcccuuccagaacauccaccccaucaccaucgggaagugccccaaguacgucaagagcaccaagcugcggcucgcgaccggccugcgcaacgugccguccauccagagccgggggcuguucggcgccaucgccggguucaucgagggcggcuggacggggaugguggacggcugguacggguaccaccaccagaacgagcagggcuccggguacgccgccgaccucaagagcacccagaacgcgaucgacaagaucaccaacaaggugaacuccgucaucgagaagaugaacacccaguucacggccgugggcaaggaguucaaccaccuggagaagcgcaucgagaaccugaacaagaaggucgacgacggcuuccucgacaucuggaccuacaacgccgagcugcuggugcuccuggagaacgagcggacccuggacuaccacgacagcaacgugaagaaccucuacgagaagguccgcucccagcugaagaacaacgccaaggagaucgggaacggcugcuucgaguucuaccacaagugcgacaacacgugcauggagagcgugaagaacgggaccuacgacuaccccaaguacuccgaggaggccaagcugaaccgggaggagaucgacggcgugaagcucgagagcacccgcaucuaccagauccuggcgaucuacuccaccgucgccagcagccuggugcucguggucucccugggggccaucagcuucuggaugugcuccaacggcagccugcagugccggaucugcaucuga

SEQ ID NO: 71376 - RNA, 1701 nt, Artificial Sequence; identical to SEQ ID NO: 67140
  derived and/or modified CDS sequence (opt1) from hemagglutinin__InfluenzaA__AEO01256

SEQ ID NO: 71377 - RNA, 1701 nt, Artificial Sequence; identical to SEQ ID NO: 70112
  derived and/or modified CDS sequence (opt1) from hemagglutinin__InfluenzaA__AEO01257

SEQ ID NO: 71378 - RNA, 1701 nt, Artificial Sequence; identical to SEQ ID NO: 66693
  derived and/or modified CDS sequence (opt1) from hemagglutinin__InfluenzaA__AEO01258

SEQ ID NO: 71379 - RNA, 1701 nt, Artificial Sequence; identical to SEQ ID NO: 71375
  derived and/or modified CDS sequence (opt1) from hemagglutinin__InfluenzaA__AEO01259

SEQ ID NO: 71380 - RNA, 1701 nt, Artificial Sequence; identical to SEQ ID NO: 69248
  derived and/or modified CDS sequence (opt1) from hemagglutinin__InfluenzaA__AEO01260

SEQ ID NO: 71381 - RNA, 1701 nt, Artificial Sequence
  derived and/or modified CDS sequence (opt1) from hemagglutinin__InfluenzaA__AEO01261
augaaggccauccuggugguccuccuguacaccuucgccaccgcgaacgccgacacgcugugcaucggcuaccacgccaacaacagcaccgacaccguggacaccgugcucgagaagaacgucacggugacccacuccgugaaccugcuggaggacaagcacaacgggaagcucugcaagcugcgcggcgucgcgccccugcaccucgggaagugcaacaucgccggcuggauccuggggaacccggagugcgagagccuguccaccgccagcuccuggagcuacaucguggagaccuccagcuccgacaacggcacgugcuaccccggcgacuucaucgacuacgaggagcuccgggagcagcugagcuccgugagcuccuucgagcgcuucgagaucuuccccaagaccagcuccuggcccaaccacgacagcaacaagggggucaccgccgccugcccgcacgccggcgcgaaguccuucuacaagaaccugaucuggcucgugaagaaggggaacagcuaccccaagcuguccaagagcuacaucaacgacaagggcaaggaggugcugguccucugggggauccaccaccccagcaccuccgccgaccagcagagccuguaccagaacgccgacgccuacguguucgugggcacgucccgguacagcaagaaguucaagcccgagaucgccauccgcccgaagguccgggaccaggagggccgcaugaacuacuacuggacccugguggagcccggggacaagaucaccuucgaggcgaccggcaaccucguggucccccgguacgccuucgccauggagcgcaacgccggguccggcaucaucaucagcgacacgcccgugcacgacugcaacacgaccugccagaccccgaagggcgccaucaacaccucccugcccuuccagaacauccaccccaucaccaucgggaagugccccaaguacgucaagagcaccaagcugcggauggcgaccggccuccgcaacgugccguccauccagagccgggggcuguucggcgccaucgccggguucaucgagggcggcuggacggggaugguggacggcugguacggguaccaccaccagaacgagcagggcuccggguacgccgccgaccucaagagcacccagaacgcgaucgacgagaucaccaacaaggugaacuccgucaucgagaagaugaacacccaguucacggccgugggcaaggaguucaaccaccuggagaagcgcaucgagaaccugaacaagaaggucgacgacggcuuccuggacaucuggaccuacaacgccgagcuccuggugcugcucgagaacgagcggacccuggacuaccacgacagcaacgugaagaaccuguacgagaagguccgcucccagcucaagaacaacgccaaggagaucgggaacggcugcuucgaguucuaccacaagugcgacaacacgugcauggagagcgugaagaacgggaccuacgacuaccccaaguacuccgaggaggccaagcugaaccgggaggagaucgacggcgugaagcuggagagcaccgggaucuaccagauccucgcgaucuacuccaccgucgccagcagccuggugcugguggucucccucggcgccaucagcuucuggaugugcuccaacggcagccugcagugccgcaucugcaucuga

SEQ ID NO: 71382 - RNA, 1701 nt, Artificial Sequence; identical to SEQ ID NO: 66693
  derived and/or modified CDS sequence (opt1) from hemagglutinin__InfluenzaA__AEO01262

SEQ ID NO: 71383 - RNA, 1701 nt, Artificial Sequence; identical to SEQ ID NO: 68375
  derived and/or modified CDS sequence (opt1) from hemagglutinin__InfluenzaA__AEO01263

SEQ ID NO: 71384 - RNA, 1701 nt, Artificial Sequence; identical to SEQ ID NO: 67046
  derived and/or modified CDS sequence (opt1) from hemagglutinin__InfluenzaA__AEO01264

SEQ ID NO: 71385 - RNA, 1701 nt, Artificial Sequence; identical to SEQ ID NO: 66693
  derived and/or modified CDS sequence (opt1) from hemagglutinin__InfluenzaA__AEO01265

SEQ ID NO: 71386 - RNA, 1701 nt, Artificial Sequence
  derived and/or modified CDS sequence (opt1) from hemagglutinin__InfluenzaA__AEO01266
augaaggccauccuggugguccuccuguacaccuucgccaccgcgaacgccgacacgcugugcaucggcuaccacgccaacaacagcaccgacaccguggacaccgugcucgagaagaacgucacggugacccacuccgugaaccugcuggaggacaagcacaacgggaagcucugcaagcugcgcggcgucgcgccccugcaccucgggaagugcaacaucgccggcuggauccuggggaacccggagugcgagagccuguccaccgccagcuccuggagcuacaucguggagaccuccagcuccgacaacggcacgugcuaccccggcgacuucaucgacuacgaggagcuccgggagcagcugagcuccgugagcuccuucgagcgcuucgagaucuuccccaagaccagcuccuggcccaaccacgacagcaacaagggggucaccgccgccugcccgcacgccggcgcgaaguccuucuacaagaaccugaucuggcucgugaagaaggggaacagcuaccccaagcuguccaagagcuacaucaacgacaagggcaaggaggugcugguccucugggggauccaccaccccagcaccuccgccgaccagcagagccuguaccagaacgccgacgccuacguguucgugggcacgucccgguacagcaagaaguucaagcccgagaucgccauccgcccgaagguccggggccaggaggggcgcaugaacuacuacuggacccugguggagcccggcgacaagaucaccuucgaggcgaccgggaaccucguggucccccgguacgccuucgccauggagcgcaacgccggcuccggcaucaucaucagcgacgcccccgugcacgacugcaacacgaccugccagaccccgaagggggcgaucaacaccucccugcccuuccagaacauccaccccaucacgaucggcaagugccccaaguacgucaagagcaccaagcugcggcucgccaccgggcugcgcaacgugccguccauccagagccggggccuguucggggccaucgccggcuucaucgagggcggguggaccggcaugguggacgggugguacggcuaccaccaccagaacgagcagggguccggcuacgccgcggaccucaagagcacgcagaacgccaucgacgagaucaccaacaaggugaacuccgucaucgagaagaugaacacccaguucaccgccgugggcaaggaguucaaccaccuggagaagcgcaucgagaaccugaacaagaaggucgacgacggguuccucgacaucuggacguacaacgccgagcugcuggugcuccuggagaacgagcggacccuggacuaccacgacagcaacgugaagaaccucuacgagaagguccgcucccagcugaagaacaacgccaaggagaucggcaacgggugcuucgaguucuaccacaagugcgacaacacgugcauggagagcgugaagaacggcaccuacgacuaccccaaguacuccgaggaggcgaagcugaaccgggaggagaucgacggggugaagcucgagagcacccgcaucuaccagauccuggccaucuacuccaccgucgccagcagccuggugcucguggucucccugggcgccaucagcuucuggaugugcuccaacggcagccugcagugccggaucugcaucuga

SEQ ID NO: 71387 - RNA, 1701 nt, Artificial Sequence; identical to SEQ ID NO: 66693
  derived and/or modified CDS sequence (opt1) from hemagglutinin__InfluenzaA__AEO01267

SEQ ID NO: 71388 - RNA, 1701 nt, Artificial Sequence; identical to SEQ ID NO: 66693
  derived and/or modified CDS sequence (opt1) from hemagglutinin__InfluenzaA__AEO01268

SEQ ID NO: 71389 - RNA, 1701 nt, Artificial Sequence
  derived and/or modified CDS sequence (opt1) from hemagglutinin__InfluenzaA__AEO01269
augaaggccauccuggugguccuccuguacaccuucgccaccgcgaacgccgacacgcugugcaucggcuaccacgccaacaacagcaccgacaccguggacaccgugcucgagaagaacgucacggugacccacuccgugaaccugcuggaggacaagcacaacgggaagcucugcaagcugcgcggcgucgcgccccugcaccucgggaagugcaacaucgccggcuggauccuggggaacccggagugcgagagccuguccaccgccagcuccuggagcuacaucguggagaccuccagcuccgacaacggcacgugcuaccccggcgacuucaucgacuacgaggagcuccgggagcagcugagcuccgugagcuccuucgagcgcuucgagaucuuccccaagaccagcuccuggcccaaccacgacagcaacaagggggucaccgccgccugcccgcacgccggcgcgaaguccuucuacaagaaccugaucuggcucgugaagaaggggaacagcuaccccaagcuguccaagagcuacaucaacgacaagggcaaggaggugcugguccucugggggauccaccaccccagcaccuccgccgaccagcagagccuguaccagaacgccgacgccuacguguucgugggcacgucccgguacagcaagaaguucaagcccgagaucgccauccgcccgaagguccgggagcaggagggccgcaugaacuacuacuggacccugguggagcccggggacaagaucaccuucgaggcgaccggcaaccucguggucccccgguacgccuucgccauggagcgcaacgccggguccggcaucgugaucagcgacacgcccgugcacgacugcaacacgaccugccagaccccgaagggcgccaucaacaccucccugcccuuccagaacauccaccccaucaccaucgggaagugccccaaguacgucaagagcaccaagcugcggcucgcgaccggccugcgcaacgugccguccauccagagccgggggcuguucggcgccaucgccggguucaucgagggcggcuggacggggaugguggacggcugguacggguaccaccaccagaacgagcagggcuccggguacgccgccgaccucaagagcacccagaacgcgaucgacgagaucaccaacaaggucaacuccgugaucgagaagaugaacacccaguucacggccgucggcaaggaguucaaccaccuggagaagcgcauggagaaccugaacaagaagguggacgacggcuuccucgacaucuggaccuacaacgccgagcugcuggugcuccuggagaacgagcggacccuggacuaccacgacagcaacgucaagaaccucuacgagaaggugcgcucccagcugaagaacaacgccaaggagaucgggaacggcugcuucgaguucuaccacaagugcgacaacacgugcauggagagcgugaagaacgggaccuacgacuaccccaaguacuccgaggaggccaagcugaaccgggaggagaucgacggcgucaagcucgagagcacccgcaucuaccagauccuggcgaucuacuccaccguggccagcagccuggugcucgucgugucccugggggccaucagcuucuggaugugcuccaacggcagccugcagugccggaucugcaucuga

SEQ ID NO: 71390 - RNA, 1701 nt, Artificial Sequence; identical to SEQ ID NO: 67857
  derived and/or modified CDS sequence (opt1) from hemagglutinin__InfluenzaA__AEO01270

SEQ ID NO: 71391 - RNA, 1701 nt, Artificial Sequence
  derived and/or modified CDS sequence (opt1) from hemagglutinin__InfluenzaA__AEO01271
augaaggccauccuggugguccuccuguacaccuucgccaccgcgaacgccgacacgcugugcaucggcuaccacgccaacaacagcaccgacaccguggacaccgugcucgagaagaacgucacggugacccacuccgugaaccugcuggaggacaagcacaacgggaagcucugcaagcugcgcggcgucgcgccccugcaccucgggaagugcgacaucgccggcuggauccuggggaacccggagugcgagagccuguccaccgcgagcuccuggagcuacaucguggagacccccuccagcgacaacggcacgugcuaccccggcgacuucaucgacuacgaggagcuccgggagcagcuguccagcguguccagcuucgagcgcuucgagaucuuccccaagaccuccagcuggccgaaccacgacuccaacaagggggucaccgccgccugcccccacgccggcgccaagagcuucuacaagaaccugaucuggcucgugaagaaggggaacuccuaccccaagcugagcaaguccuacaucaacgacaagggcaaggaggugcugguccucugggggauccaccaccccagcaccagcgccgaccagcagucccuguaccagaacgccgacgccuacguguucgugggcacgagccgguacuccaagaaguucaagccggagaucgccauccgccccaagguccgggaccaggagggccgcaugaacuacuacuggacccugguggagcccggggacaagaucaccuucgaggcgaccggcaaccucguggucccccgguacgccuucgccauggagcgcaacgccgggagcggcaucaucaucuccgacacgccggugcacgacugcaacacgaccugccagacccccaagggcgccaucaacaccagccugcccuuccagaacauccaccccaucaccaucgggaagugcccgaaguacgugaaguccaccaagcugcggcucgcgaccggccugcgcaacguccccagcauccagucccgggggcuguucggcgccaucgccggguucaucgagggcggcuggacggggaugguggacggcugguacggguaccaccaccagaacgagcagggcagcggguacgccgccgaccucaaguccacccagcacgcgaucgacgagaucaccaacaaggugaacagcgucaucgagaagaugaacacccaguucacggccgugggcaaggaguucaaccaccuggagaagcgcaucgagaaccugaacaagaaggucgacgacggcuuccucgacaucuggaccuacaacgccgagcugcuggugcuccuggagaacgagcggacccuggacuaccacgacuccaacgugaagaaccucuacgagaagguccgcagccagcugaagaacaacgccaaggagaucgggaacggcugcuucgaguucuaccacaagugcgacaacacgugcauggaguccgugaagaacgggaccuacgacuaccccaaguacagcgaggaggccaagcugaaccgggaggagaucgacggcgugaagcucgaguccacccgcaucuaccagauccuggcgaucuacagcaccgucgccuccagccuggugcucguggucagccugggggccaucuccuucuggaugugcagcaacggcucccugcagugccggaucugcaucuga

SEQ ID NO: 71392 - RNA, 1701 nt, Artificial Sequence; identical to SEQ ID NO: 66693
  derived and/or modified CDS sequence (opt1) from hemagglutinin__InfluenzaA__AEO01272

SEQ ID NO: 71393 - RNA, 1701 nt, Artificial Sequence; identical to SEQ ID NO: 66693
  derived and/or modified CDS sequence (opt1) from hemagglutinin__InfluenzaA__AEO01273

SEQ ID NO: 71394 - RNA, 1701 nt, Artificial Sequence; identical to SEQ ID NO: 66693
  derived and/or modified CDS sequence (opt1) from hemagglutinin__InfluenzaA__AEO01274

SEQ ID NO: 71395 - RNA, 1701 nt, Artificial Sequence; identical to SEQ ID NO: 68861
  derived and/or modified CDS sequence (opt1) from hemagglutinin__InfluenzaA__AEO01275

SEQ ID NO: 71396 - RNA, 1701 nt, Artificial Sequence
  derived and/or modified CDS sequence (opt1) from hemagglutinin__InfluenzaA__AEO01276
augaaggccauccuggugguccuccuguacaccuucgccaccgcgaacgccgacacgcugugcaucggcuaccacgccaacaacagcaccgacaccguggacaccgugcucaagaagaacgucacggugacccacuccgugaaccugcuggaggacaagcacaacgggaagcucugcaagcugcgcggcgucgcgccccugcaccucgggaagugcaacaucgccggcuggauccuggggaacccggagugcgagagccuguccaccgccagcuccuggagcuacaucguggagaccuccagcuccgacaacggcacgugcuaccccggcgacuucaucgacuacgaggagcuccgggagcagcugagcuccgugagcuccuucgagcgcuucgagaucuuccccaagaccagcuccuggcccaaccacgacagcaacaagggggucaccgccgccugcccgcacgccggcgcgaaguccuucuacaagaaccugaucuggcucgugaagaaggggaacagcuaccccaagcuguccaagagcuacaucaacgacaagggcaaggaggugcugguccucugggggauccaccaccccagcaccuccgccgaccagcagagccuguaccagaacgccgacgccuacguguucgugggcacgucccgguacagcaagaaguucaagcccgagaucgccauccgcccgaagguccgggaccaggagggccgcaugaacuacuacuggacccugguggagcccggggacaagaucaccuucgaggcgaccggcaaccucguggucccccgguacgccuucgccauggagcgcaacgccggguccggcaucaucaucagcgacacgcccgugcacgacugcaacacgaccugccagaccccgaagggcgccaucaacaccucccugcccuuccagaacauccaccccaucaccaucgggaagugccccaaguacgucaagagcaccaagcugcggcucgcgaccggccugcgcaacgugccguccauccagagccgggggcuguucggcgccaucgccggguucaucgagggcggcuggacggggaugguggacggcugguacggguaccaccaccagaacgagcagggcuccggguacgccgccgaccucaagagcacccagaacgcgaucgacgagaucaccaacaaggugaacuccgucaucgagaagaugaacacccaguucacggccgugggcaaggaguucaaccaccuggagaagcgcaucgagaaccugaacaagaaggucgacgacggcuuccucgacaucuggaccuacaacgccgagcugcuggugcuccuggagaacgagcggacccuggacuaccacgacagcaacgugaagaaccucuacgagaagguccgcucccagcugaagaacaacgccgaggagaucgggaacggcugcuucgaguucuaccacaagugcgacaacacgugcauggagagcgugaagaacgggaccuacgacuaccccaaguacuccgaggaggccaagcugaaccgggaggagaucgacggcgugaagcucgagagcacccgcaucuaccagauccuggcgaucuacuccaccgucgccagcagccuggugcucguggucucccugggggccaucagcuucuggaugugcuccaacggcagccugcagugccggaucugcaucuga

SEQ ID NO: 71397 - RNA, 1701 nt, Artificial Sequence; identical to SEQ ID NO: 66693
  derived and/or modified CDS sequence (opt1) from hemagglutinin__InfluenzaA__AEO01277

SEQ ID NO: 71398 - RNA, 1701 nt, Artificial Sequence
  derived and/or modified CDS sequence (opt1) from hemagglutinin__InfluenzaA__AEO01278
augaaggccauccuggugguccuccuguacaccuucgccaccgcgaacgccgacacgcugugcaucggcuaccacgccaacaacagcaccgacaccguggacaccgugcucgagaagaacgucacggugacccacuccgugaaccugcuggaggacaagcacaacgggaagcucugcaagcugcgcggcgucgcgccccugcaccucgggaagugcgacaucgccggcuggauccuggggaacccggagugcgagagccuguccaccgccagcuccuggagcuacaucguggagaccuccagcuccgacaacggcacgugcuaccccggcgacuucaucgacuacgaggagcuccgggagcagcugagcuccgugagcuccuucgagcgcuucgagaucuuccccaagaccagcuccuggcccaaccacgacagcaacaagggggucaccgccgccugcccgcacgccggcgcgaaguccuucuacaagaaccugaucuggcucgugaagaaggggaacagcuaccccaagcuguccaagagcuacaucaacgacaagggcaaggaggugcugguccucugggggauccaccaccccagcaccuccgccgaccagcagagccuguaccagaacgccgacgccuacguguucgugggcacgucccgguacagcaagaaguucaagcccgagaucgccauccgcccgaagguccgggaccaggagggccgcaugaacuacuacuggacccugguggagcccggggacaagaucaccuucgaggcgaccggcaaccucguggucccccgguacgccuucgccauggagcgcaacgccggguccggcaucaucaucagcgacacgcccgugcacgacugcaacacgaccugccagaccccgaagggcgccaucaacaccucccugcccuuccagaacauccaccccaucaccaucgggaagugccccaaguacgucaagagcaccaagcugcggcucgcgaccggccugcgcaacgugccguccauccagagccgggggcuguucggcgccaucgccggguucaucgagggcggcuggacggggaugguggacggcugguacggguaccaccaccagaacgagcagggcuccggguacgccgccgaccucaagagcacccagcacgcgaucgacgagaucaccaacaaggugaacuccgucaucgagaagaugaacacccaguucacggccgugggcaaggaguucaaccaccuggagaagcgcaucgccaaccugaacaagaaggucgacgacggcuuccucgacaucuggaccuacaacgccgagcugcuggugcuccuggagaacgagcggacccuggacuaccacgacagcaacgugaagaaccucuacgagaagguccgcucccagcugaagaacaacgccaaggagaucgggaacggcugcuucgaguucuaccacaagugcgacaacacgugcauggagagcgugaagaacgggaccuacgacuaccccaaguacuccgaggaggcgaagcugaaccgggaggagaucgacggcgugaagcucgagagcacccgcaucuaccagauccuggccaucuacuccaccgucgccagcagccuggugcucguggucucccugggggccaucagcuucuggaugugcuccaacggcagccugcagugccggaucugcaucuga

SEQ ID NO: 71399 - RNA, 1701 nt, Artificial Sequence
  derived and/or modified CDS sequence (opt1) from hemagglutinin__InfluenzaA__AEO01279
augaaggccauccuggugguccuccuguacaccuucgccaccgcgaacgccgacacgcugugcaucggcuaccacgccaacaacagcaccgacaccguggacaccgugcucgagaagaacgucacggugacccacuccgugaaccugcuggaggacaagcacaacgggaagcucugcaagcugcgcggcgucgcgccccugcaccucgggaagugcaacaucgccggcuggauccuggggaacccggagugcgagagccuguccaccgccagcuccuggagcuacaucguggagaccuccagcuccgacaacggcacgugcuaccccggcgacuucaucgacuacgaggagcuccgggagcagcugagcuccgugagcuccuucgagcgcuucgagaucuuccccaagaccagcuccuggcccaaccacgacagcaacaagggggucaccgccgccugcccgcacgccggcgcgaaguccuucuacaagaaccugaucuggcucgugaagaaggggaacagcuaccccaagcuguccaagagcuacaucaacgacaagggcaaggaggugcugguccucugggggauccaccaccccagcaccuccgccgaccagcagagccuguaccagaacgccgacgccuacguguucgugggcacgucccgguacagcaagaaguucaagcccgagaucgccauccgcccgaagguccgggaccaggagggccgcaugaacuacuacuggacccugguggagcccggggacaagaucaccuucgaggcgaccggcaaccucguggucccccgguacgccuucgccauggagcgcacggccggguccggcaucaucaucagcgacacccccgugcacgacugcaacacgaccugccagaccccgaagggcgccaucaacaccucccugcccuuccagaacauccaccccaucaccaucgggaagugccccaaguacgucaagagcaccaagcugcggcucgcgacgggccugcgcaacgugccguccauccagagccgggggcuguucggcgccaucgccggguucaucgagggcggcuggaccgggaugguggacggcugguacggguaccaccaccagaacgagcagggcuccggguacgccgccgaccucaagagcacccagaacgcgaucgacaagaucaccaacaaggugaacuccgucaucgagaagaugaacacgcaguucaccgccgugggcaaggaguucaaccaccuggagaagcgcaucgagaaccugaacaagaaggucgacgacggcuuccucgacaucuggaccuacaacgccgagcugcuggugcuccuggagaacgagcggacccuggacuaccacgacagcaacgugaagaaccucuacgagaagguccgcucccagcugaagaacaacgccaaggagaucgggaacggcugcuucgaguucuaccacaagugcgacaacacgugcauggagagcgugaagaacgggaccuacgacuaccccaaguacuccgaggaggccaagcugaaccgggaggagaucgacggcgugaagcucgagagcacccgcaucuaccagauccuggcgaucuacuccaccgucgccagcagccuggugcucguggucucccugggggccaucagcuucuggaugugcuccaacggcagccugcagugccggaucugcaucuga

SEQ ID NO: 71400 - RNA, 1701 nt, Artificial Sequence
  derived and/or modified CDS sequence (opt1) from hemagglutinin__InfluenzaA__AEO01282
augaaggccauccuggugguccuccuguacaccuucgccaccgcgaacgccgacacgcugugcaucggcuaccacgccaacaacagcaccgacaccguggacaccgugcucgagaagaacgucacggugacccacuccgugaaccugcuggaggacaagcacaacgggaagcucugcaagcugcgcggcgucgcgccccugcaccucgggaagugcaacaucgccggcuggauccuggggaacccggagugcgagagccuguccaccgccagcuccuggagcuacaucguggagaccuccagcuccgacaacggcacgugcuaccccggcgacuucaucgacuacgaggagcuccgggagcagcugagcuccgugagcuccuucgagcgcuucgagaucuuccccaagaccagcuccuggcccaaccacgacagcaacaagggggucaccgccgccugcccgcacgccggcgcgaaguccuucuacaagaaccugaucuggcucgugaagaaggggaacagcuaccccaagcuguccaagagcuacaucaacgacaagggcaaggaggugcugguccucugggggauccaccaccccagcaccuccgccgaccagcagagccuguaccagaacgccgacgccuacguguucgugggcacgucccgguacagcaagaaguucaagcccgagaucgccauccgcccgaagguccgggaccaggagggccgcaugaacuacuacuggacccugguggagcccggggacaagaucaccuucgaggcgaccggcaaccucguggucccccgguacgccuucgccauggagcgcaacgccggguccggcaucaucaucagcgacacgcccgugcacgacugcaacacgaccugccagaccccgaagggcgccaucaacaccucccugcccuuccagaacauccaccccaucaccaucgggaagugccccaaguacgucaagagcaccaagcugcggcucgcgaccggccugcgcaacgugccguccauccagagccgggggcuguucggcgccaucgccggguucaucgagggcggcuggacggggaugguggacggcugguacggguaccaccaccagaacgagcagggcuccggguacgccgccgaccucaagagcacccagaacgcgaucgacgagaucaccaacaaggugaacuccgucaucgagaagaugaacacccaguucacggccgugggcaaggaguucaaccaccuggagaagcgcaucgagaaccugaacaagaaggucgacgacggcuuccucgacaucuggaccuacaacgccgagcugcuggugcuccuggagaacgagcggacccuggacuaccacgacagcaacgugaagaagcucuacgagaagguccgcucccagcugaagaacaacgccaaggagaucgggaacggcugcuucgaguucuaccacaagugcaacaacacgugcauggagagcgugaagaacgggaccuacgacuaccccaaguacuccgaggaggccaagcugaaccgggaggagaucgacggcgugaagcucgagagcacccgcaucuaccagauccuggcgaucuacuccaccgucgccagcagccuggugcucguggucucccugggggccaucagcuucuggaugugcuccaacggcagccugcagugccggaucugcaucuga

SEQ ID NO: 71401 - RNA, 1701 nt, Artificial Sequence; identical to SEQ ID NO: 67795
  derived and/or modified CDS sequence (opt1) from hemagglutinin__InfluenzaA__AEO01283

SEQ ID NO: 71402 - RNA, 1701 nt, Artificial Sequence
  derived and/or modified CDS sequence (opt1) from hemagglutinin__InfluenzaA__AEO01284
augaaggccauccuggugguccuccuguacaccuucgccaucgcgaacgccgacacccugugcaucggcuaccacgccaacaacagcacggacaccguggacaccgugcucgagaagaacgucaccgugacgcacuccgugaaccugcuggaggacaagcacaacgggaagcucugcaagcugcgcggcgucgcgccccugcaccucgggaagugcaacaucgccggcuggauccuggggaacccggagugcgagagccuguccaccgccagcuccuggagcuacaucguggagaccuccagcuccgacaacgggaccugcuaccccggcgacuucaucgacuacgaggagcuccgggagcagcugagcuccgugagcuccuucgagcgcuucgagaucuuccccaagacgagcuccuggcccaaccacgacagcaacaagggcgucaccgccgccugcccgcacgccggcgcgaaguccuucuacaagaaccugaucuggcucgugaagaaggggaacagcuaccccaagcuguccaagagcuacaucaacgacaagggcaaggaggugcugguccucugggggauccaccaccccagcaccuccgccgaccagcagagccuguaccagaacgccgacgccuacguguucgugggcaccucccgguacagcaagaaguucaagcccgagaucgccauccgcccgaagguccgggaccaggagggccgcaugaacuacuacuggacgcugguggagcccggggacaagaucaccuucgaggcgaccggcaaccucguggucccccgguacgccuucgccauggagcgcaacgccggguccggcaucaucaucagcgacacccccgugcacgacugcaacacgaccugccagaccccgaagggcgccaucaacaccucccugcccuuccagaacauccaccccaucacgaucgggaagugccccaaguacgucaagagcaccaagcugcggcucgcgaccggccugcgcaacgugccguccauccagagccgggggcuguucggcgccaucgccggguucaucgagggcggcuggaccgggaugguggacggcugguacggguaccaccaccagaacgagcagggcuccggguacgccgccgaccucaagagcacgcagcacgcgaucgacgagaucaccaacaaggugaacuccgucaucgagaagaugaacacccaguucaccgccgugggcaaggaguucaaccaccuggagaagcgcaucgagaaccugaacaagaaggucgacgacggcuuccucgacaucuggacguacaacgccgagcugcuggugcuccuggagaacgagcggacccuggacuaccacgacagcaacgugaagaaccucuacgagaagguccgcucccagcugaagaacaacgccaaggagaucgggaacggcugcuucgaguucuaccacaagugcgacaacacgugcauggagagcgugaagaacgggaccuacgacuaccccaaguacuccgaggaggccaagcugaaccgggaggagaucaacggcgugaagcucgagagcacccgcaucuaccagauccuggcgaucuacuccaccgucgccagcagccuggugcucguggucucccugggggccaucagcuucuggaugugcuccaacggcagccugcagugccggaucugcaucuga

SEQ ID NO: 71403 - RNA, 1701 nt, Artificial Sequence; identical to SEQ ID NO: 67794
  derived and/or modified CDS sequence (opt1) from hemagglutinin__InfluenzaA__AEO01285

SEQ ID NO: 71404 - RNA, 1701 nt, Artificial Sequence; identical to SEQ ID NO: 67887
  derived and/or modified CDS sequence (opt1) from hemagglutinin__InfluenzaA__AEO01286

SEQ ID NO: 71405 - RNA, 1701 nt, Artificial Sequence
  derived and/or modified CDS sequence (opt1) from hemagglutinin__InfluenzaA__AEO01287
augaaggccauccuggugguccuccuguacaccuucgccaccgcgaacagcgacacgcugugcaucggcuaccacgccaacaacuccaccgacaccguggacaccgugcucgagaagaacgucacggugacccacagcgugaaccugcuggaggacaagcacaacgggaagcucugcaagcugcgcggcgucgcgccccugcaccucgggaagugcaacaucgccggcuggauccuggggaacccggagugcgagucccugagcaccgccuccagcugguccuacaucguggagaccagcuccagcgacaacggcacgugcuaccccggcgacuucaucgacuacgaggagcuccgggagcagcuguccagcguguccagcuucgagcgcuucgagaucuuccccaagaccuccagcuggcccaaccacgacuccaacaagggggucaccgccgccugcccgcacgccggcgccaagagcuucuacaagaaccugaucuggcucgugaagaaggggaacuccuaccccaagcugagcaagagcuacaucaacgacaagggcaaggaggugcugguccucugggggauccaccaccccuccaccagcgcggaccagcagucccuguaccagaacgccgacgccuacguguucgugggcacgagccgguacuccaagaaguucaagcccgagaucgccauccgcccgaagguccgggaccaggagggccgcaugaacuacuacuggacccugguggagcccggggacaagaucaccuucgaggccaccggcaaccucguggucccccgguacgcguucgccauggagcgcaacgccgggagcggcaucaucaucuccgacacgcccgugcacgacugcaacacgaccugccagaccccgaagggcgccaucaacaccagccugcccuuccagaacauccaccccaucaccaucgggaagugccccaaguacgugaaguccaccaagcugcggcucgccaccggccugcgcaacgucccgagcauccagucccgggggcuguucggcgcgaucgccggguucaucgagggcggcuggacggggaugguggacggcugguacggguaccaccaccagaacgagcagggcagcggguacgccgccgaccucaaguccacccagaacgccaucgacgagaucaccaacaaggugaacagcgucaucgagaagaugaacacccaguucacggcggugggcaaggaguucaaccaccuggagaagcgcaucgagaaccugaacaagaaggucgacgacggcuuccucgacaucuggaccuacaacgccgagcugcuggugcuccuggagaacgagcggacccuggacuaccacgacuccaacgugaagaaccucuacgagaagguccgcagccagcugaagaacaacgccaaggagaucgggaacggcugcuucgaguucuaccacaagugcgacaacacgugcauggaguccgugaagaacgggaccuacgacuaccccaaguacagcgaggaggccaagcugaaccgggaggagaucgacggcgugaagcucgaguccacccgcaucuaccagauccuggccaucuacagcaccgucgcgagcucccuggugcucguggucagccugggggccaucuccuucuggaugugcagcaacggcucccugcagugccggaucugcaucuga

SEQ ID NO: 71406 - RNA, 1701 nt, Artificial Sequence; identical to SEQ ID NO: 67046
  derived and/or modified CDS sequence (opt1) from hemagglutinin__InfluenzaA__AEO01288

SEQ ID NO: 71407 - RNA, 1701 nt, Artificial Sequence; identical to SEQ ID NO: 66693
  derived and/or modified CDS sequence (opt1) from hemagglutinin__InfluenzaA__AEO01289

SEQ ID NO: 71408 - RNA, 1701 nt, Artificial Sequence
  derived and/or modified CDS sequence (opt1) from hemagglutinin__InfluenzaA__AEO01290
augaaggccauccuggugguccuccuguacaccuucgccaccgcgaacgccgacacgcugugcaucggcuaccacgccaacaacagcaccgacaccguggacaccgugcucgagaagaacgucacggugacccacuccgugaaccugcuggaggacaagcacaacgggaagcucugcaagcugcgcggcgucgcgccccugcaccucgggaagugcaacaucgccggcuggauccuggggaacccggagugcgagagccuguccaccgccagcuccuggagcuacaucguggagaccuccagcuccgacaacggcacgugcuaccccggcgacuucaucgacuacgaggagcuccgggagcagcugagcuccgugagcuccuucgagcgcuucgagaucuuccccaagaccagcuccuggcccaaccacgacagcaacaagggggucaccgccgccugcccgcacgccggcgcgaaguccuucuacaagaaccugaucuggcucgugaagaaggggaacagcuaccccaagcuguccaagagcuacaucaacgacaagggcaaggaggugcugguccucugggggauccaccaccccagcaccuccgccgaccagcagagccuguaccagaacgccgacgccuacguguucgugggcacgucccgguacagcaagaaguucaagcccgagaucgccauccgcccgaagguccgggaccaggagggccgcaugaacuacuacuggacccugguggagcccggggacaagaucaccuucgaggcgaccggcaaccucguggucccccgguacgccuucgccauggagcgcaacgccggguccggcaucaucaucagcgacacgcccgugcacgacugcaacacgaccugccagaccccgaagggcgccaucaacaccucccugagcuuccagaacauccaccccaucaccaucgggaagugccccaaguacgugaaguccaccaagcugcggcucgcgaccggccugcgcaacguccccagcauccagucccgggggcuguucggcgccaucgccggguucaucgagggcggcuggacggggaugguggacggcugguacggguaccaccaccagaacgagcagggcagcggguacgccgccgaccucaaguccacccagaacgcgaucgacgagaucaccaacaaggugaacagcgucaucgagaagaugaacacccaguucacggccgugggcaaggaguucaaccaccuggagaagcgcaucgagaaccugaacaagaaggucgacgacggcuuccucgacaucuggaccuacaacgccgagcugcuggugcuccuggagaacgagcggacccuggacuaccacgacuccaacgugaagaaccucuacgagaagguccgcagccagcugaagaacaacgccaaggagaucgggaacggcugcuucgaguucuaccacaagugcgacaacacgugcauggaguccgugaagaacgggaccuacgacuacccgaaguacagcgaggaggccaagcugaaccgggaggagaucgacggcgugaagcucgaguccacccgcaucuaccagauccuggcgaucuacagcaccgucgccagcucccuggugcucguggucagccugggggccaucuccuucuggaugugcagcaacggcucccugcagugccggaucugcaucuga

SEQ ID NO: 71409 - RNA, 1701 nt, Artificial Sequence; identical to SEQ ID NO: 66693
  derived and/or modified CDS sequence (opt1) from hemagglutinin__InfluenzaA__AEO01291

SEQ ID NO: 71410 - RNA, 1701 nt, Artificial Sequence; identical to SEQ ID NO: 66693
  derived and/or modified CDS sequence (opt1) from hemagglutinin__InfluenzaA__AEO01292

SEQ ID NO: 71411 - RNA, 1701 nt, Artificial Sequence
  derived and/or modified CDS sequence (opt1) from hemagglutinin__InfluenzaA__AEO01294
augaaggccauccuggugguccuccuguacaccuucgccaccgcgaacgccgacacgcugugcaucggcuaccacgccaacaacagcaccgacaccguggacaccgugcucgagaagaacgucacggugacccacuccgugaaccugcuggaggacaagcacaacgggaagcucugcaagcugcgcggcgucgcgccccugcaccucgggaagugcgacaucgccggcuggauccuggggaacccggagugcgagagccuguccaccgccagcuccuggagcuacaucguggagaccuccagcuccgacaacggcacgugcuaccccggcgacuucaucgacuacgaggagcuccgggagcagcugagcuccgugagcuccuucgagcgcuucgagaucuuccccaagaccagcuccuggcccaaccacgacagcaacaagggggucaccgccgccugcccgcacgccggcgcgaaguccuucuacaagaaccugaucuggcucgugaagaaggggaacagcuaccccaagcuguccaagagcuacaucaacgacaagggcaaggaggugcugguccucugggggauccaccaccccagcaccuccgccgaccagcagagccuguaccagaacgccgacgccuacguguucgugggcacgucccgguacagcaagaaguucaagcccgagaucgccauccgcccgaagguccgggaccaggagggccgcaugaacuacuacuggacccugguggagcccggggacaagaucaccuucgaggcgaccggcaaccucguggucccccgguacgccuucgccauggagcgcaacgccggguccggcaucaucaucagcgacacgcccgugcacgacugcaacacgaccugccagaccccgaagggcgccaucaacaccucccugcccuuccagaacauccaccccaucaccaucgggaagugccccaaguacgucaagagcaccaagcugcggcucgcgaccggccugcgcaacgugccguccauccagagccgggggcuguucggcgccaucgccggguucaucgagggcggcuggacggggaugguggacggcugguacggguaccaccaccagaacgagcagggcuccggguacgccgccgaccucaagagcacccagcacgcgaucgacgagaucaccaacaaggugaacuccgucaucgagaagaugaacacccaguucacggccgugggcaaggaguucaaccaccuggagaagcgcaucgagaaccugaacaagaaggucgacgacggcuuccucgacaucuggaccuacaacgccgagcugcuggugcuccuggagaacgagcggacccuggacuaccacgacagcaacgugaagaaccucuacgagaagguccgcucccagcugaagaacaacgccaaggagaucgggaacggcugcuucgaguucuaccacaagugcgacaacacgugcauggagagcgugaagaacgggaccuacgacuaccccaaguacuccgaggaggccaagcugaaccgggaggagaucgacggcgugaagcucgagagcacccgcaucuaccagauccuggcgaucuacuccaccgucgccagcagccuggugcucguggucucccugggggccaucagcuucuggaugugcuccaacggcagccugcagugccggaucugcaucuga

SEQ ID NO: 71412 - RNA, 1701 nt, Artificial Sequence
  derived and/or modified CDS sequence (opt1) from hemagglutinin__InfluenzaA__AEO01295
augaaggccauccuggugguccuccuguacaccuucgccaccgcgaacgccgacacgcugugcaucggcuaccacgccaacaacagcaccgacaccguggacaccgugcucgagaagaacgucacggugacccacuccgugaaccugcuggaggacaagcacaacgggaagcucugcaagcugcgcggcgucgcgccccugcaccucgggaagugcaacaucgccggcuggauccuggggaacccggagugcgagagccuguccaccgcgagcuccuggagcuacaucguggagaccuccaacagcgacaacggcacgugcuaccccggcgacuucaucgacuacgaggagcuccgggagcagcuguccagcguguccagcuucgagcgcuucgagaucuuccccaagaccuccagcuggcccaaccacgacuccaacaagggggucaccgccgccugcccgcacgccggcgccaagagcuucuacaagaaccugaucuggcucgugaagaaggggaacuccuaccccaagcugagcaaguccuacaucaacgacaagggcaaggaggugcugguccucugggggauccaccaccccagcaccagcgccgaccagcagucccuguaccagaacgccgacgccuacguguucgugggcacgagccgguacuccaagaaguucaagcccgagaucgccauccgcccgaagguccgggaccaggagggccgcaugaacuacuacuggacccugguggagcccggggacaagaucaccuucgaggcgaccggcaaccucguggucccccgguacgccuucgccauggagcgcaacgccgggagcggcaucaucaucuccgacacgcccgugcacuacugcaacacgaccugccagaccccgaagggcgccaucaacaccagccugcccuuccagaacauccaccccaucaccaucgggaagugccccaaguacgugaaguccaccaagcugcggcucgcgaccggccugcgcaacgucccgagcauccagucccgggggcuguucggcgccaucgccggguucaucgagggcggcuggacggggaugguggacggcugguacggguaccaccaccagaacgagcagggcagcggguacgccgccgaccucaaguccacccagaacgcgaucgacaagaucaccaacaaggugaacagcgucaucgagaagaugaacacccaguucacggccgugggcaaggaguucaaccaccuggagaagcgcaucgagaaccugaacaagaaggucgacgacggcuuccucgacaucuggaccuacaacgccgagcugcuggugcuccuggagaacgagcggacccuggacuaccacgacuccaacgugaagaaccucuacgagaagguccgcagccagcugaagaacaacgccaaggagaucgggaacggcugcuucgaguucuaccacaagugcgacaacacgugcauggaguccgugaagaacgggaccuacgacuaccccaaguacagcgaggaggccaagcugaaccgggaggagaucgacggcgugaagcucgaguccacccgcaucuaccagauccuggcgaucuacagcaccgucgccuccagccuggugcucguggucagccugggggccaucuccuucuggaugugcagcaacggcucccugcagugccggaucugcaucuga

SEQ ID NO: 71413 - RNA, 1701 nt, Artificial Sequence; identical to SEQ ID NO: 66693
  derived and/or modified CDS sequence (opt1) from hemagglutinin__InfluenzaA__AEO01296

SEQ ID NO: 71414 - RNA, 1701 nt, Artificial Sequence; identical to SEQ ID NO: 68375
  derived and/or modified CDS sequence (opt1) from hemagglutinin__InfluenzaA__AEO01297

SEQ ID NO: 71415 - RNA, 1701 nt, Artificial Sequence; identical to SEQ ID NO: 68380
  derived and/or modified CDS sequence (opt1) from hemagglutinin__InfluenzaA__AEO01298

SEQ ID NO: 71416 - RNA, 1701 nt, Artificial Sequence; identical to SEQ ID NO: 66693
  derived and/or modified CDS sequence (opt1) from hemagglutinin__InfluenzaA__AEO01299

SEQ ID NO: 71417 - RNA, 1701 nt, Artificial Sequence; identical to SEQ ID NO: 66693
  derived and/or modified CDS sequence (opt1) from hemagglutinin__InfluenzaA__AEO01300

SEQ ID NO: 71418 - RNA, 1701 nt, Artificial Sequence; identical to SEQ ID NO: 66693
  derived and/or modified CDS sequence (opt1) from hemagglutinin__InfluenzaA__AEO01301

SEQ ID NO: 71419 - RNA, 1701 nt, Artificial Sequence; identical to SEQ ID NO: 66693
  derived and/or modified CDS sequence (opt1) from hemagglutinin__InfluenzaA__AEO01302

SEQ ID NO: 71420 - RNA, 1701 nt, Artificial Sequence; identical to SEQ ID NO: 68290
  derived and/or modified CDS sequence (opt1) from hemagglutinin__InfluenzaA__AEO01303

SEQ ID NO: 71421 - RNA, 1701 nt, Artificial Sequence
  derived and/or modified CDS sequence (opt1) from hemagglutinin__InfluenzaA__AEO01304
augaaggccauccuggugguccuccuguacaccuucgccaccgcgaacgccgacacgcugugcaucggcuaccacgccaacaacagcaccgacaccguggacaccgugcucgagaagaacgucacggugacccacuccgugaaccugcuggaggacaagcacaacgggaagcucugcaagcugcgcggcgucgcgccccugcaccucgggaagugcaacaucgccggcuggauccuggggaacccggagugcgagagccuguccaccgccagcuccuggagcuacaucguggagaccuccagcuccgacaacggcacgugcuaccccggcgacuucaucgacuacgaggagcuccgggagcagcugagcuccgugagcuccuucgagcgcuucgagaucuuccccaaggccagcuccuggcccaaccacgacagcaacaagggggucaccgccgccugcccgcacgcgggcgccaaguccuucuacaagaaccugaucuggcucgugaagaaggggaacagcuaccccaagcuguccaagagcuacaucaacgacaagggcaagggggugcugguccucuggggcauccaccaccccagcaccuccgccgaccagcagagccuguaccagaacgccgacgccuacguguucgugggcaccucccgguacagcaagaaguucaagcccgagaucgcgauccgcccgaagguccgggaccaggaggggcgcaugaacuacuacuggacgcugguggagcccggcgacaagaucaccuucgaggccaccgggaaccucguggucccccgguacgccuucgccauggagcgcaacgccggcuccggcaucaucaucagcgacacccccgugcacgacugcaacacgaccugccagaccccgaagggggcgaucaacaccucccugcccuuccagaacauccaccccaucacgaucggcaagugccccaaguacgucaagagcaccaagcugcggcucgccaccgggcugcgcaacgugccguccauccagagccggggccuguucggggccaucgccggcuucaucgagggcggguggaccggcaugguggacgggugguacggcuaccaccaccagaacgagcagggguccggcuacgccgcggaccucaagagcacgcagaacgccaucgacgagaucaccaacaaggugaacuccgucaucgagaagaugaacacccaguucaccgccgugggcaaggaguucaaccaccuggagaagcgcaucgagaaccugaacaagaaggucgacgacggguuccucgacaucuggacguacaacgccgagcugcuggugcuccuggagaacgagcggacccuggacuaccacgacagcaacgugaagaaccucuacgagaagguccgcucccagcugaagaacaacgccaaggagaucggcaacgggugcuucgaguucuaccacaagugcgacaacacgugcauggagagcgugaagaacggcaccuacgacuaccccaaguacuccgaggaggcgaagcugaaccgggaggagaucgacggggugaagcucgagagcacccgcaucuaccagauccuggccaucuacuccaccgucgccagcagccuggugcucguggucucccugggcgccaucagcuucuggaugugcuccaacggcagccugcagugccggaucugcaucuga

SEQ ID NO: 71422 - RNA, 1701 nt, Artificial Sequence
  derived and/or modified CDS sequence (opt1) from hemagglutinin__InfluenzaA__AEO01305
augaaggccauccuggugguccuccuguacaccuucgccaccgcgagcgccgacacgcugugcaucggcuaccacgccaacaacuccaccgacaccguggacaccgugcucgagaagaacgucacggugacccacagcgugaaccugcuggaggacaagcacaacgggaagcucugcaagcugcgcggcgucgcgccccugcaccucgggaagugcaacaucgccggcuggauccuggggaacccggagugcgagucccugagcaccgcguccagcugguccuacaucguggagaccagcuccagcgacaacggcacgugcuaccccggcgacuucaucgacuacgaggagcuccgggagcagcuguccagcguguccagcuucgagcgcuucgagaucuuccccaagaccuccagcuggcccaaccacgacuccaacaagggggucaccgccgccugcccgcacgccggcgccaagagcuucuacaagaaccugaucuggcucgugaagaaggggaacuccuaccccaagcugagcaagagcuacaucaacgacaagggcaaggaggugcugguccucugggggauccaccaccccuccaccagcgccgaccagcagucccuguaccagaacgccgacgccuacguguucgugggcacgagccgguacuccaagaaguucaagcccgagaucgccauccgcccgaagguccgggaccaggagggccgcaugaacuacuacuggacccugguggagcccggggacaagaucaccuucgaggcgaccggcaaccucguggucccccgguacgccuucgccauggagcgcaacgccgggagcggcaucaucaucuccgacacgcccgugcacgacugcaacacgaccugccagaccccgaagggcgccaucaacaccagccugcccuuccagaacauccaccccaucaccaucgggaagugccccaaguacgugaaguccaccaagcugcggcucgcgaccggccugcgcaacgucccgagcauccagucccgggggcuguucggcgccaucgccggguucaucgagggcggcuggacggggaugguggacggcugguacggguaccaccaccagaacgagcagggcagcggguacgccgccgaccucaaguccacccagaacgcgaucgacgagaucaccaacaaggugaacagcgucaucgagaagaugaacacccaguucacggccgugggcaaggaguucaaccaccuggagaagcgcaucgagaaccugaacaagaaggucgacgacggcuuccucgacaucuggaccuacaacgccgagcugcuggugcuccuggagaacgagcggacccuggacuaccacgacuccaacgugaagaaccucuacgagaagguccgcagccagcugaagaacaacgccaaggagaucgggaacggcugcuucgaguucuaccacaagugcgacaacacgugcauggaguccgugaagaacgggaccuacgacuaccccaaguacagcgaggaggccaagcugaaccgggaggagaucgacggcgugaagcucgaguccacccgcaucuaccagauccuggcgaucuacagcaccgucgccagcucccuggugcucguggucagccugggggccaucuccuucuggaugugcagcaacggcucccugcagugccggaucugcaucuga

SEQ ID NO: 71423 - RNA, 1701 nt, Artificial Sequence; identical to SEQ ID NO: 66693
  derived and/or modified CDS sequence (opt1) from hemagglutinin__InfluenzaA__AEO01306

SEQ ID NO: 71424 - RNA, 1701 nt, Artificial Sequence; identical to SEQ ID NO: 66693
  derived and/or modified CDS sequence (opt1) from hemagglutinin__InfluenzaA__AEO01307

SEQ ID NO: 71425 - RNA, 1701 nt, Artificial Sequence; identical to SEQ ID NO: 66693
  derived and/or modified CDS sequence (opt1) from hemagglutinin__InfluenzaA__AEO01308

SEQ ID NO: 71426 - RNA, 1701 nt, Artificial Sequence
  derived and/or modified CDS sequence (opt1) from hemagglutinin__InfluenzaA__AEO01309
augaaggccauccuggugguccuccuguacaccuucgccaucgcgaacgccgacacccugugcaucggcuaccacgccaacaacagcacggacaccguggacaccgugcucgagaagaacgucaccgugacgcacuccgugaaccugcuggaggacaagcacaacgggaagcucugcaagcugcgcggcgucgcgccccugcaccucgggaagugcaacaucgccggcuggauccuggggaacccggagugcgagagccuguccaccgccagcuccuggagcuacaucguggagaccuccagcuccgacaacgggaccugcuaccccggcgacuucaucgacuacgaggagcuccgggagcagcugagcuccgugagcuccuucgagcgcuucgagaucuuccccaagacgagcuccuggcccaaccacgacagcaacaagggcgucaccgccgccugcccgcacgccggcgcgaaguccuucuacaagaaccugaucuggcucgugaagaaggggaacagcuaccccaagcuguccaagagcuacaucaacgacaagggcaaggaggugcugguccucugggggauccaccaccccagcaccuccgccgaccagcagagccuguaccagaacgccgacgccuacguguucgugggcaccucccgguacagcaagaaguucaagcccgagaucgccauccgcccgaagguccgggaccaggagggccgcaugaacuacuacuggacgcugguggagcccggggacaagaucaccuucgaggcgaccggcaaccucguggucccccgguacgccuucgccauggagcgcaacgccggguccggcaucaucaucagcgacacccccgugcacgacugcaacacgaccugccagaccccgaagggcgccaucaacaccucccugcccuuccagaacauccaccccaucacgaucgggaagugccccaaguacgucaagagcaccaagcugcggcucgcgaccggccugcgcaacgugccguccauccagagccgggggcuguucggcgccaucgccggguucaucgagggcggcuggaccgggaugguggacggcugguacggguaccaccaccagaacgagcagggcuccggguacgccgccgaccucaagagcacgcagcacgcgaucgacgagaucaccaacaaggugaacuccgucaucgagaagaugaacacccaguucaccgccgugggcaaggaguucaaccaccuggagaagcgcaucgagaaccugaacaagaaggucgacgacggcuuccucgacaucuggacguacaacgccgagcugcuggugcuccuggagaacgagcggacccuggacuaccacgacagcaacgugaagaaccucuacgagaagguccgcucccagcugaagaacaacgccaaggagaucgggaacggcugcuucgaguucuaccacaagugcgacaacacgugcauggagagcgugaagaacgggaccuacgacuaccccaaguacuccaaggaggccaagcugaaccgggaggagaucaacggcgugaagcucgagagcacccgcaucuaccagauccuggcgaucuacuccaccgucgccagcagccuggugcucguggucucccugggggccaucagcuucuggaugugcuccaacggcagccugcagugccggaucugcaucuga

SEQ ID NO: 71427 - RNA, 1701 nt, Artificial Sequence
  derived and/or modified CDS sequence (opt1) from hemagglutinin__InfluenzaA__AEO01310
augaaggccauccuggugguccuccuguacaccuucgccaccgcgaacgccgacacgcugugcaucggcuaccacgccaacaacagcaccgacaccguggacaccgugcucgagaagaacgucacggugacccacuccgugaaccugcuggaggacaagcacaacgggaagcucugcaagcugcgcggcgucgcgccccugcaccucgggaagugcaacaucgccggcuggauccuggggaacccggagugcgagagccuguccaccgccagcuccuggagcuacaucguggagaccuccagcuccgacaacggcacgugcuaccccggcgacuucaucgacuacgaggagcuccgggagcagcugagcuccgugagcuccuucgagcgcuucgagaucuuccccaagaccagcuccuggcccaaccacgacagcaacaagggggucaccgccgccugcccgcacgccggcgcgaaguccuucuacaagaaccugaucuggcucgugaagaaggggaacagcuaccccaagcuguccaagagcuacaucaacgaccggggcaaggaggugcugguccucugggggauccaccaccccagcaccuccgccgaccagcagagccuguaccagaacgccgacgccuacguguucgugggcacgucccgcuacagcaagaaguucaagcccgagaucgccauccggccgaagguccgcgaccaggagggccggaugaacuacuacuggacccugguggagcccggggacaagaucaccuucgaggcgaccggcaaccucguggucccccgcuacgccuucgccauggagcggaacgccggguccggcaucaucaucagcgacacgcccgugcacgacugcaacacgaccugccagaccccgaagggcgccaucaacaccucccugcccuuccagaacauccaccccaucaccaucgggaagugccccaaguacgucaagagcaccaagcugcgccucgcgaccggccugcggaacgugccguccauccagagccgcgggcuguucggcgccaucgccggguucaucgagggcggcuggacggggaugguggacggcugguacggguaccaccaccagaacgagcagggcuccggguacgccgccgaccucaagagcacccagaacgcgaucgacgagaucaccaacaaggugaacuccgucaucgagaagaugaacacccaguucacggccgugggcaaggaguucaaccaccuggagaagcggaucgagaaccugaacaagaaggucgacgacggcuuccucgacaucuggaccuacaacgccgagcugcuggugcuccuggagaacgagcgcacccuggacuaccacgacagcaacgugaagaaccucuacgagaagguccggucccagcugaagaacaacgccaaggagaucgggaacggcugcuucgaguucuaccacaagugcgacaacacgugcauggagagcgugaagaacgggaccuacgacuaccccaaguacuccgaggaggccaagcugaaccgcgaggagaucgacggcgugaagcucgagagcacccggaucuaccagauccuggcgaucuacuccaccgucgccagcagccuggugcucguggucucccugggggccaucagcuucuggaugugcuccaacggcagccugcagugccgcaucugcaucuga

SEQ ID NO: 71428 - RNA, 1701 nt, Artificial Sequence; identical to SEQ ID NO: 66693
  derived and/or modified CDS sequence (opt1) from hemagglutinin__InfluenzaA__AEO01311

SEQ ID NO: 71429 - RNA, 1701 nt, Artificial Sequence
  derived and/or modified CDS sequence (opt1) from hemagglutinin__InfluenzaA__AEO01312
augaaggccauccuggugguccuccuguacaccuucgccaccgcgaacgccgacacgcugugcaucggcuaccacgccaacaacagcaccgacaccguggacaccgugcucgagaagaacgucacggugacccacuccgugaaccugcuggaggacaagcacaacgggaagcucugcaagcugcgcggcgucgcgccccugcaccucgggaagugcaacaucgccggcuggauccuggggaacccggagugcgagagccuguccaccgccagcuccuggagcuacaucguggagaccuccagcuccgacaacggcacgugcuaccccggcgacuucaucgacuacgaggagcuccgggagcagcugagcuccgugagcuccuucgagcgcuucgagaucuuccccaagaccagcuccuggcccaaccacgacagcaacaagggggucaccgccgccugcccgcacgccggcgcgaaguccuucuacaagaaccugaucuggcucgugaagaaggggaacagcuaccccaagcuguccaagagcuacaucaacgacaagggcaaggaggugcugguccucugggggauccaccaccccagcaccuccgccgaccagcagagccuguaccagaacgccgacgccuacguguucgugggcacgucccgguacagcaagaaguucaagcccgagaucgccauccgcccgaagguccgggaccaggagggccgcaugaacuacuacuggacccugguggagcccggggacaagaucaccuucgaggcgaccggcaaccucguggucccccgguacgccuucgccauggagcgcaacgccggguccggcaucaucaucagcgacacgcccgugcacgacugcaacacgaccugccagaccccgaagggcgccaucaacaccucccugcccuuccagaacauccaccccaucaccaucgggaagugccccaaguacgucaagagcaccaagcugcggcucgcgaccggccugcgcaacgugccguccauccagagccgggggcuguucggcgccaucgccggguucaucgagggcggcuggacggggaucguggacggcugguacggguaccaccaccagaacgagcagggcuccggguacgccgccgaccucaagagcacccagaacgcgaucgacgagaucaccaacaaggugaacuccgucaucgagaagaugaacacccaguucacggccgugggcaaggaguucaaccaccuggagaagcgcaucgagaaccugaacaagaaggucgacgacggcuuccucgacaucuggaccuacaacgccgagcugcuggugcuccuggagaacgagcggacccuggacuaccacgacagcaacgugaagaaccucuacgagaagguccgcucccagcugaagaacaacgccaaggagaucgggaacggcugcuucgaguucuaccacaagugcgacaacacgugcauggagagcgugaagaacgggaccuacgacuaccccaaguacuccgaggaggccaagcugaaccgggaggagaucgacggcgugaagcucgagagcacccgcaucuaccagauccuggcgaucuacuccaccgucgccagcagccuggugcucguggucucccugggggccaucagcuucuggaugugcuccaacggcagccugcagugccggaucugcaucuga

SEQ ID NO: 71430 - RNA, 1701 nt, Artificial Sequence; identical to SEQ ID NO: 67046
  derived and/or modified CDS sequence (opt1) from hemagglutinin__InfluenzaA__AEO01313

SEQ ID NO: 71431 - RNA, 1701 nt, Artificial Sequence; identical to SEQ ID NO: 67857
  derived and/or modified CDS sequence (opt1) from hemagglutinin__InfluenzaA__AEO01314

SEQ ID NO: 71432 - RNA, 1701 nt, Artificial Sequence
  derived and/or modified CDS sequence (opt1) from hemagglutinin__InfluenzaA__AEO01315
augaaggccauccuggugguccuccuguacaccuucgccaccgcgaacgccgacacgcugugcaucggcuaccacgccaacaacagcaccgacaccguggacaccgugcucgagaagaacgucacggugacccacuccgugaaccugcuggaggacaagcacaaccgcaagcucugcaagcugcgcggggucgcgccccugcaccucggcaagugcaacaucgccggguggauccugggcaacccggagugcgagagccuguccaccgccagcuccuggagcuacaucguggagaccuccagcuccgacaacgggacgugcuaccccggcgacuucaucgacuacgaggagcuccgggagcagcugagcuccgugagcuccuucgagcgguucgagaucuuccccaagaccagcuccuggcccaaccacgacagcaacaagggcgucaccgccgccugcccgcacgccggggcgaaguccuucuacaagaaccugaucuggcucgugaagaagggcaacagcuaccccaagcuguccaagagcuacaucaacgacaaggggaaggaggugcugguccucuggggcauccaccaccccagcaccuccgccgaccagcagagccuguaccagaacgccgacgccuacguguucguggggacgucccgcuacagcaagaaguucaagcccgagaucgccauccggccgaagguccgcgaccaggagggccggaugaacuacuacuggacccugguggagcccggcgacaagaucaccuucgaggcgaccgggaaccucguggucccccgcuacgccuucgccauggagcggaacgccggcuccgggaucaucaucagcgacacgcccgugcacgacugcaacacgaccugccagaccccgaagggcgccaucaacaccucccugcccuuccagaacauccaccccaucaccaucggcaagugccccaaguacgucaagagcaccaagcugcgccucgcgaccgggcugcggaacgugccguccauccagagccgcggccuguucggggccaucgccggcuucaucgagggcggguggacgggcaugguggacgggugguacggcuaccaccaccagaacgagcagggguccggcuacgccgccgaccucaagagcacccagaacgcgaucgacgagaucaccaacaaggugaacuccgucaucgagaagaugaacacccaguucacggccguggggaaggaguucaaccaccuggagaagcggaucgagaaccugaacaagaaggucgacgacggcuuccucgacaucuggaccuacaacgccgagcugcuggugcuccuggagaacgagcgcacccuggacuaccacgacagcaacgugaagaaccucuacgagaagguccggucccagcugaagaacaacgccaaggagaucggcaacgggugcuucgaguucuaccacaagugcgacaacacgugcauggagagcgugaagaacggcaccuacgacuaccccaaguacuccgaggaggccaagcugaaccgcgaggagaucgacggggugaagcucgagagcacccggaucuaccagauccuggcgaucuacuccaccgucgccagcagccuggugcucguggucucccugggcgccaucagcuucuggaugugcuccaacgggagccugcagugccgcaucugcaucuga

SEQ ID NO: 71433 - RNA, 1701 nt, Artificial Sequence; identical to SEQ ID NO: 66693
  derived and/or modified CDS sequence (opt1) from hemagglutinin__InfluenzaA__AEO01316

SEQ ID NO: 71434 - RNA, 1701 nt, Artificial Sequence; identical to SEQ ID NO: 66693
  derived and/or modified CDS sequence (opt1) from hemagglutinin__InfluenzaA__AEO01317

SEQ ID NO: 71435 - RNA, 1701 nt, Artificial Sequence; identical to SEQ ID NO: 66693
  derived and/or modified CDS sequence (opt1) from hemagglutinin__InfluenzaA__AEO01318

SEQ ID NO: 71436 - RNA, 1701 nt, Artificial Sequence; identical to SEQ ID NO: 66693
  derived and/or modified CDS sequence (opt1) from hemagglutinin__InfluenzaA__AEO01319

SEQ ID NO: 71437 - RNA, 1701 nt, Artificial Sequence
  derived and/or modified CDS sequence (opt1) from hemagglutinin__InfluenzaA__AEO01321
augaaggccauccuggugguccuccuguacaccuucgccaccgcgaacgccgacacgcugugcaucggcuaccacgccaacaacagcaccgacaccguggacaccgugcucgagaagaacgucacggugacccacuccgugaacauccuggaggacaagcacaacgggaagcugugcaagcuccgcggcgucgcgccccugcaccuggggaagugcaacaucgccggcuggauccucgggaacccggagugcgagagccuguccaccgccagcuccuggagcuacaucguggagaccuccagcuccgacaacggcacgugcuaccccggcgacuucaucgacuacgaggagcugcgggagcagcucagcuccgugagcuccuucgagcgcuucgagaucuuccccaagaccagcuccuggcccaaccacgacagcaacaagggggucaccgccgccugcccgcacgccggcgcgaaguccuucuacaagaaccugaucuggcuggugaagaaggggaacagcuaccccaagcucuccaagagcuacaucaacgacaagggcaaggaggugcugguccugugggggauccaccaccccagcaccuccgccgaccagcagagccucuaccagaacgccgacgccuacguguucgugggcacgucccgguacagcaagaaguucaagcccgagaucgccauccgcccgaagguccgggaccaggagggccgcaugaacuacuacuggacccugguggagcccggggacaagaucaccuucgaggcgaccggcaaccugguggucccccgguacgccuucgccauggagcgcaacgccggguccggcaucaucaucagcgacacgcccgugcacgacugcaacacgaccugccagaccccgaagggcgccaucaacaccucccuccccuuccagaacauccaccccaucaccaucgggaagugccccaaguacgucaagagcaccaagcugcggcuggcgaccggccuccgcaacgugccguccauccagagccgggggcuguucggcgccaucgccggguucaucgagggcggcuggacggggaugguggacggcugguacggguaccaccaccagaacgagcagggcuccggguacgccgccgaccucaagagcacccagaacgcgaucgacgagaucaccaacaaggugaacuccgucaucgagaagaugaacacccaguucacggccgugggcaaggaguucaaccaccuggagaagcgcaucgagaaccugaacaagaaggucgacgacggcuuccuggacaucuggaccuacaacgccgagcuccuggcccugcucgagaacgagcggacccuggacuaccacgacagcaacgugaagaaccuguacgagaaggugcgcucccagcucaagaacaacgccaaggagaucgggaacggcugcuucgaguucuaccacaagugcgacaacacgugcauggagagcgucaagaacgggaccuacgacuaccccaaguacuccgaggaggcgaagcugaaccgggaggagaucgacggcgugaagcuggagagcacccgcaucuaccagauccucgccaucuacuccaccguggccagcagccugguccugguggugucccucggggccaucagcuucuggaugugcuccaacggcagccugcagugccggaucugcaucuga

SEQ ID NO: 71438 - RNA, 1701 nt, Artificial Sequence; identical to SEQ ID NO: 66693
  derived and/or modified CDS sequence (opt1) from hemagglutinin__InfluenzaA__AEO01322

SEQ ID NO: 71439 - RNA, 1701 nt, Artificial Sequence; identical to SEQ ID NO: 68375
  derived and/or modified CDS sequence (opt1) from hemagglutinin__InfluenzaA__AEO01323

SEQ ID NO: 71440 - RNA, 1701 nt, Artificial Sequence; identical to SEQ ID NO: 68290
  derived and/or modified CDS sequence (opt1) from hemagglutinin__InfluenzaA__AEO01324

SEQ ID NO: 71441 - RNA, 1701 nt, Artificial Sequence; identical to SEQ ID NO: 66693
  derived and/or modified CDS sequence (opt1) from hemagglutinin__InfluenzaA__AEO01325

SEQ ID NO: 71442 - RNA, 1701 nt, Artificial Sequence
  derived and/or modified CDS sequence (opt1) from hemagglutinin__InfluenzaA__AEO01326
augaaggccauccuggugguccuccuguacaccuucgccaccgcgaacgccgacacgcugugcaucggcuaccacgccaacaacagcaccgacaccguggacaccgugcucgagaagaacgucacggugacccacuccgugaaccugcuggaggacaagcacaacgggaagcucugcaagcugcgcggcgucgcgccccugcaccucgggaagugcaacaucgccggcuggauccuggggaacccggagugcgagagccuguccaccgccagcuccuggagcuacaucguggagaccuccagcuccgacaacggcacgugcuaccccggcgacuucaucgacuacgaggagcuccgggagcagcugagcuccgugagcuccuucgagcgcuucgagaucuuccccaagaccagcuccuggcccaaccacgacagcaacaagggggucaccgccgccugcccgcacgccggcgcgaaguccuucuacaagaaccugaucuggcucgugaagaaggggaacagcuaccccaagcuguccaagagcuacaucaacgacaagggcaaggaggugcugguccucugggggauccaccaccccagcaccuccgccgaccagcagagccuguaccaggacgccgacgccuacguguucgugggcacgucccgguacagcaagaaguucaagcccgagaucgccauccgcccgaagguccgggaccaggagggccgcaugaacuacuacuggacccugguggagcccggggacaagaucaccuucgaggcgaccggcaaccucguggucccccgguacgccuucgccauggagcgcaacgccggguccggcaucaucaucagcgacacgcccgugcacgacugcaacacgaccugccagaccccgaagggcgccaucaacaccucccugcccuuccagaacauccaccccaucaccaucgggaagugccccaaguacgucaagagcaccaagcugcggcucgcgaccggccugcgcaacgugccguccauccagagccgggggcuguucggcgccaucgccggguucaucgagggcggcuggacggggaugguggacggcugguacggguaccaccaccagaacgagcagggcuccggguacgccgccgaccucaagagcacccagaacgcgaucgacgagaucaccaacaaggugaacuccgucaucgagaagaugaacacccaguucacggccgugggcaaggaguucaaccaccuggagaagcgcaucgagaaccugaacaagaaggucgacgacggcuuccucgacaucuggaccuacaacgccgagcugcuggugcuccuggagaacgagcggacccuggacuaccacgacagcaacgugaagaaccucuacgagaagguccgcucccagcugaagaacaacgccaaggagaucgggaacggcugcuucgaguucuaccacaagugcgacaacacgugcauggagagcgugaagaacgggaccuacgacuaccccaaguacuccgaggaggccaagcugaaccgggaggagaucgacggcgugaagcucgagagcacccgcaucuaccagauccuggcgaucuacuccaccgucgccagcagccuggugcucguggucucccugggggccaucagcuucuggaugugcuccaacggcagccugcagugccggaucugcaucuga

SEQ ID NO: 71443 - RNA, 1701 nt, Artificial Sequence; identical to SEQ ID NO: 66693
  derived and/or modified CDS sequence (opt1) from hemagglutinin__InfluenzaA__AEO01327

SEQ ID NO: 71444 - RNA, 1701 nt, Artificial Sequence; identical to SEQ ID NO: 71402
  derived and/or modified CDS sequence (opt1) from hemagglutinin__InfluenzaA__AEO01328

SEQ ID NO: 71445 - RNA, 1701 nt, Artificial Sequence; identical to SEQ ID NO: 66693
  derived and/or modified CDS sequence (opt1) from hemagglutinin__InfluenzaA__AEO01330

SEQ ID NO: 71446 - RNA, 1701 nt, Artificial Sequence
  derived and/or modified CDS sequence (opt1) from hemagglutinin__InfluenzaA__AEO01331
augaaggccauccuggugguccuccuguacaccuucgccaccgcgaacgccgacacgcugugcaucggcuaccacgccaacaacagcaccgacaccguggacacccuccuggagaagaacgugacggucacccacuccgugaaccugcucgaggacaagcacaacgggaagcugugcaagcugcgcggcguggcgccccuccaccuggggaagugcaacaucgccggcuggauccuggggaacccggagugcgagagccucuccaccgccagcuccuggagcuacaucgucgagaccuccagcuccgacaacggcacgugcuaccccggcgacuucaucgacuacgaggagcugcgggagcagcugagcuccgugagcuccuucgagcgcuucgagaucuuccccaagaccagcuccuggcccaaccacgacagcaacaagggggugaccgccgccugcccgcacgccggcgcgaaguccuucuacaagaaccucaucuggcuggucaagaaggggaacagcuaccccaagcuguccaagagcuacaucaacgacaagggcaaggaggugcucgugcugugggggauccaccaccccagcaccuccgccgaccagcagagccuguaccagaacgccgacgccuacgucuucgugggcacgucccgguacagcaagaaguucaagcccgagaucgccauccgcccgaaggugcgggaccaggagggccgcaugaacuacuacuggacccucgucgagcccggggacaagaucaccuucgaggcgaccggcaaccugguggugccccgguacgccuucgccauggagcgcaacgccggguccggcaucaucaucagcgacacgcccguccacgacugcaacacgaccugccagaccccgaagggcgccaucaacaccucccugcccuuccagaacauccaccccaucaccaucgggaagugccccaaguacgucaagagcaccaagcuccggcuggcgaccggccugcgcaacgugccguccauccagagccgggggcuguucggcgccaucgccggguucaucgagggcggcuggacggggaugguggacggcugguacggguaccaccaccagaacgagcagggcuccggguacgccgccgaccucaagagcacccagaacgcgaucgacgagaucaccaacaaggugaacuccgugaucgagaagaugaacacccaguucacggccgucggcaaggaguucaaccaccuggagaagcgcaucgagaaccucaacaagaagguggacgacggcuuccuggacaucuggaccuacaacgccgagcugcucguccugcuggagaacgagcggacccucgacuaccacgacagcaacgugaagaaccuguacgagaaggugcgcucccagcugaagaacaacgccaaggagaucgggaacggcugcuucgaguucuaccacaagugcgacaacacgugcauggagagcgucaagaacgggaccuacgacuaccccaaguacuccgaggaggccaagcucaaccgggaggagaucgacggcgugaagcuggagagcacccgcaucuaccagauccuggcgaucuacuccaccguggccagcagccucguccugguggugucccugggggccaucagcuucuggaugugcuccaacggcagccuccagugccggaucugcaucuga

SEQ ID NO: 71447 - RNA, 1701 nt, Artificial Sequence
  derived and/or modified CDS sequence (opt1) from hemagglutinin__InfluenzaA__AEO01332
augaaggccauccuggugguccuccuguacaccuucgccaccgcgaacgccgacacgcugugcaucggcuaccacgccaacaacagcaccgacaccguggacaccgugcucgagaagaacgucacggugacccacuccgugaaccugcuggaggacaagcacaacgggaagcucugcaagcugcgcggcgucgcgccccugcaccucgggaagugcaacaucgccggcuggauccuggggaacccggagugcgagagccuguccaccgccagcuccuggagcuacaucguggagaccuccagcuccgacaacggcacgugcuaccccggcgacuucaucgacuacgaggagcuccgggagcagcugagcuccgugagcuccuucgagcgcuucgagaucuuccccaagaccagcuccuggcccaaccacgacagcaacaagggggucaccgccgccugcccgcacgccggcgcgaaguccuucuacaagaaccugaucuggcucgugaagaaggggaacagcuaccccaagcuguccaagagcuacaucaacgacaagggcaaggaggugcugguccucugggggauccaccaccccagcaccuccgccgaccagcagagccuguaccagaacgccgacgccuacguguucgugggccugucccgguacagcaagaaguucaagcccgagaucgccauccgcccgaagguccgggagcaggagggccgcaugaacuacuacuggacgcucguggagcccggggacaagaucaccuucgaggcgaccggcaaccugguggucccccgguacgccuucgccauggagcgcaacgccggguccggcaucgugaucagcgacacccccgugcacgacugcaacacgaccugccagaccccgaagggcgccaucaacaccucccugcccuuccagaacauccaccccaucacgaucgggaagugccccaaguacgucaagagcaccaagcuccggcuggcgaccggccugcgcaacgugccguccauccagagccgggggcuguucggcgccaucgccggguucaucgagggcggcuggaccgggaugguggacggcugguacggguaccaccaccagaacgagcagggcuccggguacgccgccgaccucaagagcacgcagaacgcgaucgacgagaucaccaacaaggucaacuccgugaucgagaagaugaacacccaguucaccgccgucggcaaggaguucaaccaccuggagaagcgcauggagaaccucaacaagaagguggacgacggcuuccuggacaucuggacguacaacgccgagcugcucgugcugcuggagaacgagcggacccucgacuaccacgacagcaacgucaagaaccuguacgagaaggugcgcucccagcugaagaccaacgccaaggagaucgggaacggcugcuucgaguucuaccacaagugcgacaacacgugcauggagagcgugaagaacgggaccuacgacuaccccaaguacuccgaggaggccaagcucaaccgggaggagaucgacggcgucaagcuggagagcacccgcaucuaccagauccuggcgaucuacuccaccguggccagcagccucgugcuggucgugucccugggggccaucagcuucuggaugugcuccaacggcagccuccagugccggaucugcaucuga

SEQ ID NO: 71448 - RNA, 1701 nt, Artificial Sequence; identical to SEQ ID NO: 68861
  derived and/or modified CDS sequence (opt1) from hemagglutinin__InfluenzaA__AEO01333

SEQ ID NO: 71449 - RNA, 1701 nt, Artificial Sequence
  derived and/or modified CDS sequence (opt1) from hemagglutinin__InfluenzaA__AEO01334
augaaggccauccuggugguccuccuguacaccuucgccaccgcgaacgccgacacgcugugcaucggcuaccacgccaacaacagcaccgacaccguggacaccauccucgagaagaacgugacggucacccacuccgugaaccugcuggaggacaagcacaacgggaagcucugcaagcugcgcggcguggcgccccugcaccucgggaagugcaacaucgccggcuggauccuggggaacccggagugcgagagccuguccaccgccagcuccuggagcuacaucgucgagaccuccagcuccgacaacggcacgugcuaccccggcgacuucaucgacuacgaggagcuccgggagcagcugagcuccgugagcuccuucgagcgcuucgagaucuuccccaagaccagcuccuggcccaaccacgacagcaacaagggggugaccgccgccugcccgcacgccggcgcgaaguccuucuacaagaaccugaucuggcucgucaagaaggggaacagcuaccccaagcuguccaagagcuacaucaacgacaagggcaaggaggugcuggugcucugggggauccaccaccccagcaccuccgccgaccagcagagccuguaccagaacgccgacgccuacgucuucgugggcacgucccgguacagcaagaaguucaagcccgagaucgccauccgcccgaaggugcgggaccaggagggccgcaugaacuacuacuggacccuggucgagcccggggacaagaucaccuucgaggcgaccggcaaccucguggugccccgguacgccuucgccauggagcgcaacgccggguccggcaucaucaucagcgacacgcccguccacgacugcaacacgaccugccagaccccgaagggcgccaucaacaccucccugcccuuccagaacauccaccccaucaccaucgggaagugccccaaguacgucaagagcaccaagcugcggcucgcgaccggccugcgcaacgugccguccauccagagccgggggcuguucggcgccaucgccggguucaucgagggcggcuggacggggaugguggacggcugguacggguaccaccaccagaacgagcagggcuccggguacgccgccgaccucaagagcacccagaacgcgaucgacgagaucaccaacaaggugaacuccgugaucgagaagaugaacacccaguucacggccgucggcaaggaguucaaccaccuggagaagcgcaucgagaaccugaacaagaagguggacgacggcuuccucgacaucuggaccuacaacgccgagcugcugguccuccuggagaacgagcggacccuggacuaccacgacagcaacgugaagaaccucuacgagaaggugcgcucccagcugaagaacaacgccaaggagaucgggaacggcugcuucgaguucuaccacaagugcgacaacacgugcauggagagcgucaagaacgggaccuacgacuaccccaaguacuccgaggaggccaagcugaaccgggaggagaucgacggcgugaagcucgagagcacccgcaucuaccagauccuggcgaucuacuccaccguggccagcagccugguccucguggugucccugggggccaucagcuucuggaugugcuccaacggcagccugcagugccggaucugcaucuga

SEQ ID NO: 71450 - RNA, 1701 nt, Artificial Sequence; identical to SEQ ID NO: 68290
  derived and/or modified CDS sequence (opt1) from hemagglutinin__InfluenzaA__AEO01335

SEQ ID NO: 71451 - RNA, 1701 nt, Artificial Sequence
  derived and/or modified CDS sequence (opt1) from hemagglutinin__InfluenzaA__AEO01336
augaaggccauccuggugguccuccuguacaccuucgccaccgcgaacgccgacacgcugugcaucggcuaccacgccaacaacagcaccgacaccguggacaccgugcucgagaagaacgucacggugacccacuccgugaaccugcuggaggacaagcacaacgggaagcucugcaagcugcgcggcgucgcgccccugcaccucgggaagugcaacaucgccggcuggauccuggggaacccggagugcgagagccuguccaccgccagcuccuggagcuacaucguggagaccuccagcuccgacaacggcacgugcuaccccggcgacuucaucgacuacgaggagcuccgggagcagcugagcuccgugagcuccuucgagcgcuucgagaucuuccccaagaccagcuccuggcccaaccacgacagcaacaagggggucaccgccgccugcccgcacgccggcgcgaaguccuucuacaagaaccugaucuggcucgugaagaaggggaacagcuaccccaagcugaacaaguccuacaucaacgacaagggcaaggaggugcugguccucugggggauccaccaccccagcaccagcgccgaccagcagucccuguaccagaacgccgacgccuacguguucgugggcacgagccgguacuccaagaaguucaagcccgagaucgccauccgcccgaagguccgggaccaggagggccgcaugaacuacuacuggacccugguggagcccggggacaagaucaccuucgaggcgaccggcaaccucguggucccccgguacgccuucgccauggagcgcaacgccgggagcggcaucaucaucuccgacacgcccgugcacgacugcaacacgaccugccagaccccgaagggcgccaucaacaccagccugcccuuccagaacauccaccccaucaccaucggggagugccccaaguacgugaaguccaccaagcugcggcucgcgaccggccugcgcaacgucccgagcauccagucccgggggcuguucggcgccaucgccggguucaucgagggcggcuggacggggaugguggacggcugguacggguaccaccaccagaacgagcagggcagcggguacgccgccgaccucaaguccacccagaacgcgaucgacaagaucaccaacaaggugaacagcgucaucgagaagaugaacacccaguucacggccgugggcaaggaguucaaccaccuggagaagcgcaucgagaaccugaacaagaaggucgacgacggcuuccucgacaucuggaccuacaacgccgagcugcuggugcuccuggagaacgagcggacccuggacuaccacgacuccaacgugaagaaccucuacgagaagguccgcagccagcugaagaacaacgccaaggagaucgggaacggcugcuucgaguucuaccacaagugcgacaacacgugcauggaguccgugaagaacgggaccuacgacuaccccaaguacagcgaggaggccaagcugaaccgggaggagaucgacggcgugaagcucgaguccacccgcaucuaccagauccuggcgaucuacagcaccgucgccuccagccuggugcucguggucagccugggggccaucuccuucuggaugugcagcaacggcucccugcagugccggaucugcaucuga

SEQ ID NO: 71452 - RNA, 1701 nt, Artificial Sequence
  derived and/or modified CDS sequence (opt1) from hemagglutinin__InfluenzaA__AEO01337
augaaggccauccuggugguccuccuguacaccuucgccaccgcgaacgccgacacgcugugcaucggcuaccacgccaacaacagcaccgacaccguggacaccgugcucgagaagaacgucacggugacccacuccgugaaccugcuggaggacaagcacaacgggaagcucugcaagcugcgcggcgucgcgccccugcaccucgggaagugcaacaucgccggcuggauccuggggaacccggagugcgagagccuguccaccgccagcuccuggagcuacaucguggagaccuccagcuccgacaacggcacgugcuaccccggcgacuucaucgacuacgaggagcuccgggagcagcugagcuccgugagcuccuucgagcgcuucgagaucuuccccaagaccagcuccuggcccaaccacgacagcaacaagggggucaccgccgccugcccgcacgccggcgcgaaguccuucuacaagaaccugaucuggcucgugaagaaggggaacagcuaccccaagcuguccaagagcuacaucaacgacaagggcaaggaggugcugguccucugggggauccaccaccccagcaccuccgccgaccagcagagccuguaccagaacgccgacgccuacguguucgugggcacgucccgguacagcaagaaguucaagcccgagaucgccauccgcccgaagguccgggaccaggagggccgcaugaacuaccacuggacccugguggagcccggggacaagaucaccuucgaggcgaccggcaaccucguggucccccgguacgccuucgccauggagcgcaacgccggguccggcaucaucaucagcgacacgcccgugcacgacugcaacacgaccugccagaccccgaagggcgccaucaacaccucccugcccuuccagaacauccaccccaucaccaucgggaagugccccaaguacgucaagagcaccaagcugcggcucgcgaccggccugcgcaacgugccguccauccagagccgggggcuguucggcgccaucgccggguucaucgagggcggcuggacggggaugguggacggcugguacggguaccaccaccagaacgagcagggcuccggguacgccgccgaccucaagagcacccagcacgcgaucgacgagaucaccaacaaggugaacuccgucaucgagaagaugaacacccaguucacggccgugggcaaggaguucaaccaccuggagaagcgcaucgagaaccugaacaagaaggucgacgacggcuuccucgacaucuggaccuacaacgccgagcugcuggugcuccuggagaacgagcggacccuggacuaccacgacagcaacgugaagaaccucuacgagaagguccgcucccagcugaagaacaacgccaaggagaucgggaacggcugcuucgaguucuaccacaagugcgacaacacgugcauggagagcgugaagaacgggaccuacgacuaccccaaguacuccgaggaggccaagcugaaccgggaggagaucgacggcgugaagcucgagagcacccgcaucuaccagauccuggcgaucuacuccaccgucgccagcagccuggugcucguggucucccugggggccaucagcuucuggaugugcuccaacggcagccugcagugccggaucugcaucuga

SEQ ID NO: 71453 - RNA, 1701 nt, Artificial Sequence; identical to SEQ ID NO: 66693
  derived and/or modified CDS sequence (opt1) from hemagglutinin__InfluenzaA__AEO01338

SEQ ID NO: 71454 - RNA, 1701 nt, Artificial Sequence; identical to SEQ ID NO: 70565
  derived and/or modified CDS sequence (opt1) from hemagglutinin__InfluenzaA__AEO01339

SEQ ID NO: 71455 - RNA, 1701 nt, Artificial Sequence; identical to SEQ ID NO: 71411
  derived and/or modified CDS sequence (opt1) from hemagglutinin__InfluenzaA__AEO01340

SEQ ID NO: 71456 - RNA, 1701 nt, Artificial Sequence; identical to SEQ ID NO: 71411
  derived and/or modified CDS sequence (opt1) from hemagglutinin__InfluenzaA__AEO01341

SEQ ID NO: 71457 - RNA, 1701 nt, Artificial Sequence; identical to SEQ ID NO: 66693
  derived and/or modified CDS sequence (opt1) from hemagglutinin__InfluenzaA__AEO01342

SEQ ID NO: 71458 - RNA, 1701 nt, Artificial Sequence
  derived and/or modified CDS sequence (opt1) from hemagglutinin__InfluenzaA__AEO01343
augaaggccauccuggugguccuccuguacaccuucgccaccgcgaacgccgacacgcugugcaucggcuaccacgccaacaacagcaccgacaccguggacaccgugcucgagaagaacgucacggugacccacuccgugaaccugcuggaggacaagcacaacgggaagcucugcaagcugcgcggcgucgcgccccugcaccucgggaagugcaacaucgccggcuggauccuggggaacccggagugcgagagccuguccaccgcgagcuccuggagcuacaucguggagaccuccaacagcgacaacggcacgugcuaccccggcgacuucaucgacuacgaggagcuccgggagcagcuguccagcguguccagcuucgagcgcuucgagaucuuccccaagaccuccagcuggcccaaccacgacuccaacaagggggucaccgccgccugcccgcacgccggcgccaagagcuucuacaagaaccugaucuggcucgugaagaaggggaacuccuaccccaagcugagcaaguccuacaucaacgacaagggcaaggaggugcugguccucugggggauccaccaccccagcaccagcgccgaccagcagucccuguaccagaacgccgacgccuacguguucgugggcacgagccgguacuccaagaaguucaagcccgagaucgccauccgcccgaagguccgggaccaggagggccgcaugaacuacuacuggacccugguggagcccggggacaagaucaccuucgaggcgaccggcaaccucguggucccccgguacgccuucgccauggagcgcaacgccgggagcggcaucaucaucuccgacacgcccgugcacgacugcaacacgaccugccagaccccgaagggcgccaucaacaccagccugcccuuccagaacauccaccccaucaccaucgggaagugccccaaguacgugaaguccaccaagcugcggcucgcgaccggccugcgcaacgucccgagcauccagucccgggggcuguucggcgccaucgccggguucaucgagggcggcuggacggggaugguggacggcugguacggguaccaccaccagaacgagcagggcagcggguacgccgccgaccucaaguccacccagaacgcgaucgacaagaucaccaacaaggugaacagcgucaucgagaagaugaacacccaguucacggccgugggcaaggaguucaaccaccuggagaagcgcaucgagaaccugaacaagaaggucgacgacggcuuccucgacaucuggaccuacaacgccgagcugcuggugcuccuggagaacgagcggacccuggacuaccacgacuccaacgugaagaaccucuacgagaagguccgcagccagcugaagaacaacgccaaggagaucgggaacggcugcuucgaguucuaccacaagugcgacaacacgugcauggaguccgugaagaacgggaccuacgacuaccccaaguacagcgaggaggccaagcugaaccgggaggagaucgacggcgugaagcucgaguccacccgcaucuaccagauccuggcgaucuacagcaccgucgccuccagccuggugcucguggucagccugggggccaucuccuucuggaugugcagcaacggcucccugcagugccggaucugcaucuga

SEQ ID NO: 71459 - RNA, 1701 nt, Artificial Sequence
  derived and/or modified CDS sequence (opt1) from hemagglutinin__InfluenzaA__AEO01344
augaaggccauccuggugguccuccuguacaccuucgccaccgcgaacgccgacacgcugugcaucggcuaccacgccaacaacagcaccgacaccguggacaccgugcucgagaagaacgucacggugacccacuccgugaacauccuggaggacaagcacaacgggaagcugugcaagcuccgcggcgucgcgccccugcaccuggggaagugcaacaucgccggcuggauccucgggaacccggagugcgagagccuguccaccgccagcuccuggagcuacaucguggagaccuccagcuccgacaacggcacgugcuaccccggcgacuucaucgacuacgaggagcugcgggagcagcucagcuccgugagcuccuucgagcgcuucgagaucuuccccaagaccagcuccuggcccaaccacgacagcaacaagggggucaccgccgccugcccgcacgccggcgcgaaguccuucuacaagaaccugaucuggcuggugaagaaggggaacagcuaccccaagcucuccaagagcuacaucaacgacaagggcaaggaggugcugguccugugggggauccaccaccccagcaccuccgccgaccagcagagccucuaccagaacgccgacgccuacguguucgugggcacguccaaguacagcaagaaguucaagcccgagaucgccauccggccgaagguccgcgaccaggagggccggaugaacuacuacuggacccugguggagcccggggacaagaucaccuucgaggcgaccggcaaccugguggucccccgcuacgccuucgccauggagcggaacgccggguccggcaucaucaucagcgacacgcccgugcacgacugcaacacgaccugccagaccccgaagggcgccaucaacaccucccuccccuuccagaacauccaccccaucaccaucgggaagugccccaaguacgucaagagcaccaagcugcgccuggcgaccggccuccggaacgugccguccauccagagccgcgggcuguucggcgccaucgccggguucaucgagggcggcuggacggggaugguggacggcugguacggguaccaccaccagaacgagcagggcuccggguacgccgccgaccucaagagcacccagaacgcgaucgacgagaucaccaacaaggugaacuccgucaucgagaagaugaacacccaguucacggccgugggcaaggaguucaaccaccuggagaagcggaucgagaaccugaacaagaaggucgacgacggcuuccuggacaucuggaccuacaacgccgagcuccuggugcugcucgagaacgagcgcacccuggacuaccacgacagcaacgugaagaaccuguacgagaagguccggucccagcucaagaacaacgccaaggagaucgggaacggcugcuucgaguucuaccacaagugcgacaacacgugcauggagagcgugaagaacgggaccuacgacuaccccaaguacuccgaggaggccaagcugaaccgcgaggagaucgacggcgugaagcuggagagcacccggaucuaccagauccucgcgaucuacuccaccgucgccagcagccuggugcugguggucucccucggggccaucagcuucuggaugugcuccaacggcagccugcagugccgcaucugcaucuga

SEQ ID NO: 71460 - RNA, 1701 nt, Artificial Sequence; identical to SEQ ID NO: 70565
  derived and/or modified CDS sequence (opt1) from hemagglutinin__InfluenzaA__AEO01345

SEQ ID NO: 71461 - RNA, 1701 nt, Artificial Sequence; identical to SEQ ID NO: 66693
  derived and/or modified CDS sequence (opt1) from hemagglutinin__InfluenzaA__AEO01346

SEQ ID NO: 71462 - RNA, 1701 nt, Artificial Sequence
  derived and/or modified CDS sequence (opt1) from hemagglutinin__InfluenzaA__AEO01347
augaaggccauccuggugguccuccuguacaccuucgccaccgcgaacgccgacacgcugugcaucggcuaccacgccaacaacagcaccgacaccguggacaccgugcucgagaagaacgucacggugacccacuccgugaaccugcuggaggacaagcacaacgggaagcucugcaagcugcgcggcgucgcgccccugcaccucgggaagugcaacaucgccggcuggauccuggggaacccggagugcgagagccuguccaccgccagcuccuggagcuacaucguggagaccuccagcuccgacaacggcacgugcuaccccggcgacuucaucgacuacgaggagcuccgggagcagcugagcuccgugagcuccuucgagcgcuucgagaucuuccccaagaccagcuccuggcccaaccacgacagcaacaagggggucaccgccgccugcccgcacgccggcgcgaaguccuucuacaagaaccugaucuggcucgugaagaaggggaacagcuaccccaagcuguccaagagcuacaucaacgacaagggcaaggaggugcugguccucugggggauccaccaccccagcaccuccgccgaccagcagagccuguaccagaacgccgacgccuacguguucgugggcacgucccgguacagcaagaaguucaagcccgagaucgccauccgcccgaagguccgggaccaggagggccgcaugaacuacuacuggacccugguggagcccggggacaagaucaccuucgaggcgaccggcaaccucguggucccccgguacgccuucgccauggagcgcaacgccggguccggcaucaucaucagcgacacgcccgugcacgacugcaacacgaccugccagaccccgaagggcgccaucaacaccucccugcccuuccagaacauccaccccaucaccaucggggagugccccaaguacgucaagagcaccaagcugcggcucgcgaccggccugcgcaacgugccguccauccagagccgggggcuguucggcgccaucgccggguucaucgagggcggcuggacggggaugguggacggcugguacggguaccaccaccagaacgagcagggcuccggguacgccgccgaccucaagagcacccagaacgcgaucgacaagaucaccaacaaggugaacuccgucaucgagaagaugaacacccaguucacggccgugggcaaggaguucaaccaccuggagaagcgcaucgagaaccugaacaagaaggucgacgacggcuuccucgacaucuggaccuacaacgccgagcugcuggugcuccuggagaacgagcggacccuggacuaccacgacagcaacgugaagaaccucuacgagaagguccgcucccagcugaagaacaacgccaaggagaucgggaacggcugcuucgaguucuaccacaagugcgacaacacgugcauggagagcgugaagaacgggaccuacgacuaccccaaguacuccgaggaggccaagcugaaccgggaggagaucgacggcgugaagcucgagagcacccgcaucuaccagauccuggcgaucuacuccaccgucgccagcagccuggugcucguggucucccugggggccaucagcuucuggaugugcuccaacggcagccugcagugccggaucugcaucuga

SEQ ID NO: 71463 - RNA, 1701 nt, Artificial Sequence
  derived and/or modified CDS sequence (opt1) from hemagglutinin__InfluenzaA__AEO01348
augaaggccauccuggugguccuccuguacaccuucgccaucgcgaacgccgacacccugugcaucggcuaccacgccaacaacagcacggacaccguggacaccgugcucgagaagaacgucaccgugacgcacuccgugaaccugcuggaggacaagcacaacgggaagcucugcaagcugcgcggcgucgcgccccugcaccucgggaagugcaacaucgccggcuggauccuggggaacccggagugcgagagccuguccaccgccagcuccuggagcuacaucguggagaccuccagcuccgacaacgggaccugcuaccccggcgacuucaucgacuacgaggagcuccgggagcagcugagcuccgugagcuccuucgagcgcuucgagaucuuccccaagacgagcuccuggcccaaccacgacagcaacaagggcgucaccgccgccugcccgcacgccggcgcgaaguccuucuacaagaaccugaucuggcucgugaagaaggggaacagcuaccccaagcuguccaagagcuacaucaacgacaagggcaaggaggugcugguccucugggggauccaccaccccagcaccuccgccgaccagcagagccuguaccagaacgccgacgccuacguguucgugggcaccucccgguacagcaagaaguucaagcccgagaucgccauccgcccgaagguccgggagcaggagggccgcaugaacuacuacuggacgcugguggagcccggggacaagaucaccuucgaggcgaccggcaaccucguggucccccgguacgccuucgccauggagcgcaacgccggguccggcaucaucaucagcgacacccccgugcacgacugcaacacgaccugccagaccccgaagggcgccaucaacaccucccugcccuuccagaacauccaccccaucacgaucgggaagugccccaaguacgucaagagcaccaagcugcggcucgcgaccggccugcgcaacgugccguccauccagagccgggggcuguucggcgccaucgccggguucaucgagggcggcuggaccgggaugguggacggcugguacggguaccaccaccagaacgagcagggcuccggguacgccgccgaccucaagagcacgcagaacgcgaucgacgagaucaccaacaaggugaacuccgucaucgagaagaugaacacccaguucaccgccgugggcaaggaguucaaccaccuggagaagcgcaucgagaaccugaacaagaaggucgacgacggcuuccucgacaucuggacguacaacgccgagcugcuggugcuccuggagaacgagcggacccuggacuaccacgacagcaacgugaagaaccucuacgagaagguccgcucccagcugaagaacaacgccaaggagaucgggaacggcugcuucgaguucuaccacaagugcgacaacacgugcauggagagcgugaagaacgggaccuacgacuaccccaaguacuccgaggaggccaagcugaaccgggaggagaucgacggcgugaagcucgagagcacccgcaucuaccagauccuggcgaucuacuccaccgucgccagcagccuggugcucguggucucccugggggccaucagcuucuggaugugcuccaacggcagccugcagugccggaucugcaucuga

SEQ ID NO: 71464 - RNA, 1701 nt, Artificial Sequence
  derived and/or modified CDS sequence (opt1) from hemagglutinin__InfluenzaA__AEO01349
augaaggccauccuggugguccuccuguacaccuucgccaccgcgaacgccgacacgcugugcaucggcuaccacgccaacaacagcaccgacaccguggacaccgugcucgagaagaacgucacggugacccacuccgugaaccugcuggaggacaagcacaacgggaagcucugcaagcugcgcggcgucgcgccccugcaccucgggaagugcaacaucgccggcuggauccuggggaacccggagugcgagagccuguccaccgccagcuccuggagcuacaucguggagaccuccagcuccgagaacggcacgugcuaccccggcgacuucaucgacuacgaggagcuccgggagcagcugagcuccgugagcuccuucgagcgcuucgagaucuuccccaagaccagcuccuggcccaaccacgacagcaacaagggggucaccgccgccugcccgcacgccggcgcgaaguccuucuacaagaaccugaucuggcucgugaagaaggggaacagcuaccccaagcuguccaagagcuacaucaacgacaagggcaaggaggugcugguccucugggggauccaccaccccagcaccuccgccgaccagcagagccuguaccagaacgccgacgccuacguguucgugggcacgucccgguacagcaagaaguucaagcccgagaucgccauccgcccgaagguccgggaccaggagggccgcaugaacuacuacuggacccugguggagcccggggacaagaucaccuucgaggcgaccggcaaccucguggucccccgguacgccuucgccauggagcgcaacgccggguccggcaucaucaucagcgacacgcccgugcacgacugcaacacgaccugccagaccccgaagggcgccaucaacaccucccugcccuuccagaacauccaccccaucaccaucgggaagugccccaaguacgucaagagcaccaagcugcggcucgcgaccggccugcgcaacgugccguccauccagagccgggggcuguucggcgccaucgccggguucaucgagggcggcuggacggggaugguggacggcugguacggguaccaccaccagaacgagcagggcuccggguacgccgccgaccucaagagcacccagaacgcgaucgacgagaucaccaacaaggugaacuccgucaucgagaagaugaacacccaguucacggccgugggcaaggaguucaaccaccuggagaagcgcaucgagaaccugaacaagaaggucgacgacggcuuccucgacaucuggaccuacaacgccgagcugcuggugcuccuggagaacgagcggacccuggacuaccacgacagcaacgugaagaaccucuacgagaagguccgcucccagcugaagaacaacgccaaggagaucgggaacggcugcuucgaguucuaccacaagugcgacaacacgugcauggagagcgugaagaacgggaccuacgacuaccccaaguacuccaaggaggccaagcugaaccgggaggagaucgacggcgugaagcucgagagcacccgcaucuaccagauccuggcgaucuacuccaccgucgccagcagccuggugcucguggucucccugggggccaucagcuucuggaugugcuccaacggcagccugcagugccggaucugcaucuga

SEQ ID NO: 71465 - RNA, 1701 nt, Artificial Sequence
  derived and/or modified CDS sequence (opt1) from hemagglutinin__InfluenzaA__AEO01350
augaaggccauccuggugguccuccuguacaccuucgccaccacgaacgcggacacccugugcaucggcuaccacgccaacaacagcaccgacaccguggacacggugcucgagaagaacgucaccgugacccacuccgugaaccugcuggaggacaagcacaacgggaagcucugcaagcugcgcggcgucgcgccccugcaccucgggaagugcaacaucgccggcuggauccuggggaacccggagugcgagagccuguccaccgccagcuccuggagcuacaucguggagacguccagcuccgacaacgggaccugcuaccccggcgacuucaucgacuacgaggagcuccgggagcagcugagcuccgugagcuccuucgagcgcuucgagaucuuccccaagaccagcuccuggcccaaccacgacagcaacaagggcgucaccgccgccugcccgcacgccggcgccaaguccuucuacaagaaccugaucuggcucgugaagaaggggaacagcuaccccaagcuguccaagagcuacaucaacgacaagggcaaggaggugcugguccucugggggauccaccaccccagcacguccgcggaccagcagagccuguaccagaacgccgacgccuacguguucgugggcaccucccgguacagcaagaaguucaagcccgagaucgccauccgcccgaagguccgggaccaggagggccgcaugaacuacuacuggacccugguggagcccggggacaagaucaccuucgaggccacgggcaaccucguggucccccgguacgcguucgccauggagcgcaacgccggguccggcaucaucaucagcgacacccccgugcacgacugcaacacgaccugccagaccccgaagggcgccaucaacaccucccugcccuuccagaacauccaccccaucaccaucgggaagugccccaaguacgucaagagcaccaagcugcggcucgccacgggccugcgcaacgugccguccauccagagccgggggcuguucggcgcgaucgccggguucaucgagggcggcuggaccgggaugguggacggcugguacggguaccaccaccagaacgagcagggcuccggguacgccgccgaccucaagagcacccagcacgccaucgacgagaucaccaacaaggugaacuccgucaucgagaagaugaacacgcaguucaccgcggugggcaaggaguucaaccaccuggagaagcgcaucgagaaccugaacaagaaggucgacgacggcuuccucgacaucuggaccuacaacgccgagcugcuggugcuccuggagaacgagcggacccuggacuaccacgacagcaacgugaagaaccucuacgagaagguccgcucccagcugaagaacaacgccaaggagaucgggaacggcugcuucgaguucuaccacaagugcgacaacacgugcauggagagcgugaagaacgggaccuacgacuaccccaaguacuccgaggaggccaagcugaaccgggaggagaucgacggcgugaagcucgagagcacccgcaucuaccagauccuggccaucuacuccaccgucgcgagcagccuggugcucguggucucccugggggccaucagcuucuggaugugcuccaacggcagccugcagugccggaucugcaucuga

SEQ ID NO: 71466 - RNA, 1701 nt, Artificial Sequence; identical to SEQ ID NO: 66693
  derived and/or modified CDS sequence (opt1) from hemagglutinin__InfluenzaA__AEO01351

SEQ ID NO: 71467 - RNA, 1701 nt, Artificial Sequence; identical to SEQ ID NO: 67857
  derived and/or modified CDS sequence (opt1) from hemagglutinin__InfluenzaA__AEO01352

SEQ ID NO: 71468 - RNA, 1701 nt, Artificial Sequence
  derived and/or modified CDS sequence (opt1) from hemagglutinin__InfluenzaA__AEO01353
augaaggccauccuggugguccuccuguacaccuucgccaccgcgaacgccgacacgcugugcaucggcuaccacgccaacaacagcaccgacaccguggacaccgugcucgagaagaacgucacggugacccacuccgugaaccugcuggaggacaagcacaacgggaagcucugcaagcugcgcggcgucgcgccccugcaccucgggaagugcaacaucgccggcuggauccuggggaacccggagugcgagagccuguccaccgccagcuccuggagcuacaucguggagaccuccagcuccgacaacggcacgugcuaccccggcgacuucaucgacuacgaggagcuccgggagcagcugagcuccgugagcuccuucgagcgcuucgagaucuuccccaagaccagcuccuggcccaaccacgacagcaacaagggggucaccgccgccugcccgcacgccggcgcgaaguccuucuacaagaaccugaucuggcucgugaagaaggggaacagcuaccccaagcuguccaagagcuacaucaacgacaagggcaaggaggugcugguccucugggggauccaccaccccagcaccuccgccgaccagcagagccuguaccagaacgccgacgccuacguguucgugggcacgucccgguacagcaagaaguucaagcccgagaucgccauccgcccgaagguccgggaccaggagggccgcaugaacuacuacuggacccugguggagcccggggacaagaucaccuucgaggcgaccggcaaccucguggucccccgguacgccuucgccauggagcgcaacgccggguccggcaucaucaucagcgacacgcccgugcacgacugcaacacgaccugccagaccccgaagggcgccaucaacaccucccugcccuuccagaacauccaccccaucaccaucgggaagugccccaaguacgucaagagcaccaagcugcggcucgcgaccggccugcgcaacgugccguccauccagagccgggggcuguucggcgccaucgccggguucaucgagggcggcuggacggggaugguggacggcugguacggguaccaccaccagaacgagcagggcuccggguacgccgccgaccucaagagcacccagaacgcgaucgacgagaucaccaacaaggugaacuccgucaucgagaagaugaacacccaguucacggccgugggcaaggaguucaaccaccuggagaagcgcaucgagaaccugaacaagaaggucgacgacggcuuccucgacaucuggaccuacaacgccgagcugcuggugcuccuggagaacgagcggacccuggacuaccacgacagcaacgugaagaaccucuacgagaagguccgcucccagcugaagaacaacgccaaggagaucgggaacggcugcuucgaguucuaccacaagugcgacaacacgugcauggagagcgugaagaacgggaccuacgacuaccccaaguacuccgaggaggccaagcugaaccgggaggagaucgacggcgugaagcucgagagcacccgcaucuaccagauccuggcgaucuacuccaccgucgccagcagccuggugcucguggucuuccugggggccaucuccuucuggaugugcagcaacggcucccugcagugccggaucugcaucuga

SEQ ID NO: 71469 - RNA, 1701 nt, Artificial Sequence
  derived and/or modified CDS sequence (opt1) from hemagglutinin__InfluenzaA__AEO01354
augaaggccauccuggugguccuccuguacaaguucgccaccgcgaacgccgacacccugugcaucggcuaccacgccaacaacagcacggacaccguggacaccgugcucgagaagaacgucaccgugacgcacuccgugaaccugcuggaggacaagcacaacgggaagcucugcaagcugcgcggcgucgcgccccugcaccucgggaagugcaacaucgccggcuggauccuggggaacccggagugcgagagccuguccaccgccagcuccuggagcuacaucguggagaccuccagcuccgacaacgggaccugcuaccccggcgacuucaucgacuacgaggagcuccgggagcagcugagcuccgugagcuccuucgagcgcuucgagaucuuccccaagacgagcuccuggcccaaccacgacagcaacaagggcgucaccgccgccugcccgcacgccggcgcgaaguccuucuacaagaaccugaucuggcucgugaagaaggggaacagcuaccccaagcuguccaagagcuacaucaacgacaagggcaaggaggugcugguccucugggggauccaccaccccagcaccuccgccgaccagcagagccuguaccagaacgccgacgccuacguguucgugggcaccucccgguacagcaagaaguucaagcccgagaucgccauccgcccgaagguccgggaccaggagggccgcaugaacuacuacuggacgcugguggagcccggggacaagaucaccuucgaggcgaccggcaaccucguggucccccgguacgccuucgccauggagcgcaacgccggguccggcaucaucaucagcgacacccccgugcacgacugcaacacgaccugccagaccccgaagggcgccaucaacaccucccugcccuuccagaacauccaccccaucacgaucgggaagugccccaaguacgucaagagcaccaagcugcggcucgcgaccggccugcgcaacgugccguccauccagagccgggggcuguucggcgccaucgccggguucaucgagggcggcuggaccgggaugguggacggcugguacggguaccaccaccagaacgagcagggcuccggguacgccgccgaccucaagagcacgcagaacgcgaucgacgagaucaccaacaaggugaacuccgucaucgagaagaugaacacccaguucaccgccgugggcaaggaguucaaccaccuggagaagcgcaucgagaaccugaacaagaaggucgacgacggcuuccucgacaucuggacguacaacgccgagcugcuggugcuccuggagaacgagcggacccuggacuaccacgacagcaacgugaagaaccucuacgagaagguccgcucccagcugaagaacaacgccaaggagaucgggaacggcugcuucgaguucuaccacaagugcgacaacacgugcauggagagcgugaagaacgggaccuacgacuaccccaaguacuccgaggaggccaagcugaaccgggaggagaucgacggcgugaagcucgagagcacccgcaucuaccagauccuggcgaucuacuccaccgucgccagcagccuggugcucguggucucccugggggccaucagcuucuggaugugcuccaacggcagccugcagugccggaucugcaucuga

SEQ ID NO: 71470 - RNA, 1701 nt, Artificial Sequence; identical to SEQ ID NO: 68113
  derived and/or modified CDS sequence (opt1) from hemagglutinin__InfluenzaA__AEO01355

SEQ ID NO: 71471 - RNA, 1701 nt, Artificial Sequence; identical to SEQ ID NO: 66693
  derived and/or modified CDS sequence (opt1) from hemagglutinin__InfluenzaA__AEO01356

SEQ ID NO: 71472 - RNA, 1701 nt, Artificial Sequence
  derived and/or modified CDS sequence (opt1) from hemagglutinin__InfluenzaA__AEO01358
augaaggccauccuggugguccuccuguacaccuucgccaccgcgaacgccgacacgcugugcgugggcuaccacgccaacaacagcaccgacaccguggacaccguccucgagaagaacgugacggugacccacuccgucaaccugcuggaggacaagcacaacgggaagcucugcaagcugcgcggcguggcgccccugcaccucgggaagugcaacaucgccggcuggauccuggggaacccggagugcgagagccuguccaccgccagcuccuggagcuacaucguggagaccuccagcuccgacaacggcacgugcuaccccggcgacuucaucgacuacgaggagcuccgggagcagcugagcuccgucagcuccuucgagcgcuucgagaucuuccccaagaccagcuccuggcccaaccacgacagcaacaagggggugaccgccgccugcccgcacgccggcgcgaaguccuucuacaagaaccugaucuggcucgugaagaaggggaacagcuaccccaagcuguccaagagcuacaucaacgacaagggcaaggagguccuggugcucugggggauccaccaccccagcaccuccgccgaccagcagagccuguaccagaacgccgacgccuacguguucgucggcacgucccgguacagcaagaaguucaagcccgagaucgccauccgcccgaaggugcgggaccaggagggccgcaugaacuacuacuggacccugguggagcccggggacaagaucaccuucgaggcgaccggcaaccucgucgugccccgguacgccuucgccauggagcgcaacgccggguccggcaucaucaucagcgacacgcccgcccacgacugcaacacgaccugccagaccccgaagggcgcgaucaacaccucccugcccuuccagaacauccaccccaucaccaucgggaagugccccaaguacgucaagagcaccaagcugcggcucgccaccggccugcgcaacgugccguccauccagagccgggggcuguucggcgccaucgccggguucaucgagggcggcuggacggggaugguggacggcugguacggguaccaccaccagaacgagcagggcuccggguacgccgcggaccucaagagcacccagaacgccaucgacgagaucaccaacaaggugaacuccgucaucgagaagaugaacacccaguucacggccgugggcaaggaguucaaccaccuggagaagcgcaucgagaaccugaacaagaaggucgacgacggcuuccucgacaucuggaccuacaacgccgagcugcuggugcuccuggagaacgagcggacccuggacuaccacgacagcaacgugaagaaccucuacgagaagguccgcucccagcugaagaacaacgccaaggagaucgggaacggcugcuucgaguucuaccacaagugcgacaacacgugcauggagagcgugaagaacgggaccuacgacuaccccaaguacuccgaggaggcgaagcugaaccgggaggagaucgacggcgugaagcucgagagcacccgcaucuaccagauccuggccaucuacuccaccgucgccagcagccuggugcucguggucucccugggggccaucagcuucuggaugugcuccaacggcagccugcagugccggaucugcaucuga

SEQ ID NO: 71473 - RNA, 1701 nt, Artificial Sequence; identical to SEQ ID NO: 68113
  derived and/or modified CDS sequence (opt1) from hemagglutinin__InfluenzaA__AEO01359

SEQ ID NO: 71474 - RNA, 1701 nt, Artificial Sequence; identical to SEQ ID NO: 71446
  derived and/or modified CDS sequence (opt1) from hemagglutinin__InfluenzaA__AEO01360

SEQ ID NO: 71475 - RNA, 1701 nt, Artificial Sequence; identical to SEQ ID NO: 67046
  derived and/or modified CDS sequence (opt1) from hemagglutinin__InfluenzaA__AEO01361

SEQ ID NO: 71476 - RNA, 1701 nt, Artificial Sequence; identical to SEQ ID NO: 71446
  derived and/or modified CDS sequence (opt1) from hemagglutinin__InfluenzaA__AEO01362

SEQ ID NO: 71477 - RNA, 1701 nt, Artificial Sequence; identical to SEQ ID NO: 67857
  derived and/or modified CDS sequence (opt1) from hemagglutinin__InfluenzaA__AEO01363

SEQ ID NO: 71478 - RNA, 1701 nt, Artificial Sequence
  derived and/or modified CDS sequence (opt1) from hemagglutinin__InfluenzaA__AEO01365
augaaggccauccuggugguccuccuguacaccuucgccaccgcgaacgccgacacgcugugcaucggcuaccacgccaacaacagcaccgacaccguggacaccgugcucaagaagaacgucacggugacccacuccgugaacauccuggaggacaagcacaacgggaagcugugcaagcuccgcggcgucgcgccccugcaccuggggaagugcaacaucgccggcuggauccucgggaacccggagugcgagagccuguccaccgccagcuccuggagcuacaucguggagaccuccagcuccgacaacggcacgugcuaccccggcgacuucaucgacuacgaggagcugcgggagcagcucagcuccgugagcuccuucgagcgcuucgagaucuuccccaagaccagcuccuggcccaaccacgacagcaacaagggggucaccgccgccugcccgcacgccggcgcgaaguccuucuacaagaaccugaucuggcuggugaagaaggggaacagcuaccccaagcucuccaagagcuacaucaacgacaagggcaaggaggugcugguccugugggggauccaccaccccagcaccuccgccgaccagcagagccucuaccagaacgccgacgccuacguguucgugggcacgucccgguacagcaagaaguucaagcccgagaucgccauccgcccgaagguccgggaccaggagggccgcaugaacuacuacuggacccugguggagcccggggacaagaucaccuucgaggcgaccggcaaccugguggucccccgguacgccuucgccauggagcgcuccgccgggagcggcaucaucaucuccgacacgcccgugcacgacugcaacacgaccugccagaccccgaagggcgccaucaacaccagccuccccuuccagaacauccaccccaucaccaucgggaagugccccaaguacgugaaguccaccaagcugcggcuggcgaccggccuccgcaacgucccgagcauccagucccgggggcuguucggcgccaucgccggguucaucgagggcggcuggacggggaugguggacggcugguacggguaccaccaccagaacgagcagggcagcggguacgccgccgaccugaaguccacccagaacgcgaucgacgagaucaccaacaaggugaacagcgucaucgagaagaugaacacccaguucacggccgugggcaaggaguucaaccaccucgagaagcgcaucgagaaccugaacaagaaggucgacgacggcuuccuggacaucuggaccuacaacgccgagcuccuggugcugcucgagaacgagcggacccuggacuaccacgacuccaacgugaagaaccuguacgagaagguccgcagccagcucaagaacaacgccaaggagaucgggaacggcugcuucgaguucuaccacaagugcgacaacacgugcauggaguccgugaagaacgggaccuacgacuaccccaaguacagcgaggaggccaagcugaaccgggaggagaucgacggcgugaagcuggaguccacccgcaucuaccagauccucgcgaucuacagcaccgucgccagcucccuggugcugguggucagccucggggccaucuccuucuggaugugcagcaacggcucccugcagugccggaucugcaucuga

SEQ ID NO: 71479 - RNA, 1701 nt, Artificial Sequence
  derived and/or modified CDS sequence (opt1) from hemagglutinin__InfluenzaA__AEO01366
augaaggccauccuggugguccuccuguacaccuucgccaccgcgaacgccgacacgcugugcaucggcuaccacgccaacaacagcaccgacaccguggacaccgugcucgagaagaacgucacggugacccacuccgugaaccugcuggaggacaagcacaacgggaagcucugcaagcugcgcggcgucgcgccccugcaccucgggaagugcaacaucgccggcuggauccuggggaacccggagugcgagagccuguccaccgccagcuccuggagcuacaucguggagaccuccagcuccgacaacggcacgugcuaccccggcgacuucaucgacuacgaggagcuccgggagcagcugagcuccgugagcuccuucgagcgcuucgagaucuuccccaagaccagcuccuggcccaaccacgacagcaacaagggggucaccgccgccugcccgcacgccggcgcgaaguccuucuacaagaaccugaucuggcucgugaagaaggggaacagcuaccccaagcuguccaagagcuacaucaacgacaagggcaaggaggugcugguccucugggggauccaccaccccagcaccuccgccgaccagcagagccuguaccagaacgccgacgccuacguguucgugggcacgucccgguacagcaagaaguucaagcccgagaucgccauccgcccgaagguccgggaccaggagggccgcaugaacuacuacuggacccugguggagcccggggacaagaucaccuucgaggcgaccggcaaccucguggucccccgguacgccuucgccauggagcgcaacgccggguccggcaucaucaucagcgacacgcccgugcacgacugcuccacgaccugccagaccccgaagggcgccaucaacaccagccugcccuuccagaacgugcaccccaucaccaucgggaagugccccaaguacgucaaguccaccaagcugcggcucgcgaccggccugcgcaacgugccgagcauccagucccgggggcuguucggcgccaucgccggguucaucgagggcggcuggacggggaugguggacggcugguacggguaccaccaccagaacgagcagggcagcggguacgccgccgaccucaaguccacccagaacgcgaucgacgagaucaccaacaaggucaacagcgugaucgagaagaugaacacccaguucacggccgucggcaaggaguucaaccaccuggagaagcgcaucgagaaccugaacaagaagguggacgacggcuuccucgacaucuggaccuacaacgccgagcugcuggugcuccuggagaacgagcggacccuggacuaccacgacuccaacgucaagaaccucuacgagaaggugcgcagccagcugaagaacaacgccaaggagaucgggaacggcugcuucgaguucuaccacaagugcgacaacacgugcauggaguccgugaagaacgggaccuacgacuaccccaaguacagcgaggaggccaagcugaaccgggaggagaucgacggcgucaagcucgaguccacccgcaucuaccagauccuggcgaucuacagcaccguggccagcucccuggugcucgucgugagccugggggccaucuccuucuggaugugcagcaacggcucccugcagugccggaucugcaucuga

SEQ ID NO: 71480 - RNA, 1701 nt, Artificial Sequence; identical to SEQ ID NO: 71451
  derived and/or modified CDS sequence (opt1) from hemagglutinin__InfluenzaA__AEO01367

SEQ ID NO: 71481 - RNA, 1701 nt, Artificial Sequence
  derived and/or modified CDS sequence (opt1) from hemagglutinin__InfluenzaA__AEO01368
augaaggccauccuggugguccuccuguacaccuucgccaccgcgaacgccgacacgcugugcaucggcuaccacgccaacaacagcaccgacaccguggacaccgugcucgagaagaacgucacggugacccacuccgugaaccugcuggaggacaagcacaacgggaagcucugcaagcugcgcggcgucgcgccccugcaccucgggaagugcaacaucgccggcuggauccuggggaacccggagugcgagagccuguccaccgccagcuccuggagcuacaucguggagaccuccagcuccgacaacggcacgugcuaccccggcgacuucaucgacuacgaggagcuccgggagcagcugagcuccgugagcuccuucgagcgcuucgagaucuuccccaacaccagcuccuggcccaaccacgacagcaacaagggggucaccgccgccugcccgcacgccggcgcgaaguccuucuacaagaaccugaucuggcucgugaagaaggggaacagcuaccccaagcuguccaagagcuacaucaacgacaagggcaaggaggugcugguccucugggggauccaccaccccagcaccuccgccgaccagcagagccuguaccagaacgccgacgccuacguguucgugggcacgucccgguacagcaagaaguucaagcccgagaucgccauccgcccgaagguccgggaccaggagggccgcaugaacuacuacuggacccugguggagcccggggacaagaucaccuucgaggcgaccggcaaccucguggucccccgguacgccuucgccauggagcgcaacgccggguccggcaucaucaucagcgacacgcccgugcacgacugcaacacgaccugccagaccccgaagggcgccaucaacaccucccugcccuuccagaacauccaccccaucaccaucgggaagugccccaaguacgucaagagcaccaagcugcggcucgcgaccggccugcgcaacgugccguccauccagagccgggggcuguucggcgccaucgccggguucaucgagggcggcuggacggggaugguggacggcugguacggguaccaccaccagaacgagcagggcuccggguacgccgccgaccucaagagcacccagaacgcgaucgacaagaucaccaacaaggugaacuccgucaucgagaagaugaacacccaguucacggccgugggcaaggaguucaaccaccuggagaagcgcaucgagaaccugaacaagaaggucgacgacggcuuccucgacaucuggaccuacaacgccgagcugcuggugcuccuggagaacgagcggacccuggacuaccacgacagcaacgugaagaaccucuacgagaagguccgcucccagcugaagaacaacgccaaggagaucgggaacggcugcuucgaguucuaccacaagugcgacaacacgugcauggagagcgugaagaacgggaccuacgacuaccccaaguacuccgaggaggccaagcugaaccgggaggagaucgacggcgugaagcucgagagcacccgcaucuaccagauccuggcgaucuacuccaccgucgccagcagccuggugcucguggucucccugggggccaucagcuucuggaugugcuccaacggcagccugcagugccggaucugcaucuga

SEQ ID NO: 71482 - RNA, 1701 nt, Artificial Sequence; identical to SEQ ID NO: 66693
  derived and/or modified CDS sequence (opt1) from hemagglutinin__InfluenzaA__AEO01369

SEQ ID NO: 71483 - RNA, 1701 nt, Artificial Sequence; identical to SEQ ID NO: 71411
  derived and/or modified CDS sequence (opt1) from hemagglutinin__InfluenzaA__AEO01370

SEQ ID NO: 71484 - RNA, 1701 nt, Artificial Sequence; identical to SEQ ID NO: 71458
  derived and/or modified CDS sequence (opt1) from hemagglutinin__InfluenzaA__AEO01371

SEQ ID NO: 71485 - RNA, 1701 nt, Artificial Sequence; identical to SEQ ID NO: 68290
  derived and/or modified CDS sequence (opt1) from hemagglutinin__InfluenzaA__AEO01372

SEQ ID NO: 71486 - RNA, 1701 nt, Artificial Sequence; identical to SEQ ID NO: 68290
  derived and/or modified CDS sequence (opt1) from hemagglutinin__InfluenzaA__AEO01373

SEQ ID NO: 71487 - RNA, 1701 nt, Artificial Sequence
  derived and/or modified CDS sequence (opt1) from hemagglutinin__InfluenzaA__AEO01374
augaaggccauccuggugguccuccuguacaccuucgccaccgcgaacgccgacacgcugugcaucggcuaccacgccaacaacagcaccgacaccguggacaccgugcucgagaagaacgucacggugacccacuccgugaaccugcuggaggacaagcacaacgggaagcucugcaagcugcgcggcgucgcgccccugcaccucgggaagugcgacaucgccggcuggauccuggggaacccggagugcgagagccuguccaccgccagcuccuggagcuacaucguggagaccuccagcuccgacaacggcacgugcuaccccggcgacuucaucgacuacgaggagcuccgggagcagcugagcuccgugagcuccuucgagcgcuucgagaucuuccccaagaccagcuccuggcccaaccacgacagcaacaagggggucaccgccgccugcccgcacgccggcgcgaaguccuucuacaagaaccugaucuggcucgugaagaaggggaacagcuaccccaagcuguccaagagcuacaucaacgacaagggcaaggaggugcugguccucugggggauccaccaccccagcaccuccgccgaccagcagagccuguaccagaacgccgacgccuacguguucgugggcacgucccgguacagcaagaaguucaagcccgagaucgccauccgcccgaagguccgggaccaggagggccgcaugaacuacuacuggacccugguggagcccggggacaagaucaccuucgaggcgaccggcaaccucguggucccccgguacgccuucgccauggagcgcaacgccggguccggcaucaucaucagcgacacgcccgugcacgacugcaacacgaccugccagaccccgaagggcgccaucaacaccucccugcccuuccagaacauccaccccaucaccaucgggaagugccccaaguacaucaagagcaccaagcugcggcucgcgaccggccugcgcaacgugccguccauccagagccgggggcuguucggcgccaucgccggguucaucgagggcggcuggacggggauggucgacggcugguacggguaccaccaccagaacgagcagggcuccggguacgccgccgaccucaagagcacccagcacgcgaucgacgagaucaccaacaaggugaacuccgugaucgagaagaugaacacccaguucacggccgucggcaaggaguucaaccaccuggagaagcgcaucgagaaccugaacaagaagguggacgacggcuuccucgacaucuggaccuacaacgccgagcugcugguccuccuggagaacgagcggacccuggacuaccacgacagcaacgugaagaaccucuacgagaaggugcgcucccagcugaagaacaacgccaaggagaucgggaacggcugcuucgaguucuaccacaagugcgacaacacgugcauggagagcgucaagaacgggaccuacgacuaccccaaguacuccgaggaggccaagcugaaccgggaggagaucgacggcgugaagcucgagagcacccgcaucuaccagauccuggcgaucuacuccaccguggccagcagccugguccucguggugucccugggggccaucagcuucuggaugugcuccaacggcagccugcagugccggaucugcaucuga

SEQ ID NO: 71488 - RNA, 1701 nt, Artificial Sequence; identical to SEQ ID NO: 71462
  derived and/or modified CDS sequence (opt1) from hemagglutinin__InfluenzaA__AEO01375

SEQ ID NO: 71489 - RNA, 1701 nt, Artificial Sequence; identical to SEQ ID NO: 66693
  derived and/or modified CDS sequence (opt1) from hemagglutinin__InfluenzaA__AEO01376

SEQ ID NO: 71490 - RNA, 1701 nt, Artificial Sequence; identical to SEQ ID NO: 68861
  derived and/or modified CDS sequence (opt1) from hemagglutinin__InfluenzaA__AEO01377

SEQ ID NO: 71491 - RNA, 1701 nt, Artificial Sequence
  derived and/or modified CDS sequence (opt1) from hemagglutinin__InfluenzaA__AEO01378
augaaggccauccuggugguccuccuguacaccuucgccaccgcgaacgccgacacgcugugcaucggcuaccacgccaacaacagcaccgacaccguggacaccgugcucgagaagaacgucacggugacccacuccgugaaccugcuggaggacaagcacaacgggaagcucugcaagcugcgcggcgucgcgccccugcaccucgggaagugcaacaucgccggcuggauccuggggaacccggagugcgagagccuguccaccgcgagcuccuggagcuacaucguggagacccccuccagcgacaacggcacgugcuaccccggcgacuucaucgacuacgaggagcuccgggagcagcuguccagcguguccagcuucgagcgcuucgagaucuuccccaagaccuccagcuggccgaaccacgacuccaacaagggggucaccgccgccugcccccacgccggcgccaagagcuucuacaagaaccugaucuggcucgugaagaaggggaacuccuaccccaagcugagcaaguccuacaucaacgacaagggcaaggaggugcugguccucugggggauccaccaccccagcaccagcgccgaccagcagucccuguaccagaacgccgacgccuacguguucgugggcacgagccgguacuccaagaaguucaagccggagaucgccauccgccccaagguccgggaccaggagggccgcaugaacuacuacuggacccugguggagcccggggacaagaucaccuucgaggcgaccggcaaccucguggucccccgguacgccuucgccauggagcgcaacgccgggagcggcaucaucaucuccgacacgccggugcacgacugcaacacgaccugccagacccccaagggcgccaucaacaccagccugcccuuccagaacauccaccccaucaccaucgggaagugcccgaaguacgugaaguccaccaagcugcggcucgcgaccggccugcgcaacguccccagcauccagucccgggggcuguucggcgccaucgccggguucaucgagggcggcuggacggggaugguggacggcugguacggguaccaccaccagaacgagcagggcagcggguacgccgccgaccucaaguccacccagaacgcgaucgacgagaucaccaacaaggugaacagcgucaucgagaagaugaacacccaguucacggccgugggcaaggaguucaaccaccuggagaagcgcaucgagaaccugaacaagaaggucgacgacggcuuccucgacaucuggaccuacaacgccgagcugcuggugcuccuggagaacgagcggacccuggacuaccacgacuccaacgugaagaaccucuacgagaagguccgcagccagcugaagaacaacgccaaggagaucgggaacggcugcuucgaguucuaccacaagugcgacaacacgugcauggaguccgugaagaacgggaccuacgacuaccccaaguacagcgaggaggccaagcugaaccgggaggagaucgacggcgugaagcucgaguccacccgcaucuaccagauccuggcgaucuacagcaccgucgccuccagccuggugcucguggucagccugggggccaucuccuucuggaugugcagcaacggcucccugcagugccggaucugcaucuga

SEQ ID NO: 71492 - RNA, 1701 nt, Artificial Sequence; identical to SEQ ID NO: 67857
  derived and/or modified CDS sequence (opt1) from hemagglutinin__InfluenzaA__AEO01379

SEQ ID NO: 71493 - RNA, 1701 nt, Artificial Sequence; identical to SEQ ID NO: 71462
  derived and/or modified CDS sequence (opt1) from hemagglutinin__InfluenzaA__AEO01380

SEQ ID NO: 71494 - RNA, 1701 nt, Artificial Sequence; identical to SEQ ID NO: 71462
  derived and/or modified CDS sequence (opt1) from hemagglutinin__InfluenzaA__AEO01381

SEQ ID NO: 71495 - RNA, 1701 nt, Artificial Sequence; identical to SEQ ID NO: 67857
  derived and/or modified CDS sequence (opt1) from hemagglutinin__InfluenzaA__AEO01382

SEQ ID NO: 71496 - RNA, 1701 nt, Artificial Sequence; identical to SEQ ID NO: 68290
  derived and/or modified CDS sequence (opt1) from hemagglutinin__InfluenzaA__AEO01383

SEQ ID NO: 71497 - RNA, 1701 nt, Artificial Sequence
  derived and/or modified CDS sequence (opt1) from hemagglutinin__InfluenzaA__AEO01384
augaaggccauccuggugguccuccuguacaccuucgccaccgcgaacgccgacacgcugugcaucggcuaccacgccaacaacagcaccgacaccguggacaccgugcucgagaagaacgucacggugacccacuccgugaaccugcuggaggacaagcacaacgggaagcucugcaagcugcgcggcgucagcccccugcaccucgggaagugcaacaucgccggcuggauccuggggaacccggagugcgagucccugagcaccgccuccagcugguccuacaucguggagaccagcuccagcgacaacggcacgugcuaccccggcgacuucaucgacuacgaggagcuccgggagcagcuguccagcguguccagcuucgagcgcuucgagaucuuccccaagaccuccagcuggcccaaccacgacuccaacaagggggucaccgcggccugcccgcacgccggcgccaagagcuucuacaagaaccugaucuggcucgugaagaaggggaacuccuaccccaagcugagcaagagcuacaucaacgacaagggcaaggaggugcugguccucugggggauccaccaccccuccaccagcgcggaccagcagucccuguaccagaacgccgacgccuacguguucgugggcacgagccgguacuccaagaaguucaagcccgagaucgccauccgcccgaagguccgggaccaggagggccgcaugaacuacuacuggacccugguggagcccggggacaagaucaccuucgaggccaccggcaaccucguggucccccgguacgcguucgccauggagcgcaacgccgggagcggcaucaucaucuccgacacgcccgugcacgacugcaacacgaccugccagaccccgaagggcgccaucaacaccagccugcccuuccagaacauccaccccaucaccaucgggaagugccccaaguacgugaaguccaccaagcugcggcucgccaccggccugcgcaacgucccgagcauccagucccgggggcuguucggcgcgaucgccggguucaucgagggcggcuggacggggaugguggacggcugguacggguaccaccaccagaacgagcagggcagcggguacgccgccgaccucaaguccacccagaacgccaucgacgagaucaccaacaaggugaacagcgucaucgagaagaugaacacccaguucacggcggugggcaaggaguucaaccaccuggagaagcgcaucgagaaccugaacaagaaggucgacgacggcuuccucgacaucuggaccuacaacgccgagcugcuggugcuccuggagaacgagcggacccuggacuaccacgacuccaacgugaagaaccucuacgagaagguccgcagccagcugaagaacaacgccaaggagaucgggaacggcugcuucgaguucuaccacaagugcgacaacacgugcauggaguccgugaagaacgggaccuacgacuaccccaaguacagcgaggaggccaagcugaaccgggaggagaucgacggcgugaagcucgaguccacccgcaucuaccagauccuggccaucuacagcaccgucgcgagcucccuggugcucguggucagccugggggccaucuccuucuggaugugcagcaacggcucccugcagugccggaucugcaucuga

SEQ ID NO: 71498 - RNA, 1701 nt, Artificial Sequence
  derived and/or modified CDS sequence (opt1) from hemagglutinin__InfluenzaA__AEO01385
augaaggccauccuggugguccuccuguacaccuucgccaccgcgaacgccgacacgcugugcaucggcuaccacgccaacaacagcaccgacaccguggacaccgugcucgagaagaacgucacggugacccacuccgugaacauccuggaggacaagcacaacgggaagcugugcaagcuccgcggcgucgcgccccugcaccuggggaagugcaacaucgccggcuggauccucgggaacccggagugcgagagccuguccaccgccagcuccuggagcuacaucguggagaccuccagcuccgacaacggcacgugcuaccccggcgacuucaucgacuacgaggagcugcgggagcagcucagcuccgugagcuccuucgagcgcuucgagaucuuccccaagaccagcuccuggcccaaccacgacagcaacaagggggucaccgccgccugcccgcacgccggcgcgaaguccuucuacaagaaccugaucuggcuggugaagaaggggaacagcuaccccaagcucuccaagagcuacaucaacgacaagggcaaggaggugcugguccugugggggauccaccaccccagcaccuccgccgaccagcagagccucuaccagaacgccaacgccuacguguucgugggcacgucccgguacagcaagaaguucaagcccgagaucgccauccgcccgaagguccgggaccaggagggccgcaugaacuacuacuggacccugguggagcccggggacaagaucaccuucgaggcgaccggcaaccugguggucccccgguacgccuucgccauggagcgcaacgccggguccggcaucaucaucagcgacacgcccgugcacgacugcaacacgaccugccagaccccgaagggcgccaucaacaccucccuccccuuccagaacauccaccccaucaccaucgggaagugccccaaguacgucaagagcaccaagcugcggcuggcgaccggccuccgcaacgugccguccauccagagccgggggcuguucggcgccaucgccggguucaucgagggcggcuggacggggaugguggacggcugguacggguaccaccaccagaacgagcagggcuccggguacgccgccgaccucaagagcacccagaacgcgaucgacgagaucaccaacaaggugaacuccgucaucgagaagaugaacacccaguucacggccgugggcaaggaguucaaccaccuggagaagcgcaucgagaaccugaacaagaaggucgacgacggcuuccuggacaucuggaccuacaacgccgagcuccuggugcugcucgagaacgagcggacccuggacuaccacgacagcaacgugaagaaccuguacgagaagguccgcucccagcucaagaacaacgccaaggagaucgggaacggcugcuucgaguucuaccacaagugcgacaacacgugcauggagagcgugaagaacgggaccuacgacuaccccaaguacuccgaggaggccaagcugaaccgggaggagaucgacggcgugaagcuggagagcacccgcaucuaccagauccucgcgaucuacuccaccgucgccagcagccuggugcugguggucucccucggggccaucagcuucuggaugugcuccaacggcagccugcagugccggaucugcaucuga

SEQ ID NO: 71499 - RNA, 1701 nt, Artificial Sequence; identical to SEQ ID NO: 71402
  derived and/or modified CDS sequence (opt1) from hemagglutinin__InfluenzaA__AEO01386

SEQ ID NO: 71500 - RNA, 1701 nt, Artificial Sequence
  derived and/or modified CDS sequence (opt1) from hemagglutinin__InfluenzaA__AEO01387
augaaggccauccuggugguccuccuguacaccuucgccaccgcgaacgccgacacgcugugcaucggcuaccacgccaacaacagcaccgacaccguggacaccgugcucgagaagaacgucacggugacccacuccgugaacauccuggaggacaagcacaacgggaagcugugcaagcuccgcggcgucgcgccccugcaccuggggaagugcaacaucgccggcuggauccucgggaacccggagugcgagagccuguccaccgccagcuccuggagcuacaucguggagaccuccagcuccgacaacggcacgugcuaccccggcgacuucaucgacuacgaggagcugcgggagcagcucagcuccgugagcuccuucgagcgcuucgagaucuuccccaagaccagcuccuggcccaaccacgacagcaacaagggggucaccgccgccugcccgcacgccggcgcgaaguccuucuacaagaaccugaucuggcuggugaagaaggggaacagcuaccccaagcucuccaagagcuacaucaacgacaagggcaaggaggugcugguccugugggggauccaccaccccagcaccuccgccgaccagcagagccucuaccagaacgccgacgccuacguguucgugggcacgucccgguacagcaagaaguucaagcccgagaucgccauccgcccgaagguccgggaccaggagggccgcaugaacuacuacuggacccugguggagcccggggacaagaucaccuucgaggcgaccggcaaccugguggucccccgguacgccuucgccauggagcgcaacgccggguccggcaucaucaucagcgacacgcccgugcacgacugcaacacgaccugccagaccccgaagggcgccaucaacaccucccuccccuuccagaacauccaccccaucaccaucgggaagugccccaaguacgucaagagcaccaagcugcggcuggcgaccggccuccgcaacgugccguccauccagagccgggggcuguucggcgccaucgccggguucaucgagggcggcuggacggggaugguggacggcugguacggguaccaccaccagaacgagcagggcuccggguacgccgccgaccucaagagcacccagaacgcgaucgacgagaucaccaacaaggugaacuccgucaucgagaagaugaacauccaguucaccgccgugggcaaggaguucaaccaccuggagaagcgcaucgagaaccugaacaagaaggucgacgacggcuuccuggacaucuggacguacaacgccgagcuccuggugcugcucgagaacgagcggacccuggacuaccacgacagcaacgugaagaaccuguacgagaagguccgcucccagcucaagaacaacgccaaggagaucgggaacggcugcuucgaguucuaccacaagugcgacaacacgugcauggagagcgugaagaacgggaccuacgacuaccccaaguacuccgaggaggccaagcugaaccgggaggagaucgacggcgugaagcuggagagcacccgcaucuaccagauccucgcgaucuacuccaccgucgccagcagccuggugcugguggucucccucggggccaucagcuucuggaugugcuccaacggcagccugcagugccggaucugcaucuga

SEQ ID NO: 71501 - RNA, 1701 nt, Artificial Sequence
  derived and/or modified CDS sequence (opt1) from hemagglutinin__InfluenzaA__AEO01388
augaaggccauccuggugguccuccuguacaccuucgccaccgcgaacgccgacacgcugugcaucggcuaccacgccaacaacagcaccgacaccguggacaccgugcucgagaagaacgucacggugacccacuccgugaaccugcuggaggacaagcacaacgggaagcucugcaagcugcgcggcgucgcgccccugcaccucgggaagugcaacaucgccggcuggauccuggggaacccggagugcgagagccuguccaccgccagcuccuggagcuacaucguggagaccuccagcuccgacaacggcacgugcuaccccggcgacuucaucgacuacgaggagcuccgggagcagcugagcuccgugagcuccuucgagaaguucgagaucuuccccaagaccagcuccuggcccaaccacgacagcaacaagggggucaccgccgccugcccgcacgccggcgcgaaguccuucuacaagaaccugaucuggcucgugaagaaggggaacagcuaccccaagcuguccaagagcuacaucaacgacaagggcaaggaggugcugguccucugggggauccaccaccccagcaccuccgccgaccagcagagccuguaccagaacgccgacgccuacguguucgugggcacgucccgcuacagcaagaaguucaagcccgagaucgccauccggccgaagguccgcgaccaggagggccggaugaacuacuacuggacccugguggagcccggggacaagaucaccuucgaggcgaccggcaaccucguggucccccgcuacgccuucgccauggagcggaacgccggguccggcaucaucaucagcgacacgcccgugcacgacugcaacacgaccugccagaccccgaagggcgccaucaacaccucccugcccuuccagaacauccaccccaucaccaucgggaagugccccaaguacgucaagagcaccaagcugcgccucgcgaccggccugcggaacgugccguccauccagagccgcgggcuguucggcgccaucgccggguucaucgagggcggcuggacggggaugguggacggcugguacggguaccaccaccagaacgagcagggcuccggguacgccgccgaccucaagagcacccagaacgcgaucgacaagaucaccaacaaggugaacuccgucaucgagaagaugaacacccaguucacggccgugggcaaggaguucaaccaccuggagaagcggaucgagaaccugaacaagaaggucgacgacggcuuccucgacaucuggaccuacaacgccgagcugcuggugcuccuggagaacgagcgcacccuggacuaccacgacagcaacgugaagaaccucuacgagaagguccggucccagcugaagaccaacgccaaggagaucgggaacggcugcuucgaguucuaccacaagugcgacaacacgugcauggagagcgugaagaacgggaccuacgacuaccccaaguacuccgaggaggccaagcugaaccgcgaggagaucgacggcgugaagcucgagagcacccggaucuaccagauccuggcgaucuacuccaccgucgccagcagccuggugcucguggucucccugggggccaucagcuucuggaugugcuccaacggcagccugcagugccgcaucugcaucuga

SEQ ID NO: 71502 - RNA, 1701 nt, Artificial Sequence
  derived and/or modified CDS sequence (opt1) from hemagglutinin__InfluenzaA__AEO01389
augaaggccauccuggugguccuccuguacaccuucgccaccgcgaacgccgacacgcugugcaucggcuaccacgccaacaacagcaccgacaccguggacaccgugcucgagaagaacgucacggugacccacuccgugaaccugcuggaggacaagcacaacgggaagcucugcaagcugcgcggcgucgcgccccugcaccucgggaagugcaacaucgccggcuggauccuggggaacccggagugcgagagccuguccaccgccagcuccuggagcuacaucguggagaccuccagcuccgacaacggcacgugcuaccccggcgacuucaucgacuacgaggagcuccgggagcagcugagcuccgugagcuccuucgagcgcuucgagaucuuccccaagaccagcuccuggcccaaccacgacagcaacaagggggucaccgccgccugcccgcacgccggcaccaaguccuucuacaagaaccugaucuggcucgugaagaaggggaacagcuaccccaagcuguccaagagcuacaucaacgacaagggcaaggaggugcugguccucugggggauccaccaccccagcacguccgcggaccagcagagccuguaccagaacgccgacgccuacguguucgugggcaccucccgguacagcaagaaguucaagcccgagaucgccauccgcccgaagguccgggaccaggagggccgcaugaacuacuacuggacccugguggagcccggggacaagaucaccuucgaggccacgggcaaccucguggucccccgguacgcguucgccauggagcgcaacgccggguccggcaucaucaucagcgacacccccgugcacgacugcaacacgaccugccagaccccgaagggcgccaucaacaccucccugcccuuccagaacauccaccccaucaccaucgggaagugccccaaguacgucaagagcaccaagcugcggcucgccacgggccugcgcaacgugccguccauccagagccgggggcuguucggcgcgaucgccggguucaucgagggcggcuggaccgggaugguggacggcugguacggguaccaccaccagaacgagcagggcuccggguacgccgccgaccucaagagcacccagaacgccaucgacaagaucaccaacaaggugaacuccgucaucgagaagaugaacacgcaguucaccgcggugggcaaggaguucaaccaccuggagaagcgcaucgagaaccugaacaagaaggucgacgacggcuuccucgacaucuggaccuacaacgccgagcugcuggugcuccuggagaacgagcggacccuggacuaccacgacagcaacgugaagaaccucuacgagaagguccgcucccagcugaagaacaacgccaaggagaucgggaacggcugcuucgaguucuaccacaagugcgacaacacgugcauggagagcgugaagaacgggaccuacgacuaccccaaguacuccgaggaggccaagcugaaccgggaggagaucgacggcgugaagcucgagagcacccgcaucuaccagauccuggccaucuacuccaccgucgcgagcagccuggugcucguggucucccugggggccaucagcuucuggaugugcuccaacggcagccugcagugccggaucugcaucuga

SEQ ID NO: 71503 - RNA, 1701 nt, Artificial Sequence
  derived and/or modified CDS sequence (opt1) from hemagglutinin__InfluenzaA__AEO01390
augaaggccauccuggugguccuccuguacaccuucgccaucgcgaacgccgacacccugugcaucggcuaccacgccaacaacagcacggacaccguggacaccgugcucgagaagaacgucaccgugacgcacuccgugaaccugcuggaggacaagcacaacgggaagcucugcaagcugcgcggcgucgcgccccugcaccucgggaagugcaacaucgccggcuggauccuggggaacccggagugcgagagccuguccaccgccagcuccuggagcuacaucguggagaccuccagcuccgacaacgggaccugcuaccccggcgacuucaucgacuacgaggagcuccgggagcagcugagcuccgugagcuccuucgagcgcuucgagaucuuccccaagacgagcuccuggcccaaccacgacagcaacaagggggucaccgccgccugcccgcacgccggcgcgaaguccuucuacaagaaccugaucuggcucgugaagaaggggaacagcuaccccaagcuguccaagagcuacaucaacgacaagggcaaggaggugcugguccucugggggauccaccaccccagcaccuccgccgaccagcagagccuguaccagaacgccgacgccuacguguucguggagaccucccgguacagcaagaaggucaagcccgagaucgccauccgcccgcgggugcgcgaccaggagggccggaugaacuacuacuggacgcugguggagcccggcgacaagaucaccuucgaggcgaccgggaaccucgucgugccccgcuacgccuucgccauggagcggaacgccggcuccgggaucaucaucagcgacacccccgugcacgacugcaacacgaccugccagaccccgaagggcgccaucaacaccucccugcccuuccagaacauccaccccaucacgaucggcaagugccccaaguacgucaagagcaccaagcugcgccucgcgaccgggcugcggaacgugccguccauccagagccgcggccuguucggggccaucgccggcuucaucgagggcggcuggaccggcaugguggacgggugguacggcuaccaccaccagaacgagcagggguccggcuacgccgccgaccucaagagcacgcagcacgcgaucgacgagaucaccaacaaggucaacuccgugaucgagaagaugaacacccaguucaccgccgucgggaaggaguucaaccaccuggagaagcggaucgagaaccugaacaagaagguggacgacggcuuccucgacaucuggacguacaacgccgagcugcuggugcuccuggagaacgagcgcacccuggacuaccacgacagcaacgucaagaaccucuacgagaaggugcggucccagcugaagaacaacgccaaggagaucggcaacgggugcuucgaguucuaccacaagugcgacaacacgugcauggagagcgugaagaacggcaccuacgacuaccccaaguacuccgaggucgccaagcugaaccgcgaggagaucaacggggugaagcucgagagcacccggaucuaccagauccuggcgaucuacuccaccguggccagcagccugguccucguggugucccugggcgccaucagcuucuggaugugcuccaacgggagccugcagugccgcaucugcaucuga

SEQ ID NO: 71504 - RNA, 1701 nt, Artificial Sequence; identical to SEQ ID NO: 71402
  derived and/or modified CDS sequence (opt1) from hemagglutinin__InfluenzaA__AEO01391

SEQ ID NO: 71505 - RNA, 1701 nt, Artificial Sequence; identical to SEQ ID NO: 71411
  derived and/or modified CDS sequence (opt1) from hemagglutinin__InfluenzaA__AEO01392

SEQ ID NO: 71506 - RNA, 1701 nt, Artificial Sequence; identical to SEQ ID NO: 68290
  derived and/or modified CDS sequence (opt1) from hemagglutinin__InfluenzaA__AEO01393

SEQ ID NO: 71507 - RNA, 1701 nt, Artificial Sequence; identical to SEQ ID NO: 67794
  derived and/or modified CDS sequence (opt1) from hemagglutinin__InfluenzaA__AEO01394

SEQ ID NO: 71508 - RNA, 1701 nt, Artificial Sequence
  derived and/or modified CDS sequence (opt1) from hemagglutinin__InfluenzaA__AEO01395
augaaggccauccuggugguccuccuguacaccuucgccaccgcgaacgccgacacgcugugcaucggcuaccacgccaacaacagcaccgacaccguggacaccgugcucgagaagaacgucacggugacccacuccgugaaccugcuggaggacaagcacaacgggaagcucugcaagcugcgcggcgucgcgccccugcaccucgggaagugcaacaucgccggcuggauccuggggaacccggagugcgagagccuguccaccgccagcuccuggagcuacaucguggagaccuccagcuccgacaacggcacgugcuaccccggcgacuuccucgacuacgaggagcugcgggagcagcugagcuccgugagcuccuucgagcgcuucgagaucuuccccaagaccagcuccuggcccaaccacgacagcaacaagggggucaccgccgccugcccgcacgccggcgcgaaguccuucuacaagaaccucaucuggcuggugaagaaggggaacagcuaccccaagcuguccaagagcuacaucaacgacaagggcaaggaggugcucguccugugggggauccaccaccccagcaccuccgccgaccagcagagccuguaccagaacgccgacgccuacguguucgugggcacgucccgguacagcaagaaguucaagcccgagaucgccauccgcccgaagguccgggagcaggagggccgcaugaacuacuacuggacccucguggagcccggggacaagaucaccuucgaggcgaccggcaaccugguggucccccgguacgccuucgccauggagcgcaacgccggguccggcaucaucaucagcgacacgcccgugcacgacugcaacacgaccugccagaccccgaagggcgccaucaacaccucccugcccuuccagaacauccaccccaucaccaucgggaagugccccaaguacgucaagagcaccaagcuccggcuggcgaccggccugcgcaacgugccguccauccagagccgggggcuguucggcgccaucgccggguucaucgagggcggcuggacggggaugguggacggcugguacggguaccaccaccagaacgagcagggcuccggguacgccgccgaccucaagagcacccagaacgcgaucgacgagaucaccaacaaggugaacuccgucaucgagaagaugaacacccaguucacggccgugggcaaggaguucaaccaccuggagaagcgcaucgagaaccucaacaagaaggucgacgacggcuuccuggacaucuggaccuacaacgccgagcugcucgugcugcuggagaacgagcggacccucgacuaccacgacagcaacgugaagaaccuguacgagaagguccgcucccagcugaagaacaacgccaaggagaucgggaacggcugcuucgaguucuaccacaagugcgacaacacgugcauggagagcgugaagaacgggaccuacgacuaccccaaguacuccgaggaggccaagcucaaccgggaggagaucgacggcgugaagcuggagagcacccgcaucuaccagauccuggcgaucuacuccaccgucgccagcagccucgugcugguggucucccugggggccaucagcuucuggaugugcuccaacggcagccuccagugccggaucugcaucuga

SEQ ID NO: 71509 - RNA, 1701 nt, Artificial Sequence; identical to SEQ ID NO: 67794
  derived and/or modified CDS sequence (opt1) from hemagglutinin__InfluenzaA__AEO01396

SEQ ID NO: 71510 - RNA, 1701 nt, Artificial Sequence
  derived and/or modified CDS sequence (opt1) from hemagglutinin__InfluenzaA__AEO01397
augaaggccauccuggugguccuccuguacaccuucgccaccgcgaacgccgacacgcugugcaucggcuaccacgccaacaacagcaccgacaccguggacaccgugcucgagaagaacgucacggugacccacuccgugaacauccuggaggacaagcacaacgggaagcugugcaagcuccgcggcgucgcgccccugcaccuggggaagugcaacaucgccggcuggauccucgggaacccggagugcgagagccuguccaccgccagcuccuggagcuacaucguggagaccuccagcuccgacaacggcacgugcuaccccggcgacuucaucgacuacgaggagcugcgggagcagcucagcuccgugagcuccuucgagcgcuucgagaucuuccccaagaccagcuccuggcccaaccacgacagcaacaagggggucaccgccgccugcccgcacgccggcgcgaaguccuucuacaagaaccugaucuggcuggugaagaaggggaacagcuaccccaagcucuccaagagcuacaucaacgacaagggcaaggaggugcugguccugugggggauccaccaccccagcaccuccgccgaccagcagagccucuaccagaacacggacgccuacguguucgugggcaccucccgguacagcaagaaguucaagcccgagaucgccauccgcccgaagguccgggaccaggagggccgcaugaacuacuacuggacccugguggagcccggggacaagaucaccuucgaggccacgggcaaccugguggucccccgguacgcguucgccauggagcgcaacgccggguccggcaucaucaucagcgacacccccgugcacgacugcaacacgaccugccagaccccgaagggcgccaucaacaccucccuccccuuccagaacauccaccccaucaccaucgggaagugccccaaguacgucaagagcaccaagcugcggcuggccacgggccuccgcaacgugccguccauccagagccgggggcuguucggcgcgaucgccggguucaucgagggcggcuggaccgggaugguggacggcugguacggguaccaccaccagaacgagcagggcuccggguacgccgccgaccucaagagcacccagaacgccaucgacgagaucaccaacaaggugaacuccgucaucgagaagaugaacacgcaguucaccgcggugggcaaggaguucaaccaccuggagaagcgcaucgagaaccugaacaagaaggucgacgacggcuuccuggacaucuggaccuacaacgccgagcuccuggugcugcucgagaacgagcggacccuggacuaccacgacagcaacgugaagaaccuguacgagaagguccgcucccagcucaagaacaacgccaaggagaucgggaacggcugcuucgaguucuaccacaagugcgacaacacgugcauggagagcgugaagaacgggaccuacgacuaccccaaguacuccgaggaggccaagcugaaccgggaggagaucgacggcgugaagcuggagagcacccgcaucuaccagauccucgccaucuacuccaccgucgcgagcagccuggugcugguggucucccucggggccaucagcuucuggaugugcuccaacggcagccugcagugccggaucugcaucuga

SEQ ID NO: 71511 - RNA, 1701 nt, Artificial Sequence
  derived and/or modified CDS sequence (opt1) from hemagglutinin__InfluenzaA__AEO01398
augaaggccauccuggugguccuccuguacaccuucgccaccgcgaacgccgacacgcugugcaucggcuaccacgccaacaacagcaccgacaccguggacaccgugcucgagaagaacgucacggugacccacuccgugaaccugcuggaggacaagcacaacgggaagcucugcaagcugcgcggcgucgcgccccugcaccucgggaagugcaacaucgccggcuggauccuggggaacccggagugcgagagccuguccaccgccagcuccuggagcuacaucguggagaccuccagcuccgacaacggcacgugcuaccccggcgacuucaucgacuacgaggagcuccgggagcagcugagcuccgugagcuccuucgagcgcuucgagaucuuccccaagaccagcuccuggcccaaccacgacagcaacaagggggucaccgccgccugcccgcacgccggcgcgaaguccuucuacaagaaccugaucuggcucgugaagaaggggaacagcuaccccaagcuguccaagagcuacaucaacgacaagggcaaggaggugcugguccucugggggauccaccaccccagcaccuccgccgaccagcagagccuguaccagaacgccgacgccaacguguucgugggcacgucccgguacagcaagaaguucaagcccgagaucgccauccgcccgaagguccggggccaggaggggcgcaugaacuacuacuggacccugguggagcccggcgacaagaucaccuucgaggcgaccgggaaccucguggucccccgguacgccuucgccauggagcgcaacgccggcuccggcaucaucaucagcgacacgcccgugcacgacugcaacacgaccugccagaccccgaagggggccaucaacaccucccugcccuuccagaacauccaccccaucaccaucggcaagugccccaaguacgucaagagcaccaagcugcggcucgcgaccgggcugcgcaacgugccguccauccagagccggggccuguucggggccaucgccggcuucaucgagggcggguggacgggcaugguggacgggugguacggcuaccaccaccagaacgagcagggguccggcuacgccgccgaccucaagagcacccagaacgcgaucgacgagaucaccaacaaggugaacuccgucaucgagaagaugaacacccaguucacggccgugggcaaggaguucaaccaccuggagaagcgcaucgagaaccugaacaagaaggucgacgacggguuccucgacaucuggaccuacaacgccgagcugcuggugcuccuggagaacgagcggacccuggacuaccacgacagcaacgugaagaaccucuacgagaagguccgcaaccagcugaagaacaacgccaaggagaucggcaacgggugcuucgaguucuaccacaagugcgacaacacgugcauggaguccgugaagaacggcaccuacgacuaccccaaguacagcgaggaggccaagcugaaccgggaggagaucgacggggugaagcucgaguccacccgcaucuaccagauccuggcgaucuacagcaccgucgccuccagccuggugcucguggucagccugggcgccaucuccuucuggaugugcagcaacggcucccugcagugccggaucugcaucuga

SEQ ID NO: 71512 - RNA, 1701 nt, Artificial Sequence; identical to SEQ ID NO: 71411
  derived and/or modified CDS sequence (opt1) from hemagglutinin__InfluenzaA__AEO01399

SEQ ID NO: 71513 - RNA, 1701 nt, Artificial Sequence; identical to SEQ ID NO: 66693
  derived and/or modified CDS sequence (opt1) from hemagglutinin__InfluenzaA__AEO01402

SEQ ID NO: 71514 - RNA, 1701 nt, Artificial Sequence; identical to SEQ ID NO: 67857
  derived and/or modified CDS sequence (opt1) from hemagglutinin__InfluenzaA__AEO01403

SEQ ID NO: 71515 - RNA, 1701 nt, Artificial Sequence; identical to SEQ ID NO: 66693
  derived and/or modified CDS sequence (opt1) from hemagglutinin__InfluenzaA__AEO01404

SEQ ID NO: 71516 - RNA, 1701 nt, Artificial Sequence
  derived and/or modified CDS sequence (opt1) from hemagglutinin__InfluenzaA__AEO01405
augaaggccauccuggugguccuccuguacaccuucgccaccgcgaacgccgacacgcugugcaucggcuaccacgccaacaacagcaccgacaccguggacaccgugcucgagaagaacgucacggugacccacuccgugaaccugcuggaggacaagcacaacgggaagcucugcaagcugcgcggcgucgcgccccugcaccucgggaagugcaacaucgccggcuggauccuggggaacccggagugcgagagccuguccaccgccagcuccuggagcuacaucguggagaccuccagcuccgacaacggcacgugcuaccccggcgacuucaucgacuacgaggagcuccgggagcagcugagcuccgugagcuccuucgagcgcuucgagaucuuccccaagaccagcuccuggcccaaccacgacagcaacaagggggucaccgccgccugcccgcacgccggcgcgaaguccuucuacaagaaccugaucuggcucgugaagaaggggaacagcuaccccaagcuguccaagagcuacaucaacgacaagggcaaggaggugcugguccucugggggauccaccaccccagcaccuccgccgaccagcagagccuguaccagaacgccgacgccuacguguucgugggcacgucccgguacagcaagaaguucaagcccgagaucgccauccgcccgaagguccgggaccaggagggccgcaugaacuacuacuggacccugguggagcccggggacaagaucaccuucgaggcgaccggcaaccucguggucccccgguacgccuucgccauggagcgcaacgccggguccggcaucaucaucagcgacacgcccgugcacgacugcaacacgaccugccagaccccgaagggcgccaucaacaccucccugcccuuccagaacauccaccccaucaccaucgggaagugccccaaguacgucaagagcaccaagcugcggcucgcgaccggccugcgcaacgugccguccauccagagccgggggcuguucggcgccaucgccggguucaucgagggcggcuggacggggaugguggacggcugguacggguaccaccaccagaacgagcagggcuccggguacgccgccgaccucaagagcacccagaacgcgaucgacgagaucaccaacaaggugaacuccgucaucgagaagaugaacacccaguucacggccgugggcaaggaguucaaccaccuggagaagcgcaucgagaaccugaacaagaaggucgacgacggcuuccucgacaucuggaccuacaacgccgagcugcuggugcuccuggagaacgagcggacccuggacuaccacgacagcaacgugaagaaccucuacgagaagguccgcucccagcugaagaacaacgccaaggagaucgggaacggcugcuucgaguucuaccacaagugcgacaacacgugcauggagagcgugaagaacgggaccuacgacuaccccaaguacuccgaggaggccaagcugaaccgggaggagaucgacggcgugaagcucgagagcaccaugaucuaccagauccuggcgaucuacuccaccgucgccagcagccuggugcucguggucucccugggggccaucagcuucuggaugugcuccaacggcagccugcagugccgcaucugcaucuga

SEQ ID NO: 71517 - RNA, 1701 nt, Artificial Sequence
  derived and/or modified CDS sequence (opt1) from hemagglutinin__InfluenzaA__AEO01407
augaaggccauccuggugguccuccuguacaccuucgccaccgcgaacgccgacacgcugugcaucggcuaccacgccaacaacagcaccgacaccguggacaccgugcucgagaagaacgucacggugacccacuccgugaaccugcuggaggacaagcacaacgggaagcucugcaagcugcgcggcgucgcgccccugcaccucgggaagugcaacaucgccggcuggauccuggggaacccggagugcgagagccuguccaccgccagcuccuggagcuacaucguggagaccuccagcuccgacaacggcacgugcuaccccggcgacuucaucgacuacgaggagcuccgggagcagcugagcuccgugagcuccuucgagcgcuucgagaucuuccccaagaccagcuccuggcccaaccacgacagcaacaagggggucaccgccgccugcccgcacgccggcgcgaaguccuucuacaagaaccugaucuggcucgugaagaaggggaacagcuaccccaagcuguccaagagcuacaucaacgacaagggcaaggaggugcugguccucugggggauccaccaccccagcaccuccgccgaccagcagagccuguaccagaacgccgacgccuacguguucgugggcacgucccgguacagcaagaaguucaagcccgagaucgccauccgcccgaagguccgggaccaggagggccgcaugaacuacuacuggacccugguggagcccggggacaagaucaccuucgaggcgaccggcaaccucguggucccccgguacgccuucgccauggagcgcaacgccggguccggcaucaucaucagcgacacgcccgugcacgacugcaacacgaccugccagaccccgaagggcgccaucaacaccucccugcccuuccagaacauccaccccaucaccaucgggaagugccccaaguacgucaagagcaccaagcugcggcucgcgaccggccugcgcaacgugccguccauccagagccgggggcuguucggcgccaucgccggguucaucgagggcggcuggacggggaugguggacggcugguacggguaccaccaccagaacgagcagggcuccggguacgccgccgaccucaagagcacccagcacgcgaucgacgagaucaccaacaaggugaacuccgucaucgagaagaugaacacccaguucacggccgugggcaaggaguucaaccaccuggagaagcgcaucgagaaccugaacaagaaggucgacgacggcuuccucgacaucuggaccuacaacgccgagcugcuggugcuccuggagaacgagcggacccuggacuaccacgacagcaacgugaagaaccucuacgagaagguccgcucccagcugaagaacaacgccaaggagaucgggaacggcugcuucgaguucuaccacaagugcgacaacacgugcauggagagcgugaagaacgggaccuacgacuaccccaaguacuccgaggaggccaagcugaaccgggaggagaucaacggcgugaagcucgagagcacccgcaucuaccagauccuggcgaucuacuccaccgucgccagcagccuggugcucguggucucccugggggccaucagcuucuggaugugcuccaacggcagccugcagugccggaucugcaucuga

SEQ ID NO: 71518 - RNA, 1701 nt, Artificial Sequence
  derived and/or modified CDS sequence (opt1) from hemagglutinin__InfluenzaA__AEO01408
augaaggccauccuggugguccuccuguacaccuucgccaccgcgaacgccgacacgcugugcaucggcuaccacgccaacaacagcaccgacaccguggacaccgugcucgagaagaacgucacggugacccacuccgugaaccugcuggaggacaagcacaacgggaagcucugcaagcugcgcggcgucgcgccccugcaccucgggaagugcaacaucgccggcuggauccuggggaacccggagugcgagagccuguccaccgccagcuccuggagcuacaucguggagaccuccagcuccgacaacggcacgugcuaccccggcgacuucaucgacuacgaggagcuccgggagcagcugagcuccgugagcuccuucgagcgcuucgagaucuuccccaagaccagcuccuggcccaaccacgacagcaacaagggggucaccgccgccugcccgcacgccggcgcgaaguccuucuacaagaaccugaucuggcucgugaagaaggggaacagcuaccccaagcuguccaagagcuacaucaacgacaagggcaaggaggugcugguccucugggggauccaccaccccagcaccuccgccgaccagcagagccuguaccagaacgccgacgccuacguguucgugggcacgucccgguacagcaagaaguucaagcccgagaucgccauccgcccgaagguccgggagcaggagggccgcaugaacuacuacuggacccugguggagcccggggacaagaucaccuucgaggcgaccggcaaccucguggucccccgguacgccuucgccauggagcgcaacgccggguccggcaucaucaucagcgacacgcccgugcacgacugcaacacgaccugccagaccccgaagggcgccaucaacaccucccugcccuuccagaacauccaccccaucaccaucgggaagugccccaaguacgucaagagcaccaagcugcggcucgcgaccggccugcgcaacgugccguccauccagagccgggggcuguucggcgccaucgccggguucaucgagggcggcuggacggggaugguggacggcugguacggguaccaccaccagaacgagcagggcuccggguacgccgccgaccucaagagcacccagaacgcgaucgacgagaucaccaacaaggugaacuccgucaucgagaagaugaacacccaguucacggccgugggcaaggaguucaaccaccuggagaagcgcaucgagaaccugaacaagaagaucgacgacggcuuccucgacaucuggaccuacaacgccgagcugcugguccuccuggagaacgagcggacccuggacuaccacgacagcaacgugaagaaccucuacgagaaggugcgcucccagcugaagaacaacgccaaggagaucgggaacggcugcuucgaguucuaccacaagugcgacaacacgugcauggagagcgucaagaacgggaccuacgacuaccccaaguacuccgaggaggccaagcugaaccgggaggagaucgacggcgugaagcucgagagcacccgcaucuaccagauccuggcgaucuacuccaccguggccagcagccugguccucguggugucccugggggccaucagcuucuggaugugcuccaacggcagccugcagugccggaucugcaucuga

SEQ ID NO: 71519 - RNA, 1701 nt, Artificial Sequence; identical to SEQ ID NO: 67795
  derived and/or modified CDS sequence (opt1) from hemagglutinin__InfluenzaA__AEO01409

SEQ ID NO: 71520 - RNA, 1701 nt, Artificial Sequence; identical to SEQ ID NO: 71411
  derived and/or modified CDS sequence (opt1) from hemagglutinin__InfluenzaA__AEO01410

SEQ ID NO: 71521 - RNA, 1701 nt, Artificial Sequence; identical to SEQ ID NO: 70112
  derived and/or modified CDS sequence (opt1) from hemagglutinin__InfluenzaA__AEO01411

SEQ ID NO: 71522 - RNA, 1701 nt, Artificial Sequence; identical to SEQ ID NO: 67046
  derived and/or modified CDS sequence (opt1) from hemagglutinin__InfluenzaA__AEO01412

SEQ ID NO: 71523 - RNA, 1701 nt, Artificial Sequence
  derived and/or modified CDS sequence (opt1) from hemagglutinin__InfluenzaA__AEO01413
augaaggccauccuggugguccuccuguacaccuucgccaccgcgaacgccgacacgcugugcaucggcuaccacgccaacaacagcaccgacaccguggacaccgugcucgagaagaacgucacggugacccacuccgugaaccugcuggaggacaagcacaacgggaagcucugcaagcugcgcggcgucgcgccccugcaccucgggaagugcaacaucgccggcuggauccuggggaacccggagugcgagagccuguccaccgccagcuccuggagcuacaucguggagaccuccagcuccgacaacggcacgugcuaccccggcgacuucaucgacuacgaggagcuccgggagcagcugagcuccgugagcuccuucgagcgcuucgagaucuuccccaagaccagcuccuggcccaaccacgacagcaacaagggggucaccgccgccugcccgcacgccggcgcgaaguccuucuacaagaaccugaucuggcucgugaagaaggggaacagcuaccccaagcuguccaagagcuacaucaacgacaagggcaaggaggugcugguccucugggggauccaccaccccagcaccuccgccgaccagcagagccuguaccagaacgccgacgccuacguguucgugggcacgucccgguacagcaagaaguucaagcccgagaucgccauccgcccgaagguccgggaccaggagggccgcaugaacuacuacuggacccugguggagcccggggacaagaucaccuucgaggcgaccggcaaccucguggucccccgguacgccuucgccauggagcgcaacgccggguccggcaucaucaucagcgacacgcccgugcacgacugcaacacgaccugccagaccccgaagggcgccaucaacaccucccugcccuuccagaacauccaccccaucaccaucgggaagugccccaaguacgucaagagcaccaagcugcggcucgcgaccggccugcgcaacgugccguccauccagagccgggggcuguucggcgccaucgccggguucaucgagggcggcuggacggggaugguggacggcugguacggguaccaccaccagaacgagcagggcuccggguacgccgccgaccucaagagcacccagaacgcgaucgacaagaucaccaacaaggugaacuccgucaucgagaagaugaacacccaguucacggccgugggcaaggaguucaaccaccuggagaagcgcaucgagaaccugaacaagaaggucgacgacggcuuccucgacaucuggaccuacaacgccgagcugcuggugcuccuggagaacgagcggacccuggacuaccacgacagcaacgugaagaaccucuacgagaagguccgcucccagcucaagagcaacgccaaggagaucgggaacggcugcuucgaguucuaccacaagugcgacaacacgugcauggaguccgugaagaacgggaccuacgacuaccccaaguacagcgaggaggccaagcugaaccgggaggagaucgacggcgugaagcuggaguccacccgcaucuaccagauccuggcgaucuacagcaccgucgccagcucccuggugcucguggucagccugggggccaucuccuucuggaugugcagcaacggcucccugcagugccggaucugcaucuga

SEQ ID NO: 71524 - RNA, 1701 nt, Artificial Sequence
  derived and/or modified CDS sequence (opt1) from hemagglutinin__InfluenzaA__AEO01414
augaaggccauccuggugguccuccuguacaccuucgccaccgcgaacgccgacacgcugugcaucggcuaccacgccaacaacagcaccgacaccguggacaccgugcucgagaagaacgucacggugacccacuccgugaaccugcuggaggacaagcacaacgggaagcucugcaagcugcgcggcgucgcgccccugcaccucgggaagugcaacaucgccggcuggauccuggggaacccggagugcgagagccuguccaccgccagcuccuggagcuacaucguggagaccuccagcuccgacaacggcacgugcuaccccggcgacuucaucgacuacgaggagcuccgggagcagcugagcuccgugagcuccuucgagcgcuucgagaucuuccccaagaccagcuccuggcccaaccacgacagcaacaagggggucaccgccgccugcccgcacgccggcgcgaaguccuucuacaagaaccugaucuggcucgugaagaaggggaacagcuaccccaagcuguccaagagcuacaucaacgacaagggcaaggaggugcugguccucugggggauccaccaccccagcaccuccgccgaccagcagagccuguaccagaacgccgacgccuacguguucgugggcacgucccgguacagcaagaaguucaagcccgagaucgccauccgcccgaagguccgggaccaggagggccgcaugaacuacuacuggacccugguggagcccggggacaagaucaccuucgaggcgaccggcaaccucguggucccccgguacgccuucgccauggagcgcaacacgggguccggcaucaucaucagcgacacccccgugcacgacugcuccacgaccugccagaccccgaagggcgccaucaacaccagccugcccuuccagaacgugcaccccaucaccaucgggaagugccccaaguacgucaaguccaccaagcugcggcucgccacgggccugcgcaacgugccgagcauccagucccgggggcuguucggcgcgaucgccggguucaucgagggcggcuggaccgggaugguggacggcugguacggguaccaccaccagaacgagcagggcagcggguacgccgccgaccucaaguccacccagaacgccaucgacgagaucaccaacaaggucaacagcgugaucgagaagaugaacacgcaguucaccgcggucggcaaggaguucaaccaccuggagaagcgcaucgagaaccugaacaagaagguggacgacggcuuccucgacaucuggaccuacaacgccgagcugcuggugcuccuggagaacgagcggacccuggacuaccacgacuccaacgucaagaaccucuacgagaaggugcgcagccagcugaagaacaacgccaaggagaucgggaacggcugcuucgaguucuaccacaagugcgacaacacgugcauggaguccgugaagaacgggaccuacgacuaccccaaguacagcgaggaggccaagcugaaccgggaggagaucgacggcgucaagcucgaguccacccgcaucuaccagauccuggccaucuacagcaccguggcgagcucccuggugcucgucgugagccugggggccaucuccuucuggaugugcagcaacggcucccugcagugccggaucugcaucuga

SEQ ID NO: 71525 - RNA, 1701 nt, Artificial Sequence; identical to SEQ ID NO: 70324
  derived and/or modified CDS sequence (opt1) from hemagglutinin__InfluenzaA__AEO01416

SEQ ID NO: 71526 - RNA, 1701 nt, Artificial Sequence; identical to SEQ ID NO: 67857
  derived and/or modified CDS sequence (opt1) from hemagglutinin__InfluenzaA__AEO01418

SEQ ID NO: 71527 - RNA, 1701 nt, Artificial Sequence; identical to SEQ ID NO: 67857
  derived and/or modified CDS sequence (opt1) from hemagglutinin__InfluenzaA__AEO01419

SEQ ID NO: 71528 - RNA, 1701 nt, Artificial Sequence
  derived and/or modified CDS sequence (opt1) from hemagglutinin__InfluenzaA__AEO01420
augaaggccauccuggugguccuccuguacaccuucgccaccgcgaacgccgacacgcugugcaucggcuaccacgccaacaacagcaccgacaccguggacaccgugcucgagaagaacgucacggugacccacuccgugaaccugcuggaguacaagcacaacgggaagcucugcaagcugcgcggcgucgcgccccugcaccucgggaagugcaacaucgccggcuggauccuggggaacccggagugcgagagccuguccaccgcgagcuccuggagcuacaucguggagaccuccaacagcgacaacggcacgugcuaccccggcgacuucaucgacuacgaggagcuccgggagcagcuguccagcguguccagcuucgagcgcuucgagaucuuccccaagaccuccagcuggcccaaccacgacuccaacaagggggucaccgccgccugcccgcacgccggcgccaagagcuucuacaagaaccugaucuggcucgugaagaaggggaacuccuaccccaagcugagcaaguccuacaucaacgacaagggcaaggaggugcugguccucugggggauccaccaccccagcaccagcgccgaccagcagucccuguaccagaacgccgacgccuacguguucgugggcacgagccgguacuccaagaaguucaagcccgagaucgccauccgcccgaagguccgggaccaggagggccgcaugaacuacuacuggacccugguggagcccggggacaagaucaccuucgaggcgaccggcaaccucguggucccccgguacgccuucgccauggagcgcaacgccgggagcggcaucaucaucuccgacacgcccgugcacgacugcaacacgaccugccagaccccgaagggcgccaucaacaccagccugcccuuccagaacauccaccccaucaccaucgggaagugccccaaguacgugaaguccaccaagcugcggcucgcgaccggccugcgcaacgucccgagcauccagucccgggggcuguucggcgccaucgccggguucaucgagggcggcuggacggggaugguggacggcugguacggguaccaccaccagaacgagcagggcagcggguacgccgccgaccucaaguccacccagaacgcgaucgacgagaucaccaacaaggugaacagcgucaucgagaagaugaacacccaguucacggccgugggcaaggaguucaaccaccuggagaagcgcaucgagaaccugaacaagaaggucgacgacggcuuccucgacaucuggaccuacaacgccgagcugcuggugcuccuggagaacgagcggacccuggacuaccacgacuccaacgugaagaaccucuacgagaagguccgcagccagcugaagaacaacgccaaggagaucgggaacggcugcuucgaguucuaccacaagugcgacaacacgugcauggaguccgugaagaacgggaccuacgacuaccccaaguacagcgaggaggccaagcugaaccgggaggagaucgacggcgugaagcucgaguccacccgcaucuaccagauccuggcgaucuacagcaccgucgccuccagccuggugcucguggucagccugggggccaucuccuucuggaugugcagcaacggcucccugcagugccggaucugcaucuga

SEQ ID NO: 71529 - RNA, 1701 nt, Artificial Sequence
  derived and/or modified CDS sequence (opt1) from hemagglutinin__InfluenzaA__AEO01421
augaaggccauccuggugguccuccuguacaccuucgccaccgcgaacgccgacacgcugugcaucggcuaccacgccaacaacagcaccgacaccguggacaccgugcucgagaagaacgucacggugacccacuccgugaaccugcuggaggacaagcacaacgggaagcucugcaagcugcgcggcgucgcgccccugcaccucgggaagugcaacaucgccggcuggauccuggggaacccggagugcgagagccuguccaccgccagcuccuggagcuacaucguggagaccuccagcuccgacaacggcacgugcuaccccggcgacuucaucgacuacgaggagcuccgggagcagcugagcuccgugagcuccuucgagaaguucgagaucuuccccaagaccagcuccuggcccaaccacgacagcaacaagggggucaccgccgccugcccgcacgccggcgcgaaguccuucuacaagaaccugaucuggcucgugaagaaggggaacagcuaccccaagcuguccaagagcuacaucaacgacaagggcaaggaggugcugguccucugggggauccaccaccccagcaccuccgccgaccagcagagccuguaccagaacgccgacgccuacguguucgugggcacgucccgcuacagcaagaaguucaagcccgagaucgccauccggccgaagguccgcgaccaggagggccggaugaacuacuacuggacccugguggagcccggggacaagaucaccuucgaggcgaccggcaaccucguggucccccgcuacgccuucgccauggagcggaacgccggguccggcaucaucaucagcgacacgcccgugcacgacugcaacacgaccugccagaccccgaagggcgccaucaacaccucccugcccuuccagaacauccaccccaucaccaucgggaagugccccaaguacgucaagagcaccaagcugcgccucgcgaccggccugcggaacgugccguccauccagagccgcgggcuguucggcgccaucgccggguucaucgagggcggcuggacggggaugguggacggcugguacggguaccaccaccagaacgagcagggcuccggguacgccgccgaccucaagagcacccagaacgcgaucgacaagaucaccaacaaggugaacuccgucaucgagaagaugaacacccaguucacggccgugggcaaggaguucaaccaccuggagaagcggaucgagaaccugaacaagaaggucgacgacggcuuccucgacaucuggaccuacaacgccgagcugcuggugcuccuggagaacgagcgcacccuggacuaccacgacagcaacgugaagaaccucuacgagaagguccggucccagcugaagaacaacgccaaggagaucgggaacggcugcuucgaguucuaccacaagugcgacaacacgugcauggagagcgugaagaacgggaccuacgacuaccccaaguacuccgaggaggccaagcugaaccgcgaggagaucgacggcgugaagcucgagagcacccggaucuaccagauccuggcgaucuacuccaccgucgccagcagccuggugcucguggucucccugggggccaucagcuucuggaugugcuccaacggcagccugcagugccgcaucugcaucuga

SEQ ID NO: 71530 - RNA, 1701 nt, Artificial Sequence
  derived and/or modified CDS sequence (opt1) from hemagglutinin__InfluenzaA__AEO01422
augaaggccauccuggugguccuccuguacaccuucgccaucgcgaacgccgacacccugugcaucggcuaccacgccaacaacagcacggacaccguggacaccgugcucgagaagaacgucaccgugacgcacuccgugaaccugcuggaggacaagcacaacgggaagcucugcaagcugcgcggcgucgcgccccugcaccucgggaagugcaacaucgccggcuggauccuggggaacccggagugcgagagccuguccaccgccagcuccuggagcuacaucguggagaccuccagcuccgacaacgggaccugcuaccccggcgacuucaucgacuacgaggagcuccgggagcagcugagcuccgugagcuccuucgagcgcuucgagaucuuccccaagacgagcuccuggcccaaccacgacagcaacaagggggucaccgccgccugcccgcacgccggcgcgaaguccuucuacaagaaccugaucuggcucgugaagaaggggaaccuguaccccaagcugagcaaguccuacaucaacgacaagggcaaggaggugcucguccugugggggauccaccaccccagcaccagcgccgaccagcagucccuguaccagaacgccgacgccuacguguucgugggcaccagccgguacuccaagaaguucaagcccgagaucgccauccgcccgaagguccgggaccaggagggccgcaugaacuacuacuggacgcucguggagcccggggacaagaucaccuucgaggcgaccggcaaccugguggucccccgguacgccuucgccauggagcgcaacgccgggagcggcaucaucaucuccgacacccccgugcacgacugcaacacgaccugccagaccccgaagggcgccaucaacaccagccugcccuuccagaacauccaccccaucacgaucgggaagugccccaaguacgugaaguccaccaagcuccggcuggcgaccggccugcgcaacgucccgagcauccagucccggggccucuucggcgccaucgccggguucaucgagggcggcuggaccgggaugguggacggcugguacggguaccaccaccagaacgagcagggcagcggguacgccgccgaccugaaguccacgcagcacgcgaucgacgagaucaccaacaaggugaacagcgucaucgagaagaugaacacccaguucaccgccgugggcaaggaguucaaccaccuggagaagcgcaucgagaaccucaacaagaaggucgacgacggcuuccuggacaucuggacguacaacgccgagcugcucgugcugcuggagaacgagcggacccucgacuaccacgacuccaacgugaagaaccuguacgagaagguccgcagccagcugaagaacaacgccaaggagaucgggaacggcugcuucgaguucuaccacaagugcgacaacacgugcauggaguccgugaagaacgggaccuacgacuaccccaaguacagcgaggaggccaagcucaaccgggaggagaucaacggcgugaagcuggaguccacccgcaucuaccagauccuggcgaucuacagcaccgucgccuccagccucgugcugguggucagccugggggccaucuccuucuggaugugcagcaacggcucccuccagugccggaucugcaucuga

SEQ ID NO: 71531 - RNA, 1701 nt, Artificial Sequence
  derived and/or modified CDS sequence (opt1) from hemagglutinin__InfluenzaA__AEO01423
augaaggccauccugaucgugcuccuguacaccuucgccaccgcgaacgccgacacgcugugcaucggcuaccacgccaacaacagcaccgacaccgucgacaccgugcucgagaagaacgugacggucacccacuccgugaaccugcuggaggacaagcacaacgggaagcucugcaagcugcgcggcguggcgccccugcaccucgggaagugcaacaucgccggcuggauccuggggaacccggagugcgagagccuguccaccgccagcuccuggagcuacaucgucgagaccuccagcuccgacaacggcacgugcuaccccggcgacuucaucgacuacgaggagcuccgggagcagcugagcuccgugagcuccuucgagcgcuucgagaucuuccccaagaccagcuccuggcccaaccacgacagcaacaagggggugaccgccgccugcccgcacgccggcgcgaaguccuucuacaagaaccugaucuggcucgucaagaaggggaacagcuaccccaagcuguccaagagcuacaucaacgacaagggcaaggaggugcuggugcucugggggauccaccaccccagcaccuccgccgaccagcagagccuguaccagaacgccgacgccuacgucuucgugggcacgucccgguacagcaagaaguucaagcccgagaucaccauccgcccgaaggugcgggaccaggagggccgcaugaacuacuacuggacccuggucgagcccggggacaagaucaccuucgaggccacgggcaaccucguggugccccgguacgcguucgccauggagcgcaacgccggguccggcaucaucaucagcgacacccccguccacgacugcaacacgaccugccagaccccgaagggcgccaucaacaccucccugcccuuccagaacauccaccccaucaccaucgggaagugccccaaguacgucaagagcaccaagcugcggcucgccacgggccugcgcaacgugccguccauccagagccgggggcuguucggcgcgaucgccggguucaucgagggcggcuggaccgggaugguggacggcugguacggguaccaccaccagaacgagcagggcuccggguacgccgccgaccucaagagcacccagaacgccaucgacgagaucaccaacaaggugaacuccgugaucgagaagaugaacacgcaguucaccgcggucggcaaggaguucaaccaccuggagaagcgcaucgagaaccugaacaagaagguggacgacggcuuccucgacaucuggaccuacaacgccgagcugcugguccuccuggagaacgagcggacccuggacuaccacgacagcaacgugaagaaccucuacgagaaggugcgcucccagcugaagaacaacgccaaggagaucgggaacggcugcuucgaguucuaccacaagugcgacaacacgugcauggagagcgucaagaacgggaccuacgacuaccccaaguacuccgaggaggccaagcugaaccgggaggagaucgacggcgugaagcucgagagcacccgcaucuaccagauccuggccaucuacuccaccguggcgagcagccugguccucguggugucccugggggccaucagcuucuggaugugcuccaacggcagccugcagugccggaucugcaucuga

SEQ ID NO: 71532 - RNA, 1701 nt, Artificial Sequence; identical to SEQ ID NO: 71529
  derived and/or modified CDS sequence (opt1) from hemagglutinin__InfluenzaA__AEO01424

SEQ ID NO: 71533 - RNA, 1701 nt, Artificial Sequence; identical to SEQ ID NO: 71529
  derived and/or modified CDS sequence (opt1) from hemagglutinin__InfluenzaA__AEO01425

SEQ ID NO: 71534 - RNA, 1701 nt, Artificial Sequence; identical to SEQ ID NO: 66693
  derived and/or modified CDS sequence (opt1) from hemagglutinin__InfluenzaA__AEO01426

SEQ ID NO: 71535 - RNA, 1701 nt, Artificial Sequence
  derived and/or modified CDS sequence (opt1) from hemagglutinin__InfluenzaA__AEO01427
augaaggccauccuggugguccuccuguacaccuucgccaccgcgaacagcgacacgcugugcaucggcuaccacgccaacaacuccaccgacaccguggacaccgugcucgagaagaacgucacggugacccacagcgugaaccugcuggaggacaagcacaacgggaagcucugcaagcugcgcggcgucgcgccccugcaccucgggaagugcaacaucgccggcuggauccuggggaacccggagugcgagucccugagcaccgccuccagcugguccuacaucguggagaccagcuccagcgacaacggcacgugcuaccccggcgacuucaucgacuacgaggagcuccgggagcagcuguccagcguguccagcuucgagcgcuucgagaucuuccccaagaccuccagcuggcccaaccacgacuccaacaagggggucaccgccgccugcccgcacgccggcgccaagagcuucuacaagaaccugaucuggcucgugaagaaggggaacuccuaccccaagcugagcaagagcuacaucaacgacaagggcaaggaggugcugguccucugggggauccaccaccccuccaccagcgcggaccagcagucccuguaccagaacgccgacgccuacguguucgugggcacgagccgguacuccaagaaguucaagcccgagaucgccauccgcccgaagguccgggaccaggagggccgcaugaacuacuacuggacccugguggagcccggggacaagaucaccuucgaggccaccggcaaccucguggucccccgguacgcguucgccauggagcgcaacgccgggagcggcaucaucaucuccgacacgcccgugcacgacugcaacacgaccugccagaccccgaagggcgccaucaacaccagccugcccuuccagaacauccaccccaucaccaucgggaagugccccaaguacgugaaguccaccaagcugcggcucgccaccggccugcgcaacgucccgagcauccagucccgggggcuguucggcgcgaucgccggguucaucgagggcggcuggacggggaugguggacggcugguacggguaccaccaccagaacgagcagggcagcggguacgccgccgaccucaaguccacccagaacgccaucgacaagaucaccaacaaggugaacagcgucaucgagaagaugaacacccaguucacggcggugggcaaggaguucaaccaccuggagaagcgcaucgagaaccugaacaagaaggucgacgacggcuuccucgacaucuggaccuacaacgccgagcugcuggugcuccuggagaacgagcggacccuggacuaccacgacuccaacgugaagaaccucuacgagaagguccgcagccagcugaagaacaacgccaaggagaucgggaacggcugcuucgaguucuaccacaagugcgacaacacgugcauggaguccgugaagaacgggaccuacgacuaccccaaguacagcgaggaggccaagcugaaccgggaggagaucgacggcgugaagcucgaguccacccgcaucuaccagauccuggccaucuacagcaccgucgcgagcucccuggugcucguggucagccugggggccaucuccuucuggaugugcagcaacggcucccugcagugccggaucugcaucuga

SEQ ID NO: 71536 - RNA, 1701 nt, Artificial Sequence
  derived and/or modified CDS sequence (opt1) from hemagglutinin__InfluenzaA__AEO01428
augaaggccauccuggugguccuccuguacaccuucgccaccgcgaacgccgacacgcugugcaucggcuaccacgccaacaacagcaccgacaccguggacaccgugcucgagaagaacgucacggugacccacuccgugaaccugcuggaggacaagcacaacgggaagcucugcaagcugcgcggcgucgcgccccugcaccucgggaagugcaacaucgccggcuggauccuggggaacccggagugcgagagccuguccaccgccagcuccuggagcuacaucguggagaccuccagcuccgacaacggcacgugcuaccccggcgacuucaucgacuacgaggagcuccgggagcagcugagcuccgugagcuccuucgagcgcuucgagaucuuccccaagaccagcuccuggcccgaccacgacagcaacaagggggucaccgccgccugcccgcacgccggcgcgaaguccuucuacaagaaccugaucuggcucgugaagaaggggaacagcuaccccaagcuguccaagagcuacaucaacgacaagggcaaggaggugcugguccucugggggauccaccaccccagcaccuccgccgaccagcagagccuguaccagaacgccgacgccuacguguucgugggcacgucccgguacagcaagaaguucaagcccgagaucgccauccgcccgaagguccgggaccaggagggccgcaugaacuacuacuggacccugguggagcccggggacaagaucaccuucgaggcgaccggcaaccucguggucccccgguacgccuucgccauggagcgcaacgccggguccggcaucaucaucagcgacacgcccgugcacgacugcaacacgaccugccagaccccgaagggcgccaucaacaccucccugcccuuccagaacauccaccccaucaccaucgggaagugccccaaguacgucaagagcaccaagcugcggauggcgaccggccuccgcaacgugccguccauccagagccgggggcuguucggcgccaucgccggguucaucgagggcggcuggacggggaugguggacggcugguacggguaccaccaccagaacgagcagggcuccggguacgccgccgaccucaagagcacccagaacgcgaucgacgagaucaccaacaaggugaacuccgucaucgagaagaugaacacccaguucacggccgugggcaaggaguucaaccaccuggagaagcgcaucgagaaccugaacaagaaggucgacgacggcuuccuggacaucuggaccuacaacgccgagcuccuggugcugcucgagaacgagcggacccuggacuaccacgacagcaacgugaagaaccuguacgagaagguccgcucccagcucaagaacaacgccaaggagaucgggaacggcugcuucgaguucuaccacaagugcgacaacacgugcauggagagcgugaagaacgggaccuacgacuaccccaaguacuccgaggaggccaagcugaaccgggaggagaucgacggcgugaagcuggagagcacccgcaucuaccagauccucgcgaucuacuccaccgucgccagcagccuggugcugguggucucccucggggccaucagcuucuggaugugcuccaacggcagccugcagugccggaucugcaucuga

SEQ ID NO: 71537 - RNA, 1701 nt, Artificial Sequence; identical to SEQ ID NO: 67857
  derived and/or modified CDS sequence (opt1) from hemagglutinin__InfluenzaA__AEO01429

SEQ ID NO: 71538 - RNA, 1701 nt, Artificial Sequence
  derived and/or modified CDS sequence (opt1) from hemagglutinin__InfluenzaA__AEO01430
augaaggccauccuggugguccuccuguacaccuucgccaccgcgaacgccgacacgcugugcaucggcuaccacgccaacaacagcaccgacaccguggacaccgugcucgagaagaacgucacggugacccacuccgugaaccugcuggaggacaagcacaacgggaagcucugcaagcugcgcggcgucgcgccccugcaccucgggaagugcaacaucgccggcuggauccuggggaacccggagugcgagagccuguccaccgccagcuccuggagcuacaucguggagaccuccagcuccgacaacggcacgugcuaccccggcgacuucaucgacuacgaggagcuccgggagcagcugagcuccgugagcuccuucgagcgcuucgagaucuuccccaagaccagcuccuggcccaaccacgacagcaacaagggggucaccgccgccugcccgcacgacggcgccaaguccuucuacaagaaccugaucuggcucgugaagaaggggaacagcuaccccaagcuguccaagagcuacaucaacgacaagggcaaggaggugcugguccucugggggauccaccaccccagcaccuccgcggaccagcagagccuguaccagaacgccgacgccuacguguucgugggcacgucccgguacagcaagaaguucaagcccgagaucgccauccgcccgaagguccgggaccaggagggccgcaugaacuacuacuggacccugguggagcccggggacaagaucaccuucgaggccaccggcaaccucguggucccccgguacgcguucgccauggagcgcaacgccggguccggcaucaucaucagcgacacgcccgugcacgacugcaacacgaccugccagaccccgaagggcgccaucaacaccucccugcccuuccagaacauccaccccaucaccaucgggaagugccccaaguacgucaagagcaccaagcugcggcucgccaccggccugcgcaacgugccguccauccagagccgggggcuguucggcgcgaucgccggguucaucgagggcggcuggacggggaugguggacggcugguacggguaccaccaccagaacgagcagggcuccggguacgccgccgaccucaagagcacccagaacgccaucgacgagaucaccaacaaggugaacuccgucaucgagaagaugaacacccaguucacggcggugggcaaggaguucaaccaccuggagaagcgcaucgagaaccugaacaagaaggucgacgacggcuuccucgacaucuggaccuacaacgccgagcugcuggugcuccuggagaacgagcggacccuggacuaccacgacagcaacgugaagaaccucuacgagaagguccgcucccagcugaagaacaacgccaaggagaucgggaacggcugcuucgaguucuaccacaagugcgacaacacgugcauggagagcgugaagaacgggaccuacgacuaccccaaguacuccgaggaggccaagcugaaccgggaggagaucgacggcgugaagcucgagagcacccgcaucuaccagauccuggccaucuacuccaccgucgcgagcagccuggugcucguggucucccugggggccaucagcuucuggaugugcuccaacggcagccugcagugccggaucugcaucuga

SEQ ID NO: 71539 - RNA, 1701 nt, Artificial Sequence; identical to SEQ ID NO: 71411
  derived and/or modified CDS sequence (opt1) from hemagglutinin__InfluenzaA__AEO01431

SEQ ID NO: 71540 - RNA, 1701 nt, Artificial Sequence; identical to SEQ ID NO: 66693
  derived and/or modified CDS sequence (opt1) from hemagglutinin__InfluenzaA__AEO01432

SEQ ID NO: 71541 - RNA, 1701 nt, Artificial Sequence
  derived and/or modified CDS sequence (opt1) from hemagglutinin__InfluenzaA__AEO01434
augaaggccauccuggugguccuccuguacaccuucgccaccgcgaacgccgacacgcugugcaucggcuaccacgccaacaacagcaccgacaccguggacaccgugcucgagaagaacgucacggugacccacuccgugaaccugcuggaggacaagcacaacgggaagcucugcaagcugcgcggcgucgcgccccugcaccucggggagugcaacaucgccggcuggauccuggggaacccggagugcgagagccuguccaccgccagcuccuggagcuacaucguggagaccuccagcuccgacaacggcacgugcuaccccggcgacuucaucgacuacgaggagcuccgggagcagcugagcuccgugagcuccuucgagcgcuucgagaucuuccccaagaccagcuccuggcccaaccacgacagcaacaagggggucaccgccgccugcccgcacgccggcgcgaaguccuucuacaagaaccugaucuggcucgugaagaaggggaacagcuaccccaagcugaacaaguccuacaucaacgacaagggcaaggaggugcugguccucugggggauccaccaccccagcaccagcgccgaccagcagucccuguaccagaacgccgacgccuacguguucgugggcacgagccgguacuccaagaaguucaagcccgagaucgccauccgcccgaagguccgggaccaggagggccgcaugaacuacuacuggacccugguggagcccggggacaagaucaccuucgaggcgaccggcaaccucguggucccccgguacgccuucgccauggagcgcaacgccgggagcggcaucaucaucuccgacacgcccgugcacgacugcaacacgaccugccagaccccgaagggcgccaucaacaccagccugcccuuccagaacauccaccccaucaccaucggggagugccccaaguacgugaaguccaccaagcugcggcucgcgaccggccugcgcaacgucccgagcauccagucccgggggcuguucggcgccaucgccggguucaucgagggcggcuggacggggaugguggacggcugguacggguaccaccaccagaacgagcagggcagcggguacgccgccgaccucaaguccacccagaacgcgaucgacaagaucaccaacaaggugaacagcgucaucgagaagaugaacacccaguucacggccgugggcaaggaguucaaccaccuggagaagcgcaucgagaaccugaacaagaaggucgacgacggcuuccucgacaucuggaccuacaacgccgagcugcuggugcuccuggagaacgagcggacccuggacuaccacgacuccaacgugaagaaccucuacgagaagguccgcagccagcugaagaacaacgccaaggagaucgggaacggcugcuucgaguucuaccacaagugcgacaacacgugcauggaguccgugaagaacgggaccuacgacuaccccaaguacagcgaggaggccaagcugaaccgggaggagaucgacggcgugaagcucgaguccacccgcaucuaccagauccuggcgaucuacagcaccgucgccuccagccuggugcucguggucagccugggggccaucuccuucuggaugugcagcaacggcucccugcagugccggaucugcaucuga

SEQ ID NO: 71542 - RNA, 1701 nt, Artificial Sequence
  derived and/or modified CDS sequence (opt1) from hemagglutinin__InfluenzaA__AEO01435
augaaggccauccuggugguccuccuguacaccuucgccaccgcgaacgccgacacgcugugcaucggcuaccacgccaacaacagcaccgacaccguggacaccgugcucgagaagaacgucacggugacccacuccgugaaccugcuggaggacaagcacaacgggaagcucugcaagcugcgcggcgucgcgccccugcaccucgggaagugcaacaucgccggcuggauccuggggaacccggagugcgagagccuguccaccgccagcuccuggagcuacaucguggagaccuccagcuccgacaacggcacgugcuaccccggcgacuucaucgacuacgaggagcuccgggagcagcugagcuccgugagcuccuucgagcgcuucgagaucuuccccaagaccagcuccuggcccaaccacgacagcaacaagggggucaccgccgccugcccgcacgccggcgcgaaguccuucuacaagaaccugaucuggcucgugaagaaggggaacagcuaccccaagcuguccaagagcuacaucaacgacaagggcaaggaggugcugguccucugggggauccaccaccccagcaccuccgccgaccagcagagccuguaccagaacgccgacgccuacguguucgugggcacgucccgguacagcaagaaguucaagcccgagaucgccauccgcccgaagguccgggaccaggagggccgcaugaacuacuacuggacccugguggagcccggggacaagaucaccuucgaggcgaccggcaaccucguggucccccgguacgccuucgccauggagcgcaacgccggguccggcaucaucaucagcgacacgcccguguacgacugcaacacgaccugccagaccccgaagggcgccaucaacaccucccugcccuuccagaacauccaccccaucaccaucgggaagugccccaaguacgucaagagcaccaagcugcggcucgcgaccggccugcgcaacgugccguccauccagagccgggggcuguucggcgccaucgccggguucaucgagggcggcuggacggggaugguggacggcugguacggguaccaccaccagaacgagcagggcuccggguacgccgccgaccucaagagcacccagaacgcgaucgacaagaucaccaacaaggugaacuccgucaucgagaagaugaacacccaguucacggccgugggcaaggaguucaaccaccuggagaagcgcaucgagaaccugaacaagaaggucgacgacggcuuccucgacaucuggaccuacaacgccgagcugcuggugcuccuggagaacgagcggacccuggacuaccacgacagcaacgugaagaaccucuacgagaagguccgcaaccagcugaagaacaacgccaaggagaucgggaacggcugcuucgaguucuaccacaagugcgacaacacgugcauggaguccgugaagaacgggaccuacgacuaccccaaguacagcgaggaggccaagcugaaccgggaggagaucgacggcgugaagcucgaguccacccgcaucuaccagauccuggcgaucuacagcaccgucgccuccagccuggugcucguggucagccugggggccaucuccuucuggaugugcagcaacggcucccugcagugccggaucugcaucuga

SEQ ID NO: 71543 - RNA, 1701 nt, Artificial Sequence; identical to SEQ ID NO: 71529
  derived and/or modified CDS sequence (opt1) from hemagglutinin__InfluenzaA__AEO01436

SEQ ID NO: 71544 - RNA, 1701 nt, Artificial Sequence; identical to SEQ ID NO: 71411
  derived and/or modified CDS sequence (opt1) from hemagglutinin__InfluenzaA__AEO01437

SEQ ID NO: 71545 - RNA, 1701 nt, Artificial Sequence; identical to SEQ ID NO: 71462
  derived and/or modified CDS sequence (opt1) from hemagglutinin__InfluenzaA__AEO01438

SEQ ID NO: 71546 - RNA, 1701 nt, Artificial Sequence; identical to SEQ ID NO: 67046
  derived and/or modified CDS sequence (opt1) from hemagglutinin__InfluenzaA__AEO01440

SEQ ID NO: 71547 - RNA, 1701 nt, Artificial Sequence
  derived and/or modified CDS sequence (opt1) from hemagglutinin__InfluenzaA__AEO01441
augaaggccauccuggugguccuccuguacaccuucgccaccgcgaacgccgacacgcugugcaucggcuaccacgccaacaacagcaccgacaccguggacaccgugcucgagaagaacgucacggugacccacuccgugaaccugcuggaggacaagcacaacgggaagcucugcaagcugcgcggcgucgcgccccugcaccucgggaagugcaacaucgccggcuggauccuggggaacccggagugcgagagccuguccaccgccagcuccuggagcuacaucguggagaccuccagcuccgacaacggcacgugcuaccccggcgacuucaucgacuacgaggagcuccgggagcagcugagcuccgugagcuccuucgagcgcuucgagaucuuccccaagaccagcuccuggcccaaccacgacagcaacaagggggucaccgccgccugcccgcacgccggcgcgaaguccuucuacaagaaccugaucuggcucgugaagaaggggaacagcuaccccaagcuguccaagagcuacaucaacgacaagggcaaggaggugcugguccucugggggauccaccaccccagcaccuccgccgaccagcagagccuguaccagaacgccgacgccuacguguucgugggcacgucccgguacagcaagaaguucaagcccgagaucgccauccgcccgaagguccgggaccaggagggccgcaugaacuacuacuggacccugguggagcccggggacaagaucaccuucgaggcgaccggcaaccucguggucccccgguacgccuucgccauggagcgcaacgacggguccggcaucaucaucagcgacacgcccgugcacgacugcaacacgaccugccagaccccgaagggcgccaucaacaccucccugcccuuccagaacauccaccccaucaccaucgggaagugccccaaguacgucaagagcaccaagcugcggcucgccaccggccugcgcaacgugccguccauccagagccgggggcuguucggcgcgaucgccggguucaucgagggcggcuggacggggaugguggacggcugguacggguaccaccaccagaacgagcagggcuccggguacgccgccgaccucaagagcacccagaacgccaucgacaagaucaccaacaaggugaacuccgucaucgagaagaugaacacccaguucacggcggugggcaaggaguucaaccaccuggagaagcgcaucgagaaccugaacaagaaggucgacgacggcuuccucgacaucuggaccuacaacgccgagcugcuggugcuccuggagaacgagcggacccuggacuaccacgacagcaacgugaagaaccucuacgagaagguccgcucccagcugaagaacaacgccaaggagaucgggaacggcugcuucgaguucuaccacaagugcgacaacacgugcauggagagcgugaagaacgggaccuacgacuaccccaaguacuccgaggaggccaagcugaaccgggaggagaucgacggcgugaagcucgagagcacccgcaucuaccagauccuggccaucuacuccaccgucgcgagcagccuggugcucguggucucccugggggccaucagcuucuggaugugcuccaacggcagccugcagugccggaucugcaucuga

SEQ ID NO: 71548 - RNA, 1701 nt, Artificial Sequence; identical to SEQ ID NO: 68113
  derived and/or modified CDS sequence (opt1) from hemagglutinin__InfluenzaA__AEO01442

SEQ ID NO: 71549 - RNA, 1701 nt, Artificial Sequence
  derived and/or modified CDS sequence (opt1) from hemagglutinin__InfluenzaA__AEO01443
augaaggccauccuggugguccuccuguacaccuucgccaccgcgaacgccgacacgcugugcaucggcuaccacgccaacaacagcaccgacaccguggacaccgugcucgagaagaacgucacggugacccacuccgugaaccugcuggaggacaagcacaacgggaagcucugcaagcugcgcggcgucgcgccccugcaccucgggaagugcaacaucgccggcuggauccuggggaacccggagugcgagagccuguccaccgccagcuccuggagcuacaucguggagaccuccagcuccgacaacggcacgugcuaccccggcgacuucaucgacuacgaggagcuccgggagcagcugagcuccgugagcuccuucgagcgcuucgagaucuuccccaagaccagcuccuggcccaaccacgacagcaacaagggggucaccgccgccugcccgcacgccggcgcgaaguccuucuacaagaaccugaucuggcucgugaagaaggagaacagcuaccccaagcuguccaagagcuacaucaacgacaaggggaaggaggugcugguccucuggggcauccaccaccccagcaccuccgccgaccagcagagccuguaccagaacgccgacgccuacguguucguggggacgucccgguacagcaagaaguucaagcccgagaucgccauccgcccgaagguccgggaccaggagggccgcaugaacuacuacuggacccugguggagcccggcgacaagaucaccuucgaggcgaccgggaaccucguggucccccgguacgccuucgccauggagcgcaacgccggcuccgggaucaucaucagcgacacgcccgugcacgacugcaacacgaccugccagaccccgaagggcgccaucaacaccucccugcccuuccagaacauccaccccaucaccaucggcaagugccccaaguacgucaagagcaccaagcugcggcucgcgaccgggcugcgcaacgugccguccauccagagccggggccuguucggggccaucgccggcuucaucgagggcggguggacgggcaugguggacgggugguacggcuaccaccaccagaacgagcagggguccggcuacgccgccgaccucaagagcacccagaacgcgaucgacaagaucaccaacaaggugaacuccgucaucgagaagaugaacacccaguucacggccguggggaaggaguucaaccaccuggagaagcgcaucgagaaccugaacaagaaggucgacgacggcuuccucgacaucuggaccuacaacgccgagcugcuggugcuccuggagaacgagcggacccuggacuaccacgacagcaacgugaagaaccucuacgagaagguccgcucccagcugaagaacaacgccaaggagaucggcaacgggugcuucgaguucuaccacaagugcgacaacacgugcauggagagcgugaagaacggcaccuacgacuaccccaaguacuccgaggaggccaagcugaaccgggaggagaucgacggggugaagcucgagagcacccgcaucuaccagauccuggcgaucuacuccaccgucgccagcagccuggugcucguggucucccugggcgccaucagcuucuggaugugcuccaacgggagccugcagugccggaucugcaucuga

SEQ ID NO: 71550 - RNA, 1701 nt, Artificial Sequence
  derived and/or modified CDS sequence (opt1) from hemagglutinin__InfluenzaA__AEO01444
augaaggccauccuggugguccuccuguacaccuucgccaccgcgaacgccgacacgcugugcaucggcuaccacgccaacaacagcaccgacaccguggacaccgugcucgagaagaacgucacggugacccacuccgugaaccugcuggaggacaagcacaacgggaagcucugcaagcugcgcggcgucgcgccccugcaccucgggaagugcaacaucgccggcuggauccuggggaacccggagugcgagagccuguccaccgcgagcuccuggagcuacaucguggagaccuccaacagcgacaacggcacgugcuaccccggcgacuucaucgacuacgaggagcuccgggagcagcuguccagcguguccagcuucgagcgcuucgagaucuuccccaagaccuccagcuggcccaaccacgacuccgacaagggggucaccgccgccugcccgcacgccggcgccaagagcuucuacaagaaccugaucuggcucgugaagaaggggaacuccuaccccaagcugagcaaguccuacaucaacgacaagggcaaggaggugcugguccucugggggauccaccaccccagcaccagcgccgaccagcagucccuguaccagaacgccgacgccuacguguucgugggcacgagccgguacuccaagaaguucaagcccgagaucgccauccgcccgaagguccgggaccaggagggccgcaugaacuacuacuggacccugguggagcccggggacaagaucaccuucgaggcgaccggcaaccucguggucccccgguacgccuucgccauggagcgcaacgccgggagcggcaucaucaucuccgacacgcccgugcacgacugcaacacgaccugccagaccccgaagggcgccaucaacaccagccugcccuuccagaacauccaccccaucaccaucgggaagugccccaaguacgugaaguccaccaagcugcggcucgcgaccggccugcgcaacgucccgagcauccagucccgggggcuguucggcgccaucgccggguucaucgagggcggcuggacggggaugguggacggcugguacggguaccaccaccagaacgagcagggcagcggguacgccgccgaccucaaguccacccagaacgcgaucgacaagaucaccaacaaggugaacagcgucaucgagaagaugaacacccaguucacggccgugggcaaggaguucaaccaccuggagaagcgcaucgagaaccugaacaagaaggucgacgacggcuuccucgacaucuggaccuacaacgccgagcugcuggugcuccuggagaacgagcggacccuggacuaccacgacuccaacgugaagaaccucuacgagaagguccgcagccagcugaagaacaacgccaaggagaucgggaacggcugcuucgaguucuaccacaagugcgacaacacgugcauggaguccgugaagaacgggaccuacgacuaccccaaguacagcgaggaggccaagcugaaccgggaggagaucgacggcgugaagcucgaguccacccgcaucuaccagauccuggcgaucuacagcaccgucgccuccagccuggugcucguggucagccugggggccaucuccuucuggaugugcagcaacggcucccugcagugccggaucugcaucuga

SEQ ID NO: 71551 - RNA, 1701 nt, Artificial Sequence; identical to SEQ ID NO: 68861
  derived and/or modified CDS sequence (opt1) from hemagglutinin__InfluenzaA__AEO01445

SEQ ID NO: 71552 - RNA, 1701 nt, Artificial Sequence; identical to SEQ ID NO: 71411
  derived and/or modified CDS sequence (opt1) from hemagglutinin__InfluenzaA__AEO01446

SEQ ID NO: 71553 - RNA, 1701 nt, Artificial Sequence
  derived and/or modified CDS sequence (opt1) from hemagglutinin__InfluenzaA__AEO01447
augaaggccauccuggugguccuccuguacaccuucgccaccgcgaacgccgacacgcugugcaucggcuaccacgccaacaacagcaccgacaccguggacaccgugcucgagaagaacgucacggugacccacuccgugaaccugcuggaggacaagcacaacgggaagcucugcaagcugcgcggcgucgcgccccugcaccucgggaagugcaacaucgccggcuggauccuggggaacccggagugcgagagccuguccaccgccagcuccuggagcuacaucguggagaccuccagcuccgacaacggcacgugcuaccccggcgacuucaucgacuacgaggagcuccgggagcagcugagcuccgugagcuccuucgagcgcuucgagaucuuccccaagaccagcuccuggcccaaccacgacagcaacaagggggucaccgccgccugcccgcacgccggcgcgaaguccuucuacaagaaccugaucuggcucgugaagaaggggaacagcuaccccaagcuguccaagagcuacaucaacgacaagggcaaggaggugcugguccucugggggauccaccaccccagcaccuccgccgaccagcagagccuguaccagaacgccgacgccuacguguucgugggcacgucccgguacagcaagaaguucaagcccgagaucgccauccgcccgaagguccgggaccaggagggccgcaugaacuacuacuggacccugguggagcccggggacaagaucaccuucgaggcgaccggcaaccucguggucccccgguacgccuucgccauggagcgcaacgccggguccggcaucaucaucagcgacacgcccgugcacgacugcaacacgaccugccagaccccgaagggcgccaucaacaccucccugcccuuccagaacauccaccccaucaccaucgggaagugccccaaguacgucaagagcaccaagcugcggcucgcgaccggccugcgcaacgugccguccauccagagccgggggcuguucggcgccaucgccggguucaucgagggcggcuggacggggaugguggacggcugguacggguaccaccaccagaacgagcagggcuccggguacgccgccgaccucaagagcacccagaacgcgaucgacgagaucaccaacaaggugaacuccgucaucgagaagaugaacacccaguucacggccgugggcaaggaguucaaccaccuggagaagcgcaucgagaaccugaacaagaaggucgacgacggcuuccucgacaucuggaccuacaacgccgagcugcuggugcuccuggagaacgagcggacccuggacuaccacgacagcaacgugaagaaccucuacgagaagguccgcucccagcugaagaacaacgccaaggagaucgggaacggcugcuucgaguucuaccacaagugcgacaacacgugcauggagagcgugaagaacgggaccuacgacuaccccaaguacuccgaggaggccaagcugaaccgggaggagaucgacggcgugaagcucgagagcacccgcaucuaccagauccuggcgaucuacuccaccaucgccagcagccugguccucguggugucccugggggccaucagcuucuggaugugcuccaacggcagccugcagugccggaucugcaucuga

SEQ ID NO: 71554 - RNA, 1701 nt, Artificial Sequence; identical to SEQ ID NO: 67046
  derived and/or modified CDS sequence (opt1) from hemagglutinin__InfluenzaA__AEO01448

SEQ ID NO: 71555 - RNA, 1701 nt, Artificial Sequence; identical to SEQ ID NO: 71529
  derived and/or modified CDS sequence (opt1) from hemagglutinin__InfluenzaA__AEO01449

SEQ ID NO: 71556 - RNA, 1701 nt, Artificial Sequence
  derived and/or modified CDS sequence (opt1) from hemagglutinin__InfluenzaA__AEO01450
augaaggccauccuggugguccuccuguacaccuucgccaccgcgaacgccgacacgcugugcaucggcuaccacgccaacaacagcaccgacaccguggacaccgugcucgagaagaacgucacggugacccacuccgugaaccugcuggaggacaagcacaacgggaagcucugcaagcugcgcggcgucgcgccccugcaccucgggaagugcaacaucgccggcuggauccuggggaacccggagugcgagagccuguccaccgccagcuccuggagcuacaucguggagaccuccagcuccgacaacggcacgugcuaccccggcgacuucaucgacuacgaggagcuccgggagcagcugagcuccgugagcuccuucgagcgcuucgagaucuuccccaagaccagcuccuggcccaaccacgacagcaacaagggggucaccgccgccugcccgcacgccggcgcgaaguccuucuacaagaaccugaucuggcucgugaagaaggggaacagcuaccccaagcuguccaagagcuacaucaacgacaagggcaaggaggugcugguccucugggggauccaccaccccagcaccuccacggaccagcagagccuguaccagaacgccgacgccuacguguucgugggcaccucccgguacagcaagaaguucaagcccgagaucgccauccgcccgaagguccgggaccaggagggccgcaugaacuacuacuggacccugguggagcccggggacaagaucaccuucgaggccacgggcaaccucguggucccccgguacgcguucgccauggagcgcaacgccggguccggcaucaucaucagcgacacccccgugcacgacugcaacacgaccugccagaccccgaagggcgccaucaacaccucccugcccuuccagaacauccaccccaucaccaucgggaagugccccaaguacgucaagagcaccaagcugcggcucgccacgggccugcgcaacgugccguccauccagagccgggggcuguucggcgcgaucgccggguucaucgagggcggcuggaccgggaugguggacggcugguacggguaccaccaccagaacgagcagggcuccggguacgccgccgaccucaagagcacccagcacgccaucgacgagaucaccaacaaggugaacuccgucaucgagaagaugaacacgcaguucaccgcggugggcaaggaguucaaccaccuggagaagcgcaucgagaaccugaacaagaaggucgacgacggcuuccucgacaucuggaccuacaacgccgagcugcuggugcuccuggagaacgagcggacccuggacuaccacgacagcaacgugaagaaccucuacgagaagguccgcucccagcugaagaacaacgccaaggagaucgggaacggcugcuucgaguucuaccacaagugcgacaacacgugcauggagagcgugaagaacgggaccuacgacuaccccaaguacuccgaggaggccaagcugaaccgggaggagaucgacggcgugaagcucgagagcacccgcaucuaccagauccuggccaucuacuccaccgucgcgagcagccuggugcucguggucucccugggggccaucagcuucuggaugugcuccaacggcagccugcagugccggaucugcaucuga

SEQ ID NO: 71557 - RNA, 1701 nt, Artificial Sequence; identical to SEQ ID NO: 66693
  derived and/or modified CDS sequence (opt1) from hemagglutinin__InfluenzaA__AEO01451

SEQ ID NO: 71558 - RNA, 1701 nt, Artificial Sequence
  derived and/or modified CDS sequence (opt1) from hemagglutinin__InfluenzaA__AEO01452
augaaggccauccuggugguccuccuguacaccuucgccaccgcgaacgccgacacgcugugcaucggcuaccacgccaacaacagcaccgacaccguggacaccgugcucgagaagaacgucacggugacccacuccgugaaccugcuggaggacaagcacaacgggaagcucugcaagcugcgcggcgucgcgccccugcaccucgggaagugcaacaucgccggcuggauccuggggaacccggagugcgagagccuguccaccgccagcuccuggagcuacaucguggagaccuccagcuccgacaacggcacgugcuaccccggcgacuucaucgacuacgaggagcuccgggagcagcugagcuccgugagcuccuucgagcgcuucgagaucuuccccaagaccagcuccuggcccaaccacgacagcaacaagggggucaccgccgccugcccgcacgccgaggcgaaguccuucuacaagaaccugaucuggcucgugaagaagggcaacagcuaccccaagcuguccaagagcuacaucaacgacaaggggaaggaggugcugguccucuggggcauccaccaccccagcaccuccgccgaccagcagagccuguaccagaacgccgacgccuacguguucguggggacgucccgguacagcaagaaguucaagcccgagaucgccauccgcccgaagguccgggaccaggagggccgcaugaacuacuacuggacccugguggagcccggcgacaagaucaccuucgaggcgaccgggaaccucguggucccccgguacgccuucgccauggagcgcaacgccggcuccgggaucaucaucagcgacacgcccgcccacgacugcaacacgaccugccagaccccgaagggcgcgaucaacaccucccugcccuuccagaacauccaccccaucaccaucggcaagugccccaaguacgucaagagcaccaagcugcggcucgccaccgggcugcgcaacgugccguccauccagagccggggccuguucggggccaucgccggcuucaucgagggcggguggacgggcaugguggacgggugguacggcuaccaccaccagaacgagcagggguccggcuacgccgcggaccucaagagcacccagaacgccaucgacgagaucaccaacaaggugaacuccgugaucgagaagaugaacacccaguucacggccgucgggaaggaguucaaccaccuggagaagcgcaucgagaaccugaacaagaagguggacgacggcuuccucgacaucuggaccuacaacgccgagcugcugguccuccuggagaacgagcggacccuggacuaccacgacagcaacgugaagaagcucuacgagaaggugcgcucccagcugaagaacaacgccaaggagaucggcaacgggugcuucgaguucuaccacaagugcgacaacacgugcauggagagcgucaagaacggcaccuacgacuaccccaaguacuccgaggaggcgaagcugaaccgggaggagaucgacggggugaagcucgagagcacccgcaucuaccagauccuggccaucuacuccaccguggccagcagccugguccucguggugucccugggcgccaucagcuucuggaugugcuccaacgggagccugcagugccggaucugcaucuga

SEQ ID NO: 71559 - RNA, 1701 nt, Artificial Sequence
  derived and/or modified CDS sequence (opt1) from hemagglutinin__InfluenzaA__AEO01453
augaaggccauccuggugguccuccuguacaccuucgccaucgcgaacgccgacacccugugcaucggcuaccacgccaacaacagcacggacaccguggacaccgugcucgagaagaacgucaccgugacgcacuccgugaaccugcuggaggacaagcacaacgggaagcucugcaagcugcgcggcgucgcgccccugcaccucgggaagugcaacaucgccggcuggauccuggggaacccggagugcgagagccuguccaccgccagcuccuggagcuacaucguggagaccuccagcuccgacaacgggaccugcuaccccggcgacuucaucgacuacgaggagcuccgggagcagcugagcuccgugagcuccuucgagcgcuucgagaucuuccccaagacgagcuccuggcccaaccacgacagcaacaagggggucaccgccgccugcccgcacgccggcgcgaaguccuucuacaagaaccugaucuggcucgugaagaaggggaacagcuaccccaagcuguccaagagcuacaucaacgacaagggcaaggaggugcugguccucuggggcgugcaccaccccagcaccuccgccgaccagcagagccuguaccagaacgccgacgccuacguguucgucggcaccucccgguacagcaagaaguucaagcgcgagaucgccauccggcccaaggugcgcgaccaggagggccggaugaacuacuacuggacgcugguggagccgggggacaagaucaccuucgaggcgaccggcaaccucgucgugccccgcuacgccuucgccauggagcggaacgccggguccggcaucaucaucagcgacacccccgugcacgacugcaacacgaccugccagacccccaagggcgccaucaacaccucccugccguuccagaacauccaccccaucacgaucgggaagugccccaaguacgucaagagcaccaagcugcgccucgcgaccggccugcggaacgugcccuccauccagagccgcgggcuguucggcgccaucgccggguucaucgagggcggcuggaccgggaugguggacggcugguacggguaccaccaccagaacgagcagggcuccggguacgccgccgaccucaagagcacgcagcacgcgaucgacgagaucaccaacaaggucaacuccgugaucgagaagaugaacacccaguucaccgccgucggcaaggaguucaaccaccuggagaagcggaucgagaaccugaacaagaagguggacgacggcuuccucgacaucuggacguacaacgccgagcugcuggugcuccuggagaacgagcgcacccuggacuaccacgacagcaacgucaagaaccucuacgagaaggugcggucccagcugaagaacaacgccaaggagaucgggaacggcugcuucgaguucuaccacaagugcgacaacacgugcauggagagcgugaagaacgggaccuacgacuacccgaaguacuccgaggaggccaagcugaaccgcgaggagaucaacggcgucaagcucgagagcacccggaucuaccagauccuggcgaucuacuccaccguggccagcagccuggugcucgucgugucccugggggccaucagcuucuggaugugcuccaacggcagccugcagugccgcaucugcaucuga

SEQ ID NO: 71560 - RNA, 1701 nt, Artificial Sequence
  derived and/or modified CDS sequence (opt1) from hemagglutinin__InfluenzaA__AEO01454
augaaggccauccuggugguccuccuguacaccuucgccaccgcgaacgccgacacgcugugcaucggcuaccacgccaacaacagcaccgacaccguggacaccgugcucgagaagaacgucacggugacccacuccgugaacauccuggaggacaagcacaacgggaagcugugcaagcuccgcggcgucgcgccccugcaccuggggaagugcaacaucgccggcuggauccucgggaacccggagugcgagagccuguccaccgccagcuccuggagcuacaucguggagaccuccagcuccgacaacggcacgugcuaccccggcgacuucaucgacuacgaggagcugcgggagcagcucagcuccgugagcuccuucgagcgcuucgagaucuuccccaagaccagcuccuggcccaaccacgacagcaacaagggggucaccgccgccugcccgcacgccggcgcgaaguccuucuacaagaaccugaucuggcuggugaagaaggggaacagcuaccccaagcucuccaagagcuacaucaacgacaagggcaaggaggugcugguccugugggggauccaccaccccagcaccuccgccgaccagcagagccucuaccagaacgccgacgccuacguguucgugggcacgucccgguacagcaagaaguucaagcccgagaucgccauccgcccgaagguccgggaccaggagggccgcaugaacuacuacuggacccugguggagcccggggacaagaucaccuucgaggcgaccggcaaccugguggucccccgguacgccuucgccauggagcgcaacgccggguccggcaucaucaucagcgacacgcccgugcacgacugcaacacgaccugccagaccccgaagggcgccaucaacaccucccuccccuuccagaacauccaccccaccaccaucgggaagugccccaaguacgucaagagcaccaagcugcggcuggcgacgggccuccgcaacgugccguccauccagagccgggggcuguucggcgccaucgccggguucaucgagggcggcuggaccgggaugguggacggcugguacggguaccaccaccagaacgagcagggcuccggguacgccgccgaccucaagagcacccagaacgcgaucgacgagaucaccaacaaggugaacuccgucaucgagaagaugaacacgcaguucaccgccgugggcaaggaguucaaccaccuggagaagcgcaucgagaaccugaacaagaaggucgacgacggcuuccuggacaucuggaccuacaacgccgagcuccuggugcugcucgagaacgagcggacccuggacuaccacgacagcaacgugaagaaccuguacgagaagguccgcucccagcucaagaacaacgccaaggagaucgggaacggcugcuucgaguucuaccacaagugcgacaacacgugcauggagagcgugaagaacgggaccuacgacuaccccaaguacuccgaggaggccaagcugaaccgggaggagaucgacggcgugaagcuggagagcacccgcaucuaccagauccucgcgaucuacuccaccgucgccagcagccuggugcugguggucucccucggggccaucagcuucuggaugugcuccaacggcagccugcagugccggaucugcaucuga

SEQ ID NO: 71561 - RNA, 1701 nt, Artificial Sequence
  derived and/or modified CDS sequence (opt1) from hemagglutinin__InfluenzaA__AEO01455
augaaggccauccuggugguccuccuguacaccuucgccaccgcgaacgccgacacgcugugcaucggcuaccacgccaacaacagcaccgacaccguggacaccgugcucgagaagaacgucacggugacccacuccgugaaccugcuggaggacaagcacaacgggaagcucugcaagcugcgcggcgucgcgccccugcaccucgggaagugcaacaucgccggcuggauccuggggaacccggagugcgagagccuguccaccgccagcuccuggagcuacaucguggagaccuccagcuccgacaacggcacgugcuaccccggcgacuucaucgacuacgaggagcuccgggagcagcugagcuccgugagcuccuucgagcgcuucgagaucuuccccaagaccagcuccuggcccaaccacgacagcaacaagggggucaccgccgccugcccgcacgccggcgcgaaguccuucuacaagaaccugaucuggcucgugaagaaggggaacagcuaccccaagcuguccaagagcuacaucaacgacaagggcaaggaggugcugguccucugggggauccaccaccccagcaccuccgccgaccagcagagccuguaccagaacgccgacgccuacguguucgugggcacgucccgguacagcaagaaguucaagcccgagaucgccauccgcccgaagguccgggagcaggagggccgcaugaacuacuacuggacccugguggagcccggggacaagaucaccuucgaggcgaccggcaaccucguggucccccgguacgccuucgccauggagcgcaacgccggguccggcaucaucaucagcgacacgcccgugcacgacugcaacacgaccugccagaccccgaagggcgccaucaacaccucccugcccuuccagaacauccaccccaucaccaucgggaagugccccaaguacgucaagagcaccaagcugcggcucgcgaccggccugcgcaacaucccguccauccagagccgggggcuguucggcgccaucgccggguucaucgagggcggcuggacggggaugguggacggcugguacggguaccaccaccagaacgagcagggcuccggguacgccgccgaccucaagagcacccagaacgcgaucgacgagaucaccaacaaggugaacuccgugaucgagaagaugaacacccaguucacggccgucggcaaggaguucaaccaccuggagaagcgcaucgagaaccugaacaagaagguggacgacggcuuccucgacaucuggaccuacaacgccgagcugcugguccuccuggagaacgagcggacccuggacuaccacgacagcaacgugaagaaccucuacgagaaggugcgcucccagcugaagaacaacgccaaggagaucgggaacggcugcuucgaguucuaccacaagugcgacaacacgugcauggagagcgucaagaacgggaccuacgacuaccccaaguacuccgaggaggccaagcugaaccgggaggagaucgacggcgugaagcucgagagcacccgcaucuaccagauccuggcgaucuacuccaccguggccagcagccugguccucguggugucccugggggccaucagcuucuggaugugcuccaacggcagccugcagugccggaucugcaucuga

SEQ ID NO: 71562 - RNA, 1701 nt, Artificial Sequence
  derived and/or modified CDS sequence (opt1) from hemagglutinin__InfluenzaA__AEO01456
augaaggccauccugaucgugcuccuguacaccuucgccaccgcgaacgccgacacgcugugcaucggcuaccacgccaacaacagcaccgacaccgucgacacccuccuggagaagaacgugacggugacccacuccgucaaccugcucgaggacaagcacaacgggaagcugugcaagcugcgcggcguggcgccccuccaccuggggaagugcaacaucgccggcuggauccuggggaacccggagugcgagagccucuccaccgccagcuccuggagcuacaucguggagaccuccagcuccgacaacggcacgugcuaccccggcgacuucaucgacuacgaggagcugcgggagcagcugagcuccgucagcuccuucgagcgcuucgagaucuuccccaagaccagcuccuggcccaaccacgacagcaacaagggggugaccgccgccugcccgcacgccggcgcgaaguccuucuacaagaaccucaucuggcuggugaagaaggggaacagcuaccccaagcuguccaagagcuacaucaacgacaagggcaaggagguccucgugcugugggggauccaccaccccagcaccuccgccgaccagcagagccuguaccagaacgccgacgccuacguguucgucggcacgucccgguacagcaagaaguucaagcccgagaucgccauccgcccgaaggugcgggaccaggagggccgcaugaacuacuacuggacccucguggagcccggggacaagaucaccuucgaggcgaccggcaaccuggucgugccccgguacgccuucgccauggaccgcaacgccggguccggcaucaucaucagcgacgcccccgugcacgacugcaacacgaccugccagaccccgaagggcgcgaucaacaccucccugcccuuccagaacauccaccccaucacgaucgggaagugccccaaguacgucaagagcaccaagcuccggcuggccaccggccugcgcaacgugccguccauccagagccgggggcuguucggcgccaucgccggguucaucgagggcggcuggaccgggaugguggacggcugguacggguaccaccaccagaacgagcagggcuccggguacgccgcggaccucaagagcacgcagaacgccaucgacgagaucaccaacaaggucaacuccgugaucgagaagaugaacacccaguucaccgccgugggcaaggaguucaaccaccuggagaagcgcaucgagaaccucaacaagaaggucgacgacggcuuccuggacaucuggacguacaacgccgagcugcucgugcugcuggagaacgagcggacccucgacuaccacgacagcaacgucaagaaccuguacgagaaggugcgcucccagcugaagaacaacgccaaggagaucgggaacggcugcuucgaguucuaccacaagugcgacaacacgugcauggagagcgugaagaacgggaccuacgacuaccccaaguacuccgaggaggcgaagcucaaccgggaggagaucgacggcgucaagcuggagagcacccgcaucuaccagauccuggccaucuacuccaccguggccagcagccucgugcuggucgugucccugggggccaucagcuucuggaugugcuccaacggcagccuccagugccggaucugcaucuga

SEQ ID NO: 71563 - RNA, 1701 nt, Artificial Sequence; identical to SEQ ID NO: 71462
  derived and/or modified CDS sequence (opt1) from hemagglutinin__InfluenzaA__AEO01457

SEQ ID NO: 71564 - RNA, 1701 nt, Artificial Sequence; identical to SEQ ID NO: 71458
  derived and/or modified CDS sequence (opt1) from hemagglutinin__InfluenzaA__AEO01458

SEQ ID NO: 71565 - RNA, 1701 nt, Artificial Sequence; identical to SEQ ID NO: 71458
  derived and/or modified CDS sequence (opt1) from hemagglutinin__InfluenzaA__AEO01459

SEQ ID NO: 71566 - RNA, 1701 nt, Artificial Sequence; identical to SEQ ID NO: 68113
  derived and/or modified CDS sequence (opt1) from hemagglutinin__InfluenzaA__AEO01461

SEQ ID NO: 71567 - RNA, 1701 nt, Artificial Sequence; identical to SEQ ID NO: 67794
  derived and/or modified CDS sequence (opt1) from hemagglutinin__InfluenzaA__AEO01462

SEQ ID NO: 71568 - RNA, 1701 nt, Artificial Sequence; identical to SEQ ID NO: 67046
  derived and/or modified CDS sequence (opt1) from hemagglutinin__InfluenzaA__AEO01463

SEQ ID NO: 71569 - RNA, 1701 nt, Artificial Sequence
  derived and/or modified CDS sequence (opt1) from hemagglutinin__InfluenzaA__AEO01464
augaaggccauccuggugguccuccuguacaccuucgccaccgcgaacgccgacacgcugugcaucggcuaccacgccaacaacagcaccgacaccguggacacccuccuggagaagaacgugacggucacccacuccgugaaccugcucgaggacaagcacaacgggaagcugugcaagcugcgcggcguggcgccccuccaccuggggaagugcaacaucgccggcuggauccuggggaacccggagugcgagagccucuccaccgccagcuccuggagcuacaucgucgagaccuccagcuccgacaacggcacgugcuaccccggcgacuucaucgacuacgaggagcugcgggagcagcugagcuccgugagcuccuucgagcgcuucgagaucuuccccaagaccagcuccuggcccaaccacgacagcaacaagggggugaccgccgccugcccgcacgccggcgcgaaguccuucuacaagaaccucaucuggcuggucaagaaggggaacagcuaccccaagcuguccaagagcuacaucaacgacaagggcaaggaggugcucgugcugugggggauccaccaccccagcaccuccgccgaccagcagagccuguaccagaacgccgacgccuacgucuucgugggcacgucccgguacagcaagaaguucaagcccgagaucgccauccgcccgaaggugcgggaccaggagggccgcaugaacuacuacuggacccucgucgagcccggggacaagaucaccuucgaggcgaccggcaaccugguggugccccgguacgccuucgccauggaccgcaacgccggguccggcaucaucaucagcgacacguccguccacgacugcaacacgaccugccagacccccaagggcgccaucaacaccagccugccguuccagaacauccaccccaucaccaucgggaagugccccaaguacgugaaguccaccaagcuccggcuggcgaccggccugcgcaacgugcccagcauccagucccggggccucuucggggccaucgccggguucaucgagggcggcuggacggggauggucgacggcugguacggguaccaccaccagaacgagcagggcagcggguacgccgccgaccugaaguccacccagaacgcgaucgacgagaucaccaacaaggugaacagcgugaucgagaagaugaacacccaguucacggccgucggcaaggaguucaaccaccuggagaagcgcaucgagaaccucaacaagaagguggacgacggcuuccuggacaucuggaccuacaacgccgagcugcucguccugcuggagaacgagcggacccucgacuaccacgacuccaacgugaagaaccuguacgagaaggugcgcagccagcugaagaacaacgccaaggagaucgggaacggcugcuucgaguucuaccacaagugcgacaacacgugcauggaguccgucaagaacgggaccuacgacuacccgaaguacagcgaggaggccaagcucaaccgggaggagaucgacggcgugaagcuggaguccacccgcaucuaccagauccuggcgaucuacagcaccguggccagcucccucguccugguggugagccugggggccaucuccuucuggaugugcagcaacggcucccuccagugccggaucugcaucuga

SEQ ID NO: 71570 - RNA, 1701 nt, Artificial Sequence; identical to SEQ ID NO: 71549
  derived and/or modified CDS sequence (opt1) from hemagglutinin__InfluenzaA__AEO01465

SEQ ID NO: 71571 - RNA, 1701 nt, Artificial Sequence; identical to SEQ ID NO: 68565
  derived and/or modified CDS sequence (opt1) from hemagglutinin__InfluenzaA__AEO01466

SEQ ID NO: 71572 - RNA, 1701 nt, Artificial Sequence; identical to SEQ ID NO: 67046
  derived and/or modified CDS sequence (opt1) from hemagglutinin__InfluenzaA__AEO01467

SEQ ID NO: 71573 - RNA, 1701 nt, Artificial Sequence; identical to SEQ ID NO: 67857
  derived and/or modified CDS sequence (opt1) from hemagglutinin__InfluenzaA__AEO01468

SEQ ID NO: 71574 - RNA, 1701 nt, Artificial Sequence; identical to SEQ ID NO: 66693
  derived and/or modified CDS sequence (opt1) from hemagglutinin__InfluenzaA__AEO01469

SEQ ID NO: 71575 - RNA, 1701 nt, Artificial Sequence
  derived and/or modified CDS sequence (opt1) from hemagglutinin__InfluenzaA__AEO01470
augaaggccauccuggugguccuccuguacaccuucgccaccgcgaacgccgacacgcugugcaucggcuaccacgccaacaacagcaccgacaccguggacaccgugcucgagaagaacgucacggugacccacuccgugaaccugcuggaggacaagcacaacgggaagcucugcaagcugcgcggcgucgcgccccugcaccucgggaagugcaacaucgccggcuggauccuggggaacccggagugcgagagccuguccaccgccagcuccuggagcuacaucguggagaccuccagcuccgacaacggcacgugcuaccccggcgacuucaucgacuacgaggagcuccgggagcagcugagcuccgugagcuccuucgagcgcuucgagaucuuccccaagaccagcuccuggcccaaccacgacagcaacaagggggucaccgccgccugcccgcacgccggcgcgaaguccuucuacaagaaccugaucuggcucgugaagaaggggaacagcuaccccaagcuguccaagagcuacaucaacgacaagggcaaggaggugcugguccucugggggauccaccaccccagcaccuccgccgaccagcagagccuguaccagaacgccgacgccuacguguucgugggcacgucccgguacagcaagaaguucaagcccgagaucgccauccgcccgaagguccgggaccaggagggccgcaugaacuacuacuggacccugguggagcccggggacaagaucaccuucgaggcgaccggcaaccucgugaucccccgguacgccuucgccauggagcgcaacgccggguccggcaucaucaucagcgacacgcccguccacgacugcaacacgaccugccagaccccgaagggcgccaucaacaccucccugcccuuccagaacauccaccccaucaccaucgggaagugccccaaguacgucaagagcaccaagcugcggcucgcgaccggccugcgcaacgugccguccauccagagccgggggcuguucggcgccaucgccggguucaucgagggcggcuggacggggaugguggacggcugguacggguaccaccaccagaacgagcagggcuccggguacgccgccgaccucaagagcacccagaacgcgaucgacgagaucaccaacaaggugaacuccgugaucgagaagaugaacacccaguucacggccgucggcaaggaguucaaccaccuggagaagcgcaucgagaaccugaacaagaagguggacgacggcuuccucgacaucuggaccuacaacgccgagcugcugguccuccuggagaacgagcggacccuggacuaccacgacagcaacgugaagaaccucuacgagaaggugcgcucccagcugaagaacaacgccaaggagaucgggaacggcugcuucgaguucuaccacaagugcgacaacacgugcauggagagcgucaagaacgggaccuacgacuaccccaaguacuccgaggaggccaagcugaaccgggaggagaucgacggcgugaagcucgagagcacccgcaucuaccagauccuggcgaucuacuccaccguggccagcagccugguccucguggugucccugggggccaucagcuucuggaugugcuccaacggcagccugcagugccggaucugcaucuga

SEQ ID NO: 71576 - RNA, 1701 nt, Artificial Sequence; identical to SEQ ID NO: 71402
  derived and/or modified CDS sequence (opt1) from hemagglutinin__InfluenzaA__AEO01471

SEQ ID NO: 71577 - RNA, 1701 nt, Artificial Sequence; identical to SEQ ID NO: 68320
  derived and/or modified CDS sequence (opt1) from hemagglutinin__InfluenzaA__AEO01472

SEQ ID NO: 71578 - RNA, 1701 nt, Artificial Sequence
  derived and/or modified CDS sequence (opt1) from hemagglutinin__InfluenzaA__AEO01473
augaaggccauccuggugguccuccuguacaccuucgccaccgcgaacgccgacacgcugugcaucggcuaccacgccaacaacagcaccgacaccguggacaccgugcucgagaagaacgucacggugacccacuccgugaaccugcuggaggacaagcacaacgggaagcucugcaagcugcgcggcgucgcgccccugcaccucgggaagugcaacaucgccggcuggauccuggggaacccggagugcgagagccuguccaccgccagcuccuggagcuacaucguggagaccuccagcuccgacaacggcacgugcuaccccggcgacuucaucgacuacgaggagcuccgggagcagcugagcuccgugagcuccuucgagcgcuucgagaucuuccccaagaccagcuccuggcccaaccacgacagcaacaagggggucaccgccgccugcccgcacgccggcgcgaaguccuucuacaagaaccugaucuggcucgugaagaaggggaacagcuaccccaagcugaacaaguccuacaucaacgacaagggcaaggaggugcugguccucugggggauccaccaccccagcaccagcgccgaccagcagucccuguaccagaacgccgacgccuacguguucgugggcacgagccgguacuccaagaaguucaagcccgagaucgccauccgcccgaagguccgggaccaggagggccgcaugaacuacuacuggacccugguggagcccggggacaagaucaccuucgaggcgaccggcaaccucguggucccccgguacgccuucgccauggagcgcaacgccgggagcggcaucaucaucuccgacacgcccgugcacgacugcaacacgaccugccagaccccggagggcgccaucaacaccagccugcccuuccagaacauccaccccaucaccaucggggagugccccaaguacgugaaguccaccaagcugcggcucgcgaccggccugcgcaacgucccgagcauccagucccgggggcuguucggcgccaucgccggguucaucgagggcggcuggacggggaugguggacggcugguacggguaccaccaccagaacgagcagggcagcggguacgccgccgaccucaaguccacccagaacgcgaucgacaagaucaccaacaaggugaacagcgucaucgagaagaugaacacccaguucacggccgugggcaaggaguucaaccaccuggagaagcgcaucgagaaccugaacaagaaggucgacgacggcuuccucgacaucuggaccuacaacgccgagcugcuggugcuccuggagaacgagcggacccuggacuaccacgacuccaacgugaagaaccucuacgagaagguccgcagccagcugaagaacaacgccaaggagaucgggaacggcugcuucgaguucuaccacaagugcgacaacacgugcauggaguccgugaagaacgggaccuacgacuaccccaaguacagcgaggaggccaagcugaaccgggaggagaucgacggcgugaagcucgaguccacccgcaucuaccagauccuggcgaucuacagcaccgucgccuccagccuggugcucguggucagccugggggccaucuccuucuggaugugcagcaacggcucccugcagugccggaucugcaucuga

SEQ ID NO: 71579 - RNA, 1701 nt, Artificial Sequence
  derived and/or modified CDS sequence (opt1) from hemagglutinin__InfluenzaA__AEO01474
augaaggccauccuggugguccuccuguacaccuucgccaccgcgaacgccgacacgcugugcaucggcuaccacgccaacaacagcaccgacaccguggacaccgugcucgagaagaacgucacggugacccacuccgugaaccugcuggaggacaagcacaacgggaagcucugcaagcugcgcggcgucgcgccccugcaccucgggaagugcaacaucgccggcuggauccuggggaacccggagugcgagagccuguccaccgccagcuccuggagcuacaucguggagaccuccagcuccgacaacggcacgugcuaccccggcgacuucaucgacuacgaggagcuccgggagcagcugagcuccgugagcuccuucgagcgcuucgagaucuuccccaagaccagcuccuggcccaaccacgacagcgacaagggggucaccgccgccugcccgcacgccggcgcgaaguccuucuacaagaaccugaucuggcucgugaagaaggggaacagcuaccccaagcuguccaagagcuacaucaacgacaagggcaaggaggugcugguccucugggggauccaccaccccagcaccuccgccgaccagcagagccuguaccagaacgccgacgccuacguguucgugggcacgucccgguacagcaagaaguucaagcccgagaucgccauccgcccgaagguccgggaccaggagggccgcaugaacuacuacuggacccugguggagcccggggacaagaucaccuucgaggcgaccggcaaccucguggucccccgguacgccuucgccauggagcgcaacgccggguccggcaucaucaucagcgacacgcccgugcacgacugcaacacgaccugccagaccccgaagggcgccaucaacaccucccugcccuuccagaacauccaccccaucaccaucgggaagugccccaaguacgucaagagcaccaagcugcggcucgcgaccggccugcgcaacgugccguccauccagagccgggggcuguucggcgccaucgccggguucaucgagggcggcuggacggggaugguggacggcugguacggguaccaccaccagaacgagcagggcuccggguacgccgccgaccucaagagcacccagaacgcgaucgacaagaucaccaacaaggugaacuccgucaucgagaagaugaacacccaguucacggccgugggcaaggaguucaaccaccuggagaagcgcaucgagaaccugaacaagaaggucgacgacggcuuccucgacaucuggaccuacaacgccgagcugcuggugcuccuggagaacgagcggacccuggacuaccacgacagcaacgugaagaaccucuacgagaagguccgcucccagcugaagaacaacgccaaggagaucgggaacggcugcuucgaguucuaccacaagugcgacaacacgugcauggagagcgugaagaacgggaccuacgacuaccccaaguacuccgaggaggccaagcugaaccgggaggagaucgacggcgugaagcucgagagcacccgcaucuaccagauccuggcgaucuacuccaccgucgccagcagccuggugcucguggucucccugggggccaucagcuucuggaugugcuccaacggcagccugcagugccggaucugcaucuga

SEQ ID NO: 71580 - RNA, 1701 nt, Artificial Sequence
  derived and/or modified CDS sequence (opt1) from hemagglutinin__InfluenzaA__AEO01475
augaaggccauccuggugguccuccuguacaccuucgccaccgcgaacgccgacacgcugugcaucggcuaccacgccaacaacagcaccgacaccguggacaccgugcucgagaagaacgucacggugacccacuccgugaaccugcuggaggacaagcacaacgggaagcucugcaagcugcgcggcgucgcgccccugcaccucgggaagugcaacaucgccggcuggauccuggggaacccggagugcgagagccuguccaccgcgagcuccuggagcuacaucguggagaccuccaacagcgacaacggcacgugcuaccccggcgacuucaucgacuacgaggagcuccgggagcagcuguccagcguguccagcuucgagcgcuucgagaucuuccccaagaccuccagcuggcccaaccacgacuccaacaagggggucaccgccgccugcccgcacgccggcgccaagagcuucuacaagaaccugaucuggcucgugaagaaggggaacuccuaccccaagcugagcaaguccuacaucaacgacaagggcaaggaggugcugguccucugggggauccaccaccccagcaccagcgccgaccagcagucccuguaccagaacgccgacgccuacguguucgugggcacgagccgguacuccaagaaguucaagcccgagaucgccauccgcccgaagguccgggaccaggagggccgcaugaacuacuacuggacccugguggagcccggggacaagaucaccuucgaggcgaccggcaaccucguggucccccgguacgccuucgccauggagcgcaacgccgggagcggcaucaucaucuccgacacgcccgugcacgacugcaacacgaccugccagaccccgaagggcgccaucaacaccagccugcccuuccagaacauccaccccaucaccaucgggaagugccccaaguacgugaaguccaccaagcugcggcucgcgaccggccugcgcaacgucccgagcauccagucccgggggcuguucggcgccaucgccggguucaucgagggcggcuggacggggaugguggacggcugguacggguaccaccaccagaacgagcagggcagcggguacgccgccgaccucaaguccacccagcacgcgaucgacgagaucaccaacaaggugaacagcgucaucgagaagaugaacacccaguucacggccgugggcaaggaguucaaccaccuggagaagcgcaucgagaaccugaacaagaaggucgacgacggcuuccucgacaucuggaccuacaacgccgagcugcuggugcuccuggagaacgagcggacccuggacuaccacgacuccaacgugaagaaccucuacgagaagguccgcagccagcugaagaacaacgccaaggagaucgggaacggcugcuucgaguucuaccacaagugcgacaacacgugcauggaguccgugaagaacgggaccuacgacuaccccaaguacagcgaggaggccaagcugaaccgggaggagaucgacggcgugaagcucgaguccacccgcaucuaccagauccuggcgaucuacagcaccgucgccuccagccuggugcucguggucagccugggggccaucuccuucuggaugugcagcaacggcucccugcagugccggaucugcaucuga

SEQ ID NO: 71581 - RNA, 1701 nt, Artificial Sequence
  derived and/or modified CDS sequence (opt1) from hemagglutinin__InfluenzaA__AEO01476
augaaggccauccuggugguccuccuguacaccuucagcaccgccaacgcggacacgcugugcaucggcuaccacgccaacaacuccaccgacaccguggacaccgugcucgagaagaacgucacggugacccacagcgugaaccugcuggaggacaagcacaacgggaagcucugcaagcugcgcggcgucgcgccccugcaccucgggaagugcaacaucgccggcuggauccuggggaacccggagugcgagucccugagcaccgccuccagcugguccuacaucguggagaccagcuccagcgacaacggcacgugcuaccccggcgacuucaucgacuacgaggagcuccgggagcagcuguccagcguguccagcuucgagcgcuucgagaucuuccccaagaccuccagcuggcccaaccacgacuccaacaagggggucaccgccgccugcccgcacgccggcgccaagagcuucuacaagaaccugaucuggcucgugaagaaggggaacuccuaccccaagcugagcaagagcuacaucaacgacaagggcaaggaggugcugguccucugggggauccaccaccccuccaccagcgcggaccagcagucccuguaccagaacgccgacgccuacguguucgugggcacgagccgguacuccaagaaguucaagcccgagaucgccauccgcccgaagguccgggaccaggagggccgcaugaacuacuacuggacccugguggagcccggggacaagaucaccuucgaggccaccggcaaccucguggucccccgguacgcguucgccauggagcgcaacgccgggagcggcaucaucaucuccgacacgcccgugcacgacugcaacacgaccugccagaccccgaagggcgccaucaacaccagccugcccuuccagaacauccaccccaucaccaucgggaagugccccaaguacgugaaguccaccaagcugcggcucgccaccggccugcgcaacgucccgagcauccagucccgggggcuguucggcgcgaucgccggguucaucgagggcggcuggacggggaugguggacggcugguacggguaccaccaccagaacgagcagggcagcggguacgccgccgaccucaaguccacccagaacgccaucgacgagaucaccaacaaggugaacagcgucaucgagaagaugaacacccaguucacggcggugggcaaggaguucaaccaccuggagaagcgcaucgagaaccugaacaagaaggucgacgacggcuuccucgacaucuggaccuacaacgccgagcugcuggugcuccuggagaacgagcggacccuggacuaccacgacuccaacgugaagaaccucuacgagaagguccgcagccagcugaagaacaacgccaaggagaucgggaacggcugcuucgaguucuaccacaagugcgacaacacgugcauggaguccgugaagaacgggaccuacgacuaccccaaguacagcgaggaggccaagcugaaccgggaggagaucgacggcgugaagcucgaguccacccgcaucuaccagauccuggccaucuacagcaccgucgcgagcucccuggugcucguggucagccugggggccaucuccuucuggaugugcagcaacggcucccugcagugccggaucugcaucuga

SEQ ID NO: 71582 - RNA, 1701 nt, Artificial Sequence
  derived and/or modified CDS sequence (opt1) from hemagglutinin__InfluenzaA__AEO01477
augaaggccauccuggugguccuccuguacaccuucgccaccgcgaacgccgacacgcugugcaucggcuaccacgccaacaacagcaccgacaccguggacaccgugcucgagaagaacgucacggugacccacuccgugaaccugcuggaggacaagcacaacgggaagcucugcaagcugcgcggcgucgcgccccugcaccucgggaagugcaacaucgccggcuggauccuggggaacccggagugcgagagccuguccaccgccagcuccuggagcuacaucguggagaccuccagcuccgacaacggcacgugcuaccccggcgacuucaucgacuacgaggagcuccgggagcagcugagcuccgugagcuccuucgagcgcuucgagaucuuccccaagaccagcuccuggcccaaccacgacagcaacaagggggucaccgccgccugcccgcacgccggcgcgaaguccuucuacaagaaccugaucuggcucgugaagaaggggaacagcuaccccaagcuguccaagagcuacaucaacgacaagggcaaggaggugcugguccucugggggauccaccaccccagcaccuccgccgaccagcagagccuguaccagaacgccgacgccuacgccuucgugggcacgucccgguacagcaagaaguucaagcccgagaucgcgauccgcccgaaggugcgggagcaggagggccgcaugaacuacuacuggacccuggucgagcccggggacaagaucaccuucgaggccaccggcaaccucguggugccccgguacgccuucgccauggagcgcaacgccggguccggcaucaucaucagcgacacgcccguccacgacugcaacacgaccugccagaccccgaagggcgcgaucaacaccucccugcccuuccagaacauccaccccaucaccaucgggaagugccccaaguacgucaagagcaccaagcugcggcucgccaccggccugcgcaacgugccguccauccagagccgggggcuguucggcgccaucgccggguucaucgagggcggcuggacggggaugguggacggcugguacggguaccaccaccagaacgagcagggcuccggguacgccgcggaccucaagagcacccagaacgccaucgacgagaucaccaacaaggugaacuccgugaucgagaagaugaacacccaguucacggccgucggcaaggaguucaaccaccuggagaagcgcaucgagaaccugaacaagaagguggacgacggcuuccucgacaucuggaccuacaacgccgagcugcugguccuccuggagaacgagcggacccuggacuaccacgacagcaacgugaagaaccucuacgagaaggugcgcucccagcugaagaacaacgccaaggagaucgggaacggcugcuucgaguucuaccacaagugcgacaacacgugcauggagagcgucaagaacgggaccuacgacuaccccaaguacuccgaggaggcgaagcugaaccgggaggagaucgacggcgugaagcucgagagcacccgcaucuaccagauccuggccaucuacuccaccguggccagcagccugguccucguggugucccugggggccaucagcuucuggaugugcuccaacggcagccugcagugccggaucugcaucuga

SEQ ID NO: 71583 - RNA, 1701 nt, Artificial Sequence; identical to SEQ ID NO: 68021
  derived and/or modified CDS sequence (opt1) from hemagglutinin__InfluenzaA__AEO01478

SEQ ID NO: 71584 - RNA, 1701 nt, Artificial Sequence; identical to SEQ ID NO: 71411
  derived and/or modified CDS sequence (opt1) from hemagglutinin__InfluenzaA__AEO01479

SEQ ID NO: 71585 - RNA, 1701 nt, Artificial Sequence; identical to SEQ ID NO: 71458
  derived and/or modified CDS sequence (opt1) from hemagglutinin__InfluenzaA__AEO01480

SEQ ID NO: 71586 - RNA, 1701 nt, Artificial Sequence
  derived and/or modified CDS sequence (opt1) from hemagglutinin__InfluenzaA__AEO01482
augaaggccauccuggugguccuccuguacaccuucgccaccgcgaacgccgacacgcugugcaucggcuaccacgccaacaacagcaccgacaccguggacaccgugcucgagaagaacgucacggugacccacuccgugaaccugcuggaggacaagcacaacgggaagcucugcaagcugcgcggcgucgcgccccugcaccucgggaagugcaacaucgccggcuggauccuggggaacccggagugcgagagccuguccaccgccagcuccuggagcuacaucguggagaccuccagcuccgacaacggcacgugcuaccccggcgacuucaucgacuacgaggagcuccgggagcagcugagcuccgugagcuccuucgagcgcuucgagaucuuccccaagaccagcuccuggcccaaccacgacagcaacaagggggucaccgccgccugcccgcacgccggcgcgaaguccuucuacaagaaccugaucuggcucgugaagaaggggaacagcuaccccaagcuguccaagagcuacaucaacgacaagggcaaggaggugcugguccucugggggauccaccaccccagcaccuccgccgaccagcagagccuguaccagaacgccgacgccuacguguucgugggcacgucccgguacagcaagaaguucaagcccgagaucgccauccgcccgaagguccgggaccaggagggccgcaugaacuacuacuggacccugguggagcccggggacaagaucaccuucgaggcgaccggcaaccucguggucccccgguacgccuucgccauggagcgcaacgccggguccggcaucaucaucagcgacacgcccgugcacgacugcaacacgaccugccagaccccgaagggcgccaucaacaccucccugcccuuccagaacauccaccccaucaccaucgggaagugccccaaguacgucaagagcaccaagcugcggcucgcgaccggccugcgcaacgugccguccauccagagccgggggcuguucggcgccaucgccggguucaucgagggcggcuggacggggaugguggacggcugguacggguaccaccaccagaacgagcagggcuccggguacgccgccgaccucaagagcacccagaacgcgaucgacaagaucaccaacaaggugaacuccgucaucgagaagaugaacacccaguucacggccgugggcaaggaguucaaccaccuggagaagcgcaucgagaaccugaacaagaaggucgacgacggcuuccucgacaucuggaccuacaacgccgagcugcuggugcuccuggagaacgagcggacccuggacuaccacgacagcaacgugaagaaccucuacgagaagguccgcucccagcugaagaacaacgccaaggagaucgggaacggcugcuucgaguucuaccacaagugcaacaacacgugcauggagagcgugaagaacgggaccuacgacuaccccaaguacuccgaggaggccaagcugaaccgggaggagaucgacggcgugaagcucgagagcacccgcaucuaccagauccuggcgaucuacuccaccgucgccagcagccuggugcucguggucucccugggggccaucagcuucuggaugugcuccaacggcagccugcagugccggaucugcaucuga

SEQ ID NO: 71587 - RNA, 1701 nt, Artificial Sequence
  derived and/or modified CDS sequence (opt1) from hemagglutinin__InfluenzaA__AEO01483
augaaggccauccuggugguccuccuguacaccuucgccaccgcgaacgccgacacgcugugcaucggcuaccacgccaacaacagcaccgacaccguggacaccgugcucgagaagaacgucacggugacccacuccgugaaccugcuggaggacaagcacaacgggaagcucugcaagcugcgcggcgucgcgccccugcaccucgggaagugcaacaucgccggcuggauccuggggaacccggagugcgagagccuguccaccgcgagcuccuggagcuacaucguggagaccuccaacagcgacaacggcacgugcuaccccggcgacuucaucgacuacgaggagcuccgggagcagcuguccagcguguccagcuucgagcgcuucgagaucuuccccaagaccuccagcuggcccaaccacgacuccaacaagggggucaccgccgccugcccgcacgccggcgccaagagcuucuacaagaaccugaucuggcucgugaagaaggggaacuccuaccccaagcugagcaaguccuacaucaacgacaagggcaaggaggugcugguccucugggggauccaccaccccagcaccagcgccgaccagcagucccuguaccagaacgccgacgccuacguguucgugggcacgagccgguacuccaagaaguucaagcccgagaucgccauccgcccgaagguccgggaccaggagggccgcaugaacuacuacuggacccugguggagcccggggacaagaucaccuucgaggcgaccggcaaccucguggucccccgguacgccuucgccauggagcgcaacgccgggagcggcaucaucaucuccgacacgcccgugcacgacugcaacacgaccugccagaccccgaagggcgccaucaacaccagccugcccuuccagaacauccaccccaucaccaucgggaagugccccaaguacgugaaguccaccaagcugcggcucgcgaccggccugcgcaacgucccgagcauccagucccgggggcuguucggcgccaucgccggguucaucgagggcggcuggacggggaugguggacggcugguacggguaccaccaccagaacgagcagggcagcggguacgccgccgaccucaaguccacccagaacgcgaucgacaagaucaccaacaaggugaacagcgucaucgagaagaugaacacccaguucacggccgugggcaaggaguucaaccaccuggagaagcgcaucgagaaccugaacaagaaggucgacgacggcuuccucgacaucuggaccuacaacgccgagcugcuggugcuccuggagaacgagcggacccuggacuaccacgacuccaacgugaagaaccucuacgagaagguccgcagccagcugaagaacaacgccaaggagaucgggaacggcugcuucgaguucuaccacaagugcgacaacacgugcauggaguccgugaagaacgggaccuacgacuaccccaaguacagcgaggaggccaagcugaaccgggaggagaucgacggcgugaagcucgaguccacccgcaucuaccagauccuggcgaucuacagcaccgccgccuccagccugguccucguggugagccugggggccaucuccuucuggaugugcagcaacggcucccugcagugccggaucugcaucuga

SEQ ID NO: 71588 - RNA, 1701 nt, Artificial Sequence
  derived and/or modified CDS sequence (opt1) from hemagglutinin__InfluenzaA__AEO01484
augaaggccauccuggugguccuccuguacaccuucgccaccgcgaacgccgacacgcugugcaucggcuaccacgccaacaacagcaccgacaccguggacaccgugcucgagaagaacgucacggugacccacuccgugaaccugcuggaggacaagcacaacgggaagcucugcaagcugaagggcgucgcgccccugcaccucgggaagugcgacaucgccggcuggauccuggggaacccggagugcgagagccuguccaccgccagcuccuggagcuacaucguggagaccuccagcuccgacaacggcacgugcuaccccggcgacuucaucgacuacgaggagcuccgcgagcagcugagcuccgugagcuccuucgagcgguucgagaucuuccccaagaccagcuccuggcccaaccacgacagcaacaagggggucaccgccgccugcccgcacgccggcgcgaaguccuucuacaagaaccugaucuggcucgugaagaaggggaacagcuaccccaagcuguccaagagcuacaucaacgacaagggcaaggaggugcugguccucugggggauccaccaccccagcaccuccgccgaccagcagagccuguaccagaacgccgacgccuacguguucgugggcacgucccgcuacagcaagaaguucaagcccgagaucgccauccggccgaagguccgcgaccaggagggccggaugaacuacuacuggacccugguggagcccggggacaagaucaccuucgaggcgaccggcaaccucguggucccccgcuacgccuucgccauggagcggaacgccggguccggcaucaucaucagcgacacgcccgugcacgacugcaacacgaccugccagaccccgaagggcgccaucaacaccucccugcccuuccagaacauccaccccaucaccaucgggaagugccccaaguacgucaagagcaccaagcugcgccucgcgaccggccugcggaacgugccguccauccagagccgcgggcuguucggcgccaucgccggguucaucgagggcggcuggacggggaugguggacggcugguacggguaccaccaccagaacgagcagggcuccggguacgccgccgaccucaagagcacccagcacgcgaucgacgagaucaccaacaaggugaacuccgucaucgagaagaugaacacccaguucacggccgugggcaaggaguucaaccaccuggagaagcggaucgagaaccugaacaagaaggucgacgacggcuuccucgacaucuggaccuacaacgccgagcugcuggugcuccuggagaacgagcgcacccuggacuaccacgacagcaacgugaagaaccucuacgagaagguccggucccagcugaagaacaacgccaaggagaucgggaacggcugcuucgaguucuaccacaagugcgacaacacgugcauggagagcgugaagaacgggaccuacgacuaccccaaguacuccgaggaggccaagcugaaccgcgaggagaucgacggcgugaagcucgagagcacccggaucuaccagauccuggcgaucuacuccaccgucgccagcagccuggugcucguggucucccugggggccaucagcuucuggaugugcuccaacggcagccugcagugccgcaucugcaucuga

SEQ ID NO: 71589 - RNA, 1701 nt, Artificial Sequence
  derived and/or modified CDS sequence (opt1) from hemagglutinin__InfluenzaA__AEO01485
augaaggccauccuggugguccuccuguacaccuucgccaccgcgaacgccgacacgcugugcaucggcuaccacgccaacaacagcaccgacaccguggacaccgugcucgagaagaacgucacggugacccacuccgugaaccugcuggaggacaagcacaacgggaagcucugcaagcugcgcggcgucgcgccccugcaccucgggaagugcaacaucgccggcuggauccuggggaacccggagugcgagagccuguccaccgccagcuccuggagcuacaucguggagaccuccagcuccgacaacggcacgugcuaccccggcgacuucaucgacuacgaggagcuccgggagcagcugagcuccgugagcuccuucgagcgcuucgagaucuuccccaagaccagcuccuggcccaaccacgacagcaacaagggggucaccgccgccugcccgcacgccggcgcgaaguccuucuacaagaaccugaucuggcucgugaagaaggggaacagcuaccccaagcuguccaagagcuacaucaacgacaagggcaaggaggugcugguccucugggggauccaccaccccagcaccuccgccgaccagcagagccuguaccagaacgccgacgccuacguguucgugggcacgucccgguacagcaagaaguucaagcccgagaucaccauccgcccgaagguccgggaccaggagggccgcaugaacuacuacuggacccugguggagcccggggacaagaucaccuucgaggccacgggcaaccucguggucccccgguacgcguucgccauggagcgcaacgccggguccggcaucaucaucagcgacacccccgugcacgacugcaacacgaccugccagaccccgaagggcgccaucaacaccucccugcccuuccagaacauccaccccaucaccaucgggaagugccccaaguacgucaagagcaccaagcugcggcucgccacgggccugcgcaacgugccguccauccagagccgggggcuguucggcgcgaucgccggguucaucgagggcggcuggaccgggaugguggacggcugguacggguaccaccaccagaacgagcagggcuccggguacgccgccgaccucaagagcacccagaacgccaucgacgagaucaccaacaaggugaacuccgucaucgagaagaugaacacgcaguucaccgcggugggcaaggaguucaaccaccuggagaagcgcaucgagaaccugaacaagaaggucgacgacggcuuccucgacaucuggaccuacaacgccgagcugcuggugcuccuggagaacgagcggacccuggacuaccacgacagcaacgugaagaaccucuacgagaagguccgcucccagcugaagaacaacgccaaggagaucgggaacggcugcuucgaguucuaccacaagugcgacaacacgugcauggagagcgugaagaacgggaccuacgacuaccccaaguacuccgaggaggccaagcugaaccgggaggagaucgacggcgugaagcucgagagcacccgcaucuaccagauccuggccaucuacuccaccgucgcgagcagccuggugcucguggucucccugggggccaucagcuucuggaugugcuccaacggcagccugcagugccggaucugcaucuga

SEQ ID NO: 71590 - RNA, 1701 nt, Artificial Sequence
  derived and/or modified CDS sequence (opt1) from hemagglutinin__InfluenzaA__AEO01487
augaaggccauccuggugguccuccuguacaccuucgccaccgcgaacgccgacacgcugugcaucggcuaccacgccaacaacagcaccgacaccguggacaccgugcucgagaagaacgucacggugacccacuccgugaaccugcuggaggacaagcacaacgggaagcucugcaagcugcgcggcgucgcgccccugcaccucgggaagugcaacaucgccggcuggauccuggggaacccggagugcgagagccuguccaccgccagcuccuggagcuacaucguggagaccuccagcuccgacaacggcacgugcuaccccggcgacuucaucgacuacgaggagcuccgggagcagcugagcuccgugagcuccuucgagcgcuucgagaucuuccccaagaccagcuccuggcccaaccacgacagcaacaagggggucaccgccgccugcccgcacgccggcgcgaaguccuucuacaagaaccugaucuggcucgugaagaaggggaacagcuaccccaagcuguccaagagcuacaucaacgacaagggcaaggaggugcugguccucugggggauccaccaccccagcaccuccgccgaccagcagagccuguaccagaacgccgacgccuacguguucgugggcacgucccgguacagcaagaaguucaagcccgagaucgccauccgcccgaagguccgggaccaggagggccgcaugaacuacuacuggacccugguggagcccggggacaagaucaccuucgaggcgaccggcaaccucguggucccccgguacgccuucgccauggagcgcaacgccggguccggcaucaucaucagcgacacgcccgugcacgacugcaacacgaccugccagaccccgaagggcgccaucaacaccucccugcccuuccagaacauccaccccaucaccaucgggaagugccccaaguacgucaagagcaccaagcugcggcucgcgaccggccugcgcaacgugccguccauccagagccgggggcuguucggcgccaucgccggguucaucgagggcggcuggacggggaugguggacggcugguacggguaccaccaccagaacgagcagggcuccggguacgccgccgaccucaagagcacccagaacgcgaucgacgagaucaccaacaaggugaacuccgucaucgagaagaugaacacccaguucacggccgugggcaaggaguucaaccaccuggagaagcgcaucgagaaccugaacaagaaggucgacgacggcuuccucgacaucuggaccuacaacgccgagcugcuggugcuccuggagaacgagcggacccuggacuaccacgacagcaacgugaagaaccucuacgagaagguccgcucccagcugaagaacaacgccaaggagaucgggaacggcugcuucgaguucuaccacaagugcgacaacacgugcauggagagcgugaagaacgggaccuacgacuaccccaaguacuccgaggaggccaagcugaaccgggaggagaucgacggcgugacccucgagagcacccgcaucuaccagauccuggcgaucuacuccaccgucgccagcagccuggugcucguggucucccugggggccaucagcuucuggaugugcuccaacggcagccugcagugccggaucugcaucuga

SEQ ID NO: 71591 - RNA, 1701 nt, Artificial Sequence
  derived and/or modified CDS sequence (opt1) from hemagglutinin__InfluenzaA__AEO01488
augaaggccauccuggugguccuccuguacaccuucgccaccgcgaacgccgacacgcugugcaucggcuaccacgccaacaacagcaccgacaccguggacaccgugcucgagaagaacgucacggugacccacuccgugaaccugcuggaggacaagcacaacgggaagcucugcaagcugcgcggcgucgcgccccugcaccucgggaagugcaacaucgccggcuggauccuggggaacccggagugcgagagccuguccaccgccagcuccuggagcuacaucguggagaccuccagcuccgacaacggcacgugcuaccccggcgacuucaucgacuacgaggagcuccgggagcagcugagcuccgugagcuccuucgagcgcuucgagaucuuccccaagaccagcuccuggcccaaccacgacagcaacaagggggucaccgccgccugcccgcacgccggcgcgaaguccuucuacaagaaccugaucuggcucgugaagaaggggaacagcuaccccaagcuguccaagagcuacaucaacgacaagggcaaggaggugcugguccucugggggauccaccaccccagcaccuccgccgaccagcagagccuguaccagaacgccgacgccuacguguucgugggcacgucccgguacagcaagaaguucaagcccgagaucgccauccgcccgaagguccgggaccaggagggccgcaugaacuacuacuggacccugguggagcccggggacaagaucaccuucgaggcgaccggcaaccucguggucccccgguacgccuucacgauggagcgcaacgccggguccggcaucaucaucagcgacacccccgugcacgacugcaacacgaccugccagaccccgaagggcgccaucaacaccucccugcccuuccagaacauccaccccaucaccaucgggaagugccccaaguacgucaagagcaccaagcugcggcucgccacgggccugcgcaacgugccguccauccagagccgggggcuguucggcgcgaucgccggguucaucgagggcggcuggaccgggaugguggacggcugguacggguaccaccaccagaacgagcagggcuccggguacgccgccgaccucaagagcacccagaacgccaucgacggcaucaccaacaaggugaacuccgucaucgagaagaugaacacgcaguucaccgcggugggcaaggaguucaaccaccuggagaagcgcaucgagaaccugaacaagaaggucgacgacggguuccucgacaucuggaccuacaacgccgagcugcuggugcuccuggagaacgagcggacccuggacuaccacgacagcaacgugaagaaccucuacgagaagguccgcucccagcugaagaacaacgccaaggagaucggcaacgggugcuucgaguucuaccacaagugcgacaacacgugcauggagagcgugaagaacggcaccuacgacuaccccaaguacuccgaggaggccaagcugaaccgggaggagaucgacggggugaagcucgagagcacccgcaucuaccagauccuggccaucuacuccaccgucgcgagcagccuggugcucguggucucccugggcgccaucagcuucuggaugugcuccaacggcagccugcagugccggaucugcaucuga

SEQ ID NO: 71592 - RNA, 1701 nt, Artificial Sequence
  derived and/or modified CDS sequence (opt1) from hemagglutinin__InfluenzaA__AEO01489
augaaggccauccuggugguccuccuguacaccuucgccaccgcgaacgccgacacgcugugcaucggcuaccacgccaacaacagcaccgacaccguggacaccgugcucgagaagaacgucacggugacccacuccgugaaccugcuggaggacaagcacaacgggaagcucugcaagcugcgcggcgucgcgccccugcaccucgggaagugcaacaucgccggcuggauccuggggaacccggagugcgagagccuguccaccgccagcuccuggagcuacaucguggagaccuccagcuccgacaacggcacgugcuaccccggcgacuucaucgacuacgaggagcuccgggagcagcugagcuccgugagcuccuucgagcgcuucgagaucuuccccaagaccagcuccuggcccaaccacgacagcaacaagggggucaccgccgccugcccgcacgccggcgcgaaguccuucuacaagaaccugaucuggcucgugaagaaggggaacagcuaccccaagcuguccaagagcuacaucaacgacaagggcaaggaggugcugguccucugggggauccaccaccccagcaccuccgccgaccagcagagccuguaccagaacgccgacgccuacguguucgugggcacgucccgguacagcaagaaguuccgccccgagaucgccauccggccgaagguccgcgaccaggagggccggaugaacuacuacuggacccugguggagcccggggacaagaucaccuucgaggcgaccggcaaccucguggucccccgcuacgccuucgccauggagcggaacgccggguccggcaucaucaucagcgacacgcccgugcacgacugcaacacgaccugccagaccccgaagggcgccaucaacaccucccugcccuuccagaacauccaccccaucaccaucgggaagugccccaaguacgucaagagcaccaagcugcgccucgcgaccggccugcggaacgugccguccauccagagccgcgggcuguucggcgccaucgccggguucaucgagggcggcuggacggggaugguggacggcugguacggguaccaccaccagaacgagcagggcuccggguacgccgccgaccucaagagcacccagaacgcgaucgacgagaucaccaacaaggugaacuccgucaucgagaagaugaacacccaguucacggccgugggcaaggaguucaaccaccuggagaagcggaucgagaaccugaacaagaaggucgacgacggcuuccucgacaucuggaccuacaacgccgagcugcuggugcuccuggagaacgagcgcacccuggacuaccacgacagcaacgugaagaaccucuacgagaagguccggucccagcugaagaacaacgccaaggagaucgggaacggcugcuucgaguucuaccacaagugcgacaacacgugcauggagagcgugaagaacgggaccuacgacuaccccaaguacuccgaggaggccaagcugaaccgcgaggagaucgacggcgugaagcucgagagcacccggaucuaccagauccuggcgaucuacuccaccgucgccagcagccuggugcucguggucucccugggggccaucagcuucuggaugugcuccaacggcagccugcagugccgcaucugcaucuga

SEQ ID NO: 71593 - RNA, 1701 nt, Artificial Sequence
  derived and/or modified CDS sequence (opt1) from hemagglutinin__InfluenzaA__AEO01490
augaaggccauccuggugguccuccuguacaccuucgccaccgcgaacgccgacacgcugugcaucggcuaccacgccaacaacagcaccgacaccguggacaccgugcucgagaagaacgucacggugacccacuccgugaaccugcuggaggacaagcacaacgggaagcucugcaagcugcgcggcgucgcgccccugcaccucgggaagugcaacaucgccggcuggauccuggggaacccggagugcgagagccuguccaccgccagcuccuggagcuacaucguggagaccuccagcuccgacaacggcacgugcuaccccggcgacuucaucgacuacgaggagcuccgggagcagcugagcuccgugagcuccuucgagcgcuucgagaucuuccccaagaccagcuccuggcccaaccacgacagcaacaagggggucaccgccgccugcccgcacgccggcgcgaaguccuucuacaagaaccugaucuggcucgugaagaaggggaacagcuaccccaagcuguccaagagcuacaucaacgacaagggcaaggaggugcugguccucugggggauccaccaccccagcaccuccgccgaccagcagagccuguaccagaacgccgacgccuacguguucgugggcacgucccgguacagcaagaaguucaagcccgagaucgccauccgcccgaagguccgggaccaggagggccgcaugaacuacuacuggacccugguggagcccggggacaagaucaccuucgaggcgaccggcaaccucguggucccccgguacgccuucgccauggagcgcaacgccggguccggcaucaucaucagcgacacgcccgugcacgacugcaacacgaccugccagaccccgaagggcgccaucaacaccucccugcccuuccagaacauccaccccaucaccaucgggaagugccccaaguacgucaagagcaccaagcugcggauggcgaccggccuccgcaacgugccguccauccagagccgggggcuguucggcgccaucgccggguucaucgagggcggcuggacggggaugguggacggcugguacggguaccaccaccagaacgagcagggcuccggguacgccgccgaccucaagagcacccagaacgcgaucgacgagaucaccaacaaggugaacuccgucaucgagaagaugaacacccaguucacggccgugggcaaggaguucaaccaccuggagaagcgcaucgagaaccugaacaagaaggucgacgacggcuuccuggacaucuggaccuacaacgccgagcuccuggugcugcucgagaacgagcggacccuggacuaccacgacagcaacgugaagaaccuguacgagaagguccgcaaccagcucaagaacaacgccaaggagaucgggaacggcugcuucgaguucuaccacaagugcgacaacacgugcauggaguccgugaagaacgggaccuacgacuaccccaaguacagcgaggaggccaagcugaaccgggaggagaucgacggcgugaagcuggaguccacccgcaucuaccagauccucgcgaucuacagcaccgucgccuccagccuggugcugguggucagccucggggccaucuccuucuggaugugcagcaacggcucccugcagugccggaucugcaucuga

SEQ ID NO: 71594 - RNA, 1701 nt, Artificial Sequence
  derived and/or modified CDS sequence (opt1) from hemagglutinin__InfluenzaA__AEO01491
augaaggccauccuggugguccuccuguacaccuucgccaccgcgaacgccgacacgcugugcaucggcuaccacgccaacaacagcaccgacaccguggacaccgugcucgagaagaacgucacggugacccacuccgugaaccugcuggaggacaaguacaacgggaagcucugcaagcugcgcggcgucgcgccccugcaccucgggaagugcaacaucgccggcuggauccuggggaacccggagugcgagagccuguccaccgccagcuccuggagcuacaucguggagaccuccagcuccgacaacggcacgugcuaccccggcgacuucaucgacuacgaggagcuccgggagcagcugagcuccgugagcuccuucgagcgcuucgagaucuuccccaagaccagcuccuggcccaaccacgacagcaacaagggggucaccgccgccugcccgcacgccggcgcgaaguccuucuacaagaaccugaucuggcucgugaagaaggggaacagcuaccccaagcuguccaagagcuacaucaacgacaagggcaaggaggugcugguccucugggggauccaccaccccagcaccuccgccgaccagcagagccuguaccagaacgccgacgccuacguguucgugggcacgucccgguacagcaagaaguucaagcccgagaucgccauccgcccgaagguccgggaccaggagggccgcaugaacuaccacuggacccugguggagcccggggacaagaucaccuucgaggcgaccggcaaccucguggucccccgguacgccuucgccauggagcgcaacgccggguccggcaucaucaucagcgacacgcccgugcacgacugcaacacgaccugccagaccccgaagggcgccaucaacaccucccugcccuuccagaacauccaccccaucaccaucgggaagugccccaaguacgucaagagcaccaagcugcggcucgcgaccggccugcgcaacgugccguccauccagagccgggggcuguucggcgccaucgccggguucaucgagggcggcuggacggggaugguggacggcugguacggguaccaccaccagaacgagcagggcuccggguacgccgccgaccucaagagcacccagaacgcgaucgacgagaucaccaacaaggugaacuccgucaucgagaagaugaacacccaguucacggccgugggcaaggaguucaaccaccuggagaagcgcaucgagaaccugaacaagaaggucgacgacggcuuccucgacaucuggaccuacaacgccgagcugcuggugcuccuggagaacgagcggacccuggacuaccacgacagcaacgugaagaaccucuacgagaagguccgcucccagcugaagaacaacgccaaggagaucgggaacggcugcuucgaguucuaccacaagugcgacaacacgugcauggagagcgugaagaacgggaccuacgacuaccccaaguacuccgaggaggccaagcugaaccgggaggagaucgacggcgugaagcucgagagcacccgcaucuaccagauccuggcgaucuacuccaccgucgccagcagccuggugcucguggucucccugggggccaucagcuucuggaugugcuccaacggcagccugcagugccggaucugcaucuga

SEQ ID NO: 71595 - RNA, 1701 nt, Artificial Sequence; identical to SEQ ID NO: 71462
  derived and/or modified CDS sequence (opt1) from hemagglutinin__InfluenzaA__AEO01492

SEQ ID NO: 71596 - RNA, 1701 nt, Artificial Sequence
  derived and/or modified CDS sequence (opt1) from hemagglutinin__InfluenzaA__AEO01493
augaaggccauccuggugguccuccuguacaccuucgccaccgcgaacgccgacacgcugugcaucggcuaccacgccaacaacagcaccgacaccguggacaccgugcucgagaagaacgucacggugacccacuccgugaacauccuggaggacaagcacaacgggaagcugugcaagcuccgcggcgucgcgccccugcaccuggggaagugcaacaucgccggcuggauccucgggaacccggagugcgagagccuguccaccgccagcuccuggagcuacaucguggagaccuccagcuccgacaacggcacgugcuaccccggcgacuucaucgacuacgaggagcugcgggagcagcucagcuccgugagcuccuucgagcgcuucgagaucuuccccaagaccagcuccuggcccaaccacgacagcaacaagggggucaccgccgccugcccgcacgccggcgcgaaguccuucuacaagaaccugaucuggcuggugaagaaggggaacagcuaccccaagcucuccaagagcuacaucaacgacaagggcaaggaggugcugguccugugggggauccaccaccccagcaccuccgccgaccagcagagccucuaccagaacgccgacgccuacguguucgugggcacgucccgguacagcaagaaguucaagcccgagaucgccauccgcccgaagguccgggaccaggagggccgcaugaacuacuacuggacccugguggagcccggggacaagaucaccuucgaggcgaccggcaaccugguggucccccgguacgccuucgccauggagcgcuccgccgggagcggcaucaucaucuccgacacgcccgugcacgacugcaacacgaccugccagaccccgaagggcgccaucaacaccagccuccccuuccagaacauccaccccaucaccaucgggaagugccccaaguacgugaaguccaccaagcugcggcuggcgaccggccuccgcaacgucccgagcauccagucccgggggcuguucggcgccaucgccggguucaucgagggcggcuggacggggaugguggacggcugguacggguaccaccaccagaacgagcagggcagcggguacgccgccgaccugaaguccacccagaacgcgaucgacgagaucaccaacaaggugaacagcgucaucgagaagaugaacacccaguucacggccgugggcaaggaguucaaccaccucgagaagcgcaucgagaaccugaacaagaaggucgacgacggcuuccuggacaucuggaccuacaacgccgagcuccuggugcugcucgagaacgagcggacccuggacuaccacgacuccaacgugaagaaccuguacgagaagguccgcagccagcucaagaacaacgccaaggagaucgggaacggcugcuucgaguucuaccacaagugcgacaacacgugcauggaguccgugaagaacgggaccuacgacuaccccaaguacagcgaggaggccaagcugaaccgggaggagaucgacggcgugaagcuggaguccacccgcaucuaccagauccucgcgaucuacagcaccgucgccagcucccuggugcugguggucagccucggggccaucuccuucuggaugugcagcaacggcucccugcagugccggaucugcaucuga

SEQ ID NO: 71597 - RNA, 1701 nt, Artificial Sequence
  derived and/or modified CDS sequence (opt1) from hemagglutinin__InfluenzaA__AEO01494
augaaggccauccuggugguccuccuguacaccuucgccaccgcgaacgccgacacgcugugcaccggcuaccacgccaacaacagcaccgacaccguggacacggugcucgagaagaacgucaccgugacccacuccgugaaccugcuggaggacaagcacaacgggaagcucugcaagcugcgcggcgucgcgccccugcaccucgggaagugcaacaucgccggcuggauccuggggaacccggagugcgagagccuguccaccgccagcuccuggagcuacaucguggagacguccagcuccgacaacgggaccugcuaccccggcgacuucaucgacuacgaggagcuccgggagcagcugagcuccgugagcuccuucgagcgcuucgagaucuuccccaagaccagcuccuggcccaaccacgacagcaacaagggcgucaccgccgccugcccgcacgccggcgcgaaguccuucuacaagaaccugaucuggcucgugaagaaggggaacagcuaccccaagcuguccaagagcuacaucaacgacaagggcaaggaggugcugguccucugggggauccaccaccccagcacguccgccgaccagcagagccuguaccagaacgccgacgccuacguguucgugggcaccucccgguacagcaagaaguucaagcccgagaucgccauccgcccgaagguccgggaccaggagggccgcaugaacuacuacuggacccugguggagcccggggacaagaucaccuucgaggcgacgggcaaccucguggucccccgguacgccuucgccauggagcgcaacgccggguccggcaucaucaucagcgacacccccgugcacgacugcaacacgaccugccagaccccgaagggcgccaucaacaccucccugcccuuccagaacauccaccccaucaccaucgggaagugccccaaguacgucaagagcaccaagcugcggcucgcgacgggccugcgcaacgugccguccauccagagccgggggcuguucggcgccaucgccggguucaucgagggcggcuggaccgggaugguggacggcugguacggguaccaccaccagaacgagcagggcuccggguacgccgccgaccucaagagcacccagaacgcgaucgacgagaucaccaacaaggugaacuccgucaucgagaagaugaacacgcaguucaccgccgugggcaaggaguucaaccaccuggagaagcgcaucgagaaccugaacaagaaggucgacgacggcuuccucgacaucuggaccuacaacgccgagcugcuggugcuccuggagaacgagcggacccuggacuaccacgacagcaacgugaagaaccucuacgagaagguccgcaaccagcugaagaacaacgccaaggagaucgggaacggcugcuucgaguucuaccacaagugcgacaacacgugcauggaguccgugaagaacgggaccuacgacuaccccaaguacagcgaggaggccaagcugaaccgggaggagaucgacggcgugaagcucgaguccacccgcaucuaccagauccuggcgaucuacagcaccgucgccuccagccuggugcucguggucagccugggggccaucuccuucuggaugugcagcaacggcucccugcagugccggaucugcaucuga

SEQ ID NO: 71598 - RNA, 1701 nt, Artificial Sequence; identical to SEQ ID NO: 68290
  derived and/or modified CDS sequence (opt1) from hemagglutinin__InfluenzaA__AEO01496

SEQ ID NO: 71599 - RNA, 1701 nt, Artificial Sequence; identical to SEQ ID NO: 67046
  derived and/or modified CDS sequence (opt1) from hemagglutinin__InfluenzaA__AEO01497

SEQ ID NO: 71600 - RNA, 1701 nt, Artificial Sequence; identical to SEQ ID NO: 68290
  derived and/or modified CDS sequence (opt1) from hemagglutinin__InfluenzaA__AEO01498

SEQ ID NO: 71601 - RNA, 1701 nt, Artificial Sequence
  derived and/or modified CDS sequence (opt1) from hemagglutinin__InfluenzaA__AEO01499
augaaggccauccuggugguccuccuguacaccuucgccaucgcgaacgccgacacccugugcaucggcuaccacgccaacaacagcacggacaccguggacaccgugcucgagaagaacgucaccgugacgcacuccgugaaccugcuggaggacaagcacaacgggaagcucugcaagcugcgcggcgucgcgccccugcaccucgggaagugcaacaucgccggcuggauccuggggaacccggagugcgagagccuguccaccgccagcuccuggagcuacaucguggagaccuccagcuccgacaacgggaccugcuaccccggcgacuucaucgacuacgaggagcuccgggagcagcugagcuccgugagcuccuucgagcgcuucgagaucuuccccaagacgagcuccuggcccaaccacgacagcaacaagggcgucaccgccgccugcccgcacgccggcgcgaaguccuucuacaagaaccugaucuggcucgugaagaaggggaacagcuaccccaagcuguccaagagcuacaucaacgacaagggcaaggaggugcugguccucugggggauccaccaccccuacaccagcgccgaccagcagucccuguaccagaacgccgacgccuacguguucgugggcaccagccgguacuccaagaaguucaagcccgagaucgccauccgcccgaagguccgggaccaggagggccgcaugaacuacuacuggacgcugguggagcccggggacaagaucaccuucgaggcgaccggcaaccucguggucccccgguacgccuucgccauggagcgcaacgccgggagcggcaucaucaucuccgacacccccgugcacgacugcaacacgaccugccagaccccgaagggcgccaucaacaccagccugcccuuccagaacauccaccccaucacgaucgggaagugccccaaguacgugaaguccaccaagcugcggcucgcgaccggccugcgcaacgucccgagcauccagucccgggggcuguucggcgccaucgccggguucaucgagggcggcuggaccgggaugguggacggcugguacggguaccaccaccagaacgagcagggcagcggguacgccgccgaccucaaguccacgcagcacgcgaucgacgagaucaccaacaaggugaacagcgucaucgagaagaugaacacccaguucaccgccgugggcaaggaguucaaccaccuggagaagcgcaucgagaaccugaacaagaaggucgacgacggcuuccucgacaucuggacguacaacgccgagcugcuggugcuccuggagaacgagcggacccuggacuaccacgacuccaacgugaagaaccucuacgagaagguccgcagccagcugaagaacaacgccaaggagaucgggaacggcugcuucgaguucuaccacaagugcgacaacacgugcauggaguccgugaagaacgggaccuacgacuaccccaaguacagcgaggaggccaagcugaaccgggaggagaucaacggcgugaagcucgaguccacccgcaucuaccagauccuggcgaucuacagcaccgucgccuccagccuggugcucguggucagccugggggccaucuccuucuggaugugcagcaacggcucccugcagugccggaucugcaucuga

SEQ ID NO: 71602 - RNA, 1701 nt, Artificial Sequence; identical to SEQ ID NO: 67794
  derived and/or modified CDS sequence (opt1) from hemagglutinin__InfluenzaA__AEO01500

SEQ ID NO: 71603 - RNA, 1701 nt, Artificial Sequence; identical to SEQ ID NO: 67857
  derived and/or modified CDS sequence (opt1) from hemagglutinin__InfluenzaA__AEO01501

SEQ ID NO: 71604 - RNA, 1701 nt, Artificial Sequence; identical to SEQ ID NO: 67857
  derived and/or modified CDS sequence (opt1) from hemagglutinin__InfluenzaA__AEO01502

SEQ ID NO: 71605 - RNA, 1701 nt, Artificial Sequence; identical to SEQ ID NO: 68113
  derived and/or modified CDS sequence (opt1) from hemagglutinin__InfluenzaA__AEO01503

SEQ ID NO: 71606 - RNA, 1701 nt, Artificial Sequence; identical to SEQ ID NO: 68290
  derived and/or modified CDS sequence (opt1) from hemagglutinin__InfluenzaA__AEO01505

SEQ ID NO: 71607 - RNA, 1701 nt, Artificial Sequence; identical to SEQ ID NO: 67794
  derived and/or modified CDS sequence (opt1) from hemagglutinin__InfluenzaA__AEO01506

SEQ ID NO: 71608 - RNA, 1701 nt, Artificial Sequence; identical to SEQ ID NO: 71402
  derived and/or modified CDS sequence (opt1) from hemagglutinin__InfluenzaA__AEO01507

SEQ ID NO: 71609 - RNA, 1701 nt, Artificial Sequence; identical to SEQ ID NO: 68290
  derived and/or modified CDS sequence (opt1) from hemagglutinin__InfluenzaA__AEO01508

SEQ ID NO: 71610 - RNA, 1701 nt, Artificial Sequence; identical to SEQ ID NO: 68021
  derived and/or modified CDS sequence (opt1) from hemagglutinin__InfluenzaA__AEO01510

SEQ ID NO: 71611 - RNA, 1701 nt, Artificial Sequence
  derived and/or modified CDS sequence (opt1) from hemagglutinin__InfluenzaA__AEO01511
augaaggccauccuggugguccuccuguacaccuucgccaccgcgaacgccgacacgcugugcaucggcuaccacgccaacaacagcaccgacaccguggacaccgugcucgagaagaacgucacggugacccacuccgugaaccugcuggaggacaagcacaacgggaagcucugcaagcugcgcggcgucacgccccugcaccucgggaagugcaacaucgccggcuggauccuggggaacccggagugcgagagccuguccaccaccagcuccuggagcuacaucguggagaccuccagcuccgacaacgggaccugcuaccccggcgacuucaucgacuacgaggagcuccgggagcagcugagcuccgugagcuccuucgagcgcuucgagaucuuccccaagaccagcuccuggcccaaccacgacagcaacaagggcgucacggccgcgugcccgcacgccggcgccaaguccuucuacaagaaccugaucuggcucgugaagaaggggaacagcuaccccaagcuguccaagagcuacaucaacgacaagggcaaggaggugcugguccucugggggauccaccaccccagcaccuccgccgaccagcagagccuguaccagaacgcggacgccuacguguucgugggcaccucccgguacagcaagaaguucaagcccgagaucgccauccgcccgaagguccgggagcaggagggccgcaugaacuacuacuggacccugguggagcccggggacaagaucacguucgaggccaccggcaaccucguggucccccgguacgccuucgcgauggagcgcaacgccggguccggcaucaucaucagcgacacccccgugcacgacugcaacaccacgugccagaccccgaagggcgccaucaacaccucccugcccuuccagaacauccaccccaucaccaucgggaagugccccaaguacgucaagagcacgaagcugcggcucgccaccggccugcgcaacgugccguccauccagagccgggggcuguucggcgccaucgcgggguucaucgagggcggcuggaccgggaugguggacggcugguacggguaccaccaccagaacgagcagggcuccggguacgccgccgaccucaagagcacccagaacgccaucgacaagaucacgaacaaggugaacuccgucaucgagaagaugaacacccaguucaccgccgugggcaaggaguucaaccaccuggagaagcgcaucgagaaccugaacaagaaggucgacgacggcuuccucgacaucuggaccuacaacgcggagcugcuggugcuccuggagaacgagcggacgcuggacuaccacgacagcaacgugaagaaccucuacgagaagguccgcucccagcugaagaacaacgccaaggagaucgggaacggcugcuucgaguucuaccacaagugcgacaacacgugcauggagagcgugaagaacgggaccuacgacuaccccaaguacuccgaggaggccaagcugaaccgggaggagaucgacggcgugaagcucgagagcacccgcaucuaccagauccuggccaucuacuccaccgucgccagcagccuggugcucguggucucccugggggcgaucagcuucuggaugugcuccaacggcagccugcagugccggaucugcaucuga

SEQ ID NO: 71612 - RNA, 1701 nt, Artificial Sequence
  derived and/or modified CDS sequence (opt1) from hemagglutinin__InfluenzaA__AEO01512
augaaggccauccuggugguccuccuguacaccuucgccaccgcgaacgccgacacgcugugcaucggcuaccacgccaacaacagcaccgacaccguggacaccgugcucgagaagaacgucacggugacccacuccgugaaccugcuggaggacaagcacaacgggaagcucugcaagcugcgcggcgucgcgccccugcaccucgggaagugcaacaucgccggcuggauccuggggaacccggagugcgagagccuguccaccgccagcuccuggagcuacaucguggagaccuccagcuccgacaacggcacgugcuaccccggcgacuucaucgacuacgaggagcuccgggagcagcugagcuccgugagcuccuucgagcgcuucgagaucuuccccaagaccagcuccuggcccaaccacgacagcaacaagggggucaccgccgccugcccgcacgccggcgcgaaguccuucuacaagaaccugaucuggcucgugaagaaggggaacagcuaccccaagcuguccaagagcuacaucaacgacaagggcaaggaggugcugguccucugggggauccaccaccccagcaccuccgccgaccagcagagccuguaccagaacgccgacgccuacguguucgugggcacgucccgguacagcaagaaguucaagcccgagaucgccauccgcccgaagguccgggagcaggagggccgcaugaacuacuacuggacccugguggagcccggggacaagaucaccuucgaggcgaccggcaaccucguggucccccgguacgccuucgccauggagcgcaacgccggguccggcaucaucaucagcgacacgcccgugcacgacugcaacacgaccugccagaccccgaagggcgccaucaacaccucccugcccuuccagaacauccaccccaucaccaucgggaagugccccaaguacgucaagagcaccaagcugcggcucgcgaccggccugcgcaacgugccguccauccagagccgggggcuguucggcgccaucgccggguucaucgagggcggcuggacggggaugguggacggcugguacggguaccaccaccagaacgagcagggcuccggguacgccgccgaccucaagagcacccagaacgcgaucgacgagaucaccaacaaggugaacuccgucaucgagaagaugaacacccaguucacggccgugggcaaggaguucaaccaccuggagaagcgcaucgagaaccugaacaagaaggucgacgacggcuuccucgacaucuggaccuacaacgccgagcugcuggugcuccuggagaacgagcggacccuggacuaccacgacagcaacgugaagaaccucuacgagaagguccgcucccagcugaagaacaacgccaaggagaucgggaacggcugcuucgaguucuaccacaagugcgacaacaagugcauggagagcgugaagaacgggaccuacgacuaccccaaguacuccgaggaggccaagcugaaccgggaggagaucgacggcgugaagcucgagagcacgcgcaucuaccagauccuggcgaucuacuccaccgucgccagcagccuggugcucguggucucccugggggccaucagcuucuggaugugcuccaacggcagccugcagugccggaucugcaucuga

SEQ ID NO: 71613 - RNA, 1701 nt, Artificial Sequence
  derived and/or modified CDS sequence (opt1) from hemagglutinin__InfluenzaA__AEO01513
augaaggccauccuggccgugcuccuguacaccuucgcgaccgccaacgccgacacgcugugcaucggcuaccacgccaacaacagcaccgacaccgucgacaccgugcucgagaagaacgugacggucacccacuccgugaacauccuggaggacaagcacaacgggaagcugugcaagcuccgcggcguggcgccccugcaccuggggaagugcaacaucgccggcuggauccucgggaacccggagugcgagagccuguccaccgccagcuccuggagcuacaucgucgagaccuccagcuccgacaacggcacgugcuaccccggcgacuucaucgacuacgaggagcugcgggagcagcucagcuccgugagcuccuucgagcgcuucgagaucuuccccaagaccagcuccuggcccaaccacgacagcaacaagggggugaccgccgccugcccgcacgcgggcgccaaguccuucuacaagaaccugaucuggcuggucaagaaggggaacagcuaccccaagcucuccaagagcuacaucaacgacaagggcaaggaggugcuggugcugugggggauccaccaccccagcaccuccgccgaccagcagagccucuaccagaacgccgacgccuacgucuucgugggcuccagccgguacuccaagaaguucaagcccgagaucgcgauccgcccgaaggugcgggaccaggagggccgcaugaacuacuacuggacgcuggucgagcccggggacaagaucaccuucgaggccaccggcaaccugguggugccccgguacgccuucgccauggagcgcaacgccgggagcggcaucaucaucuccgacacccccguccacgacugcaacacgaccugccagaccccgaagggcgcgaucaacaccagccuccccuuccagaacauccaccccgugacgaucgggaagugccccaaguacgugaaguccaccaagcugcggcuggccaccggccuccgcaacgucccgagcauccagucccgggggcuguucggcgccaucgccggguucaucgagggcggcuggaccgggaugguggacggcugguacggguaccaccaccagaacgagcagggcagcggguacgccgcggaccugaaguccacgcagaacgccaucgacgagaucaccaacaaggugaacagcgucaucgagaagaugaacacccaguucaccgccgugggcaaggaguucaaccaccucgagaagcgcaucgagaaccugaacaagaaggucgacgacggcuuccuggacaucuggacguacaacgccgagcuccuggugcugcucgagaacgagcggacccuggacuaccacgacuccaacgugaagaaccuguacgagaagguccgcagccagcucaagaacaacgccaaggagaucgggaacggcugcuucgaguucuaccacaagugcgacaacacgugcauggaguccgugaagaacgggaccuacgacuaccccaaguacagcgaggaggcgaagcugaaccgggaggagaucgacggcgugaagcuggaguccacccgcaucuaccagauccucgccaucuacagcaccgucgccagcucccuggugcugguggucagccucggggccaucuccuucuggaugugcagcaacggcucccugcagugccggaucugcaucuga

SEQ ID NO: 71614 - RNA, 1701 nt, Artificial Sequence
  derived and/or modified CDS sequence (opt1) from hemagglutinin__InfluenzaA__AEO01514
augaaggccauccuggugguccuccuguacaccuucgccaccgcgaacgccgacacgcugugcaucggcuaccacgccaacaacagcaccgacaccguggacaccgugcucgagaagaacgucacggugacccacuccgugaaccugcuggaggacaugcacaacgggaagcucugcaagcugcgcggcgucgcgccccugcaccucgggaagugcaacaucgccggcuggauccuggggaacccggagugcgagagccuguccaccgccagcuccuggagcuacaucguggagaccuccagcuccgacaacggcacgugcuaccccggcgacuucaucgacuacgaggagcuccgggagcagcugagcuccgugagcuccuucgagcgcuucgagaucuuccccaagaccagcuccuggcccaaccacgacagcaacaagggggucaccgccgccugcccgcacgccggcgcgaaguccuucuacaagaaccugaucuggcucgugaagaaggggaacagcuaccccaagcuguccaagagcuacaucaacgacaagggcaaggaggugcugguccucugggggauccaccaccccagcaccuccgccgaccagcagagccuguaccagaacgccgacgccuacguguucgugggcacgucccgguacagcaagaaguucaagcccgagaucgccauccgcccgaagguccgggagcaggagggccgcaugaacuacuacuggacccugguggagcccggggacaagaucaccuucgaggcgaccggcaaccucguggucccccgguacgccuucgccauggagcgcaacgccggguccggcaucaucaucagcgacacgcccgugcacgacugcaacacgaccugccagaccccgaagggcgccaucaacaccucccugcccuuccagaacauccaccccaucaccaucgggaagugccccaaguacgucaagagcaccaagcugcggcucgcgaccggccugcgcaacgugccguccauccagagccgggggcuguucggcgccaucgccggguucaucgagggcggcuggacggggaugguggacggcugguacggguaccaccaccagaacgagcagggcuccggguacgccgccgaccucaagagcacccagaacgcgaucgacaagaucaccaacaaggugaacuccgucaucgagaagaugaacacccaguucacggccgugggcaaggaguucaaccaccuggagaagcgcaucgagaaccugaacaagaaggucgacgacggcuuccucgacaucuggaccuacaacgccgagcugcuggugcuccuggagaacgagcggacccuggacuaccacgacagcaacgugaagaaccucuacgagaagguccgcucccagcugaagaacaacgccaaggagaucgggaacggcugcuucgaguucuaccacaagugcgacaacacgugcauggagagcgugaagaacgggaccuacgacuaccccaaguacuccgaggaggccaagcugaaccgggaggagaucgacggcgugaagcucgagagcacccgcaucuaccagauccuggcgaucuacuccaccgucgccagcagccuggugcucguggucucccugggggccaucagcuucuggaugugcuccaacggcagccugcagugccggaucugcaucuga

SEQ ID NO: 71615 - RNA, 1701 nt, Artificial Sequence; identical to SEQ ID NO: 68880
  derived and/or modified CDS sequence (opt1) from hemagglutinin__InfluenzaA__AEO01515

SEQ ID NO: 71616 - RNA, 1701 nt, Artificial Sequence; identical to SEQ ID NO: 71462
  derived and/or modified CDS sequence (opt1) from hemagglutinin__InfluenzaA__AEO01516

SEQ ID NO: 71617 - RNA, 1701 nt, Artificial Sequence
  derived and/or modified CDS sequence (opt1) from hemagglutinin__InfluenzaA__AEO01517
augaaggccauccuggugguccuccuguacaccuucgccaccgcgaacgccgacacgcugugcaucggcuaccacgccaacaacagcaccgacaccguggacaccgugcucgagaagaacgucacggugacccacuccgugaaccugcuggaggacaagcacaacgggaagcucugcaagcugcgcggcgucgcgccccugcaccucgggaagugcaacaucgccggcuggauccuggggaacccggagugcgagagccuguccaccgccagcuccuggagcuacaucguggagaccuccagcuccgacaacggcacgugcuaccccggcgacuucaucgacuacgaggagcuccgggagcagcugagcuccgugagcuccuucgagcgcuucgagaucuuccccaagaccagcuccuggcccaaccacgacagcaacaagggggucaccgccgccugcccgcacgccggcgcgaaguccuucuacaagaaccugaucuggcucgugaagaaggagaacagcuaccccaagcuguccaagagcuacaucaacgacaaggggaaggaggugcugguccucuggggcauccaccaccccagcaccuccgccgaccagcagagccuguaccagaacgccgacgccuacguguucguggggacgucccgguacagcaagaaguucaagcccgagaucgccauccgcccgaagguccgggaccaggagggccgcaugaacuacuacuggacccugguggagcccggcgacaagaucaccuucgaggcgaccgggaaccucguggucccccgguacgccuucgccauggagcgcaacgccggcuccgggaucaucaucagcgacacgcccgugcacgacugcaacacgaccugccagaccccggagggcgccaucaacaccucccugcccuuccagaacauccaccccaucaccaucggcaagugccccaaguacgucaagagcaccaagcugcggcucgcgaccgggcugcgcaacgugccguccauccagagccggggccuguucggggccaucgccggcuucaucgagggcggguggacgggcaugguggacgggugguacggcuaccaccaccagaacgagcagggguccggcuacgccgccgaccucaagagcacccagaacgcgaucgacgagaucaccaacaaggugaacuccgucaucgagaagaugaacacccaguucacggccguggggaaggaguucaaccaccuggagaagcgcaucgagaaccugaacaagaaggucgacgacggcuuccucgacaucuggaccuacaacgccgagcugcuggugcuccuggagaacgagcggacccuggacuaccacgacagcaacgugaagaaccucuacgagaagguccgcucccagcugaagaacaacgccaaggagaucggcaacgggugcuucgaguucuaccacaagugcgacaacacgugcauggagagcgugaagaacggcaccuacgacuaccccaaguacuccgaggaggccaagcugaaccgggaggagaucgacggggugaagcucgagagcacccgcaucuaccagauccuggcgaucuacuccaccgucgccagcagccuggugcucguggucucccugggcgccaucagcuucuggaugugcuccaacgggagccugcagugccggaucugcaucuga

SEQ ID NO: 71618 - RNA, 1701 nt, Artificial Sequence
  derived and/or modified CDS sequence (opt1) from hemagglutinin__InfluenzaA__AEO01518
augaaggccauccuggugguccuccuguacaccuucgccaccgcgaacgccgacacgcugugcaucggcuaccacgccaacaacagcaccgacaccguggacaccgugcucgagaagaacgucacggugacccacuccgugaaccugcuggaggacaagcacaacgggaagcucugcaagcugcgcggcgucgcgccccugcaccucgggaagugcaacaucgccggcuggauccuggggaacccggagugcgagagccuguccaccgccagcuccuggagcuacaucguggagaccuccagcuccgacaacggcacgugcuaccccggcgacuucaucgacuacgaggagcuccgggagcagcugagcuccgugagcuccuucgagcgcuucgagaucuuccccaagaccagcuccuggcccaaccacgacagcaacaagggggucaccgccgccugcccgcacgccggcgcgaaguccuucuacaagaaccugaucuggaucgugaagaaggggaacagcuaccccaagcucaacaaguccuacaucaacgacaagggcaaggaggugcugguccugugggggauccaccaccccagcaccagcgccgaccagcagucccucuaccagaacgccgacgccuacguguucgugggcacgagccgguacuccaagaaguucaagcccgagaucgccauccgcccgaagguccgggaccaggagggccgcaugaacuacuacuggacccugguggagcccggggacaagaucaccuucgaggcgaccggcaaccugguggucccccgguacgccuucgccauggagcgcaacgccgggagcggcaucaucaucuccgacacgcccgugcacgacugcaacacgaccugccagaccccgaagggcgccaucaacaccagccuccccuuccagaacauccaccccaucaccaucggggagugccccaaguacgugaaguccaccaagcugcggcuggcgaccggccuccgcaacgucccgagcauccagucccgggggcuguucggcgccaucgccggguucaucgagggcggcuggacggggaugguggacggcugguacggguaccaccaccagaacgagcagggcagcggguacgccgccgaccugaaguccacccagaacgcgaucgacaagaucaccaacaaggugaacagcgucaucgagaagaugaacacccaguucacggccgugggcaaggaguucaaccaccucgagaagcgcaucgagaaccugaacaagaaggucgacgacggcuuccuggacaucuggaccuacaacgccgagcuccuggugcugcucgagaacgagcggacccuggacuaccacgacuccaacgugaagaaccuguacgagaagguccgcagccagcucaagaacaacgccaaggagaucgggaacggcugcuucgaguucuaccacaagugcgacaacacgugcauggaguccgugaagaacgggaccuacgacuaccccaaguacagcgaggaggccaagcugaaccgggaggagaucgacggcgugaagcuggaguccacccgcaucuaccagauccucgcgaucuacagcaccgucgccuccagccuggugcugguggucagccucggggccaucuccuucuggaugugcagcaacggcucccugcagugccggaucugcaucuga

SEQ ID NO: 71619 - RNA, 1701 nt, Artificial Sequence
  derived and/or modified CDS sequence (opt1) from hemagglutinin__InfluenzaA__AEO01519
augaaggccauccuggugguccuccuguacaccuucgccaccgcgaacgccgacacgcugugcaucggcuaccacgccaacaacagcaccgacaccguggacaccgugcucgagaagaacgucacggugacccacuccgugaaccugcuggaggacaagcacaacgggaagcucugcaagcugcgcggcgucgcgccccugcaccucgggaagugcaacaucgccggcuggauccuggggaacccggagugcgagagccuguccaccgccagcuccuggagcuacaucguggagaccuccagcuccgacaacggcacgugcuaccccggcgacuucaucgacuacgaggagcuccgggagcagcugagcuccgugagcuccuucgagcgcuucgagaucuuccccaagaccagcuccuggcccaaccacgacagcaacaagggggucaccgccgccugcccgcacgccggcgcgaaguccuucuacaagaaccugaucuggcucgugaagaaggggaacagcuaccccaagcuguccaagagcuacaucaacgacaagggcaaggaggugcugguccucugggggauccaccaccccagcaccuccgccgaccagcagagccuguaccagaacgccgacgccuacguguucgugggcacgucccgguacagcaagaaguuccgccccgagaucgccauccggccgaagguccgcgagcaggagggccggaugaacuacuacuggacccugguggagcccggggacaagaucaccuucgaggcgaccggcaaccucguggucccccgcuacgccuucgccauggagcggaacgccggguccggcaucaucaucagcgacacgcccgugcacgacugcaacacgaccugccagaccccgaagggcgccaucaacaccucccugcccuuccagaacauccaccccaucaccaucgggaagugccccaaguacgucaagagcaccaagcugcgccucgcgaccggccugcggaacaucccguccauccagagccgcgggcuguucggcgccaucgccggguucaucgagggcggcuggacggggaugguggacggcugguacggguaccaccaccagaacgagcagggcuccggguacgccgccgaccucaagagcacccagaacgcgaucgacgagaucaccaacaaggugaacuccgugaucgagaagaugaacacccaguucacggccgucggcaaggaguucaaccaccuggagaagcggaucgagaaccugaacaagaagguggacgacggcuuccucgacaucuggaccuacaacgccgagcugcugguccuccuggagaacgagcgcacccuggacuaccacgacagcaacgugaagaaccucuacgagaaggugcggucccagcugaagaacaacgccaaggagaucgggaacggcugcuucgaguucuaccacaagugcgacaacacgugcauggagagcgucaagaacgggaccuacgacuaccccaaguacuccgaggaggccaagcugaaccgcgaggagaucgacggcgugaagcucgagagcacccggaucuaccagauccuggcgaucuacuccaccguggccagcagccugguccucguggugucccugggggccaucagcuucuggaugugcuccaacggcagccugcagugccgcaucugcaucuga

SEQ ID NO: 71620 - RNA, 1701 nt, Artificial Sequence; identical to SEQ ID NO: 69598
  derived and/or modified CDS sequence (opt1) from hemagglutinin__InfluenzaA__AEO01520

SEQ ID NO: 71621 - RNA, 1701 nt, Artificial Sequence; identical to SEQ ID NO: 68320
  derived and/or modified CDS sequence (opt1) from hemagglutinin__InfluenzaA__AEO01521

SEQ ID NO: 71622 - RNA, 1701 nt, Artificial Sequence; identical to SEQ ID NO: 70112
  derived and/or modified CDS sequence (opt1) from hemagglutinin__InfluenzaA__AEO01522

SEQ ID NO: 71623 - RNA, 1701 nt, Artificial Sequence; identical to SEQ ID NO: 67857
  derived and/or modified CDS sequence (opt1) from hemagglutinin__InfluenzaA__AEO01523

SEQ ID NO: 71624 - RNA, 1701 nt, Artificial Sequence; identical to SEQ ID NO: 71451
  derived and/or modified CDS sequence (opt1) from hemagglutinin__InfluenzaA__AEO01524

SEQ ID NO: 71625 - RNA, 1701 nt, Artificial Sequence
  derived and/or modified CDS sequence (opt1) from hemagglutinin__InfluenzaA__AEO01525
augaaggccauccuggugguccuccuguacaccuucgccaccgcgaacgccgacacgcugugcaucggcuaccacgccaacaacagcaccgacaccguggacaccgugcucgagaagaacgucacggugacccacuccgugaaccugcuggaggacaagcacaacgggaagcucugcaagcugcgcggcgucgcgccccugcaccucgggaagugcaacaucgccggcuggauccuggggaacccggagugcgagagccuguccaccgccagcuccuggagcuacaucguggagaccuccagcuccggcaacggcacgugcuaccccggggacuucaucgacuacgaggagcuccgggagcagcugagcuccgugagcuccuucgagcgcuucgagaucuuccccaagaccagcuccuggcccaaccacgacagcaacaagggcgucaccgccgccugcccgcacgccggggcgaaguccuucuacaagaaccugaucuggcucgugaagaagggcaacagcuacccccggcuguccaagagcuacaucaacgacaaggggaaggaggugcugguccucuggggcauccaccaccccagcaccuccgccgaccagcagagccuguaccagaacgccgacgccuacguguucgugggcacgucccgcuacagcaagaaguucaagcccgagaucgccauccggccgaagguccgcgaccaggaggggcggaugaacuacuacuggacccugguggagcccggcgacaagaucaccuucgaggcgaccgggaaccucguggucccccgcuacgccuucgccauggagcggaacgccggcuccggcaucaucaucagcgacacgcccgugcacgacugcaacacgaccugccagaccccgaagggggccaucaacaccucccugcccuuccagaacauccaccccaucaccaucggcaagugccccaaguacgucaagagcaccaagcugcgccucgcgaccgggcugcggaacgugccguccauccagagccgcggccuguucggggccaucgccggcuucaucgagggcggguggacgggcaugguggacgggugguacggcuaccaccaccagaacgagcagggguccggcuacgccgccgaccucaagagcacccagaacgcgaucgacgagaucaccaacaaggugaacuccgucaucgagaagaugaacacccaguucacggccgugggcaaggaguucaaccaccuggagaagcggaucgagaaccugaacaagaaggucgacgacggguuccucgacaucuggaccuacaacgccgagcugcuggugcuccuggagaacgagcgcacccuggacuaccacgacagcaacgugaagaaccucuacgagaagguccggucccagcugaagaacaacgccaaggagaucggcaacgggugcuucgaguucuaccacaagugcgacaacacgugcauggagagcgugaagaacggcaccuacgacuaccccaaguacuccgaggaggccaagcugaaccgcgaggagaucgacggggugaagcucgagagcacccggaucuaccagauccuggcgaucuacuccaccgucgccagcagccuggugcucguggucucccugggcgccaucagcuucuggaugugcuccaacggcagccugcagugccgcaucugcaucuga

SEQ ID NO: 71626 - RNA, 1701 nt, Artificial Sequence; identical to SEQ ID NO: 67857
  derived and/or modified CDS sequence (opt1) from hemagglutinin__InfluenzaA__AEO01526

SEQ ID NO: 71627 - RNA, 1701 nt, Artificial Sequence; identical to SEQ ID NO: 70634
  derived and/or modified CDS sequence (opt1) from hemagglutinin__InfluenzaA__AEO01527

SEQ ID NO: 71628 - RNA, 1701 nt, Artificial Sequence
  derived and/or modified CDS sequence (opt1) from hemagglutinin__InfluenzaA__AEO01529
augaaggccauccuggugguccuccuguacaccuucgccaccgcgaacgccgacacgcugugcaucggcuaccacgccaacaacagcaccgacaccguggacaccgugcucgagaagaacgucacggugacccacuccgugaacauccuggaggacaagcacaacgggaagcugugcaagcuccgcggcgucgcgccccugcaccuggggaagugcaacaucgccggcuggauccucgggaacccggagugcgagagccuguccaccgccagcuccuggagcuacaucguggagaccuccagcuccgacaacggcacgugcuaccccggcgacuucaucgacuacgaggagcugcgggagcagcucagcuccgugagcuccuucgagcgcuucgagaucuuccccaagaccagcuccuggcccaaccacgacagcaacaagggggucaccgccgccugcccgcacgccggcgcgaaguccuucuacaagaaccugaucuggcuggugaagaaggggaacagcuaccccaagcucuccaagagcuacaucaacgacaagggcaaggaggugcugguccugugggggauccaccaccccagcaccuccgccgaccagcagagccucuaccagaacgccgacgccuacguguucgugggcuccagccgguacuccaagaaguucaagcccgagaucgccauccgcccgaagguccgggaccaggagggccgcaugaacuacuacuggacgcugguggagcccggggacaagaucaccuucgaggcgaccggcaaccugguggucccccgguacgccuucgccauggagcgcaacgccgggagcggcaucaucaucuccgacacccccgugcacgacugcaacacgaccugccagaccccgaagggcgccaucaacaccagccuccccuuccagaacauccaccccaucacgaucgggaagugccccaaguacgugaaguccaccaagcugcggcuggcgaccggccuccgcaacgucccgagcauccagucccgggggcuguucggcgccaucgccggguucaucgagggcggcuggaccgggaugguggacggcugguacggguaccaccaccagaacgagcagggcagcggguacgccgccgaccugaaguccacgcagaacgcgaucgacgagaucaccaacaaggugaacagcgucaucgagaagaugaacacccaguucaccgccgugggcaaggaguucaaccaccucgagaagcgcaucgagaaccugaacaagaaggucgacgacggcuuccuggacaucuggacguacaacgccgagcuccuggugcugcucgagaacgagcggacccuggacuaccacgacuccaacgugaagaaccuguacgagaagguccgcagccagcucaagaacaacgccaaggagguggggaacggcugcuucgaguucuaccacaagugcgacaacacgugcauggaguccgugaagaacgggaccuacgacuaccccaaguacagcgaggaggccaagcugaaccgggagaagaucgacggcgucaagcuggaguccacccgcaucuaccagauccucgcgaucuacagcaccgccgccagcucccuggugcugguggucagccucggggccaucuccuucuggaugugcagcaacggcucccugcagugccggaucugcaucuga

SEQ ID NO: 71629 - RNA, 1701 nt, Artificial Sequence; identical to SEQ ID NO: 67857
  derived and/or modified CDS sequence (opt1) from hemagglutinin__InfluenzaA__AEO01530

SEQ ID NO: 71630 - RNA, 1701 nt, Artificial Sequence
  derived and/or modified CDS sequence (opt1) from hemagglutinin__InfluenzaA__AEO01531
augaaggccauccuggugguccuccuguacaccuucgccaccgcgaacacggacacccugugcaucggcuaccacgccaacaacagcaccgacaccguggacacggugcucgagaagaacgucaccgugacccacuccgugaaccugcuggaggacaagcacaacgggaagcucugcaagcugcgcggcgucgcgccccugcaccucgggaagugcaacaucgccggcuggauccuggggaacccggagugcgagagccuguccaccgccagcuccuggagcuacaucguggagacguccagcuccgacaacgggaccugcuaccccggcgacuucaucgacuacgaggagcuccgggagcagcugagcuccgugagcuccuucgagcgcuucgagaucuuccccaagaccagcuccuggcccaaccacgacagcaacaagggcgucaccgccgccugcccgcacgccggcgccaaguccuucuacaagaaccugaucuggcucgugaagaaggggaacagcuaccccaagcuguccaagagcuacaucaacgacaagggcaaggaggugcugguccucugggggauccaccaccccagcacguccgcggaccagcagagccuguaccagaacgccgacgccuacguguucgugggcaccucccgguacagcaagaaguucaagcccgagaucgccauccgcccgaagguccgggagcaggagggccgcaugaacuacuacuggacccugguggagcccggggacaagaucaccuucgaggccacgggcaaccucguggucccccgguacgcguucgccauggagcgcaacgccggguccggcaucaucaucagcgacacccccgugcacgacugcaacacgaccugccagaccccgaagggcgccaucaacaccucccugcccuuccagaacauccaccccaucaccaucgggaagugccccaaguacgucaagagcaccaagcugcggcucgccacgggccugcgcaacgugccguccauccagagccgggggcuguucggcgcgaucgccggguucaucgagggcggcuggaccgggaugguggacggcugguacggguaccaccaccagaacgagcagggcuccggguacgccgccgaccucaagagcacccagaacgccaucgacaagaucaccaacaaggugaacuccgucaucgagaagaugaacacgcaguucaccgcggugggcaaggaguucaaccaccuggagaagcgcaucgagaaccugaacaagaaggucgacgacggcuuccucgacaucuggaccuacaacgccgagcugcuggugcuccuggagaacgagcggacccuggacuaccacgacagcaacgugaagaaccucuacgagaagguccgcucccagcugaagaacaacgccaaggagaucgggaacggcugcuucgaguucuaccacaagugcgacaacacgugcauggagagcgugaagaacgggaccuacgacuaccccaaguacuccgaggaggccaagcugaaccgggaggagaucgacggcgugaagcucgagagcacccgcgucuaccagauccuggccaucuacuccaccguggcgagcagccuggugcucgucgugucccugggggccaucagcuucuggaugugcuccaacggcagccugcagugccggaucugcaucuga

SEQ ID NO: 71631 - RNA, 1701 nt, Artificial Sequence; identical to SEQ ID NO: 71462
  derived and/or modified CDS sequence (opt1) from hemagglutinin__InfluenzaA__AEO01532

SEQ ID NO: 71632 - RNA, 1701 nt, Artificial Sequence
  derived and/or modified CDS sequence (opt1) from hemagglutinin__InfluenzaA__AEO01533
augaaggccauccuggugguccuccuguacaccuucgccaccgcgaacgccgacacgcugugcaucggcuaccacgccaacaacagcaccgacaccguggacaccgugcucgagaagaacgucacggugacccacuccguggaccugcuggaggacaagcacaacgggaagcucugcaagcugcgcggcgucgcgccccugcaccucgggaagugcaacaucgccggcuggauccuggggaacccggagugcgagagccuguccaccgccagcuccuggagcuacaucguggagaccuccagcuccgacaacggcacgugcuaccccggcgacuucaucgacuacgaggagcuccgggagcagcugagcuccgugagcuccuucgagcgcuucgagaucuuccccaagaccagcuccuggcccaaccacgacagcaacaagggggucaccgccgccugcccgcacgccggcgcgaaguccuucuacaagaaccugaucuggcucgugaagaaggggaacagcuaccccaagcuguccaagagcuacaucaacgacaagggcaaggaggugcugguccucugggggauccaccaccccagcaccuccgccgaccagcagagccuguaccagaacgccgacgccuacguguucgugggcacgucccgguacagcaagaaguucaagcccgagaucgccauccgcccgaagguccgggaccaggagggccgcaugaacuacuacuggacccugguggagcccggggacaagaucaccuucgaggcgaccggcaaccucguggucccccgguacgccuucgccauggagcgcaacgccggguccggcaucaucaucagcgacacgcccgugcacgacugcaacacgaccugccagaccccgaagggcgccaucaacaccucccugcccuuccagaacauccaccccaucaccaucgggaagugccccaaguacgucaagagcaccaagcugcggcucgcgaccggccugcgcaacgugccguccauccagagccgggggcuguucggcgccaucgccggguucaucgagggcggcuggacggggaugguggacggcugguacggguaccaccaccagaacgagcagggcuccggguacgccgccgaccucaagagcacccagaacgcgaucgacgagaucaccaacaaggugaacuccgucaucgagaagaugaacacccaguucacggccgugggcaaggaguucaaccaccuggagaagcgcaucgagaaccugaacaagaaggucgacgacggcuuccucgacaucuggaccuacaacgccgagcugcuggugcuccuggagaacgagcggacccuggacuaccacgacagcaacgugaagaaccucuacgagaagguccgcucccagcugaagaacaacgccaaggagaucgggaacggcugcuucgaguucuaccacaagugcgacaacacgugcauggagagcgugaagaacgggaccuacgacuaccccaaguacuccgaggaggccaagcugaaccgggaggagaucgacggcgugaagcucgagagcacccgcaucuaccagauccuggcgaucuacuccaccgucgccagcagccuggugcucguggucucccugggggccaucagcuucuggaugugcuccaacggcagccugcagugccggaucugcaucuga

SEQ ID NO: 71633 - RNA, 1701 nt, Artificial Sequence
  derived and/or modified CDS sequence (opt1) from hemagglutinin__InfluenzaA__AEO01534
augaaggccauccuggugguccuccuguacaccuucgccaccgcgaacgccgacacgcugugcaucggcuaccacgccaacaacagcaccgacaccguggacaccgugcucgagaagaacgucacggugacccacuccgugaaccugcuggaggacaagcacaacgggaagcucugcaagcugcgcggcgucgcgccccugcaccucgggaagugcaacaucgccggcuggauccuggggaacccggagugcgagagccuguccaccgcgcggagcugguccuacaucguggagaccagcuccagcgacaacggcacgugcuaccccggcgacuucaucgacuacgaggagcuccgcgagcagcuguccagcguguccagcuucgagcgguucgagaucuuccccaagaccuccagcuggcccaaccacgacuccaacaagggggucaccgccgccugcccgcacgccggcgccaagagcuucuacaagaaccugaucuggcucgugaagaaggggaacuccuaccccaagcugagcaaguccuacaucaacgacaagggcaaggaggugcugguccucugggggauccaccaccccagcaccagcgccgaccagcagucccuguaccagaacgccgacgccuacguguucgugggcacgagccgcuacuccaagaaguucaagcccgagaucgccauccggccgaagguccgcgaccaggagggccggaugaacuacuacuggacccugguggagcccggggacaagaucaccuucgaggcgaccggcaaccucguggucccccgcuacgccuucgccauggagcggaacgccgggagcggcaucaucaucuccgacacgcccgugcacgacugcaacacgaccugccagaccccgaagggcgccaucaacaccagccugcccuuccagaacauccaccccaucaccaucgggaagugccccaaguacgugaaguccaccaagcugcgccucgcgaccggccugcggaacgucccgagcauccagucccgcgggcuguucggcgccaucgccggguucaucgagggcggcuggacggggaugguggacggcugguacggguaccaccaccagaacgagcagggcagcggguacgccgccgaccucaaguccacccagcacgcgaucgacgagaucaccaacaaggugaacagcgucaucgagaagaugaacacccaguucacggccgugggcaaggaguucaaccaccuggagaagcggaucgagaaccugaacaagaaggucgacgacggcuuccucgacaucuggaccuacaacgccgagcugcuggugcuccuggagaacgagcgcacccuggacuaccacgacuccaacgugaagaaccucuacgagaagguccggagccagcugaagaacaacgccaaggagaucgggaacggcugcuucgaguucuaccacaagugcgacaacacgugcauggaguccgugaagaacgggaccuacgacuaccccaaguacagcgaggaggccaagcugaaccgcgaggagaucgacggcgugaagcucgaguccacccggaucuaccagauccuggcgaucuacagcaccgucgccuccagccuggugcucguggucagccugggggccaucuccuucuggaugugcagcaacggcucccugcagugccgcaucugcaucuga

SEQ ID NO: 71634 - RNA, 1701 nt, Artificial Sequence; identical to SEQ ID NO: 68342
  derived and/or modified CDS sequence (opt1) from hemagglutinin__InfluenzaA__AEO01535

SEQ ID NO: 71635 - RNA, 1701 nt, Artificial Sequence; identical to SEQ ID NO: 67857
  derived and/or modified CDS sequence (opt1) from hemagglutinin__InfluenzaA__AEO01536

SEQ ID NO: 71636 - RNA, 1701 nt, Artificial Sequence; identical to SEQ ID NO: 69598
  derived and/or modified CDS sequence (opt1) from hemagglutinin__InfluenzaA__AEO01537

SEQ ID NO: 71637 - RNA, 1701 nt, Artificial Sequence
  derived and/or modified CDS sequence (opt1) from hemagglutinin__InfluenzaA__AEO01538
augaaggccauccuggugguccuccuguacaccuucgccaccgcgaacgccgacacgcugugcaucggcuaccacgccaacaacagcaccgacaccguggacaccgugcucgagaagaacgucacggugacccacuccgugaaccugcuggaggacaagcacaacgggaagcucugcaagcugggcggggucgcgccccugcaccucggcaagugcaacaucgccggguggauccugggcaacccggagugcgagagccuguccaccgccagcuccuggagcuacaucguggagaccuccagcuccgacaacggcacgugcuaccccggggacuucaucgacuacgaggagcuccgcgagcagcugagcuccgugagcuccuucgagcgguucgagaucuuccccaagaccagcuccuggcccaaccacgacagcaacaagggcgucaccgccgccugcccgcacgccggggcgaaguccuucuacaagaaccugaucuggcucgugaagaagggcaacagcuaccccaagcuguccaagagcuacaucaacgacaaggggaaggaggugcugguccucuggggcauccaccaccccagcaccuccgccgaccagcagagccuguaccagaacgccgacgccuacguguucgugggcacgucccgcuacagcaagaaguucaagcccgagaucgccauccggccgaagguccgcgaccaggaggggcggaugaacuacuacuggacccugguggagcccggcgacaagaucaccuucgaggcgaccgggaaccucguggucccccgcuacgccuucgccauggagcggaacgccggcuccggcaucaucaucagcgacacgcccgugcacgacugcaacacgaccugccagaccccgaagggggccaucaacaccucccugcccuuccagaacauccaccccaucaccaucggcaagugccccaaguacgucaagagcaccaagcugcgccucgcgaccgggcugcggaacgugccguccauccagagccgcggccuguucggggccaucgccggcuucaucgagggcggguggacgggcaugguggacgggugguacggcuaccaccaccagaacgagcagggguccggcuacgccgccgaccucaagagcacccagaacgcgaucgacgagaucaccaacaaggugaacuccgucaucgagaagaugaacacccaguucacggccgugggcaaggaguucaaccaccuggagaagcggaucgagaaccugaacaagaaggucgacgacggguuccucgacaucuggaccuacaacgccgagcugcuggugcuccuggagaacgagcgcacccuggacuaccacgacagcaacgugaagaaccucuacgagaagguccggucccagcugaagaacaacgccaaggagaucggcaacgggugcuucgaguucuaccacaagugcgacaacacgugcauggagagcgugaagaacggcaccuacgacuaccccaaguacuccgaggaggccaagcugaaccgcgaggagaucgacggggugaagcucgagagcacccggaucuaccagauccuggcgaucuacuccaccgucgccagcagccuggugcucguggucucccugggcgccaucagcuucuggaugugcuccaacggcagccugcagugccgcaucugcaucuga

SEQ ID NO: 71638 - RNA, 1701 nt, Artificial Sequence; identical to SEQ ID NO: 68320
  derived and/or modified CDS sequence (opt1) from hemagglutinin__InfluenzaA__AEO01539

SEQ ID NO: 71639 - RNA, 1701 nt, Artificial Sequence
  derived and/or modified CDS sequence (opt1) from hemagglutinin__InfluenzaA__AEO01540
augaaggccauccuggugguccuccuguacaccuucgccaucgcgaacgccgacacccugugcaucggcuaccacgccaacaacagcacggacaccguggacaccgugcucgagaagaacgucaccgugacgcacuccgugaaccugcuggaggacaagcacaacgagaagcucugcaagcugcgcggggucgcgccccugcaccucggcaagugcaacaucgccggguggauccugggcaacccggagugcgagagccuguccaccgccagcuccuggagcuacaucguggagaccuccagcuccgacaacgggaccugcuaccccggcgacuucaucgacuacgaggagcuccgggagcagcugagcuccgugagcuccuucgagcgcuucgagaucuuccccaagacgagcuccuggcccaaccacgacagcaacaagggcgucaccgccgccugcccgcacgccggggcgaaguccuucuacaagaaccugaucuggcucgugaagaagggcaacagcuaccccaagcuguccaagagcuacaucaacgacaaggggaaggaggugcugguccucuggggcauccaccaccccagcaccuccgccgaccagcagagccuguaccagaacgccgacgccuacguguucguggggaccucccgguacagcaagaaguucaagcccgagaucgccauccgcccgaagguccgggaccaggagggccgcaugaacuacuacuggacgcugguggagcccggcgacaagaucaccuucgaggcgaccgggaaccucguggucccccgguacgccuucgccauggagcgcaacgccggcuccgggaucaucaucagcgacacccccgugcacgacugcaacacgaccugccagaccccgaagggcgccaucaacaccucccugcccuuccagaacauccaccccaucacgaucggcaagugccccaaguacgucaagagcaccaagcugcggcucgcgaccgggcugcgcaacgugccguccauccagagccggggccuguucggggccaucgccggcuucaucgagggcggguggaccggcaugguggacgggugguacggcuaccaccaccagaacgagcagggguccggcuacgccgccgaccucaagagcacgcagcacgcgaucgacgagaucaccaacaaggugaacuccgucaucgagaagaugaacacccaguucaccgccguggggaaggaguucaaccaccuggagaagcgcaucgagaaccugaacaagaaggucgacgacggcuuccucgacaucuggacguacaacgccgagcugcuggugcuccuggagaacgagcggacccuggacuaccacgacagcaacgugaagaaccucuacgagaagguccgcucccagcugaagaacaacgccaaggagaucggcaacgggugcuucgaguucuaccacaagugcgacaacacgugcauggagagcgugaagaacggcaccuacgacuaccccaaguacuccgaggaggccaagcugaaccgggaggagaucaacggggugaagcucgagagcacccgcaucuaccagauccuggcgaucuacuccaccgucgccagcagccuggugcucguggucucccugggcgccaucagcuucuggaugugcuccaacgggagccugcagugccggaucugcaucuga

SEQ ID NO: 71640 - RNA, 1701 nt, Artificial Sequence; identical to SEQ ID NO: 68113
  derived and/or modified CDS sequence (opt1) from hemagglutinin__InfluenzaA__AEO01541

SEQ ID NO: 71641 - RNA, 1701 nt, Artificial Sequence; identical to SEQ ID NO: 67857
  derived and/or modified CDS sequence (opt1) from hemagglutinin__InfluenzaA__AEO01542

SEQ ID NO: 71642 - RNA, 1701 nt, Artificial Sequence; identical to SEQ ID NO: 67794
  derived and/or modified CDS sequence (opt1) from hemagglutinin__InfluenzaA__AEO01543

SEQ ID NO: 71643 - RNA, 1701 nt, Artificial Sequence; identical to SEQ ID NO: 67794
  derived and/or modified CDS sequence (opt1) from hemagglutinin__InfluenzaA__AEO01544

SEQ ID NO: 71644 - RNA, 1701 nt, Artificial Sequence
  derived and/or modified CDS sequence (opt1) from hemagglutinin__InfluenzaA__AEO01545
augaaggccauccuggugguccuccuguacaccuucgccaccgcgaacgccgacacgcugugcaucggcuaccacgccaacaacagcaccgacaccguggacaccgugcucgagaagaacgucacggugacccacuccgugaaccugcuggaggacaagcacagcgggaagcucugcaagcugcgcggcgucgcgccccugcaccucgggaagugcaacaucgccggcuggauccuggggaacccggagugcgagucccugagcaccgcguccagcugguccuacaucguggagaccagcuccagcgacaacggcacgugcuaccccggcgacuucguggacuacgaggagcuccgggagcagcuguccagcgucuccagcuucgagcgcuucgagaucuuccccaagaccuccagcuggcccaaccacgacuccaacaagggggugaccgccgccugcccgcacgccggcgccaagagcuucuacaagaaccugaucuggcucgugaagaaggggaacuccuaccccaagcugagcaagagcuacaucaacgacaagggcaaggagguccuggugcucugggggauccaccaccccuccaccagcgccgaccagcagucccuguaccagaacgccgacgccuacguguucgucggcacgagccgguacuccaagaaguucaagcccgagaucgccauccgcccgaaggugcgggaccaggagggccgcaugaacuacuacuggacccugguggagcccggggacaagaucaccuucgaggcgaccggcaaccucgucgugccccgguacgccuucgccauggagcgcaacgccgggagcggcaucaucaucuccgacacgcccgugcacgacugcaacacgaccugccagaccccgaagggcgccaucaacaccagccugcccuuccagaacauccaccccaucaccaucgggaagugccccaaguacgucaaguccaccaagcugcggcucgcgaccggccugcgcaacgugccgagcauccagucccgggggcuguucggcgccaucgccggguucaucgagggcggcuggacggggaugguggacggcugguacggguaccaccaccagaacgagcagggcagcggguacgccgccgaccucaaguccacccagaacgcgaucgacaagaucaccaacaaggucaacagcgugaucgagaagaugaacacccaguucacggccgucggcaaggaguucaaccaccuggagaagcgcaucgagaaccugaacaagaagguggacgacggcuuccucgacaucuggaccuacaacgccgagcugcuggugcuccuggagaacgagcggacccuggacuaccacgacuccaacgucaagaaccucuacgagaaggugcgcagccagcugaagaacaacgccaaggagaucgggaacggcugcuucgaguucuaccacaagugcgacaacacgugcauggaguccgugaagaacgggaccuacgacuaccccaaguacagcgaggaggccaagcugaaccgggaggagaucgacggcgucaagcucgaguccacccgcaucuaccagauccuggcgaucuacagcaccguggccagcucccuggugcucgucgugagccugggggccaucuccuucuggaugugcagcaacggcucccugcagugccggaucugcaucuga

SEQ ID NO: 71645 - RNA, 1701 nt, Artificial Sequence; identical to SEQ ID NO: 66680
  derived and/or modified CDS sequence (opt1) from hemagglutinin__InfluenzaA__AEO01546

SEQ ID NO: 71646 - RNA, 1701 nt, Artificial Sequence; identical to SEQ ID NO: 66680
  derived and/or modified CDS sequence (opt1) from hemagglutinin__InfluenzaA__AEO01547

SEQ ID NO: 71647 - RNA, 1701 nt, Artificial Sequence; identical to SEQ ID NO: 66873
  derived and/or modified CDS sequence (opt1) from hemagglutinin__InfluenzaA__AEO01548

SEQ ID NO: 71648 - RNA, 1701 nt, Artificial Sequence; identical to SEQ ID NO: 66784
  derived and/or modified CDS sequence (opt1) from hemagglutinin__InfluenzaA__AEO01549

SEQ ID NO: 71649 - RNA, 1701 nt, Artificial Sequence; identical to SEQ ID NO: 66693
  derived and/or modified CDS sequence (opt1) from hemagglutinin__InfluenzaA__AEO01550

SEQ ID NO: 71650 - RNA, 1701 nt, Artificial Sequence; identical to SEQ ID NO: 66693
  derived and/or modified CDS sequence (opt1) from hemagglutinin__InfluenzaA__AEO01551

SEQ ID NO: 71651 - RNA, 1701 nt, Artificial Sequence; identical to SEQ ID NO: 66693
  derived and/or modified CDS sequence (opt1) from hemagglutinin__InfluenzaA__AEO01552

SEQ ID NO: 71652 - RNA, 1701 nt, Artificial Sequence; identical to SEQ ID NO: 66693
  derived and/or modified CDS sequence (opt1) from hemagglutinin__InfluenzaA__AEO01553

SEQ ID NO: 71653 - RNA, 1701 nt, Artificial Sequence; identical to SEQ ID NO: 66693
  derived and/or modified CDS sequence (opt1) from hemagglutinin__InfluenzaA__AEO01554

SEQ ID NO: 71654 - RNA, 1701 nt, Artificial Sequence; identical to SEQ ID NO: 66873
  derived and/or modified CDS sequence (opt1) from hemagglutinin__InfluenzaA__AEO01555

SEQ ID NO: 71655 - RNA, 1701 nt, Artificial Sequence; identical to SEQ ID NO: 66693
  derived and/or modified CDS sequence (opt1) from hemagglutinin__InfluenzaA__AEO01557

SEQ ID NO: 71656 - RNA, 1701 nt, Artificial Sequence; identical to SEQ ID NO: 66693
  derived and/or modified CDS sequence (opt1) from hemagglutinin__InfluenzaA__AEO01558

SEQ ID NO: 71657 - RNA, 1701 nt, Artificial Sequence
  derived and/or modified CDS sequence (opt1) from hemagglutinin__InfluenzaA__AEO01559
augaaggccauccuggugguccuccuguacaccuucgccaccgcgaacgccgacacgcugugcaucggcuaccacgccaacaacagcaccgacaccguggacaccgugcucgagaagaacgucacggugacccacuccgugaaccugcuggaggacaagcacaacgggaagcucugcaagcugcgcggcgucgcgccccugcaccucgggaagugcaacaucgccggcuggauccuggggaacccggagugcgagagccuguccaccgccagcuccuggagcuacaucguggagaccuccagcuccgacaacggcacgugcuaccccggcgacuucaucgacuacgaggagcuccgggagcagcugagcuccgugagcuccuucgagcgcuucgagaucuuccccaagaccagcuccuggcccaaccacgacagcaacaagggggucaccgccgccugcccgcacgccggcgcgaaguccuucuacaagaaccugaucuggcucgugaagaaggggaacagcuaccccaagcuguccaagagcuacaucaacgacaagggcaaggaggugcugguccucugggggauccaccaccccagcaccuccgccgaccagcagagccuguaccagaacgccgacgccuacguguucgugggcacgucccgguacagcaagaaguucaagcccgagaucgccauccgcccgaagguccgggaccaggagggccgcaugaacuacuacuggacccugguggagcccggggacaagaucaccuucgaggcgaccggcaaccucguggucccccgguacgccuucgccauggagcgcaacgccggguccggcaucaucaucagcgacacgcccgugcaggacugcaacacgaccugccagaccccgaagggcgccaucaacaccucccugcccuuccagaacauccaccccaucaccaucgggaagugccccaaguacgucaagagcaccaagcugcggcucgcgaccggccugcgcaacgugccguccauccagagccgggggcuguucggcgccaucgccggguucaucgagggcggcuggacggggaugguggacggcugguacggguaccaccaccagaacgagcagggcuccggguacgccgccgaccucaagagcacccagaacgcgaucgacgagaucaccaacaaggugaacuccgucaucgagaagaugaacacccaguucacggccgugggcaaggaguucaaccaccuggagaagcgcaucgagaaccugaacaagaaggucgacgacggcuuccucgacaucuggaccuacaacgccgagcugcuggugcuccuggagaacgagcggacccuggacuaccacgacagcaacgugaagaaccucuacgagaagguccgcucccagcugaagaacaacgccaaggagaucgggaacggcugcuucgaguucuaccacaagugcgacaacacgugcauggagagcgugaagaacgggaccuacgacuaccccaaguacuccgaggaggccaagcugaaccgggaggagaucgacggcgugaagcucgagagcacccgcaucuaccagauccuggcgaucuacuccaccgucgccagcagccuggugcucguggucucccugggggccaucagcuucuggaugugcuccaacggcagccugcagugccggaucugcaucuga

SEQ ID NO: 71658 - RNA, 1701 nt, Artificial Sequence; identical to SEQ ID NO: 66693
  derived and/or modified CDS sequence (opt1) from hemagglutinin__InfluenzaA__AEO01560

SEQ ID NO: 71659 - RNA, 1701 nt, Artificial Sequence; identical to SEQ ID NO: 66693
  derived and/or modified CDS sequence (opt1) from hemagglutinin__InfluenzaA__AEO01561

SEQ ID NO: 71660 - RNA, 1701 nt, Artificial Sequence; identical to SEQ ID NO: 66693
  derived and/or modified CDS sequence (opt1) from hemagglutinin__InfluenzaA__AEO01562

SEQ ID NO: 71661 - RNA, 1701 nt, Artificial Sequence; identical to SEQ ID NO: 66693
  derived and/or modified CDS sequence (opt1) from hemagglutinin__InfluenzaA__AEO01563

SEQ ID NO: 71662 - RNA, 1701 nt, Artificial Sequence; identical to SEQ ID NO: 66693
  derived and/or modified CDS sequence (opt1) from hemagglutinin__InfluenzaA__AEO01564

SEQ ID NO: 71663 - RNA, 1701 nt, Artificial Sequence; identical to SEQ ID NO: 66693
  derived and/or modified CDS sequence (opt1) from hemagglutinin__InfluenzaA__AEO01565

SEQ ID NO: 71664 - RNA, 1701 nt, Artificial Sequence; identical to SEQ ID NO: 66680
  derived and/or modified CDS sequence (opt1) from hemagglutinin__InfluenzaA__AEO01566

SEQ ID NO: 71665 - RNA, 1701 nt, Artificial Sequence; identical to SEQ ID NO: 66935
  derived and/or modified CDS sequence (opt1) from hemagglutinin__InfluenzaA__AEO01567

SEQ ID NO: 71666 - RNA, 1701 nt, Artificial Sequence; identical to SEQ ID NO: 66875
  derived and/or modified CDS sequence (opt1) from hemagglutinin__InfluenzaA__AEO01568

SEQ ID NO: 71667 - RNA, 1701 nt, Artificial Sequence; identical to SEQ ID NO: 66875
  derived and/or modified CDS sequence (opt1) from hemagglutinin__InfluenzaA__AEO01569

SEQ ID NO: 71668 - RNA, 1701 nt, Artificial Sequence; identical to SEQ ID NO: 66935
  derived and/or modified CDS sequence (opt1) from hemagglutinin__InfluenzaA__AEO01570

SEQ ID NO: 71669 - RNA, 1701 nt, Artificial Sequence; identical to SEQ ID NO: 66875
  derived and/or modified CDS sequence (opt1) from hemagglutinin__InfluenzaA__AEO01571

SEQ ID NO: 71670 - RNA, 1701 nt, Artificial Sequence; identical to SEQ ID NO: 66935
  derived and/or modified CDS sequence (opt1) from hemagglutinin__InfluenzaA__AEO01572

SEQ ID NO: 71671 - RNA, 1701 nt, Artificial Sequence; identical to SEQ ID NO: 66680
  derived and/or modified CDS sequence (opt1) from hemagglutinin__InfluenzaA__AEO01573

SEQ ID NO: 71672 - RNA, 1701 nt, Artificial Sequence; identical to SEQ ID NO: 66693
  derived and/or modified CDS sequence (opt1) from hemagglutinin__InfluenzaA__AEO01574

SEQ ID NO: 71673 - RNA, 1701 nt, Artificial Sequence; identical to SEQ ID NO: 66680
  derived and/or modified CDS sequence (opt1) from hemagglutinin__InfluenzaA__AEO01575

SEQ ID NO: 71674 - RNA, 1701 nt, Artificial Sequence; identical to SEQ ID NO: 66680
  derived and/or modified CDS sequence (opt1) from hemagglutinin__InfluenzaA__AEO01576

SEQ ID NO: 71675 - RNA, 1701 nt, Artificial Sequence; identical to SEQ ID NO: 66680
  derived and/or modified CDS sequence (opt1) from hemagglutinin__InfluenzaA__AEO01577

SEQ ID NO: 71676 - RNA, 1701 nt, Artificial Sequence; identical to SEQ ID NO: 66935
  derived and/or modified CDS sequence (opt1) from hemagglutinin__InfluenzaA__AEO01578

SEQ ID NO: 71677 - RNA, 1701 nt, Artificial Sequence; identical to SEQ ID NO: 66935
  derived and/or modified CDS sequence (opt1) from hemagglutinin__InfluenzaA__AEO01579

SEQ ID NO: 71678 - RNA, 1701 nt, Artificial Sequence; identical to SEQ ID NO: 66680
  derived and/or modified CDS sequence (opt1) from hemagglutinin__InfluenzaA__AEO01581

SEQ ID NO: 71679 - RNA, 1701 nt, Artificial Sequence; identical to SEQ ID NO: 66680
  derived and/or modified CDS sequence (opt1) from hemagglutinin__InfluenzaA__AEO01582

SEQ ID NO: 71680 - RNA, 1701 nt, Artificial Sequence; identical to SEQ ID NO: 66680
  derived and/or modified CDS sequence (opt1) from hemagglutinin__InfluenzaA__AEO01583

SEQ ID NO: 71681 - RNA, 1701 nt, Artificial Sequence; identical to SEQ ID NO: 66680
  derived and/or modified CDS sequence (opt1) from hemagglutinin__InfluenzaA__AEO01584

SEQ ID NO: 71682 - RNA, 1701 nt, Artificial Sequence; identical to SEQ ID NO: 66680
  derived and/or modified CDS sequence (opt1) from hemagglutinin__InfluenzaA__AEO01585

SEQ ID NO: 71683 - RNA, 1701 nt, Artificial Sequence; identical to SEQ ID NO: 66680
  derived and/or modified CDS sequence (opt1) from hemagglutinin__InfluenzaA__AEO01586

SEQ ID NO: 71684 - RNA, 1701 nt, Artificial Sequence; identical to SEQ ID NO: 66680
  derived and/or modified CDS sequence (opt1) from hemagglutinin__InfluenzaA__AEO01587

SEQ ID NO: 71685 - RNA, 1701 nt, Artificial Sequence; identical to SEQ ID NO: 66680
  derived and/or modified CDS sequence (opt1) from hemagglutinin__InfluenzaA__AEO01588

SEQ ID NO: 71686 - RNA, 1701 nt, Artificial Sequence; identical to SEQ ID NO: 66693
  derived and/or modified CDS sequence (opt1) from hemagglutinin__InfluenzaA__AEO01589

SEQ ID NO: 71687 - RNA, 1701 nt, Artificial Sequence; identical to SEQ ID NO: 66693
  derived and/or modified CDS sequence (opt1) from hemagglutinin__InfluenzaA__AEO01590

SEQ ID NO: 71688 - RNA, 1701 nt, Artificial Sequence; identical to SEQ ID NO: 66693
  derived and/or modified CDS sequence (opt1) from hemagglutinin__InfluenzaA__AEO01591

SEQ ID NO: 71689 - RNA, 1701 nt, Artificial Sequence; identical to SEQ ID NO: 66680
  derived and/or modified CDS sequence (opt1) from hemagglutinin__InfluenzaA__AEO01592

SEQ ID NO: 71690 - RNA, 1701 nt, Artificial Sequence; identical to SEQ ID NO: 66693
  derived and/or modified CDS sequence (opt1) from hemagglutinin__InfluenzaA__AEO01593

SEQ ID NO: 71691 - RNA, 1701 nt, Artificial Sequence; identical to SEQ ID NO: 66680
  derived and/or modified CDS sequence (opt1) from hemagglutinin__InfluenzaA__AEO01594

SEQ ID NO: 71692 - RNA, 1701 nt, Artificial Sequence; identical to SEQ ID NO: 66680
  derived and/or modified CDS sequence (opt1) from hemagglutinin__InfluenzaA__AEO01595

SEQ ID NO: 71693 - RNA, 1701 nt, Artificial Sequence; identical to SEQ ID NO: 66873
  derived and/or modified CDS sequence (opt1) from hemagglutinin__InfluenzaA__AEO01596

SEQ ID NO: 71694 - RNA, 1701 nt, Artificial Sequence; identical to SEQ ID NO: 66693
  derived and/or modified CDS sequence (opt1) from hemagglutinin__InfluenzaA__AEO01597

SEQ ID NO: 71695 - RNA, 1701 nt, Artificial Sequence
  derived and/or modified CDS sequence (opt1) from hemagglutinin__InfluenzaA__AEO01598
augaaggccauccuggugguccuccuguacaccuucgccaccgcgaacgccgacacgcugugcaucggcuaccacgccaacaacagcaccgacaccguggacaccgugcucgagaagaacgucacggugacccacuccgugaaccugcuggaggacaagcacaacgggaagcucugcaagcugcgcggcgucgcgccccugcaccucgggaagugcaacaucgccggcuggauccuggggaacccggagugcgagagccuguccaccgccagcuccuggagcuacaucguggagaccuccagcuccgacaacggcacgugcuaccccggcgacuucaucgacuacgaggagcuccgggagcagcugagcuccgugagcuccuucgagcgcuucgagauguuccccaagaccagcuccuggcccaaccacgacagcaacaacggggucaccgccgccugcccgcacgccggcgcgaaguccuucuacaagaaccugaucuggcucgugaagaaggggaacagcuaccccaagcuguccaagagcuacaucaacgacaagggcaaggaggugcugguccucugggggauccaccaccccagcaccuccgccgaccagcagagccuguaccagaacgccgacgccuacguguucgugggcuccagccgguacuccaagaaguucaagcccgagaucgccauccgcccgaagguccgggaccaggagggccgcaugaacuacuacuggacgcugguggagcccggggacaagaucaccuucgaggcgaccggcaaccucguggucccccgguacgccuucgccauggagcgcaacgccgggagcggcaucaucaucuccgacacccccgugcacgacugcaacacgaccugccagaccccgaagggcgccaucaacaccagccugcccuuccagaacauccaccccaucacgaucgggaagugccccaaguacgugaaguccaccaagcugcggcucgcgaccggccugcgcaacgucccgagcauccagucccgggggcuguucggcgccaucgccggguucaucgagggcggcuggaccgggaugguggacggcugguacggguaccaccaccagaacgagcagggcagcggguacgccgccgaccucaaguccacgcagaacgcgaucgacgagaucaccaacaaggugaacagcgucaucgagaagaugaacacccaguucaccgccgugggcaaggaguucaaccaccuggagaagcgcaucgagaaccugaacaagaaggucgacgacggcuuccucgacaucuggacguacaacgccgagcugcuggugcuccuggagaacgagcggacccuggacuaccacgacuccaacgugaagaaccucuacgagaagguccgcagccagcugaagaacaacgccaaggagaucgggaacggcugcuucgaguucuaccacaagugcgacaacacgugcauggaguccgugaagaacgggaccuacgacuaccccaaguacagcgaggaggccaagcugaaccgggaggagaucgacggcgugaagcucgaguccacccgcaucuaccagauccuggcgaucuacagcaccgucgccagcucccuggugcucguggucagccugggggccaucuccuucuggaugugcagcaacggcucccugcagugccggaucugcaucuga

SEQ ID NO: 71696 - RNA, 1701 nt, Artificial Sequence; identical to SEQ ID NO: 66693
  derived and/or modified CDS sequence (opt1) from hemagglutinin__InfluenzaA__AEO01599

SEQ ID NO: 71697 - RNA, 1701 nt, Artificial Sequence; identical to SEQ ID NO: 66693
  derived and/or modified CDS sequence (opt1) from hemagglutinin__InfluenzaA__AEO01600

SEQ ID NO: 71698 - RNA, 1701 nt, Artificial Sequence; identical to SEQ ID NO: 66693
  derived and/or modified CDS sequence (opt1) from hemagglutinin__InfluenzaA__AEO01601

SEQ ID NO: 71699 - RNA, 1701 nt, Artificial Sequence; identical to SEQ ID NO: 66693
  derived and/or modified CDS sequence (opt1) from hemagglutinin__InfluenzaA__AEO01602

SEQ ID NO: 71700 - RNA, 1701 nt, Artificial Sequence; identical to SEQ ID NO: 66693
  derived and/or modified CDS sequence (opt1) from hemagglutinin__InfluenzaA__AEO01603

SEQ ID NO: 71701 - RNA, 1701 nt, Artificial Sequence; identical to SEQ ID NO: 66693
  derived and/or modified CDS sequence (opt1) from hemagglutinin__InfluenzaA__AEO01604

SEQ ID NO: 71702 - RNA, 1701 nt, Artificial Sequence; identical to SEQ ID NO: 66693
  derived and/or modified CDS sequence (opt1) from hemagglutinin__InfluenzaA__AEO01605

SEQ ID NO: 71703 - RNA, 1701 nt, Artificial Sequence
  derived and/or modified CDS sequence (opt1) from hemagglutinin__InfluenzaA__AEO01606
augaaggccauccuggugguccuccuguacaccuucgccaccgcgaacgccgacacgcugugcaucggcuaccacgccaacaacagcaccgacaccguggacaccgugcucgagaagaacgucacggugacccacuccgugaaccugcuggaggacaagcacaacgggaagcucugcaagcugcgcggcgucgcgccccugcaccucgggaagugcaacaucgccggcuggauccuggggaacccggagugcgagagccuguccaccgccagcuccuggagcuacaucguggagaccuccagcuccgacaacggcacgugcuaccccggcgacuucaucgacuacgaggagcuccgggagcagcugagcuccgugagcuccuucgagcgcuucgagaucuuccccaagaccagcuccuggcccaaccacgacagcaacaagggggucaccgccgccugcccgcacgccggcgcgaaguccuucuacaagaaccugaucuggcucgugaagaaggggaacagcuaccccaagcuguccaagagcuacaucaacgacaagggcaaggaggugcugguccucugggggauccaccaccccagcaccuccgccgaccagcagagccuguaccagaacgccgacgccuacguguucgugggcacgucccgguacagcaagaaguucaagcccgagaucgccauccgcccgaagguccgggaccaggagggccgcaugaacuacuacuggacccugguggagcccggggacaagaucaccuucgaggcgaccggcaaccucguggucccccgguacgccuucgccauggagcgcaacgccggguccggcaucaucaucagcgacacgcccgugcacgacugcaacacgaccugccagaccccgaagggcgccaucaacaccucccugcccuuccagaacauccaccccaucaccaucgggaagugccccaaguacgucaagagcaccaagcugcggcucgcgaccggccugcgcaacgugccguccauccagagccgggggcuguucggcgccaucgccggguucaucgagggcggcuggacggggaugguggacggcugguacggguaccaccaccagaacgagcagggcuccggguacgccgccgaccucaagagcacccagaacgcgaucgacgagaucaccaacaaggugaacuccgucaucgagaagaugaacacccaguucacggccgugggcaaggaguucaaccaccuggagaagcgcaucgagaaccugaacaagaaggucgacgacggcuuccucgacaucuggaccuacaacgccgagcugcuggugcuccuggagaacgagcggacccuggacuaccacgacagcaacgugaagaaccucuacgagaaggucaagucccagcugaagaacaacgccaaggagaucgggaacggcugcuucgaguucuaccacaagugcgacaacacgugcauggagagcgugaagaacgggaccuacgacuaccccaaguacuccgaggaggccaagcugaaccgcgaggagaucgacggcgugaagcucgagagcacccggaucuaccagauccuggcgaucuacuccaccgucgccagcagccuggugcucguggucucccugggggccaucagcuucuggaugugcuccaacggcagccugcagugccgcaucugcaucuga

SEQ ID NO: 71704 - RNA, 1701 nt, Artificial Sequence; identical to SEQ ID NO: 66935
  derived and/or modified CDS sequence (opt1) from hemagglutinin__InfluenzaA__AEO01607

SEQ ID NO: 71705 - RNA, 1701 nt, Artificial Sequence; identical to SEQ ID NO: 69598
  derived and/or modified CDS sequence (opt1) from hemagglutinin__InfluenzaA__AEO01608

SEQ ID NO: 71706 - RNA, 1701 nt, Artificial Sequence; identical to SEQ ID NO: 71458
  derived and/or modified CDS sequence (opt1) from hemagglutinin__InfluenzaA__AEO01609

SEQ ID NO: 71707 - RNA, 1701 nt, Artificial Sequence
  derived and/or modified CDS sequence (opt1) from hemagglutinin__InfluenzaA__AEO01610
augaaggccauccuggugguccuccuguacaccuucgccaccacgaacgcggacacccugugcaucggcuaccacgccaacaacagcaccgacaccguggacacggugcucgagaagaacgucaccgugacccacuccgugaaccugcuggaggacaagcacaacgggaagcucugcaagcugcgcggcgucgcgccccugcaccucgggaagugcaacaucgccggcuggauccuggggaacccggagugcgagagccuguccaccgccagcuccuggagcuacaucguggagacguccagcuccgacaacgggaccugcuaccccggcgacuucaucgacuacgaggagcuccgggagcagcugagcuccgugagcuccuucgagcgcuucgagaucuuccccaagaccagcuccuggcccaaccacgacagcaacaagggcgucaccgccgccugcccgcacgccggcgccaaguccuucuacaagaaccugaucuggcucgugaagaaggggaacagcuaccccaagcuguccaagagcuacaucaacgacaagggcaaggaggugcugguccucugggggauccaccaccccagcacguccgcggaccagcagagccuguaccagaacgccgacgccuacguguucgugggcaccucccgguacagcaagaaguucaagcccgagaucgccauccgcccgaagguccgggaccaggagggccgcaugaacuacuacuggacccugguggagcccggggacaagaucaccuucgaggccacgggcaaccucguggucccccgguacgcguucgccauggagcgcaacgccggguccggcaucaucaucagcgacacccccgugcacgacugcaacacgaccugccagaccccgaagggcgccaucaacaccucccugcccuuccagaacauccaccccaucaccaucgggaagugccccaaguacgucaagagcaccaagcugcggcucgccacgggccugcgcaacgugccguccauccagagccgggggcuguucggcgcgaucgccggguucaucgagggcggcuggaccgggaugguggacggcugguacggguaccaccaccagaacgagcagggcuccggguacgccgccgaccucaagagcacccagcacgccaucgacgagaucaccaacaaggugaacuccgucaucgagaagaugaacacgcaguucaccgcggugggcaaggaguucaaccaccuggagaagcgcaucgagaaccugaacaagaaggucgacgacggcuuccucgacaucuggaccuacaacgccgagcugcuggugcuccuggagaacgagcggacccuggacuaccacgacagcaacgugaagaaccucuacgagaagguccgcucccagcugaagaacaacgccaaggagaucgggaacggcugcuucgaguucuaccacaagugcgacaacacgugcauggagagcgugaagaacgggaccuacgacuaccccaaguacuccgaggaggccaagcugaaccgggaggagaucgacggcgugaagcucgagagcacccgcaucuaccagauccuggccaucuacuccaccgucgcgagcagccuggugcucguggucucccugggggccaucagcuucuggaugugcuccaacggcagccugcagugccgggugugcaucuga

SEQ ID NO: 71708 - RNA, 1701 nt, Artificial Sequence
  derived and/or modified CDS sequence (opt1) from hemagglutinin__InfluenzaA__AEO01611
augaaggccauccuggugguccuccuguacaccuucgccaccgcgaacgccgacacgcugugcaucggcuaccacgccaacaacagcaccgacaccguggacaccgugcucgagaagaacgucacggugacccacuccgugaaccugcuggaggacaagcacaacgggaagcucugcaagcugcgcggcgucgcgccccugcaccucgggaagugcaacaucgccggcuggauccuggggaacccggagugcgagagccuguccaccgccagcuccuggagcuacaucguggagaccuccagcuccgacaacggcacgugcuaccccggcgacuucaucgacuacgaggagcuccgggagcagcugagcuccgugagcuccuucgagcgcuucgagaucuuccccaagaccagcuccuggcccaaccacgacagcaacaagggggucaccgccgccugcccgcacgccggcgcgaaguccuucuacaagaaccugaucuggcucgugaagaaggggaacagcuaccccaagcuguccaagagcuacaucaacgacaagggccgggaggugcugguccucugggggauccaccaccccagcaccuccgccgaccagcagagccuguaccagaacgccgacgccuacguguucgugggcacgucccgcuacagcaagaaguucaagcccgagaucgccauccggccgaagguccgcgaccaggagggccggaugaacuacuacuggacccugguggagcccggggacaagaucaccuucgaggcgaccggcaaccucguggucccccgcuacgccuucgccauggagcggaacgccggguccggcaucaucaucagcgacacgcccgugcacgacugcaacacgaccugccagaccccgaagggcgccaucaacaccucccugcccuuccagaacauccaccccaucaccaucggggagugccccaaguacgucaagagcaccaagcugcgccucgcgaccggccugcggaacgugccguccauccagagccgcgggcuguucggcgccaucgccggguucaucgagggcggcuggacggggaugguggacggcugguacggguaccaccaccagaacgagcagggcuccggguacgccgccgaccucaagagcacccagaacgcgaucgacaagaucaccaacaaggugaacuccgucaucgagaagaugaacacccaguucacggccgugggcaaggaguucaaccaccuggagaagcggaucgagaaccugaacaagaaggucgacgacggcuuccucgacaucuggaccuacaacgccgagcugcuggugcuccuggagaacgagcgcacccuggacuaccacgacagcaacgugaagaaccucuacgagaagguccggucccagcugaagaacaacgccaaggagaucgggaacggcugcuucgaguucuaccacaagugcgacaacacgugcauggagagcgugaagaacgggaccuacgacuaccccaaguacuccgaggaggccaagcugaaccgcgaggagaucgacggcgugaagcucgagagcacccggaucuaccagauccuggcgaucuacuccaccgccgccagcagccugguccucguggugucccugggggccaucagcuucuggaugugcuccaacggcagccugcagugccgcaucugcaucuga

SEQ ID NO: 71709 - RNA, 1701 nt, Artificial Sequence
  derived and/or modified CDS sequence (opt1) from hemagglutinin__InfluenzaA__AEO01612
augaaggccauccuggugguccuccuguacaccuucgccaccgcgaacgccgacacgcugugcaucggcuaccacgccaacaacagcaccgacaccguggacaccgugcucgagaagaacgucacggugacccacuccgugaaccugcuggaggacaagcacaacgggaagcucugcaagcugcgcggcgucgcgccccugcaccucgggaagugcaacaucgccggcuggauccuggggaacccggagugcgagagccuguccaccgccagcuccuggagcuacaucguggagaccuccagcuccgacaacggcacgugcuaccccggcgacuucaucgacuacgaggagcuccgggagcagcugagcuccgugagcuccuucgagcgcuucgagaucuuccccaagaccagcuccuggcccaaccacgacagcaacaagggggccaccgccgccugcccgcacgcgggcgccaaguccuucuacaagaaccugaucuggcucgucaagaaggggaacagcuaccccaagcuguccaagagcuacaucaacgacaagggcaaggaggugcuggugcucugggggauccaccaccccagcaccuccgccgaccagcagagccuguaccagaacgccgacgccuacgucuucgugggcacgucccgguacagcaagaaguucaagcccgagaucgcgauccgcccgaaggugcgggaccaggagggccgcaugaacuacuacuggacccuggucgagcccggggacaagaucaccuucgaggccaccggcaaccucguggugccccgguacgccuucgccauggagcgcaacgccggguccggcaucaucaucagcgacacgcccguccacgacugcaacacgaccugccagaccccgaagggcgcgaucaacaccucccugcccuuccagaacauccaccccaucaccaucgggaagugccccaaguacgucaagagcaccaagcugcggcucgccaccggccugcgcaacgugccguccauccagagccgggggcuguucggcgccaucgccggguucaucgagggcggcuggacggggaugguggacggcugguacggguaccaccaccagaacgagcagggcuccggguacgccgcggaccucaagagcacccagaacgccaucgacgagaucaccaacaaggugaacuccgugaucgagaagaugaacacccaguucacggccgucggcaaggaguucaaccaccuggagaagcgcaucgagaaccugaacaagaagguggacgacggcuuccucgacaucuggaccuacaacgccgagcugcugguccuccuggagaacgagcggacccuggacuaccacgacagcaacgugaagaaccucuacgagaaggugcgcucccagcugaagaacaacgccaaggagaucgggaacggcugcuucgaguucuaccacaagugcgacaacacgugcauggagagcgucaagaacgggaccuacgacuaccccaaguacuccgaggaggcgaagcugaaccgggaggagaucgacggcgugaagcucgagagcacccgcaucuaccagauccuggccaucuacuccaccguggccagcagccugguccucguggugucccugggggccaucagcuucuggaugugcuccaacggcagccugcagugccggaucugcaucuga

SEQ ID NO: 71710 - RNA, 1701 nt, Artificial Sequence; identical to SEQ ID NO: 69290
  derived and/or modified CDS sequence (opt1) from hemagglutinin__InfluenzaA__AEO01613

SEQ ID NO: 71711 - RNA, 1701 nt, Artificial Sequence
  derived and/or modified CDS sequence (opt1) from hemagglutinin__InfluenzaA__AEO01614
augaaggccauccuggugguccuccuguacaccuucgccaccgcgaacgccgacacgcugugcaucggcuaccacgccaacaacagcaccgacaccguggacaccgugcucgagaagaacgucacggugacccacuccgugaaccugcuggaggacaagcacaacgggaagcucugcaagcugaagggcgucgcgccccugcaccucgggaagugcaacaucgccggcuggauccuggggaacccggagugcgagagccuguccaccgccagcuccuggagcuacaucguggagaccuccagcuccgacaacggcacgugcuaccccggcgacuucaucgacuacgaggagcuccgcgagcagcugagcuccgugagcuccuucgagcgguucgagaucuuccccaagaccagcuccuggcccaaccacgacagcaacaagggggucaccgccgccugcccgcacgccggcgcgaaguccuucuacaagaaccugaucuggcucgugaagaaggggaacagcuaccccaagcuguccaagagcuacaucaacgacaagggcaaggaggugcugguccucugggggauccaccaccccagcaccuccgccgaccagcagagccuguaccagaacgccgacgccuacguguucgugggcacgucccgcuacagcaagaaguucaagcccgagaucgccauccggccgaagguccgcgaccaggagggccggaugaacuacuacuggacccugguggagcccggggacaagaucaccuucgaggcgaccggcaaccucguggucccccgcuacgccuucgccauggagcggaacgccggguccggcaucaucaucagcgacacgcccgugcacgacugcaacacgaccugccagaccccgaagggcgccaucaacaccucccugcccuuccagaacauccaccccaucaccaucgggaagugccccaaguacgucaagagcaccaagcugcgccucgcgaccggccugcggaacaucccguccauccagagccgcgggcuguucggcgccaucgccggguucaucgagggcggcuggacggggaugguggacggcugguacggguaccaccaccagaacgagcagggcuccggguacgccgccgaccucaagagcacccagaacgcgaucgacgagaucaccaacaaggugaacuccgugaucgagaagaugaacacccaguucacggccgucggcaaggaguucaaccaccuggagaagcggaucgagaaccugaacaagaagguggacgacggcuuccucgacaucuggaccuacaacgccgagcugcugguccuccuggagaacgagcgcacccuggacuaccacgacagcaacgugaagaaccucuacgagaaggugcggucccagcugaagaacaacgccaaggagaucgggaacggcugcuucgaguucuaccacaagugcgacaacacgugcauggagagcgucaagaacgggaccuacgacuaccccaaguacuccgaggaggccaagcugaaccgcgaggagaucgacggcgugaagcucgagagcacccggaucuaccagauccuggcgaucuacuccaccguggccagcagccugguccucguggugucccugggggccaucagcuucuggaugugcuccaacggcagccugcagugccgcaucugcaucuga

SEQ ID NO: 71712 - RNA, 1701 nt, Artificial Sequence
  derived and/or modified CDS sequence (opt1) from hemagglutinin__InfluenzaA__AEO01615
augaaggccauccuggugguccuccuguacaccuucgccaccgcgaacgccgacacgcugugcaucggcuaccacgccaacaacagcaccgacaccguggacaccgugcucgagaagaacgucacggugacccacuccgugaaccugcuggaggacaagcacaacgggaagcucugcaagcugcgcggcgucgcgccccugcaccucgggaagugcaacaucgccggcuggauccuggggaacccggagugcgagagccuguccaccgccagcuccuggagcuacaucguggagaccuccagcuccgacaacggcacgugcuaccccggcgacuucaucgacuacgaggagcuccgggagcagcugagcuccgugagcuccuucgagcgcuucgagaucuuccccaagaccagcuccuggcccaaccacgacagcaacaagggggucaccgccgccugcccgcacgccggcgcgaaguccuucuacaagaaccugaucuggcucgugaagaaggggaacagcuaccccaagcuguccaaguacuacaucaacgacaagggcaaggaggugcugguccucugggggauccaccaccccagcaccagcgccgaccagcagucccuguaccagaacgccgacgccuacguguucgugggcacgagccgguacuccaagaaguucaagcccgagaucgccauccgcccgaagguccgggagcaggagggccgcaugaacuacuacuggacccugguggagcccggggacaagaucaccuucgaggcgaccggcaaccucguggucccccgguacgccuucgccauggagcgcaacgccgggagcggcaucaucaucuccgacacgcccgugcacgacugcaacacgaccugccagaccccgaagggcgccaucaacaccagccugcccuuccagaacauccaccccaucaccaucgggaagugccccaaguacgugaaguccaccaagcugcggcucgcgaccggccugcgcaacgucccgagcauccagucccgggggcuguucggcgccaucgccggguucaucgagggcggcuggacggggaugguggacggcugguacggguaccaccaccagaacgagcagggcagcggguacgccgccgaccucaaguccacccagaacgcgaucgacaagaucaccaacaaggugaacagcgucaucgagaagaugaacacccaguucacggccgugggcaaggaguucaaccaccuggagaagcgcaucgagaaccugaacaagaaggucgacgacggcuuccucgacaucuggaccuacaacgccgagcugcuggugcuccuggagaacgagcggacccuggacuaccacgacuccaacgugaagaaccucuacgagaagguccgcagccagcugaagaacaacgccaaggagaucgggaacggcugcuucgaguucuaccacaagugcgacaacacgugcauggaguccgugaagaacgggaccuacgacuaccccaaguacagcgaggaggccaagcugaaccgggaggagaucgacggcgugaagcucgaguccacccgcaucuaccagauccuggcgaucuacagcaccgucgccuccagccuggugcucguggucagccugggggccaucuccuucuggaugugcagcaacggcucccugcagugccggaucugcaucuga

SEQ ID NO: 71713 - RNA, 1701 nt, Artificial Sequence; identical to SEQ ID NO: 67046
  derived and/or modified CDS sequence (opt1) from hemagglutinin__InfluenzaA__AEO01616

SEQ ID NO: 71714 - RNA, 1701 nt, Artificial Sequence; identical to SEQ ID NO: 67857
  derived and/or modified CDS sequence (opt1) from hemagglutinin__InfluenzaA__AEO01617

SEQ ID NO: 71715 - RNA, 1701 nt, Artificial Sequence; identical to SEQ ID NO: 68290
  derived and/or modified CDS sequence (opt1) from hemagglutinin__InfluenzaA__AEO01619

SEQ ID NO: 71716 - RNA, 1701 nt, Artificial Sequence; identical to SEQ ID NO: 71402
  derived and/or modified CDS sequence (opt1) from hemagglutinin__InfluenzaA__AEO01620

SEQ ID NO: 71717 - RNA, 1701 nt, Artificial Sequence; identical to SEQ ID NO: 71549
  derived and/or modified CDS sequence (opt1) from hemagglutinin__InfluenzaA__AEO01621

SEQ ID NO: 71718 - RNA, 1701 nt, Artificial Sequence
  derived and/or modified CDS sequence (opt1) from hemagglutinin__InfluenzaA__AEO01625
augaagaccaucaucgcccugagcuacauccucugccugguguccgcccagaagcugcccggcaacgacaacagcaccgcgacgcucugccuggggcaccacgccgucccgaacggcaccaucgugaagaccaucaccaacgaccagaucgaggugacgaacgccaccgagcugguccaguccagcuccaccggggagaucugcgacagcccccaccaggugcucgacggcgagaacugcacccugaucgacgcccugcucggggacccccagugcgacggcuuccagaacaagaagugggaccuguucguggagcgcuccaaggccuacagcaacugcuaccccuacgacgucccggacuacgcgucccugcggagccucguggccuccagcggcacgcuggaguucaacaacgaguccuucaacuggaccggggugacccagaacggcaccagcuccgccugcauccgccggagcaacaacuccuucuucagccgccugaacuggcucacgcacuccaaguucaaguaccccgcccugaacgucaccaugcccaacaacgaggaguucgacaagcuguacaucuggggcgugcaccaccccgggaccgacaacgaccagaucuuccucuacgcgcaggccagcgggcggaucaccgugagcacgaagcgcucccagcagaccgucaucccgaacaucggcagccggccccgcgugcggaacauccccucccgcaucagcaucuacuggaccaucgugaagcccggcgacauccugcugaucaacuccaccgggaaccucaucgccccgcggggcuacuucaagauccgcagcgggaaguccagcaucaugcgguccgacgcccccaucggcaagugcaacagcgagugcaucacgcccaacggcuccauccccaacgacaagccguuccagaacgucaaccgcaucaccuacggggccugcccccgguacgugaagcagaacacccugaagcuggcgaccggcaugcgcaacgugcccgagaagcagacgcgggggaucuucggcgccaucgccggguucaucgagaacggcugggagggcauggucgacgggugguacggcuuccgccaccagaacagcgaggggaucggccaggccgccgaccucaaguccacccaggcggccaucgaccagaucaacgggaagcugaaccggcugaucggcaagaccaacgagaaguuccaccagaucgagaaggaguucagcgagguggagggccgcauccaggaccucgagaaguacguggaggacaccaagaucgaccugugguccuacaacgccgagcugcucgucgcccuggagaaccagcacacgaucgaccugaccgacagcgagaugaacaagcuguucgagaagaccaagaagcagcuccgggagaacgccgaggacauggggaacggcugcuucaagaucuaccacaagugcgacaacgcgugcaucggguccauccgcaacggcaccuacgaccacgagguguaccgcgacgaggcccugaacaaccgguuccagaucaaggggguggagcucaagagcggcuacaaggacuggauccuguggaucuccuucgccaucagcugcuuccugcucugcgucgcccugcugggcuucaucaugugggccugccagaaggggaacauccgcugcaacaucugcaucuga

SEQ ID NO: 71719 - RNA, 1701 nt, Artificial Sequence
  derived and/or modified CDS sequence (opt1) from hemagglutinin__InfluenzaA__AEO01636
augaaguccaucaucgcccuguccuacauccucugccuggugagcgcccagaagcugcccggcaacgacaacuccaccgcgacccucugccuggggcaccacgccgucccgaacggcacgaucgugaagaccaucaccaacgaccagaucgaggugaccaacgccacggagcugguccagagcuccagcaccggggagaucugcgacagcccccaccaggugcucgacggcgagaacugcacccugaucgacgcccugcucggggacccccagugcgacggcuuccagaacaagaagugggaccuguucguggagcgcagcaaggccuacuccaacugcuaccccuacgacgucccggacuacgcgagccugcggucccucguggccagcuccggcacccuggaguucaacaacgagagcuucaacuggacgggggugacccagaacggcaccuccagcgccugcauccgccgguccaacaacagcuucuucucccgccugaacuggcucacccacagcaaguucaaguaccccgcccugaacgucacgaugcccaacaacgaggaguucgacaagcuguacaucuggggcgugcaccaccccgggaccgacaacgaccagaucuuccucuacgcgcaggccagcgggcggaucaccguguccaccaagcgcagccagcagacggucaucccgaacaucggcucccggccccgcgugcggaacauccccagccgcaucuccaucuacuggaccaucgugaagcccggcgacauccugcugaucaacagcaccgggaaccucaucgccccgcggggcuacuucaagauccgcuccggcaagagcuccaucaugcggagcgacgcccccaucgggaagugcaacuccgagugcaucacccccaacggcagcauccccaacgacaagccguuccagaacgucaaccgcaucacguacggggccugcccccgguacgugaagcagaacacccugaagcuggcgaccggcaugcgcaacgugcccgagaagcagacccgggggaucuucggcgccaucgccggguucaucgagaacggcugggagggcauggucgacgggugguacggcuuccgccaccagaacuccgaggggaucggccaggccgccgaccucaagagcacgcaggcggccaucgaccagaucaacgggaagcugaaccggcugaucggcaagaccaacgagaaguuccaccagaucgagaaggaguucuccgagguggagggccgcauccaggaccucgagaaguacguggaggacaccaagaucgaccuguggagcuacaacgccgagcugcucgucgcccuggagaaccagcacaccaucgaccugacggacuccgagaugaacaagcuguucgagaagaccaagaagcagcuccgggagaacgccgaggacauggggaacggcugcuucaagaucuaccacaagugcgacaacgcgugcaucgggagcauccgcaacggcaccuacgaccacgacguguaccgcgacgaggcccugaacaaccgguuccagaucaaggggguggagcucaaguccggcuacaaggacuggauccuguggaucagcuucgccaucagcugcuuccugcucugcgucgcccugcugggcuucaucaugugggccugccagaaggggaacauccgcugcaacaucugcaucuga

SEQ ID NO: 71720 - RNA, 1701 nt, Artificial Sequence
  derived and/or modified CDS sequence (opt1) from hemagglutinin__InfluenzaA__AEO01642
augaagaccaucaucgcccugagcuacauccucugccugguguccgcccagaagcugcccggcaacgacaacagcaccgcgacgcucugccuggggcaccacgccgucccgaacggcaccaucgugaagaccaucaccaacgaccagaucgaggugacgaacgccaccgagcugguccaguccagcuccaccggggagaucugcaacagcccccaccagauccucgacggcgagaacugcacccugaucgacgcccugcucggggacccccagugcgacggcuuccagaacaagaagugggaccuguucguggagcgcuccaaggccuacagcaacugcuaccccuacgacgugccggacuacgcgucccugcggagccucgucgccuccagcggcacgcuggaguucaacaacgaguccuucaacuggaccggggugacccagaacggcaccagcuccgccugcauccgccggagcaacaacuccuucuucagccgccugaacuggcucacgcaccugaaguucaaguaccccgcccugaacgugaccaugcccaacaacgaggaguucgacaagcucuacaucuggggcguccaccaccccgggaccgacaacgaccagaucuuccuguacgcgcaggccuccgggcggaucaccgugagcacgaagcgcagccagcagaccgugaucccgaacaucggcucccggccccgcguccggaacauccccagccgcaucuccaucuacuggaccaucgugaagcccggcgacauccugcucaucaacagcaccgggaaccugaucgccccgcggggcuacuucaagauccgcuccggcaagagcuccaucaugcggagcgacgcccccaucgggaagugcaacuccaagugcaucacgcccaacggcagcauccccaacgacaagccguuccagaacgugaaccgcgucaccuacggggccugcccccgguacgugaagcagaacacccugaagcucgcgaccggcaugcgcaacgugcccgagaagcagacgcgggggaucuucggcgccaucgccggguucaucgagaacggcugggagggcauggucgacgggugguacggcuuccgccaccagaacuccgaggggaucggccaggccgccgaccucaagagcacccaggcggccaucgaccagaucaacgggaagcugaaccggcugaucggcaagaccaacgagaaguuccaccagaucgagaaggaguucuccgagguggagggccgcauccaggaccuggagaaguacguggaggacaccaagaucgaccuguggagcuacaacgccgagcuccuggucgcccuggagaaccagcacacgaucgaccucaccgacuccgagaugaacaagcuguucgagaagaccaagaagcagcugcgggagaacgccgaggacauggggaacggcugcuucaagaucuaccacaagugcgacaacgcgugcaucgggagcauccgcaacggcaccuacgaccacgacguguaccgcgacgaggcccucaacaaccgguuccagaucaaggggguggagcugaaguccggcuacaaggacuggauccuguggaucagcuucgccaucuccugcuuccuccugugcgucgcccugcucggcuucaucaugugggccugccagaaggggaacauccgcugcaacaucugcaucuga

SEQ ID NO: 71721 - RNA, 1698 nt, Artificial Sequence
  derived and/or modified CDS sequence (opt1) from hemagglutinin__InfluenzaA__AEO01663
augaaggugaagcugcucguccugcugugcaccuucgccgccaccuacgcggacacgaucugcaucggcuaccacgccaacaacagcaccgacaccguggacaccgugcucgagaagaacgucacggugacccacuccgugaaccugcuggagaacagccacaacgggaagcucugccugcugaagggcaucgcgccccuccagcuggggaacugcuccgucgccggcuggauccuggggaacccggagugcgagcuccugaucagcaaggaguccuggagcuacaucguggagaagcccaaccccgagaacgggaccugcuaccccggccacuucgccgacuacgaggagcugcgcgagcagcucuccagcguguccagcuucgagcgguucgagaucuucccgaaggaguccagcuggcccaaccacaccgucacggggguguccgccagcugcucccacaacggcgagagcuccuucuaccgcaaccugcuguggcucaccgggaagaacggccuguaccccaaccugagcaaguccuacgccaacaacaaggagaaggaggugcucguccuguggggcgugcaccacccgcccaacaucggcgaccagaaggcccuguaccacaccgagaacgccuacgugagcgucgugagcucccacuacagccggaaguucacccccgagaucgcgaagcgccccaaggugcgggaccaggagggccgcaucaacuacuacuggacgcuccuggagcccggggacaccaucaucuucgaggccaacggcaaccugcgggccccgcgcuacgccuucgcccucucccggggguucggcagcggcaucaucaacuccaacgcgcccauggacaagugcgacgccaagugccagacgccccagggggccaucaacagcucccugcccuuccagaacguccacccggugcccaucggcgagugccccaaguacgugcgcagcgccaagcugcggauggucaccgggcuccgcaacauccccuccauccagagccggggccuguucggggccaucgcgggcuucaucgagggcggguggaccggcaugguggacgggugguacggcuaccaccaccagaacgagcagggguccggcuacgccgccgaccagaaguccacccagaacgccaucaacggcaucaccaacaaggugaacagcgucaucgagaagaugaacacccaguucacggccguggggaaggaguucaacaagcuggagcgccggauggagaaccucaacaagaaggucgacgacggcuucaucgacaucuggaccuacaacgcggagcugcuggugcuccuggagaacgagcgcacccuggacuuccacgacagcaacgugaagaaccucuacgagaaggucaagucccagcugaagaacaacgccaaggagaucgggaacggcugcuucgaguucuaccacaagugcaacgacgagugcauggagagcgugaagaacgggaccuacgacuacccgaaguacuccgaggagagcaagcugaaccgggagaagaucgacggcgugcgccucgaguccaugggcgucuaccagauccuggccaucuacagcacgguggccagcucccuggugcuccuggucagccugggggccaucuccuucuggaugugcagcaacggcucccuccagugccggaucugcaucuga

SEQ ID NO: 71722 - RNA, 1698 nt, Artificial Sequence
  derived and/or modified CDS sequence (opt1) from hemagglutinin__InfluenzaA__AEO01674
augaaggugaagcugcucguccugcugugcaccuucaccgccacguacgccgacaccaucugcaucggcuaccacgcgaacaacagcaccgacaccguggacacggugcucgagaagaacgucaccgugacccacuccgugaaccugcuggagaacagccacaacgggaagcucugccugcugaagggcaucgcgccccuccagcuggggaacugcuccgucgccggcuggauccuggggaacccggagugcgagcuccugaucagcaaggaguccuggagcuacaucguggagaagcccaaccccgagaacgggaccugcuaccccggccacuucgccgacuacgaggagcugcgcgagcagcucuccagcguguccagcuucgagcgguucgagaucuucccgaaggaguccagcuggcccaaccacacggucaccgggguguccgccagcugcucccacaacggcgagagcuccuucuaccgcaaccugcuguggcucaccgggaagaacggccuguaccccaaccugagcaaguccuacgccaacaacaaggagaaggaggugcucguccuguggggcgugcaccacccgcccaacaucggcgaccagaaggcccuguaccacaccgagaacgccuacgugagcgucgugagcucccacuacagccggaaguucacgcccgagaucgccaagcgccccaaggugcgggaccaggagggccgcaucaacuacuacuggacccuccuggagcccggggacaccaucaucuucgaggcgaacgagaaccugaaggccccgcgguacgccuucgcccucucccgcggcuucgggagcggcaucaucaacuccaaggcccccauggacaagugcgacgcgaagugccagacgccccagggcgccaucaacagcucccugcccuuccagaacguccacccggugaccaucggggagugccccaaguacgugcggagcgccaagcugcgcauggucaccggccuccggaacauccccuccauccagagccgcgggcuguucggcgccaucgccggguucaucgagggcggcuggaccgggaugguggacggcugguacggguaccaccaccagaacgagcagggcuccggguacgcggccgaccagaaguccacccagaacgccaucaacggcaucacgaacaaggugaacagcgucaucgagaagaugaacacccaguucaccgccgugggcaaggaguucaacaagcuggagcggcgcauggagaaccucaacaagaaggucgacgacggguucaucgacaucuggaccuacaacgccgagcugcuggugcuccuggagaacgagcggacgcuggacuuccacgacagcaacgugaagaaccucuacgagaaggucaagucccagcugaagaacaacgcgaaggagaucggcaacgggugcuucgaguucuaccacaagugcaacgacgagugcauggagagcgugaagaacggcaccuacgacuaccccaaguacuccgaggagagcaagcugaaccgcgagaagaucgacggggugcggcucgaguccaugggcgucuaccagauccuggccaucuacagcaccguggccagcucccuggugcuccuggucagccugggcgccaucuccuucuggaugugcagcaacgggucccuccagugccgcaucugcaucuga

SEQ ID NO: 71723 - RNA, 1701 nt, Artificial Sequence; identical to SEQ ID NO: 71718
  derived and/or modified CDS sequence (opt1) from hemagglutinin__InfluenzaA__AEO01691

SEQ ID NO: 71724 - RNA, 1698 nt, Artificial Sequence
  derived and/or modified CDS sequence (opt1) from hemagglutinin__InfluenzaA__AEO01699
augaaggugaagcugcucguccugcugugcaccuucaccgccacguacgccgacaccaucugcaucggcuaccacgcgaacaacagcaccgacaccguggacacggugcucgagaagaacgucaccgugacccacuccgugaaccugcuggagaacagccacaacgggaagcucugccugcugaagggcaucgcgccccuccagcuggggaacugcuccgucgccggcuggauccuggggaacccggagugcgagcuccugaucagcaaggaguccuggagcuacaucguggagaagcccaaccccgagaacgggaccugcuaccccggccacuucgccgacuacgaggagcugcgcgagcagcucuccagcguguccagcuucgagcgguucgagaucuucccgaaggaguccagcuggcccaaccacacggucaccgggguguccgccagcugcucccacaacggcgagagcuccuucuaccgcaaccugcuguggcucaccgggaagaacggccuguaccccaaccugagcaaguccuacgccaacaacaaggagaaggaggugcucguccuguggggcgugcaccacccgcccaacaucggcgaccagaaggcccuguaccacaccgagaacgccuacgugagcgucgugagcucccacuacagccggaaguucacgcccgagaucgccaagcgccccaaggugcgggaccaggagggccgcaucaacuacuacuggacccuccuggagccccgggacaccaucaucuucgaggcgaacgggaaccugaucgccccgcgcuacgccuucgcccucucccggggcuucgggagcggcaucaucaacuccaacgcccccauggacaagugcgacgcgaagugccagacgccccagggcgccaucaacagcucccugcccuuccagaacguccacccggugaccaucggggagugccccaaguacgugcgcagcgccaagcugcggauggucaccggccuccgcaacauccccuccauccccagccgggggcuguucggcgccaucgccggguucaucgagggcggcuggaccgggaugguggacggcugguacggguaccaccaccagaacgagcagggcuccggguacgcggccgaccagaaguccacccagaacgccaucaacggcaucacgaacaaggugaacagcgucaucgagaagaugaacacccaguucaccgccgugggcaaggaguucaacaagcuggagcgccggauggagaaccucaacaagaaggucgacgacggguucaucgacaucuggaccuacaacgccgagcugcuggugcuccuggagaacgagcgcacgcuggacuuccacgacagcaacgugaagaaccucuacgagaaggucaagucccagcugaagaacaacgcgaaggagaucggcaacgggugcuucgaguucuaccacaagugcaacgacgagugcauggagagcgugaagaacggcaccuacgacuacccgaaguacuccgaggagagcaagcugaaccgggagaagaucgacggggugaagcucgaguccaugggcgccuaccagauccuggccaucuacagcaccggcgccagcucccugguccuccuggugagccugggggccaucuccuucuggaugugcagcaacggcucccuccagcgccggaucugcaucuga

SEQ ID NO: 71725 - RNA, 1698 nt, Artificial Sequence
  derived and/or modified CDS sequence (opt1) from hemagglutinin__InfluenzaA__AEO01709
augaaggugaagcugcucguccugcugugcaccuucaccgccacguacgccgacaccaucugcaucggcuaccacgcgaacaacagcaccgacaccguggacacggugcucgagaagaacgucaccgugacccacuccgugaaccugcuggagaacagccacaacgggaagcucugccugcugaagggcaucgcgccccuccagcuggggaacugcuccgucgccggcuggauccuggggaacccggagugcgagcuccugaucagcaaggaguccuggagcuacaucguggagaagcccaaccccgagaacgggaccugcuaccccggccacuucgccgacuacgaggagcugcgcgagcagcucuccagcguguccagcuucgagcgguucgagaucuucccgaaggaguccagcuggcccaaccacacggucaccgggguguccgccagcugcucccacaacggcgagagcuccuucuaccgcaaccugcuguggcucaccgggaagaacggccuguaccccaaccugagcaaguccuacgccaacaacaaggagaaggaggugcucguccuguggggcgugcaccacccgcccaacaucggcgaccagaaggcccuguaccacaccgagaacgccuacgugagcgucgugagcucccacuacagccggaaguucacgcccgagaucgccaagcgccccaagcuccgggaccaggacggccgcaucaacuacuacuggacccugcuggagcccggggacaccaccaucuucgaggcgaacggcaaccucaucgccccgcgguacgccuucgcccugucccgcggguucggcagcggcaucaucaacuccaacgcccccauggacaagugcgacgcgaagugccagacgccccagggggccaucaacagcucccugcccuuccagaacgugcacccggucaccaucggcgagugccccaaguacgugcggagcgccaagcuccgcauggugaccgggcugcggaacauccccuccauccagagccgcggccuguucggggccaucgccggcuucaucgagggcggguggaccggcauggucgacgggugguacggcuaccaccaccagaacgagcagggguccggcuacgcggccgaccagaaguccacgcagaacgccaucaacggcaucaccaacaaggugaacagcgugaucgagaagaugaacacccaguucaccgccgucgggaaggaguucaacaagcucgagcggcgcauggagaaccugaacaagaagguggacgacggcuucaucgacaucuggacguacaacgccgagcugcucguccugcuggagaacgagcggacccucgacuuccacgacagcaacgugaagaaccuguacgagaaggugaagucccagcugaagaacaacgcgaaggagaucgggaacggcugcuucgagcucuaccugaagugcaacggggagugcauggagagcgucaagaacggcaccuacgacuaccccaaguacuccgaggagagcaagcugaaccgcgagaagaucgacggcgugaagcucgaguccauggggguguaccagauccuggccaucuacagcaccgucgccagcucccuggugcuccuggugagccugggcgccaucuccuucuggaugugcagcaacgggucccugcagugccggaucugcaucuga

SEQ ID NO: 71726 - RNA, 1701 nt, Artificial Sequence; identical to SEQ ID NO: 67857
  derived and/or modified CDS sequence (opt1) from hemagglutinin__InfluenzaA__AEO37530

SEQ ID NO: 71727 - RNA, 1701 nt, Artificial Sequence
  derived and/or modified CDS sequence (opt1) from hemagglutinin__InfluenzaA__AEO72176
augaaggccauccuggugguccuccuguacaccuucgccaccgcgaacgccgacacgcugugcaucggcuaccacgccaacaacagcaccgacaccguggacaccgugcucgagaagaacgucacggugacccacuccgugaaccugcuggaggacaagcacaacgggaagcucugcaagcugcgcggcgucgcgccccugcaccucgggaagugcaacaucgccggcuggauccuggggaacccggagugcgagagccuguccaccgccagcuccuggagcuacaucguggagaccuccagcuccgacaacggcacgugcuaccccggcgacuucaucgacuacgaggagcuccgggagcagcugagcuccgugagcuccuucgagcgcuucgagaucuuccccaagaccagcuccuggcccaaccacgacagcaacaagggggucaccgccgccugcccgcacgccggcgcgaaguccuucuacaagaaccugaucuggcucgugaagaaggggaacagcuaccccaagcuguccaagagcuacaucaacgacaagggcaaggaggugcugguccucugggggauccaccaccccagcaccacggccgaccagcagucccuguaccagaacgccgacaccuacguguucgugggcaccagccgguacuccaagaaguucaagcccgagaucgccauccgcccgaagguccgggaccaggagggccgcaugaacuacuacuggacccugguggagcccggggacaagaucacguucgaggccaccggcaaccucguggucccccgguacgcguucgccauggagcgcaacgccgggagcggcaucaucaucuccgacacccccgugcacgacugcaacaccacgugccagaccccgaagggcgccaucaacaccagccugcccuuccagaacauccaccccaucaccaucgggaagugccccaaguacgugaaguccacgaagcugcggcucgccaccggccugcgcaacgucccgagcauccagucccgggggcuguucggcgcgaucgccggguucaucgagggcggcuggaccgggaugguggacggcugguacggguaccaccaccagaacgagcagggcagcggguacgccgccgaccucaaguccacccagaacgccaucgacaagaucacgaacaaggugaacagcgucaucgagaagaugaacacccaguucaccgcggugggcaaggaguucaaccaccuggagaagcgcaucgagaaccugaacaagaaggucgacgacggcuuccucgacaucuggaccuacaacgccgagcugcuggugcuccuggagaacgagcggacgcuggacuaccacgacuccaacgugaagaaccucuacgagaagguccgcaaccagcugaagaacaacgccaaggagaucgggaacggcugcuucgaguucuaccacaagugcgacaacacgugcauggagagcgugaagaacgggaccuacgacuaccccaaguacuccgaggaggccaagcugaaccgggaggagaucgacggcgugaagcucgagagcacccgcaucuaccagauccuggccaucuacuccaccgucgcgagcucccuggugcucgccgugagccugggggccaucagcuucuggaugugcuccaacggcagccugcagugccggaucugcaucuga

SEQ ID NO: 71728 - RNA, 1704 nt, Artificial Sequence
  derived and/or modified CDS sequence (opt1) from hemagglutinin__InfluenzaA__AEO88980
auggagaagaucgugcugcuccuggccaucgucagccuggugaaguccgaccagaucugcaucggcuaccacgccaacaacagcaccgagcaggucgacaccaucauggagaagaacgugacggugacccacgcgcaggacauccucgagaagacccacaacgggaagcugugcgaccuggacggcgugaagccccucauccugcgcgacugcuccgucgccggguggcugcucggcaacccgaugugcgacgaguucaucaacgugcccgaguggagcuacaucguggagaaggccaaccccgccaacgaccugugcuaccccgggaacuucaacgacuacgaggagcugaagcaccuccugucccggaucaaccacuucgagaagauccagaucauccccaagagcuccuggagcgaccacgaggccuccagcggcgucuccagcgcgugcccguaccagggcacccccuccuucuuccgcaacgugguguggcugaucaagaagaacaacacguaccccaccaucaagcggagcuacaacaacaccaaccaggaggaccuccugauccugugggggauccaccacuccaacgacgccgccgagcagaccaagcucuaccagaacccgacgaccuacaucagcgucggcaccuccacccugaaccagcgccuggugcccaagaucgccacgcggagcaaggugaacgggcaguccggccgcauggacuucuucuggaccauccucaagcccaacgacgcgaucaacuucgagagcaacgggaacuucaucgcccccgaguacgccuacaagaucgucaagaagggcgacagcgccaucaugaaguccgagguggaguacggcaacugcaacaccaagugccagaccccgaucggggccaucaacagcuccaugcccuuccacaacauccacccccugacgaucggcgagugccccaaguacgucaagagcaacaagcuggugcucgcgaccgggcugcggaacuccccgcugcgcgagcggcgccggaagcgcggccucuucggcgccaucgccggguucaucgagggcggguggcagggcaugguggacgggugguacggcuaccaccacagcaacgagcagggcuccggguacgccgccgacaaggagagcacccagaaggcgaucgacggcgugaccaacaaggucaacuccaucaucgacaagaugaacacgcaguucgaggccguggggcgggaguucaacaaccuggagcgccggaucgagaaccugaacaagaagauggaggacggcuuccucgacguguggaccuacaacgccgagcugcugguccucauggagaacgagcgcacccuggacuuccacgacagcaacgugaagaaccuguacgacaagguccggcuccagcugcgcgacaacgccaaggagcuggggaacggcugcuucgaguucuaccacaagugcgacaacgagugcauggaguccgugcggaacggcaccuacgacuacccccaguacagcgaggaggcccgccucaagcgggaggagaucuccggggugaagcuggagagcaucggcacguaccagauccuguccaucuacagcaccgucgcguccagccucgcccuggccaucaugguggccgggcugucccucuggaugugcagcaacggcagccugcagugccgcaucugcaucuga

SEQ ID NO: 71729 - RNA, 1704 nt, Artificial Sequence
  derived and/or modified CDS sequence (opt1) from hemagglutinin__InfluenzaA__AEO89021
auggagaagaucgugcugcuccuggccaucgucagccuggugaaguccgaccagaucugcaucggcuaccacgccaacaacagcaccgagcaggucgacaccaucauggagaagaacgugacggugacccacgcgcaggacauccucgagaagacccacaacgggaagcugugcgaccuggacggcgugaagccccucauccugcgcgacugcuccgucgccggguggcugcucggcaacccgaugugcgacgaguucaucaacgugcccgaguggagcuacaucguggagaaggccaaccccgccaacgaccugugcuaccccgggaacuucaacgacuacgaggagcugaagcaccuccugucccggaucaaccacuucgagaagaucccgaucauccccaagagcuccuggagcgaccacgaggccuccagcggcgucuccagcgcgugccccuaccagggcacccccuccuucuuccgcaacgugguguggcugaucaagaagaacaacacguacccgaccaucaagcggagcuacaacaacaccaaccaggaggaccuccugauccugugggggauccaccacuccaacaacgccgccgagcagaccaagcucuaccagaaccccacgaccuacaucagcgucggcaccuccacccugaaccugcgccucgugcccaagaucgccacgcggagcaaggugaacgggcaguccggccgcauggacuucuucuggaccauccugaagcccaacgacgcgaucaacuucgagagcaacgggaacuucaucgccccggaguacgccuacaagaucgucaagaagggcgacagcgccaucaugaaguccgagguggaguacggcaacugcaacaccaagugccagacccccaucggggccaucaacagcuccaugcccuuccacaacauccacccccugacgaucggcgagugcccgaaguacgugaaguccaacaagcucguccuggcgaccgggcugcggaacagcccccuccgcgagcggcgccggaagcgcggccuguucggcgccaucgccggguucaucgagggcggguggcagggcaugguggacgggugguacggcuaccaccacagcaacgagcagggcuccggguacgccgccgacaaggagagcacccagaaggcgaucgacggcgugaccaacaaggucaacuccaucaucgacaagaugaacacgcaguucgaggccguggggcgggaguucaacaaccuggagcgccggaucgagaaccucaacaagaagauggaggacggcuuccuggacguguggaccuacaacgccgagcugcucguccugauggagaacgagcgcacccuggacuuccacgacagcaacgugaagaaccucuacgacaagguccggcugcagcugcgcgacaacgccaaggagcucgggaacggcugcuucgaguucuaccacaagugcgacaacgagugcauggaguccgugcggaacggcaccuacgacuacccccaguacagcgaggaggcccgccugaagcgggaggagaucuccggggugaagcuggagagcaucggcacguaccagauccucuccaucuacagcaccgucgcguccagccuggcccuggccaucaugguggccgggcucucccuguggaugugcagcaacggcagccugcagugccgcaucugcaucuga

SEQ ID NO: 71730 - RNA, 1704 nt, Artificial Sequence
  derived and/or modified CDS sequence (opt1) from hemagglutinin__InfluenzaA__AEO89030
auggagaagaucgugcugcuccuggccaucgucagccuggugaaguccgaccagaucugcaucggcuaccacgccaacaacagcaccgagcaggucgacaccaucauggagaagaacgugacggugacccacgcgcaggacauccucgagaagacccacaacgggaagcugugcgaccuggacggcgugaagccccucauccugcgcgacugcuccgucgccggguggcugcucggcaacccgaugugcgacgaguucaucaacgugcccgaguggagcuacaucguggagaaggccaaccccgccaacgaccugugcuaccccgggaacuucaacgacuacgaggagcugaagcaccuccugucccggaucaaccacuucgagaagauccagaucauccccaagagcuccuggagcgaccacgaggccuccagcggcgucuccagcgugugcccguaccagggcacccccuccuucuuccgcaacguggucuggcugaucaagaagaacaacacguaccccaccaucaagcggagcuacaacaacaccaaccaggaggaccuccugauccugugggggauccaccacuccaacgacgcggccgagcagaccaagcucuaccagaacccgacgaccuacaucagcgugggcaccuccacccugaaccagcgccuggugcccaagaucgccacgcggagcaaggucaacgggcaguccggccgcauggacuucuucuggaccgugcucaagcccaacgacgccaucaacuucgagagcaacgggaacuucaucgcgcccgaguacgccuacaagaucgugaagaagggcgacagcgccaucaugaaguccgaggucgaguacggcaacugcaacaccaagugccagaccccgaucggggccaucaacagcuccaugcccuuccacaacauccacccccugacgaucggcgagugccccaaguacgucaagagcaacaagcuggugcucgccaccgggcugcggaacuccccgcugcgcgagcggcgccggaagcgcggccucuucggcgcgaucgccggguucaucgagggcggguggcagggcaugguggacgggugguacggcuaccaccacagcaacgagcagggcuccggguacgccgccgacaaggagagcacccagaaggccaucgacggcgugaccaacaaggugaacuccaucaucgacaagaugaacacgcaguucgaggcggucgggcgggaguucaacaaccuggagcgccggaucgagaaccugaacaagaagauggaggacggcuuccucgacguguggaccuacaacgccgagcugcugguccucauggagaacgagcgcacccuggacuuccacgacagcaacgugaagaaccuguacgacaaggugcggcuccagcugcgcgacaacgccaaggagcuggggaacggcugcuucgaguucuaccacaagugcgacaacgagugcauggaguccguccggaacggcaccuacgacuacccccaguacagcgaggaggcccgccucaagcgggaggagaucuccggggugaagcuggagagcaucggcacguaccagauccuguccaucuacagcaccguggccuccagccucgcgcuggccaucauggucgccgggcugucccucuggaugugcagcaacggcagccugcagugccgcaucugcaucuga

SEQ ID NO: 71731 - RNA, 1704 nt, Artificial Sequence
  derived and/or modified CDS sequence (opt1) from hemagglutinin__InfluenzaA__AEO89048
auggagaagaucguguuccugcucgccaucgucagccuggugaaguccgaccagaucugcaucggcuaccacgccaacaacagcaccgagcaggucgacaccaucauggagaagaacgugacggugacccacgcgcaggacauccuggagaagacccacaacgggaagcucugcgaccuggacggcgugaagccccugauccuccgcgacugcuccgucgccggguggcugcugggcaacccgaugugcgacgaguucaucaacgugcccgaguggagcuacaucguggagaaggccaaccccgccaacgaccucugcuaccccgggaacuucaacgacuacgaggagcugaagcaccuccugucccggaucaaccacuucgagaagauccagaucauccccaagagcuccuggagcgaccacgaggccuccagcggcgucuccagcgcgugcccguaccagggcacccccuccuucuuccgcaacgugaucuggcugaucaagaagaacaacacguaccccaccaucaagcggagcuacaacaacaccaaccaggaggaccugcucauccugugggggauccaccacuccaacgacgccgccgagcagaccaagcuguaccagaacccgacgaccuacaucagcgugggcaccuccacccucaaccagcgccugguccccaagaucgccacgcggagcaaggugaacgggcaguccggccgcauggacuucuucuggaccauccugaagcccaacgacgcgaucaacuucgagagcaacgggaacuucaucgcccccgaguacgccuacaagaucgugaagaagggcgacagcgccauccucaaguccgaggucgaguacggcaacugcaacaccaagugccagaccccgaucggggccaucaacagcuccaugcccuuccacaacauccacccccugacgaucggcgagugccccaaguacgucaagagcaacaagcuggugcucgcgaccgggcugcggaacuccccgcugcgcgagcggcgccggaagcgcggccucuucggcgccaucgccggguucaucgagggcggguggcagggcaugguggacgggugguacggcuaccaccacagcaacgagcagggcuccggguacgccgccgacaaggagagcacccagaaggcgaucgacggcgugaccaacaaggugaacuccaucaucgacaagaugaacacgcaguucgaggccgucgggcgggaguucaacaaccuggagcgccggaucgagaaccugaacaagaagauggaggacggcuuccucgacguguggaccuacaacgccgagcugcuggugcucauggagaacgagcgcacccuggacuuccacgacagcaacgucaagaaccuguacgacaaggugcggcuccagcugcgcgacaacgccaaggagcuggggaacggcugcuucgaguucuaccacaagugcgacaacgagugcauggaguccguccggaacggcaccuacgacuacccccaguacagcgaggaggcccgccucaagcgggaggagaucuccggggugaagcuggagagcaucggcacguaccagauccuguccaucuacagcaccguggcguccagccucgcccuggccaucauggucgccgggcugucccucuggaugugcagcaacggcagccugcagugccgcaucugcaucuga

SEQ ID NO: 71732 - RNA, 1704 nt, Artificial Sequence
  derived and/or modified CDS sequence (opt1) from hemagglutinin__InfluenzaA__AEO89065
auggagaagaucgugcugcuccuggccaucgucagccuggugaaguccgaccagaucugcaucggcuaccacgccaacaacagcaccgagcaggucgacaccaucauggagaagaacgugacggugacccacgcgcaggacauccucgagaagacccacaacgggaagcugugcgaccuggacggcgugaagccccucauccugcgcgacugcuccgucgccggguggcugcucggcaacccgaugugcgacgaguucaucaacgugcccgaguggagcuacaucguggagaaggccaaccccgccaacgaccugugcuaccccgggaacuucaacgacuacgaggagcugaagcaccuccugucccggaucaaccacuucgagaagauccagaucauccccaagagcuccuggagcgaccacgaggccuccagcggcgucuccagcgugugcccguaccagggcacccccuccuucuuccgcaacguggucuggcugaucaagaagaacaacacguaccccaccaucaagcggagcuacaacaacaccaaccaggaggaccuccugauccugugggggauccaccacuccaacgacgcggccgagcagaccaagcucuaccagaacccgacgaccuacaucagcgugggcaccuccacccugaaccugcgccucgugcccaagaucgccacgcggagcaaggucaacgggcaguccggccgcauggacuucuucuggaccauccugaagcccagcgacgccaucaacuucgagagcaacgggaacuucaucgcgcccgaguacgccuacaagaucgugaagaagggcgacuccgccaucaugaaguccgagguggaguacggcaacugcaacaccaagugccagaccccgaucggggccaucaacagcagcaugcccuuccacaacauccacccccugacgaucggcgagugccccaaguacgucaaguccaacaagcucgugcuggccaccgggcugcggaacagcccgcuccgcgagcggcgccggaagcgcggccuguucggcgcgaucgccggguucaucgagggcggguggcagggcaugguggacgggugguacggcuaccaccacuccaacgagcagggcagcggguacgccgccgacaaggaguccacccagaaggccaucgacggcgucaccaacaaggugaacagcaucaucgacaagaugaacacgcaguucgaggcgguggggcgggaguucaacaaccuggagcgccggaucgagaaccucaacaagaagauggaggacggcuuccuggacgucuggaccuacaacgccgagcugcucgugcugauggagaacgagcgcacccuggacuuccacgacuccaacgucaagaaccucuacgacaaggugcggcugcagcugcgcgacaacgccaaggagcucgggaacggcugcuucgaguucuaccacaagugcgacaacgagugcauggagagcgugcggaacggcaccuacgacuacccccaguacuccgaggaggcccgccugaagcgggaggagaucagcggggucaagcuggaguccaucggcacguaccagauccucagcaucuacuccaccguggccagcucccuggcgcuggccaucaugguggccgggcucagccuguggaugugcagcaacggcucccugcagugccgcaucugcaucuga

SEQ ID NO: 71733 - RNA, 1704 nt, Artificial Sequence
  derived and/or modified CDS sequence (opt1) from hemagglutinin__InfluenzaA__AEO89082
auggagaagaucgugcugcuccuggccaucgucagccuggugaaguccgaccagaucugcaucggcuaccacgccaacaacagcaccgagcaggucgacaccaucauggagaagaacgugacggugacccacgcgcaggacauccucgagaagacccacaacgggaagcugugcgaccuggacggcgugaagccccucauccugcgcgacugcuccgucgccggguggcugcucggcaacccgaugugcgacgaguucaucaacgugcccgaguggagcuacaucguggagaaggccaaccccgccaacgaccugugcuaccccgggaacuucaacgacuacgaggagcugaagcaccuccugucccggaucaaccacuucgagaagauccagaucauccccaagagcuccuggagcgaccacgacaccuccagcggcgucuccagcgccugcccguaccagggcacgcccuccuucuuccgcaacgugguguggcugaucaagaagaacaacaccuaccccaccaucaagcggagcuacaacaacaccaacaaggaggaccuccugauccugugggggauccaccacuccaacgacgcggccgagcagacgaagcucuaccagaacccgaccaccuacaucagcgucggcaccuccacgcugaaccagcgccuggugcccaagaucgccacccggagcaaggugaacgggcaguccggccgcauggacuucuucuggaccauccucaagcccaacgacgccaucaacuucgagagcaacgggaacuucaucgcgcccgaguacgccuacaagaucgucaagaagggcgacagcgccaucaugaaguccgagguggaguacggcaacugcaacaccaagugccagacgccgaucggggccaucaacagcuccaugcccuuccacaacauccacccccugaccaucggcgagugccccaaguacgucaagagcaacaagcuggugcucgccaccgggcugcggaacuccccgcugcgcgagcggcgccggaagcgcggccucuucggcgcgaucgccggguucaucgagggcggguggcagggcaugguggacgggugguacggcuaccaccacagcaacgagcagggcuccggguacgccgccgacaaggagagcacccagaaggccaucgacggcgugacgaacaaggucaacuccaucaucgacaagaugaacacccaguucgaggcgguggggcgggaguucaacaaccuggagcgccggaucgagaaccugaacaagaagauggaggacggcuuccucgacguguggaccuacaacgccgagcugcugguccucauggagaacgagcgcacccuggacuuccacgacagcaacgugaagaaccuguacgacaagguccggcuccagcugcgcgacaacgccaaggagcuggggaacggcugcuucgaguucuaccacaagugcgacaacgagugcauggaguccgugcggaacggcacguacgacuacccccaguacagcgaggaggcccgccucaagcgggaggagaucuccggggugaagcuggagagcaucggcaccuaccagauccuguccaucuacagcaccgucgccuccagccucgcgcuggccaucaugguggccgggcugucccucuggaugugcagcaacggcagccugcagugccgcaucugcaucuga

SEQ ID NO: 71734 - RNA, 1704 nt, Artificial Sequence
  derived and/or modified CDS sequence (opt1) from hemagglutinin__InfluenzaA__AEO89091
auggagaagaccguguuccugcucgccaucgucagccuggugaaguccgaccagaucugcaucggcuaccacgccaacaacagcaccgagcaggucgacacgaucauggagaagaacgugaccgugacccacgcgcagaacauccuggagaagacccacaacgggaagcucugcgacaucgacggcgugaagccccugauccugaaggacugcuccgucgccggguggcuccugggcaacccgaugugcgacgaguucaucaacgugcccgaguggagcuacaucguggagaaggccaaccccgccaacgaccugugcuaccccgggaacuucaacgacuacgaggagcucaagcaccuccugucccgcaucaaccacuucgagaagauccagaucauccccaagagcuccuggagcgaccacgaggccuccagcggcgucuccagcacgugcccguaccagggcacccccuccuucuuccggaacgugguguggcugaucaagaagaacaacaccuaccccaccaucaagcgcagcuacaacaacacgaaccaggaggaccugcugauccucugggggauccaccacuccaacgacgaggcggagcaggccaagcuguaccagaacccgaccaccuacaucagcgucggcaccuccacgcugaaccagcggcucgugcccaagaucgccacccgcagcaaggugaacgggcaguccggccggauggacuucuucuggaccauccugaagcccaacgacgccaucaacuucgagagcaacgggaacuucaucgcgcccgaguacgccuacaagaucgucaagaagggcgacagcgccaucaugaaguccgagguggaguacggcaacugcaacaccaagugccagacgccgaucggggccaucaacagcuccaugcccuuccacaacauccacccccugaccaucggcgagugccccaaguacgucaagagcaacaagcucgugcuggccaccgggcugcgcaacuccccgcuccgggagcgccggcgcaagcggggccuguucggcgcgaucgccggguucaucgagggcggguggcagggcaugguggacgggugguacggcuaccaccacagcaacgagcagggcuccggguacgccgccgacaaggagagcacccagaaggccaucgacggcgugacgaacaaggucaacuccaucaucgacaagaugaacacccaguucgaggcgguggggcgcgaguucaacaaccuggagcggcgcaucgagaaccucaacaagaagauggaggacggcuuccuggacguguggaccuacaacgccgagcugcucguccugauggagaacgagcggacccuggacuuccacgacagcaacgugaagaaccucuacgacaagguccgccugcagcugcgggacaacgccaaggagcucgggaacggcugcuucgaguucuaccacaagugcgacgacgagugcauggaguccgugcgcaacggcacguacgacuacccccaguacagcgaggaggcccggcugaagcgcgaggagaucuccggggugaagcuggagagcaucggcaccuaccagauccucuccaucuacagcaccgucgccuccagccuggcgcuggccaucaugauggccgggcucucccuguggaugugcagcaacggcagccugcagugccggaucugcaucuga

SEQ ID NO: 71735 - RNA, 1704 nt, Artificial Sequence
  derived and/or modified CDS sequence (opt1) from hemagglutinin__InfluenzaA__AEO89100
auggagaagaucgugcccuuccuggccaucaucagccucgucaaguccgaccagaucugcaucggcuaccacgccaacaacagcaccgagcaggucgacaccaucauggagaagaacgugacggugacccacgcgcaggacauccuggagaagacccacaacgggaagcugugcgaccucgacggcgugaagccgcugauccugcgcgacugcuccguggccggguggcuccugggcaaccccaugugcgacgaguucaucaacguccccgaguggagcuacaucguggagaaggccaaccccgccaacgaccugugcuacccggggaacuucaacgacuacgaggagcucaagcaccuccugucccggaucaaccacuucgagaagauccagaucauccccaagaacagcugguccgaccacgaggccagcuccggcgugagcuccgcgugccccuaccagggcacccccagcuucuuccgcaacgucguguggcugaucaagaagaacaacacguacccgaccaucaagcgguccuacaacaacaccaaccaggaggaccugcugauccucugggggauccaccacagcaacgacgccgccgagcagaccaagcuguaccagaaccccacgaccuacaucuccgugggcaccagcacccugaaccagcgccucguccccaagaucgccacgcgguccaaggugaacgggcagagcggccgcauggacuucuucuggaccauccugaagcccaacgacgcgaucaacuucgaguccaacgggaacuucaucgccccggaguacgccuacaagaucgugaagaagggcgacagcgccaucaugaaguccgaggucgaguacggcaacugcaacaccaagugccagacccccaucggggccaucaacagcagcaugcccuuccacaacauccacccccugacgaucggcgagugcccgaaguacgugaaguccaacaagcucgugcuggcgaccgggcugcggaacagcccccuccgcgagcggcgccggaagcgcggccuguucggcgccaucgccggguucaucgagggcggguggcagggcauggucgacgggugguacggcuuccaccacuccaacgagcagggcagcggguacgccgccgacaaggaguccacccagaaggcgaucgacggcgugaccaacaaggugaacagcaucaucgacaagaugaacacgcaguucgaggccgucgggcgggaguucaacaaccuggagcgccggaucgagaaccucaacaagaagauggaggacggcuuccuggacguguggaccuacaacgccgagcugcucgugcugauggagaacgagcgcacccuggacuuccacgacuccaacgucaagaaccucuacgacaaggugcggcugcagcugcgcgacaacgccaaggagcucgggaacggcugcuucgaguucuaccacaagugcgacgacgagugcauggagagcgucaagaacggcaccuacgacuacccccaguacuccgaggaggcccggcugaagcgcgaggagaucagcggggugaagcuggaguccaucggcacguaccagauccucagcaucuacuccaccguggcgagcucccuggcccuggccaucauggucgccgggcucagccuguggaugugcuccaacggcagccugcagugccggaucugcaucuga

SEQ ID NO: 71736 - RNA, 1704 nt, Artificial Sequence
  derived and/or modified CDS sequence (opt1) from hemagglutinin__InfluenzaA__AEO89109
auggagaagaucgugcugcuccuggccaucgucagccuggugaaguccgaccagaucugcaucggcuaccacgccaacaacagcaccgagcaggucgacaccaucauggagaagaacgugacggugacccacgcgcaggacauccucgagaagacccacaacgggaagcugugcgaccuggacggcgugaagccccucauccugcgcgacugcuccgucgccggguggcugcucggcaacccgaugugcgacgaguucaucaacgugcccgaguggagcuacaucguggagaaggccaaccccgccaacgaccugugcuaccccgggaacuucaacgacuacgaggagcugaagcaccuccugucccggaucaaccacuucgagaagauccagaucauccccaagagcuccuggagcgaccacgaggccuccagcggcgucuccagcgcgugcccguaccagggcacccccuccuucuuccgcaacgugguguggcugaucaagaagaacaacacguaccccaccaucaagcggagcuacaacaacaccaaccaggagaaccuccugauccugugggggauccaccacuccaacgacgccgccgagcagaucaagcucuaccagaacccgaccacguacaucagcgucggcaccuccacccugaaccagcgccuggugaccaagaucgccacgcggcccaaggugaacgggcagagcggccgcauggacuucuucuggaccauccucaagcccaacgacgcgaucaacuucgaguccaacgggaacuucaucgcccccgaguacgccuacaagaucgucaaggagggcgacagcgccaucaugaaguccgagguggaguacggcaacugcaacaccaagugccagaccccgaucggggccaucaacagcagcaugcccuuccacaacauccacccccugacgaucggcgagugccccaaguacgugaaguccaacaagcugguccucgcgaccgggcugcggaacagcccgcugcgcgagcggcgccggaagcgcggccucuucggcgccaucgccggguucaucgagggcggguggcagggcaugguggacgggugguacggcuaccaccacuccaacgagcagggcagcggguacgccgccgacaaggaguccacccagaaggcgaucgacggcgugaccaacaaggucaacagcaucaucgacaagaugaacacgcaguucgaggccguggggcgggaguucaacaaccuggagcgccggaucgagaaccugaacaagaagauggaggacggcuuccucgacguguggaccuacaacgccgagcugcugguccucauggagaacgagcgcacccuggacuuccacgacuccaacgugaagaaccuguacgacaagguccggcuccagcugcgcgacaacgccaaggagcuggggaacggcugcuucgaguucuaccacaagugcgacaacgagugcauggagagcgugcggaacggcaccuacgacuacccccaguacuccgaggaggcccgccucaagcgggaggagaucagcggggugaagcuggaguccaucggcacguaccagauccugagcaucuacuccaccgucgcgagcucccucgcccuggccaucaugguggccgggcugagccucuggaugugcuccaacggcagccugcagugccgcaucugcaucuga

SEQ ID NO: 71737 - RNA, 1704 nt, Artificial Sequence
  derived and/or modified CDS sequence (opt1) from hemagglutinin__InfluenzaA__AEO89127
auggagaagaucgugcugcuccuggccaucaucagccuggucaaguccgaccagaucugcaucggcuaccacgccaacaacagcaccgagcaggucgacaccaucauggagaagaacgugacggugacccacgcgcaggacauccucgagaagacccacaacgggaagcugugcgaccuggacggcgugaagccccucauccugcgcgacugcuccguggccggguggcugcucggcaacccgaugugcgacgaguucaucaacguccccgaguggagcuacaucguggagaaggccaaccccgccaacgaccugugcuaccccgggaacuucaacgacuacgaggagcugaagcaccuccugucccggaucaaccacuucgagaagauccagaucauccccaagagcuccuggagcgaccacgaggccuccagcggcguguccagcgcgugcccguaccagggcacccccuccuucuuccgcaacgucguguggcugaucaagaagaacaacacguaccccaccaucaagcggagcuacaacaacaccaaccaggagaaccuccugauccugugggggauccaccacuccaacgacgccgccgagcagaucaagcucuaccagaacccgaccacguacaucagcgugggcaccuccacccugaaccagcgccugguccccaagaucgccacccggagcaaggugaacgggcaguccggccgcauggacuucuucuggacgauccucaagcccaacgacgcgaucaacuucgagagcaacgggaacuucaucgcccccgaguacgccuacaagaucgugaaggagggcgacagcgccaucaugaaguccgaggucgaguacggcaacugcaacaccaagugccagaccccgaucggggccaucaacagcuccaugcccuuccacaacauccacccccugaccaucggcgagugccccaaguacgucaagagcaacaagcuggugcucgcgacggggcugcggaacuccccgcugcgcgagcggcgccggcgccggggccucuucggcgccaucgccggguucaucgagggcggguggcagggcaugguggacgggugguacggcuaccaccacagcaacgagcagggcuccggguacgccgccgacaaggagagcacccagaaggcgaucgacggcgugaccaacaaggugaacuccaucaucgacaagaugaacacccaguucgaggccgucgggcgcgaguucaacaaccuggagcggcgcaucgagaaccugaacaagaagauggaggacggcuuccucgacguguggacguacaacgccgagcugcuggugcucauggagaacgagcggacccuggacuuccacgacagcaacgucaagaaccuguacgacaaggugcgccuccagcugcgggacaacgccaaggagcuggggaacggcugcuucgaguucuaccacaagugcgacaacgagugcauggaguccguccgcaacggcaccuacgacuacccccaguacagcgaggaggcccggcucaagcgcgaggagaucuccgggaucaagcuggagagcaugggcaccuaccagauccuguccaucuacagcacgguggcguccagccucgcccuggccaucaugguggccgggcugucccucuggaugugcagcaacggcagccugcagugccgcaucugcaucuga

SEQ ID NO: 71738 - RNA, 1704 nt, Artificial Sequence
  derived and/or modified CDS sequence (opt1) from hemagglutinin__InfluenzaA__AEO89145
auggagaagaucgugcugcuccuggccaucgucagccuggugaaguccgaccagaucugcaucggcuaccacgccaacaacagcaccgagcaggucgacaccaucauggagaagaacgugacggugacccacgcgcaggacauccucgagaagacccacaacgggaagcugugcgaccuggacggcgugaagccccucauccugggggacugcuccgucgccggcuggcugcucgggaacccgaugugcgacaaguucaucaacgugcccgaguggagcuacaucguggagaaggccaaccccgccaacgaccugugcuaccccggcaacuucaacgacuacgaggagcugaagcaccuccugucccgcaucaaccacuucgagaagauccagaucauccccaagagcuccuggagcgaccacgaggccuccagcggcgucuccagcgcgugcccguaccaggggacccccuccuucuuccggaacgugguguggcugacgaagaagaacaacaccuaccccaccaucaagcgcagcuacaacaacaccaaccaggaggaccuccugauccuguggggcauccaccacuccaacaacgccgccgagcaggagaagcucuaccagaacccgacgaccuacaucagcgucgggaccuccacccugaaccagcggcuggugcccaagaucgccacgcgcagcaaggugaacggccaguccgggcggauggacuucuucuggaccauccucaagcccaacgacgcgaucaacuucgagagcaacggcaacuucaucgcccccgaguacgccuacaagaucgucaagaagggcgacagcgccaucaugaaguccgggguggaguacggcaacugcaacaccaagugccagaccccgaucggggccaucaacagcuccaugcccuuccacaacauccacccccugacgaucggcgagugccccaaguacgucaagagcaacaagcuggugcucgcgaccggccugcgcaacuccccgcugcgggagcgccggcgcaagcggggccucuucggggccaucgccggguucaucgagggcggguggcagggcaugguggacggcugguacggguaccaccacagcaacgagcagggcuccggguacgccgccgacaaggagagcacccagaaggcgaucgacggcgugaccaacaaggucaacuccaucaucgacaagaugaacacgcaguucgaggccguggggcgcgaguucaacaaccuggagcggcgcaucgagaaccugaacaagaagauggaggacggcuuccucgacguguggaccuacaacgccgagcugcugguccucauggagaacgagcggacccuggacuuccacgacagcaacgugaagaaccuguacgacaagguccgccuccagcugcgggacaacgccaaggagcugggcaacgggugcuucgaguucuaccacaagugcgacaacgagugcauggaguccgugcgcaacggcaccuacgacuacccccaguacagcgaggaggcccggcucaagcgcgaggagaucuccggggugaagcuggagagcaucggcacguaccagauccuguccaucuacagcaccgcggccuccagccucgcccuggccaucauggucgccgggcugucccucuggaugugcagcaacggcagccugcagugccggaucugcaucuga

SEQ ID NO: 71739 - RNA, 1707 nt, Artificial Sequence
  derived and/or modified CDS sequence (opt1) from hemagglutinin__InfluenzaA__AEO89163
auggagaagaucgugcugcuguucgccaucgucagccuggugaaguccgaccacaucugcaucggcuaccacgccaacaacagcaccgagcaggucgacaccaucauggagaagaacgugacggugacccacgcgcaggacauccuggagaagacccacaacgggaagcucugcgaccugaacggcgugaagccccugauccucaaggacugcuccgucgccggguggcugcugggcaacccgaugugcgacgaguucaucgacgugcccgaguggagcuacaucguggagaaggccaaccccgccaacgaccucugcuaccccgggaacuucaacgacuacgaggagcugaagcaccuccucucccgcaucaaccacuucgagaagauccagaucaucccgaaggacagcuggcccgaccacgaggccucccugggcgucagcuccgcgugccccuaccagggcaacagcuccuucuuccggaacgugguguggcugaucaagaaggggaacgccuaccccaccaucaagaaguccuacaacaacacgaacaaggaggaccuccugauccuguggggcauccaccacccgaacgacgaggccgagcagacccgccucuaccagaaccccaccaccuacaucagcaucgggacgagcacccugaaccagcggcuggucccccgcaucgccacccgguccaaggugaacggccagagcgggcgcaucgacuucuucuggaccauccucaagcccaacgacgcgaucaacuucgaguccaacggcaacuucaucgccccggaguacgccuacaagaucgugaagaagggcgacagcacgaucaugaaguccgaggucgaguacgggaacugcaacacccggugccagacccccaugggcgccaucaacagcagcaugcccuuccacaacauccacccccugaccaucggggagugcccgaaguacgugaaguccaacaagcuggugcucgccacgggccugcgcaacagcccccagcgggagcgccggcgccggaagcgcggccuguucggggcgaucgccggcuucaucgagggcggguggcaggggauggucgacggcugguacggcuaccaccacuccaacgagcaggggagcggcuacgccgccgacaaggaguccacccagaaggccaucgacggggugaccaacaaggugaacagcaucaucgacaagaugaacacccaguucgaggcggucggccgggaguucaacaaccucgagcgccggaucgagaaccugaacaagaagauggaggacggguuccuggacguguggacguacaacgccgagcuccuggugcugauggagaacgagcgcacccucgacuuccacgacuccaacgucaagaaccuguacgacaaggugcggcugcagcuccgcgacaacgccaaggagcugggcaacggcugcuucgaguucuaccacaagugcgacaacgagugcauggagagcguccggaacgggaccuacgacuacccccaguacuccgaggaggcccgccugaagcgcgaggagaucagcggcgugaagcucgaguccaucgggaccuaccagauccugagcaucuacuccacgguggccagcucccugguccucgcgaucaugguggccggccugagccuguggaugugcuccaacgggagccuccagugccggaucugcaucuga

SEQ ID NO: 71740 - RNA, 1704 nt, Artificial Sequence
  derived and/or modified CDS sequence (opt1) from hemagglutinin__InfluenzaA__AEO89172
auggagaagaucgugcugcuccuggccaucgucagccuggugcgcuccgaccagaucugcaucggcuaccacgccaacaacagcaccgagcaggucgacaccaucauggagaagaacgugacggugacccacgcgcagaacauccucgagaagacccacaacgggaagcugugcgaccuggacggcgugaagccccucauccugcgggacugcuccgucgccggguggcugcucggcaacccgaugugcgacgaguucaucaacgugcccgaguggagcuacaucguggagaaggccaaccccgccaacgaccugugcuaccccgggaacuucaacgacuacgaggagcugaagcaccuccugucccgcaucaaccacuucgagaagauccagaucauccccaagagcuccuggagcgaccacgaggccuccagcggcgucuccagcgcgugcccguaccagggcacccccuccuucuuccggaacgugguguggcugaucaagaagaacaacacguaccccaccaucaagcgcagcuacaacaacaccaaccaggaggaccuccugguccugugggggauccaccacuccaacgacgccaccgagcagaucaagcucuaccagaacccgacgaccuacgugagcgugggcaccuccacccugaaccagcggcugguccccaagaucgccacgcgcagcaaggugaacgggcaguccggccggauggacuucuucuggaccauccucaagagcaacgacgccaucaacuucgagagcaacgggaacuucaucgcgcccgaguacgccuacaagaucgugaagaagggcgacuccgccaucaugaaguccgaggucgaguacggcaacugcuccaccaagugccagacccccaucggggccaucaacagcuccaugccguuccacaacauccacccccugacgaucggcgagugccccaaguacgucaagagcaacaagcuggugcucgccaccgggcugcgcaacagcccccugcgggagcgccggcgcaagcggggccucuucggcgcgaucgccggguucaucgagggcggguggcagggcaugguggacgggugguacggcuaccaccacagcaacgagcagggcuccggguacgccgccgacaaggagagcacccagaaggccaucgacggcgugaccaacaaggugaacuccaucaucgacaagaugaacacgcaguucgaggcggucgggcgcgaguucaacaaccuggagcggcgcaucgagaaccugaacaagaagauggaggacggcuuccucgacguguggaccuacaacgccgagcugcugguccucauggagaacgagcggacccuggacuuccacgacagcaacgugaagaaccuguacgacaaggugcgccuccagcugcgggacaacgccaaggagcuggggaacggcugcuucgaguucuaccacaagugcgacaacgagugcauggaguccguccgcaacggcaccuacgacuacccgcaguacagcgaggaggcccggcucaagcgcgaggagaucuccggggugaagcuggagagcaucggcacguaccagauccuguccaucuacagcaccguggccuccagccucgcgcuggccaucauggucgccgggcugagccucuggaugugcuccaacggcagccugcagugccgcaucugcaucuga

SEQ ID NO: 71741 - RNA, 1704 nt, Artificial Sequence
  derived and/or modified CDS sequence (opt1) from hemagglutinin__InfluenzaA__AEO89181
auggagaagaucgugcugcuguucgccaccaucagccuggucaaguccgaccacaucugcaucggcuaccacgccaacaacagcaccgagcaggucgacacgaucauggagaagaacgugaccgugacccacgcgcaggacauccuggagaagacccacaacgggaagcucugcgaccugaacggcgugaagccccugauccucaaggacugcuccguggccggguggcugcugggcaacccgaugugcgacgaguucaucaacguccccgaguggagcuacaucguggagaaggccaaccccgccaacgaccucugcuaccccgggaacuucaacgacuacgaggagcugaagcaccuccucucccgcaucaaccacuucgagaagauccagaucaucccgaagaacagcugguccgaccacgaggccagccugggcguguccgcggccugccccuaccagggcaagagcuccuucuuccggaacgucguguggcugaucaagaaggacaacgccuaccccacgaucaagaagggguacaacaacaccaaccaggaggaccuccuggugcuguggggcauccaccaccccaacgacgaggccgagcagacccgccucuaccagaacccgaccacguacaucagcaucgggaccuccacccugaaccagcggcugguccccaagaucgcgacccgcagcaagaucaacggccaguccgggcggaucgacuucuucuggacgauccucaagcccaacgacgccauccacuucgagagcaacggcaacuucaucgcccccgaguacgccuacaagaucgugaagaagggcgacuccaccaucaugaaguccgagguggaguacgggaacugcaacacccgcugccagaccccgaucggcgccaucaacagcagcaugcccuuccacaacauccacccccugacgaucggggagugccccaaguacgucaagagcaacaagcuggugcucgcgaccggccugcggaacuccccgcagcgcgagcggcgccggaagcgcggccuguucggggccaucgccggcuucaucgagggcggguggcaggggaugguggacggcugguacggcuaccaccacagcaacgagcagggguccggcuacgccgccgacaaggagagcacccagaaggcgaucgacggggucaccaacaaggugaacuccaucaucgacaagaugaacacgcaguucgaggccgugggccgggaguucaacaaccucgagcgccggaucgagaaccugaacaagaagauggaggacggguuccuggacgucuggaccuacaacgccgagcuccuggugcugauggagaacgagcgcacccucgacuuccacgacagcaacgugcggaaccuguacgacaagguccgccugcagcucaaggacaacgccaaggagcugggcaacggcugcuucgaguucuaccacaagugcgacaacgagugcauggaguccgugcggaacgggaccuacgacuacccccaguacagcgaggaggcccgccugaagcgggaggagaucuccggcgucaagcucgagagcaucgggaucuaccagauccuguccaucuacagcacgguggcguccagccuggugcucgccaucaugauggccggccugucccuguggaugugcagcaacgggucccuccagugccgcaucugcaucuga

SEQ ID NO: 71742 - RNA, 1704 nt, Artificial Sequence
  derived and/or modified CDS sequence (opt1) from hemagglutinin__InfluenzaA__AEO89192
auggagaagaucgugcugcuccuggccaucgucagccuggugaaguccgaccagaucugcaucggcuaccacgccaacaacagcaccgagcaggucgacaccaucauggagaagaacgugacggugacccacgcgcaggacauccucgagaagacccacaacgggaagcugugcgaccuggacggcgugaagccccucauccugcgcgacugcuccgucgccggguggcugcucggcaacccgaugugcgacgaguucaucaacgugcccgaguggagcuacaucguggagaaggccaaccccgccaacgaccugugcuaccccgggaacuucaacgacuacgaggagcugaagcaccuccugucccggaucaaccacuucgagaagauccagaucauccccaagagcuccuggagcgaccacgaggccuccagcggcgucuccagcgcgugcccguaccagggcacccccuccuucuuccgcaacgugguguggcugaucaagaagaacaacacguaccccaccaucaagcggagcuacaacaacaccaaccaggagaaccuccugauccugugggggauccaccacuccaacgacgccgccgagcagaucaagcucuaccagaacccgaccacguacgucagcaucggcaccuccacccugaaccagcgccuggugcccaagaucgccacccggagcaaggugaacgggcaguccggccgcauggacuucuucuggacgauccucaagcccaacgacgcgaucaacuucgagagcaacgggaacuucaucgcccccgaguacgccuacaagaucgucaaggagggcgacagcgccaucaugaaguccgagguggaguacggcaacugcaacaccaagugccagaccccgaucggggccaucaacagcuccaugcccuuccacaacauccacccccugaccaucggcgagugccccaaguacgucaagagcaacaagcuggugcucgcgacggggcugcggaacuccccgcugcgcgagcggcgccggaagcgcggccucuucggcgccaucgccggguucaucgagggcggguggcagggcaugguggacgggugguacggcuacccccacagcaacgagcagggcuccggguacgccgccgacaaggagagcacccagaaggcgaucgacggcgugaccaacaaggucaacuccaucaucgacaagaugaacacccaguucgaggccguggggcgggaguucaacaaccuggagcgccggaucgagaaccugaacaagaagauggaggacggcuuccucgacguguggacguacaacgccgagcugcugguccucauggagaacgagcgcacccuggacuuccacgacagcaacgugaagaaccuguacgacaagguccggcuccagcugcgcgacaacgccaaggagcuggggaacggcugcuucgaguucuaccacaagugcgacaacgagugcauggaguccgugcggaacggcaccuacgacuacccccaguacagcgaggaggcccgccucaagcgggaggagaucaacggggugaagcuggaguccaucggcaccuaccagauccugagcaucuacuccacggucgcgagcucccucgcccuggccaucaugguggccgggcugagccucuggaugugcuccaacggcagccugcagugccgcaucugcaucuga

SEQ ID NO: 71743 - RNA, 1704 nt, Artificial Sequence
  derived and/or modified CDS sequence (opt1) from hemagglutinin__InfluenzaA__AEO89203
auggagaagaucgugcugcuccuggccaucgucagccuggugaaguccgaccagaucugcaucggcuaccacgccaacaacagcaccgagcaggucgacaccaucauggagaagaacgugacggugacccacgcgcaggacauccucgagaagacccacaacgggaagcugugcgaccuggacggcgugaagccccucauccugcgcgacugcuccgucgccggguggcugcucggcaacccgaugugcgacgaguucaucaacgugcccgaguggagcuacaucguggagaaggccaaccccgccaacgaccugugcuaccccgggaacuucaacgacuacgaggagcugaagcaccuccugucccggaucaaccacuucgagaagauccagaucauccccaagagcuccuggagcgaccacgaggccuccagcggcgucuccagcgcgugcccguaccagggcacccccuccuucuuccgcaacgugguguggcugaucaagaagaacaacacguaccccaccaucaagcggagcuacaacaacaccaaccaggagaaccuccugauccugugggggauccaccacuccaacgacgccgccgagcagaucaagcucuaccagaacccgaccacguacgucagcaucggcaccuccacccugaaccagcgccuggugcccaagaucgccacccggagcaaggugaacgggcaguccggccgcauggacuucuucuggacgauccucaagcccaacgacgcgaucaacuucgagagcaacgggaacuucaucgcccccgaguacgccuacaagaucgucaaggagggcgacagcgccaucaugaaguccgagguggaguacggcaacugcaacaccaagugccagaccccgaucggggccaucaacagcuccaugcccuuccacaacauccacccccugaccaucggcgagugccccaaguacgucaagagcaacaagcuggugcucgcgacggggcugcggaacuccccgcugcgcgagcggcgccggaagcgcggccucuucggcgccaucgccggguucaucgagggcggguggcagggcaugguggacgggugguacggcuaccaccacagcaacgagcagggcuccggguacgccgccgacaaggagagcacccagaaggcgaucgacggcgugaccaacaaggucaacuccaucaucgacaagaugaacacccaguucgaggccguggggcgggaguucaacaaccuggagcgccggaucgagaaccugaacaagaagauggaggacggcuuccucgacguguggacguacaacgccgagcugcugguccucauggagaacgagcgcacccuggacuuccacgacagcaacgugaagaaccuguacgacaagguccggcuccagcugcgcgacaacgccaaggagcuggggaacggcugcuucgaguucuaccacaagugcgacaacgagugcauggaguccgugcggaacggcaccuacgacuacccccaguacagcgaggaggcccgccucaagcgggaggagaucaacggggugaagcuggaguccaucggcaccuaccagauccugagcaucuacuccacggucgcgagcucccucgcccuggccaucaugguggccgggcugagccucuggaugugcuccaacggcagccugcagugccgcaucugcaucuga

SEQ ID NO: 71744 - RNA, 1704 nt, Artificial Sequence; identical to SEQ ID NO: 71743
  derived and/or modified CDS sequence (opt1) from hemagglutinin__InfluenzaA__AEO89213

SEQ ID NO: 71745 - RNA, 1704 nt, Artificial Sequence; identical to SEQ ID NO: 71743
  derived and/or modified CDS sequence (opt1) from hemagglutinin__InfluenzaA__AEO89224

SEQ ID NO: 71746 - RNA, 1704 nt, Artificial Sequence
  derived and/or modified CDS sequence (opt1) from hemagglutinin__InfluenzaA__AEO89235
auggagaagaucgugcugcuccuggccauggucagccuggugcgcuccgaccagaucugcaucggcuaccacgccaacaacagcaccgagcaggucgacaccaucauggagaagaacgugacggugacccacgcgcaggacauccucgagaagacccacaacgggaagcugugcgaccuggacggcgugaagccccucauccugcgggacugcuccgucgccggguggcugcucggcaacccgaugugcgacgaguucaucaacgugcccgaguggagcuacaucguggagaaggccaaccccgccaacgaccugugcuaccccgggaaccugaacgacuacgaggagcucaagcaccuccugucccgcaucaaccacuucgagaagauccagaucauccccaagagcuccuggagcgaccacgaggccucccugggcgucagcuccgcgugcccguaccagggcacccccagcuucuuccggaacgugaucuggcugaucaagaagaacaacacguaccccaccaucaagcgcuccuacaacaacaccaaccaggaggaccugcucauccugugggggauccaccacagcaacgacgaggccgagcagaucaagcuguaccagaacccgaccacguacaucuccgugggcaccagcacccucaaccagcggcugguccccaagaucgccacccgcuccaaggugaacgggcagagcggccggauggacuucuucuggacgauccugaagcccgacgacgccaucaacuucgaguccaacgggaacuucaucgcgcccgaguacgccuacaagaucgugaagaagggcgacagcgccaucaugaaguccgaggucgaguacggcaacugcaacaccaagugccagaccccgaucggggccaucaacagcagcaugcccuuccacaacauccacccccucaccaucggcgagugccccaaguacgugaaguccaacaagcuggugcuggccacggggcuccgcaacagcccgcugcgggagaagcgccggaagcgcggccuguucggcgcgaucgccggguucaucgagggcggguggcagggcauggucgacgggugguacggcuaccaccacuccaacgagcagggcagcggguacgccgccgacaaggaguccacccagaaggccaucgacggcgugaccaacaaggugaacagcaucaucgacaagaugaacacccaguucgaggcggucgggcgggaguucaacaaccucgagcgccggaucgagaaccugaacaagaagauggaggacggcuuccuggacguguggacguacaacgccgagcuccuggugcugauggagaacgagcgcacccucgacuuccacgacuccaacgucaagaaccuguacgacaaggugcggcugcagcuccgcgacaacgccaaggagcuggggaacggcugcuucgaguucuaccacaagugcgacaacgagugcauggagagcguccggaacggcaccuacgacuacccccaguacuccgaggaggcccgccugaagcgggaggagaucagcggggugaagcucgaguccaucggcaccuaccagauccugagcaucuacuccacgguggccagcucccuggcgcucgccaucauggucgccgggcugagccuguggaugugcuccaacggcagccuccagugccgcaucugcaucuga

SEQ ID NO: 71747 - RNA, 1704 nt, Artificial Sequence
  derived and/or modified CDS sequence (opt1) from hemagglutinin__InfluenzaA__AEO89246
auggagaagaucgugccccugcucgccauggucagccuggugaaguccgaccagaucugcaucggcuaccacgccaacaacagcaccgagcaggucgacaccaucauggagaagaacgugacggugacccacgcgcaggacauccuggagaagacccacaacgggaagcucugcgaccuggacggcgugaagccgcugauccuccgcgacugcuccgucgccggguggcugcugggcaaccccaugugcgacgaguucaucaacgugcccgaguggagcuacaucguggagaaggccaaccccgccaacgaccucugcuacccggggaaccugaacgacuacgaggagcugaagcaccuccugucccggaucaaccacuucgagaagauccagaucauccccaagagcuccuggagcgaccacgaggccucccugggcgucagcuccgcgugccccuaccagggcacccccagcuucuuccgcaacgugguguggcucaucaagaagaacaacacguacccgaccaucaagcgguccuacaacaacaccaaccaggaggaccugcugauccucugggggauccaccacagcaacgacgaggccgagcagaucaagcuguaccagaaccccaccacguacaucuccgucggcaccagcacccugaaccagcgccucgugcccaagaucgccacccgguccaaggugaacgggcagagcggccgcauggacuucuucuggacgauccugaagcccgacgacgccaucaacuucgaguccaacgggaacuucaucgcgccggaguacgccuacaagaucgucaagaagggcgacagcgccaucaugaaguccgagguggaguacggcaacugcaacaccaagugccagacccccaucggggccaucaacagcagcaugcccuuccacaacauccacccccugaccaucggcgagugcccgaaguacgugaaguccaacaagcucguccuggccacggggcugcggaacagcccccuccgcgagcggcgccggaagcgcggccuguucggcgcgaucgccggguucaucgagggcggguggcagggcaugguggacgggugguacggcuaccaccacuccaacgagcagggcagcggguacgccgccgacaaggaguccacccagaaggccaucgacggcgugaccaacaaggucaacagcaucaucgacaagaugaacacccaguucgaggcgguggggcgggaguucuccaaccuggagcgccggaucgagaaccucaacaagaagauggaggacggcuuccuggacguguggacguacaacgccgagcugcucguccugauggagaacgagcgcacccuggacuuccacgacagcaacgugaagaaccucuacgacaagguccggcugcagcugcgcgacaacgccaaggagcucgggaacggcugcuucgaguucuaccacaagugcgacaacgagugcauggaguccgugcggaacggcaccuacgacuacccccaguacagcgaggaggcccgccugaagcgggaggagaucuccggggugaagcuggagagcaucggcaccuaccagauccucuccaucuacagcacggucgccuccagccuggcgcuggccaucaugguggccgggcucucccuguggaugugcagcaacggcagccugcagugccgcaucugcaucuga

SEQ ID NO: 71748 - RNA, 1704 nt, Artificial Sequence
  derived and/or modified CDS sequence (opt1) from hemagglutinin__InfluenzaA__AEO89257
auggagaagaucgugcugcuccuggccaucgucagccuggugcgcuccgaccagaucugcaucggcuaccacgccaacaacagcaccgagcaggucgacaccaucauggagaagaacgugacggugacccacgcgcaggacauccucgagaagacccacaacgggaagcugugcgaccuggacggcgugaagccccucauccugcgggacugcuccgucgccggguggcugcucggcaacccgaugugcgacgaguucaucaacgugcccgaguggagcuacaucguggagaaggccaaccccgccaacgaccugugcuaccccgggaacuucaacgacuacgaggagcugaagcaccuccugucccgcaucaaccacuucgagaagauccagaucauccccaagagcuccuggagcgaccacgaggccuccagcggcgucuccagcgcgugcccguaccagggcacccccuccuucuuccggaacgugguguggcugaucaagaagaacaacacguaccccaccaucaagcgcagcuacaacaacaccaaccaggaggaccuccugguccugugggggauccaccacuccaacgacgccgccgagcagaucaagcucuaccagaacccgaccacguacgugagcgugggcaccuccacccugaaccagcggcugguccccaagaucgccacccgcagcaaggugaacgggcaguccggccggauggacuucuucuggacgauccucaagagcaacgacgcgaucaacuucgagagcaacgggaacuucaucgcccccgaguacgccuacaagaucgugaagaagggcgacuccgccaucaugaaguccgaggucgaguacggcaacugcuccaccaagugccagacccccaucggggccaucaacagcuccaugccguuccacaacauccacccccugaccaucggcgagugccccaaguacgucaagagcaacaagcuggugcucgcgacggggcugcgcaacagcccccugcgggagcgccggcgcaagcggggccucuucggcgccaucgccggguucaucgagggcggguggcagggcaugguggacgggugguacggcuaccaccacagcaacgagcagggcuccggguacgccgccgacaaggagagcacccagaaggcgaucgacggcgugaccaacaaggugaacuccaucaucgacaagaugaacacccaguucgaggccgucgggcgcgaguucaacaaccuggagcggcgcaucgagaaccugaacaagaagauggaggacggcuuccucgacguguggacguacaacgccgagcugcugguccucauggagaacgagcggacccuggacuuccacgacagcaacgugaagaaccuguacgacaaggugcgccuccagcugcgggacaacgccaaggagcuggggaacggcugcuucgaguucuaccacaagugcgacaacgagugcauggaguccguccgcaacggcaccuacgacuacccgcaguacagcgaggaggcccggcucaagcgcgaggagaucuccggggugaagcuggagagcaucggcaccuaccagauccuguccaucuacagcacgguggcguccagccucguccuggccaucaugguggccgggcugagccucuggaugugcuccaacggcagccugcagugccgcaucugcaucuga

SEQ ID NO: 71749 - RNA, 1704 nt, Artificial Sequence; identical to SEQ ID NO: 71748
  derived and/or modified CDS sequence (opt1) from hemagglutinin__InfluenzaA__AEO89268

SEQ ID NO: 71750 - RNA, 1704 nt, Artificial Sequence
  derived and/or modified CDS sequence (opt1) from hemagglutinin__InfluenzaA__AEO89279
auggagaagaucgugcugcuccuggccaucgucagccuggugaaguccgaccagaucugcaucggcuaccacgccaacaacagcaccgagcaggucgacaccaucauggagaagaacgugacggugacccacgcgcaggacauccucgagaagacccacaacgggaagcugugcgaccuggacggcgugaagccccucauccugggggacugcuccgucgccggcuggcugcucgggaacccgaugugcgacaaguucaucaacgugcccgaguggagcuacaucguggagaaggccaaccccgccaacgaccugugcuaccccggcaacuucaacgacuacgaggagcugaagcaccuccugucccgcaucaaccacuucgagaagauccagaucauccccaagagcuccuggagcgaccacgaggccuccagcggcgucuccagcgcgugcccguaccaggggacccccuccuucuuccggaacgugguguggcugaucaagaagaacaacacguaccccaccaucaagcgcagcuacaacaacaccaaccaggaggaccuccugauccuguggggcauccaccacuccaacaacgccgccgagcaggagaagcucuaccagaacccgaccacguacaucagcgucgggaccuccacccugaaccagcggcuggugcccaagaucgccacccgcagcaaggugaacggccaguccgggcggauggacuucuucuggacgauccucaagcccaacgacgcgaucaacuucgagagcaacggcaacuucaucgcccccgaguacgccuacaagaucgucaagaagggcgacagcgccaucaugaaguccggggugaaguacggcaacugcaacaccaagugccagaccccgaucggggccaucaacagcuccaugcccuuccacaacauccacccccugaccaucggcgagugccccaaguacgucaagagcaacaagcuggugcucgcgacgggccugcgcaacuccccgcugcgggagcgccggcgcaagcggggccucuucggggccaucgccggguucaucgagggcggguggcagggcaugguggacggcugguacggguaccaccacagcaacgagcagggcuccggguacgccgccgacaaggagagcacccagaaggcgaucgacggcgugaccaacaaggucaacuccaucaucgacaagaugaacacccaguucgaggccguggggcgcgaguucaacaaccuggagcggcgcaucgagaaccugaacaagaagauggaggacggcuuccucgacguguggacguacaacgccgagcugcugguccucauggagaacgagcggacccuggacuuccacgacagcaacgugaagaaccuguacgacaagguccgccuccagcugcgggacaacgccaaggagcugggcaacgggugcuucgaguucuaccacaagugcgacaacgagugcauggaguccgugcgcaacggcaccuacgacuacccccaguacagcgaggaggcccggcucaagcgcgaggagaucuccggggugaagcuggagagcaucggcaccuaccagauccuguccaucuacagcacggcggccuccagccucgcccuggccaucauggucgccgggcugucccucuggaugugcagcaacggcagccugcagugccggaucugcaucuga

SEQ ID NO: 71751 - RNA, 1704 nt, Artificial Sequence
  derived and/or modified CDS sequence (opt1) from hemagglutinin__InfluenzaA__AEO89289
auggagaagaucgugcugcuccuggccaucgucagccuggccaaguccgaccagaucugcaucggcuaccacgcgaacaacagcaccgagcaggucgacaccaucauggagaagaacgugacggugacccacgcccaggacauccucgagaagacccacaacgggaagcugugcgaccuggacggcgugaagccccucauccugggggacugcuccguggccggcuggcugcucgggaacccgaugugcgacaaguucaucaacguccccgaguggagcuacaucguggagaaggugaaccccgccaacgaccugugcuaccccggcaacuucaacgacuacgaggagcugaagcaccuccugucccgcaucaaccacuucgagaagaucaagaucauccccaagagcuccuggagcgaccacgaggccuccagcggcgucuccagcgcgugcccguaccaggggacccccuccuucuuccggaacgugguguggcugaucaagaagaacaacacguaccccaccaucaagcgcagcuacaacaacaccaaccaggaggaccuccugauccuguggggcauccaccacuccaacaacgucgccgagcaggagaagcucuaccagaacccgaccacguacaucagcguggggaccuccacccugaaccagcggcuggugcccaagaucgccacccgcagcaaggucaacggccaguccgggcggauggacuucuucuggacgauccucaagcccaacgacaccaucaacuucgagagcaacggcaacuucaucgcccccgaguacgcguacaagaucgugaagaagggcgacagcgccaucaugaaguccgggguggaguacggcaacugcaacaccaagugccagaccccgaucggggccaucaacagcuccaugcccuuccacaacauccacccccugacgaucggcgagugccccaaguacgucaagagcaacaagcuggugcucgccaccggccugcgcaacuccccgcugcgggagcgccggcgcaagcggggccucuucggggccaucgcgggguucaucgagggcggguggcagggcaugguggacggcugguacggguaccaccacagcaacgagcagggcuccggguacgccgccgacaaggagagcacccagaaggccaucgacggcgucaccaacaaggugaacuccaucaucgacaagaugaacacgcaguucgaggccguggggcgcgaguucaacaaccuggagcggcgcaucgagaaccugaacaagaagauggaggacggcuuccucgacgucuggaccuacaacgcggagcugcuggugcucauggagaacgagcggacccuggacuuccacgacagcaacgucaagaaccuguacgacaaggugcgccuccagcugcgggacaacgccaaggagcugggcaacgggugcuucgaguucuaccacaagugcgacaacgagugcauggaguccgugcgcaacggcaccuacgacuacccccgguacagcgaggaggcccgccucaagcgggaggagaucuccggggucaagcuggagagcaucggcacguaccagauccuguccaucuacagcaccgccgccuccagccucgcgcuggccaucaugguggccgggcugucccucuggaugugcagcaacggcagccugcagugccgcaucugcaucuga

SEQ ID NO: 71752 - RNA, 1704 nt, Artificial Sequence
  derived and/or modified CDS sequence (opt1) from hemagglutinin__InfluenzaA__AEO89300
auggagaagaucgugcugcuccuggccaucgucagccuggugaaguccgaccagaucugcaucggcuaccacgccaacaacagcaccgagcaggucgacaccaucauggagaagaacgugacggugacccacgcgcaggacauccucgagaagacccacaacgggaagcugugcgaccuggacggcgugaagccccucauccugcgcgacugcuccgucgccggguggcugcucggcaacccgaugugcgacgaguucaucaacgugcccgaguggagcuacaucguggagaaggccaaccccgccaacgaccugugcuaccccgggaacuucaacgacuacgaggagcugaagcaccuccugucccggaucaaccacuucgagaagauccagaucauccccaagagcuccuggagcgaccacgaggccuccagcggcgucuccagcgcgugcccguaccagggcacccccuccuucuuccgcaacgugguguggcugaucaagaagaacaacacguaccccaccaucaagcggagcuacaacaacaccaaccaggagaaccuccugauccugugggggauccaccacuccaacgacgccgccgagcagaucaagcucuaccagcacccgaccacguacaucagcgucggcaccuccacccugaaccagcgccuggugcccaagaucgccacccggagcaaggugaacgggcaguccggccgcauggacuucuucuggacgauccucaagcccaacgacgcgaucaacuucgagagcaacgggaacuucaucgcccccgaguacgccuacaagaucgucaaggagggcgacagcgccaucaugaaguccgagguggaguacggcaacugcaacaccaagugccagaccccgaucggggccaucaacagcuccaugcccuuccacaacauccacccccugaccaucggcgagugccccaaguacgucaagagcaacaagcuggugcucgcgacggggcugcggaacuccccgcugcgcgagcggcgccggaagcgcggccucuucggcgccaucgccggguucaucgagggcggguggcagggcaugguggacgggugguacggcuaccaccacagcaacgagcagggcuccggguacgccgccgacaaggagagcacccagaaggcgaucgacggcgugaccaacaaggucaacuccaucaucgacaagaugaacacccaguucgaggccguggggcgggaguucaacaaccuggagcgccggaucgagaaccugaacaagaagauggaggacggcuuccucgacguguggacguacaacgccgagcugcugguccucauggagaacgagcgcacccuggacuuccacgacagcaacgugaagaaccuguacgacaagguccggcuccagcugcgcgacaacgccaaggagcuggggaacggcugcuucgaguucuaccacaagugcgacaacgagugcauggaguccgugcggaacggcaccuacgacuacccccaguacagcgaggaggcccgccucaagcgggaggagaucaacggggugaagcuggaguccaugggcaccuaccagauccugagcaucuacuccacggucgcgagcucccucgcccuggccaucaugguggccgggcugagcuucuggaugugcuccaacggcagccuccagugccgcaucugcaucuga

SEQ ID NO: 71753 - RNA, 1704 nt, Artificial Sequence
  derived and/or modified CDS sequence (opt1) from hemagglutinin__InfluenzaA__AEO89311
auggagaagaucgugcugcuguucgccaucgucagccuggugaaguccgaccacaucugcaucggcuaccacgccaacaacagcaccgagcaggucgacaccaucauggagaagaacgugacggugacccacgcgcaggacauccuggagaagacccacaacgggaagcucugcgaccugaacggcgugaagccccugauccucaaggacugcuccgucgccggguggcugcugggcaacccgaugugcgacgaguucaucaacgugcccgaguggagcuacaucguggagaaggccaaccccgccaacgaccucugcuaccccgggaacuucaacgacuacgaggagcugaagcaccuccucucccgcaucaaccacuucgagaagauccagaucaucccgaaggacagcugguccgaccacgaggccagccugggcgucuccgcggccugccccuaccagggcaacagcuccuucuuccggaacgugguguggcugaucaagaaggacaacgccuaccccaccaucaagaaguccuacaacaacacgaaccaggaggaccuccugauccugugggggauccaccaccccaacgacgaggccgagcagacccgccucuaccagaacccgaccaccuacaucagcaucggcacgagcacccugaaccagcggcugguccccaagaucgcgacccgcuccaaggugaacgggcagagcggccggaucgacuucuucuggaccauccucaagcccaacgacgccauccacuucgaguccaacgggaacuucaucgcccccgaguacgccuacaagaucgugaagaagggcgacagcacgaucaugaaguccgaggucgaguacggcaacugcaacacccgcugccagaccccgaugggggccaucaacagcagcaugcccuuccacaacauccacccccugaccaucggcgagugccccaaguacgugaaguccacgaagcuggugcucgcgaccgggcugcggaacagcccgcagcgcgagcggcgccggaagcgcggccuguucggcgccaucgccggguucaucgagggcggguggcagggcauggucgacgggugguacggcuaccaccacuccaacgagcagggcagcggguacgccgccgacaaggaguccacccagaaggcgaucgacggcgugaccaacaaggugaacagcaucaucgacaagaugaacacgcaguucgaggccgucgggcgggaguucaacaagcucgagcgccggaucgagaaccugaacaagaagauggaggacggcuuccuggacguguggaccuacaacgccgagcuccuggugcugauggagaacgagcgcacccucgacuuccacgacuccaacgucaagaaccuguacgacaaggugcggcugcagcuccgcgacaacgccaaggagcuggggaacggcugcuucgaguucuaccacaagugcaacaacgagugcauggagagcguccggaacggcaccuacgacuacccccaguacuccgaggaggcccgccugaagcgggaggagaucagcggggugaagcucgaguccaucggcaucuaccagauccugagcaucuacuccacgguggcgagcucccugguccucgccaucaugauggccgggcugagccuguggaugugcuccaacggcagccuccagugccgcaucugcaucuga

SEQ ID NO: 71754 - RNA, 1701 nt, Artificial Sequence; identical to SEQ ID NO: 65952
  derived and/or modified CDS sequence (opt1) from hemagglutinin__InfluenzaA__AEO99215

SEQ ID NO: 71755 - RNA, 1698 nt, Artificial Sequence
  derived and/or modified CDS sequence (opt1) from hemagglutinin__InfluenzaA__AEQ38187
augaaggugaagcugcucguccugcugugcaccuucaccgccacguacgccgacaccaucugcaucggcuaccacgcgaacaacagcaccgacaccguggacacggugcucgagaagaacgucaccgugacccacuccgugaaccugcuggagaacagccacaacgggaagcucugccugcugaagggcaucgcgccccuccagcuggggaacugcuccgucgccggcuggauccuggggaacccggagugcgagcuccugaucagcaaggaguccuggagcuacaucguggagaagcccaaccccgagaacgggaccugcuaccccggccacuucgccgacuacgaggagcugcgcgagcagcucuccagcguguccagcuucgagcgguucgagaucuucccgaaggaguccagcuggcccaaccacacggucaccggggccuccgccagcugcucccacaacggcgagaacagcuucuaccgcaaccugcuguggcucaccgggaagaacggccuguaccccaaccuguccaagagcuacgccaacaacaaggagaaggaggugcucgugcuguggggcguccaccacccgcccaacaucgccgaccagaagacccuguaccacacggagaacgccuacguguccguggucagcagccacuacucccggaaguucacccccgagaucgcgaagcgccccaaggugcgggaccaggagggccgcaucaacuacuacuggacccuccuggagcccggcgacaccaucaucuucgaggccaacgggaaccugaucgccccgcgguacgccuucgcccucagccgcggcuucggguccggcaucaucaacagcaacgcgcccauggacaagugcgacgccaagugccagacgccccagggcgccaucaacuccagccugcccuuccagaacgugcacccggucaccaucggggagugccccaaguacgugcgguccgccaagcugcgcauggugaccggccuccggaacauccccagcauccagucccgcgggcuguucggcgccaucgcgggguucaucgagggcggcuggaccgggauggucgacggcugguacggguaccaccaccagaacgagcagggcagcggguacgccgccgaccagaaguccacgcagaacgccaucaacggcaucaccaacaaggugaacagcgugaucgagaagaugaacacccaguucaccgccgucggcaaggaguucaacaagcuggagcggcgcauggagaaccucaacaagaagguggacgacggguucaucgacaucuggacguacaacgcggagcugcugguccuccuggagaacgagcggacccuggacuuccacgacuccaacgugaagaaccucuacgagaaggucaagagccagcugaagaacaacgccaaggagaucggcaacgggugcuucgaguucuaccacaagugcaacgacgagugcauggaguccgugaagaacggcaccuacgacuaccccaaguacagcgaggaguccaagcugaaccgcgagaagaucgacggggugaagcucgagagcaugggcguguaccagauccuggccaucuacuccaccgucgccagcagccuggugcuccuggugucccugggcgccaucagcuucuggaugugcuccaacgggagccuccagugccggaucugcaucuga

SEQ ID NO: 71756 - RNA, 1698 nt, Artificial Sequence; identical to SEQ ID NO: 71755
  derived and/or modified CDS sequence (opt1) from hemagglutinin__InfluenzaA__AEQ38188

SEQ ID NO: 71757 - RNA, 1698 nt, Artificial Sequence
  derived and/or modified CDS sequence (opt1) from hemagglutinin__InfluenzaA__AEQ38189
augaaggugaagcugcucguccugcugugcaccuucaccgccacguacgccgacaccaucugcaucggcuaccacgcgaacaacagcaccgacaccguggacacggugcucgagaagaacgucaccgugacccacuccgugaaccugcuggagaacagccacaacgggaagcucugccugcugaagggcaucgcgccccuccagcuggggaacugcuccgucgccggcuggauccuggggaacccggagugcgagcuccugaucagcaaggaguccuggagcuacaucguggagaagcccaaccccgagaacgggaccugcuaccccggccacuucgccgacuacgaggagcugcgcgagcagcucuccagcguguccagcuucgagcgguucgagaucuucccgaaggaguccagcuggcccaaccacacggucaccgggguguccgccagcugcucccacaacggcgagaacagcuucuaccgcaaccugcuguggcucaccgggaagaacggccuguaccccaaccuguccaagagcuacgccaacaacaaggagaaggaggugcucguccuguggggcgugcaccacccgcccaacaucgccaaccagaagacccuguaccacacggagaacgccuacguguccgucgugagcagccacuacucccggaaguucacccccgagaucgccaagcgccccaaggugcgggaccaggagggccgcaucaacuacuacuggacccuccuggagcccggcgacaccaucaucuucgaggcgaacgggaaccugaucgccccgcgguacgccuucgcccucagccgcggcuucggguccggcaucaucaacagcaacgcccccauggacaagugcgacgcgaagugccagacgccccagggcgccaucaacuccagccugcccuuccagaacguccacccggugaccaucggggagugccccaaguacgugcgguccgccaagcugcgcauggucaccggccuccggaacauccccagcauccagucccgcgggcuguucggcgccaucgccggguucaucgagggcggcuggaccgggaugguggacggcugguacggguaccaccaccagaacgagcagggcagcggguacgcggccgaccagaaguccacgcagaacgccaucaacggcaucaccaacaaggugaacagcgucaucgagaagaugaacacccaguucaccgccgugggcaaggaguucaacaagcuggagcggcgcauggagaaccucaacaagaaggucgacgacggguucaucgacaucuggacguacaacgccgagcugcuggugcuccuggagaacgagcggacccuggacuuccacgacuccaacgugaagaaccucuacgagaaggucaagagccagcugaagaacaacgcgaaggagaucggcaacgggugcuucgaguucuaccacaagugcaacgacgagugcauggaguccgugaagaacggcaccuacgacuaccccaaguacagcgaggaguccaagcugaaccgcgagaagaucgacggggugaagcucgagagcaugggcgucuaccagauccuggccaucuacuccaccguggccagcagccuggugcuccuggucucccugggcgccaucagcuucuggaugugcuccaacgggagccuccagugccggaucugcaucuga

SEQ ID NO: 71758 - RNA, 1698 nt, Artificial Sequence
  derived and/or modified CDS sequence (opt1) from hemagglutinin__InfluenzaA__AEQ38190
augaaggugaagcugcucguccugcugugcaccuucaccgccacguacgccgacaccaucugcaucggcuaccacgcgaacaacagcaccgacaccguggacacggugcucgagaagaacgucaccgugacccacuccgugaaccugcuggagaacagccacaacgggaagcucugccugcugaagggcaucgcgccccuccagcuggggaacugcuccgucgccggcuggauccuggggaacccggagugcgagcuccugaucagcaaggaguccuggagcuacaucguggagaagcccaaccccgagaacgggaccugcuaccccggccacuucgccgacuacgaggagcugcgcgagcagcucuccagcguguccagcuucgagcgguucgagaucuucccgaaggaguccagcuggcccaaccacacggucaccgggguguccgccagcugcucccacaacggcgagaacagcuucuaccgcaaccugcuguggcucaccgggaagaacggccuguaccccaaccuguccaagcccuacgccaacaacaaggagaaggaggugcucguccuguggggcgugcaccacccgcccaacaucgccgugcagaagacccuguaccacacggagaacgccuacgucagcgugguguccagccacuacagccggaaguucacccccgagaucgccaagcgccccaagguccgggaccaggagggccgcaucaacuacuacuggacccuccuggagccgggcgacaccaucaucuucgaggcgaacgggaaccugaucgcgccccgguacgccuucgcccucucccgcggcuucgggagcggcaucaucaacuccaacgcccccauggacaagugcgacgccaagugccagacgccccagggcgccaucaacagcucccugccguuccagaacgugcaccccgugaccaucggggagugccccaaguacguccggagcgccaagcugcgcauggugaccggccuccggaacauccccuccauccagagccgcgggcuguucggcgccaucgccggguucaucgagggcggcuggaccgggaugguggacggcugguacggguaccaccaccagaacgagcagggcuccggguacgcggccgaccagaaguccacgcagaacgccaucaacggcaucaccaacaaggucaacagcgugaucgagaagaugaacacccaguucaccgccgucggcaaggaguucaacaagcuggagcggcgcauggagaaccucaacaagaagguggacgacggguucaucgacaucuggacguacaacgccgagcugcuggugcuccuggagaacgagcggacccuggacuuccacgacagcaacgucaagaaccucuacgagaaggugaagucccagcugaagaacaacgcgaaggagaucggcaacgggugcuucgaguucuaccacaagugcaacgacgagugcauggagagcgugaagaacggcaccuacgacuacccgaaguacuccgaggagagcaagcugaaccgcgagaagaucgacggggucaagcucgaguccaugggcguguaccagauccuggccaucuacagcaccguggccuccagccugguccuccuggugagccugggcgccaucuccuucuggaugugcagcaacgggucccuccagugccggaucugcaucuga

SEQ ID NO: 71759 - RNA, 1698 nt, Artificial Sequence; identical to SEQ ID NO: 67650
  derived and/or modified CDS sequence (opt1) from hemagglutinin__InfluenzaA__AEQ38191

SEQ ID NO: 71760 - RNA, 1698 nt, Artificial Sequence
  derived and/or modified CDS sequence (opt1) from hemagglutinin__InfluenzaA__AEQ38192
augaaggugaagcugcucguccugcugugcaccuucaccgccacguacgccgacaccaucugcaucggcuaccacgcgaacaacagcaccgacaccguggacacggugcucgagaagaacgucaccgugacccacuccgugaaccugcuggagaacagccacaacgggaagcucugccugcugaagggcaucgcgccccuccagcuggggaacugcuccgucgccggcuggauccuggggaacccggagugcgagcuccugaucagcaaggaguccuggagcuacaucguggagaagcccaaccccgagaacgggaccugcuaccccggccacuucgccgacuacgaggagcugcgcgagcagcucuccagcguguccagcuucgagcgguucgagaucuucccgaaggaguccagcuggcccaaccacacggucaccgggguguccgccagcugcucccacaacggcgagagcuccuucuaccgcaaccugcuguggcucaccgggaagaacggccuguaccccaaccugagcaaguccuacgccaacaacaaggagaaggaggugcucguccuguggggcgugcaccacccgcccagcaucagcgaccagaagacccuguaccacacggagaacgccuacguguccgucgugagcucccacuacagccggaaguucacccccgagaucaccaagcgccccaaggugcgggaccaggagggccgcaucaacuacuacuggacccuccuggagcccggcgacacgaucaucuucgaggccaacgggaaccugaucgccccgcgguacgcguucgcccucucccgcggcuucgggagcggcaucaucaacuccaacacccccauggacaagugcgacaccaagugccagacgccccagggcgccaucaacagcucccugcccuuccagaacguccacccggugaccaucggggagugccccaaguacgugcggagcgccaagcugcgcauggucaccggccuccggaacauccccuccauccagagccgcgggcuguucggcgccaucgcgggguucaucgagggcggcuggaccgggaugguggacggcugguacggguaccaccaccagaacgagcagggcuccggguacgccgccgaccagaaguccacccagaacgccaucaacggcaucacgaacaaggugaacagcgucaucgagaagaugaacacccaguucaccgccgugggcaaggaguucaacaagcuggagcggcgcauggagaaccucaacaagaaggucgacgacggguucaucgacaucuggaccuacaacgcggagcugcuggugcuccuggagaacgagcggacgcuggacuuccacgacagcaacgugaagaaccucuacgagaaggucaagucccagcugaagaacaacgccaaggagaucggcaacgggugcuucgaguucuaccacaagugcaacgacgagugcauggagagcgugaagaacggcaccuacgacuaccccaaguacuccgaggagagcaagcugaaccgcgagaagaucgacggggugaagcucgagagcaugggcgucuaccagauccuggccaucuacuccaccguggccagcucccuggugcuccuggucagccugggcgccaucuccuucuggaugugcagcaacgggucccuccagugccggaucugcaucuga

SEQ ID NO: 71761 - RNA, 1698 nt, Artificial Sequence
  derived and/or modified CDS sequence (opt1) from hemagglutinin__InfluenzaA__AEQ38193
augaaggugaagcugcucauccugcugugcaccuucaccgccacguacgccgacaccaucugcaucggcuaccacgcgaacaacagcaccgacaccgucgacacggugcucgagaagaacgugaccgucacccacuccgugaaccugcuggagaacagccacaacgggaagcucugccugcugaagggcaucgcgccccuccagcuggggaacugcuccguggccggcuggauccuggggaacccggagugcgagcuccugaucagcaaggaguccuggagcuacaucgucgagaagcccaaccccgagaacgggaccugcuaccccggccacuucgccgacuacgaggagcugcgcgagcagcucuccagcguguccagcuucgagcgguucgagaucuucccgaaggaguccagcuggcccaaccacacggugaccggggucuccgccagcugcucccacaacggcgagagcuccuucuaccgcaaccugcuguggcucaccgggaagaacggccuguaccccaaccugagcaaguccuacgccaacaacaaggagaaggaggugcucgugcuguggggcguccaccacccgcccaacaucguggaccagaagacccuguaccggacggagaacgccuacgugagcgucgugagcucccacuacagccgcaaguucacccccgagaucgccaagcggcccaaggugcgcgaccaggagggccggaucaacuacuacuggacccuccuggagcccggcgacaccaucaucuucgaggccaacgggaaccugaucgcgccgcgcuacgccuucgcccucucccggggcuucgggagcggcaucaucaacuccaacgcccccauggacaagugcgacgccaagugccagacgccccagggcgcgaucaacagcucccugcccuuccagaacguccacccggugaccaucggggagugccccaaguacgugcgcagcgccaagcugcggauggucaccggccuccgcaacauccccuccauccagagccgggggcuguucggcgccaucgccggguucaucgagggcggcuggaccgggaugguggacggcugguacggguaccaccaccagaacgagcagggcuccggguacgccgcggaccagaaguccacgcagaacgccaucaacggcaucaccaacaaggugaacagcgucaucgagaagaugaacacccaguucaccgccgugggcaaggaguucaacaagcuggagcgccggauggagaaccucaacaagaaggucgacgacggguucaucgacaucuggacguacaacgccgagcugcuggugcuccuggagaacgagcgcacccuggacuuccacgacagcaacgugaagaaccucuacgagaaggucaagucccagcugaagaacaacgccaaggagaucggcaacgggugcuucgaguucuaccacaagugcaacgacgagugcauggagagcgugaagaacggcaccuacgacuaccccaaguacuccgaggagagcaagcugaaccgggagaagaucgacggggugaagcucgaguccaugggcgucuaccagauccuggcgaucuacagcaccguggccagcucccuggugcuccuggucagccugggcgccaucuccuucuggaugugcagcaacgggucccuccagugccgcaucugcaucuga

SEQ ID NO: 71762 - RNA, 1698 nt, Artificial Sequence
  derived and/or modified CDS sequence (opt1) from hemagglutinin__InfluenzaA__AEQ38194
augaaggugaagcugcucguccugcugugcaccuucaccgccacguacgccgacaccaucugcaucggcuaccacgcgaacaacagcaccgacaccguggacacggugcucgagaagaacgucaccgugacccacuccgugaaccugcuggagaacagccacaacgggaagcucugccugcugaagggcaucgcgccccuccagcuggggaacugcuccgucgccggcuggauccuggggaacccggagugcgagcuccugaucagcaaggaguccuggagcuacaucguggagaagcccaaccccgagaacgggaccugcuaccccggccacuucgccgacuacgaggagcugcgcgagcagcucuccagcguguccagcuucgagcgguucgagaucuucccgaaggaguccagcuggcccaaccacacggucaccgggguguccgccagcugcucccacaacggcgagagcuccuucuaccgcaaccugcuguggcucaccgggaagaacggccuguaccccaaccugagcaaguccuacgccaacaacaaggagaaggaggugcucguccuguggggcgugcaccacccgcccagcaucagcgaccagaagacccuguaccacacggagaacgccuacguguccgucgugagcucccacuacagccggaaguucacccccgagaucgccaagcgccccaaggugcgggaccaggagggccgcaucaacuacuacuggacccuccuggagcccggcgacaccaucaucuucgaggccuccgggaaccugaucgcgccgcgguacgccuucgcccucagccgcggcuucggguccggcaucaucaacagcaacgcccccauggacaagugcgacgccaagugccagacgccccagggcgcgaucaacuccagccugcccuuccagaacguccacccggugaccaucggggagugccccaaguacgugcgguccgccaagcugcgcauggucaccggccuccggaacauccccagcauccagucccgcgggcuguucggcgccaucgccggguucaucgagggcggcuggaccgggaugguggacggcugguacggguaccaccaccggaacgagcagggcagcggguacgccgcggaccagaaguccacgcagaacgccaucaacggcaucaccaacaaggugaacagcgucaucgagaagaugaacacccaguucaccgccgugggcaaggaguucaacaagcuggagcgccggauggagaaccucaacaagcgcgucgacgacggguucaucgacaucuggacguacaacgccgagcugcuggugcuccuggagaacgagcggacccuggacuuccacgacuccaacgugaagaaccucuacgagaaggucaagagccagcugaagaacaacgccaaggagaucggcaacgggugcuucgaguucuaccacaagugcaacgacgagugcauggaguccgugaagaacggcaccuacgacuaccccaaguacagcgaggagagcaagcugaaccgcgagaagaucgacggggugaagcucgaguccaugggcgucuaccagauccuggcgaucuacagcaccguggccuccagccuggugcuccuggucucccugggcgccaucagcuucuggaugugcuccaacgggagccuccagugccggaucugcaucuga

SEQ ID NO: 71763 - RNA, 1698 nt, Artificial Sequence
  derived and/or modified CDS sequence (opt1) from hemagglutinin__InfluenzaA__AEQ38195
augaaggugaagcugcucguccugcugugcaccuucaccgccacguacgccgacaccaucugcaucggcuaccacgcgaacaacagcaccgacaccguggacacggugcucgagaagaacgucaccgugacccacuccgugaaccugcuggagaacagccacaacgggaagcucugccugcugaagggcaucgcgccccuccagcuggggaacugcuccgucgccggcuggauccuggggaacccggagugcgagcuccugaucagcaaggaguccuggagcuacaucguggagaagcccaaccccgagaacgggaccugcuaccccggccacuucgccgacuacgaggagcugcgcgagcagcucuccagcguguccagcuucgagcgguucgagaucuucccgaaggaguccagcuggcccaaccacacggucaccggggccuccgccagcugcucccacaacggcgagaacagcuucuaccgcaaccugcuguggcucaccgggaagaacggccuguaccccaaccuguccaagagcuacgccaacaacaaggagaaggaggugcucgugcuguggggcguccaccacccgcccaacaucgccaaccagaagacccuguaccacacggagaacgccuacguguccguggucagcagccacuacucccggaaguucacccccgagaucgcgaagcgccccaaggugcgggaccaggagggccgcaucaacuacuacuggacccuccuggagcccggcgacaccaucaucuucgaggccaacgggaaccugaucgccccgcgguacgccuucgcccucagccgcggcuucggguccggcaucaucaacagcaacgcgcccauggacaagugcgacgccaagugccagacgccccagggcgccaucaacuccagccugcccuuccagaacgugcacccggucaccaucggggagugccccaaguacgugcgguccgccaagcugcgcauggugaccggccuccggaacauccccagcauccagucccgcgggcuguucggcgccaucgcgggguucaucgagggcggcuggaccgggauggucgacggcugguacggguaccaccaccagaacgagcagggcagcggguacgccgccgaccagaaguccacgcagaacgccaucaacggcaucaccaacaaggugaacagcgugaucgagaagaugaacacccaguucaccgccaugggcaaggaguucaacaagcuggagcggcgcauggagaaccucaacaagaaggucgacgacggguucaucgacaucuggacguacaacgcggagcugcuggugcuccuggagaacgagcggacccuggacuuccacgacuccaacgucaagaaccucuacgagaaggucaagagccagcugaagaacaacgccaaggagaucggcaacgggugcuucgaguucuaccacaagugcaacgacgagugcauggaguccgugaagaacggcaccuacgacuaccccaaguacagcgaggaguccaagcugaaccgcgagaagaucgacggggugaagcucgagagcaugggcguguaccagauccuggccaucuacuccaccguggccagcagccugguccuccuggugucccugggcgccaucagcuucuggaugugcuccaacgggagccuccagugccggaucugcaucuga

SEQ ID NO: 71764 - RNA, 1698 nt, Artificial Sequence
  derived and/or modified CDS sequence (opt1) from hemagglutinin__InfluenzaA__AEQ38196
augaaggugaagcugcucguccugcugugcaccuucaccgccacguacgccgacaccaucugcaucggcuaccacgcgaacaacagcaccgacaccguggacacggugcucgagaagaacgucaccgugacccacuccgugaaccugcuggagaacagccacaacgggaagcucugccugcugaagggcaucgcgccccuccagcuggggaacugcuccgucgccggcuggauccuggggaacccggagugcgagcuccugaucagcaaggaguccuggagcuacaucguggagaagcccaaccccgagaacgggaccugcuaccccggccacuucgccgacuacgaggagcugcgcgagcagcucuccagcguguccagcuucgagcgguucgagaucuucccgaaggaguccagcuggcccaaccacacggucaccggggccuccgccagcugcucccacaacggcgagaacagcuucuaccgcaaccugcuguggcucaccgggaagaacggccuguaccccaaccuguccaagagcuacgccaacaacaaggagaaggaggugcucgugcuguggggcguccaccacccgcccaacaucgccgaccagaagacccuguaccacacggagaacgccuacguguccguggucagcagccacuacucccggaaguucacccccgagaucgcgaagcgccccaaggugcgggaccaggagggccgcaucaacuacuacuggacccuccuggagcccggcgacaccaucaucuucgaggccaacgggaaccugaucgccccgcgguacgccuucgcccucagccgcggcuucggguccggcaucaucaacagcaacgcgcccauggacaagugcgacgccaagugccagacgccccagggcgccaucaacuccagccugcccuuccagaacgugcacccggucaccaucggggagugccccaaguacgugcgguccgccaagcugcgcauggugaccggccuccggaacauccccagcauccagucccgcgggcuguucggcgccaucgcgggguucaucgagggcggcuggaccgggauggucgacggcugguacggguaccaccaccagaacgagcagggcagcggguacgccgccgaccagaaguccacgcagaacgccaucaacggcaucaccaacaaggugaacagcgugaucgagaagaugaacacccaguucaccgccgucggcaaggaguucaacaagcuggagcggcgcauggagaaccucaacaagaagguggacgacggguucaucgacaucuggacguacaacgcggagcugcugguccuccuggagaacgagcggacccuggacuuccacgacuccaacgugaagaaccucuacgagaaggucaagagccagcugaagaacaacgccaaggagaucggcaacgggugcuucgaguucuaccacaagugcaacgacgagugcauggaguccgugaagaacggcaccuacgaguaccccaaguacagcgaggaguccaagcugaaccgcgagaagaucgacggggugaagcucgagagcaugggcguguaccagauccuggccaucuacuccaccgucgccagcagccuggugcuccuggugucccugggcgccaucagcuucuggaugugcuccaacgggagccuccagugccggaucugcaucuga

SEQ ID NO: 71765 - RNA, 1698 nt, Artificial Sequence; identical to SEQ ID NO: 71755
  derived and/or modified CDS sequence (opt1) from hemagglutinin__InfluenzaA__AEQ38197

SEQ ID NO: 71766 - RNA, 1698 nt, Artificial Sequence; identical to SEQ ID NO: 71755
  derived and/or modified CDS sequence (opt1) from hemagglutinin__InfluenzaA__AEQ38198

SEQ ID NO: 71767 - RNA, 1701 nt, Artificial Sequence; identical to SEQ ID NO: 71074
  derived and/or modified CDS sequence (opt1) from hemagglutinin__InfluenzaA__AEQ62909

SEQ ID NO: 71768 - RNA, 1701 nt, Artificial Sequence
  derived and/or modified CDS sequence (opt1) from hemagglutinin__InfluenzaA__AEQ62910
augaaggccauccugguggucaugcucuacaccuucgccaccgcgaacgccgacacgcugugcaucggcuaccacgccaacaacagcaccgacaccguggacaccgugcuggagaagaacgucacggugacccacuccgugaaccuccuggaggacaagcacaacgggaagcugugcaagcuccgcggcgucgcgccccugcaccuggggaagugcaacaucgccggcuggauccucgggaacccggagugcgagagccuguccaccgccagcuccuggagcuacaucguggagaccgccucccccgacaacggcacgugcuaccccggcgacuucaucgacuacgaggagcugcgggagcagcucagcuccgugagcuccuucgagcgcuucgagaucuuccccaagaccagcuccuggccgaaccacgacagcaacaagggggucaccgccgccugcccccacgcgggcgccaaguccuucuacaagaaccugauguggcuggugaagaaggggaacagcuaccccaagcucuccaagagcuacaucaacgacaagggcaaggaggugcugguccugugggggauccaccacccgcccaccuccgccgaccagcagagccucuaccagaacgccgacgccuacguguucgugggcacgagccgguacuccaagaaguucaagcccgagaucgcgauccgccccaagguccggggccaggaggggcgcaugaacuacuacuggacccugguggagcccggcgacaagaucaccuucgaggccaccgggaaccugguggucccgcgguacgccuucgccauggagcgcaacgccggcagcggcaucaucaucuccgacacgcccgugcacgacugcaacacgaccugccagagccccaagggggcgaucaacaccucccuccccuuccagaacauccacccgaucaccaucggcgagugccccaaguacgucaagagcaccaagcugcggcuggccaccgggcuccgcaacgugcccuccgugcagagccggggccuguucggggccaucgccggcuucaucgagggcggguggaccggcaugguggacgggugguacggcuaccaccaccagaacgagcagggguccggcuacgccgcggaccucaagagcacgcagaacgccaucgacgagaucaccaacaaggucaacuccgugaucgagaagaugaacacccaguucaccgccgucggcaaggaguucaaccagcuggagaagcgcaucgagaaccugaacaagaagguggacgacggguuccuggacaucuggacguacaacgccgagcuccuggugcugcucgagaacgagcggacccuggacuaccacgacagcaacgucaagaaccuguacgagaaggugcgcucccagcucaagaacaacgccaaggagaucggcaacgggugcuucgaguucuaccacaagugcgacaacacgugcauggagagcgugaagaacggcaccuacgacuaccccaaguacuccgaggaggcgaagcugaaccgggaggagaucgacggggucaagcuggagagcacccgcaucuaccagauccucgccaucuacuccaccguggccagcucccuggugcuggucgugagccucggcgccaucagcuucuggaugugcuccaacggcagccugcagugccggaucugcaucuga

SEQ ID NO: 71769 - RNA, 1701 nt, Artificial Sequence; identical to SEQ ID NO: 70891
  derived and/or modified CDS sequence (opt1) from hemagglutinin__InfluenzaA__AEQ62911

SEQ ID NO: 71770 - RNA, 1701 nt, Artificial Sequence; identical to SEQ ID NO: 71074
  derived and/or modified CDS sequence (opt1) from hemagglutinin__InfluenzaA__AEQ62912

SEQ ID NO: 71771 - RNA, 1701 nt, Artificial Sequence
  derived and/or modified CDS sequence (opt1) from hemagglutinin__InfluenzaA__AEQ62915
augaaggccauccuggugguccuccuguacaccuucgccaccgcgaacgccgacacgcugugcaucggcuaccacgccaacaacagcaccgacaccguggacaccgugcucgagaagaacgucacggugacccacuccgugaaccugcuggaggacaagcacaacgggaagcucugcaagcugcgcggcgucgcgccccugcaccucgggaagugcaacaucgccggcuggauccuggggaacccggagugcgagagccuguccaccgccagcuccuggagcuacaucguggagaccuccagcuccgacaacggcacgugcuaccccggcgacuucaucaacuacgaggagcuccgggagcagcugagcuccgugagcuccuucgagcgcuucgagaucuuccccaagaccagcuccuggcccaaccacgacagcaacaagggggucaccgccgccugcccgcacgccggcgcgaaguccuucuacaagaaccugaucuggcucgugaagaaggggaacagcuaccccaagcuguccaagagcuacaucaacgacaagggcaaggaggugcugguccucugggggauccaccaccccagcaccacggccgaccagcagucccuguaccagaacgccgacgccuacguguucgugggcaccagccgguacuccaagaaguucaagcccgagaucgccauccgcccgaagguccgggaccaggagggccgcaugaacuacuacuggacccugguggagcccggggacaagaucaccuucgaggcgacgggcaaccucguggucccccgguacgccuucgccauggagcgcaacgccgggagcggcaucaucaucuccgacacccccgugcacgacugcaacacgaccugccagaccccgaagggcgccaucaacaccagccugcccuuccagaacauccaccccaucaccaucgggaagugccccaaguacgugaaguccaccaagcugcggcucgcgacgggccugcgcaacgucccgagcauccagucccgggggcuguucggcgccaucgccggguucaucgagggcggcuggaccgggaugguggacggcugguacggguaccaccaccagaacgagcagggcagcggguacgccgccgaccucaaguccacccagaacgcgaucgacaagaucaccaacaaggugaacagcgucaucgagaagaugaacacgcaguucaccgccgugggcaaggaguucaaccaccuggagaagcgcaucgagaaccugaacaagaaggucgacgacggcuuccucgacaucuggaccuacaacgccgagcugcuggugcuccuggagaacgagcggacccuggacuaccacgacuccaacgugaagaaccucuacgagaagguccgcaaccagcugaagacgaacgccaaggagaucgggaacggcugcuucgaguucuaccacaagugcgacaacacgugcauggagagcgugaagaacgggaccuacgacuaccccaaguacuccgaggaggccaagcugaaccgggaggagaucgacggcgugaagcucgagagcacccgcaucuaccagauccuggcgaucuacuccaccgucgccagcucccuggugcucguggucagccugggggccaucagcuucuggaugugcuccaacggcagccugcagugccggaucugcaucuga

SEQ ID NO: 71772 - RNA, 1701 nt, Artificial Sequence; identical to SEQ ID NO: 67435
  derived and/or modified CDS sequence (opt1) from hemagglutinin__InfluenzaA__AER08646

SEQ ID NO: 71773 - RNA, 1701 nt, Artificial Sequence; identical to SEQ ID NO: 69443
  derived and/or modified CDS sequence (opt1) from hemagglutinin__InfluenzaA__AER08648

SEQ ID NO: 71774 - RNA, 1701 nt, Artificial Sequence
  derived and/or modified CDS sequence (opt1) from hemagglutinin__InfluenzaA__AER08652
augaagaccaucaucgcccugagcuacauccucugccugguguucgcccagaagcugcccggcaacgacaacuccaccgcgacgcucugccuggggcaccacgccgucccgaacggcaccaucgugaagaccaucaccaacgaccagaucgaggugacgaacgccaccgagcugguccagagcuccagcaccggggagaucugcgacagcccccaccagauccucgacggcaagaacugcacccugaucgacgcccugcucggggacccccagugcgacggcuuccagaacaagaagugggaccuguucguggagcgcagcaaggccuacuccaacugcuaccccuacgacgugccggacuacgcgagccugcggucccucgucgccagcuccggcacgcuggaguucaacaacgagagcuucaacuggaccggggugacccagaacggcaccuccagcgccugcauccgccgguccaagaacagcuucuucucccgccugaacuggcucacgcaccugaacuucaaguaccccgcccugaacgugaccaugcccaacaacgagcaguucgacaagcucuacaucuggggcguccaccaccccgggaccgacaaggaccagaucuuccuguacgcgcaggccagcgggcggaucaccguguccacgaagcgcagccagcagaccgccaucccgaacaucggcagccggccccgcgugcggaacauccccucccgcaucagcaucuacuggaccaucgucaagcccggcgacauccugcucaucaacuccaccgggaaccugaucgccccgcggggcuacuucaagauccgcagcgggaaguccagcaucaugcgguccgacgcccccaucggcaagugcaacagcgagugcaucacgcccaacggcuccauccccagcgacaagccguuccagaacgugaaccgcaucaccuacggggcgugcccccgguacgugaagcagaacacccugaagcucgccaccggcaugcgcaacguccccgagaagcagacgcgggggaucuucggcgccaucgccggguucaucgagaacggcugggagggcaugguggacgggugguacggcuuccgccaccagaacuccgaggggcggggccaggccgcggaccugaaguccacccaggccgccaucgaccagaucaacgggaagcugaaccgccucaucggcaagaccaacgagaaguuccaccagaucgagaaggaguucuccgagguggagggccggauccaggaccuggagaaguacgucgaggacaccaagaucgaccuguggagcuacaacgccgagcuccugguggcccuggagaaccagcacacgaucgaccucaccgacuccgagaugaacaagcuguucgagaagaccaagaagcagcugcgcgagaacgcggaggacauggggaacggcugcuucaagaucuaccacaagugcgacaacgccugcaucgggagcauccgcaacggcaccuacgaccacgacguguaccgggacgaggcccucaacaaccgcuuccagaucaagggggucgagcugaaguccggcuacaaggacuggauccuguggaucagcuucgccaucuccugcuuccuccugugcguggcccugcucggcuucaucaugugggcgugccagaaggggaacauccggugcaacaucugcaucuga

SEQ ID NO: 71775 - RNA, 1701 nt, Artificial Sequence; identical to SEQ ID NO: 71774
  derived and/or modified CDS sequence (opt1) from hemagglutinin__InfluenzaA__AER08654

SEQ ID NO: 71776 - RNA, 1701 nt, Artificial Sequence
  derived and/or modified CDS sequence (opt1) from hemagglutinin__InfluenzaA__AER08656
augaagaccaucaucgcccugagcuacauccucugccugguguucgcccagaagcugcccggcaacgacaacuccaccgcgacgcucugccuggggcaccacgccgucccgaacggcaccaucgugaagaccaucaccaacgaccagaucgaggugacgaacgccaccgagcugguccagagcuccagcaccggggagaucugcgacagcccccaccagauccucgacggcaagaacugcacccugaucgacgcccugcucggggacccccagugcgacggcuuccagaacaagaagugggaccuguucguggagcgcagcaaggccuacuccaacugcuaccccuacgacgugccggacuacgcgagccugcggucccucgucgccagcuccggcacgcuggaguucaacaacgagagcuucaacuggaccggggugacccagaacggcaccuccagcgccugcauccgccgguccaagaacagcuucuucucccgccugaacuggcucacgcaccugaacuucaaguaccccgcccugaacgugaccaugcccaacaacgagcaguucgacaagcucuacaucuggggcguccaccaccccgggaccgacaaggaccagaucuuccuguacgcgcaggccagcgggcggaucaccguguccacgaagcgcagccagcagaccgugaucccgaacaucggcagccggccccgcguccggaacauccccucccgcaucagcaucuacuggaccaucgugaagcccggcgacauccugcucaucaacuccaccgggaaccugaucgccccgcggggcuacuucaagaugcagagcgggaaguccagcaucaugcgcuccgacgcccccaucggcaagugcaacagcgagugcaucacgcccaacggcuccauccccaacgacaagccguuccagaacgugaaccggaucaccuacggggccugcccccgcuacgucaagcagaacacccugaagcucgcgaccggcaugcggaacgugcccgagaagcagacgcgcgggaucuucggcgccaucgccggguucaucgagaacggcugggagggcaugguggacgggugguacggcuuccggcaccagaacagcgaggggcgcggccaggccgccgaccugaaguccacccaggcggccaucgaccagaucaacgggaagcugaaccggcucaucggcaagaccaacgagaaguuccaccagaucgagaaggaguucagcgaggucgagggccgcauccaggaccuggagaaguacguggaggacaccaagaucgaccugugguccuacaacgccgagcuccugguggcccuggagaaccagcacacgaucgaccucaccgacagcgagaugaacaagcuguucgagaagaccaagaagcagcugcgggagaacgccgaggacauggggaacggcugcuucaagaucuaccacaagugcgacaacgcgugcaucggguccauccgcaacggcaccuacgaccacgacgucuaccgcgacgaggcccucaacaaccgguuccagaucaaggggguggagcugaaguccggcuacaaggacuggauccuguggaucuccuucgccaucagcugcuuccuccugugcguggcccugcucggcuucaucaugugggccugccagaaggggaacauccgcugcaacaucugcaucuga

SEQ ID NO: 71777 - RNA, 1701 nt, Artificial Sequence
  derived and/or modified CDS sequence (opt1) from hemagglutinin__InfluenzaA__AER08660
augaagaccaucaucgcccugagcuacauccucugccugguguucgcccagaagcugcccggcaacgacaacuccaccgcgacgcucugccuggggcaccacgccgucccgaacggcaccaucgugaagaccaucaccaacgaccagaucgaggugacgaacgccaccgagcugguccagagcuccagcaccggggagaucugcaacagcccccaccagauccucgacggcgagaacugcacccugaucgacgcccugcucggggacccccagugcgacggcuuccagaacaagaagugggaccuguucguggagcgcagcaaggccuacuccaacugcuaccccuacgacgugccggacuacgcgagccugcggucccucgucgccagcuccggcacgcuggaguucaacaacgagagcuucaacuggaccggggugacccagaacggcaccuccagcgccugcauccgccgguccaacaacagcuucuucucccgccugaacuggcucacgcaccugaacuucaaguaccccgcccugaacgugaccaugcccaacaacgagcaguucgacaagcucuacaucuggggcguccaccaccccgggaccgacaaggaccagaucuuccuguacgcgcaggccagcgggcggaucaccguguccacgaagcgcagccagcaggccgugaucccgaacaucggcagccggccccgcguccggaacauccccucccgcaucagcaucuacuggaccaucgugaagcccggcgacauccugcucaucaacuccaccgggaaccugaucgccccgcggggcuacuucaagauccgcagcgggaaguccagcaucaugcgguccgacgcccccaucggcaagugcaacagcgcgugcaucacccccaacggcuccauccccaacgacaagccguuccagaacgugaaccgcaucacguacggggccugcccccgguacgucaagcagaacacccugaagcucgccaccggcaugcgcaacgugcccgagaagcagacccgggggaucuucggcgccaucgccggguucaucgagaacggcugggagggcaugguggacgggugguacggcuuccgccaccagaacagcgaggggcggggccaggcggccgaccugaaguccacgcaggccgccaucgaccagaucaacgggaagcugaaccgccucaucggcaagaccaacgagaaguuccaccagaucgagaaggaguucagcgaggucgagggccggauccaggaccuggagaaguacguggaggacaccaagaucgaccugugguccuacaacgccgagcuccugguggcgcuggagaaccagcacaccaucgaccucacggacagcgagaugaacaagcuguucgagaagaccaagaagcagcugcgcgagaacgccgaggacauggggaacggcugcuucaagaucuaccacaagugcgacaacgccugcaucggguccauccgcaacggcaccuacgaccacgacgucuaccgggacgaggcccucaacaaccgcuuccagaucaaggggguggagcugaaguccggcuacaaggacuggauccuguggaucuccuucgccaucagcugcuuccuccugugcguggcgcugcucggcuucaucaugugggccugccagaaggggaacauccggugcaacaucugcaucuga

SEQ ID NO: 71778 - RNA, 1701 nt, Artificial Sequence
  derived and/or modified CDS sequence (opt1) from hemagglutinin__InfluenzaA__AER08664
augaagaccaucaucgcccugagcuacauccucugccugguguucgcccagaagcugcccggcaacgacaacuccaccgcgacgcucugccuggggcaccacgccgucccgaacggcaccaucgugaagaccaucaccaacgaccagaucgaggugacgaacgccaccgagcugguccagagcuccagcaccggggagaucugcgacagcccccaccagauccucgacggcgagaacugcacccugaucgacgcccugcucggggacccccagugcgacggcuuccagaacaagaagugggaccuguucguggagcgcagcaaggccuacuccaacugcuaccccuacgacgugccggacuacgcgagccugcggucccucgucgccagcuccggcacgcuggaguucaacagcgaguccuucaacuggaccggggugacccagaacggcaccagcuccgccugcauccgccggagcaacaacuccuucuucagccgccugaacuggcucacgcaccugaacuucaaguaccccgcccugaacgugaccaugcccaacaacgagcaguucgacaagcucuacaucuggggcguccaccaccccgggaccgacaaggaccagaucuuccuguacgcgcaggccuccgggcggaucaccgugagcacgaagcgcagccagcaggccgugaucccgaacaucggcucccggccccgcguccggaacauccccagccgcaucuccaucuacuggaccaucgugaagcccggcgacauccugcucaucaacagcaccgggaaccugaucgccccgcggggcuacuucaagauccgcuccgggaaguccuccaucaugcggagcgacgcccccaucggcaagugcaacuccgagugcaucacccccaacggcagcauccccaacgacaagccguuccagaacgugaaccgcaucacguacggggcgugcccccgguacgucaagcaguccacccugaagcucgccaccggcaugcgcaacgugcccgagaagcagacccgggggaucuucggcgccaucgccggguucaucgagaacggcugggagggcaugguggacgggugguacggcuuccgccaccagaacagcgaggggcggggccaggccgcggaccugaaguccacgcaggccgccaucgaccagaucaacgggaagcugaaccgccucaucggcaagaccaacgagaaguuccaccagaucgagaaggaguucagcgaggucgagggccggauccaggaccuggagaaguacguggaggacaccaagaucgaccugugguccuacaacgccgagcuccugguggcccuggagaaccagcacaccaucgaccucacggacagcgagaugaacaagcuguucgagaagaccaagaagcagcugcgcgagaacgcggaggacauggggaacggcugcuucaagaucuaccacaagugcgacaacgccugcaucggguccauccgcaacggcaccuacgaccacgacgucuaccgggacgaggcccucaacaaccgcuuccagaucaaggggguggagcucaagagcggcuacaaggacuggauccuguggaucuccuucgccaucagcugcuuccugcugugcguggcccugcucggcuucaucaugugggcgugccagaaggggaacauccggugcaacaucugcaucuga

SEQ ID NO: 71779 - RNA, 1701 nt, Artificial Sequence; identical to SEQ ID NO: 71006
  derived and/or modified CDS sequence (opt1) from hemagglutinin__InfluenzaA__AER08668

SEQ ID NO: 71780 - RNA, 1701 nt, Artificial Sequence
  derived and/or modified CDS sequence (opt1) from hemagglutinin__InfluenzaA__AER08670
augaagaccaucaucgcccugagcuacauccucugccugguguucgcccagaagcugcccggcaacgacaacuccaccgcgacgcucugccuggggcaccacgccgucccgaacggcaccaucgugaagaccaucaccaacgaccagaucgaggugacgaacgccaccgagcugguccagagcuccagcaccggggagaucugcaacagcccccaccagauccucgacggcgagaacugcacccugaucgacgcccugcucggggacccccagugcgacggcuuccagaacaagaagugggaccuguucguggagcgcagcaaggcccacuccaacugcuaccccuacgacgugccggacuacgcgagccugcggucccucgucgccagcuccggcacgcuggaguucaacaacgagagcuucaacuggaccggggugacccagaacggcaccuccagcgccugcauccgccgguccaacaacagcuucuucucccgccugaacuggcucacgcaccugaacuucaaguaccccgcccugaacgugaccaugcccaacaacgagcaguucgacaagcucuacaucuggggcguccaccaccccgggaccgacaaggaccagaucuuccuguacgcgcaggccagcgggcggaucaccguguccacgaagcgcagccagcaggccgugaucccgaacaucggcagccggccccgcguccggaacauccccucccgcgugagcaucuacuggaccaucgugaagcccggcgacauccugcucaucaacuccaccgggaaccugaucgccccgcggggcuacuucaagauccgcagcgggaaguccagcaucaugaaguccgacgcccccaucggcaagugcaacagcgcgugcaucacccccaacggcuccauccccaacgacaagccguuccagaacgucaaccggaucacguacggggccugcccccgcuacgugaagcagaacacccugaagcucgccaccggcaugcggaacgugcccgagaagcagacccgcgggaucuucggcgccaucgccggguucaucgagaacggcugggagggcauggucgacgggugguacggcuuccggcaccagaacagcgaggggcgcggccaggcggccgaccugaaguccacgcaggccgccaucgaccagaucaacgggaagcugaaccggcucaucggcaagaccaacgagaaguuccaccagaucgagaaggaguucagcgagguggagggccgcauccaggaccuggagaaguacguggaggacaccaagaucgaccugugguccuacaacgccgagcuccuggucgcgcuggagaaccagcacaccaucgaccucacggacagcgagaugaacaagcuguucgagaagaccaagaagcagcugcgggagaacgccgaggacauggggaacggcugcuucaagaucuaccacaagugcgacaacgccugcaucggguccauccgcaacggcaccuacgaccacgacguguaccgcgacgaggcccucaacaaccgguuccagaucaaggggguggagcugaaguccggcuacaaggacuggauccuguggaucuccuucgccaucagcugcuuccuccugugcgucgcgcugcucggcuucaucaugugggccugccagaaggggaacauccgcugcaacaucugcaucuga

SEQ ID NO: 71781 - RNA, 1701 nt, Artificial Sequence
  derived and/or modified CDS sequence (opt1) from hemagglutinin__InfluenzaA__AER08672
augaagaccaucaucgcccugagcuacauccucugccugguguucgcccagaagcugcccggcaacgacaacuccaccgcgacgcucugccuggggcaccacgccgucccgaacggcaccaucgugaagaccaucaccaacgaccagaucgaggugacgaacgccaccgagcugguccagagcuccagcaccgggggcaucugcgacagcccccaccagauccucgacgggggcaacugcacccugaucgacgcccugcucggcgacccccagugcgacggguuccagaacaagaagugggaccuguucguggagcgcagcaaggccuacuccaacugcuaccccuacgacgugccggacuacgcgagccugcggucccucgucgccagcuccggcacgcuggaguucaacagcgaguccuucaacuggaccggggugacccagaacggcaccagcuccgccugcauccgccggagcaacaacuccuucuucagccgccugaacuggcucacgcaccugaacuucaaguaccccgcccugaacgugaccaugcccaacaacgagcaguucgacaagcucuacaucuggggcguccaccaccccgggaccgacaaggaccagaucuuccuguacgcgcaggccuccggccggaucaccgugagcacgaagcgcagccagcaggccgugaucccgaacaucgggucccggccccgcguccggaacauccccagccgcaucuccaucuacuggaccaucgugaagcccggcgacauccugcucaucaacagcaccgggaaccugaucgccccgcggggcuacuucaagauccgcuccggcaagagcuccaucaugcggagcgacgcccccaucgggaagugcaacuccgagugcaucacccccaacggcagcauccccaacgacaagccguuccagaacgugaaccgcaucacguacggggcgugcccccgguacgucaagcaguccacccugaagcucgccaccggcaugcgcaacgugcccgagaagcagacccgggggaucuucggcgccaucgccggcuucaucgagaacgggugggagggcaugguggacgggugguacggcuuccgccaccagaacagcgaggggcggggccaggccgcggaccugaaguccacgcaggccgccaucgaccagaucaacggcaagcugaaccgccucaucgggaagaccaacgagaaguuccaccagaucgagaaggaguucagcgaggucgagggccggauccaggaccuggagaaguacguggaggacaccaagaucgaccugugguccuacaacgccgagcuccugguggcccuggagaaccagcacaccaucgaccucacggacagcgagaugaacaagcuguucgagaagaccaagaagcagcugcgcgagaacgcggaggacauggggaacggcugcuucaagaucuaccacaagugcgacaacgccugcaucggguccauccgcaacggcaccuacgaccacgacgucuaccgggacgaggcccucaacaaccgcuuccagaucaagggcguggagcugaaguccggguacaaggacuggauccuguggaucuccuucgccaucagcugcuuccuccugugcguggcccugcucggcuucaucaugugggcgugccagaaggggaacauccggugcaacaucugcaucuga

SEQ ID NO: 71782 - RNA, 1701 nt, Artificial Sequence
  derived and/or modified CDS sequence (opt1) from hemagglutinin__InfluenzaA__AER08674
augaagaccaucaucgcccugagcuacauccucugccugguguucgcccagaagcugcccggcaacgacaacuccaccgcgacgcucugccuggggcaccacgccgucccgaacggcaccauggugaagaccaucaccaacgaccagaucgaggugacgaacgccaccgagcugguccagagcuccagcaccggggagaucugcaacagcccccaccagauccucgacggcgagaacugcacccugaucgacgcccugcucggggacccccagugcgacggcuuccagaacaagaagugggaccuguucguggagcgcagcaaggcccacuccaacugcuaccccuacgacgugccggacuacgcgagccugcggucccucgucgccagcuccggcacgcuggaguucaacaacgagagcuucaacuggaccggggugacccagaacggcaccuccagcgccugcauccgccgguccaacaacagcuucuucucccgccugaacuggcucacgcaccugaacuucaaguaccccgcccugaacgugaccaugcccaacaacgagcaguucgacaagcucuacaucuggggcguccaccaccccgggaccgacaaggaccagaucuuccuguacgcgcaggccagcgggcggaucaccguguccacgaagcgcagccagcaggccgugaucccgaacaucggcagccggccccgcguccggaacauccccucccgcgugagcaucuacuggaccaucgugaagcccggcgacauccugcucaucaacuccaccgggaaccugaucgccccgcggggcuacuucaagauccgcagcgggaaguccagcaucaugcgguccgacgcccccaucggcaagugcaacagcgcgugcaucacccccaacggcuccauccccaacgacaagccguuccagaacgucaaccgcaucacguacggggccugcccccgguacgugaagcagaacacccugaagcucgccaccggcaugcgcaacgugcccgagaagcagacccgggggaucuucggcgccaucgccggguucaucgagaacggcugggagggcauggucgacgggugguacggcuuccgccaccagaacagcgaggggcggggccaggcggccgaccugaaguccacgcaggccgccaucgaccagaucaacgggaagcugaaccgccucaucggcaagaccaacgagaaguuccaccagaucgagaaggaguucagcgagguggagggccggauccaggaccuggagaaguacguggaggacaccaagaucgaccugugguccuacaacgccgagcuccuggucgcgcuggagaaccagcacaccaucgaccucacggacagcgagaugaacaagcuguucgagaagaccaagaagcagcugcgcgagaacgccgaggacauggggaacggcugcuucaagaucuaccacaagugcgacaacgccugcaucggguccauccgcaacggcaccuacgaccacgacguguaccgggacgaggcccucaacaaccgcuuccagaucaaggggguggagcugaaguccggcuacaaggacuggauccuguggaucuccuucgccaucagcugcuuccuccugugcgucgcgcugcucggcuucaucaugugggccugccagaaggggaacauccggugcaacaucugcaucuga

SEQ ID NO: 71783 - RNA, 1701 nt, Artificial Sequence; identical to SEQ ID NO: 71006
  derived and/or modified CDS sequence (opt1) from hemagglutinin__InfluenzaA__AER08676

SEQ ID NO: 71784 - RNA, 1701 nt, Artificial Sequence; identical to SEQ ID NO: 71006
  derived and/or modified CDS sequence (opt1) from hemagglutinin__InfluenzaA__AER08678

SEQ ID NO: 71785 - RNA, 1701 nt, Artificial Sequence
  derived and/or modified CDS sequence (opt1) from hemagglutinin__InfluenzaA__AER08680
augaagaccaucaucgcccugagcuacauccucugccugguguucgcccagaagcugcccggcaacgacaacuccaccgcgacgcucugccuggggcaccacgccgucccgaacggcaccaucgugaagaccaucaccaacgaccagaucgaggugacgaacgccaccgagcugguccagagcuccagcgccggggagaucugcgacagcccccaccagauccucgacggcgagaacugcacccugaucgacgcccugcucggggacccccagugcgacggcuuccagaacaagaagugggaccuguucguggagcgcagccgggcgcacuccaacugcuaccccuacgacgugccggacuacgccagccugcgcucccucgucgccagcuccggcacccuggaguucaacaacgagagcuucaacuggacgggggugacccagaacggcaccuccagcgccugcauccggcgcuccaacaacagcuucuucucccggcugaacuggcucacccaccugaacuucaaguaccccgcgcugaacgugacgaugcccaacaacgagcaguucgacaagcucuacaucuggggcguccaccaccccgggaccgacaaggaccagaucuuccuguacgcccaggccagcgggcgcaucaccguguccaccaagcggagccagcaggccgugaucccgaacaucggcagccgcccccggguccgcaacauccccucccggaucagcaucuacuggacgaucgugaagcccggcgacauccugcucaucaacuccaccgggaaccugaucgccccgcgcggcuacuucaagauccggagcgggaaguccagcaucaugcgcuccgacgcgcccaucggcaagugcaacagcgagugcaucacccccaacggcuccauccccaacgacaagccguuccagaacgugaaccggaucaccuacggggccugcccccgcuacgucaagcagagcacgcugaagcucgccaccggcaugcggaacgugcccgagaagcagacccgcgggaucuucggcgccaucgccggguucaucgagaacggcugggagggcaugauggacgggugguacggcuuccggcaccagaacuccgaggggcgcggccaggcggccgaccugaaguccacccaggccgccaucgaccagaucaacgggaagcugaaccggcucaucggcaagacgaacgagaaguuccaccagaucgagaaggaguucuccgagguggagggccgcauccaggaccuggagaaguacgucgaggacaccaagaucgaccuguggagcuacaacgccgagcuccugguggcgcuggagaaccagcacaccaucgaccucaccgacuccgagaugaacaagcuguucgagaagacgaagaagcagcugcgcgagaacgccgaggacauggggaacggcugcuucaagaucuaccacaagugcgacaacgccugcaucgggagcauccggaacggcaccuacgaccacgacguguaccgcgacgaggcccucaacaaccgguuccagaucaagggggucgagcugaaguccggcuacaaggacuggauccuguggaucagcuucgccaucuccugcuuccuccugugcguggcgcugcucggcuucaucaugugggccugccagaaggggaacauccgcugcaacaucugcaucuga

SEQ ID NO: 71786 - RNA, 1701 nt, Artificial Sequence
  derived and/or modified CDS sequence (opt1) from hemagglutinin__InfluenzaA__AER08682
augaagaccgugaucgcccugagcuacauccucugccuggucuucgcccagaagcugcccggcaacgacaacuccaccgcgacgcucugccuggggcaccacgccgugccgaacggcaccaucgugaagaccaucaccaacgaccagaucgaggucacgaacgccaccgagcuggugcagagcuccagcaccggggagaucugcaacagcccccaccagauccucgacggcgagaacugcacccugaucgacgcccugcucggggacccccagugcgacggcuuccagaacaagaagugggaccuguucguggagcgcagcaaggcccacuccaacugcuaccccuacgacgucccggacuacgcgagccugcggucccucguggccagcuccggcacgcuggaguucaacaacgagagcuucaacuggaccggggugacccagaacggcaccuccagcgccugcauccgccgguccaacaacagcuucuucucccgccugaacuggcucacgcaccugaacuucaaguaccccgcccugaacgucaccaugcccaacaacgagcaguucgacaagcucuacaucuggggcgugcaccaccccgggaccgacaaggaccagaucuuccuguacgcgcaggccagcgggcggaucaccguguccacgaagcgcagccagcaggccgucaucccgaacaucggcagccggccccgcgugcggaacauccccucccgcgugagcaucuacuggaccaucgucaagcccggcgacauccugcucaucaacuccaccgggaaccugaucgccccgcggggcuacuucaagauccgcagcgggaaguccagcaucaugcgguccgacgcccccaucggcaagugcaacagcgcgugcaucacccccaacggcuccauccccaacgacaagccguuccagaacgugaaccgcaucacguacggggccugcccccgguacgugaagcagaacacccugaagcucgccaccggcaugcgcaacguccccgagaagcagacccgggggaucuucggcgccaucgccggguucaucgagaacggcugggagggcaugguggacgggugguacggcuuccgccaccagaacagcgaggggcggggccaggcggccgaccugaaguccacgcaggccgccaucgaccagaucaacgggaagcugaaccgccucaucggcaagaccaacgagaaguuccaccagaucgagaaggaguucagcgagguggagggccggauccaggaccuggagaaguacgucgaggacaccaagaucgaccugugguccuacaacgccgagcuccugguggcgcuggagaaccagcacaccaucgaccucacggacagcgagaugaacaagcuguucgagaagaccaagaagcagcugcgcgagaacgccgaggacauggggaacggcugcuucaagaucuaccacaagugcgacaacgccugcaucggguccauccgcaacggcaccuacgaccacgacguguaccgggacgaggcccucaacaaccgcuuccagaucaagggggucgagcugaaguccggcuacaaggacuggauccuguggaucuccuucgccaucagcugcuuccuccugugcguggcgcugcucggcuucaucaugugggccugccagaaggggaacauccggugcaacaucugcaucuga

SEQ ID NO: 71787 - RNA, 1701 nt, Artificial Sequence
  derived and/or modified CDS sequence (opt1) from hemagglutinin__InfluenzaA__AER08684
augaagaccaucaucgcccugagcuacauccucugccugguguucgcccagaagcugcccggcaacgacaacuccaccgcgacgcucugccuggggcaccacgccgucccgaacggcaccaucgugaagaccaucaccaacgaccagaucgaggugacgaacgccaccgagcugguccagagcuccagcaccggggagaucugcaacagcccccaccagauccucgacggcgagaacugcacccugaucgacgcccugcucggggacccccagugcgacggcuuccagaacaagaagugggaccuguucguggagcgcagcaaggcccacuccaacugcuaccccuacgacgugccggacuacgcgagccugcggucccucgucgccagcuccggcacgcuggaguucaacaacgagagcuucaacuggaccggggugacccagaacggcaccuccagcgccugcauccgccgguccaacaacagcuucuucucccgccugaacuggcucacgcaccugaacuucaaguaccccgcccugaacgugaccaugcccaacaacgagcaguucgacaagcucuacaucuggggcguccaccaccccgggaccgacaaggaccagaucuuccuguacgcgcaggccagcgggcggaucaccguguccacgaagcgcagccagcaggccgugaucccgaacaucggcagccggccccgcguccggaacauccccucccgcgugagcaucuacuggaccaucgugaagcccggcgacauccugcucaucaacuccaccgggaaccugaucgccccgcggggcuacuucaagauccgcagcgggaaguccagcaucaugcgguccgacgcccccaucggcaagugcaacagcacgugcaucacccccaacggcuccauccccaacgacaagccguuccagaacgucaaccgcaucaccuacggggcgugcccccgguacgugaagcagaacacccugaagcucgccaccggcaugcgcaacgugcccgagaagcagacgcgggggaucuucggcgccaucgccggguucaucgagaacggcugggagggcauggucgacgggugguacggcuuccgccaccagaacagcgaggggcggggccaggccgcggaccugaaguccacccaggccgccaucgaccagaucaacgggaagcugaaccgccucaucggcaagaccaacgagaaguuccaccagaucgagaaggaguucagcgagguggagggccggauccaggaccuggagaaguacguggaggacaccaagaucgaccugugguccuacaacgccgagcuccuggucgcccuggagaaccagcacacgaucgaccucaccgacagcgagaugaacaagcuguucgagaagaccaagaagcagcugcgcgagaacgcggaggacauggggaacggcugcuucaagaucuaccacaagugcgacaacgccugcaucggguccauccgcaacggcaccuacgaccacgacguguaccgggacgaggcccucaacaaccgcuuccagaucaaggggguggagcugaaguccggcuacaaggacuggauccuguggaucuccuucgccaucagcugcuuccuccugugcgucgcccugcucggcuucaucaugugggcgugccagaaggggaacauccggugcaacaucugcaucuga

SEQ ID NO: 71788 - RNA, 1701 nt, Artificial Sequence
  derived and/or modified CDS sequence (opt1) from hemagglutinin__InfluenzaA__AER08686
augaagaccaucaucgcccugagcuacauccucugccugguguucgcccagaagcugcccggcaacgacaacuccaccgcgacgcucugccuggggcaccacgccgucccgaacggcaccaucgugaagaccaucaccaacgaccagaucgaggugacgaacgccaccgagcugguccagagcuccagcaccggggagaucugcaacagcccccaccagauccucgacggcgagaacugcacccugaucgacgcccugcucggggacccccagugcgacggcuuccagaacaagaagugggaccuguucguggagcgcagcaaggcccacuccaacugcuaccccuacgacgugccggacuacgcgagccugcggucccucgucgccagcuccggcacgcuggaguucaacaacgagagcuucaacuggaccggggugacccagaacggcaccuccagcgccugcauccgccgguccaacaacagcuucuucucccgccugaacuggcucacgcaccugaacuucaaguaccccgcccugaacgugaccaugcccaacaacgagcaguucgacaagcucuacaucuggggcguccaccaccccgggaccgacaaggaccagaucuuccuguacgcgcaggccagcgggcggaucaccguguccacgaagcgcagccagcaggccgugaucccgaacaucggcagccggccccgcguccggaacauccccucccgcgugagcaucuacuggaccaucgugaagcccggcgacauccugcucaucaacuccaccgggaaccugaucgccccgcggggcuacuucaagauccgcagcgggaaguccagcaucaugcgguccgacgcccccaucggcaagugcaacagcacgugcaucacccccaacggcuccauccccaacgacaagccguuccagaacgucaaccgcaucaccuacggggcgugcccccgguacgugaagcagaacacccugaagcucgccaccggcaugcgcaacgugcccgagaagcagacgcgggggaucuucggcgccaucgccggguucaucgagaacggcugggagggcauggucgacgggugguacggcuuccgccaccagaacagcgaggggcggggccaggccgcggaccugaaguccacccaggccgccaucgaccagaucaacgggaagcugaaccgccucaucggcaagaccaacgagaaguuccaccagaucgagaaggaguucagcgagguggagggccggauccaggaccuggagaaguacaucgaggacaccaagaucgaccugugguccuacaacgccgagcuccugguggcccuggagaaccagcacacgaucgaccucaccgacagcgagaugaacaagcuguucgagaagaccaagaagcagcugcgcgagaacgcggaggacauggggaacggcugcuucaagaucuaccacaagugcgacaacgccugcaucggguccauccgcaacggcaccuacgaccacgacgucuaccgggacgaggcccucaacaaccgcuuccagaucaaggggguggagcugaaguccggcuacaaggacuggauccuguggaucuccuucgccaucagcugcuuccuccugugcguggcccugcucggcuucaucaugugggcgugccagaaggggaacauccggugcaacaucugcaucuga

SEQ ID NO: 71789 - RNA, 1701 nt, Artificial Sequence; identical to SEQ ID NO: 71006
  derived and/or modified CDS sequence (opt1) from hemagglutinin__InfluenzaA__AER08688

SEQ ID NO: 71790 - RNA, 1701 nt, Artificial Sequence
  derived and/or modified CDS sequence (opt1) from hemagglutinin__InfluenzaA__AER08690
augaagaccaucaucgcccugagcuacauccucugccugguguucgcccagaagcugcccgagaacgacaacuccaccgcgacgcucugccugggccaccacgccgucccgaacgggaccaucgugaagaccaucaccaacgaccagaucgaggugacgaacgccaccgagcugguccagagcuccagcaccggcgagaucugcaacagcccccaccagauccucgacggggagaacugcacccugaucgacgcccugcucggcgacccccagugcgacggguuccagaacaagaagugggaccuguucguggagcgcagcaaggcccacuccaacugcuaccccuacgacgugccggacuacgcgagccugcggucccucgucgccagcuccggcacgcuggaguucaacaacgagagcuucaacuggaccggcgugacccagaacgggaccuccagcgccugcauccgccgguccaacaacagcuucuucucccgccugaacuggcucacgcaccugaacuucaaguaccccgcccugaacgugaccaugcccaacaacgagcaguucgacaagcucuacaucuggggcguccaccaccccgggaccgacaaggaccagaucuuccuguacgcgcaggccagcggccggaucaccguguccacgaagcgcagccagcaggccgugaucccgaacaucgggagccggccccgcguccggaacauccccucccgcgugagcaucuacuggaccaucgugaagcccggcgacauccugcucaucaacuccaccggcaaccugaucgccccgcggggguacuucaagauccgcagcggcaaguccagcaucaugcgguccgacgcccccaucgggaagugcaacagcacgugcaucacccccaacggcuccauccccaacgacaagccguuccagaacgucaaccgcaucaccuacggcgcgugcccccgguacgugaagcagaacacccugaagcucgccaccgggaugcgcaacgugcccgagaagcagacgcggggcaucuucggggccaucgccggcuucaucgagaacgggugggagggcauggucgacggcugguacggguuccgccaccagaacagcgagggccgggggcaggccgcggaccugaaguccacccaggccgccaucgaccagaucaacggcaagcugaaccgccucaucgggaagaccaacgagaaguuccaccagaucgagaaggaguucagcgagguggagggccggauccaggaccuggagaaguacguggaggacaccaagaucgaccugugguccuacaacgccgagcuccuggucgcccuggagaaccagcacacgaucgaccucaccgacagcgagaugaacaagcuguucgagaagaccaagaagcagcugcgcgagaacgcggaggacaugggcaacgggugcuucaagaucuaccacaagugcgacaacgccugcaucggcuccauccgcaacgggaccuacgaccacgacguguaccgggacgaggcccucaacaaccgcuuccagaucaagggcguggagcugaaguccggguacaaggacuggauccuguggaucuccuucgccaucagcugcuuccuccugugcgucgugcugcucggcuucaucaugugggccugccagaagggcaacauccggugcaacaucugcaucuga

SEQ ID NO: 71791 - RNA, 1701 nt, Artificial Sequence; identical to SEQ ID NO: 71006
  derived and/or modified CDS sequence (opt1) from hemagglutinin__InfluenzaA__AER08692

SEQ ID NO: 71792 - RNA, 1701 nt, Artificial Sequence
  derived and/or modified CDS sequence (opt1) from hemagglutinin__InfluenzaA__AER08698
augaagaccaccaucgcccugagccacauccucugccugguguucgcccagaagcugcccggcaacgacaacuccacggcgacccucugccuggggcaccacgccgucccgaacggcaccaucgugaagaccaucacgaacgaccagaucgaggugaccaacgccaccgagcugguccagagcuccagcgccggggagaucugcgacagcccccaccagauccucgacggcgagaacugcacccugaucgacgcccugcucggggacccccagugcgacggcuuccagaacaagaagugggaccuguucguggagcgcagccgggcguacuccaacugcuaccccuacgacgugccggacuacgccagccugcgcucccucgucgccagcuccggcacgcuggaguucaacaacgagagcuucaacuggaccggggugacccagaacggcaccuccagcgccugcauccggcgcuccaacaacagcuucuucucccggcugaacuggcucacgcaccugaacuucaaguaccccgcgcugaacgugaccaugcccaacaacgagcaguucgacaagcucuacaucuggggcguccaccaccccgggaccgacaaggaccagaucuuccuguacgcccaggccagcgggcgcaucaccguguccacgaagcggagccagcaggccgugaucccgaacaucggcagccgcccccggguccgcaacauccccucccggaucagcaucuacuggaccaucgugaagcccggcgacauccugcucaucaacuccaccgggaaccugaucgccccgcgcggcuacuucaagauccggagcgggaaguccagcaucaugcgcuccgacgcgcccaucggcaagugcaacagcgagugcaucacccccaacggcuccauccccaacgacaagccguuccagaacgugaaccggaucacguacggggccugcccccgcuacgucaagcagagcacccugaagcucgccaccggcaugcggaacgugcccgagaagcagacccgcgggaucuucggcgccaucgccggguucaucgagaacggcugggagggcaugguggacgggugguacggcuuccggcaccagaacuccgaggggcgcggccaggcggccgaccugaaguccacgcaggccgccaucgaccagaucaacgggaagcugaaccggcucaucggcaagaccaacgagaaguuccaccagaucgagaaggaguucuccgaggucgagggccgcauccaggaccuggagaaguacguggaggacaccaagaucgaccuguggagcuacaacgccgagcuccugguggcgcuggagaaccagcacaccaucgaccucacggacuccgagaugaacaagcuguucgagaagaccaagaagcagcugcgcgagaacgccgaggacauggggaacggcugcuucaagaucuaccacaagugcgacaacgccugcaucgggagcauccggaacggcaccuacgaccacgacgucuaccgcgacgaggcccucaacaaccgguuccagaucaaggggguggagcugaaguccggcuacaaggacuggauccuguggaucagcuucgccaucuccugcuuccuccugugcguggcgcugcucggcuucaucaugugggccugccagaaggggaacauccgcugcaacaucugcaucuga

SEQ ID NO: 71793 - RNA, 1701 nt, Artificial Sequence; identical to SEQ ID NO: 71006
  derived and/or modified CDS sequence (opt1) from hemagglutinin__InfluenzaA__AER08700

SEQ ID NO: 71794 - RNA, 1701 nt, Artificial Sequence
  derived and/or modified CDS sequence (opt1) from hemagglutinin__InfluenzaA__AER92712
augaaggccauccuggugguccuccuguacaccuucgccaccgcgaacgccgacacgcugugcaucggcuaccacgccaacaacagcaccgacaccguggacaccgugcucgagaagaacgucacggugacccacuccguggaccugcuggaggacaagcacaacgggaagcucugcaagcugcgcggcgucgcgccccugcaccucgggaagugcaacaucgccggcuggauccuggggaacccggagugcgagagccuguccaccgcgagcuccuggagcuacaucguggagaccuccaacagcgacaacggcacgugcuaccccggcgacuucaucgacuacgaggagcuccgggagcagcuguccagcguguccagcuucgagcgcuucgagaucuuccccaagaccuccagcuggcccaaccacgacuccaacaagggggucaccgccgccugcccgcacgccggcgccaagagcuucuacaagaaccugaucuggcucgugaagaaggggaacuccuaccccaagcugaacaagagcuacaucaacgacaagggcaaggaggugcugguccucugggggauccaccaccccuccaccagcacggaccagcagagccuguaccagaacgccgacgccuacguguucgugggcaccucccgguacagcaagaaguucaagcccgagaucgccauccgcccgaagguccggaaccaggagggccgcaugaacuacuacuggacccugguggagcccggggacaagaucaccuucgaggccacgggcaaccucguggucccccgguacgcguucaccaucgagcgcaacgccggguccggcaucaucaucagcgacacccccauccacgacugcaacaccacgugccagaccccgaagggcgccaucaacaccucccugcccuuccagaacauccaccccaucaccaucgggaagugccccaaguacgucaagagcacgaagcugcggcucgccaccggccugcgcaacgugccguccauccagagccgggggcuguucggcgccaucgcgggguucaucgagggcggcuggaccgggaugguggacggcugguacggguaccaccaccagaacgagcagggcuccggguacgccgccgaccucaagagcacccagaacgccaucgacgagaucacgaacaaggugaacuccgugaucgagaagaugaacacccaguucaccgccgucggcaaggaguucaaccaccuggagaagcgcaucgagaaccugaacaagaagguggacgacggcuuccucgacaucuggaccuacaacgcggagcugcugguccuccuggagaacgagcggacgcuggacuaccacgacagcaacgugaagaaccucuacgagaaggugcgcucccagcugaagaacaacgccaaggagaucgggaacggcugcuucgaguucuaccacaagugcgacaacacgugcauggagagcgucaagaacgggaccuacgacuaccccaaguacuccgaggaggccaagcugaaccgggaggagaucgacggcgugaagcucgagagcacccgcaucuaccagauccuggccaucuacuccaccguggccagcucccugguccucguggugagccugggggcgaucagcuucuggaugugcuccaacggcagccugcagugccggaucugcaucuga

SEQ ID NO: 71795 - RNA, 1701 nt, Artificial Sequence; identical to SEQ ID NO: 69557
  derived and/or modified CDS sequence (opt1) from hemagglutinin__InfluenzaA__AET10090

SEQ ID NO: 71796 - RNA, 1701 nt, Artificial Sequence; identical to SEQ ID NO: 69557
  derived and/or modified CDS sequence (opt1) from hemagglutinin__InfluenzaA__AET10091

SEQ ID NO: 71797 - RNA, 1701 nt, Artificial Sequence; identical to SEQ ID NO: 69557
  derived and/or modified CDS sequence (opt1) from hemagglutinin__InfluenzaA__AET10092

SEQ ID NO: 71798 - RNA, 1701 nt, Artificial Sequence
  derived and/or modified CDS sequence (opt1) from hemagglutinin__InfluenzaA__AET10094
augaagaccaucaucgcccugagcugcauccucugccugguguucgcccagaagcugcccggcaacgacaacuccaccgcgacgcucugccuggggcaccacgccgucccgaacggcaccaucgugaagaccaucaccaacgaccagaucgaggugacgaacgccaccgagcugguccagagcuccagcaccggggagaucugcgacagcccccaccagauccucgacggcgagaacugcacccugaucgacgcccugcucggggacccccagugcgacggcuuccagaacaagaagugggaccuguucguggagcgcagcaaggccuacuccagcugcuaccccuacgacgugccggacuacgcgucccugcggagccucgucgccuccagcggcacgcuggaguucaacaacgaguccuucaacuggaccggggugacccagaacggcaccagcuccgccugcauccgccggagcaacaacuccuucuucagccgccugaacuggcucacgcaccugaacuucaaguaccccgcccugaacgugaccaugcccaacaacgagcaguucgacaagcucuacaucuggggcguccaccaccccgggaccgacaaggaccagaucuuccuguacgcgcaggccuccgggcggaucaccgugagcacgaagcgcagccagcaggccgugaucccgaacaucggcucccggccccgcguccggaacauccccagccgcaucuccaucuacuggaccaucgugaagcccggcgacauccugcucaucaacagcaccgggaaccugaucgccccgcggggcuacuucaagauccgcuccgggaaguccuccaucaugcggagcgacgcccccaucggcaagugcaacuccgagugcaucacccccaacggcagcauccccaacgacaagccguuccagaacgugaaccgcaucacguacggggcgugcccccgguacgucaagcaguccacccugaagcucgccaccggcaugcgcaacgugcccgagaagcagacccgggggaucuucggcgccaucgccggguucaucgagaacggcugggagggcaugguggacgggugguacggcuuccgccaccagaacagcgaggggcggggccaggccgcggaccugaaguccacgcaggccgccaucgaccagaucaacgggaagcugaaccgccucaucggcaagaccaacgagaaguuccaccagaucgagaaggaguucagcgaggucgagggccggauccaggaccuggagaaguacguggaggacaccaagaucgaccugugguccuacaacgccgagcuccugguggcccuggagaaccagcacaccaucgaccucacggacagcgagaugaacaagcuguucgagaagaccaagaagcagcugcgcgagaacgcggaggacauggggaacggcugcuucaccaucuaccacaagugcgacaacgccugcaucggguccauccgcaacggcaccuacgaccacaacgucuaccgggacgaggcccucaacaaccgcuuccagaucaaggggguggagcucaagagcggcuacaaggacuggauccuguggaucuccuucgccaucagcugcuuccugcugugcguggcccugcucggcuucaucaugugggcgugccagaaggggaacauccggugcaacaucugcaucuga

SEQ ID NO: 71799 - RNA, 1701 nt, Artificial Sequence
  derived and/or modified CDS sequence (opt1) from hemagglutinin__InfluenzaA__AET10095
augaagaccaucaucgcccugagcuacauccucugccugguguucgcccagaagcugcccggcaacgacaacuccaccgcgacgcucugccuggggcaccacgccgucccgaacggcaccaucgugaagaccaucaccaacgaccagaucgaggugacgaacgccaccgagcugguccagagcuccagcaccggggagaucugcgacagcccccaccagauccucgacggcgagaacugcacccugaucgacgcccugcucggggacccccagugcgacggcuuccagaacaagaagugggaccuguucguggagcgcagcaaggccuacuccaacugcuaccccuacgacgugccggacuacgcgagccugcggucccucgucgccagcuccggcacgcuggaguucaacaacgagagcuucaacuggaccggggugacccagaacggcaccuccagcgccugcauccgccgguccaacaacagcuucuucucccgccugaacuggcucacgcaccugaacuucaaguaccccgcccugaacgugaccaugcccaacaacgagcaguucgacaagcucuacaucuggggcguccaccaccccgggaccgacaaggaccagaucuuccuguacgcgcaggccagcgggcggaucaccguguccacgaagcgcagccagcaggccgugaucccgaacaucggcagccggccccgcguccggaacauccccucccgcaucagcaucuacuggaccaucgugaagcccggcgacauccugcucaucaacuccaccgggaaccugaucgccccgcggggcuacuucaagauccgcagcgggaaguccagcaucaugcgguccgacacccccaucggcaagugcaacagcgagugcaucacgcccaacggcuccauccccaacgacaagccguuccagaacgugaaccgcaucaccuacggggccugcccccgguacgucaagcagaacacccugaagcucgcgaccggcaugcgcaacgugcccgagaagcagacgcgggggaucuucggcgccaucgccggguucaucgagaacggcugggagggcaugguggacgggugguacggcuuccgccaccagaacagcgaggggcggggccaggccgccgaccugaaguccacccaggcggccaucgaccagaucaacgggaagcugaaccgccucaucggcaagaccaacgagaaguuccaccagaucgagaaggaguucagcgaggucgagggccggauccaggaccuggagaaguacguggaggacaccaagaucgaccugugguccuacaacgccgagcuccugguggcccuggagaaccagcacacgaucgaccucaccgacagcgagaugaacaagcuguucgagaagaccaagaagcagcugcgcgagaacgccgaggacauggggaacggcugcuucaagaucuaccacaagugcgacaacgcgugcaucgaguccauccgcaacgggaccuacgaccacgacgucuaccgggacgaggcccucaacaaccgcuuccagaucaagggcguggagcugaaguccggguacaaggacuggauccuguggaucuccuucgccaucagcugcuuccuccugugcguggcccugcucggcuucaucaugugggccugccagaagggcaacauccggugcaacaucugcaucuga

SEQ ID NO: 71800 - RNA, 1701 nt, Artificial Sequence
  derived and/or modified CDS sequence (opt1) from hemagglutinin__InfluenzaA__AET10096
augaagaccaucaucgcccugagcuacauccucugccugguguucgcccagaaguuccccggcaacgacaacuccaccgcgacgcugugccucgggcaccacgccgucccgaacggcaccaucgugaagaccaucaccaacgaccagaucgaggugacgaacgccaccgagcugguccagaacagcuccaccggggagaucugcgacagcccccaccagaucaucgacggcgagaacugcacccugaucgacgcccuccugggggacccccagugcgacggcuuccagaacaagaaguggaaccuguucguggagcgcuccaaggccuacagcaacugcuaccccuacgacgugccggacuacgcgucccuccggagccuggucgccuccagcggcacgcuggaguucaacaacgaguccuucaacuggaccggggugacccagaacggcaccagcuccgccugcauccgccggagcaacaacuccuucuucagccgccucaacuggcugacgcaccugaacuucaaguaccccgcccucaacgugaccaugcccaacaacgagcaguucgacaagcuguacaucuggggcguccaccaccccgggaccgacaaggaccagaucuuccuguacgcgcaggccuccgggcggaucaccgugagcacgaagcgcucccagcaggccgugaucccgaacaucggcagccggccccgcguccggaacauccccagccgcaucuccaucuacuggaccaucgugaagcccggcgacauccuccugaucaacagcaccgggaaccugaucgccccgcggggcuacuucaagauccgcuccggcaagagcuccaucaugcggagcgacgcccccaucgggaagugcaacuccgagugcaucacccccaacggcagcauccccaacgacaagccguuccagaacgugaaccgcaucacguacggggcgugcccccgguacgucaagcagaacacccucaagcuggccaccggcaugcgcaacgugcccgagaagcagacccgggggaucuucggcgccaucgccggguucaucgagaacggcugggagggcaugguggacgggugguacggcuuccgccaccagaacuccgaggggcggggccaggccgcggaccucaagagcacgcaggccgccaucgaccagaucaacgggaagcugaaccgccugaucggcaagaccaacgagaaguuccaccagaucgagaaggaguucuccgaggucgagggccggauccaggaccuggagaaguacguggaggacaccaagaucgaccucuggagcuacaacgccgagcugcugguggcccucgagaaccagcacaccaucgaccugacggacuccgagaugaacaagcuguucgagaagaccaagaagcagcuccgcgagaacgcggaggacauggggaacggcugcuucaagaucuaccacaagugcgacaacgccugcaucgggagcauccgcaacggcaccuacgaccacgacgucuaccgggacgaggcccugaacaaccgcuuccagaucaaggggguggagcugaaguccggcuacaaggacuggauccucuggaucagcuucgccaucuccugcuuccugcugugcguggcccuccugggcuucaucaugugggcgugccagaaggggaacauccggugcaacaucugcaucuga

SEQ ID NO: 71801 - RNA, 1701 nt, Artificial Sequence
  derived and/or modified CDS sequence (opt1) from hemagglutinin__InfluenzaA__AET10098
augaagaccaucaucgcccugagcuacauccucugccugguguucgcccagaaguuccccggcaacgacaacuccaccgcgacgcugugccucgggcaccacgccgucccgaacggcaccaucgugaagaccaucaccaacgaccagaucgaggugacgaacgccaccgagcugguccagaacagcuccaccggggagaucugcgacagcccccaccagaucaucgacggcgagaacugcacccugaucgacgcccuccugggggacccccagugcgacggcuuccagaacaagaagugggaccuguucguggagcgcuccaaggccuacagcaacugcuaccccuacgacgugccggacuacgcgucccuccggagccuggucgccuccagcggcacgcuggaguucaacaacgaguccuucaacuggaccggggugacccagaacggcaccagcuccgccugcauccgccggagcaacaacuccuucuucagccgccucaacuggcugacgcaccugaacuucaaguaccccgcccucaacgugaccaugcccaacaacgagcaguucgacaagcuguacaucuggggcguccaccaccccgggaccgacaaggaccagaucuuccuguacgcgcaggccuccgggcggaucaccgugagcacgaagcgcucccagcaggccgugaucccgaacaucggcagccggccccgcguccggaacauccccagccgcaucuccaucuacuggaccaucgugaagcccggcgacauccuccugaucaacagcaccgggaaccugaucgccccgcggggcuacuucaagauccgcuccggcaagagcuccaucaugcggagcgacgcccccaucgggaagugcaacuccgagugcaucacccccaacggcagcauccccaacgacaagccguuccagaacgugaaccgcaucacguacggggcgugcccccgguacgucaagcagaacacccucaagcuggccaccggcaugcgcaacgugcccgagaagcagacccgggggaucuucggcgccaucgccggguucaucgagaacggcugggagggcaugguggacgggugguacggcuuccgccaccagaacuccgaggggcggggccaggccgcggaccucaagagcacgcaggccgccaucgaccagaucaacgggaagcugaaccgccugaucggcaagaccaacgagaaguuccaccagaucgagaaggaguucuccgaggucgagggccggauccaggaccuggagaaguacguggaggacaccaagaucgaccucuggagcuacaacgccgagcugcugguggcccucgagaaccagcacaccaucgaccugacggacuccgagaugaacaagcuguucgagaagaccaagaagcagcuccgcgagaacgcggaggacauggggaacggcugcuucaagaucuaccacaagugcgacaacgccugcaucgggagcauccgcaacggcaccuacgaccacgacgucuaccgggacgaggcccugaacaaccgcuuccagaucaaggggguggagcugaaguccggcuacaaggacuggauccucuggaucagcuucgccaucuccugcuuccugcugugcguggcccuccugggcuucaucaugugggcgugccagaaggggaacauccggugcaacaucugcaucuga

SEQ ID NO: 71802 - RNA, 1701 nt, Artificial Sequence; identical to SEQ ID NO: 70879
  derived and/or modified CDS sequence (opt1) from hemagglutinin__InfluenzaA__AET10099

SEQ ID NO: 71803 - RNA, 1701 nt, Artificial Sequence; identical to SEQ ID NO: 71006
  derived and/or modified CDS sequence (opt1) from hemagglutinin__InfluenzaA__AET10100

SEQ ID NO: 71804 - RNA, 1701 nt, Artificial Sequence
  derived and/or modified CDS sequence (opt1) from hemagglutinin__InfluenzaA__AET10101
augaagaccaucaucgcccugagcugcauccucugccugguguucgcccagaagcugcccggcaacgacaacuccaccgcgacgcucugccuggggcaccacgccgucccgaacggcaccaucgugaagaccaucaccaacgaccagaucgaggugacgaacgccaccgagcugguccagagcuccagcaccggggagaucugcgacagcccccaccagauccucgacggcgagaacugcacccugaucgacgcccugcucggggacccccagugcgacggcuuccagaacaagaagugggaccuguucguggagcgcagcaaggccuacuccaacugcuaccccuacgacgugccggacuacgcgagccugcggucccucgucgccagcuccggcacgcuggaguucaacaacgagagcuucaacuggaccggggugacccagaacggcaccuccagcgccugcauccgccgguccaacaacagcuucuucucccgccugaacuggcucacgcaccugaacuucaaguaccccgcccugaacgugaccaugcccaacaacgagcaguucgacaagcucuacaucuggggcguccaccaccccggggcggacaaggaccagaucuuccuguacgcccaggccagcgggcggaucaccguguccaccaagcgcagccagcaggccgugaucccgaacaucggcagccggccccgcguccggaacauccccucccgcaucagcaucuacuggacgaucgugaagcccggcgacauccugcucaucaacuccaccgggaaccugaucgccccgcggggcuacuucaagauccgcagcgggaaguccagcaucaugcgguccgacgcgcccaucggcaagugcaacagcgagugcaucacccccaacggcuccauccccaacgacaagccguuccagaacgugaaccgcaucaccuacggggccugcccccgguacgucaagcagagcacgcugaagcucgccaccggcaugcgcaacgugcccgagaagcagacccgggggaucuucggcgccaucgccggguucaucgagaacggcugggagggcaugguggacgggugguacggcuuccgccaccagaacuccgaggggcggggccaggcggccgaccugaaguccacccaggccgccaucgaccagaucaacgggaagcugaaccgccucaucggcaagacgaacgagaaguuccaccagaucgagaaggaguucuccgaggucgagggccggauccaggaccuggagaaguacguggaggacaccaagaucgaccuguggagcuacaacgccgagcuccugguggcgcuggagaaccagcacaccaucgaccucaccgacuccgagaugaacaagcuguucgagaagacgaagaagcagcugcgcgagaacgccgaggacauggggaacggcugcuucaccaucuaccacaagugcgacaacgccugcaucgggagcauccgcaacggcaccuacgaccacaacgucuaccgggacgaggcccucaacaaccgcuuccagaucaaggggguggagcugaaguccggcuacaaggacuggauccuguggaucagcuucgccaucuccugcuuccuccugugcguggcgcugcucggcuucaucaugugggccugccagaaggggaacauccggugcaacaucugcaucuga

SEQ ID NO: 71805 - RNA, 1701 nt, Artificial Sequence
  derived and/or modified CDS sequence (opt1) from hemagglutinin__InfluenzaA__AET10102
augaagaccaucaucgcccugagcuacauccucugccugguguucacccagaagcugcccggcaacgacaacuccacggccacccucugccuggggcaccacgcggucccgaacggcaccaucgugaagaccaucacgaacgaccagaucgaggugaccaacgccaccgagcugguccagagcuccagcaccggggagaucugcgacagcccccaccagauccucgacggcaagaacugcacgcugaucgacgcccugcucggggacccccagugcgacggcuuccagaacaagaagugggaccuguucguggagcgcagcaaggccuacuccaacugcuaccccuucgacgugccggacuacgccagccugcggucccucgucgcgagcuccggcacccuggaguucaacaacgagagcuucaacuggaccggggugacccagaacggcacguccagcgccugcaugcgccgguccaagagcuccuucuucagccgccugaacuggcucacccaccugaacuucaaguaccccgcccugaacgugaccaugcccaacgacgagcaguucgacaagcucuacaucuggggcguccaccaccccgggaccgacaaggaccagaucuuccuguacgcccaggcguccgggcggaucacggugagcaccaagcgcagccagcagaccgugaucccgaacaucggcucccggccccgcauccggaacauccccagccgcaucuccaucuacuggaccaucgucaagcccggcgacauccugcucaucaacagcacggggaaccugaucgccccgcggggcuacuucaagauccgcuccgggaaguccuccaucaugcggagcgacgcccccaucggcaagugcaacuccgagugcaucacccccaacggcagcauccccaacgacaagccguuccagaacgugaaccgcaucaccuacggggccugcccccgguacgugaagcagaacacccugaagcucgccacgggcaugcgcaacguccccgagaagcagacccgggggaucuucggcgcgaucgccggguucaucgagaacggcugggagggcaugguggacgggugguacggcuuccgccaccagaacuccgaggggcggggccaggccgccgaccucaagagcacccaggccgcgaucgaccagaucaacgggaagcugaaccgccugaucggccggaccaacgagaaguuccaccagaucgagaaggaguucuccgagguggagggccgcauccaggaccuggagaaguacgucgaggacacgaagaucgaccuguggagcuacaacgccgagcuccugguggcccuggagaaccagcacaccaucgaccucaccgacuccgagaugaacaagcuguucgagaagacccgcaagcagcugcgggagaacgccgaggacauggggaacggcugcuucaagaucuaccacaagugcgacaacgccugcaucgggagcauccgcaacggcacguacgaccacgacguguaccgggacgaggcgcucaacaaccgcuuccagaucaagggggucgagcugaaguccggcuacaaggacuggauccuguggaucagcuucgccaucuccugcuuccuccugugcguggccagccugggcuucaucaugugggccugccagaaggggaacauccggugcaacaucugcaucuga

SEQ ID NO: 71806 - RNA, 1701 nt, Artificial Sequence
  derived and/or modified CDS sequence (opt1) from hemagglutinin__InfluenzaA__AET10103
augaagaccaucaucgcccugagcuacauccucugccugguguucgcccagaagcugcccggcaacgacaacuccaccgcgacgcucugccuggggcaccacgccgucccgaacggcaccaucgugaagaccaucaccaacgaccagaucgaggugacgaacgccaccgagcugguccagaacagcuccaccggggagaucugcgacagcccccaccagauccucgacggcgagaacugcacccugaucgacgcccugcucggggacccccagugcgacggcuuccagaacaagaagugggaccuguucguggagcgcuccaaggccuacagcaacugcuaccccuacgacgugccggacuacgcgucccugcggagccucgucgccuccagcggcacgcuggaguucaacaacgaguccuucaacuggaccggggugacccagaacggcaccagcuccgccugcauccgccggagcaacaacuccuucuucagccgccugaacuggcucacgcaccugaacuucaaguaccccgcccugaacgugaccaugcccaacaacgagcaguucgacaagcucuacaucuggggcguccaccaccccgggaccgacaaggaccagaucuuccuguacgcgcaggccuccgggcggaucaccgugagcacgaagcgcucccagcaggccgugaucccgaacaucggcagccggccccgcguccggaacauccccagccgcaucuccaucuacuggaccaucgugaagcccggcgacauccugcucaucaacagcaccgggaaccugaucgccccgcggggcuacuucaagauccgcuccggcaagagcuccaucaugcggagcgacgcccccaucgggaagugcaacuccgagugcaucacccccaacggcagcauccccaacgacaagccguuccagaacgugaaccgcaucacguacggggcgugcccccgguacgucaagcagaacacccugaagcucgccaccggcaugcgcaacgugcccgagaagcagacccgggggaucuucggcgccaucgccggguucaucgagaacggcugggagggcaugguggacgggugguacggcuuccgccaccagaacuccgaggggcggggccaggccgcggaccucaagagcacgcaggccgccaucgaccagaucaacgggaagcugaaccgccugaucggcaagaccaacgagaaguuccaccagaucgagaaggaguucuccgaggucgagggccggauccaggaccuggagaaguacguggaggacaccaagaucgaccuguggagcuacaacgccgagcuccugguggcccuggagaaccagcacaccaucgaccucacggacuccgagaugaacaagcuguucgagaagaccaagaagcagcugcgcgagaacgcggaggacauggggaacggcugcuucaagaucuaccacaagugcgacaacgccugcaucgggagcauccgcaacggcaccuacgaccacgacgucuaccgggacgaggcccucaacaaccgcuuccagaucaaggggguggagcugaaguccggcuacaaggacuggauccuguggaucagcuucgccaucuccugcuuccuccugugcguggcccugcucggcuucaucaugugggcgugccagaaggggaacauccggugcaacaucugcaucuga

SEQ ID NO: 71807 - RNA, 1701 nt, Artificial Sequence
  derived and/or modified CDS sequence (opt1) from hemagglutinin__InfluenzaA__AET10104
augaagaccaucaucgcccugagcuacauccucugccugguguucgcccagaaguuccccggcaacgacaacuccaccgcgacgcugugccucgggcaccacgccgucccgaacggcaccaucgugaagaccaucaccaacgaccagaucgaggugacgaacgccaccgagcugguccagaacagcuccaccggggagaucugcgacagcccccaccagaucaucgacggcgagaacugcacccugaucgacgcccuccugggggacccccagugcgacggcuuccagaacaagaagugggaccuguucguggagcgcuccaaggccuacagcaacugcuaccccuacgacgugccggacuacgcgucccuccggagccuggucgccuccagcggcacgcuggaguucaacaacgaguccuucaacuggaccggggugacccagaacggcaccagcuccgccugcauccgccggagcaacaacuccuucuucagccgccucaacuggcugacgcaccugaacuucaaguaccccgcccucaacgugaccaugcccaacaacgagcaguucgacaagcuguacaucuggggcguccaccaccccgggaccgacaaggaccagaucuuccuguacgcgcaggccuccgggcggaucaccgugagcacgaagcgcucccagcaggccgugaucccgaacaucggcagccggccccgcguccggaacauccccagccgcaucuccaucuacuggaccaucgugaagcccggcgacauccuccugaucaacagcaccgggaaccugaucgccccgcggggcuacuucaagauccgcuccggcaagagcuccaucaugcggagcgacgcccccaucgggaagugcaacuccgagugcaucacccccaacggcagcauccccaacgacaagccguuccagaacgugaaccgcaucacguacggggcgugcccccgguacgucaagcagaacacccucaagcuggccaccggcaugcgcaacgugcccgagaagcagacccgggggaucuucggcgccaucgccggguucaucgagaacggcugggagggcaugguggacgggugguacggcuuccgccaccagaacuccgaggggcggggccaggccgcggaccucaagagcacgcaggccgccaucgaccagaucaacgggaagcugaaccgccugaucggcaagaccaacgagaaguuccaccagaucgagaaggaguucuccgaggucgagggccggauccaggaccuggggaaguacguggaggacaccaagaucgaccucuggagcuacaacgccgagcugcugguggcccucgagaaccagcacaccaucgaccugacggacuccgagaugaacaagcuguucgagaagaccaagaagcagcuccgcgagaacgcggaggacaugggcaacgggugcuucaagaucuaccacaagugcgacaacgccugcaucggcagcauccgcaacgggaccuacgaccacgacgucuaccgggacgaggcccugaacaaccgcuuccagaucaagggcguggagcugaaguccggcuacaaggacuggauccucuggaucagcuucgccaucuccugcuuccugcugugcguggcccuccugggguucaucaugugggcgugccagaagggcaacauccggugcaacaucugcaucuga

SEQ ID NO: 71808 - RNA, 1701 nt, Artificial Sequence
  derived and/or modified CDS sequence (opt1) from hemagglutinin__InfluenzaA__AET10105
augaagaccaucaucgcccugagcuacauccucugccugguguucgcccaggagcugcccggcaacgacaacuccaccgcgacgcucugccuggggcaccacgccgucccgaacggcaccaucgugaagaccaucaccaacgaccagaucgaggugacgaacgccaccgagcugguccagagcuccagcaccggggagaucugcaacagcccccaccagauccucgacggcgagaacugcacccugaucgacgcccugcucggggacccccagugcgacggcuuccagaacaagaagugggaccuguucguggagcgcagcaaggcccacuccaacugcuaccccuacgacgugccggacuacgcgagccugcggucccucgucgccagcuccggcacgcuggaguucaacaacgagagcuucaacuggaccggggugacccagaacggcaccuccagcgccugcauccgccgguccaacaacagcuucuucucccgccugaacuggcucacgcaccugaacuucaaguaccccgcccugaacgugaccaugcccaacaacgagcaguucgacaagcucuacaucuggggcguccaccaccccgggaccgacaaggaccagaucuuccuguacgcgcaggccgccgggcggaucaccgugagcacgaagcgcucccagcaggccgugaucccgaacaucggcagccggccccgcguccggaacauccccagccgcguguccaucuacuggaccaucgugaagcccggcgacauccugcucaucaacagcaccgggaaccugaucgccccgcggggcuacuucaagauccgcuccgggaaguccuccaucaugcggagcgacgcgcccaucggcaagugcaacuccgccugcaucacccccaacggcagcauccccaacgacaagccguuccagaacgucaaccgcaucacguacggggccugcccccgguacgugaagcagaacacccugaagcucgccaccggcaugcgcaacgugcccgagaagcagacccgggggaucuucggcgccaucgcgggguucaucgagaacggcugggagggcauggucgacgggugguacggcuuccgccaccagaacuccgaggggcggggccaggccgccgaccucaagagcacgcaggccgccaucgaccagaucaacgggaagcugaaccgccugaucggcaagaccaacgagaaguuccaccagaucgagaaggaguucuccgagguggagggccggauccaggaccuggagaaguacguggaggacaccaagaucgaccuguggagcuacaacgcggagcuccuggucgcccuggagaaccagcacaccaucgaccucacggacuccgagaugaacaagcuguucgagaagaccaagaagcagcugcgcgagaacgccgaggacauggggaacggcugcuucaagaucuaccacaagugcgacaacgccugcaucgggagcauccgcaacggcaccuacgaccacgacguguaccgggacgaggcccucaacaaccgcuuccagaucaaggggguggagcugaaguccggcuacaaggacuggauccuguggaucagcuucgcgaucuccugcuuccuccugugcgucgcccugcucggcuucaucaugugggccugccagaaggggaacauccggugcaacaucugcaucuga

SEQ ID NO: 71809 - RNA, 1701 nt, Artificial Sequence
  derived and/or modified CDS sequence (opt1) from hemagglutinin__InfluenzaA__AET10106
augaagaccaucaucgcccugagcuacauccucugccugguguucgcccagaagcugcccggcaacuacaacuccaccgcgacgcucugccuggggcaccacgccgucccgaacggcaccaucgugaagaccaucaccaacgaccagaucgaggugacgaacgccaccgagcugguccagagcuccagcaccggggagaucugcaacagcccccaccagauccucgacggcgagaacugcacccugaucgacgcccugcucggggacccccagugcgacggcuuccagaacaagaagugggaccuguucguggagcgcagcaaggcccacuccaacugcuaccccuacgacgugccggacuacgcgagccugcggucccucgucgccagcuccggcacgcuggaguucaacaacgagagcuucaacuggaccggggugacccagaacggcaccuccagcgccugcauccgccgguccaacaacagcuucuucucccgccugaacuggcucacgcaccugaacuucaaguaccccgcccugaacgugaccaugcccaacaacgagcaguucgacaagcucuacaucuggggcguccaccaccccgggaccgacaaggaccagaucuuccuguacgcgcaggccagcgggcggaucaccguguccacgaagcgcagccagcaggccgugaucccgaacaucggcagccggccccgcguccggaacauccccucccgcgugagcaucuacuggaccaucgugaagcccggcgacauccugcucaucaacuccaccgggaaccugaucgccccgcggggcuacuucaagauccgcagcgggaaguccagcaucaugcgguccgacgcccccaucggcaagugcaacagcgcgugcaucacccccaacggcuccauccccaacgacaagccguuccagaacgucaaccgcaucacguacggggccugcccccgguacgugaagcagaacacccugaagcucgccaccggcaugcgcaacgugcccgagaagcagacccgggggaucuucggcgccaucgccggguucaucgagaacggcugggagggcauggucgacgggugguacggcuuccgccaccagaacagcgaggggcggggccaggcggccgaccugaaguccacgcaggccgccaucgaccagaucaacgggaagcugaaccgccucaucggcaagaccaacgagaaguuccaccagaucgagaaggaguucagcgagguggagggccggauccaggaccuggagaaguacguggaggacaccaagaucgaccugugguccuacaacgccgagcuccuggucgcgcuggagaaccagcacaccaucgaccucacggacagcgagaugaacaagcuguucgagaagaccaagaagcagcugcgcgagaacgccgaggacauggggaacggcugcuucaagaucuaccacaagugcgacaacgccugcaucggguccauccgcaacggcaccuacgaccacgacguguaccgggacgaggcccucaacaaccgcuuccagaucaaggggguggagcugaaguccggcuacaaggacuggauccuguggaucuccuucgccaucagcugcuuccuccugugcgucgcgcugcucggcuucaucaugugggccugccagaaggggaacauccggugcaacaucugcaucuga

SEQ ID NO: 71810 - RNA, 1701 nt, Artificial Sequence
  derived and/or modified CDS sequence (opt1) from hemagglutinin__InfluenzaA__AET10107
augaagaccaucaucgcccugagcuacauccucugccugguguucgcccaggagauccccggcaacgacaacuccaccgcgacgcugugccucgggcaccacgccgucccgaacggcaccaucgugaagaccaucaccaacgaccagaucgaggugacgaacgccaccgagcugguccagagcuccagcaccggggagaucugcaacagcccccaccagauccuggacggcgagaacugcacccucaucgacgcccugcugggggacccccagugcgacggcuuccagaacaagaagugggaccucuucguggagcgcuccaaggcccacuccaacugcuaccccuacgacgugccggacuacgcgagccugcggucccuggucgccagcuccggcacgcucgaguucaacaacgagagcuucaacuggaccggggugacccagaacggcaccuccagcgccugcauccgccgguccaacaacagcuucuucucccgccugaacuggcugacgcaccucaacuucaaguaccccgcccugaacgugaccaugcccaacaacgagcaguucgacaagcuguacaucuggggcguccaccaccccgggaccgacaaggaccagaucuuccucuacgcgcaggccagcgggcggaucaccguguccacgaagcgcagccagcaggccgugaucccgaacaucggcagccggccccgcguccggaacauccccucccgcgugagcaucuacuggaccaucgugaagcccggcgacauccugcugaucaacuccaccgggaaccucaucgccccgcggggcuacuucaagauccgcagcgggaaguccagcaucaugcgguccgacgcccccaucggcaagugcaacagcgcgugcaucacccccaacggcuccauccccaacgacaagccguuccagaacgucaaccgcaucacguacggggccugcccccgguacgugaagcagaacacccugaagcuggccaccggcaugcgcaacgugcccgagaagcagacccgggggaucuucggcgccaucgccggguucaucgagaacggcugggagggcauggucgacgggugguacggcuuccgccaccagaacagcgaggggcggggccaggcggccgaccucaaguccacgcaggccgccaucgaccagaucaacgggaagcugaaccgccugaucggcaagaccaacgagaaguuccaccagaucgagaaggaguucagcgagguggagggccggauccaggaccucgagaaguacguggaggacaccaagaucgaccugugguccuacaacgccgagcugcucgucgcgcuggagaaccagcacaccaucgaccugacggacagcgagaugaacaagcuguucgagaagaccaagaagcagcuccgcgagaacgccgaggacauggggaacggcugcuucaagaucuaccacaagugcgacaacgccugcaucggguccauccgcaacggcaccuacgaccacgacguguaccgggacgaggcccugaacaaccgcuuccagaucaaggggguggagcucaagagcggcuacaaggacuggauccuguggaucuccuucgccaucagcugcuuccugcucugcgucgcgcugcugggcuucaucaugugggccugccagaaggggaacaucaagugcaacaucugcaucuga

SEQ ID NO: 71811 - RNA, 1701 nt, Artificial Sequence; identical to SEQ ID NO: 67435
  derived and/or modified CDS sequence (opt1) from hemagglutinin__InfluenzaA__AET10108

SEQ ID NO: 71812 - RNA, 1701 nt, Artificial Sequence; identical to SEQ ID NO: 71006
  derived and/or modified CDS sequence (opt1) from hemagglutinin__InfluenzaA__AET10109

SEQ ID NO: 71813 - RNA, 1701 nt, Artificial Sequence
  derived and/or modified CDS sequence (opt1) from hemagglutinin__InfluenzaA__AET10110
augaagaccaucaucgcccugagcuacauccucugccugguguucgcccagaagcugcccggcaacgacaacuccaccgcgacgcucugccuggggcaccacgccgucccgaacggcaccaucgugaagaccaucaccaacgaccagaucgaggugacgaacgccaccgagcugguccagagcuccagcaccggggagaucugcaacagcccccaccagauccucgacggcgagaacugcacccugaucgacgcccugcucggggacccccagugcgacggcuuccagaacaagaagugggaccuguucguggagcgcagcaaggccuacuccaacugcuaccccuacgacgugccggacuacgcgagccugcggucccucgucgccagcuccggcacgcuggaguucaacaacgagagcuucaacuggaccggggugacccagaacggcaccuccagcgccugcauccgccgguccaacaacagcuucuucucccgccugaacuggcucacgcaccugaacuucaaguaccccgcccugaacgugaccaugcccaacaacgagcaguucgacaagcucuacaucuggggcguccaccaccccgggaccgacaaggaccagaucuuccuguacgcgcaggccagcgggcggaucaccguguccacgaagcgcagccagcaggccgugaucccgaacaucggcagccggccccgcguccggaacauccccucccgcgugagcaucuacuggaccaucgugaagcccggcgacauccugcucaucaacuccaccgggaaccugaucgccccgcggggcuacuucaagauccgcagcgggaaguccagcaucaugcgguccgacgcccccaucggcaagugcaacagcgcgugcaucacccccaacggcuccauccccaacgacaagccguuccagaacgucaaccgcaucacguacggggccugcccccgguacgugaagcagaacacccugaagcucgccaccggcaugcgcaacgugcccgagaagcagacccgggggaucuucggcgccaucgccggguucaucgagaacggcugggagggcauggucgacgggugguacggcuuccgccaccagaacagcgaggggcggggccaggcggccgaccugaaguccacgcaggccgccaucgaccagaucaacgggaagcugaaccgccucaucggcaagaccaacgagaaguuccaccagaucgagaaggaguucagcgagguggagggccggauccaggaccuggagaaguacguggaggacaccaagaucgaccugugguccuacaacgccgagcuccuggucgcgcuggagaaccagcacaccaucgaccucacggacagcgagaugaacaagcuguucgagaagaccaagaagcagcugcgcgagaacgccgaggacauggggaacggcugcuucaagaucuaccacaagugcgacaacgccugcaucggguccauccgcaacggcaccuacgaccacgacguguaccgggacgaggcccucaacaaccgcuuccagaucaaggggguggagcugaaguccggcuacaaggacuggauccuguggaucuccuucgccaucagcugcuuccuccugugcgucgcgcugcucggcuucaucaugugggccugccagaaggggaacaucaagugcaacaucugcaucuga

SEQ ID NO: 71814 - RNA, 1701 nt, Artificial Sequence
  derived and/or modified CDS sequence (opt1) from hemagglutinin__InfluenzaA__AET10111
augaagaccaucaucgcccugagcuacauccucugccugguguucgcccaggagauccccggcaacgacaacuccaccgcgacgcugugccucgggcaccacgccgucccgaacggcaccaucgugaagaccaucaccaacgaccagaucgaggugacgaacgccaccgagcugguccagagcuccagcaccggggagaucugcaacagcccccaccagauccuggacggcgagaacugcacccucaucgacgcccugcugggggacccccagugcgacggcuuccagaacaagaagugggaccucuucguggagcgcuccaaggcccacuccaacugcuaccccuacgacgugccggacuacgcgagccugcggucccuggucgccagcuccggcacgcucgaguucaacaacgagagcuucaacuggaccggggugacccagaacggcaccuccagcgccugcauccgccgguccaacaacagcuucuucucccgccugaacuggcugacgcaccucaacuucaaguaccccgcccugaacgugaccaugcccaacaacgagcaguucgacaagcuguacaucuggggcguccaccaccccgggaccgacaaggaccagaucuuccucuacgcgcaggccagcgggcggaucaccguguccacgaagcgcagccagcaggccgugaucccgaacaucggcagccggccccgcguccggaacauccccucccgcgugagcaucuacuggaccaucgugaagcccggcgacauccugcuguccaacagcaccgggaaccucaucggcccgcggggguacuucaagauccgcuccggcaagagcuccaucaugcggagcgacgcccccaucggcaagugcaacuccgccugcaucacccccaacgggagcauccccaacgacaagccguuccagaacgucaaccgcaucacguacggcgcgugcccccgguacgugaagcagaacacccugaagcuggccaccgggaugcgcaacgugcccgagaagcagacccggggcaucuucggggccaucgccggcuucaucgagaacggcugggaggggauggucgacggcugguacggguuccgccaccagaacuccgagggccgggggcaggccgcggaccucaagagcacgcaggccgccaucgaccagaucaacggcaagcugaaccgccugaucggcaagaccaacgagaaguuccaccagaucgagaaggaguucuccgagguggaggggcggauccaggaccucgagaaguacguggaggacaccaagaucgaccuguggagcuacaacgccgagcugcucgucgcccuggagaaccagcacaccaucgaccugacggacuccgagaugaacaagcuguucgagaagaccaagaagcagcuccgcgagaacgcggaggacaugggcaacgggugcuucaagaucuaccacaagugcgacaacgccugcaucggcagcauccgcaacgggaccuacgaccacgacguguaccgggacgaggcccugaacaaccgcuuccagaucaagggcguggagcucaaguccggcuacaaggacuggauccuguggaucagcuucgccaucuccugcuuccugcucugcgucgcccugcugggguucaucaugugggcgugccagaagggcaacauccggugcaacaucugcaucuga

SEQ ID NO: 71815 - RNA, 1701 nt, Artificial Sequence
  derived and/or modified CDS sequence (opt1) from hemagglutinin__InfluenzaA__AET10113
augaagaccaucaucgcccugagcuacauccucugccugguguucgcccaggagcugcccggcaacgacaacuccaccgcgacgcucugccuggggcaccacgccguccagaacggcaccaucgugaagaccaucaccaacgaccagaucgaggugacgaacgccaccgagcugguccagagcuccagcaccggggagaucugcaacuccccgcaccagauccucgacggcgagaacugcacccugaucgacgcccugcucggggacccccagugcgacggcuuccagaacaagaagugggaccuguucguggagcgcagcaaggcccacuccaacugcuaccccuacgacgugcccgacuacgcgagccugcggucccucgucgccagcuccggcacgcuggaguucaacaacgagagcuucaacuggaccggggugacccagaacggcaccuccagcgccugcauccgccgguccaacaacagcuucuucucccgccugaacuggcucacgcaccugaacuucaaguacccggcccugaacgugaccaugcccaacaacgagcaguucgacaagcucuacaucuggggcguccaccaccccgggaccgacaaggaccagaucuuccuguacgcgcaggccagcgggcggaucaccguguccacgaagcgcagccagcaggccgugauccccaacaucggcagccggccgcgcguccggaacauccccucccgcgugagcaucuacuggaccaucgugaagcccggcgacauccugcucaucaacuccaccgggaaccugaucgcgccccggggcuacuucaagauccgcagcgggaaguccagcaucaugcgguccgacgccccgaucggcaagugcaacagcgccugcaucacccccaacggcuccauccccaacgacaagcccuuccagaacgucaaccgcaucacguacggggccugcccgcgguacgugaagcagaacacccugaagcucgccaccggcaugcgcaacgugcccgagaagcagacccgggggaucuucggcgccaucgccggguucaucgagaacggcugggagggcauggucgacgggugguacggcuuccgccaccagaacagcgaggggcggggccaggcggccgaccugaaguccacgcaggccgccaucgaccagaucaacgggaagcugaaccgccucaucggcaagaccaacgagaaguuccaccagaucgagaaggaguucagcgagguggagggccggauccaggaccuggagaaguacguggaggacaccaagaucgaccugugguccuacaacgccgagcuccuggucgcgcuggagaaccagcacaccaucgaccucacggacagcgagaugaacaagcuguucgagaagaccaagaagcagcugcgcgagaacgccgaggacauggggaacggcugcuucaagaucuaccacaagugcgacaacgccugcaucggguccauccgcaacggcaccuacgaccacgacguguaccgggacgaggcccucaacaaccgcuuccagaucaaggggguggagcucaagagcggcuacaaggacuggauccuguggaucuccuucgccaucagcugcuuccugcugugcgucgcgcugcucggcuucaucaugugggccugccagaaggggaacauccggugcaacaucugcaucuga

SEQ ID NO: 71816 - RNA, 1701 nt, Artificial Sequence
  derived and/or modified CDS sequence (opt1) from hemagglutinin__InfluenzaA__AET10114
augaagaccaucaucgcccugagcuacauccucugccugguguucgcccaggagcugcccggcaacgacgacuccaccgcgacgcucugccuggggcaccacgccgucccgaacggcaccaucgugaagaccaucaccaacgaccagaucgaggugacgaacgccaccgagcugguccagagcuccagcaccggggagaucugcaacagcccccaccagauccucgacggcgagaacugcacccugaucgacgcccugcucggggacccccagugcgacggcuuccagaacaagaagugggaccuguucguggagcgcagcaaggcccacuccaacugcuaccccuacgacgugccggacuacgcgagccugcggucccucgucgccagcuccggcacgcuggaguucaacaacgagagcuucaacuggaccggggugacccagaacggcaccuccagcgccugcauccgccgguccaacaacagcuucuucucccgccugaacuggcucacgcaccugaacuucaaguaccccgcccugaacgugaccaugcccaacaacgagcaguucgacaagcucuacaucuggggcguccaccaccccgggaccgacaaggaccagaucuuccuguacgcgcaggccagcgggcggaucaccguguccacgaagcgcagccagcaggccgugaucccgaacaucggcagccggccccgcguccggaacauccccucccgcgugagcaucuacuggaccaucgugaagcccggcgacauccugcucaucaacuccaccgggaaccugaucgccccgcggggcuacuucaagauccgcagcgggaaguccagcaucaugcgguccgacgcccccaucggcaagugcaacagcgcgugcaucacccccaacggcuccaucagcaacgacaagcccuuccagaacgucaaccgcaucacguacggggccugcccgcgguacgugaagcagaacacccugaagcucgccaccggcaugcgcaacgugcccgagaagcagacccgggggaucuucggcgccaucgccggguucaucgagaacggcugggagggcauggucgacgggugguacggcuuccgccaccagaacuccgaggggcggggccaggcggccgaccugaaguccacgcaggccgccaucgaccagaucaacgggaagcugaaccgccucaucggcaagaccaacgagaaguuccaccagaucgagaaggaguucuccgagguggagggccggauccaggaccuggagaaguacguggaggacaccaagaucgaccuguggagcuacaacgccgagcuccuggucgcgcuggagaaccagcacaccaucgaccucacggacuccgagaugaacaagcuguucgagaagaccaagaagcagcugcgcgagaacgccgaggacauggggaacggcugcuucaagaucuaccacaagugcgacaacgccugcaucgggagcauccgcaacggcaccuacgaccacgacguguaccgggacgaggcccucaacaaccgcuuccagaucaaggggguggagcugaaguccggcuacaaggacuggauccuguggaucagcuucgccaucuccugcuuccuccugugcgucgcgcugcucggcuucaucaugugggccugccagaaggggaacaucaugugcaacaucugcaucuga

SEQ ID NO: 71817 - RNA, 1698 nt, Artificial Sequence
  derived and/or modified CDS sequence (opt1) from hemagglutinin__InfluenzaA__AET50439
augaaggugaagcugcucguccugcugugcaccuucaccgccacguacgccgacaccaucugcaucggcuaccacgcgaacaacagcaccgacaccguggacacggugcucgagaagaacgucaccgugacccacuccgugaaccugcuggagaacagccacaacgggaagcucugccugcugaagggcaucgcgccccuccagcuggggaacugcuccgucgccggcuggauccuggggaacccggagugcgagcuccugaucagcaaggaguccuggagcuacaucguggagaagcccaaccccgagaacgggaccugcuaccccggccacuucgccgacuacgaggagcugcgcgagcagcucuccagcguguccagcuucgagcgguucgagaucuucccgaaggaguccagcuggcccaaccacacggucaccgggguguccgccagcugcucccacaacggcgagagcuccuucuaccgcaaccugcuguggcucaccgggaagaacggccuguaccccaaccugagcaaguccuacgccaacaacaaggagaaggaggugcucguccuguggggcgugcaccacccgcccaacaucggcaaccagaaggcccuguaccacaccgagaacgccuacgugagcgucgugagcucccacuacagccggaaguucacgcccgagaucgccaagcgccccaaggugcgggaccaggagggccgcaucaacuacuacuggacccuccuggagcccggggacaccaucaucuucgaggcgaacggcaaccugaucgccccgcgguacgccuucgcccucucccgcggguucggcagcggcaucaucaacuccaacgcccccauggacaagugcgacgcgaagugccagacgccccagggggccaucaacagcucccugcccuuccagaacguccacccggugaccaucggcgagugccccaaguacgugcggagcgccaagcugcgcauggucaccgggcuccggaacauccccuccauccagagccgcggccuguucggggccaucgccggcuucaucgagggcggguggaccggcaugguggacgggugguacggcuaccaccaccagaacgagcagggguccggcuacgcggccgaccagaaguccacccagaacgccaucaacggcaucacgaacaaggugaacagcgucaucgagaagaugaacacccaguucaccgccguggggaaggaguucaacaagcuggagcggcgcauggagaaccucaacaagaaggucgacgacggcuucaucgacaucuggaccuacaacgccgagcugcuggugcuccuggagaacgagcggacgcuggacuuccacgacagcaacgugaagaaccucuacgagaaggucaagucccagcugaagaacaacgcgaaggagaucgggaacggcugcuucgaguucuaccacaagugcaacgacgagugcauggagagcgugaagaacgggaccuacgacuaccccaaguacuccgaggagagcaagcugaaccgcgagaagaucgacggcgugaagcucgaguccaugggcgucuaccagauccuggccaucuacagcaccguggccagcucccuggugcuccuggucagccugggggccaucuccuucuggaugugcagcaacggcucccuccagugccggaucugcaucuga

SEQ ID NO: 71818 - RNA, 1698 nt, Artificial Sequence
  derived and/or modified CDS sequence (opt1) from hemagglutinin__InfluenzaA__AET50440
augaaggugaagcugcucguccugcugugcaccuucaccgccacguacgccgacaccaucugcaucggcuaccacgcgaacaacagcaccgacaccguggacacggugcucgagaagaacgucaccgugacccacuccgugaaccugcuggagaacagccacaacgggaagcucugccugcugaagggcaucgcgccccuccagcuggggaacugcuccgucgccggcuggauccuggggaacccggagugcgagcuccugaucagcaaggaguccuggagcuacaucguggagaagcccaaccccgagaacgggaccugcuaccccggccacuucgccgacuacgaggagcugcgcgagcagcucuccagcguguccagcuucgagcgguucgagaucuucccgaaggaguccagcuggcccacgcacaccgucaccgggguguccgccagcugcucccacaacggcgagagcuccuucuaccgcaaccugcuguggcucaccgggaagaacggccuguaccccaaccugagcaaguccuacgccaacaacaaggagaaggaggugcucguccuguggggcgugcaccacccgcccaacaucggcaaccagaaggcccuguaccacacggagaacgccuacgugagcgucgugagcucccacuacagccggaaguucacccccgagaucgccaagcgccccaaggugcgggaccaggagggccgcaucaacuacuacuggacccuccuggagcccggggacaccaucaucuucgaggcgaacggcaaccugaucgccccgcgguacgccuucgcccucucccgcggguucggcagcggcaucaucaacuccaacgcccccauggacaagugcgacgcgaagugccagacgccccagggggccaucaacagcucccugcccuuccagaacguccacccggugaccaucggcgagugccccaaguacgugcggagcgccaagcugcgcauggucaccgggcuccggaacauccccuccauccagagccgcggccuguucggggccaucgccggcuucaucgagggcggguggaccggcaugguggacgggugguacggcuaccaccaccagaacgagcagggguccggcuacgcggccgaccagaaguccacgcagaacgccaucaacggcaucaccaacaaggugaacagcgucaucgagaagaugaacacccaguucaccgccguggggaaggaguucaacaagcuggagcggcgcauggagaaccucaacaagaaggucgacgacggcuucaucgacaucuggacguacaacgccgagcugcuggugcuccuggagaacgagcggacccuggacuuccacgacagcaacgugaagaaccucuacgagaaggucaagucccagcugaagaacaacgcgaaggagaucgggaacggcugcuucgaguucuaccacaagugcaacgacgagugcauggagagcgugaagaacgggaccuacgacuaccccaaguacuccgaggagagcaagcugaaccgcgagaagaucgacggcgugaagcucgaguccaugggcgucuaccagauccuggccaucuacagcaccguggccagcucccuggugcuccuggucagccugggggccaucuccuucuggaugugcagcaacggcucccuccagugccggaucugcaucuga

SEQ ID NO: 71819 - RNA, 1698 nt, Artificial Sequence
  derived and/or modified CDS sequence (opt1) from hemagglutinin__InfluenzaA__AET50441
augaaggugaagcugcucguccugcugugcaccuucaccgccacguacgccgacaccaucugcaucggcuaccacgcgaacaacagcaccgacaccguggacacggugcucgagaagaacgucaccgugacccacuccgugaaccugcuggagaacagccacaacgggaagcucugccugcugaagggcaucgcgccccuccagcuggggaacugcuccgucgccggcuggauccuggggaacccggagugcgagcuccugaucagcaaggaguccuggagcuacaucguggagaagcccaaccccgagaacgggaccugcuaccccggccacuucgccgacuacgaggagcugcgcgagcagcucuccagcguguccagcuucgagcgguucgagaucuucccgaaggaguccagcuggcccacgcacaccgucaccgggguguccgccagcugcucccacaacggcgagagcuccuucuaccgcaaccugcuguggcucaccgggaagaacggccuguaccccaaccugagcaaguccuacgccaacaacaaggagaaggaggugcucguccuguggggcgugcaccacccgcccaacaucggcaaccagaaggcccuguaccacacggagaacgccuacgugagcgucgugagcucccacuacagccggaaguucacccccgagaucgccaagcgccccaaggugcggggccaggaggggcgcaucaacuacuacuggacccuccuggagcccggcgacaccaucaucuucgaggcgaacgggaaccugaucgccccgcgguacgccuucgcccucucccgcggcuucggcagcgggaucaucaacuccaacgcccccauggacaagugcgacgcgaagugccagacgccccagggcgccaucaacagcucccugcccuuccagaacguccacccggugaccaucggggagugccccaaguacgugcggagcgccaagcugcgcauggucaccggccuccggaacauccccuccauccagagccgcgggcuguucggcgccaucgccggcuucaucgagggcggguggaccgggaugguggacggcugguacggguaccaccaccagaacgagcagggcuccggcuacgcggccgaccagaaguccacgcagaacgccaucaacgggaucaccaacaaggugaacagcgucaucgagaagaugaacacccaguucaccgccgugggcaaggaguucaacaagcuggagcggcgcauggagaaccucaacaagaaggucgacgacggguucaucgacaucuggacguacaacgccgagcugcuggugcuccuggagaacgagcggacccuggacuuccacgacagcaacgugaagaaccucuacgagaaggucaagucccagcugaagaacaacgcgaaggagaucggcaacgggugcuucgaguucuaccacaagugcaacgacgagugcauggagagcgugaagaacggcaccuacgacuaccccaaguacuccgaggagagcaagcugaaccgcgagaagaucgacggcgugaagcucgaguccaugggggucuaccagauccuggccaucuacagcaccguggccagcucccuggugcuccuggucagccugggcgccaucuccuucuggaugugcagcaacgggucccuccagugccggaucugcaucuga

SEQ ID NO: 71820 - RNA, 1698 nt, Artificial Sequence
  derived and/or modified CDS sequence (opt1) from hemagglutinin__InfluenzaA__AET50442
augaaggugaagcugcucguccugcugugcaccuucaccgccacguacgccgacaccaucugcaucggcuaccacgcgaacaacagcaccgacaccguggacacggugcucgagaagaacgucaccgugacccacuccgugaaccugcuggagaacagccacaacgggaagcucugccugcugaagggcaucgcgccccuccagcuggggaacugcuccgucgccggcuggauccuggggaacccggagugcgagcuccugaucagcaaggaguccuggagcuacaucguggagaagcccaaccccgagaacggcaucugcuaccccggccacuucgccgacuacgaggagcugcgcgagcagcucuccagcguguccagcuucgagcgguucgagaucuucccgaaggaguccagcuggcccacccacacggucaccgggguguccgccagcugcucccacaacggcgagagcuccuucuaccgcaaccugcuguggcucaccgggaagaacggccuguaccccaaccugagcaaguccuacgccaacaacaaggagaaggaggugcucguccuguggggcgugcaccacccgcccaacaucgggaaccagaaggcccuguaccacaccgagaacgccuacgugagcgucgugagcucccacuacagccggaaguucacgcccgagaucgccaagcgccccaaggugcggggccaggaggggcgcaucaacuacuacuggacccuccuggagcccggcgacaccaucaucuucgaggcgaacgggaaccugaucgccccgcgguacgccuucgcccucucccgcggcuucggcagcgggaucaucaacuccaacgcccccauggacaagugcgacgcgaagugccagacgccccagggcgccaucaacagcucccugcccuuccagaacguccacccggugaccaucggggagugccccaaguacgugcggagcgccaagcugcgcauggucaccggccuccggaacauccccuccauccagagccgcgggcuguucggcgccaucgccggcuucaucgagggcggguggaccgggaugguggacggcugguacggguaccaccaccagaacgagcagggcuccggcuacgcggccgaccagaaguccacccagaacgccaucaacgggaucacgaacaaggugaacagcgucaucgagaagaugaacacccaguucaccgccgugggcaaggaguucaacaagcuggagcggcgcauggagaaccucaacaagaaggucgacgacggguucaucgacaucuggaccuacaacgccgagcugcuggugcuccuggagaacgagcggacgcuggacuuccacgacagcaacgugaagaaccucuacgagaaggucaagucccagcugaagaacaacgcgaaggagaucggcaacgggugcuucgaguucuaccacaagugcaacgacgagugcauggagagcgugaagaacggcaccuacgacuaccccaaguacuccgaggagagcaagcugaaccgcgagaagaucgacggcgugaagcucgaguccaugggggucuaccagauccuggccaucuacagcaccguggccagcucccuggugcuccuggucagccugggcgccaucuccuucuggaugugcagcaacgggucccuccagugccggaucugcaucuga

SEQ ID NO: 71821 - RNA, 1698 nt, Artificial Sequence
  derived and/or modified CDS sequence (opt1) from hemagglutinin__InfluenzaA__AET84163
augaaggugaagcugcucguccugcugugcaccuucaccgccacguacgccgacaccaucugcaucggcuaccacgcgaacaacagcaccgacaccguggacacggugcucgagaagaacgucaccgugacccacuccgugaaccugcuggagaacagccacaacgggaagcucugccugcugaagggcaucgcgccccuccagcuggggaacugcuccgucgccggcuggauccuggggaacccggagugcgagagccucaucuccaaggagagcugguccuacaucguggagaagcccaaccccgagaacgggaccugcuaccccggccacuucgccgacuacgaggagcugcgcgagcagcugagcuccgugagcuccuucgagcgguucgagaucuucccgaaggagagcuccuggcccaaccacacggucaccggggugagcgccuccugcagccacaacggcgaguccagcuucuaccgcaaccuccuguggcugaccgggaagaacggccucuaccccaaccuguccaagagcuacgccaacaacaaggagaaggaggugcugguccucuggggcgugcaccacccgcccagcaucuccaaccagaagacccuguaccacacggagaacgccuacgugagcgucguguccagccacuacucccggaaguucacccccgagguggccaagcgccccaagguccgggaccaggagggccgcaucaacuacuacuggacccugcucgagcccggcgacaccaucaucuucgaggccaacgggaaccugaucgcgccgcgguacgccuucgcccugagccgcggcuucggguccggcaucaucaacagcaacgcccccauggacaagugcgacgccaagugccagacgccccagggcgcgaucaacuccagccuccccuuccagaacgugcacccggugaccaucggggagugccccaaguacguccgguccgccaagcugcgcauggugaccggccugcggaacauccccagcauccagucccgcggccucuucggggccaucgccggguucaucgagggcggcuggaccgggaugguggacggcugguacggguaccaccaccagaacgagcagggcagcggguacgccgcggaccagaaguccacgcagaacgccaucaacggcaucaccaacaaggucaacagcgugaucgagaagaugaacacccaguucaccgccgucggcaaggaguucaacaagcuggagcggcgcauggagaaccugaacaagaagguggacgacggguucaucgacaucuggacguacaacgccgagcuccuggugcugcucgagaacgagcggacccuggacuuccacgacuccaacgucaagaaccuguacgagaaggucaagagccagcucaagaacaacgccaaggagaucggcaacgggugcuucgaguucuaccacaagugcaacgacgagugcauggaguccgugaagaacggcaccuacgacuaccccaaguacagcgaggagagcaagcugaaccgcgagaagaucgacggggugaagcuggaguccaugggcguguaccagauccucgcgaucuacagcaccguggccuccagccugguccugcucgugucccugggcgccaucagcuucuggaugugcuccaacgggagccugcagugccggaucugcaucuga

SEQ ID NO: 71822 - RNA, 1698 nt, Artificial Sequence
  derived and/or modified CDS sequence (opt1) from hemagglutinin__InfluenzaA__AET84174
augaaggugaagcugcucguccugcugugcaccuucaccgccacguacgccgacaccaucugcaucggcuaccacgcgaacaacagcaccgacaccguggacacggugcucgagaagaacgucaccgugacccacuccgugaaccugcuggagaacagccacaacgggaagcucugccugcugaagggcaucgcgccccuccagcuggggaacugcuccgucgccggcuggauccuggggaacccggagugcgagcuccugaucagcaaggaguccuggagcuacaucguggagaagcccaaccccgagaacgggaccugcuaccccggccacuucgccgacuacgaggagcugcgcgagcagcucuccagcguguccagcuucgagcgguucgagaucuucccgaaggaguccagcuggcccaaccacacggucaccgggguguccgccagcugcucccacaacggcgagagcuccuucuaccgcaaccugcuguggcucaccgggaagaacggccuguaccccaaccugagcaaguccuacgccaacaacaaggagaaggaggugcucguccuguggggcgugcaccacccgcccaacaucguggaccagaagacccuguaccggacggagaacgccuacgucagcguggugagcucccacuacagccgcaaguucacccccgagaucgccaagcggcccaagguccgcgaccaggagggccggaucaacuacuacuggacccuccuggagcccggcgacaccaucaucuucgaggccaacgggaaccugaucgcgccgcgcuacgccuucgcccucauccggggcuucggguccggcaucaucaacagcaacgcccccaugggcaagugcgacgccaagugccagacgccccagggggcgaucaacuccagccugcccuuccagaacgugcacccggugaccaucggcgagugccccaaguacguccgcuccgccaagcugcggauggugaccgggcuccgcaacauccccagcauccagucccggggccuguucggggccaucgccggcuucaucgagggcggguggaccggcaugguggacgggugguacggcuaccaccaccagaacgagcaggggagcggcuacgccgcggaccagaaguccacgcagaacgccaucaacggcaucaccaacaaggucaacagcgugaucgagaagaugaacacccaguucaccgccgucgggaaggaguucaacaagcuggagcgccggauggagaaccucaacaagaagguggacgacggcuucaucgacaucuggacguacaacgccgagcugcuggugcuccuggagaacgagcgcacccuggacuuccacgacuccaacgucaagaaccucuacgagaaggucaagagccagcugaagaacaacgccaaggagaucgggaacggcugcuucgaguucuaccacaagugcaacgacgagugcauggaguccgugaagaacgggaccuacgacuaccccaaguacagcgaggaguccaagcugaaccgggagaagaucgacggcgugaagcucgagagcaugggcguguaccagauccuggcgaucuacuccaccguggccagcagccugguccuccuggugucccugggggccaucagcuucuggaugugcuccaacggcagccuccagugccgcaucugcaucuga

SEQ ID NO: 71823 - RNA, 1698 nt, Artificial Sequence
  derived and/or modified CDS sequence (opt1) from hemagglutinin__InfluenzaA__AET84196
augaaggugaagcugcucguccugcugugcaccuucaccgccacguacgccgacaccaucugcaucggcuaccacgcgaacaacagcaccgacaccguggacacggugcucgagaagaacgucaccgugacccacuccgugaaccugcuggagaacagccacaacgggaagcucugccugcugaagggcaucgcgccccuccagcuggggaacugcuccgucgccggcuggauccuggggaacccggagugcgagagccucaucuccaaggagagcugguccuacaucguggagaagcccaaccccgagaacgggaccugcuaccccggccacuucgccgacuacgaggagcugcgcgagcagcugagcuccgugagcuccuucgagcgguucgagaucuucccgaaggagagcuccuggcccaaccacacggucaccggggugagcgccuccugcagccacaacggcgaguccagcuucuaccgcaaccuccuguggcugacccggaagaacgggcucuaccccacccuguccaagagcuacgccaacaacaaggagaaggaggugcugguccucuggggcgugcaccacccgcccagcaucaacgaccagaagacgcuguaccacaccgagaacgccuacguguccgucgugagcucccacuacagccgcaaguucacccccgagaucgccaagcggcccaaggugcgcgaccaggaggggcggaucaacuacuacuggacccugcucgagcccggcgacacgaucaucuucgaggccaacggcaaccugaucgcgccgcgcuacgccuucgcccugucccggggguucggcagcgggaucaucaacuccagcgcccccauggacaagugcgacgccaagugccagacgccccagggcgcgaucaacuccagccuccccuuccagaacguccacccggugaccaucggcgagugccccaaguacgugcgcuccgccaagcugcggauggucaccgggcugcgcaacauccccagcauccagucccggggccucuucggggccaucgccggcuucaucgagggcggcuggaccggcaugguggacgggugguacggcuaccaccaccagaacgagcaggggagcggcuacgccgcggaccagaaguccacccagaacgccaucaacgggaucaccaacaaggugaacagcgucaucgagaagaugaacacccaguucacggccgugggcaaggaguucaacaagcuggagcgccggauggagaaccugaacaagaaggucgacgacggcuucaucgacaucuggaccuacaacgccgagcuccuggugcugcucgagaacgagcgcacccuggacuuccacaacuccaacgugaagaaccuguacgagaaggucaagagccagcucaagaacaacgccaaggagaucgggaacggcugcuucgaguucuaccacaagugcaacgacgagugcauggaguccgugaagaacgggaccuacgacuaccccaaguacagcgaggagagcaagcugaaccgggagaagaucgacggcgugaagcuggaguccaugggggucuaccagauccucgcgaucuacagcacgguggccuccagccuggugcugcucgucucccugggcgccaucagcuucuggaugugcuccaacggcagccugcagugccgcaucugcaucuga

SEQ ID NO: 71824 - RNA, 1698 nt, Artificial Sequence
  derived and/or modified CDS sequence (opt1) from hemagglutinin__InfluenzaA__AET84207
augaaggugaagcugcucguccugcugugcaccuucaccgccacguacgccgacaccaucugcaucggcuaccacgcgaacaacagcaccgacaccguggacacggugcucgagaagaacgucaccgugacccacuccgugaaccugcuggagaacagccacaacgggaagcucugccugcugaagggcaucgcgccccuccagcuggggaacugcuccgucgccggcuggauccuggggaacccggagugcgagcuccugaucagcaaggaguccuggagcuacaucguggagaagcccaaccccgagaacgggaccugcuaccccggccacuucgccgacuacgaggagcugcgcgagcagcucuccagcgugccguccuucgagcgguucgagaucuuccccaaggagagcuccuggcccaaccacacggucaccggggugagcgccuccugcagccacaacggcgaguccagcuucuaccgcaaccugcuguggcucaccgggaagaacggccuguaccccaaccuguccaagagcuacgccaacaacaaggagaaggaggugcucguccuguggggcgugcaccacccgcccuccaucaacgaccagaagacccuguaccacacggagaacgccuacgugagcgucgugagcucccacuacagccggaaguucacccccgagaucgccaagcgccccaaggugcgggaccaggagggccgcaucaacuacuacuggacccuccuggagccgcgggacaccaucaucuucgaggccaacggcaaccugaucgcgccccgcuacgccuucgcccucucccggggguucggcagcgggaucaucaacuccaacgcccccauggacaagugcgacgccaagugccagacgccccagggcgcgaucaacagcucccugccguuccagaacguccaccccgugaccaucggcgagugccccaaguacgugcgcagcgccaagcugcggauggucaccgggcuccgcaacauccccuccauccagagccggggccuguucggggccaucgccggcuucaucgagggcggguggaccggcaugguggacgggugguacggcuaccaccaccagaacgagcagggguccggcuacgccgcggaccagaaguccacgcagaacgccaucaacgggaucaccaacaaggugaacagcgucaucgagaagaugaacacccaguucaccgccgugggcaaggaguucaacaagcuggagcgccggauggagaaccucaacaagaaggucgacgacggcuucaucgacaucuggacguacaacgccgagcugcuggugcuccuggagaacgagcgcacccuggacuuccacgacagcaacgugaagaaccucuacgagaaggucaagucccagcugaagaacaacgccaaggagaucgggaacggcugcuucgaguucuaccacaagugcaacgacgagugcauggagagcgugaagaacgggaccuacgacuacccgaaguacuccgaggagagcaagcugaaccgggagaagaucgacggcgugaagcucgaguccaugggggucuaccagauccuggcgaucuacagcaccguggccagcucccuggugcuccuggucagccugggcgccaucuccuucuggaugugcagcaacggcucccuccagugccgcaucugcaucuga

SEQ ID NO: 71825 - RNA, 1698 nt, Artificial Sequence
  derived and/or modified CDS sequence (opt1) from hemagglutinin__InfluenzaA__AET84218
augaaggugaagcugcucguccugcugugcaccuucaccgccacguacgccgacaccaucugcaucggcuaccacgcgaacaacagcaccgacaccguggacacggugcucgagaagaacgucaccgugacccacuccgugaaccugcuggagaacagccacaacgggaagcucugccugcugaagggcaucgcgccccuccagcuggggaacugcuccgucgccggcuggauccuggggaacccggagugcgagcuccugaucagcaaggaguccuggagcuacaucguggagaagcccaaccccgagaacgggaccugcuaccccggccacuucgccgacuacgaggagcugcgcgagcagcucuccagcguguccagcuucgagcgguucgagaucuucccgaaggaguccagcuggcccaaccacacggucaccgggguguccgccagcugcucccacaacggcgagagcuccuucuaccgcaaccugcuguggcucaccgggaagaacggccuguaccccaaccugagcaaguccuacgccaacaacaaggagaaggaggugcucguccuguggggcgugcaccacccgcccaacaucagcaaccagaagacccuguaccacacggagaacgccuacgugagcgucguguccagccacuacucccggaaguucacccccgagaucgccaagcgccccaaggugcgggaccaggagggccgcaucaacuacuacuggacccuccuggagcccggcgacaccaucaucuucgaggccagcgggaaccugaucgcgccgcgguacgccuucgcccucucccgcggcuucgggagcggcaucaucaacuccaacgcccccauggacaagugcgacgccaagugccagacgccccagggcgcgaucaacagcucccugcccuuccagaacguccacccggugaccaucggggagugccccaaguacgugcggagcgccaagcugcgcauggucaccggccuccggaacauccccuccauccagagccgcgggcuguucggcgccaucgccggguucaucgagggcggcuggaccgggaugguggacggcugguacggguaccaccaccagaacgagcagggcuccggguacgccgcggaccagaaguccacgcagaacgccaucaacggcaucaccaacaaggugaacagcgucaucgagaagaugaacacccaguucaccgccgugggcaaggaguucaacaagcuggagcggcgcauggagaaccucaacaagaaggucgacgacggguucaucgacaucuggacguacaacgccgagcugcuggugcuccuggagaacgagcggacccuggacuuccacgacagcaacgugaagaaccucuacgagaaggucaagucccagcugaagaacaacgccaaggagaucggcaacgggugcuucgaguucuaccacaagugcaacgacgagugcauggagagcgugaagaacggcaccuacgacuaccccaaguacuccgaggagagcaagcugaaccgcgagaagaucgacggggugaagcucgagagcaugggcgucuaccagauccuggcgaucuacuccaccguggccagcucccuggugcuccuggucagccugggcgccaucuccuucuggaugugcagcaacgggucccuccagugccggaucugcaucuga

SEQ ID NO: 71826 - RNA, 1698 nt, Artificial Sequence
  derived and/or modified CDS sequence (opt1) from hemagglutinin__InfluenzaA__AET84229
augaaggugaagcugcucguccugcugugcaccuucaccgccacguacgccgacaccaucugcaucggcuaccacgcgaacaacagcaccgacaccguggacacggugcucgagaagaacgucaccgugacccacuccgugaaccugcuggagaacagccacaacgggaagcucugccugcugaagggcaucgcgccccuccagcuggggaacugcuccgucgccggcuggauccuggggaacccggagugcgagcuccugaucagcaaggaguccuggagcuacaucguggagaagcccaaccccgagaacgggaccugcuaccccggccacuucgccgacuacgaggagcugcgcgagcagcucuccagcguguccagcuucgagcgguucgagaucuucccgaaggaguccagcuggcccaaccacacggucaccgggguguccgccagcugcucccacaacggcgagagcuccuucuaccgcaaccugcuguggcucaccgggaagaacggccuguaccccacccugagcaaguccuacgccaacaacaaggagaaggaggugcucguccuguggggcgugcaccacccgcccaacaucguggaccagaagacgcuguaccggaccgagaacgccuacgucagcguggugagcucccacuacagccgcaaguucacccccgagaucgccaagcggcccaagguccgcgaccaggagggccggaucaacuacuacuggacccuccuggagcccggcgacacgaucaucuucgaggccaacgggaaccugaucgcgccgcgcuacgccuucgcccucucccggggcuucgggagcggcaucaucaacuccaacgcccccaugggcaagugcgacgccaagugccagacgccccagggggcgaucaacagcucccugcccuuccagaacgugcacccggugaccaucggcgagugccccaaguacguccgcagcgccaagcugcggauggugaccgggcuccgcaacaucccgcccauccagucccggggccuguucggggccaucgccggcuucaucgagggcggguggaccggcaugguggacgggugguacggcuaccaccaccagaacgagcaggggagcggcuacgccgcggaccagaaguccacccagaacgccaucaacggcaucaccaacaaggucaacagcgugaucgagaagaugaacacccaguucacggccgucgggaaggaguucaacaagcuggagcgccggauggagaaccucaacaagaagguggacgacggcuucaucgacaucuggaccuacaacgccgagcugcuggugcuccuggagaacgagcgcacccuggacuuccacgacuccaacgucaagaaccucuacgagaaggucaagagccagcugaagaacaacgccaaggagaucgggaacggcugcuucgaguucuaccacaagugcaacgacgagugcauggaguccgugaagaacgggaccuacgacuaccccaaguacagcgaggaguccaagcugaaccgggagaagaucgacggcgugaagcucgagagcaugggcguguaccagauccuggcgaucuacuccacgguggccagcagccugguccuccuggugucccugggggccaucagcuucuggaugugcuccaacggcagccuccagugccgcaucugcaucuga

SEQ ID NO: 71827 - RNA, 1698 nt, Artificial Sequence
  derived and/or modified CDS sequence (opt1) from hemagglutinin__InfluenzaA__AET84240
augaaggugaagcugcucguccugcugugcaccuucaccgccacguacgccgacaccaucugcaucggcuaccacgcgaacaacagcaccgacaccguggacacggugcucgagaagaacgucaccgugacccacuccgugaaccugcuggagaacagccacaacgggaagcucugccugcugaagggcaucgcgccccuccagcuggggaacugcuccgucgccggcuggauccuggggaacccggagugcgagcuccugaucagcaaggaguccuggagcuacaucguggagaagcccaaccccgagaacgggaccugcuaccccggcuacuucgccgacuacgaggagcugcgcgagcagcucuccagcguguccagcuucgagcgguucgagaucuucccgaaggaguccagcuggcccaaccacacggucaccgggguguccgccagcugcucccacaacggcgagagcuccuucuaccgcaaccugcuguggcucaccgggaagaacggccuguaccccaaccugagcaaguccuacgccaacaacaaggagaaggaggugcucguccuguggggcgugcaccacccgcccaacaucguggaccagaagacccuguaccggacggagaacgccuacgucagcguggugagcucccacuacagccgcaaguucacccccgagaucgccaagcggcccaagguccgcgaccaggagggccggaucaacuacuacuggacccuccuggagcccggcgacaccaucaucuucgaggccaacgggaaccugaucgcgccgcgcuacgccuucgcccucucccggggcuucgggagcggcaucaucaacuccaacgcccccaugggcaagugcgacgccaagugccagacgccccagggggcgaucaacagcucccugcccuuccagaacgugcacccggugaccaucggcgagugccccaaguacguccgcagcgccaagcugcggauggugaccgggcuccgcaacauccccuccauccagagccggggccuguucggggccaucgccggcuucaucgagggcggguggaccggcaugguggacgggugguacggcuaccaccaccagaacgagcagggguccggcuacgccgcggaccagaaguccacgcagaacgccaucaacggcaucaccaacaaggucaacagcgugaucgagaagaugaacacccaguucaccgccgucgggaaggaguucaacaagcuggagcgccggauggagaaccucaacaagaagguggacgacggcuucaucgacaucuggacguacaacgccgagcugcuggugcuccuggagaacgagcgcacccuggacuuccacgacagcaacgucaagaaccucuacgagaaggugaagucccagcugaagaacaacgccaaggagaucgggaacggcugcuucgaguucuaccacaagugcaacaacgagugcauggagagcgugaagaacgggaccuacgacuaccccaaguacuccgaggagagcaagcugaaccgggagaagaucgacggcgucaagcucgaguccaugggcguguaccagauccuggcgaucuacagcaccguggccagcucccugguccuccuggugagccugggggccaucuccuucuggaugugcagcaacggcucccuccagugccgcaucugcaucuga

SEQ ID NO: 71828 - RNA, 1698 nt, Artificial Sequence
  derived and/or modified CDS sequence (opt1) from hemagglutinin__InfluenzaA__AET84251
augaaggugaagcugcucguccugcugugcaccuucaccgccacguacgccgacaccaucugcaucggcuaccacgcgaacaacagcaccgacaccguggacacggugcucgagaagaacgucaccgugacccacuccgugaaccugcuggagaacagccacaacgggaagcucugccugcugaagggcaucgcgccccuccagcuggggaacugcuccgucgccggcuggauccuggggaacccggagugcgagcuccugaucagcaaggaguccuggagcuacaucguggagaagcccaaccccgagaacgggaccugcuaccccggccacuucgccgacuacgaggagcugcgcgagcagcucuccagcguguccagcuucgagcgguucgagaucuucccgaaggaguccagcuggcccaaccacacggucaccgggguguccgccagcugcucccacaacggcgagagcuccuucuaccgcaaccugcuguggcucaccgggaagaacggccuguaccccaaccugagcaaguccuacgccaacaacaaggagaaggaggugcucguccuguggggcgugcaccacccgcccaacaucgugaaccagaagacccuguaccggacggagaacgccuacgucagcguggugagcucccacuacagccgcaaguucacccccgagaucgccaagcggcccaagguccgcgaccaggagggccggaucaacuacuacuggacccuccuggagcccggcgacaccaucaucuucgaggccaacgggaaccugaucgcgccgcgcuacgccuucgcccucucccggggcuucgggagcggcaucaucaacuccaacgcccccaugggcaagugcgacgccaagugccagacgccccacggggcgaucaacagcugccugcccuuccagaacgugcacccggugaccaucggcgagugccccaaguacguccgcuccgccaagcugcggauggugaccgggcuccgcaacauccccagcauccagucccggggccuguucggggccaucgccggcuucaucgagggcggguggaccggcaugguggacgggugguacggcuaccaccaccagaacgagcaggggagcggcuacgccgcggaccagaaguccacgcagaacgccaucaacggcaucaccaacaaggucaacagcgugaucgagaagaugaacacccaguucaccgccgucgggaaggaguucaacaagcuggagcgccggauggagaaccucaacaagaagguggacgacggcuucaucgacaucuggacguacaacgccgagcugcuggugcuccuggagaacgagcgcacccuggacuuccacgacuccaacgucaagaaccucuacgagaaggucaagagccagcugaagaacaacgccaaggagaucgggaacggcugcuucgaguucuaccacaagugcaacgacgagugcauggaguccgugaagaacgggaccuacgacuaccccaaguacagcgaggaguccaagcugaacaaggagaagaucgacggcgugaagcucgagagcaugggcguguaccagauccuggcgaucuacuccaccguggccagcagccugguccuccuggugucccugggggccaucagcuucuggaugugcuccaacggcagccuccagugccggaucugcaucuga

SEQ ID NO: 71829 - RNA, 1698 nt, Artificial Sequence
  derived and/or modified CDS sequence (opt1) from hemagglutinin__InfluenzaA__AET84262
augaaggugaagcugcucguccugcugugcaccuucaccgccacguacgccgacaccaucugcaucggcuaccacgcgaacaacagcaccgacaccguggacacggugcucgagaagaacgucaccgugacccacuccgugaaccugcuggagaacagccacaacgggaagcucugccugcugaagggcaucgcgccccuccagcuggggaacugcuccgucgccggcuggauccuggggaacccggagugcgagcuccugaucagcaaggaguccuggagcuacaucguggagaagcccaaccccgagaacgggaccugcuaccccggccacuucgccgacuacgaggagcugcgcgagcagcucuccagcguguccagcuucgagcgguucgagaucuucccgaaggaguccagcuggcccaaccacacggucaccgggguguccgccagcugcucccacaacggcgagagcuccuucuaccgcaaccugcuguggcucaccgggaagaacggccuguaccccaaccugagcaaguccuacgccaacaacaaggagaaggaggugcucguccuguggggcgugcaccacccgcccaacaucguggaccagaagacccuguaccggacggagaacgccuacgucagcguggugagcucccacuacagccgcaaguucacccccgagaucgccaagcggcccaagguccgcgaccaggagggccggaucaacuacuacuggacccuccuggagcccggcgacaccaucaucuucgaggccaacgggaaccugaucgcgccgcgcuacgccuucgcccucucccggggcuucgggagcggcaucaucaacuccaacgcccccauggacaagugcgacgccaagugccagacgccccacggcgcgaucaacagcugccugcccuuccagaacgugcacccggugaccaucggggagugccccaaguacguccgcuccgccaagcugcggauggugaccggccuccgcaacauccccagcauccagucccgggggcuguucggcgccaucgccggguucaucgagggcggcuggaccgggaugguggacggcugguacggguaccaccaccagaacgagcagggcagcggguacgccgcggaccagaaguccacgcagaacgccaucaacggcaucaccaacaaggucaacagcgugaucgagaagaugaacacccaguucaccgccgucggcaaggaguucaacaagcuggagcgccggauggagaaccucaacaagaagguggacgacggguucaucgacaucuggacguacaacgccgagcugcuggugcuccuggagaacgagcgcacccuggacuuccacgacuccaacgucaagaaccucuacgagaaggucaagagccagcugaagaacaacgccaaggagaucggcaacgggugcuucgaguucuaccacaagugcaacgacgagugcauggaguccgugaagaacggcaccuacgacuaccccaaguacagcgaggaguccaagcugaaccgggagaagaucgacggggugaagcucgagagcaugggcguguaccagauccuggcgaucuacuccaccguggccagcagccugguccuccuggugucccugggcgccaucagcuucuggaugugcuccaacgggagccuccagugccgcaucugcaucuga

SEQ ID NO: 71830 - RNA, 1698 nt, Artificial Sequence; identical to SEQ ID NO: 71757
  derived and/or modified CDS sequence (opt1) from hemagglutinin__InfluenzaA__AET84284

SEQ ID NO: 71831 - RNA, 1698 nt, Artificial Sequence
  derived and/or modified CDS sequence (opt1) from hemagglutinin__InfluenzaA__AET84306
augaaggugaagcugcucguccugcugugcaccuucaccgccacguacgccgacaccaucugcaucggcuaccacgcgaacaacagcaccgacaccguggacacggugcucgagaagaacgucaccgugacccacuccgugaaccugcuggagaacagccacaacgggaagcucugccugcugaagggcaucgcgccccuccagcuggggaacugcuccgucgccggcuggauccuggggaacccggagugcgagcuccugaucagcaaggaguccuggagcuacaucguggagaagcccaaccccgagaacgggaccugcuaccccggccacuucgccgacuacgaggagcugcgcgagcagcucuccagcguguccagcuucgagcgguucgagaucuucccgaaggaguccagcuggcccaaccacacggucaccgggguguccgccagcugcucccacaacggcgagagcuccuucuaccgcaaccugcuguggcucaccgggaagaacggccuguaccccaaccugagcaaguccuacgccaacaacaaggagaaggaggugcucguccuguggggcgugcaccacccgcccaacaucggcaaccagaaggcccuguaccacaccgagaacgccuacgugagcgucgugagcucccacuacagcaucaaguucacgcccgagaucgccaagcggcccaaggugcgcgaccaggagggccggaucaacuacuacuggacccuccuggagcccggggacaccaucaucuucgaggcgaacggcaaccugaucgccccgcgcuacgccuucgcccucucccggggguucggcagcggcaucaucaacuccaacgcccccauggacaagugcgacgcgaagugccagacgccccagggggccaucaacagcucccugcccuuccagaacguccacccggugaccaucggcgagugccccaaguacgugcgcagcgccaagcugcggauggucaccgggcuccgcaacauccccuccauccagagccggggccuguucggggccaucgccggcuucaucgagggcggguggaccggcaugguggacgggugguacggcuaccaccaccagaacgagcagggguccggcuacgcggccgaccagaaguccacccagaacgccaucaacggcaucacgaacaaggugaacagcgucaucgagaagaugaacacccaguucaccgccguggggaaggaguucaacaagcuggagcgccggauggagaaccucaacaagaaggucgacgacggcuucaucgacaucuggaccuacaacgccgagcugcuggugcuccuggagaacgagcgcacgcuggacuuccacgacagcaacgugaagaaccucuacgagaaggucaagucccagcugaagaacaacgcgaaggagaucgggaacggcugcuucgaguucuaccacaagugcaacgacgagugcauggagagcgugaagaacgggaccuacgacuaccccaaguacuccgaggagagcaagcugaaccgggagaagaucgacggcgugaagcucgaguccaugggcgucuaccagauccuggccaucuacagcaccguggccagcucccuggugcuccuggucagccugggggccaucuccuucuggaugugcagcaacggcucccuccagugccgcaucugcaucuga

SEQ ID NO: 71832 - RNA, 1698 nt, Artificial Sequence
  derived and/or modified CDS sequence (opt1) from hemagglutinin__InfluenzaA__AET84339
augaaggugaagcugcucguccugcugugcaccuucaccgccacguacgccgacaccaucugcaucggcuaccacgcgaacaacagcaccgacaccguggacacggugcucgagaagaacgucaccgugacccacuccgugaaccugcuggagaacagccacaacgggaagcucugccugcugaagggcaucgcgccccuccagcuggggaacugcuccgucgccggcuggauccuggggaacccggagugcgagcuccugaucagcaaggaguccuggagcuacaucguggagaagcccaaccccgagaacgggaccugcuaccccggccacuucgccgacuacgaggagcugcgcgagcagcucuccagcguguccagcuucgagcgguucgagaucuucccgaaggaguccagcuggcccaaccacacggucaccgggguguccgccagcugcucccacaacggcgagcgcagcuucuaccggaaccugcuguggcucaccgggaagaacggccuguaccccaaccuguccaagagcuacgccaacaacaaggagaaggaggugcucguccuguggggcgugcaccacccgcccaacaucggcaaccagaagacccuguaccacacggagaacgccuacguguccgucgugagcagccacuacucccgcaaguucacccccgagaucgccaagcggcccaaggugcgcgaccaggagggccggaucaacuacuacuggacccuccuggagcccggggacaccaucaucuucgaggccaacggcaaccugaucgcgccgcgcuacgccuucgcccucagccggggguucggcuccggcaucaucaacagcaacgcccccauggacaagugcgacgccaagugccagacgccccagggggcgaucaacuccagccugcccuuccagaacguccacccggugaccaucggcgagugccccaaguacgugcgcuccgccaagcugcggauggucaccgggcuccgcaacauccccagcauccagucccggggccuguucggggccaucgccggcuucaucgagggcggguggaccggcaugguggacgggugguacggcuaccaccaccagaacgagcaggggagcggcuacgccgcggaccagaaguccacgcagaacgccaucaacggcaucaccaacaaggugaacagcgucaucgagaagaugaacacccaguucaccgccguggggaaggaguucaacaagcuggagcgccggauggagaaccucaacaagaaggucgacgacggcuucaucgacaucuggacguacaacgccgagcugcuggugcuccuggagaacgagcgcacccuggacuuccacgacuccaacgugaagaaccucuacgagaaggucaagagccagcugaagaacaacgccaaggagaucgggaacggcugcuucgaguucuaccacaagugcaacgacgagugcauggaguccgugaagaacgggaccuacgacuaccccaaguacagcgaggaguccaagcugaaccgggagaagaucgacggcgugaagcucgagagcaugggcgucuaccagauccuggcgaucuacuccaccguggccagcagccuggugcuccuggucucccugggggccaucagcuucuggaugugcuccaacggcagccuccagugccgcaucugcaucuga

SEQ ID NO: 71833 - RNA, 1698 nt, Artificial Sequence; identical to SEQ ID NO: 71832
  derived and/or modified CDS sequence (opt1) from hemagglutinin__InfluenzaA__AET84361

SEQ ID NO: 71834 - RNA, 1698 nt, Artificial Sequence
  derived and/or modified CDS sequence (opt1) from hemagglutinin__InfluenzaA__AET84372
augaaggugaagcugcucguccugcugugcaccuucaccgccacguacgccgacaccaucugcaucggcuaccacgcgaacaacagcaccgacaccguggacacggugcucgagaagaacgucaccgugacccacuccgugaaccugcuggagaacagccacaacgggaagcucugccugcugaagggcaucgcgccccuccagcuggggaacugcuccgucgccggcuggauccuggggaacccggagugcgagcuccugaucagcaaggaguccuggagcuacaucguggagaagcccaaccccgagaacgggaccugcuaccccggccacuucgccgacuacgaggagcugcgcgagcagcucuccagcguguccagcuucgagcgguucgagaucuucccgaaggaguccagcuggcccaaccacacggucaccgggguguccgccagcugcucccacaacggcgagcgcagcuucuaccggaaccugcuguggcucaccgggaagaacggccuguaccccaaccuguccaagagcuacgccaacaacaaggagaaggaggugcucguccuguggggcgugcaccacccgcccaacaucggcgaccagaagacccuguaccacacggagaacgccuacguguccgucgugagcagccacuacucccgcaaguucacccccgagaucgccaagcggcccaaggugcgcgaccaggagggccggaucaacuacuacuggacccuccuggagcccggggacaccaucaucuucgaggccaacggcaaccugaucgcgccgcgcuacgccuucgcccucagccggggguucggcuccggcaucaucaacagcaacgcccccauggacaagugcgacgccaagugccagacgccccagggggcgaucaacuccagccugcccuuccagaacguccacccggugaccaucggcgagugccccaaguacgugcgcuccgccaagcugcggauggucaccgggcuccgcaacauccccagcauccagucccggggccuguucggggccaucgccggcuucaucgagggcggguggaccggcaugguggacgggugguacggcuaccaccaccagaacgagcaggggagcggcuacgccgcggaccagaaguccacgcagaacgccaucaacggcaucaccaacaaggugaacagcgucaucgagaagaugaacacccaguucaccgccguggggaaggaguucaacaagcuggagcgccggauggagaaccucaacaagaaggucgacgacggcuucaucgacaucuggacguacaacgccgagcugcuggugcuccuggagaacgagcgcacccuggacuuccacgacuccaacgugaagaaccucuacgagaaggucaagagccagcugaagaacaacgccaaggagaucgggaacggcugcuucgaguucuaccacaagugcaacgacgagugcauggaguccgugaagaacgggaccuacgacuaccccaaguacagcgaggaguccaagcugaaccgggagaagaucgacggcgugaagcucgagagcaugggcgucuaccagauccuggcgaucuacuccaccguggccagcagccuggugcuccuggucucccugggggccaucagcuucuggaugugcuccaacggcagccuccagugccgcaucugcaucuga

SEQ ID NO: 71835 - RNA, 1698 nt, Artificial Sequence
  derived and/or modified CDS sequence (opt1) from hemagglutinin__InfluenzaA__AET84394
augaaggugaagcugcucguccugcugugcaccuucaccgccacguacgccgacaccaucugcaucggcuaccacgcgaacaacagcaccgacaccguggacacggugcucgagaagaacgucaccgugacccacuccgugaaccugcuggagaacagccacaacgggaagcucugccugcugaagggcaucgcgccccuccagcuggggaacugcuccgucgccggcuggauccuggggaacccggagugcgagcuccugaucagcaaggaguccuggagcuacaucguggagaagcccaaccccgagaacgggaccugcuaccccggccacuucgccgacuacgaggagcugcgcgagcagcucuccagcguguccagcuucgagcgguucgagaucuucccgaaggaguccagcuggcccaaccacacggucaccgggguguccgccagcugcucccacaacggcgagcgcagcuucuaccggaaccugcuguggcucaccgggaagaacggccuguaccccaaccuguccaagagcuacgccaacaacaaggagaaggaggugcucguccuguggggcgugcaccacccgcccgacaucggcaaccagaagacccuguaccacacggagaacgccuacguguccgucgugagcagccacuacucccgcaaguucacccccgagaucgccaagcggcccaaggugcgcgaccaggagggccggaucaacuacuacuggacccuccuggagcccggggacaccaucaucuucgaggccaacggcaaccugaucgcgccgcgcuacgccuucgcccucagccggggguucggcuccggcaucaucaacagcaacgcccccauggacaagugcgacgccaagugccagacgccccagggggcgaucaacuccagccugcccuuccagaacguccacccggugaccaucggcgagugccccaaguacgugcgcuccgagaagcugcggauggucaccgggcuccgcaacauccccagcauccagucccggggccuguucggggccaucgccggcuucaucgagggcggguggaccggcaugguggacgggugguacggcuaccaccaccagaacgagcaggggagcggcuacgccgccgaccagaaguccacgcagaacgcgaucaacggcaucaccaacaaggugaacagcgucaucgagaagaugaacacccaguucaccgccguggggaaggaguucaacaagcuggagcgccggauggagaaccucaacaagaaggucgacgacggcuucaucgacaucuggacguacaacgccgagcugcuggugcuccuggagaacgagcgcacccuggacuuccacgacuccaacgugaagaaccucuacgagaaggucaagagccagcugaagaacaacgccaaggagaucgggaacggcugcuucgaguucuaccacaagugcaacgacgagugcauggaguccgugaagaacgggaccuacgacuaccccaaguacagcgaggaguccaagcugaaccgggagaagaucgacggcgugaagcucgagagcaugggcgucuaccagauccuggccaucuacuccaccguggcgagcagccuggugcuccuggucucccugggggccaucagcuucuggaugugcuccaacggcagccuccagugccgcaucugcaucuga

SEQ ID NO: 71836 - RNA, 1698 nt, Artificial Sequence; identical to SEQ ID NO: 69540
  derived and/or modified CDS sequence (opt1) from hemagglutinin__InfluenzaA__AET84405

SEQ ID NO: 71837 - RNA, 1698 nt, Artificial Sequence
  derived and/or modified CDS sequence (opt1) from hemagglutinin__InfluenzaA__AET84416
augaaggugaagcugcucguccugcugugcaccuucaccgccacguacgccgacaccaucugcaucggcuaccacgcgaacaacagcaccgacaccguggacacggugcucgagaagaacgucaccgugacccacuccgugaaccugcuggagaacagccacaacgggaagcucugccugcugaagggcaucgcgccccuccagcuggggaacugcuccgucgccggcuggauccuggggaacccggagugcgagcuccugaucagcaaggaguccuggagcuacaucguggagaagcccaaccccgagaacgggaccugcuaccccggccacuucgccgacuacgaggagcugcgcgagcagcucuccagcguguccagcuucgagcgguucgagaucuucccgaaggaguccagcuggcccaaccacacggucaccgggguguccgccagcugcucccacaacggcgagcgcagcuucuaccggaaccugcuguggcucaccgggaagaacggccuguaccccacccuguccaagagcuacgccaacaacaaggagaaggaggugcucguccuguggggcgugcaccacccgcccgacaucggcgaccagaagacgcuguaccacaccgagaacgccuacguguccgucgugagcagccacuacucccgcaaguucacccccgagaucgccaagcggcccaaggugcgcgaccaggagggccggaucaacuacuacuggacccuccuggagcccggggacacgaucaucuucgaggccaacggcaaccugaucgcgccgcgcuacgccuucgcccucagccggggguucggcuccggcaucaucaacagcaacgcccccauggacaagugcgacgccaagugccagacgccccagggggcgaucaacuccagccugcccuuccagaacguccacccggugaccaucggcgagugccccaaguacgugcgcuccgccaagcugcggauggucaccgggcuccgcaacauccccagcauccagucccggggccuguucggggccaucgccggcuucaucgagggcggguggaccggcaugguggacgggugguacggcuaccaccaccagaacgagcaggggagcggcuacgccgcggaccagaaguccacccagaacgccaucaacggcaucaccaacaaggugaacagcgucaucgagaagaugaacacccaguucacggccguggggaaggaguucaacaagcuggagcgccggauggagaaccucaacaagaaggucgacgacggcuucaucgacaucuggaccuacaacgccgagcugcuggugcuccuggagaacgagcgcacccuggacuuccacgacuccaacgugaagaaccucuacgagaaggucaagagccagcugaagaacaacgccaaggagaucgggaacggcugcuucgaguucuaccacaagugcaacgacgagugcauggaguccgugaagaacgggaccuacgacuaccccaaguacagcgaggaguccaagcugaaccgggagaagaucgacggcgugaagcucgagagcaugggcgucuaccagauccuggcgaucuacuccacgguggccagcagccuggugcuccuggucucccugggggccaucagcuucuggaugugcuccaacggcagccuccagugccgcaucugcaucuga

SEQ ID NO: 71838 - RNA, 1698 nt, Artificial Sequence
  derived and/or modified CDS sequence (opt1) from hemagglutinin__InfluenzaA__AET84427
augaaggugaagcugcucguccugcugugcaccuucaccgccacguacgccgacaccaucugcaucggcuaccacgcgaacaacagcaccgacaccguggacacggugcucgagaagaacgucaccgugacccacuccgugaaccugcuggagaacagccacaacgggaagcucugccugcugaagggcaucgcgccccuccagcuggggaacugcuccgucgccggcuggauccuggggaacccggagugcgagcuccugaucagcaaggaguccuggagcuacaucguggagaagcccaaccccgagaacgggaccugcuaccccggccacuucgccgacuacgaggagcugcgcgagcagcucuccagcguguccagcuucgagcgguucgagaucuucccgaaggaguccagcuggcccaaccacacggucaccgggguguccgccagcugcucccacaacggcgagagcuccuucuaccgcaaccugcuguggcucaccgggaagaacggccuguaccccaaccugagcaaguccuacgccaacaacaaggagaaggaggugcucguccuguggggcgugcaccacccgcccaacaucggcaaccagaagacccuguaccacacggagaacgccuacgugagcgucgugagcucccacuacagccggaaguucacccccgagaucgccaagcgccccaaggugcgggaccaggagggccgcaucaacuacuacuggacccuccuggagcccggggacaccaucaucuucgaggccaacggcaaccugaucgcgccgcgguacgccuucgcccucucccgcggguucggcagcggcaucaucaacuccaacgcccccauggacaagugcgacgccaagugccagacgccccagggggcgaucaacagcucccugcccuuccagaacguccacccggugaccaucggcgagugccccaaguacgugcggagcgccaagcugcgcauggucaccgggcuccggaacauccccuccauccagagccgcggccuguucggggccaucgccggcuucaucgagggcggguggaccggcaugguggacgggugguacggcuaccaccaccagaacgagcagggguccggcuacgccgcggaccagaaguccacgcagaacgccaucaacggcaucaccaacaaggugaacagcgucaucgagaagaugaacacccaguucaccgccguggggaaggaguucaacaagcuggagcggcgcauggagaaccucaacaagaaggucgacgacggcuucaucgacaucuggacguacaacgccgagcugcuggugcuccuggagaacgagcggacccuggacuuccacgacagcaacgugaagaaccucuacgagaaggucaagucccagcugaagaacaacgccaaggagaucgggaacggcugcuucgaguucuaccacaagugcaacgacgagugcauggagagcgugaagaacgggaccuacgacuaccccaaguacuccgaggagagcaagcugaaccgcgagaagaucgacggcgugaagcucgaguccaugggcgucuaccagauccuggcgaucuacagcaccguggccagcucccuggugcuccuggucagccugggggccaucuccuucuggaugugcagcaacggcucccuccagugccggaucugcaucuga

SEQ ID NO: 71839 - RNA, 1698 nt, Artificial Sequence
  derived and/or modified CDS sequence (opt1) from hemagglutinin__InfluenzaA__AET84438
augaaggugaagcugcucguccugcugugcaccuucaccgccacguacgccgacaccaucugcaucggcuaccacgcgaacaacagcaccgacaccguggacacggugcucgagaagaacgucaccgugacccacuccgugaaccugcuggagaacagccacaacgggaagcucugccugcugaagggcaucgcgccccuccagcuggggaacugcuccgucgccggcuggauccuggggaacccggagugcgagcuccugaucagcaaggaguccuggagcuacaucguggagaagcccaaccccgagaacgggaccugcuaccccggccacuucgccgacuacgaggagcugcgcgagcagcucuccagcguguccagcuucgagcgguucgagaucuucccgaaggaguccagcuggcccaaccacacggucaccgggguguccgccagcugcucccacaacggcgagagcuccuucuaccgcaaccugcuguggcucaccgggaagaacggccuguaccccaaccugagcaaguccuacgccaacaacaaggagaaggaggugcucguccuguggggcgugcaccacccgcccaacaucggcgugcagaagacccuguacaacacggagaacgccuacgucagcguggugagcucccacuacagccggaaguucacccccgagaucgccaagcgccccaagguccgggaccaggagggccgcaucaacuacuacuggacccuccuggagcccggggacaccaucauguucgaggccaacggcaaccugaucgcgccgcgguacgccuucgcccucucccgcggguucggcagcggcaucaucaacuccaacgcccccauggacaagugcgacgccaagugccagacgccccagggggcgaucaacagcucccugcccuuccagaacgugcacccggugaccaucggcgagugccccaaguacguccggagcgccaagcugcgcauggugaccgggcuccggaacauccccuccauccagagccgcggccuguucggggccaucgccggcuucaucgagggcggguggaccggcaugguggacgggugguacggcuaccaccaccagaacgagcagggguccggcuacgccgcggaccagaaguccacgcagaacgccaucaacggcaucaccaacaaggucaacagcgugaucgagaagaugaacacccaguucaccgccgucgggaaggaguucaacaagcuggagcggcgcauggagaaccucaacaagaagguggacgacggcuucaucgacaucuggacguacaacgccgagcugcuggugcuccuggagaacgagcggacccuggacuuccacgacagcaacgucaagaaccucuacgagaaggugaagucccagcugaagaacaacgccaaggagaucgggaacggcugcuucgaguucuaccacaagugcaacgacgagugcauggagagcgugaagaacgggaccuacgacuaccccaaguacuccgaggagagcaagcugaaccgcgagaagaucgacggcgucaagcucgaguccaugggcguguaccagauccuggcgaucuacagcaccguggccagcucccugguccuccuggugagccugggggccaucuccuucuggaugugcagcaacggcucccuccagugccggaucugcaucuga

SEQ ID NO: 71840 - RNA, 1698 nt, Artificial Sequence
  derived and/or modified CDS sequence (opt1) from hemagglutinin__InfluenzaA__AET84449
augaaggugaagcugcucguccugcugugcaccuucaccgccacguacgccgacaccaucugcaucggcuaccacgcgaacaacagcaccgacaccguggacacggugcucgagaagaacgucaccgugacccacuccgugaaccugcuggaggacagccacaacgggaagcucugccugcugaagggcaucgcgccccuccagcuggggaacugcuccgucgccggcuggauccuggggaacccggagugcgagcuccugaucagccgcgaguccuggagcuacaucguggagaagcccaaccccgagaacgggaccugcuaccccggccacuucgccgacuacgaggagcugcgggagcagcucuccagcguguccagcuucgagcgcuucgagaucuucccgaaggaguccagcuggcccaaccacacgaccaccggggucuccgccagcugcucccacaacggcgagagcuccuucuacaagaaccugcuguggcucaccgggaagaacggccuguaccccaaccugagcaaguccuacgccaacaacaaggagaaggaggugcucgugcuguggggcguccaccacccgcccaacaucggcgaccagcgggcccuguaccacacggagaacgccuacgugagcguggucagcucccacuacagccgcaaguucacccccgagaucgccaagcggcccaaggugcgcgaccaggagggccggaucaacuacuacuggacccuccuggagcccggggacaccaucaucuucgaggcgaacggcaaccugaucgccccgcgcuacgccuucgcccucucccggggguucggcagcggcaucaucaacuccaacgcccccauggacgggugcgacgcgaagugccagacgccccagggcgccaucaacagcucccugcccuuccagaacgugcacccggucaccaucggggagugccccaaguacgugcgcagcgccaagcugcggauggugaccggccuccgcaacauccccuccauccagagccgggggcuguucggcgccaucgccggcuucaucgagggcggguggaccgggauggucgacggcugguacggguaccaccaccagaacgagcagggcuccggcuacgcggccgaccagaaguccacgcagaacgccaucaacgggaucaccaacaaggugaacagcgugaucgagaagaugaacacccaguucaccgccgucggcaaggaguucaacaagcuggagcgccggauggagaaccucaacaagaagguggacgacggguucaucgacaucuggacguacaacgccgagcugcugguccuccuggagaacgagcgcacccuggacuuccacgacagcaacgugaagaaccucuacgagaaggugaagucccagcugaagaacaacgcgaaggagaucggcaacgggugcuucgaguucuaccacaagugcaacgacgagugcauggagagcgucaagaacggcaccuacgacuaccccaaguacuccgaggagagcaagcugaaccgggagaagaucgacggcgugaagcucgaguccauggggguguaccagauccuggccaucuacagcaccgucgccagcucccuggugcuccuggugagccugggcgccaucuccuucuggaugugcagcaacgggucccuccagugccgcaucugcaucuga

SEQ ID NO: 71841 - RNA, 1701 nt, Artificial Sequence
  derived and/or modified CDS sequence (opt1) from hemagglutinin__InfluenzaA__AET98600
augaagaccaucaucgcccugagcuacauccucugccugguguucgcccagaagcugcccggcaacgacaacuccaccgcgacgcucugccuggggcaccacgccgucccgaacggcaccaucgugaagaccaucaccaacgaccagaucgaggugacgaacgccaccgagcugguccagagcuccagcaccggggagaucugcgacagcccccaccagauccucgacggcgagaacugcacccugaucgacgcccugcucggggacccccagugcgacggcuuccagaacaagaagugggaccuguucguggagcgcagcaaggccuacuccaacugcuaccccuacgacgugccggacuacgcgagccugcggucccucgucgccagcuccggcacgcuggaguucaacaacgagagcuucaacuggaccggggugacccagaacggcaccuccagcgccugcauccgccgguccaacaacagcuucuucucccgccugaacuggcucacgcaccugaacuucaaguaccccgcccugaacgugaccguccccaacaacgagcaguucgacaagcucuacaucuggggcgugcaccaccccgggaccgacaaggaccagaucuuccuguacgcgcaggccagcgggcggaucaccguguccacgaagcgcagccagcaggccgucaucccgaacaucggcagccggccccgcgugcggaacauccccucccgcaucagcaucuacuggaccaucgugaagcccggcgacauccugcucaucaacuccaccgggaaccugaucgccccgcggggcuacuucaagauccgcagcgggaaguccagcaucaugcgguccgacgcccccaucggcaagugcaacagcgagugcaucacccccaacggcuccauccccaacgacaagccguuccagaacgucaaccgcaucacguacggggcgugcccccgguacgugaagcagagcacccugaagcucgccaccggcaugcgcaacgugcccgagaagcagacccgggggaucuucggcgccaucgccggguucaucgagaacggcugggagggcauggucgacgggugguacggcuuccgccaccagaacuccgaggggcggggccaggccgcggaccugaaguccacgcaggccgccaucgaccagaucaacgggaagcugaaccgccucaucggcaagaccaacgagaaguuccaccagaucgagaaggaguucuccgagguggagggccggauccaggaccuggagaaguacguggaggacaccaagaucgaccuguggagcuacaacgccgagcuccuggucgcccuggagaaccagcacaccaucgaccucacggacuccgagaugaacaagcuguucgagaagaccaagaagcagcugcgcgagaacgcggaggacauggggaacggcugcuucaccaucuaccacaagugcgacaacgccugcaucgggagcauccgcaacggcaccuacgaccacaacguguaccgggacgaggcccucaacaaccgcuuccagaucaaggggguggagcugaaguccggcuacaaggacuggauccuguggaucagcuucgccaucuccugcuuccuccugugcgucgcccugcucggcuucaucaugugggcgugccagaaggggaacauccggugcaacaucugcaucuga

SEQ ID NO: 71842 - RNA, 1701 nt, Artificial Sequence
  derived and/or modified CDS sequence (opt1) from hemagglutinin__InfluenzaA__AEV76874
augaaggccauccuggugguccuccuguacaccuucgccaccgcgaacgccgacacgcugugcaucggcuaccacgccaacaacagcaccgacaccguggacaccgugcucgagaagaacgucacggugacccacuccgugaaccugcuggaggacaagcacaacgggaagcucugcaagcugcgcggcgucgcgccccugcaccucgggaagugcaacaucgccggcuggauccuggggaacccggagugcgagagcuucuccaccgccagcuccuggagcuacaucguggagaccuccagcuccgacaacggcacgugcuaccccggcgacuucaucgacuacgaggagcugcgggagcagcucagcuccgugagcuccuucgagcgcuucgagaucuuccccaagaccagcuccuggcccaaccacgacagcaacaagggggucaccgccgccugcccgcacgccggcgcgaagggguucuacaagaaccugaucuggcuggugaagaagggcaacuccuaccccaagcucagcaaguccuacaucaacgacaaggggaaggaggugcugguccuguggggcauccaccaccccagcaccacggccgaccagcagagccucuaccagaacgccgacaccuacguguucgugggcaccucccgguacagcaagaaguucaaccccgagaucgagauccgcccgaagguccgggaccaggaggggcgcaugaacuacuacuggacccugguggagcccggcgacaagaucacguucgaggccaccgggaaccugguggucccccgguacgccuucgcgauggagcgcaacgccggcuccggcaucaucaucagcgacacccccgugcacgacugcaacaccacgugccagaccccgaagggggccaucaacaccucccuccccuuccagaacauccaccccaucaccaucggcaagugccccaaguacgucaagagcacgaagcugcggcuggccaccgggcuccgcaacgugccguccauccagagccggggccuguucggggccaucgcgggcuucaucgagggcggguggaccggcaugguggacgggugguacggcuaccaccaccagaacgagcagggguccggcuacgccgccgaccucaagagcacccagaacgccaucgacaagaucacgaacaaggugaacuccgucaucgagaagaugaacacccaguucaccgccgugggcaaggaguucaaccaccuggagaagcgcaucgagaaccugaacaagaaggucgacgacggguuccuggacaucuggaccuacaacgcggagcuccuggugcugcucgagaacgagcggacgcuggacuaccacgacagcaacgugaagaaccuguacgagaagguccgcaaccagcucaagaacaacgccaaggagaucggcaacgggugcuucgaguucuaccacaagugcgacaacacgugcauggaguccgugaagaacggcaccuacgacuaccccaaguacagcgaggaggccaagcugaaccgggaggagaucgacggggugaagcuggaguccacccgcaucuaccagauccucgccaucuacagcaccgucgccuccagccuggugcugguggucucccucggcgcgaucagcuucuggaugugcagcaacggcucccugcagugccggaucugcaucuga

SEQ ID NO: 71843 - RNA, 1701 nt, Artificial Sequence; identical to SEQ ID NO: 66693
  derived and/or modified CDS sequence (opt1) from hemagglutinin__InfluenzaA__AEW10574

SEQ ID NO: 71844 - RNA, 1701 nt, Artificial Sequence; identical to SEQ ID NO: 66693
  derived and/or modified CDS sequence (opt1) from hemagglutinin__InfluenzaA__AEW10584

SEQ ID NO: 71845 - RNA, 1701 nt, Artificial Sequence; identical to SEQ ID NO: 67046
  derived and/or modified CDS sequence (opt1) from hemagglutinin__InfluenzaA__AEW10594

SEQ ID NO: 71846 - RNA, 1701 nt, Artificial Sequence; identical to SEQ ID NO: 67046
  derived and/or modified CDS sequence (opt1) from hemagglutinin__InfluenzaA__AEW10604

SEQ ID NO: 71847 - RNA, 1701 nt, Artificial Sequence; identical to SEQ ID NO: 67046
  derived and/or modified CDS sequence (opt1) from hemagglutinin__InfluenzaA__AEW10614

SEQ ID NO: 71848 - RNA, 1701 nt, Artificial Sequence; identical to SEQ ID NO: 67046
  derived and/or modified CDS sequence (opt1) from hemagglutinin__InfluenzaA__AEW10624

SEQ ID NO: 71849 - RNA, 1701 nt, Artificial Sequence; identical to SEQ ID NO: 66693
  derived and/or modified CDS sequence (opt1) from hemagglutinin__InfluenzaA__AEW10634

SEQ ID NO: 71850 - RNA, 1701 nt, Artificial Sequence; identical to SEQ ID NO: 66680
  derived and/or modified CDS sequence (opt1) from hemagglutinin__InfluenzaA__AEW10644

SEQ ID NO: 71851 - RNA, 1701 nt, Artificial Sequence
  derived and/or modified CDS sequence (opt1) from hemagglutinin__InfluenzaA__AEW10654
augaaggccauccuggugguccuccuguacaccuucgccaccgcgaacgccgacacgcugugcaucggcuaccacgccaacaacagcaccgacaccguggacaccgugcucgagaagaacgucacggugacccacuccgugaaccugcuggaggacaagcacaacgggaagcucugcaagcugcgcggcgucgcgccccugcaccucgggaagugcaacaucgccggcuggauccuggggaacccggagugcgagagccuguccaccgccagcuccuggagcuacaucguggagaccuccagcuccgacaacggcacgugcuaccccggcgacuucaucgacuacgaggagcuccgggagcagcugagcuccgugagcuccuucgagcgcuucgagaucuuccccaagaccagcuccuggcccaaccacgacagcaacaagggggucaccgccgccugcccgcacgccggcgcgaaguccuucuacaagaaccugaucuggcucgugaagaaggggaacagcuaccccaagcugaacaaguccuacaucaacgacaagggcaaggaggugcugguccucugggggauccaccaccccagcaccagcgccgaccagcagucccuguaccagaacgccgacgccuacguguucgugggcagcucccgguacagcaagaaguucaagcccgagaucgccauccgcccgaagguccgggaccaggagggccgcaugaacuacuacuggacgcugguggagcccggggacaagaucaccuucgaggcgaccggcaaccucguggucccccgguacgccuucgccauggagcgcaacgccggguccggcaucaucaucagcgacacccccgugcacgacugcaacacgaccugccagaccccgaagggcgccaucaacaccucccugcccuuccagaacauccaccccaucacgaucgggaagugccccaaguacgucaagagcaccaagcugcggcucgcgaccggccugcgcaacgugccguccauccagagccgggggcuguucggcgccaucgccggguucaucgagggcggcuggaccgggaugguggacggcugguacggguaccaccaccagaacgagcagggcuccggguacgccgccgaccucaagagcacgcagaacgcgaucgacgagaucaccaacaaggugaacuccgucaucgagaagaugaacacccaguucaccgccgugggcaaggaguucaaccaccuggagaagcgcaucgagaaccugaacaagaaggucgacgacggcuuccucgacaucuggacguacaacgccgagcugcuggugcuccuggagaacgagcggacccuggacuaccacgacagcaacgugaagaaccucuacgagaagguccgcucccagcugaagaacaacgccaaggagaucgggaacggcugcuucgaguucuaccacaagugcgacaacacgugcauggagagcgugaagaacgggaccuacgacuaccccaaguacuccgaggaggccaagcugaaccgggaggagaucgacggcgugaagcucgagagcacccgcaucuaccagauccuggcgaucuacuccaccgucgccagcagccuggugcucguggucucccugggggccaucagcuucuggaugugcuccaacggcagccugcagugccggaucugcaucuga

SEQ ID NO: 71852 - RNA, 1701 nt, Artificial Sequence; identical to SEQ ID NO: 66680
  derived and/or modified CDS sequence (opt1) from hemagglutinin__InfluenzaA__AEW10664

SEQ ID NO: 71853 - RNA, 1701 nt, Artificial Sequence
  derived and/or modified CDS sequence (opt1) from hemagglutinin__InfluenzaA__AEW10674
augaaggccauccuggugguccuccuguacaccuucgccaccgcgaacgccgacacgcugugcaucggcuaccacgccaacaacagcaccgacaccguggacaccgugcucgagaagaacgucacggugacccacuccgugaaccugcuggaggacaagcacaacgggaagcucugcaagcugcgcggcgucgcgccccugcaccucgggaagugcaacaucgccggcuggauccuggggaacccggagugcgagagccuguccaccgccagcuccuggagcuacaucguggagaccuccagcuccgacaacggcacgugcuaccccggcgacuucaucgacuacgaggagcuccgggagcagcugagcuccgugagcuccuucgagcgcuucgagaucuuccccaagaccagcuccuggcccaaccacgacagcaacaagggggucaccgccgccugcccgcacgccgaggcgaaguccuucuacaagaaccugaucuggcucgugaagaagggcaacagcuaccccaagcuguccaagagcuacaucaacgacaaggggaaggaggugcugguccucuggggcauccaccaccccagcaccuccgccgaccagcagagccuguaccagaacgccgacgccuacguguucguggggacgucccgguacagcaagaaguucaagcccgagaucgccauccgcccgaagguccgggaccaggagggccgcaugaacuacuacuggacccugguggagcccggcgacaagaucaccuucgaggcgaccgggaaccucguggucccccgguacgccuucgccauggagcgcaacgccggcuccgggaucaucaucagcgacacgcccgugcacgacugcaacacgaccugccagaccccgaagggcgccaucaacaccucccugcccuuccagaacauccaccccaucaccaucggcaagugccccaaguacgucaagagcaccaagcugcggcucgcgaccgggcugcgcaacgugccguccauccagagccggggccuguucggggccaucgccggcuucaucgagggcggguggacgggcaugguggacgggugguacggcuaccaccaccagaacgagcagggguccggcuacgccgccgaccucaagagcacccagaacgcgaucgacgagaucaccaacaaggugaacuccgucaucgagaagaugaacacccaguucacggccguggggaaggaguucaaccaccuggagaagcgcaucgagaaccugaacaagaaggucgacgacggcuuccucgacaucuggaccuacaacgccgagcugcuggugcuccuggagaacgagcggacccuggacuaccacgacagcaacgugaagaaccucuacgagaagguccgcucccagcugaagaacaacgccaaggagaucggcaacgggugcuucgaguucuaccacaagugcgacaacacgugcauggagagcgugaagaacggcaccuacgacuaccccaaguacuccgaggaggccaagcugaaccgggaggagaucgacggggugaagcucgagagcacccgcaucuaccagauccuggcgaucuacuccaccgucgccagcagccuggugcucguggucucccugggcgccaucagcuucuggaugugcuccaacgggagccugcagugccggaucugcaucuga

SEQ ID NO: 71854 - RNA, 1701 nt, Artificial Sequence; identical to SEQ ID NO: 66693
  derived and/or modified CDS sequence (opt1) from hemagglutinin__InfluenzaA__AEW10684

SEQ ID NO: 71855 - RNA, 1701 nt, Artificial Sequence; identical to SEQ ID NO: 66680
  derived and/or modified CDS sequence (opt1) from hemagglutinin__InfluenzaA__AEW10694

SEQ ID NO: 71856 - RNA, 1701 nt, Artificial Sequence; identical to SEQ ID NO: 66680
  derived and/or modified CDS sequence (opt1) from hemagglutinin__InfluenzaA__AEW10704

SEQ ID NO: 71857 - RNA, 1701 nt, Artificial Sequence; identical to SEQ ID NO: 71851
  derived and/or modified CDS sequence (opt1) from hemagglutinin__InfluenzaA__AEW10724

SEQ ID NO: 71858 - RNA, 1701 nt, Artificial Sequence; identical to SEQ ID NO: 66693
  derived and/or modified CDS sequence (opt1) from hemagglutinin__InfluenzaA__AEW10734

SEQ ID NO: 71859 - RNA, 1701 nt, Artificial Sequence
  derived and/or modified CDS sequence (opt1) from hemagglutinin__InfluenzaA__AEW10744
augaaggccauccuggugguccuccuguacaccuucgccaccgcgaacgccgacacgcugugcaucggcuaccacgccaacaacagcaccgacaccguggacaccgugcucgagaagaacgucacggugacccacuccgugaacauccuggaggacaagcacaacgggaagcugugcaagcuccgcggcgucgcgccccugcaccuggggaagugcaacaucgccggcuggauccucgggaacccggagugcgagagccuguccaccgccagcuccuggagcuacaucguggagaccuccagcuccgacaacggcacgugcuaccccggcgacuucaucgacuacgaggagcugcgggagcagcucagcuccgugagcuccuucgagcgcuucgagaucuuccccaagaccagcuccuggcccaaccacgacagcaacaagggggucaccgccgccugcccgcacgccggcgcgaaguccuucuacaagaaccugaucuggcuggugaagaaggggaacagcuaccccaagcucuccaagagcuacaucaacgacaagggcaaggaggugcugguccugugggggauccaccaccccagcaccuccgccgaccagcagagccucuaccagaacgccgacgccuacguguucgugggcuccagccgguacuccaagaaguucaagcccgagaucgccauccgcccgaagguccgggaccaggagggccgcaugaacuacuacuggacgcugguggagcccggggacaagaucaccuucgaggcgaccggcaaccugguggucccccgguacgccuucgccauggagcgcaacgccgggagcggcaucaucaucuccgacacccccgugcacgacugcaacacgaccugccagaccccgaagggcgccaucaacaccagccuccccuuccagaacauccaccccaucacgaucgggaagugccccaaguacgugaaguccaccaagcugcggcuggcgaccggccuccgcaacgucccgagcauccugucccgggggcuguucggcgccaucgccggguucaucgagggcggcuggaccgggaugguggacggcugguacggguaccaccaccagaacgagcagggcagcggguacgccgccgaccucaaguccacgcagaacgcgaucgacgagaucaccaacaaggugaacagcgucaucgagaagaugaacacccaguucaccgccgugggcaaggaguucaaccaccuggagaagcgcaucgagaaccugaacaagaaggucgacgacggcuuccucgacaucuggacguacaacgccgagcugcuggugcuccuggagaacgagcggacccuggacuaccacgacuccaacgugaagaaccucuacgagaagguccgcagccagcugaagaacaacgccaaggagaucgggaacggcugcuucgaguucuaccacaagugcgacaacacgugcauggaguccgugaagaacgggaccuacgacuaccccaaguacagcgaggaggccaagcugaaccgggaggagaucgacggcgugaagcucgaguccacccgcaucuaccagauccuggcgaucuacagcaccgucgccagcucccuggugcucguggucagccugggggccaucuccuucuggaugugcagcaacggcucccugcagugccggaucugcaucuga

SEQ ID NO: 71860 - RNA, 1701 nt, Artificial Sequence; identical to SEQ ID NO: 71859
  derived and/or modified CDS sequence (opt1) from hemagglutinin__InfluenzaA__AEW10754

SEQ ID NO: 71861 - RNA, 1701 nt, Artificial Sequence
  derived and/or modified CDS sequence (opt1) from hemagglutinin__InfluenzaA__AEW10764
augaaggccauccuggugguccuccuguacaccuucgccaccgcgaacgccgacacgcugugcaucggcuaccacgccaacaacagcaccgacaccguggacaccgugcucgagaagaacgucacggugacccacuccgugaacauccuggaggacaagcacaacgggaagcugugcaagcuccgcggcgucgcgccccugcaccuggggaagugcaacaucgccggcuggauccucgggaacccggagugcgagagccuguccaccgccagcuccuggagcuacaucguggagaccuccagcuccgacaacggcacgugcuaccccggcgacuucaucgacuacgaggagcugcgggagcagcucagcuccgugagcuccuucgagcgcuucgagaucuuccccaagaccagcuccuggcccaaccacgacagcaacaagggggucaccgccgccugcccgcacgccggcgcgaaguccuucuacaagaaccugaucuggcuggugaagaaggggaacagcuaccccaagcucuccaagagcuacaucaacgacaagggcaaggaggugcugguccugugggggauccaccaccccagcaccuccgccgaccagcagagccucuaccagaacgccaacgccuacguguucgugggcuccagccgguacuccaagaaguucaagcccgagaucgccauccgcccgaagguccgggaccaggagggccgcaugaacuacuacuggacgcugguggagcccggggacaagaucaccuucgaggcgaccggcaaccugguggucccccgguacgccuucgccauggagcgcaacgccgggagcggcaucaucaucuccgacacccccgugcacgacugcaacacgaccugccagaccccgaagggcgccaucaacaccagccuccccuuccagaacauccaccccaucacgaucgggaagugccccaaguacgugaaguccaccaagcugcggcuggcgaccggccuccgcaacgucccgagcauccagucccgggggcuguucggcgccaucgccggguucaucgagggcggcuggaccgggaugguggacggcugguacggguaccaccaccagaacgagcagggcagcggguacgccgccgaccugaaguccacgcagaacgcgaucgacgagaucaccaacaaggugaacagcgucaucgagaagaugaacacccaguucaccgccgugggcaaggaguucaaccaccucgagaagcgcaucgagaaccugaacaagaaggucgacgacggcuuccuggacaucuggacguacaacgccgagcuccuggugcugcucgagaacgagcggacccuggacuaccacgacuccaacgugaagaaccuguacgagaagguccgcagccagcucaagaacaacgccaaggagaucgggaacggcugcuucgaguucuaccacaagugcgacaacacgugcauggaguccgugaagaacgggaccuacgacuaccccaaguacagcgaggaggccaagcugaaccgggaggagaucgacggcgugaagcuggaguccacccgcaucuaccagauccucgcgaucuacagcaccgucgccagcucccuggugcugguggucagccucggggccaucuccuucuggaugugcagcaacggcucccugcagugccggaucugcaucuga

SEQ ID NO: 71862 - RNA, 1701 nt, Artificial Sequence; identical to SEQ ID NO: 66937
  derived and/or modified CDS sequence (opt1) from hemagglutinin__InfluenzaA__AEW10774

SEQ ID NO: 71863 - RNA, 1701 nt, Artificial Sequence; identical to SEQ ID NO: 66680
  derived and/or modified CDS sequence (opt1) from hemagglutinin__InfluenzaA__AEW10784

SEQ ID NO: 71864 - RNA, 1701 nt, Artificial Sequence; identical to SEQ ID NO: 66680
  derived and/or modified CDS sequence (opt1) from hemagglutinin__InfluenzaA__AEW10794

SEQ ID NO: 71865 - RNA, 1701 nt, Artificial Sequence; identical to SEQ ID NO: 66873
  derived and/or modified CDS sequence (opt1) from hemagglutinin__InfluenzaA__AEW10804

SEQ ID NO: 71866 - RNA, 1701 nt, Artificial Sequence; identical to SEQ ID NO: 66691
  derived and/or modified CDS sequence (opt1) from hemagglutinin__InfluenzaA__AEW10814

SEQ ID NO: 71867 - RNA, 1701 nt, Artificial Sequence; identical to SEQ ID NO: 66784
  derived and/or modified CDS sequence (opt1) from hemagglutinin__InfluenzaA__AEW10824

SEQ ID NO: 71868 - RNA, 1701 nt, Artificial Sequence; identical to SEQ ID NO: 66680
  derived and/or modified CDS sequence (opt1) from hemagglutinin__InfluenzaA__AEW10834

SEQ ID NO: 71869 - RNA, 1701 nt, Artificial Sequence; identical to SEQ ID NO: 66873
  derived and/or modified CDS sequence (opt1) from hemagglutinin__InfluenzaA__AEW10844

SEQ ID NO: 71870 - RNA, 1701 nt, Artificial Sequence
  derived and/or modified CDS sequence (opt1) from hemagglutinin__InfluenzaA__AEW10854
augaaggccauccuggugguccuccuguacaccuucgccaccgcgaacgccgacacgcugugcaucggcuaccacgccaacaacagcaccgacaccguggacaccgugcucgagaagaacgucacggugacccacuccgugaacauccuggaggacaagcacaacgggaagcugugcaagcuccgcggcgucgcgccccugcaccuggggaagugcaacaucgccggcuggauccucgggaacccggagugcgagagccuguccaccgccagcuccuggagcuacaucguggagaccuccagcuccgacaacggcacgugcuaccccggcgacuucaucgacuacgaggagcugcgggagcagcucagcuccgugagcuccuucgagcgcuucgagaucuuccccaagaccagcuccuggcccaaccacgacagcaacaagggggucaccgccgccugcccgcacgccggcgcgaaguccuucuacaagaaccugaucuggcuggugaagaaggggaacagcuaccccaagcucuccaagagcuacaucaacgacaagggcaaggaggugcugguccugugggggauccaccaccccagcaccuccgccgaccagcagagccucuaccagaacgccgacgccuacguguucgugggcuccagccgguacuccaagaaguucaagcccgagaucacgauccgcccgaagguccgggaccaggagggccgcaugaacuacuacuggacccugguggagcccggggacaagaucaccuucgaggccaccggcaaccugguggucccccgguacgcguucgccauggagcgcaacgccgggagcggcaucaucaucuccgacacgcccgugcacgacugcaacacgaccugccagaccccgaagggcgccaucaacaccagccuccccuuccagaacauccaccccaucaccaucgggaagugccccaaguacgugaaguccaccaagcugcggcuggccaccggccuccgcaacgucccgagcauccagucccgggggcuguucggcgcgaucgccggguucaucgagggcggcuggacggggaugguggacggcugguacggguaccaccaccagaacgagcagggcagcggguacgccgccgaccugaaguccacccagaacgccaucgacgagaucaccaacaaggugaacagcgucaucgagaagaugaacacccaguucacggcggugggcaaggaguucaaccaccucgagaagcgcaucgagaaccugaacaagaaggucgacgacggcuuccuggacaucuggaccuacaacgccgagcuccuggugcugcucgagaacgagcggacccuggacuaccacgacuccaacgugaagaaccuguacgagaagguccgcagccagcucaagaacaacgccaaggagaucgggaacggcugcuucgaguucuaccacaagugcgacaacacgugcauggaguccgugaagaacgggaccuacgacuaccccaaguacagcgaggaggccaagcugaaccgggaggagaucgacggcgugaagcuggaguccacccgcaucuaccagauccucgccaucuacagcaccgucgcgagcucccuggugcugguggucagccucggggccaucuccuucuggaugugcagcaacggcucccugcagugccggaucugcaucuga

SEQ ID NO: 71871 - RNA, 1701 nt, Artificial Sequence; identical to SEQ ID NO: 66873
  derived and/or modified CDS sequence (opt1) from hemagglutinin__InfluenzaA__AEW10864

SEQ ID NO: 71872 - RNA, 1701 nt, Artificial Sequence; identical to SEQ ID NO: 66873
  derived and/or modified CDS sequence (opt1) from hemagglutinin__InfluenzaA__AEW10874

SEQ ID NO: 71873 - RNA, 1701 nt, Artificial Sequence; identical to SEQ ID NO: 66873
  derived and/or modified CDS sequence (opt1) from hemagglutinin__InfluenzaA__AEW10884

SEQ ID NO: 71874 - RNA, 1701 nt, Artificial Sequence; identical to SEQ ID NO: 66680
  derived and/or modified CDS sequence (opt1) from hemagglutinin__InfluenzaA__AEW10894

SEQ ID NO: 71875 - RNA, 1701 nt, Artificial Sequence; identical to SEQ ID NO: 66873
  derived and/or modified CDS sequence (opt1) from hemagglutinin__InfluenzaA__AEW10904

SEQ ID NO: 71876 - RNA, 1701 nt, Artificial Sequence; identical to SEQ ID NO: 66873
  derived and/or modified CDS sequence (opt1) from hemagglutinin__InfluenzaA__AEW10914

SEQ ID NO: 71877 - RNA, 1701 nt, Artificial Sequence; identical to SEQ ID NO: 66680
  derived and/or modified CDS sequence (opt1) from hemagglutinin__InfluenzaA__AEW10924

SEQ ID NO: 71878 - RNA, 1701 nt, Artificial Sequence; identical to SEQ ID NO: 66680
  derived and/or modified CDS sequence (opt1) from hemagglutinin__InfluenzaA__AEW10934

SEQ ID NO: 71879 - RNA, 1701 nt, Artificial Sequence; identical to SEQ ID NO: 66873
  derived and/or modified CDS sequence (opt1) from hemagglutinin__InfluenzaA__AEW10944

SEQ ID NO: 71880 - RNA, 1701 nt, Artificial Sequence; identical to SEQ ID NO: 66693
  derived and/or modified CDS sequence (opt1) from hemagglutinin__InfluenzaA__AEW10954

SEQ ID NO: 71881 - RNA, 1701 nt, Artificial Sequence; identical to SEQ ID NO: 66693
  derived and/or modified CDS sequence (opt1) from hemagglutinin__InfluenzaA__AEW10964

SEQ ID NO: 71882 - RNA, 1701 nt, Artificial Sequence; identical to SEQ ID NO: 66873
  derived and/or modified CDS sequence (opt1) from hemagglutinin__InfluenzaA__AEW10974

SEQ ID NO: 71883 - RNA, 1701 nt, Artificial Sequence; identical to SEQ ID NO: 66693
  derived and/or modified CDS sequence (opt1) from hemagglutinin__InfluenzaA__AEW10984

SEQ ID NO: 71884 - RNA, 1701 nt, Artificial Sequence; identical to SEQ ID NO: 66693
  derived and/or modified CDS sequence (opt1) from hemagglutinin__InfluenzaA__AEW10994

SEQ ID NO: 71885 - RNA, 1701 nt, Artificial Sequence; identical to SEQ ID NO: 66693
  derived and/or modified CDS sequence (opt1) from hemagglutinin__InfluenzaA__AEW11004

SEQ ID NO: 71886 - RNA, 1701 nt, Artificial Sequence; identical to SEQ ID NO: 66693
  derived and/or modified CDS sequence (opt1) from hemagglutinin__InfluenzaA__AEW11014

SEQ ID NO: 71887 - RNA, 1701 nt, Artificial Sequence; identical to SEQ ID NO: 66693
  derived and/or modified CDS sequence (opt1) from hemagglutinin__InfluenzaA__AEW11024

SEQ ID NO: 71888 - RNA, 1701 nt, Artificial Sequence; identical to SEQ ID NO: 66693
  derived and/or modified CDS sequence (opt1) from hemagglutinin__InfluenzaA__AEW11034

SEQ ID NO: 71889 - RNA, 1701 nt, Artificial Sequence; identical to SEQ ID NO: 66873
  derived and/or modified CDS sequence (opt1) from hemagglutinin__InfluenzaA__AEW11044

SEQ ID NO: 71890 - RNA, 1701 nt, Artificial Sequence; identical to SEQ ID NO: 66693
  derived and/or modified CDS sequence (opt1) from hemagglutinin__InfluenzaA__AEW11054

SEQ ID NO: 71891 - RNA, 1701 nt, Artificial Sequence; identical to SEQ ID NO: 66680
  derived and/or modified CDS sequence (opt1) from hemagglutinin__InfluenzaA__AEW11064

SEQ ID NO: 71892 - RNA, 1701 nt, Artificial Sequence; identical to SEQ ID NO: 66680
  derived and/or modified CDS sequence (opt1) from hemagglutinin__InfluenzaA__AEW11074

SEQ ID NO: 71893 - RNA, 1701 nt, Artificial Sequence
  derived and/or modified CDS sequence (opt1) from hemagglutinin__InfluenzaA__AEW11084
augaaggccauccuggugguccuccuguacaccuucgccaccgcgaacgccgacacgcugugcaucggcuaccacgccaacaacagcaccgacaccguggacaccgugcucgagaagaacgucacggugacccacuccgugaaccugcuggaggacaagcacaacgggaagcucugcaagcugcgcggcgucgcgccccugcaccucgggaagugcaacaucgccggcuggauccuggggaacccggagugcgagagccuguccaccgccagcuccuggagcuacaucguggagaccuccagcuccgacaacggcacgugcuaccccggcgacuucaucgacuacgaggagcuccgggagcagcugagcuccgugagcuccuucgagcgcuucgagaucuuccccaagaccagcuccuggcccaaccacgacagcaacaagggggucaccgccgccugccugcacgccggcgcgaaguccuucuacaagaaccucaucuggcuggugaagaaggggaacagcuacccgaagcuguccaagagcuacaucaacgacaagggcaaggaggugcucguccugugggggauccaccaccccagcaccuccgccgaccagcagagccuguaccagaacgccgacgccuacguguucgugggcuccagccgguacuccaagaaguucaagcccgagaucgccauccgccccaagguccgggaccaggagggccgcaugaacuacuacuggacgcucguggagccgggggacaagaucaccuucgaggcgaccggcaaccugguggucccccgguacgccuucgccauggagcgcaacgccgggagcggcaucaucaucuccgacacccccgugcacgacugcaacacgaccugccagacccccaagggcgccaucaacaccagccugccguuccagaacauccaccccaucacgaucgggaagugccccaaguacgugaaguccaccaagcuccggcuggcgaccggccugcgcaacguccccagcauccagucccggggccucuucggggccaucgccggguucaucgagggcggcuggaccgggaugguggacggcugguacggguaccaccaccagaacgagcagggcagcggguacgccgccgaccugaaguccacgcagaacgcgaucgacgagaucaccaacaaggugaacagcgucaucgagaagaugaacacccaguucaccgccgugggcaaggaguucaaccaccuggagaagcgcaucgagaaccucaacaagaaggucgacgacggcuuccuggacaucuggacguacaacgccgagcugcucgugcugcuggagaacgagcggacccucgacuaccacgacuccaacgugaagaaccuguacgagaagguccgcagccagcugaagaacaacgccaaggagaucgggaacggcugcuucgaguucuaccacaagugcgacaacacgugcauggaguccgugaagaacgggaccuacgacuacccgaaguacagcgaggaggccaagcucaaccgggaggagaucgacggcgugaagcuggaguccacccgcaucuaccagauccuggcgaucuacagcaccgucgccagcucccucgugcugguggucagccugggggccaucuccuucuggaugugcagcaacggcucccuccagugccggaucugcaucuga

SEQ ID NO: 71894 - RNA, 1701 nt, Artificial Sequence; identical to SEQ ID NO: 66680
  derived and/or modified CDS sequence (opt1) from hemagglutinin__InfluenzaA__AEW11094

SEQ ID NO: 71895 - RNA, 1701 nt, Artificial Sequence; identical to SEQ ID NO: 66680
  derived and/or modified CDS sequence (opt1) from hemagglutinin__InfluenzaA__AEW11104

SEQ ID NO: 71896 - RNA, 1701 nt, Artificial Sequence; identical to SEQ ID NO: 66693
  derived and/or modified CDS sequence (opt1) from hemagglutinin__InfluenzaA__AEW11114

SEQ ID NO: 71897 - RNA, 1701 nt, Artificial Sequence
  derived and/or modified CDS sequence (opt1) from hemagglutinin__InfluenzaA__AEW11124
augaaggccauccuggugguccuccuguacaccuucgccaccgcgaacgccgacacgcugugcaucggcuaccacgccaacaacagcaccgacaccguggacaccgugcucgagaagaacgucacggugacccacuccgugaaccugcuggaggacaagcacaacgggaagcucugcaagcugcgcggcgucgcgccccugcaccucgggaagugcaacaucgccggcuggauccuggggaacccggagugcgagagccuguccaccgccagcuccuggagcuacaucguggagaccuccagcuccgacaacggcacgugcuaccccggcgacuucaucgacuacgaggagcuccgggagcagcugagcuccgugagcuccuucgagcgcuucgagaucuuccccaagaccagcuccuggcccaaccacgacagcaacaagggggucaccgccgccugcccgcacgccggcgcgaaguccuucuacaagaaccugaucuggcucgugaagaaggggaacagcuaccccaagcuguccaagagcuacaucaacgacaagggcaaggaggugcugguccucugggggauccaccaccccagcaccuccgccgaccagcagagccuguaccagaacgccgacgccuacguguucgugggcuccagccgguacuccaagaaguucaagcccgagaucgccauccgcccgaagguccgggaccaggagggccgcaugaacuacuacuggacgcugguggagcccggggacaagaucaccuucgaggcgaccggcaaccucguggucccccgguacgccuucgccauggagcgcaacgccgggagcggcaucaucaucuccgacacccccgugcacgacugcaacacgaccugccagaccccgaagggcgccaucaacaccagccugcccuuccagaacauccaccccaucacgaucgggaagugccccaaguucgugaaguccaccaagcugcggcucgcgaccggccugcgcaacgucccgagcauccagucccgggggcuguucggcgccaucgccggguucaucgagggcggcuggaccgggaugguggacggcugguacggguaccaccaccagaacgagcagggcagcggguacgccgccgaccucaaguccacgcagaacgcgaucgacgagaucaccaacaaggugaacagcgucaucgagaagaugaacacccaguucaccgccgugggcaaggaguucaaccaccuggagaagcgcaucgagaaccugaacaagaaggucgacgacggcuuccucgacaucuggacguacaacgccgagcugcuggugcuccuggagaacgagcggacccuggacuaccacgacuccaacgugaagaaccucuacgagaagguccgcagccagcugaagaacaacgccaaggagaucgggaacggcugcuucgaguucuaccacaagugcgacaacacgugcauggaguccgugaagaacgggaccuacgacuaccccaaguacagcgaggaggccaagcugaaccgggaggagaucgacggcgugaagcucgaguccacccgcaucuaccagauccuggcgaucuacagcaccgucgccagcucccuggugcucguggucagccugggggccaucuccuucuggaugugcagcaacggcucccugcagugccggaucugcaucuga

SEQ ID NO: 71898 - RNA, 1701 nt, Artificial Sequence
  derived and/or modified CDS sequence (opt1) from hemagglutinin__InfluenzaA__AEW11134
augaaggccauccuggugguccuccuguacaccuucgccaccgcgaacgccgacacgcugugcaucggcuaccacgccaacaacagcaccgacaccguggacaccgugcucgagaagaacgucacggugacccacuccgugaacauccuggaggacaagcacaacgggaagcugugcaagcuccgcggcgucgcgccccugcaccuggggaagugcaacaucgccggcuggauccucgggaacccggagugcgagagccuguccaccgccagcuccuggagcuacaucguggagaccuccagcuccgacaacggcacgugcuaccccggcgacuucaucgacuacgaggagcugcgggagcagcucagcuccgugagcuccuucgagcgcuucgagaucuuccccaagaccagcuccuggcccaaccacgacagcaacaagggggucaccgccgccugcccgcacgccggcgcgaaguccuucuacaagaaccugaucuggcuggugaagaaggggaacagcuaccccaagcucuccaagagcuacaucaacgacaagggcaaggaggugcugguccugugggggauccaccaccccagcaccuccgccgaccagcagagccucuaccagaacgccgacgccuacguguucgugggcuccagccgguacuccaagaaguucaagcccgagaucgccauccgcccgaagguccgggaccaggagggccgcaugaacuacuacuggacgcugguggagcccggggacaagaucaccuucgaggcgaccggcaaccugguggucccccgguacgccuucgccauggagcgcaacgccgggagcggcaucaucaucuccgacacccccgugcacgacugcaacacgaccugccagaccccgaagggcgccaucaacaccagccuccccuuccagaacauccaccccaucacgaucgggaagugccccaaguacgugaaguccaccaagcugcggcuggcgaccggccuccgcaacgucccgagcauccagucccgggggcuguucggcgccaucgccggguucaucgagggcggcuggaccgggaugguggacggcugguacggguaccaccaccagaacgagcagggcagcggguacgccgccgaccugaaguccacgcagaacgcgaucgacgagaucaccaacaaggugaacagcgucaucgagaagaugaacacccaguucaccgccgugggcaaggaguucaaccaccucgagaagcgcaucgagaaccugaacaagaaggucgacgacggcuuccuggacaucuggacguacaacgccgagcuccuggugcugcucgagaacgagcggacccuggacuaccacgacuccaacgugaagaaccuguacgagaagguccgcagccagcucaagaacaacgccaaggagaucgggaacggcugcuucgaguucuaccacaagugcgacaacacgugcauggaguccgugaagaacgggaccuacgacuaccccaaguacagcgaggaggccaagcugaacaaggaggagaucgacggcgugaagcuggaguccacccggaucuaccagauccucgcgaucuacagcaccgucgccagcucccuggugcugguggucagccucggggccaucuccuucuggaugugcagcaacggcucccugcagugccgcaucugcaucuga

SEQ ID NO: 71899 - RNA, 1701 nt, Artificial Sequence; identical to SEQ ID NO: 66693
  derived and/or modified CDS sequence (opt1) from hemagglutinin__InfluenzaA__AEW11144

SEQ ID NO: 71900 - RNA, 1701 nt, Artificial Sequence; identical to SEQ ID NO: 66693
  derived and/or modified CDS sequence (opt1) from hemagglutinin__InfluenzaA__AEW11154

SEQ ID NO: 71901 - RNA, 1701 nt, Artificial Sequence; identical to SEQ ID NO: 71893
  derived and/or modified CDS sequence (opt1) from hemagglutinin__InfluenzaA__AEW11164

SEQ ID NO: 71902 - RNA, 1701 nt, Artificial Sequence; identical to SEQ ID NO: 71893
  derived and/or modified CDS sequence (opt1) from hemagglutinin__InfluenzaA__AEW11174

SEQ ID NO: 71903 - RNA, 1701 nt, Artificial Sequence; identical to SEQ ID NO: 66693
  derived and/or modified CDS sequence (opt1) from hemagglutinin__InfluenzaA__AEW11184

SEQ ID NO: 71904 - RNA, 1701 nt, Artificial Sequence; identical to SEQ ID NO: 66680
  derived and/or modified CDS sequence (opt1) from hemagglutinin__InfluenzaA__AEW11194

SEQ ID NO: 71905 - RNA, 1701 nt, Artificial Sequence; identical to SEQ ID NO: 66693
  derived and/or modified CDS sequence (opt1) from hemagglutinin__InfluenzaA__AEW11204

SEQ ID NO: 71906 - RNA, 1701 nt, Artificial Sequence; identical to SEQ ID NO: 66693
  derived and/or modified CDS sequence (opt1) from hemagglutinin__InfluenzaA__AEW11214

SEQ ID NO: 71907 - RNA, 1701 nt, Artificial Sequence; identical to SEQ ID NO: 66873
  derived and/or modified CDS sequence (opt1) from hemagglutinin__InfluenzaA__AEW11224

SEQ ID NO: 71908 - RNA, 1701 nt, Artificial Sequence; identical to SEQ ID NO: 66693
  derived and/or modified CDS sequence (opt1) from hemagglutinin__InfluenzaA__AEW11234

SEQ ID NO: 71909 - RNA, 1701 nt, Artificial Sequence; identical to SEQ ID NO: 66693
  derived and/or modified CDS sequence (opt1) from hemagglutinin__InfluenzaA__AEW11244

SEQ ID NO: 71910 - RNA, 1701 nt, Artificial Sequence
  derived and/or modified CDS sequence (opt1) from hemagglutinin__InfluenzaA__AEW11254
augaaggccauccuggugguccuccuguacaccuucgccaccgcgaacgccgacacgcugugcaucggcuaccacgccaacaacagcaccgacaccguggacaccgugcucgagaagaacgucacggugacccacuccgugaaccugcuggaggacaagcacaacgggaagcucugcaagcugcgcggcgucgcgccccugcaccucgggaagugcaacaucgccggcuggauccuggggaacccggagugcgagagccuguccaccgccagcuccuggagcuacaucguggagaccuccagcuccgacaacggcacgugcuaccccggcgacuucaucgacuacgaggagcuccgggagcagcugagcuccgugagcuccuucgagcgcuucgagaucuuccccaagaccagcuccuggcccaaccacgacagcaacaagggggucaccgccgccugccugcacgccggcgcgaaguccuucuacaagaaccucaucuggcuggugaagaaggggaacagcuacccgaagcuguccaagagcuacaucaacgacaagggcaaggaggugcucguccugugggggauccaccaccccagcgccuccgccgaccagcagagccuguaccagaacgccgacgccuacguguucgugggcuccagccgguacuccaagaaggucaagcccgagaucgcgauccgccccaaggugcgggaccaggagggccgcaugaacuacuacuggacccucguggagccgggggacaagaucacguucgaggccaccggcaaccuggucgugccccgguacgccuucgccauggagcgcaacgccgggagcggcaucaucaucuccgacacccccgugcacgacugcaacaccacgugccagacccccaagggcgcgaucaacaccagccugccguuccagaacauccaccccaucaccaucgggaagugccccaaguacgucaaguccacgaagcuccggcuggccaccggccugcgcaacgugcccagcauccagucccggggccucuucggggccaucgccggguucaucgagggcggcuggaccgggaugguggacggcugguacggguaccaccaccagaacgagcagggcagcggguacgccgcggaccugaaguccacccagaacgccaucgacgagaucacgaacaaggucaacagcgugaucgagaagaugaacacccaguucaccgccgucggcaaggaguucaaccaccuggagaagcgcaucgagaaccucaacaagaagguggacgacggcuuccuggacaucuggaccuacaacgccgagcugcucgugcugcuggagaacgagcggacgcucgacuaccacgacuccaacgucaagaaccuguacgagaaggugcgcagccagcugaagaacaacgccaaggagaucgggaacggcugcuucgaguucuaccacaagugcgacaacacgugcauggaguccgugaagaacgggaccuacgacuacccgaaguacagcgaggaggcgaagcucaaccgggaggagaucgacggcgucaagcuggaguccacccgcaucuaccagauccuggccaucuacagcaccguggccagcucccucgugcuggucgugagccugggggccaucuccuucuggaugugcagcaacggcucccuccagugccggaucugcaucuga

SEQ ID NO: 71911 - RNA, 1701 nt, Artificial Sequence; identical to SEQ ID NO: 66680
  derived and/or modified CDS sequence (opt1) from hemagglutinin__InfluenzaA__AEW11263

SEQ ID NO: 71912 - RNA, 1701 nt, Artificial Sequence; identical to SEQ ID NO: 66680
  derived and/or modified CDS sequence (opt1) from hemagglutinin__InfluenzaA__AEW11273

SEQ ID NO: 71913 - RNA, 1701 nt, Artificial Sequence; identical to SEQ ID NO: 66680
  derived and/or modified CDS sequence (opt1) from hemagglutinin__InfluenzaA__AEW11283

SEQ ID NO: 71914 - RNA, 1701 nt, Artificial Sequence; identical to SEQ ID NO: 66680
  derived and/or modified CDS sequence (opt1) from hemagglutinin__InfluenzaA__AEW11293

SEQ ID NO: 71915 - RNA, 1701 nt, Artificial Sequence
  derived and/or modified CDS sequence (opt1) from hemagglutinin__InfluenzaA__AEW11303
augaaggccauccuggugguccuccuguacaccuucgccaccgcgaacgccgacacgcugugcaucggcuaccacgccaacaacagcaccgacaccguggacaccgugcucgagaagaacgucacggugacccacuccgugaaccugcuggaggacaagcacaacgggaagcucugcaagcugcgcggcgucgcgccccugcaccucgggaagugcaacaucgccggcuggauccuggggaacccggagugcgagagccuguccaccgccagcuccuggagcuacaucguggagaccuccagcuccgacaacggcacgugcuaccccggcgacuucaucgacuacgaggagcuccgggagcagcugagcuccgugagcuccuucgagcgcuucgagaucuuccccaagaccagcuccuggcccaaccacgacagcaacaagggggucaccaccgccugcccgcacgccggcgccaaguccuucuacaagaaccugaucuggcucgugaagaaggggaacagcuaccccaagcuguccaagagcuacaucaacgacaagggcaaggaggugcugguccucugggggauccaccaccccagcacguccgcggaccagcagagccuguaccagaacgccgacgccuacguguucgugggcaccucccgguacagcaagaaguucaagcccgagaucgccauccgcccgaagguccgggaccaggagggccgcaugaacuacuacuggacccugguggagcccggggacaagaucaccuucgaggccacgggcaaccucguggucccccgguacgcguucgccauggagcgcaacgccggguccggcaucaucaucagcgacacccccgugcacgacugcaacacgaccugccagaccccgaagggcgccaucaacaccucccugcccuuccagaacauccaccccaucaccaucgggaagugccccaaguacgucaagagcaccaagcugcggcucgccacgggccugcgcaacgugccguccauccagagccgggggcuguucggcgcgaucgccggguucaucgagggcggcuggaccgggaugguggacggcugguacggguaccaccaccagaacgagcagggcuccggguacgccgccgaccucaagagcacccagaacgccaucgacgagaucaccaacaaggugaacuccgucaucgagaagaugaacacgcaguucaccgcggugggcaaggaguucaaccaccuggagaagcgcaucgagaaccugaacaagaaggucgacgacggcuuccucgacaucuggaccuacaacgccgagcugcuggugcuccuggagaacgagcggacccuggacuaccacgacagcaacgugaagaaccucuacgagaagguccgcucccagcugaagaacaacgccaaggagaucgggaacggcugcuucgaguucuaccacaagugcgacaacacgugcauggagagcgugaagaacgggaccuacgacuaccccaaguacuccgaggaggccaagcugaaccgggaggagaucgacggcgugaagcucgagagcacccgcaucuaccagauccuggccaucuacuccaccgucgcgagcagccuggugcucguggucucccugggggccaucagcuucuggaugugcuccaacggcagccugcagugccgggugugcaucuga

SEQ ID NO: 71916 - RNA, 1701 nt, Artificial Sequence; identical to SEQ ID NO: 66680
  derived and/or modified CDS sequence (opt1) from hemagglutinin__InfluenzaA__AEW11313

SEQ ID NO: 71917 - RNA, 1701 nt, Artificial Sequence
  derived and/or modified CDS sequence (opt1) from hemagglutinin__InfluenzaA__AEW11323
augaaggccauccuggugguccuccuguacaccuucgccaccgcgaacgccgacacgcugugcaucggcuaccacgccaacaacagcaccgacaccguggacaccgugcucgagaagaacgucacggugacccacuccgugaaccugcuggaggacaagcacaacgggaagcucugcaagcugcgcggcgucgcgccccugcaccucgggaagugcaacaucgccggcuggauccuggggaacccggagugcgagagccuguccaccgccagcuccuggagcuacaucguggagaccuccagcuccgacaacggcacgugcuaccccggcgacuucaucgacuacgaggagcuccgggagcagcugagcuccgugagcuccuucgagcgcuucgagaucuuccccaagaccagcuccuggcccaaccacgacagcaacaagggggucaccgccgccugcccgcacgccggcgcgaaguccuucuacaagaaccugaucuggcucgugaagaaggggaacagcuaccccaagcuguccaagagcuacaucaacgacaagggcaaggaggugcugguccucugggggauccaccaccccagcaccuccgccgaccagcagagccuguaccagaacgccgacgccuacguguucgugggcacgucccgguacagcaagaaguucaagcccgagaucgccauccgcccgaagguccggggccaggaggggcgcaugaacuacuacuggacccugguggagcccggcgacaagaucaccuucgaggcgaccgggaaccucguggucccccgguacgccuucgccauggagcgcaacgccggcuccggcaucaucaucagcgacacgcccgugcacgacugcaacacgaccugccagaccccgaagggggccgugaacaccucccugcccuuccagaacauccaccccaucaccaucggcaagugccccaaguacgucaagagcaccaagcugcggcucgcgaccgggcugcgcaacgugccguccauccagagccggggccuguucggggccaucgccggcuucaucgagggcggguggacgggcaugguggacgggugguacggcuaccaccaccagaacgagcagggguccggcuacgccgccgaccucaagagcacccagaacgcgaucgacgagaucaccaacaaggucaacuccgugaucgagaagaugaacacccaguucacggccgucggcaaggaguucaaccaccuggagaagcgcaucgagaaccugaacaagaagguggacgacggguuccucgacaucuggaccuacaacgccgagcugcuggugcuccuggagaacgagcggacccuggacuaccacgacagcaacgucaagaaccucuacgagaaggugcgcucccagcugaagaacaacgccaaggagaucggcaacgggugcuucgaguucuaccacaagugcgacaacacgugcauggagagcgugaagaacggcaccuacgacuaccccaaguacuccgaggaggccaagcugaaccgggaggagaucgacggggucaagcucgagagcacccgcaucuaccagauccuggcgaucuacuccaccguggccagcagccuggugcucgucgugucccugggcgccaucagcuucuggaugugcuccaacggcagccugcagugccggaucugcaucuga

SEQ ID NO: 71918 - RNA, 1701 nt, Artificial Sequence
  derived and/or modified CDS sequence (opt1) from hemagglutinin__InfluenzaA__AEW22712
augaaggccauccuggugguccuccuguacaccuucgccaccgcgaacgccgacacgcugugcaucggcuaccacgccaacaacagcaccgacaccaucgacaccgugcucgagaagaacgugacggucacccacuccgugaaccugcuggaggacaagcacaacgggaagcucugcaagcugcgcggcguggcgccccugcaccucgggaagugcaacaucgccggcuggauccuggggaacccggagugcgagagccuguccaccgccagcuccuggagcuacaucgucgagaccuccagcuccgacaacggcacgugcuaccccggcgacuucaucgacuacgaggagcuccgggagcagcugagcuccgugagcuccuucgagcgcuucgagaucuuccccaagaccagcuccuggcccaaccacgacagcaacaagggggugaccgccgccugcccgcacgccggcgcgaagggguucuacaagaaccugaucuggcucgucaagaagggcaacuccuaccccaagcugagcaaguccuacaucaacgacaaggggaaggaggugcuggugcucuggggcauccaccaccccagcaccacggccgaccagcagagccuguaccagaacgccgacaccuacgucuucgugggcaccucccgguacagcaagaaguucaagcccgagaucgccauccgcccgaaggugcgggaccaggaggggcgcaugaacuacuacuggacccuggucaagcccggcgacaagaucacguucgaggccaccgggaaccucguggugccccgguacgcguucgccauggagcgcaacgccggcuccggcaucaucaucagcgacacccccguccacgacugcaacaccacgugccagaccccgaagggggccaucaacaccucccugcccuuccagaacauccaccccaucaccaucggcaagugccccaaguacgucaagagcacgaagcugcggcucgccaccgggcugcgcaacgugccguccauccagagccggggccuguucggggcgaucgccggcuucaucgagggcggguggaccggcaugguggacgggugguacggcuaccaccaccagaacgagcagggguccggcuacgccgccgaccucaagagcacccagaacgccaucgacaagaucacgaacaaggugaacuccgugaucgagaagaugaacacccaguucaccgcggucggcaaggaguucaaccaccuggagaagcgcaucgagaaccugaacaagaagguggacgacggguuccucgacaucuggaccuacaacgccgagcugcugguccuccuggagaacgagcggacgcuggacuaccacgacagcaacgugaagaaccucuacgagaaggugcgcaaccagcugaagaacaacgccaaggagaucggcaacgggugcuucgaguucuaccacaagugcgacaacacgugcauggaguccgucaagaacggcaccuacgacuaccccaaguacagcgaggaggccaagcugaaccgggaggagaucgacggggugaagcucgaguccacccgcaucuaccagauccuggccaucuacagcaccguggcguccagccugguccucguggugucccugggcgccaucagcuucuggaugugcagcaacggcucccugcagugccggaucugcaucuga

SEQ ID NO: 71919 - RNA, 1701 nt, Artificial Sequence
  derived and/or modified CDS sequence (opt1) from hemagglutinin__InfluenzaA__AEW22718
augaaggccauccuggugguccuccuguacaccuucgccaccgcgaacgccgacacgcugugcaucggcuaccacgccaacaacagcaccgacaccguggacaccgugcucgagaagaacgucacggugacccacuccgugaaccugcuggaggacaagcacaacgggaagcucugcaagcugcgcggcgucgcgccccugcaccucgggaagugcaacaucgccggcuggauccuggggaacccggagugcgagagccuguccaccgccagcuccuggagcuacaucguggagaccuccagcuccgacaacggcacgugcuaccccggcgacuucaucgacuacgaggagcuccgggagcagcugagcuccgugagcuccuucgagcgcuucgagaucuuccccaagaccagcuccuggcccaaccacgacagcaacaagggggucaccgccgccugcccgcacgccggcgcgaagggguucuacaagaaccugaucuggcucgugaagaagggcaacuccuaccccaagcugagcaaguccuacaucaacgacaaggggaaggaggugcugguccucuggggcauccaccaccccagcaccacggccgaccagcagagccuguaccagaacgccgacaccuacguguucgugggcaccucccgguacagcaagaaguucaagcccgagaucgccauccgcccgaagguccgggaccaggaggggcgcaugaacuacuacuggacccuggugaagcccggcgacaagaucacguucgaggccaccgggaaccucguggucccccgguacgcguucgccauggagcgcaacgccggcuccggcaucaucaucagcgacacccccgugcacgacugcaacaccacgugccagaccccgaagggggccaucaacaccucccugcccuuccagaacauccaccccaucaccaucggcaagugccccaaguacgucaagagcacgaagcugcggcucgccaccgggcugcgcaacgugccguccauccagagccggggccuguucggggcgaucgccggcuucaucgagggcggguggaccggcaugguggacgggugguacggcuaccaccaccagaacgagcagggguccggcuacgccgccgaccucaagagcacccagaacgccaucgacaagaucacgaacaaggugaacuccgucaucgagaagaugaacacccaguucaccgcggugggcaaggaguucaaccaccuggagaagcgcaucgagaaccugaacaagaaggucgacgacggguuccucgacaucuggaccuacaacgccgagcugcuggugcuccuggagaacgagcggacgcuggacuaccacgacagcaacgugaagaaccucuacgagaagguccgcaaccagcugaagaacaacgccaaggagaucggcaacgggugcuucgaguucuaccacaagugcgacaacacgugcauggaguccgugaagaacggcaccuacgacuaccccaaguacagcgaggaggccaagcugaaccgggaggagaucgacggggugaagcucgaguccacccgcaucuaccagauccuggccaucuacagcaccgucgcguccagccuggugcucguggucucccugggcgccaucagcuucuggaugugcagcaacggcucccugcagugccggaucugcaucuga

SEQ ID NO: 71920 - RNA, 1701 nt, Artificial Sequence; identical to SEQ ID NO: 70478
  derived and/or modified CDS sequence (opt1) from hemagglutinin__InfluenzaA__AEW22720

SEQ ID NO: 71921 - RNA, 1701 nt, Artificial Sequence; identical to SEQ ID NO: 70478
  derived and/or modified CDS sequence (opt1) from hemagglutinin__InfluenzaA__AEW22722

SEQ ID NO: 71922 - RNA, 1701 nt, Artificial Sequence
  derived and/or modified CDS sequence (opt1) from hemagglutinin__InfluenzaA__AEW22724
augaaggccauccuggugguccuccuguacaccuucgccaccgcgaacgccgacacgcugugcaucggcuaccacgccaacaacagcaccgacaccguggacaccgugcucgagaagaacgucacggugacccacuccgugaaccugcuggaggacaagcacaacgggaagcucugcaagcugcgcggcgucgcgccccugcaccucgggaagugcaacaucgccggcuggauccuggggaacccggagugcgagagccuguccaccgccagcuccuggagcuacaucguggagaccuccagcuccgacaacggcacgugcuaccccggcgacuucaucgacuacgaggagcuccgggagcagcugagcuccgugagcuccuucgagcgcuucgagaucuuccccaagaccagcuccuggcccaaccacgacagcaacaagggggucaccgccgccugcccgcacgccggcgcgaagggguucuacaagaaccugaucuggcucgugaagaagggcaacuccuaccccaagcugagcaaguccuacaucaacgacaaggggaaggaggugcugguccucuggggcauccaccaccccagcaccacggccgaccagcagagccuguaccagaacgccgacaccuacguguucgugggcaccucccgguacagcaagaaguucaagcccgagaucgccauccgcccgaagguccgggaccaggaggggcgcaugaacuacuacuggacccugguggagcccggcgacaagaucacguucgaggccaccgggaaccucguggucccccgguacgcguucgccauggagcgcaacgccggcuccggcaucaucaucagcgacacccccgugcacgacugcaacaccacgugccagaccccgaagggggccaucaacaccucccugcccuuccagaacauccaccccaucaccaucggcaagugccccaaguacgucaagagcacgaagcugcggcucgccaccgggcugcgcaacgugccguccauccagagccggggccuguucggggcgaucgccggcuucaucgagggcggguggaccggcaugguggacgggugguacggcuaccaccaccagaacgagcagggguccggcuacgccgccgaccucaagagcacccagaacgccaucgacaagaucacgaacaaggugaacuccgucaucgagaagaugaacacccaguucaccgcggugggcaaggaguucaaccaccuggagaagcgcaucgagaaccugaacaagaaggucgacgacggguuccucgacaucuggaccuacaacgccgagcugcuggugcuccuggagaacgagcggacgcuggacuaccacgacagcaacgugaagaaccucuacgagaagguccgcaaccagcugaagaacaacgcccgggagaucggcaacgggugcuucgaguucuaccacaagugcgacaacacgugcauggaguccgugaagaacggcaccuacgacuaccccaaguacagcgaggaggccaagcugaaccgcgaggagaucgacggggugaagcucgaguccacccggaucuaccagauccuggccaucuacagcaccgucgcguccagccuggugcucguggucucccugggcgccaucagcuucuggaugugcagcaacggcucccugcagugccgcaucugcaucuga

SEQ ID NO: 71923 - RNA, 1701 nt, Artificial Sequence
  derived and/or modified CDS sequence (opt1) from hemagglutinin__InfluenzaA__AEW25297
augaaggccauccuggugguccuccuguacaccuucgccaccgcgaacgccgacacgcugugcaucggcuaccacgccaacaacagcaccgacaccguggacaccgugcucgagaagaacgucacggugacccacuccgugaaccugcuggaggacaagcacaacgggaagcucugcaagcugcgcggcgucgcgccccugcaccucgggaagugcaacaucgccggcuggaucccggggaaccccgagugcgagagccuguccaccgcgagcuccuggagcuacaucguggagaccuccagcuccgacaacggcacgugcuaccccggcgacuucaucgacuacgaggagcugcgggagcagcucagcuccgugagcuccuucgagcgcuucgagaucuuccccaagaccagcuccuggccgaaccacgaccccaacaagggggucaccgccgccugcccccacgccggcgccaagagcuucuacaagaaccugaucuggcuggugaagaaggggaacuccuaccccaagcucagcaaguccuacaucaacgacaagggcaaggaggugcugguccugugggggauccaccacccgagcaccagcgccgaccagcagucccucuaccagaacgccgacgccuacguguucgugggcacgagccgguacuccaagaaguucaagcccgagaucgccauccgccccaagguccgggaccaggagggccgcaugaacuacuacuggacccugguggagcccggggacaagaucaccuucgaggcgaccggcaaccugguggucccgcgguacgccuucgccauggagcgcaacgccgggagcggcaucaucaucuccgacacgcccgugcacgacugcaacacgaccugccagacgccccggggcgccaucaacaccagccuccccuuccagaacauccacccgaucaccaucgggaagugccccaaguacgugaaguccaccaagcugcgccuggcgaccggccuccggaacguccccagcauccagucccgcgggcuguucggcgccaucgccggguucaucgagggcggcuggaccgggaugguggacggcugguacggguaccaccaccagaacgagcagggcagcggguacgccgccgaccugaaguccacccagaacgcgaucgacgagaucaccaacaaggugaacagcgucaucgagaagaugaacacccaguucacggccgugggcaaggaguucaaccaccucgagaagcggaucgagaaccugaacaagaaggucgacgacggcuuccuggacaucuggaccuacaacgccgagcuccuggugcugcucgagaacgagcgcacccuggacuaccacgacuccaacgugaagaaccuguacgagaagguccggagccagcucaagaacaacgccaaggagaucgggaacggcugcuucgaguucuaccacaagugcgacaacacgugcauggaguccgugaagaacgggaccuacgacuaccccaaguacagcgaggaggccaagcugaaccgcgaggagaucgacggcgugaagcuggaguccacccggaucuaccagauccucgcgaucuacagcaccgucgccuccagccuggugcugguggucagccucggggccaucuccuucuggaugugcagcaacggcucccugcagugccgcaucugcaucuga

SEQ ID NO: 71924 - RNA, 1701 nt, Artificial Sequence; identical to SEQ ID NO: 67491
  derived and/or modified CDS sequence (opt1) from hemagglutinin__InfluenzaA__AEW25306

SEQ ID NO: 71925 - RNA, 1701 nt, Artificial Sequence
  derived and/or modified CDS sequence (opt1) from hemagglutinin__InfluenzaA__AEW25315
augaaggccauccuggugguccuccuguacaccuucgccaccgcgaacgccgacacgcugugcaucggcuaccacgccaacaacagcaccgacaccguggacaccgugcucgagaagaacgucacggugacccacuccgugaaccugcuggaggacaagcacaacgggaagcucugcaagcugcgcggcgucgcgccccugcaccucgggaagugcaacaucgccggcuggauccuggggaacccggagugcgagagccuguccaccgcgagcuccuggagcuacaucguggagaccuccagcuccgacaacggcacgugcuaccccggcgacuucaucgacuacgaggagcuccgggagcagcugagcuccgugagcuccuucgagcgcuucgagaucuuccccaagaccagcuccuggcccaaccacgacccgaacaagggggucaccgccgccugcccccacgccggcgccaagagcuucuacaagaaccugaucuggcucgugaagaaggggaacuccuaccccaagcugagcaaguccuacaucaacgacaagggcaaggaggugcugguccucugggggauccaccaccccagcaccagcgccgaccagcagucccuguaccagaacgccgacgccuacguguucgugggcacgagccgguacuccaagaaguucaagccggagaucgccauccgccccaagguccgggaccaggagggccgcaugaacuacuacuggacccugguggagcccggggacaagaucaccuucgaggcgaccggcaaccucguggucccccgguacgccuucgccauggagcgcaacgccgggagcggcaucaucaucuccgacacgccggugcacgacugcaacacgaccugccagacccccaagggcgccaucaacaccagccugcccuuccagaacauccaccccaucaccaucgggaagugcccgaaguacgugaaguccaccaagcugcggcucgcgaccggccugcgcaacguccccagcauccagucccgggggcuguucggcgccaucgccggguucaucgagggcggcuggacggggaugguggacggcugguacggguaccaccaccagaacgagcagggcagcggguacgccgccgaccucaaguccacccagaacgcgaucgacgagaucaccaacaaggugaacagcgucaucgagaagaugaacacccaguucacggccgugggcaaggaguucaaccaccuggagaagcgcaucgagaaccugaacaagaaggucgacgacggcuuccucgacaucuggaccuacaacgccgagcugcuggugcuccuggagaacgagcggacccuggacuaccacgacuccaacgugaagaaccucuacgagaagguccgcagccagcugaagaacaacgccaaggagaucgggaacggcugcuucgaguucuaccacaagugcgacaacacgugcauggaguccgugaagaacgggaccuacgacuaccccaaguacagcgaggaggccaagcugaaccgggaggagaucgacggcgugaagcucgaguccacccgcaucuaccagauccuggcgaucuacagcaccgucgccuccagccuggugcucguggucagccugggggccaucuccuucugggugugcagcaacggcucccugcagugccggaucugcaucuga

SEQ ID NO: 71926 - RNA, 1701 nt, Artificial Sequence
  derived and/or modified CDS sequence (opt1) from hemagglutinin__InfluenzaA__AEW25331
augaaggccauccuggugguccuccuguacaccuucgccaccgcgaacgccgacacgcugugcaucggcuaccacgccaacaacagcaccgacaccguggacaccgugcucgagaagaacgucacggugacccacuccgugaaccugcuggaggacaagcacaacgggaagcucugcaagcugcgcggcgucgcgccccugcaccucgggaagugcaacaucgccggcuggauccuggggaacccggagugcgagagcuucuccaccagcuccagcugguccuacaucguggagaccagcuccagcgacaacggcacgugcuaccccggcgacuucaucgacuacgaggagcugcgggagcagcucuccagcguguccagcuucgagcgcuucgagaucuuccccaagaccuccagcuggcccaaccacgacuccaacaagggggucaccgccgccugcccgcacgccggcgccaagagcuucuacaagaaccugaucuggcuggugaagaaggggaacuccuaccccaagcucagcaagagcuacaucaacgacaagggcaaggaggugcugguccugugggggauccaccaccccuccaccagcgcggaccagcagucccucuaccagaacgccgacgccuacguguucgugggcacgagccgguacuccaagaaguucaagcccgagaucgccauccgcccgaagguccgggaccaggagggccgcaugaacuacuacuggacccugguggagcccggggacaagaucaccuucgaggccaccggcaaccugguggucccccgguacgcguucgccauggagcgcaacgccgggagcggcaucaucaucuccgacacgcccgugcacgacugcaacacgaccugccagaccccgaagggcgccaucaacaccagccuccccuuccagaacaucccgcccaucaccaucgggaagugccccaaguacgugaaguccaccaagcugcggcuggccaccggccuccgcaacguccccagcauccagucccgggggcuguucggcgcgaucgccggguucaucgagggcggcuggacggggaugguggacggcugguacggguaccaccaccagaacgagcagggcagcggguacgccgccgaccugaaguccacccagaacgccaucgacgagaucaccaacaaggugaacagcgucaucgagaagaugaacacccaguucacggcggugggcaaggaguucaaccaccucgagaagcgcaucgagaaccugaacaagaaggucgacgacggcuuccuggacaucuggaccuacaacgccgagcuccuggugcugcucgagaacgagcggacccuggacuaccacgacuccaacgugaagaaccuguacgagaagguccgcagccagcucaagaacaacgccaaggagaucgggaacggcugcuucgaguucuaccacaagugcgacaacacgugcauggaguccgugaagaacgggaccuacgacuaccccaaguacagcgaggaggccaagcugaaccgggaggagaucgacggcgugaagcuggaguccacccgcaucuaccagauccucgccaucuacagcaccgucgcgagcucccuggugcugguggucagccucggggccaucuccuucuggaugugcagcaacggcucccugcagugccggaucugcaucuga

SEQ ID NO: 71927 - RNA, 1701 nt, Artificial Sequence
  derived and/or modified CDS sequence (opt1) from hemagglutinin__InfluenzaA__AEW25349
augaaggccauccuggugguccuccuguacaccuucgccaccgcgaacgccgacacgcugugcaucggcuaccacgccaacaacagcaccgacaccguggacaccgugcucgagaagaacgucacggugacccacuccgugaaccugcuggaggacaagcacaacgggaagcucugcaagcugcgcggcgucgcgccccugcaccucgggaagugcaacaucgccggcuggauccuggggaacccggagugcgagagcuucuccaccagcuccagcugguccuacaucguggagaccagcuccagcgacaacggcacgugcuaccccggcgacuucaucgacuacgaggagcugcgggagcagcucuccagcguguccagcuucgagcgcuucgagaucuuccccaagaccuccagcuggcccaaccacgacuccaacaagggggucaccgccgccugcccgcacgccggcgccaagagcuucuacaagaaccugaucuggcuggugaagaaggggaacuccuaccccaagcucagcaagagcuacaucaacgacaagggcaaggaggugcugguccugugggggauccaccaccccuccaccagcgcggaccagcagucccucuaccagaacgccgacgccuacguguucgugggcacgagccgguacuccaagaaguucaagcccgagaucgccauccgcccgaagguccgggaccaggagggccgcaugaacuacuacuggacccugguggagcccggggacaagaucaccuucgaggccaccggcaaccugguggucccccgguacgcguucgccauggagcgcaacgccgggagcggcaucaucaucuccgacacgcccgugcacgacugcaacacgaccugccagaccccgaagggcgccaucaacaccagccuccccuuccagaacauccaccccaucaccaucgggaagugccccaaguacgugaaguccaccaagcugcggcuggccaccggccuccgcaacgucccgagcauccagucccgggggcuguucggcgcgaucgccggguucaucgagggcggcuggacggggaugguggacggcugguacggguaccaccaccagaacgagcagggcagcggguacgccgccgaccugaaguccacccagaacgccaucgacgagaucaccaacaaggugaacagcgucaucgagaagaugaacacccaguucacggcggugggcaaggaguucaaccaccucgagaagcgcaucgagaaccugaacaagaaggucgacgacggcuuccuggacaucuggaccuacaacgccgagcuccuggugcugcucgagaacgagcggacccuggacuaccacgacuccaacgugaagaaccuguacgagaagguccgcagccagcucaagaacaacgccaaggagaucgggaacggcugcuucgaguucuaccacaagugcgacaacacgugcauggaguccgugaagaacgggaccuacgacuaccccaaguacagcgaggaggccaagcugaaccgggaggagaucgacggcgugaagcuggaguccacccgcaucuaccagauccucgccaucuacagcaccgucgcgagcucccuggugcugguggucagccucggggccaucuccuucuggaugugcagcaacggcucccugcagugccggaucugcaucuga

SEQ ID NO: 71928 - RNA, 1701 nt, Artificial Sequence
  derived and/or modified CDS sequence (opt1) from hemagglutinin__InfluenzaA__AEW25367
augaaggccauccuggugguccuccuguacaccuucgccaccgcgaacgccgacacgcugugcaucggcuaccacgccaacaacagcaccgacaccguggacaccgugcucgagaagaacgucacggugacccacuccgugaaccugcuggaggacaagcacaacgggaagcucugcaagcugcgcggcgucgcgccccugcaccucgggaagugcaacaucgccggcuggauccuggggaacccggagugcgagagcuucuccaccagcuccagcugguccuacaucguggagaccagcuccagcgacaacggcacgugcuaccccggcgacuucaucgacuacgaggagcugcgggagcagcucuccagcguguccagcuucgagcgcuucgagaucuuccccaagaccuccagcuggcccaaccacgacuccaacaagggggucaccgccgccugcccgcacgccggcgccaagagcuucuacaagaaccugaucuggcuggugaagaaggggaacuccuaccccaagcucagcaagagcuacaucaacgacaagggcaaggaggugcugguccugugggggauccaccaccccuccaccagcgcggaccagcagcggcucuaccagaacgccgacgccuacguguucgugggcacgucccgcuacagcaagaaguucaagcccgagaucgccauccggccgaagguccgcgaccaggagggccggaugaacuacuacuggacccugguggagcccggggacaagaucaccuucgaggccaccggcaaccugguggucccccgcuacgcguucgccauggagcggaacgccggguccggcaucaucaucagcgacacgcccgugcacgacugcaacacgaccugccagaccccgaagggcgccaucaacaccucccuccccuuccagaacauccaccccaucaccaucgggaagugccccaaguacgucaagagcaccaagcugcgccuggccaccggccuccggaacgugccguccauccagagccgcgggcuguucggcgcgaucgccggguucaucgagggcggcuggacggggaugguggacggcugguacggguaccaccaccagaacgagcagggcuccggguacaccgccgaccucaagagcacccagaacgccaucgacgagaucaccaacaaggugaacuccgucaucgagaagaugaacacgcaguucaccgccgugggcaaggaguucaaccaccuggagaagcggaucgagaaccugaacaagaaggucgacgacggcuuccuggacaucuggaccuacaacgcggagcuccuggugcugcucgagaacgagcgcacccuggacuaccacgacagcaacgugaagaaccuguacgagaagguccggucccagcucaagaacaacgccaaggagaucgggaacggcugcuucgaguucuaccacaagugcgacaacacgugcauggagagcgugaagaacgggaccuacgacuaccccaaguacuccgaggaggccaagcugaaccgcgaggagaucgacggcgugaagcuggagagcacccggaucuaccagauccucgccaucuacuccaccgucgccagcagccuggugcugguggucucccucggggcgaucagcuucuggaugugcuccaacggcagccugcagugccgcaucugcaucuga

SEQ ID NO: 71929 - RNA, 1701 nt, Artificial Sequence
  derived and/or modified CDS sequence (opt1) from hemagglutinin__InfluenzaA__AEW25377
augaaggccauccuggugguccuccuguacaccuucgccaccgcgaacgccgacacgcugugcaucggcuaccacgccaacaacagcaccgacaccguggacaccgugcucgagaagaacgucacggugacccacuccgugaaccugcuggaggacaagcacaacgggaagcucugcaagcugcgcggcgucgcgccccugcaccucgggaagugcaacaucgccggcuggauccuggggaacccggagugcgagagccuguccaccgccagcuccuggagcuacaucguggagaccuccagcuccgacaacggcacgugcuaccccggcgacuucaucgacuacgaggagcuccgggagcagcugagcuccgugagcuccuucgagcgcuucgagaucuuccccaagaccagcuccuggcccaaccacgacagcaacaagggggucaccaccgccugcccgcacgccggcgccaaguccuucuacaagaaccugaucuggcucgugaagaaggggaacagcuaccccaagcuguccaagagcuacaucaacgacaagggcaaggaggugcugguccucugggggauccaccaccccagcacguccgcggaccagcagagccuguaccagaacgccgacgccuacguguucgugggcaccucccgguacagcaagaaguucaagcccgagaucgccauccgcccgaagguccgggaccaggagggccgcaugaacuacuacuggacccugguggagcccggggacaagaucaccuucgaggccacgggcaaccucguggucccccgguacgcguucgccauggagcgcaacgccggguccggcaucaucaucagcgacacccccgugcacgacugcaacacgaccugccagaccccgaagggcgccaucaacaccucccugcccuuccagaacauccaccccaucaccaucgggaagugccccaaguacgucaagagcaccaagcugcggcucgccacgggccugcgcaacgugccguccauccagagccgggggcuguucggcgcgaucgccggguucaucgagggcggcuggaccgggaugguggacggcugguacggguaccaccaccagaacgagcagggcuccggguacgccgccgaccucaagagcacccagaacgccaucgacgagaucaccaacaaggugaacuccgucaucgagaagaugaacacgcaguucaccgcggugggcaaggaguucaaccaccuggagaagcgcaucgagaaccugaacaagaaggucgacgacggcuuccucgacaucuggaccuacaacgccgagcugcuggugcuccuggagaacgagcggacccuggacuaccacgacagcaacgugaagaaccucuacgagaaggucaagucccagcugaagaacaacgccaaggagaucgggaacggcugcuucgaguucuaccacaagugcgacaacgccugcauggagagcgugaagaacgggacguacgacuaccccaaguacuccgaggaggccaagcugaaccgcgaggagaucgacggcgugaagcucgagagcacccggaucuaccagauccuggcgaucuacuccaccgucgccagcagccuggugcucguggucucccugggggccaucagcuucuggaugugcuccaacggcagccugcagugccgcaucugcaucuga

SEQ ID NO: 71930 - RNA, 1701 nt, Artificial Sequence
  derived and/or modified CDS sequence (opt1) from hemagglutinin__InfluenzaA__AEW25385
augaaggccauccuggugguccuccuguacaccuucgccaccgcgaacgccgacacgcugugcaucggcuaccacgccaacaacagcaccgacaccguggacaccgugcucgagaagaacgucacggugacccacuccgugaaccugcuggaggacaagcacaacgggaagcucugcaagcugcgcggcgucgcgccccugcaccucgggaagugcaacaucgccggcuggauccuggggaacccggagugcgagagccuguccaccgcgagcuccuggagcuacaucguggagaccuccagcuccgacaacggcacgugcuaccccggcgacuucaucgacuacgaggagcuccgggagcagcugagcuccgugcccagcuucgagcgcuucgagaucuuccccaagaccuccagcuggccgaaccacgacuccaacaagggggucaccgccgccugcccccacgccggcgccaagagcuucuacaagaaccugaucuggcucgugaagaaggggaacuccuaccccaagcugagcaaguccuacaucaacgacaagggcaaggaggugcugguccucugggggauccaccaccccagcaccagcgccgaccagcagucccuguaccagaacgccgacgccuacguguucgugggcacgagccgguacuccaagaaguucaagccggagaucgccauccgccccaagguccgggaccaggagggccgcaugaacuacuacuggacccugguggagcccggggacaagaucaccuucgaggcgaccggcaaccucguggucccccgguacgccuucgccauggagcgcaacgccgggagcggcaucaucaucuccgacacgccggugcacgacugcaacacgaccugccagacccccaagggcgccaucaacaccagccugcccuuccagaacauccaccccaucaccaucgggaagugcccgaaguacgugaaguccaccaagcugcggcucgcgaccggccugcgcaacguccccagcauccagucccgggggcuguucggcgccaucgccggguucaucgagggcggcuggacggggaugguggacggcugguacggguaccaccaccagaacgagcagggcagcggguacgccgccgaccucaaguccacccagaacgcgaucgacaagaucaccaacaaggugaacagcgucaucgagaagaugaacacccaguucacggccgugggcaaggaguucaaccaccuggagaagcgcaucgagaaccugaacaagaaggucgacgacggcuuccucgacaucuggaccuacaacgccgagcugcuggugcuccuggagaacgagcggacccuggacuaccacgacuccaacgugaagaaccucuacgagaagguccgcagccagcugaagaacaacgccaaggagaucgggaacggcugcuucgaguucuaccacaagugcgacaacacgugcauggaguccgugaagaacgggaccuacgacuaccccaaguacagcgaggaggccaagcugaaccgggaggagaucgacggcgugaagcucgaguccacccgcaucuaccagauccuggcgaucuacagcaccgucgccuccagccuggugcucguggucagccugggggccaucuccuucuggaugugcagcaacggcucccugcagugccggaucugcaucuga

SEQ ID NO: 71931 - RNA, 1701 nt, Artificial Sequence; identical to SEQ ID NO: 71927
  derived and/or modified CDS sequence (opt1) from hemagglutinin__InfluenzaA__AEW25416

SEQ ID NO: 71932 - RNA, 1701 nt, Artificial Sequence
  derived and/or modified CDS sequence (opt1) from hemagglutinin__InfluenzaA__AEW25446
augaaggccauccuggugguccuccuguacaccuucgccaccgcgaacgccgacacgcugugcaucggcuaccacgccaacaacagcaccgacaccguggacaccgugcucgagaagaacgucacggugacccacuccgugaaccugcuggaggacaagcacaacgggaagcucugcaagcugcgcggcgucgcgccccugcaccucgggaagugcaacaucgccggcuggauccuggggaacccggagugcgagagccuguccaccgcgagcuccuggagcuacaucguggagaccuccagcuccgacaacggcacgugcuaccccggcgacuucaucgacuacgaggagcuccgggagcagcugagcuccgugagcuccuucgagcgcuucgagaucuuccccaagaccagcuccuggcccaaccacgacccgaacaagggggucaccgccgccugcccccacgccggcgccaagagcuucuacaagaaccugaucuggcucgugaagaaggggaacuccuaccccaagcugagcaaguccuacaucaacgacaagggcaaggaggugcugguccucugggggauccaccaccccagcaccagcgccgaccagcagucccuguaccagaacgccgacgccuacguguucgugggcacgagccgguacuccaagaaguucaagccggagaucgccauccgccccaagguccgggaccaggagggccgcaugaacuacuacuggacccugguggagcccggggacaagaucaccuucgaggcgaccggcaaccucguggucccccgguacgccuucgccauggagcgcaacgccgggagcggcaucaucaucuccgacacgccggugcacgacugcaacacgaccugccagacccccaagggcgccaucaacaccagccugcccuuccagaacauccaccccaucaccaucgggaagugcccgaaguacgugaaguccaccaagcugcggcucgcgaccggccugcgcaacguccccagcauccagucccgggggcuguucggcgccaucgccggguucaucgagggcggcuggacggggaugguggacggcugguacggguaccaccaccagaacgagcagggcagcggguacgccgccgaccucaaguccacccagaacgcgaucgacgagaucaccaacaaggugaacagcgucaucgagaagaugaacaagcaguucaccgccgugggcaaggaguucaaccaccuggagaagcgcaucgagaaccugaacaagaaggucgacgacggcuuccucgacaucuggacguacaacgccgagcugcuggugcuccuggagaacgagcggacccuggacuaccacgacuccaacgugaagaaccucuacgagaagguccgcagccagcugaagaacaacgccaaggagaucgggaacggcugcuucgaguucuaccacaagugcgacaacacgugcauggaguccgugaagaacgggaccuacgacuaccccaaguacagcgaggaggccaagcugaaccgggaggagaucgacggcgugaagcucgaguccacccgcaucuaccagauccuggcgaucuacagcaccgucgccuccagccuggugcucguggucagccugggggccaucuccuucuggaugugcagcaacggcucccugcagugccggaucugcaucuga

SEQ ID NO: 71933 - RNA, 1701 nt, Artificial Sequence; identical to SEQ ID NO: 71927
  derived and/or modified CDS sequence (opt1) from hemagglutinin__InfluenzaA__AEW25454

SEQ ID NO: 71934 - RNA, 1701 nt, Artificial Sequence
  derived and/or modified CDS sequence (opt1) from hemagglutinin__InfluenzaA__AEW25462
augaaggccauccuggugguccuccuguacaccuucgccaccgcgaacgccgacacgcugugcaucggcuaccacgccaacaacagcaccgacaccguggacaccgugcucgagaagaacgucacggugacccacuccgugaaccugcuggaggacaagcacaacgggaagcucugcaagcugcgcggcgucgcgccccugcaccucgggaagugcaacaucgccggcuggauccuggggaacccggagugcgagagccuguccaccgcgagcuccuggagcuacaucguggagaccuccagcuccgacaacggcacgugcuaccccggcgacuucaucgacuacgaggagcuccgggagcagcugagcuccgugagcuccuucgagcgcuucgagaucuuccccaagaccagcuccuggcccaaccacgacccgaacaagggggucaccgccgccugcccccacgccggcgccaagagcuucuacaagaaccugaucuggcucgugaagaaggggaacuccuaccccaagcugagcaagcccuacaccaacgacaagggcaaggaggugcugguccucugggggauccaccacccguccacgagcgccgaccagcagagccuguaccagaacgccgacgccuacguguucgugggcaccucccgguacagcaagaaguucaagcccgagaucgccauccgccccaagguccgggaccaggagggccgcaugaacuacuacuggacccugguggagcccggggacaagaucaccuucgaggcgacgggcaaccucguggucccgcgguacgccuucgccauggagcgcaacgccggguccggcaucaucaucagcgacacccccgugcacgacugcaacacgaccugccagacccccaagggcgccaucaacaccucccugcccuuccagaacauccacccgaucaccaucgggaagugccccaaguacgucaagagcaccaagcugcggcucgcgacgggccugcgcaacgugcccuccauccagagccgggggcuguucggcgccaucgccggguucaucgagggcggcuggaccgggaugguggacggcugguacggguaccaccaccagaacgagcagggcuccggguacgccgccgaccucaagagcacccagaacgcgaucgacgagaucaccaacaaggugaacuccgucaucgagaagaugaacacgcaguucaccgccgugggcaaggaguucaaccaccuggagaagcgcaucgagaaccugaacaagaaggucgacgacggcuuccucgacaucuggaccuacaacgccgagcugcuggugcuccuggagaacgagcggacccuggacuaccacgacagcaacgugaagaaccucuacgagaagguccgcucccagcugaagaacaacgccaaggagaucgggaacggcugcuucgaguucuaccacaagugcgacaacacgugcauggagagcgugaagaacgggaccuacgacuaccccaaguacuccgaggaggccaagcugaaccgggaggagaucgacggcgugaagcucgagagcacccgcaucuaccagauccuggcgaucuacuccaccgucgccagcucccuggugcucguggucagccugggggccaucagcuucuggaugugcuccaacggcagccugcagugccggaucugcaucuga

SEQ ID NO: 71935 - RNA, 1701 nt, Artificial Sequence; identical to SEQ ID NO: 67491
  derived and/or modified CDS sequence (opt1) from hemagglutinin__InfluenzaA__AEW25472

SEQ ID NO: 71936 - RNA, 1701 nt, Artificial Sequence
  derived and/or modified CDS sequence (opt1) from hemagglutinin__InfluenzaA__AEW25482
augaaggccauccuggugguccuccuguacaccuucgccaccgcgaacgccgacacgcugugcaucggcuaccacgccaacaacagcaccgacaccguggacaccgugcucgagaagaaggucacggugacccacuccgugaaccugcuggaggacaagcacaacgggaagcucugcaagcugcgcggcgucgcgccccugcaccucgggaagugcaacaucgccggcuggauccuggggaacccggagugcgagagccuguccaccgccagcuccuggagcuacaucguggagaccuccaacagcgacaacggcacgugcuaccccggcgacuucaucgacuacgaggagcuccgggagcagcuguccagcguguccagcuucgagcgcuucgagaucuuccccaagaccuccagcuggcccaaccacgacccgaacaagggggucaccgccgccugcccccacgccggcgcgaaguccuucuacaagaaccugaucuggcucgugaagaaggggaacagcuaccccaagcuguccaagagcuacaucaacgacaagggcaaggaggugcugguccucugggggauccaccaccccuccaccagcgccgaccagcagagccuguaccagaacgccgacgccuacguguucgugggcacgucccgguacagcaagaaguucaagccggagaucgccauccgccccaagguccgggaccagggcgggcgcaugaacuacuacuggacccugguggagcccggcgacaagaucaccuucgaggcgaccgggaaccucguggucccccgguacgccuucgccauggagcgcaacgccggcuccggcaucaucaucagcgacacgccggugcacgacugcaacacgaccugccagacccccaagggggccaucaacaccucccugcccuuccagaacauccaccccaucaccaucggcaagugcccgaaguacgucaagagcaccaagcugcggcucgcgaccgggcugcgcaacgugcccuccauccagagccggggccuguucggggccaucgccggcuucaucgagggcggguggacgggcaugguggacgggugguacggcuaccaccaccagaacgagcagggguccggcuacgccgccgaccucaagagcacccagaacgcgaucgacgagaucaccaacaaggugaacuccgucaucgagaagaugaacacccaguucacggccgugggcaaggaguucaaccaccuggagaagcgcaucgagaaccugaacaagaaggucgacgacggguuccucgacaucuggaccuacaacgccgagcugcuggugcuccuggagaacgagcggacccuggacuaccacgacagcaacgugaagaaccucuacgagaagguccgcucccagcugaagaacaacgccaaggagaucggcaacgggugcuucgagcuguaccacaagugcgacaacacgugcauggagagcgugaagaacggcaccuacgacuaccccaaguacuccgaggaggccaagcucaaccgggaggagaucgacggggugaagcuggagagcacccgcaucuaccagauccuggcgaucuacuccaccgucgccagcucccucgugcugguggucagccugggcgccaucagcuucuggaugugcuccaacggcagccuccagugccggaucugcaucuga

SEQ ID NO: 71937 - RNA, 1701 nt, Artificial Sequence
  derived and/or modified CDS sequence (opt1) from hemagglutinin__InfluenzaA__AEW25492
augaaggccauccuggugguccuccuguacaccuucgccaccgcgaacgccgacacgcugugcaucggcuaccacgccaacaacagcaccgacaccguggacaccgugcucgagaagaacgucacggugacccacuccgugaaccugcuggaggacaagcacaacgggaagcucugcaagcugcgcggcgucgcgccccugcaccucgggaagugcaacaucgccggcuggauccuggggaacccggagugcgagagccuguccaccgcgagcuccuggagcuacaucguggagaccuccagcuccgacaacggcacgugcuaccccggcgacuucaucgacuacgaggagcuccgggagcagcugagcuccgugagcuccuucgagcgcuucgagaucuuccccaagaccagcuccuggcccaaccacgacccgaacaagggggucaccgccgccugcccccacgccggcgccaagagcuucuacaagaaccugaucuggcucgugaagaaggggaacuccuaccccaagcugagcaaguccuacaucaacgacaagggcaaggaggugcugguccucugggggauccaccaccccagcaccagcgccgaccagcagucccuguaccagaacgccgacgccuacaucuucgugggcacgagccgguacuccaagaaguucaagccggagaucgccauccgccccaaggugcgggaccaggagggccgcaugaacuacuacuggacccuggucgagcccggggacaagaucaccuucgaggcgaccggcaaccucguggugccccgguacgccuucgccauggagcgcaacgccgggagcggcaucaucaucuccgacacgccgguccacgacugcaacacgaccugccagacccccaagggcgccaucaacaccagccugcccuuccagaacauccaccccaucaccaucgggaagugcccgaaguacgugaaguccaccaagcugcggcucgcgaccggccugcgcaacgugcccagcauccagucccgggggcuguucggcgccaucgccggguucaucgagggcggcuggacggggauggucgacggcugguacggguaccaccaccagaacgagcagggcagcggguacgccgccgaccucaaguccacccagaacgcgaucgacgagaucaccaacaaggugaacagcgugaucgagaagaugaacacccaguucacggccgucggcaaggaguucaaccaccuggagaagcgcaucgagaaccugaacaagaagguggacgacggcuuccucgacaucuggaccuacaacgccgagcugcugguccuccuggagaacgagcggacccuggacuaccacgacuccaacgugaagaaccucuacgagaaggugcgcagccagcugaagaacaacgccaaggagaucgggaacggcugcuucgaguucuaccacaagugcgacaacacgugcauggaguccgucaagaacgggaccuacgacuaccccaaguacagcgaggaggccaagcugaaccgggaggagaucgacggcgugaagcucgaguccacccgcaucuaccagauccuggcgaucuacagcaccguggccuccagccugguccucguggugagccugggggccaucuccuucuggaugugcagcaacggcucccugcagugccggaucugcaucuga

SEQ ID NO: 71938 - RNA, 1701 nt, Artificial Sequence
  derived and/or modified CDS sequence (opt1) from hemagglutinin__InfluenzaA__AEW25501
augaaggccauccuggugguccuccuguacaccuucgccaccgcgaacgccgacacgcugugcaucggcuaccacgccaacaacagcaccgacaccguggacaccgugcucgagaagaacgucacggugacccacuccgugaaccugcuggaggacaagcacaacgggaagcucugcaagcugcgcggcgucgcgccccugcaccucgggaagugcaacaucgccggcuggauccuggggaacccggagugcgagagccuguccaccgccagcuccuggagcuacaucguggagaccuccagcuccgacaacggcacgugcuaccccggcgacuucaucgacuacgaggagcuccgggagcagcugagcuccgugagcuccuucgagaaguucgagaucuuccccaagaccagcuccuggcccaaccacgacagcaacaagggggucaccgccgccugcccgcacgccggcgcgaaguccuucuacaagaaccugaucugccucgugaagaaggggaacagcuaccccaagcuguccaagagcuacaucaacgacaagggcaaggaggugcugguccucugggggauccaccaccccagcaccuccgccgaccagcagagccuguaccagaacgccgacgccuacguguucgugggcacgucccgcuacagcaagaaguucaagcccgagaucgccauccggccgaagguccgcgaccaggagggccggaugaacuacuacuggacccugguggagcccggggacaagaucaccuucgaggcgaccggcaaccucguggucccccgcuacgccuucgccauggagcggaacgccggguccggcaucaucaucagcgacacgcccgugcacgacugcaacacgaccugccagaccccgaagggcgccaucaacaccucccugcccuuccagaacauccaccccaucaccaucgggaagugccccaaguacgucaagagcaccaagcugcgccucgcgaccggccugcggaacgugccguccauccagagccgcgggcuguucggcgccaucgccggguucaucgagggcggcuggacggggaugguggacggcugguacggguaccaccaccagaacgagcagggcuccggguacgccgccgaccucaagagcacccagaacgcgaucgacaagaucaccaacaaggugaacuccgucaucgagaagaugaacacccaguucacggccgugggcaaggaguucaaccaccuggagaagcggaucgagaaccugaacaagaaggucgacgacggcuuccucgacaucuggaccuacaacgccgagcugcuggugcuccuggagaacgagcgcacccuggacuaccacgacagcaacgugaagaaccucuacgagaagguccggucccagcugaagaacaacgccaaggagaucgggaacggcugcuucgaguucuaccacaagugcgacaacacgugcauggagagcgugaagaacgggaccuacgacuaccccaaguacuccgaggaggccaagcugaaccgcgaggagaucgacggcgugaagcucgagagcacccggaucuaccagauccuggcgaucuacuccaccgucgccagcagccuggugcucguggucucccugggggccaucagcuucuggaugugcuccaacggcagccugcagugccgcaucugcaucuga

SEQ ID NO: 71939 - RNA, 1701 nt, Artificial Sequence; identical to SEQ ID NO: 71927
  derived and/or modified CDS sequence (opt1) from hemagglutinin__InfluenzaA__AEW25509

SEQ ID NO: 71940 - RNA, 1701 nt, Artificial Sequence
  derived and/or modified CDS sequence (opt1) from hemagglutinin__InfluenzaA__AEW25519
augaaggccauccuggugguccuccuguacaccuucgccaccgcgaacgccgacacgcugugcaucggcuaccacgccaacaacagcaccgacaccguggacaccgugcucgagaagaacgucacggugacccacuccgugaaccugcuggaggacaagcacaacgggaagcucugcaagcugcgcggcgucgcgccccugcaccucgggaagugcaacaucgccggcuggauccuggggaacccggagugcgagagccuguccaccgccagcuccuggagcuacaucguggagaccuccagcuccgacaacggcacgugcuaccccggcgacuucaucgacuacgaggagcuccgggagcagcugagcuccgugagcuccuucgagcgcuucgagaucuuccccaagaccagcuccuggcccaaccacgacccgaacaagggggucaccgccgccugcccccacaccggcgccaagagcuucuacaagaaccugaucuggcucgugaagaaggggaacuccuaccccaagcugagcaaguccuacaucaacgacaagggcaaggaggugcugguccucugggggauccaccaccccagcacgagcgcggaccagcagucccuguaccagaacgccgacgccuacguguucgugggcaccagccgguacuccaagaaguucaagccggagaucgccauccgccccaagguccgggaccaggagggccgcaugaacuacuacuggacccugguggagcccggggacaagaucaccuucgaggccacgggcaaccucguggucccccgguacgcguucgccauggagcgcaacgccgggagcggcaucaucaucuccgacaccccggugcacgacugcaacacgaccugccagacccccaagggcgccaucaacaccagccugcccuuccagaacauccaccccaucaccaucgggaagugcccgaaguacgugaaguccaccaagcugcggcucgccacgggccugcgcaacguccccagcauccagucccgggggcuguucggcgcgaucgccggguucaucgagggcggcuggaccgggaugguggacggcugguacggguaccaccaccagaacgagcagggcagcggguacgccgccgaccucaaguccacccagaacgccaucgacgagaucaccaacaaggugaacagcgucaucgagaagaugaacacgcaguucaccgcggugggcaaggaguucaaccaccuggagaagcgcaucgagaaccugaacaagaaggucgacgacggcuuccucgacaucuggaccuacaacgccgagcugcuggugcuccuggagaacgagcggacccuggacuaccacgacuccaacgugaagaaccucuacgagaagguccgcagccagcugaagaacaacgccaaggagaucgggaacggcugcuucgaguucuaccacaagugcgacaacacgugcauggaguccgugaagaacgggaccuacgacuaccccaaguacagcgaggaggccaagcugaaccgggagaagaucgacggcgugaagcucgaguccacccgcaucuaccagauccuggccaucuacagcaccgucgcguccagccuggugcucguggucagccugggggccaucuccuucuggaugugcagcaacggcucccugcagugccggaucugcaucuga

SEQ ID NO: 71941 - RNA, 1701 nt, Artificial Sequence
  derived and/or modified CDS sequence (opt1) from hemagglutinin__InfluenzaA__AEW25528
augaaggccauccuggugguccuccuguacaccuucgccaccgcgaacgccgacacgcugugcaucggcuaccacgccaacaacagcaccgacaccguggacaccgugcucgagaagaacgucacggugacccacuccgugaaccugcuggaggacaagcacaacgggaagcucugcaagcugcgcggcgucgcgccccugcaccucgggaagugcaacaucgccggcuggauccuggggaacccggagugcgagagcuucuccaccagcuccagcugguccuacaucguggagaccagcuccagcgacaacggcacgugcuaccccggcgacuucaucgacuacgaggagcugcgggagcagcucuccagcguguccagcuucgagcgcuucgagaucuuccccaagaccuccagcuggcccaaccacgacuccaacaagggggucaccgccgccugcccgcacgccggcgccaagagcuucuacaagaaccugaucuggcuggugaagaaggggaacuccuaccccaagcucagcaagagcuacaucaacgacaagggcaaggaggugcugguccugugggggauccaccaccccuccaccagcgcggaccagcagucccucuaccagaacgccgacgccuacguguucgugggcacgagccgguacuccaagaaguucaagcccgagaucgccauccgcccgaagguccgggaccaggagcgccggaugaacuacuacuggacccugguggagcccggcgacaagaucaccuucgaggccaccgggaaccugguggucccccgcuacgcguucgccauggagcggaacgccggcagcgggaucaucaucuccgacacgcccgugcacgacugcaacacgaccugccagaccccgaagggcgccaucaacaccagccuccccuuccagaacauccaccccaucaccaucggcaagugccccaaguacgugaaguccaccaagcugcgccuggccaccgggcuccggaacgucccgagcauccagucccgcggccuguucggggcgaucgccggcuucaucgagggcggguggacgggcaugguggacgggugguacggcuaccaccaccagaacgagcaggggagcggcuacgccgccgaccugaaguccacccagaacgccaucgacgagaucaccaacaaggugaacagcgucaucgagaagaugaacacccaguucacggcgguggggaaggaguucaaccaccucgagaagcggaucgagaaccugaacaagaaggucgacgacggcuuccuggacaucuggaccuacaacgccgagcuccuggugcugcucgagaacgagcgcacccuggacuaccacgacuccaacgugaagaaccuguacgagaagguccggagccagcucaagaacaacgccaaggagaucggcaacgggugcuucgaguucuaccacaagugcgacaacacgugcauggaguccgugaagaacggcaccuacgacuaccccaaguacagcgaggaggccaagcugaaccgcgaggagaucgacggggugaagcuggaguccacccggaucuaccagauccucgccaucuacagcaccgucgcgagcucccuggugcugguggucagccucggcgccaucuccuucuggaugugcagcaacgggucccugcagugccgcaucugcaucuga

SEQ ID NO: 71942 - RNA, 1701 nt, Artificial Sequence
  derived and/or modified CDS sequence (opt1) from hemagglutinin__InfluenzaA__AEW25545
augaaggccauccuggugguccuccuguacaccuucgccaccgcgaacgccgacacgcugugcaucggcuaccacgccaacaacagcaccgacaccguggacaccgugcucgagaagaacgucacggugacccacuccgugaaccugcuggaggacaagcacaacgggaagcucugcaagcugcgcggcgucgcgccccugcaccucgggaagugcaacaucgccggcuggauccuggggaacccggagugcgagagccuguccaccgcgagcuccuggagcuacaucguggagaccuccagcuccgacaacggcacgugcuaccccggcgacuucaucgacuacgaggagcuccgggagcagcugagcuccgugagcuccuucgagcgcuucgagaucuuccccaagaccagcuccuggcccaaccacgacccgaacaagggggucaccgccgccugcccccacgccggcgccaagagcuucuacaagaaccugaucuggcucgugaagaaggggaacuccuaccccaagcugagcaaguccuacaucaacgacaagggcaaggaggugcugguccucugggggauccaccaccccagcaccagcgccgaccagcagucccuguaccagaacgccgacgccuacguguucgugggcacgagccgguacuccaagaaguucaagccggagaucgccauccgccccaagguccgggaccaggagggccgcaugaacuacuacuggacccugguggagcccggggacaagaucaccuucgaggcgaccggcaaccucguggucccccgguacgccuucgccauggagcgcaacgccgggagcggcaucaucaucuccgacacgccggugcacgacugcaacacgaccugccagacccccaagggcgccaucaacaccagccugcccuuccagaacauccaccccaucaccaucgggaagugcccgaaguacgugaaguccaccaagcugcggcucgcgaccggccugcgcaacguccccagcauccagucccgggggcuguucggcgccaucgccggguucaucgagggcggcuggacggggaugguggacggcugguacggguaccaccaccagaacgagcagggcagcggguacgccgccgaccucaaguccacccagaacgcgaucgacaagaucaccaacaaggugaacagcgucaucgagaagaugaacacccaguucacggccgugggcaaggaguucaaccaccuggagaagcgcaucgagaaccugaacaagaaggucgacgacggcuuccucgacaucuggaccuacaacgccgagcugcuggugcuccuggagaacgagcggacccuggacuaccacgacuccaacgugaagaaccucuacgagaagguccgcagccagcugaagaacaacgccaaggagaucgggaacggcugcuucgaguucuaccacaagugcgacaacacgugcauggaguccgugaagaacgggagcuacgacuaccccaaguacuccgaggaggccaagcugaaccgggaggagaucgacggcgugaagcucgagagcacccgcaucuaccagauccuggcgaucuacuccaccgucgccagcagccuggugaugguggucucccucggggccaucagcuucuggaugugcuccaacggcagccugcagugccggaucugcaucuga

SEQ ID NO: 71943 - RNA, 1701 nt, Artificial Sequence
  derived and/or modified CDS sequence (opt1) from hemagglutinin__InfluenzaA__AEW25555
augaaggccauccuggugguccuccuguacaccuucgccaccgcgaacgccgacacgcugugcaucggcuaccacgccaacaacagcaccgacaccguggacaccgugcucgagaagaacgucacggugacccacuccgugaaccugcuggaggacaagcacaacgggaagcucugcaagcugcgcggcgucgcgccccugcaccucgggaagugcaacaucgccggcuggauccuggggaacccggagugcgagagccuguccaccgcgagcuccuggagcuacaucguggagaccuccagcuccgacaacggcacgugcuaccccggcgacuucaucgacuacgaggagcuccgggagcagcugagcuccgugagcuccuucgagcgcuucgagaucuuccccaagaccagcuccuggcccaaccacgacccgaacaagggggucaccgccgccugcccccacgccggcgccaagagcuucuacaagaaccugaucuggcucgugaagaaggggaacuccuaccccaagcugagcaaguccuacaucaacgacaagggcaaggaggugcugguccucugggggauccaccaccccagcaccagcgccgaccagcagucccuguaccagaacgccgacgccuacguguucgugggcacgagccgguacuccaagaaguucaagccggagaucgccauccgccccaagguccgggaccaggagggccgcaugaacuacuacuggacccugguggagcccggggacaagaucaccuucgaggcgaccggcaaccucguggucccccgguacgccuucgccauggagcgcaacgccgggagcggcaucaucaucuccgacacgccggugcacuacugcaacacgaccugccagacccccaagggcgccaucaacaccagccugcccuuccagaacauccaccccaucaccaucgggaagugcccgaaguacgugaaguccaccaagcugcggcucgcgaccggccugcgcaacguccccagcauccagucccgggggcuguucggcgccaucgccggguucaucgagggcggcuggacggggaugguggacggcugguacggguaccaccaccagaacgagcagggcagcggguacgccgccgaccucaaguccacccagaacgcgaucgacgagaucaccaacaaggugaacagcgucaucgagaagaugaacacccaguucacggccgugggcaaggaguucaaccaccuggagaagcgcaucgagaaccugaacaagaaggucgacgacggcuuccucgacaucuggaccuacaacgccgagcugcuggugcuccuggagaacgagcggacccuggacuaccacgacuccaacgugaagaaccucuacgagaagguccgcagccagcugaagaacaacgccaaggagaucgggaacggcugcuucgaguucuaccacaagugcgacaacacgugcauggaguccgugaagaacgggaccuacgacuaccccaaguacagcgaggaggccaagcugaaccgggaggagaucgacggcgugaagcucgaguccacccgcaucuaccagauccuggcgaucuacagcaccgucgccuccagccuggugcucguggucagccugggggccaucuccuucuggaugugcagcaacggcucccugcagugccggaucugcaucuga

SEQ ID NO: 71944 - RNA, 1701 nt, Artificial Sequence
  derived and/or modified CDS sequence (opt1) from hemagglutinin__InfluenzaA__AEW25564
augaaggccauccuggugguccuccuguacaccuucgccaccgcgaacgccgacacgcugugcaucggcuaccacgccaacaacagcaccgacaccguggacaccgugcucgagaagaacgucacggugacccacuccgugaaccugcuggaggacaagcacaacgggaagcucugcaagcugcgcggcgucgcgccccugcaccucgggaagugcaacaucgccggcuggauccuggggaacccggagugcgagagccuguccaccgccagcuccuggagcuacaucguggagaccuccagcuccgacaacggcacgugcuaccccggcgacuucaucgacuacgaggagcuccgggagcagcugagcuccgugagcuccuucgagcgcuucgagaucuuccccaagaccagcuccuggcccaaccacgacagcaacaagggggucaccgccgccugcccgcacgccggcgcgaaguccuucuacaagaaccugaucuggcucgugaagaaggggaacagcuaccccaagcuguccaagagcuacaucaacgacaagggcaaggaggugcugguccucugggggauccaccaccccagcaccuccgccgaccagcagagccuguaccagaacgccgacgccuacguguucgugggcacgucccgguacagcaagaaguucaagcccgagaucgccauccgcccgaagguccgggaccaggagggccgcaugaacuacuacuggacccugguggagcccggggacaagaucaccuucgaggcgaccggcaaccucguggucccccgguacgccuucgccauggagcgcaacgccggguccggcaucaucaucagcgacacgcccgugcacgacugcaacacgaccugccagaccccgaagggcgcccugaacaccucccugcccuuccagaacauccaccccaucaccaucgggaagugccccaaguacgucaagagcaccaagcuccggcuggcgaccggccugcgcaacgugccguccauccagagccgggggcuguucggcgccaucgccggguucaucgagggcggcuggacggggaugguggacggcugguacggguaccaccaccagaacgagcagggcuccggguacgccgccgaccucaagagcacccagaacgcgaucgacgagaucaccaacaaggugaacuccgucaucgagaagaugaacacccaguucacggccgugggcaaggaguucaaccaccuggagaagcgcaucgagaaccucaaccggaaggucgacgacggcuuccuggacaucuggaccuacaacgccgagcugcucgugcugcuggagaacgagcgcacccucgacuaccacgacagcaacgugaagaaccuguacgagaagguccggucccagcugaagaacaacgccaaggagaucgggaacggcugcuucgaguucuaccacaagugcgacaacacgugcauggagagcgugaagaacgggaccuacgacuaccccaaguacuccgaggaggccaagcucaaccgcgaggagaucgacggcgugaagcuggagagcaccgggaucuaccagauccuggcgaucuacuccaccgucgccagcagccucgugcugguggucucccugggcgccaucagcuucuggaugugcuccaacggcagccuccagugccggaucugcaucuga

SEQ ID NO: 71945 - RNA, 1701 nt, Artificial Sequence; identical to SEQ ID NO: 67491
  derived and/or modified CDS sequence (opt1) from hemagglutinin__InfluenzaA__AEW25573

SEQ ID NO: 71946 - RNA, 1701 nt, Artificial Sequence
  derived and/or modified CDS sequence (opt1) from hemagglutinin__InfluenzaA__AEW25582
augaaggccauccuggugguccuccuguacaccuucgccaccgcgaacgccgacacgcugugcaucggcuaccacgccaacaacagcaccgacaccguggacaccgugcucgagaagaacgucacggugacccacuccgugaaccugcuggaggacaagcacaacgggaagcucugcaagcugcgcggcgucgcgccccugcaccucgggaagugcaacaucgccggcuggauccuggggaacccggagugcgagagccuguccaccgccagcuccuggagcuacaucguggagaccuccagcuccgacaacggcacgugcuaccccggcgacuucaucgacuacgaggagcuccgggagcagcugagcuccgugagcuccuucgagcgcuucgagaucuuccccaagaccagcuccuggcccaaccacgacagcaacaagggggucaccgccgccugcccgcacgccggcgcgaaguccuucuacaagaaccugaucuggcucgugaagaaggggaacagcuaccccaagcuguccaagagcuacaucaacgacaagggcaaggaggugcugguccucugggggauccaccaccccagcaccuccgccgaccagcagagccuguaccagaacgccgacgccuacguguucgugggcacgucccgguacagcaagaaguucaagcccgagaucgccauccgcccgaagguccgggaccaggagggccgcaugaacuacuacuggacccugguggagcccggggacaagaucaccuucgaggcgaccggcaaccucguggucccccgguacgccuucgccauggagcgcaacgccggguccggcaucauccugagcgacacgcccgugcacgacugcaacacgaccugccagaccccgaagggcgccaucaacaccucccugcccuuccagaacauccaccccaucaccaucgggaagugccccaaguacgucaagagcaccaagcuccggcuggcgaccggccugcgcaacgugccguccauccagagccgggggcuguucggcgccaucgccggguucaucgagggcggcuggacggggaugguggacggcugguacggguaccaccaccagaacggccagggguccggcuacgccgccgaccucaagagcacccagaacgcgaucgacaagaucaccaacaaggugaacuccgucaucgagaagaugaacacccaguucacggccgugggcaaggaguucaaccaccuggagaagcgcaucgagaaccucaacaagaaggucgacgacggguuccuggacaucuggaccuacaacgccgagcugcucgugcugcuggagaacgagcggacccucgacuaccacgacagcaacgugaagaaccuguacgagaagguccgcucccagcugaagaacaacgccaaggagaucggcaacgggugcuucgaguucuaccacaagugcgacaacacgugcauggagagcgugaagaacggcaccuacgacuaccccaaguacuccgaggaggccaagcucaaccgggaggagaucgacggggugaagcuggagagcacccgcaucuaccagauccuggcgaucuacuccaccgucgccagcagccucgugcugguggucucccugggcgccaucagcuucuggaugugcuccaacggcagccuccagugccggaucugcaucuga

SEQ ID NO: 71947 - RNA, 1701 nt, Artificial Sequence
  derived and/or modified CDS sequence (opt1) from hemagglutinin__InfluenzaA__AEW25590
augaaggccauccuggugguccuccuguacaccuucgccaccgcgaacgccgacacgcugugcaucggcuaccacgccaacaacagcaccgacaccguggacaccgugcucgagaagaacgucacggugacccaguccgugaaccugcuggaggacaagcacaacgggaagcucugcaagcugcgcggcgucgcgccccugcaccucgggaagugcaacaucgccggcuggauccuggggaacccggagugcgagagccuguccaccgccagcuccuggagcuacaucguggagaccuccagcuccgacaacggcacgugcuaccccggcgacuucaucgacuacgaggagcuccgggagcagcugagcuccgugagcuccuucgagcgcuucgagaucuuccccaagaccagcuccuggcccaaccacgacagcaacaagggggucaccgccgccugcccgcacgccggcgcgaaguccuucuacaagaaccugaucuggcucgugaagaaggggaacagcuaccccaagcuguccaagagcuacaucaacgacaagggcaaggaggugcugguccucugggggauccaccaccccagcaccuccgccgaccagcagagccuguaccagaacgccgacgccuacguguucgugggcacgucccgguacagcaagaaguucaagcccgagaucgccauccgcccgaagguccgggaccaggaggcgcgcaugaacuacuacuggacccugguggagcccggcgacaagaucaccuucgaggccaccgggaaccucguggucccccgguacgccuucgccauggagcgcgacgccggcuccgggaucaucaucagcgacacgcccgugcacgacugcaacacgaccugccagaccccgaagggcgcgaucaacaccucccugcccuuccagaacauccaccccaucaccaucggcaagugccccaaguacgucaagagcaccaagcugcggcucgccaccgggcugcgcaacgugccguccauccagagccggggccuguucggggccaucgccggcuucaucgagggcggguggacgggcaugguggacgggugguacggcuaccaccaccagaacgagcagggguccggcuacgccgcggaccucaagagcacccagaacgccaucgacgagaucaccaacaaggugaacuccgucaucgagaagaugaacacccaguucacggccguggggaaggaguucaaccaccuggagaagcgcaucgagaaccugaacaagaaggucgacgacggcuuccucgacaucuggaccuacaacgccgagcugcuggugcuccuggagaacgagcggacccuggacuaccacgacagcaacgugaagaaccuccacgagaagguccgcucccagcugaagaacaacgccaaggagaucggcaacgggugcuucgaguucuaccacaagugcgacaacacgugcauggagagcgugaagaacggcaccuacgacuaccccaaguacuccgaggaggcgaagcugaaccgggaggagaucgacggggugaagcucgagagcacccgcaucuaccagauccuggccaucuacuccaccgucgccagcagccuggugcucguggucucccugggcgccaucagcuucuggaugugcuccaacgggagccugcagugccggaucugcaucuga

SEQ ID NO: 71948 - RNA, 1701 nt, Artificial Sequence; identical to SEQ ID NO: 67491
  derived and/or modified CDS sequence (opt1) from hemagglutinin__InfluenzaA__AEW25600

SEQ ID NO: 71949 - RNA, 1701 nt, Artificial Sequence; identical to SEQ ID NO: 67491
  derived and/or modified CDS sequence (opt1) from hemagglutinin__InfluenzaA__AEW25620

SEQ ID NO: 71950 - RNA, 1701 nt, Artificial Sequence
  derived and/or modified CDS sequence (opt1) from hemagglutinin__InfluenzaA__AEW25629
augaaggccauccuggugguccuccuguacaccuucgccaccgcgaacgccgacacgcugugcaucggcuaccacgccaacaacagcaccgacaccguggacaccgugcucgagaagaacgucacggugacccacuccgugaaccugcuggaggacaagcacaacgggaagcucugcaagcugcgcggcgucgcgccccugcaccucgggaagugcaacaucgccggcuggauccuggggaacccggagugcgagagccuguccaccgcgagcuccuggagcuacaucguggagaccuccagcuccgacaacggcacgugcuaccccggcgacuucaucgacuacgaggagcuccgggagcagcugagcuccgugagcuccuucgagcgcuucgagaucuuccccaagaccagcuccuggcccaaccacgacccgaacaagggggucaccgccgccugcccccacgccgaggccaagagcuucuacaagaaccugaucuggcucgugaagaagggcaacuccuaccccaagcugagcaaguccuacaucaacgacaaggggaaggaggugcugguccucuggggcauccaccaccccagcaccagcgccgaccagcagucccuguaccagaacgccgacgccuacguguucguggggacgagccgguacuccaagaaguucaagccggagaucgccauccgccccaagguccgggaccaggagggccgcaugaacuacuacuggacccugguggagcccggcgacaagaucaccuucgaggcgaccgggaaccucguggucccccgguacgccuucgccauggagcgcaacgccggcagcgggaucaucaucuccgacacgccggugcacgacugcaacacgaccugccagacccccaagggcgccaucaacaccagccugcccuuccagaacauccaccccaucaccaucggcaagugcccgaaguacgugaaguccaccaagcugcggcucgcgaccgggcugcgcaacguccccagcauccagucccggggccuguucggggccaucgccggcuucaucgagggcggguggacgggcaugguggacgggugguacggcuaccaccaccagaacgagcaggggagcggcuacgccgccgaccucaaguccacccagaacgcgaucgacgagaucaccaacaaggugaacagcgucaucgagaagaugaacacccaguucacggccguggggaaggaguucaaccaccuggagaagcgcaucgagaaccugaacaagaaggucgacgacggcuuccucgacaucuggaccuacaacgccgagcugcuggugcuccuggagaacgagcggacccuggacuaccacgacuccaacgugaagaaccucuacgagaagguccgcagccagcugaagaacaacgccaaggagaucggcaacgggugcuucgaguucuaccacaagugcgacaacaugugcauggaguccgugaagaacggcaccuacgacuaccccaaguacagcgaggaggccaagcugaaccgggaggagaucgacggggugaagcucgaguccacgcgcaucuaccagauccuggcgaucuacagcaccgucgccuccagccuggugcucguggucagccugggcgccaucuccuucuggaugugcagcaacgggucccugcagugccggaucugcaucuga

SEQ ID NO: 71951 - RNA, 1701 nt, Artificial Sequence; identical to SEQ ID NO: 66693
  derived and/or modified CDS sequence (opt1) from hemagglutinin__InfluenzaA__AEW25637

SEQ ID NO: 71952 - RNA, 1701 nt, Artificial Sequence
  derived and/or modified CDS sequence (opt1) from hemagglutinin__InfluenzaA__AEW25646
augaaggccauccuggugguccuccuguacaccuucgccaccgcgaacgccgacacgcugugcaucggcuaccacgccaacaacagcaccgacaccguggacaccgugcucgagaagaacgucacggugacccacuccgugaaccugcuggaggacaagcacaacgggaagcucugcaagcugcgcggcgucgcgccccugcaccucgggaagugcaacaucgccggcuggauccuggggaacccggagugcgagagccuguccaccgcgagcuccuggagcuacaucguggagaccuccagcuccgacaacggcacgugcuaccccggcgacuucaucgacuacgaggagcuccgggagcagcugagcuccgugagcuccuucgagcgcuucgagaucuuccccaagaccagcuccuggcccaaccacgacccgaacaagggggucaccgccgccugcccccacgccggcgccaagagcuucuacaagaaccugaucuggcucgugaagaaggggaacuccuaccccaagcugagcaaguccuacaucaacgacaagggcaaggaggugcugguccucugggggauccaccaccccagcaccagcgccgaccagcagucccuguaccagaacgccgacgccuacguguucgugggcacgagccgguacuccaagaaguucaagccggagaucgccauccgccccaagguccgggaccaggagggccgcaugaacuacuacuggacccugguggagcccggggacaagaucaccuucgaggcgaccggcaaccucguggucccccgguacgccuucgccauggagcgcaacgccgggagcggcaucaucaucuccgacacgccggugcacgacugcaacacgaccugccagacccccaagggcgccaucaacaccagccugcccuuccagaacauccaccccaucaccaucgggaagugcccgaaguacgugaaguccaccaagcugcggcucgcgaccggccugcgcaacguccccagcauccagucccgggggcuguucggcgccaucgccggguucaucgagggcggcuggacggggaugguggacggcugguacggguaccaccaccagaacgagcagggcagcggguacgccgccgaccucaaguccacccagaacgcgaucgacaagaucaccaacaaggugaacagcgucaucgagaagaugaacacccaguucacggccgugggcaaggaguucaaccaccuggagaagcgcaucgagaaccugaacaagaaggucgacgacggcuuccucgacaucuggaccuacaacgccgagcugcuggugcuccuggagaacgagcggacccuggacuaccacgacuccaacgugaagaaccucuacgagaagguccgcagccagcugaagaacaacgccaaggagaucgggaacggcugcuucgaguucuaccacaagugcgacaacacgugcauggaguccgugaagaacgggaccuacgacuaccccaaguacagcgaggaggccaagcugaaccgggaggagaucgacggcgugaagcucgaguccacccgcaucuaccagauccuggcgaucuacagcaccgucgccuccagccuggugcucguggucagccugggggccaucuccuucuggaugugcagcaacggcucccugcagugccggaucugcaucuga

SEQ ID NO: 71953 - RNA, 1701 nt, Artificial Sequence
  derived and/or modified CDS sequence (opt1) from hemagglutinin__InfluenzaA__AEW25654
augaaggccauccuggugguccuccuguacaccuucgccaccgcgaacgccgacacgcugugcaucggcuaccacgccaacaacagcaccgacaccguggacaccgugcucgagaagaacgucacggugacccacuccgugaaccugcuggaggacaagcacaacgggaagcucugcaagcugcgcggcgucgcgccccugcaccucgggaagugcaacaucgccggcuggauccuggggaacccggagugcgagagccuguccaccgccagcuccuggagcuacaucguggagaccuccagcuccgacaacggcacgugcuaccccggcgacuucaucgacuacgaggagcuccgggagcagcugagcuccgugagcuccuucgagcgcuucgagaucuuccccaagaccagcuccuggcccaaccacgacagcaacaagggggucaccgccgccugcccgcacgccggcgcgaaguccuucuacaagaaccugaucuggcucgugaagaaggggaacagcuaccccaagcuguccaagagcuacaucaacgacaagggcaaggaggugcugguccucugggggauccaccaccccagcaccuccgccgaccagcagagccuguaccagaacgccgacgccuacguguucgugggcacgucccgguacagcaagaaguucaagcccgagaucgccauccgcccgaagguccgggaccaggagggccgcaugaacuacuacuggacccugguggagcccggggacaagaucaccuucgaggcgaccggcaaccucguggucccccgguacgccuucgccauggagcgcaacgccggguccggcaucaucaucagcgacacgcccgugcacgacugcaacacgaccugccagaccccgaagggcgccaucaacaccuccccgcccuuccagaacauccaccccaucaccaucgggaagugccccaaguacgucaagagcaccaagcugcggcuggcgaccggccuccgcaacauccccuccauccagagccgggggcuguucggcgccaucgccggguucaucgagggcggcuggacggggaugguggacggcugguacggguaccaccaccagaacgagcagggcuccggguacgccgccgaccucaagagcacccagaacgcgaucgacgagaucaccaacaaggugaacuccgugaucgagaagaugaacacccaguucacggccgucggcaaggaguucaaccaccuggagaagcgcaucgagaaccugaacaagaagguggacgacggcuuccuggacaucuggaccuacaacgccgagcuccugguccugcucgagaacgagcggacccuggacuaccacgacagcaacgugaagaaccuguacgagaaggugcgcucccagcucaagaacaacgccaaggagaucgggaacggcugcuucgaguucuaccacaagugcgacaacacgugcauggagagcgucaagaacgggaccuacgacuaccccaaguacuccgaggaggccaagcugaaccgggaggagaucgacggcgugaagcuggagagcacccgcaucuaccagauccucgcgaucuacuccaccguggccagcagccugguccugguggugucccucggggccaucagcuucuggaugugcuccaacggcagccugcagugccggaucugcaucuga

SEQ ID NO: 71954 - RNA, 1701 nt, Artificial Sequence
  derived and/or modified CDS sequence (opt1) from hemagglutinin__InfluenzaA__AEW25662
augaaggccauccuggugguccuccuguacaccuucgccaccgcgaacgccgacacgcugugcaucggcuaccacgccaacaacagcaccgacaccguggacaccgugcucgagaagaacgucacggugacccacuccgugaaccugcuggaggacaagcacaacgggaagcucugcaagcugcgcggcgucgcgccccugcaccucgggaagugcaacaucgccggcuggauccuggggaacccggagugcgagagccuguccaccgcgagcuccuggagcuacaucguggagaccuccagcuccgacaacggcacgugcuaccccggcgacuucaucgacuacgaggagcuccgggagcagcugagcuccgugagcuccuucgagcgcuucgagaucuuccccaagaccagcuccuggcccaaccacgacccgaacaaggggaucaccgccgccugcccccacgccggcgccaagagcuucuacaagaaccugaucuggcucgucaagaaggggaacuccuaccccaagcugagcaaguccuacaucaacgacaagggcaaggaggugcuggugcucugggggauccaccaccccagcaccagcgccgaccagcagucccuguaccagaacgccgacgccuacgucuucgugggcacgagccgguacuccaagaaguucaagccggagaucgccauccgccccaaggugcgggaccaggagggccgcaugaacuacuacuggacccuggucgagcccggggacaagaucaccuucgaggcgaccggcaaccucguggugccccgguacgccuucgccauggagcgcaacgccgggagcggcaucaucaucuccgacacgccgguccacgacugcaacacgaccugccagacccccaagggcgccaucaacaccagccugcccuuccagaacauccaccccaucaccaucgggaagugcccgaaguacgugaaguccaccaagcugcggcucgcgaccggccugcgcaacgugcccagcauccagucccgggggcuguucggcgccaucgccggguucaucgagggcggcuggacggggauggucgacggcugguacggguaccaccaccagaacgagcagggcagcggguacgccgccgaccucaaguccacccagaacgcgaucgacgagaucaccaacaaggugaacagcgugaucgagaagaugaacacccaguucacggccgucggcaaggaguucaaccaccuggagaagcgcaucgagaaccugaacaagaagguggacgacggcuuccucgacaucuggaccuacaacgccgagcugcugguccuccuggagaacgagcggacccuggacuaccacgacuccaacgugaagaaccucuacgagaaggugcgcagccagcugaagaacaacgccaaggagaucgggaacggcugcuucgaguucuaccacaagugcgacaacacgugcauggaguccgucaagaacgggaccuacgacuaccccaaguacagcgaggaggccaagcugaaccgggaggagaucgacggcgugaagcucgaguccacccgcaucuaccagauccuggcgaucuacagcaccguggccuccagccugguccucguggugagccugggggccaucuccuucuggaugugcagcaacggcucccugcagugccggaucugcaucuga

SEQ ID NO: 71955 - RNA, 1701 nt, Artificial Sequence
  derived and/or modified CDS sequence (opt1) from hemagglutinin__InfluenzaA__AEW25669
augaaggccauccuggugguccuccuguacaccuucgccaccgcgaacgccgacacgcugugcaucggcuaccacgccaacaacagcaccgacaccguggacaccgugcucgagaagaacgucacggugacccacuccgugaaccugcuggaggacaagcacaacgggaagcucugcaagcugcgcggcgucgcgccccugcaccucgggaagugcaacaucgccggcuggauccuggggaacccggagugcgagagccuguccaccgcgagcuccuggagcuacaucguggagaccuccagcuccgacaacggcacgugcuaccccggcgacuucaucgacuacgaggagcuccgggagcagcugagcuccgugagcuccuucgagcgcuucgagaucuuccccaagaccagcuccuggcccaaccacgacccgaacaagggggucaccgccgccugcccccacgccggcgccaagagcuucuacaagaaccugaucuggcucgugaagaaggggaacuccuaccccaagcugagcaaguccuacaucaacgacaagggcaaggaggugcugguccucugggggauccaccaccccagcaccagcgccgaccagcagucccuguaccagaacgccgacgccuacguguucgugggcacgagccgguacuccaagaaguucaagccggagaucgccauccgccccaagguccgggaccaggagggccgcaugaacuacuacuggacccugguggagcccggggacaagaucaccuucgaggcgaccggcaaccucguggucccccgguacgccuucgccauggagcgcaacgccgggagcggcaucaucaucuccgacacgccggugcacgacugcaacacgaccugccagacccccaagggcgccaucaacaccagccugcccuuccagaacauccaccccaucaccaucgggaagugcccgaaguacgugaaguccaccaagcugcggcucgcgaccggccugcgcaacguccccagcauccagucccgggggcuguucggcgccaucgccggguucaucgagggcggcuggacggggaugguggagggcugguacggguaccaccaccagaacgagcagggcagcggguacgccgccgaccucaaguccacccagaacgcgaucgacgagaucaccaacaaggugaacagcgucaucgagaagaugaacacccaguucacggccgugggcaaggaguucaaccaccuggagaagcgcaucgagaaccugaacaagaaggucgacgacggcuuccucgacaucuggaccuacaacgccgagcugcuggugcuccuggagaacgagcggacccuggacuaccacgacuccaacgugaagaaccucuacgagaagguccgcagccagcugaagaacaacgccaaggagaucgggaacggcugcuucgaguucuaccacaagugcgacaacacgugcauggaguccgugaagaacgggaccuacgacuaccccaaguacagcgaggaggccaagcugaaccgggaggagaucgacggcgugaagcucgaguccacccgcaucuaccagauccuggcgaucuacagcaccgucgccuccagccuggugcucguggucagccugggggccaucuccuucuggaugugcagcaacggcucccugcagugccggaucugcaucuga

SEQ ID NO: 71956 - RNA, 1701 nt, Artificial Sequence
  derived and/or modified CDS sequence (opt1) from hemagglutinin__InfluenzaA__AEW25678
augaaggccauccuggugguccuccuguacaccuucgccaccgcgaacgccgacacgcugugcaucggcuaccacgccaacaacagcaccgacaccguggacaccgugcucgagaagaacgucacggugacccacuccgugaaccugcuggaggacaagcacaacgggaagcucugcaagcugcgcggcgucgcgccccugcaccucgggaagugcaacaucgccggcuggauccuggggaacccggagugcgagagccuguccaccgccagcuccuggagcuacaucguggagaccuccagcuccgacaacggcacgugcuaccccggcgacuucaucgacuacgaggagcuccgggagcagcugagcuccgugagcuccuucgagaaguucgagaucuuccccaagaccagcuccuggcccaaccacgacagcaacaagggggucaccgccgccugcccgcacgccggcgcgaaguccuucuacaagaaccugaucuggcucgugaagaaggggaacagcuaccccaagcuguccaagagcuacaucaacgacaagggcaaggaggugcugguccucugggggauccaccaccccagcaccuccgccgaccagcagagccuguaccagaacgccgacgccuacguguucgugggcacgucccgcuacagcaagaaguucaagcccgagaucgccauccggccgaagguccgcgaccaggagggccggaugaacuacuacuggacccugguggagcccggggacaagaucaccuucgaggcgaccggcaaccucguggucccccgcuacgccuucgccauggagcggaacgccggguccggcaucaucaucagcgacacgcccgugcacgacugcaacacgaccugccagaccccgaagggcgccaucaacaccucccugcccuuccagaacauccaccccaucaccaucgggaagugccccaaguacgucaagagcaccaagcugcgccucgcgaccggccugcggaacgugccguccauccagagccgcgggcuguucggcgccaucgccggguucaucgagggcggcuggacggggaugguggacggcugguacggguaccaccaccagaacgagcagggcuccggguacgccgccgaccucaagagcacccagaacgcgaucgacgagaucaccaacaaggugaacuccgucaucgagaagaugaacacccaguucacggccgugggcaaggaguucaaccaccuggagaagcggaucgagaaccugaacaagaaggucgacgacggcuuccucgacaucuggaccuacaacgccgagcugcuggugcuccuggagaacgagcgcacccuggacuaccacgacagcaacgugaagaaccucuacgagaagguccggucccagcugaagaacaacgccaaggagaucgggaacggcugcuucgaguucuaccacaagugcgacaacacgugcauggagagcgugaagaacgggaccuacgacuaccccaaguacuccgaggaggccaagcugaaccgcgaggagaucgacggcgugaagcucgagagcacccggaucuaccagauccuggcgaucuacuccaccgucgccagcagccuggugcucguggucucccugcgcgccaucagcuucuggaugugcuccaacgggagccugcagugccggaucugcaucuga

SEQ ID NO: 71957 - RNA, 1701 nt, Artificial Sequence
  derived and/or modified CDS sequence (opt1) from hemagglutinin__InfluenzaA__AEW25687
augaaggccauccuggugguccuccuguacaccuucgccaccgcgaacgccgacacgcugugcaucggcuaccacgccaacaacagcaccgacaccguggacaccgugcucgagaagaacgucacggugacccacuccgugaaccugcuggaggacaagcacaacgggaagcucugcaagcugcgcggcgucgcgccccugcaccucgggaagugcaacaucgccggcuggauccuggggaacccggagugcgagagccuguccaccgcgagcuccuggagcuacaucguggagaccuccagcuccgacaacggcacgugcuaccccggcgacuucaucgacuacgaggagcuccgggagcagcugagcuccgugagcuccuucgagcgcuucgagaucuuccccaagaccagcuccuggcccaaccacgacccgaacaagggggucaccgccgccugccccuacgccggcgccaagagcuucuacaagaaccugaucuggcucgugaagaaggggaacuccuaccccaagcugagcaaguccuacaucaacgacaagggcaaggaggugcugguccucugggggauccaccaccccagcaccagcgccgaccagcagucccuguaccagaacgccgacgccuacguguucgugggcacgagccgguacuccaagaaguucaagccggagaucgccauccgccccaagguccgggaccaggagggccgcaugaacuacuacuggacccugguggagcccggggacaagaucaccuucgaggcgaccggcaaccucguggucccccgguacgccuucgccauggagcgcaacgccgggagcggcaucaucaucuccgacacgccggugcacgacugcaacacgaccugccagacccccaagggcgccaucaacaccagccugcccuuccagaacauccaccccaucaccaucgggaagugcccgaaguacgugaaguccaccaagcugcggcucgcgaccggccugcgcaacguccccagcauccagucccgggggcuguucggcgccaucgccggguucaucgagggcggcuggacggggaugguggacggcugguacggguaccaccaccagaacgagcagggcagcggguacgccgccgaccucaaguccacccagaacgcgaucgacaagaucaccaacaaggugaacagcgucaucgagaagaugaacacccaguucacggccgugggcaaggaguucaaccaccuggagaagcgcaucgagaaccugaacaagaaggucgacgacggcuuccucgacaucuggaccuacaacgccgagcugcuggugcuccuggagaacgagcggacccuggacuaccacgacuccaacgugaagaaccucuacgagaagguccgcagccagcugaagaacaacgccaaggagaucgggaacggcugcuucgaguucuaccacaagugcgacaacacgugcauggaguccgugaagaacgggaccuacgacuaccccaaguacagcgaggaggccaagcugaaccgggaggagaucgacggcgugaagcucgaguccacccgcaucuaccagauccuggcgaucuacagcaccgucgccuccagccuggugcucguggucagccugggggccaucuccuucuggaugugcagcaacggcucccugcagugccggaucugcaucuga

SEQ ID NO: 71958 - RNA, 1701 nt, Artificial Sequence; identical to SEQ ID NO: 71927
  derived and/or modified CDS sequence (opt1) from hemagglutinin__InfluenzaA__AEW25696

SEQ ID NO: 71959 - RNA, 1701 nt, Artificial Sequence; identical to SEQ ID NO: 67491
  derived and/or modified CDS sequence (opt1) from hemagglutinin__InfluenzaA__AEW25706

SEQ ID NO: 71960 - RNA, 1695 nt, Artificial Sequence
  derived and/or modified CDS sequence (opt1) from hemagglutinin__InfluenzaA__AEW91908
auggagaagaucgugcugcuguucgccaccaucagccuggucaaguccgaccacaucugcaucggcuaccacgccaacaacagcaccgagcaggucgacacgaucauggagaagaacgugaccgugacccacgcgcaggacauccuggagaagacccacaacgggaagcucugcgaccugaacggcgugaagccccugauccucaaggacugcuccguggccggguggcugcugggcaacccgaugugcgacgaguucaucaacguccccgaguggagcuacaucguggagaaggccaaccccgccaacgaccucugcuaccccgggaacuucaacgacuacgaggagcugaagcaccuccucucccgcaucaaccacuucgagaagauccagaucaucccgaagaacagcugguccgaccacgaggccagccugggcguguccgcggccugccccuaccagggcaagagcuccuucuuccggaacgucguguggcugaucaagaaggacaacgccuaccccacgaucaagaagggguacaacaacaccaaccaggaggaccuccuggugcuguggggcauccaccaccccaacgacgaggccgagcagacccgccucuaccagaacccgaccacguacaucagcaucgggaccuccacccugaaccagcggcugguccccaagaucgcgacccgcagcaagaucaacggccaguccgggcggaucgacuucuucuggacgauccucaagcccaacgacgccauccacuucgagagcaacggcaacuucaucgcccccgaguacgccuacaagaucgugaagaagggcgacuccaccaucaugaaguccgagguggaguacgggaacugcaacacccgcugccagaccccgaucggcgccaucaacagcagcaugcccuuccacaacauccacccccugacgaucggggagugccccaaguacgucaagagcaacaagcuggugcucgcgaccggccugcggaacuccccgcagggcgagacccgcgggcuguucggcgccaucgccggguucaucgagggcggguggcagggcaugguggacggcugguacggguaccaccacagcaacgagcagggcuccggguacgccgccgacaaggagagcacccagaaggcgaucgacggcgucacgaacaaggugaacuccaucaucgacaagaugaacacccaguucgaggccguggggcgggaguucaacaaccucgagcgccggaucgagaaccugaacaagaagauggaggacggcuuccuggacgucuggaccuacaacgccgagcuccuggugcugauggagaacgagcgcacccucgacuuccacgacagcaacgugcggaaccuguacgacaagguccgccugcagcucaaggacaacgccaaggagcugggcaacgggugcuucgaguucuaccacaagugcgacaacgagugcauggaguccgugcggaacggcacguacgacuacccccaguacagcgaggaggcccgccugaagcgggaggagaucuccggggucaagcucgagagcaucggcaucuaccagauccuguccaucuacagcaccguggcguccagccuggugcucgccaucaugauggccgggcugucccuguggaugugcagcaacggcucccuccagugccgcaucugcaucuga

SEQ ID NO: 71961 - RNA, 1701 nt, Artificial Sequence
  derived and/or modified CDS sequence (opt1) from hemagglutinin__InfluenzaA__AEX09175
augaaggccauccuggugguccuccuguacaccuucgccaccgcgaacgccgacacgcugugcaucggcuaccacgccaacaacagcaccgacaccguggacaccgugcucgagaagaacgucgccgugacgcacuccgugaaccugcuggaggacaagcacaacgggaagcucugcaagcugcgcggcgucgcgccccugcaccucgggaagugcaacaucgccggcuggauccuggggaacccggagugcgagagccuguccaccgccagcuccuggagcuacaucguggagaccuccagcuccgacaacgggaccugcuaccccggcgacuucaucgacuacgaggagcuccgggagcagcugagcuccgugagcuccuucgagcgcuucgagaucuuccccaagacgagcuccuggcccaaccacgacagcaacaagggcgucaccgccgccugcccgcacgcgggcgccaaguccuucuacaagaaccugaucuggcucgugaagaaggggaacagcuaccccaagcuguccaagagcuacaucaacgacaagggcaaggaggugcugguccucugggggauccaccaccccagcaccuccgccgaccagcagagccuguaccagaacgccgacgccuacguguucgugggcaccucccgguacagcaagaaguucaagcccgagaucgcgauccgcccgaagguccgggaccgcgagggccggaugaacuacuacuggacgcugguggagcccggggacaagaucaccuucgaggccaccggcaaccucguggucccccgcuacgccuucgccauggagcggaacgccggguccggcaucaucaucagcgacacccccgugcacgacugcaacacgaccugccagaccccgaagggcgcgaucaacaccucccugcccuuccagaacauccaccccaucacgaucgggaagugccccaaguacgucaagagcaccaagcugcgccucgccaccggccugcggaacgugccguccauccagagccgcgggcuguucggcgccaucgccggguucaucgagggcggcuggaccgggaugguggacggcugguacggguaccaccaccagaacgagcagggcuccggguacgccgcggaccucaagagcacgcagaacgccaucgacgagaucaccaacaaggugaacuccgucaucgagaagaugaacacccaguucaccgccgugggcaaggaguucaaccaccuggagaagcggaucgagaaccugaacaagaaggucgacgacggcuuccucgacaucuggacguacaacgccgagcugcuggugcuccuggagaacgagcgcacccuggacuaccacgacagcaacgugaagaaccucuacgagaagguccggucccagcugaagaacaacgccaaggagaucgggaacggcugcuucgaguucuaccacaagugcgacaacacgugcauggagagcgugaagaacgggaccuacgacuaccccaaguacuccgaggaggcgaagcugaaccgcgaggagaucgacggcgugaagcucgagagcacccggaucuaccagauccuggccaucuacuccaccgucgccagcagccuggugcucguggucucccugggggccaucagcuucuggaugugcuccaacggcagccugcagugccgcaucugcaucuga

SEQ ID NO: 71962 - RNA, 1701 nt, Artificial Sequence; identical to SEQ ID NO: 66693
  derived and/or modified CDS sequence (opt1) from hemagglutinin__InfluenzaA__AEX25795

SEQ ID NO: 71963 - RNA, 1701 nt, Artificial Sequence
  derived and/or modified CDS sequence (opt1) from hemagglutinin__InfluenzaA__AEX25797
auggaggccauccuggugguccuccuguacaccuucgccaccgcgaacgccgacacgcugugcaucggcuaccacgccaacaacagcaccgacaccguggacaccgugcucgagaagaacgucacggugacccacuccgugaaccugcuggaggacaagcacaacgggaagcucugcaagcugcgcggcgucgcgccccugcaccucgggaagugcaacaucgccggcuggauccuggggaacccggagugcgagagccuguccaccgcgagcuccuggagcuacaucguggagaccuccaacagcgacaacggcacgugcuaccccggcgacuucaucgacuacgaggagcuccgggagcagcuguccagcguguccagcuucgagcgcuucgagaucuuccccaagaccuccagcuggcccaaccacgacuccaacaagggggucaccgccgccugcccgcacgccggcgccaagagcuucuacaagaaccugaucuggcucgugaagaaggggaacuccuaccccaagcugagcaaguccuacaucaacgacaagggcaaggaggugcugguccucugggggauccaccaccccagcaccagcgccgaccagcagucccuguaccagaacgccgacgccuacguguucgugggcagcucccgguacagcaagaaguucaagcccgagaucgccauccgcccgaagguccgggaccaggagggccgcaugaacuacuacuggacgcugguggagcccggggacaagaucaccuucgaggcgaccggcaaccucguggucccccgguacgccuucgccauggagcgcaacgccggguccggcaucaucaucagcgacacccccgugcacgacugcaacacgaccugccagaccccgaagggcgccaucaacaccucccugcccuuccacaacauccaccccaucacgaucgggaagugccccaaguacgucaagagcaccaagcugcggcucgcgaccggccugcgcaacgugccguccauccagagccgggggcuguucggcgccaucgccggguucaucgagggcggcuggaccgggaugguggacggcugguacggguaccaccaccagaacgagcagggcuccggguacgccgccgaccucaagagcacgcagaacgcgaucgacgagaucaccaacaaggugaacuccgucaucgagaagaugaacacccaguucaccgccgugggcaaggaguucaaccaccuggagaagcgcaucgagaaccugaacaagaaggucgacgacggcuuccucgacaucuggacguacaacgccgagcugcuggugcuccuggagaacgagcggacccuggacuaccacgacagcaacgugaagaaccucuacgagaagguccgcucccagcugaagaacaacgccaaggagaucgggaacggcugcuucgaguucuaccacaagugcgacaacacgugcauggagagcgugaagaacgggaccuacgacuaccccaaguacuccgaggaggccaagcugaaccgggaggagaucgacggcgugaagcucgagagcacccgcaucuaccagauccuggcgaucuacuccaccgucgccagcagccuggugcucguggucucccugggggccaucagcuucuggaugugcuccaacggcagccugcagugccggaucugcaucuga

SEQ ID NO: 71964 - RNA, 1701 nt, Artificial Sequence
  derived and/or modified CDS sequence (opt1) from hemagglutinin__InfluenzaA__AEX25798
augaaggccauccuggugguccuccuguacaccuucgccaccgcgaacgccgacacgcugugcaucggcuaccacgccaacaacagcaccgacaccguggacaccgugcucgagaagaacgucacggugacccacuccgugaaccugcuggaggacaagcacaacgggaagcucugcaagcugcgcggcgucgcgccccugcaccucgggaagugcaacaucgccggcuggauccuggggaacccggagugcgagagccuguccaccgccagcuccuggagcuacaucguggagaccuccagcuccgacaacggcacgugcuaccccggcgacuucaucaacuacgaggagcuccgggagcagcugagcuccgugagcuccuucgagcgcuucgagaucuuccccaagaccagcuccuggcccaaccacgacagcaacaagggggucaccgccgccugcccgcacgccggcgcgaaguccuucuacaagaaccugaucuggcucgugaagaaggggaacagcuaccccaagcuguccaagagcuacaucaacgacaagggcaaggaggugcugguccucugggggauccaccaccccagcaccuccgccgaccagcagagccuguaccagaacgccgacgccuacguguucgugggcacgucccgguacagcaagaaguucaagcccgagaucgccauccgcccgaagguccgggaccaggagggccgcaugaacuacuacuggacccugguggagcccggggacaagaucaccuucgaggcgaccggcaaccucguggucccccgguacgccuucgccauggagcgcaacgccggguccggcaucaucaucagcgacacgcccgugcacgacugcaacacgaccugccagaccccgaagggcgccaucaacaccucccugcccuuccacaacauccaccccaucaccaucgggaagugccccaaguacgucaagagcaccaagcugcggcucgcgaccggccugcgcaacgugccguccauccagagccgggggcuguucggcgccaucgccggguucaucgagggcggcuggacggggaugguggacggcugguacggguaccaccaccagaacgagcagggcuccggguacgccgccgaccucaagagcacccagaacgcgaucgacgagaucaccaacaaggugaacuccgucaucgagaagaugaacacccaguucacggccgugggcaaggaguucaaccaccuggagaagcgcaucgagaaccugaacaagaaggucgacgacggcuuccucgacaucuggaccuacaacgccgagcugcuggugcuccuggagaacgagcggacccuggacuaccacgacagcaacgugaagaaccucuacgagaagguccgcucccagcugaagaacaacgccaaggagaucgggaacggcugcuucgaguucuaccacaagugcgacaacacgugcauggagagcgugaagaacgggaccuacgacuaccccaaguacuccgaggaggccaagcugaaccgggaggagaucgacggcgugaagcucgagagcacccgcaucuaccagauccuggcgaucuacuccaccgucgccagcagccuggugcucguggucucccugggggccaucagcuucuggaugugcuccaacggcagccugcagugccggaucugcaucuga

SEQ ID NO: 71965 - RNA, 1701 nt, Artificial Sequence; identical to SEQ ID NO: 66693
  derived and/or modified CDS sequence (opt1) from hemagglutinin__InfluenzaA__AEX25800

SEQ ID NO: 71966 - RNA, 1701 nt, Artificial Sequence; identical to SEQ ID NO: 66693
  derived and/or modified CDS sequence (opt1) from hemagglutinin__InfluenzaA__AEX25803

SEQ ID NO: 71967 - RNA, 1701 nt, Artificial Sequence; identical to SEQ ID NO: 66935
  derived and/or modified CDS sequence (opt1) from hemagglutinin__InfluenzaA__AEX25808

SEQ ID NO: 71968 - RNA, 1701 nt, Artificial Sequence; identical to SEQ ID NO: 69663
  derived and/or modified CDS sequence (opt1) from hemagglutinin__InfluenzaA__AEX25810

SEQ ID NO: 71969 - RNA, 1701 nt, Artificial Sequence
  derived and/or modified CDS sequence (opt1) from hemagglutinin__InfluenzaA__AEX25811
auggaggccauccuggugguccuccuguacaccuucgccaccgcgaacgccgacacgcugugcaucggcuaccacgccaacaacagcaccgacaccguggacaccgugcucgagaagaacgucacggugacccacuccgugaaccugcuggaggacaagcacaacgggaagcucugcaagcugcgcggcgucgcgccccugcaccucgggaagugcaacaucgccggcuggauccuggggaacccggagugcgagagccuguucaccgcguccagcugguccuacaucguggagaccagcuccagcgacaacggcacgugcuaccccggcgacuucaucgacuacgaggagcuccgggagcagcuguccagcguguccagcuucgagcgcuucgagaucuuccccaagaccuccagcuggcccaaccacgacuccaacaagggggucaccgccgccugcccgcacgccggcgccaagagcuucuacaagaaccugaucuggcucgugaagaaggggaacuccuaccccaagcugagcaaguccuacaucaacgacaagggcaaggaggugcugguccucugggggauccaccaccccagcaccagcgccgaccagcagucccuguaccagaacgccgacgccuacguguucgugggcagcucccgguacagcaagaaguucaagcccgagaucgccauccgcccgaagguccgggaccaggagggccgcaugaacuacuacuggacgcugguggagcccggggacaagaucaccuucgaggcgaccggcaaccucguggucccccgguacgccuucgccauggagcgcaaggccggguccggcaucaucaucagcgacacccccgugcacgacugcaacacgaccugccagaccccgaagggcgccaucaacaccucccugcccuuccacaacauccaccccaucacgaucgggaagugccccaaguacgucaagagcaccaagcugcggcucgcgaccggccugcgcaacgugccguccauccagagccgggggcuguucggcgccaucgccggguucaucgagggcggcuggaccgggaugguggacggcugguacggguaccaccaccagaacgagcagggcuccggguacgccgccgaccucaagagcacgcagaacgcgaucgacgagaucaccaacaaggugaacuccgucaucgagaagaugaacacccaguucaccgccgugggcaaggaguucaaccaccuggagaagcgcaucgagaaccugaacaagaaggucgacgacggcuuccucgacaucuggacguacaacgccgagcugcuggugcuccuggagaacgagcggacccuggacuaccacgacagcaacgugaagaaccucuacgagaagguccgcucccagcugaagaacaacgccaaggagaucgggaacggcugcuucgaguucuaccacaagugcgacaacacgugcauggagagcgugaagaacgggaccuacgacuaccccaaguacuccgaggaggccaagcugaaccgggaggagaucgacggcgugaagcucgagagcacccgcaucuaccagauccuggcgaucuacuccaccgucgccagcagccuggugcucguggucucccugggggccaucagcuucuggaugugcuccaacggcagccugcagugccggaucugcaucuga

SEQ ID NO: 71970 - RNA, 1701 nt, Artificial Sequence; identical to SEQ ID NO: 69663
  derived and/or modified CDS sequence (opt1) from hemagglutinin__InfluenzaA__AEX25814

SEQ ID NO: 71971 - RNA, 1701 nt, Artificial Sequence
  derived and/or modified CDS sequence (opt1) from hemagglutinin__InfluenzaA__AEX25816
augaaggccauccuggugguccuccuguacaccuucgccaccgcgaacgccgacacgcugugcaucggcuaccacgccaacaacagcaccgacaccguggacaccgugcucgagaagaacgucacggugacccacuccgugaaccugcuggaggacaagcacaacgggaagcucugcaagcugcgcggcgucgcgccccugcaccucgggaagugcaacaucgccggcuggauccuggggaacccggagugcgagagccuguccaccgcgaacagcugguccuacaucguggagaccagcuccagcgacaacggcacgugcuaccccggcgacuucaucaacuacgaggagcuccgggagcagcuguccagcguguccagcuucgagcgcuucgagaucuuccccaagaccuccagcuggcccaaccacgacuccaacaagggggucaccgccgccugcccgcacgccggcgccaagagcuucuacaagaaccugaucuggcucgugaagaaggggaacuccuaccccaagcugagcaaguccuacaucaacgacaagggcaaggaggugcugguccucugggggauccaccaccccagcaccagcgccgaccagcagucccuguaccagaacgccgacgccuacguguucgugggcacgagccgguacuccaagaaguucaagcccgagaucgccauccgcccgaagguccgggaccaggagggccgcaugaacuacuacuggacccugguggagcccggggacaagaucaccuucgaggcgaccggcaaccucguggucccccgguacgccuucgccauggagcgcaacgccgggagcggcaucaucaucuccgacacgcccgugcacgacugcaacacgaccugccagaccccgaagggcgccaucaacaccagccugcccuuccagaacauccaccccaucaccaucgggaagugccccaaguacgugaaguccaccaagcugcggcucgcgaccggccugcgcaacgucccgagcauccagucccgggggcuguucggcgccaucgccggguucaucgagggcggcuggacggggaugguggacggcugguacggguaccaccaccagaacgagcagggcagcggguacgccgccgaccucaaguccacccagaacgcgaucgacgagaucaccaacaaggugaacagcgucaucgagaagaugaacacccaguucacggccgugggcaaggaguucaaccaccuggagaagcgcaucgagaaccugaacaagaaggucgacgacggcuuccucgacaucuggaccuacaacgccgagcugcuggugcuccuggagaacgagcggacccuggacuaccacgacuccaacgugaagaaccucuacgagaagguccgcagccagcugaagaacaacgccaaggagaucgggaacggcugcuucgaguucuaccacaagugcgacaacacgugcauggaguccgugaagaacgggaccuacgacuaccccaaguacagcgaggaggccaagcugaaccgggaggagaucgacggcgugaagcucgaguccacccgcaucuaccagauccuggcgaucuacagcaccgucgccuccagccuggugcucguggucagccugggggccaucuccuucuggaugugcagcaacggcucccugcagugccggaucugcaucuga

SEQ ID NO: 71972 - RNA, 1701 nt, Artificial Sequence
  derived and/or modified CDS sequence (opt1) from hemagglutinin__InfluenzaA__AEX25818
auggaggccauccuggugguccuccuguacaccuucgccaccgcgaacgccgacacgcugugcaucggcuaccacgccaacaacagcaccgacaccguggacaccgugcucgagaagaacgucacggugacccacuccgugaaccugcuggaggacaagcacaacgggaagcucugcaagcugcgcggcgucgcgccccugcaccucgggaagugcaacaucgccggcuggauccuggggaacccggagugcgagagccuguccaccgcgagcuccuggagcuacaucguggagaccuccaacagcgacaacggcacgugcuaccccggcgacuucaucgacuacgaggagcuccgggagcagcuguccagcguguccagcuucgagcgcuucgagaucuuccccaagaccuccagcuggcccaaccacgacuccaacaagggggucaccgccgccugcccgcacgccggcgccaagagcuucuacaagaaccugaucuggcucgugaagaaggggaacuccuaccccaagcugagcaaguccuacaucaacgacaagggcaaggaggugcugguccucugggggauccaccaccagagcaccagcgccgaccagcagucccuguaccagaacgccgacgccuacguguucgugggcagcucccgguacagcaagaaguucaagcccgagaucgccauccgccccaagguccgggaccaggagggccgcaugaacuacuacuggacgcugguggagccgggggacaagaucaccuucgaggcgaccggcaaccucguggucccccgguacgccuucgccauggagcgcaacgccggguccggcaucaucaucagcgacacccccgugcacgacugcaacacgaccugccagacccccaagggcgccaucaacaccucccugccguuccacaacauccaccccaucacgaucgggaagugccccaaguacgucaagagcaccaagcugcggcucgcgaccggccugcgcaacgugcccuccauccagagccgggggcuguucggcgccaucgccggguucaucgagggcggcuggaccgggaugguggacggcugguacggguaccaccaccagaacgagcagggcuccggguacgccgccgaccucaagagcacgcagaacgcgaucgacgagaucaccaacaaggugaacuccgucaucgagaagaugaacacccaguucaccgccgugggcaaggaguucaaccaccuggagaagcgcaucgagaaccugaacaagaaggucgacgacggcuuccucgacaucuggacguacaacgccgagcugcuggugcuccuggagaacgagcggacccuggacuaccacgacagcaacgugaagaaccucuacgagaagguccgcucccagcugaagaacaacgccaaggagaucgggaacggcugcuucgaguucuaccacaagugcgacaacacgugcauggagagcgugaagaacgggaccuacgacuacccgaaguacuccgaggaggccaagcugaaccgggaggagaucgacggcgugaagcucgagagcacccgcaucuaccagauccuggcgaucuacuccaccgucgccagcagccuggugcucguggucucccugggggccaucagcuucuggaugugcuccaacggcagccugcagugccggaucugcaucuga

SEQ ID NO: 71973 - RNA, 1701 nt, Artificial Sequence
  derived and/or modified CDS sequence (opt1) from hemagglutinin__InfluenzaA__AEX25824
augaaggccauccuggugguccuccuguacaccuucgccaccgcgaacgccgacacgcugugcaucggcuaccacgccaacaacagcaccgacaccguggacaccgugcucgagaagaacgucacggugacccacuccgugaaccugcuggaggacaagcacaacgggaagcucugcaagcugcgcggcgucgcgccccugcaccucgggaagugcaacaucgccggcuggauccuggggaacccggagugcgagagccuguccaccgccagcuccuggagcuacaucguggagaccuccagcuccgacaacggcacgugcuaccccggcgacuucaucgacuacgaggagcuccgggagcagcugagcuccgugagcuccuucgagcgcuucgagaucuuccccaagaccagcuccuggcccaaccacgacagcaacaagggggucaccgccgccugcccgcacgccggcgcgaaguccuucuacaagaaccugaucuggcucgugaagaaggggaacagcuaccccaagcuguccaagagcuacaucaacgacaagggcaaggaggugcugguccucugggggauccaccaccccagcaccuccgccgaccagcagagccuguaccagaacgccgacgccuacguguucgugggcacgucccgguacagcaagaaguucaagcccgagaucgccauccgcccgaagguccgggaccaggagggccgcaugaacuacuacuggacccugguggagcccggggacaagaucaccuucgaggcgaccggcaaccucguggucccccgguacgccuucgccauggagcgcaacgccggguccggcaucaucaucagcgacacgcccgugcacgacugcaacacgaccugccagaccccgaagggcgccaucaacaccucccugcccuuccagaacauccaccccaucaccaucgggaagugccccaaguacguggagagcaccaagcugcggcucgcgaccggccugcgcaacgucccguccauccagagccgggggcuguucggcgccaucgccggguucaucgagggcggcuggacggggaugguggacggcugguacggguaccaccaccagaacgagcagggcuccggguacgccgccgaccucaagagcacccagaacgcgaucgacgagaucaccaacaaggugaacuccgucaucgagaagaugaacacccaguucacggccgugggcaaggaguucaaccaccuggagaagcgcaucgagaaccugaacaagaaggucgacgacggcuuccucgacaucuggaccuacaacgccgagcugcuggugcuccuggagaacgagcggacccuggacuaccacgacagcaacgugaagaaccucuacgagaagguccgcucccagcugaagaacaacgccaaggagaucgggaacggcugcuucgaguucuaccacaagugcgacaacacgugcauggagagcgugaagaacgggaccuacgacuaccccaaguacuccgaggaggccaagcugaaccgggaggagaucgacggcgugaagcucgagagcacccgcaucuaccagauccuggcgaucuacuccaccgucgccagcagccuggugcucguggucucccugggggccaucagcuucuggaugugcuccaacggcagccugcagugccggaucugcaucuga

SEQ ID NO: 71974 - RNA, 1698 nt, Artificial Sequence
  derived and/or modified CDS sequence (opt1) from hemagglutinin__InfluenzaA__AEX33420
augaaggugaagcugcucguccugcugugcaucuucaccgccaccuacgccgacacgaucugcaucggcuaccacgcgaacaacagcaccgacaccguggacaccgugcucgagaagaacgucacggugacccacuccgugaaccugcuggaggacagccacaacgggaagcucugccugcugaagggcaucgcgccccuccagcuggggaacugcuccgucgccggcuggauccuggggaacccggagugcgagcuccugaucagcaaggaguccuggagcuacaucguggagacccccaaccccgagaacgggaccugcuaccccggcuacuucgccgacuacgaggagcugcgcgagcagcucuccagcguguccagcuucgagcgguucgagaucuucccgaaggaguccagcuggcccaaccacacggucaccgggguguccgccagcugcucccacaacggcaagagcuccuucuaccgcaaccugcuguggcucaccggcaagagcggccuguaccccaaccuguccaagagcuacgccaacaacaaggagaaggaggugcucguccuguggggcgugcaccacccgcccaacaucggggaccagcgggcccuguaccacaccgagaacgccuacgugagcgucguguccagccacuacucccgccgguucacgcccgagaucgccaagcgccccaaggugcgggaccaggagggccgcaucaacuacuacuggacccuccuggagcccggggacaccaucaucuucgaggcgaacggcaaccugaucgccccgcgguacgccuucgcccucagccgcggguucggcuccggcaucaucaccagcaacgcccccauggacgagugcgacgcgaagugccagacgccccagggggccaucaacuccagccugcccuuccagaacguccacccggugaccaucggcgagugccccaaguacgugaaguccgccaagcugcggauggucaccgggcuccgcaacauccccagcauccagucccggggccuguucggggccaucgccggcuucaucgagggcggguggaccggcaugguggacgggugguacggcuaccaccaccagaacgagcaggggagcggcuacgcggccgaccagaaguccacgcagaacgccaucaacggcaucaccaacaaggugaacagcgucaucgagaagaugaacacccaguucaccgccguggggaaggaguucaacaagcuggagcgccggauggagaaccucaacaagaaggucgacgacggcuuccuggacaucuggacguacaacgccgagcugcucgugcugcuggagaacgagcgcacccucgacuuccacgacuccaacgugaagaaccuguacgagaaggucaagagccagcugaagaacaacgcgaaggagaucgggaacggcugcuucgaguucuaccacaagugcaacgacgagugcauggaguccgugaagaacgggaccuacgacuaccccaaguacagcgaggaguccaagcucaaccgggagaagaucgacggcgugaagcuggagagcaugggcgucuaccagauccuggccaucuacagcaccguggccuccagccucgugcugcuggucucccucggggccaucagcuucuggaugugcuccaacggcagccugcagugccgcaucugcaucuga

SEQ ID NO: 71975 - RNA, 1701 nt, Artificial Sequence
  derived and/or modified CDS sequence (opt1) from hemagglutinin__InfluenzaA__AEX33453
augaagaccaucaucgcccugagcuacauccucugccugguguucgcccagaagcugcccggcaacgacaacuccaccgcgacgcucugccuggggcaccacgccgucccgaacggcaccaucgugaagaccaucaccaacgaccagaucgaggugacgaacgccaccgagcugguccagagcuccagcaccgggggcaucugcgacagcccccaccagauccucgacggggagaacugcacccugaucgacgcccugcucggcgacccccagugcgacggcuuccagaacaagaagugggaccuguucguggagcgcagcaaggccuacuccaacugcuaccccuacgacgugccggacuacgcgagccugcggucccucgucgccagcuccgggacgcuggaguucaacaacgagagcuucaacuggaccggcgugacccagaacgggaccuccagcgccugcaagcgccgguccgacaagagcuucuucucccgccugaacuggcucacgcaccugaaguacaaguaccccgcccugaacgugaccaugcccaacaacgagaaguucgacaagcucuacaucuggggcguccaccaccccgggaccgacagcgaccagaucucccuguacgcgcaggccagcggccggaucaccgugagcacgaagcgcucccagcagaccgugaucccgaacaucggcagccggccccgcguccgggacguguccagccgcaucuccaucuacuggaccaucgugaagcccggggacauccugcucaucaacagcaccggcaaccugaucgcgccccggggguacuucaagauccgcuccggcaagagcuccaucaugcggagcgacgccccgaucggcaagugcaacuccgagugcaucacgcccaacgggagcauccccaacgacaagcccuuccagaacgucaaccgcaucaccuacggcgccugcccgcgguacgugaagcagaacacccugaagcucgccaccgggaugcgcaacgugcccgagaagcagacgcggggcaucuucggggccaucgccggcuucaucgagaacggcugggaggggauggucgacggcugguacggguuccgccaccagaacuccgagggcaccgggcaggccgccgaccugaaguccacccaggcggccaucaaccagaucaacggcaagcugaaccggcucaucggcaagaccaacgagaaguuccaccagaucgagaaggaguucuccgagguggaggggcgcauccaggaccuggagaaguacguggaggacacgaagaucgaccuguggagcuacaacgccgagcuccuggucgcccuggagaaccagcacaccaucgaccucaccgacuccgagaugaacaagcuguucgagcggaccaagaagcagcugcgcgagaacgccgaggacaugggcaacgggugcuucaagaucuaccacaagugcgacaacgcgugcaucggcagcauccgcaacgggacguacgaccacgacguguaccgggacgaggcccucaacaaccgcuuccagaucaagggcguggagcugaaguccggcuacaaggacuggauccuguggaucagcuucgccaucagcugcuuccuccugugcgucgcccugcucggguucaucaugugggccugccagaagggcaacauccggugcaacaucugcaucuga

SEQ ID NO: 71976 - RNA, 1701 nt, Artificial Sequence; identical to SEQ ID NO: 65819
  derived and/or modified CDS sequence (opt1) from hemagglutinin__InfluenzaA__AEX33464

SEQ ID NO: 71977 - RNA, 1701 nt, Artificial Sequence; identical to SEQ ID NO: 65819
  derived and/or modified CDS sequence (opt1) from hemagglutinin__InfluenzaA__AEX33475

SEQ ID NO: 71978 - RNA, 1701 nt, Artificial Sequence; identical to SEQ ID NO: 65819
  derived and/or modified CDS sequence (opt1) from hemagglutinin__InfluenzaA__AEX33486

SEQ ID NO: 71979 - RNA, 1701 nt, Artificial Sequence; identical to SEQ ID NO: 65819
  derived and/or modified CDS sequence (opt1) from hemagglutinin__InfluenzaA__AEX33497

SEQ ID NO: 71980 - RNA, 1701 nt, Artificial Sequence; identical to SEQ ID NO: 65819
  derived and/or modified CDS sequence (opt1) from hemagglutinin__InfluenzaA__AEX33508

SEQ ID NO: 71981 - RNA, 1701 nt, Artificial Sequence; identical to SEQ ID NO: 65819
  derived and/or modified CDS sequence (opt1) from hemagglutinin__InfluenzaA__AEX33519

SEQ ID NO: 71982 - RNA, 1701 nt, Artificial Sequence
  derived and/or modified CDS sequence (opt1) from hemagglutinin__InfluenzaA__AEX33541
augaagaccaucaucgcccugagcuacauccucugccugguguucgcccagaagcugcccggcaacgacaacuccaccgcgacgcucugccuggggcaccacgccgucccgaacggcaccaucgugaagaccaucaccaacgaccagaucgaggugacgaacgccaccgagcugguccagaucagcuccaccgggggcaucugcgacagcccccaccagauccucgacggggagaacugcacccugaucgacgcccugcucggcgacccccagugcgacggcuuccagaacaagaagugggaccuguucguggagcgcuccaaggccuacagcaacugcuaccccuacgacgugccggacuacgcgucccugcggagccucgucgccuccagcgggacgcuggaguucaacaacgaguccuucgacuggaccggcgugacccagaacgggaccagcuccagcugcaagcgccgguccaacaagagcuucuucucccgccugaacuggcucacgcaccugaaguacaaguaccccgcccugaacgugaccaugcccaacaacgagaaguucgacaagcucuacaucuggggcguccaccaccccgggaccgacagcgaccagaucucccuguacgcccaggcgagcggccggaucaccgugagcacgaagcgcucccagcagaccgugaucccgaacaucggcagccggccccgcguccgggacguguccagccgcaucuccaucuacuggaccaucgugaagcccggggacauccugcucaucaacagcaccggcaaccugaucgcgccccggggguacuucaagauccgcuccggcaagagcuccaucaugcggagcgacgccccgaucggcaagugcaacuccgagugcaucacgcccaacgggagcauccccaacgacaagcccuuccagaacgucaaccgcaucaccuacggcgccugcccgcgguacgugaagcagaacacccugaagcucgccaccgggaugcgcaacgugcccgagaagcagacgcggggcaucuucggggccaucgccggcuucaucgagaacggcugggaggggauggucgacggcugguacggguuccgccaccagaacuccgagggcaccgggcaggccgccgaccucaagagcacccaggccgcgaucaaccagaucaacggcaagcugaaccggcugaucggcaagaccaacgagaaguuccaccagaucgagaaggaguucuccgagguggaggggcgcauccaggaccuggagaaguacguggaggacacgaagaucgaccuguggagcuacaacgccgagcuccuggucgcccuggagaaccagcacaccaucgaccucaccgacuccgagaugaacaagcuguucgagcggaccaagaagcagcugcgcgagaacgccgaggacaugggcaacgggugcuucaagaucuaccacaagugcgacaacgccugcaucggcagcauccgcaacgggacguacgaccacgacguguaccgggacgaggcgcucaacaaccgcuuccagaucaagggcguggagcugaaguccggcuacaaggacuggauccuguggaucagcuucgccaucagcugcuuccuccugugcgucgcccugcucggguucaucaugugggccugccagaagggcaacauccggugcaacaucugcaucuga

SEQ ID NO: 71983 - RNA, 1701 nt, Artificial Sequence
  derived and/or modified CDS sequence (opt1) from hemagglutinin__InfluenzaA__AEX33574
augaagaccaucaucgcccugagcuacauccucugccugguguucgcccagaagcugcccggcaacgacaacuccaccgcgacgcucugccuggggcaccacgccgucccgaacggcaccaucgugaagaccaucaccaacgaccagaucgaggugacgaacgccaccgagcugguccagagcuccagcaccgggggcaucugcgacagcccccaccagauccucgacggggagaacugcacccugaucgacgcccugcucggcgacccccagugcgacggcuuccagaacaagaagugggaccuguucguggagcgcagcaaggccuacuccaacugcuaccccuacgacgugccggacuacgcgagccugcggucccucgucgccagcuccgggacgcuggaguucaacaacgagagcuucaacuggaccggcgugacccagaacgggaccuccagcgccugcaagcgccgguccaacaagagcuucuucucccgccugaacuggcucacgcaccugaaguucaaguaccccgcccugaacgugaccaugcccaacaacgagaaguucgacaagcucuacaucuggggcguccaccaccccgggaccgacaacgaccagaucagccuguacgcgcaggccuccggccggaucaccgugagcacgaagcgcagccagcagaccgugaucccgaacaucggcucccggccccgcguccgggacgugcccagccgcaucuccaucuacuggaccaucgugaagcccggggacauccugcucaucaacagcaccggcaaccugaucgccccgcggggguacuucaagauccgcuccggcaagagcuccaucaugcggagcgacgcccccaucggcaagugcaacuccgagugcaucacgcccaacgggagcauccccaacgacaagccguuccagaacgucaaccgcaucaccuacggcgccugcccccgguacgugaagcagaacacccugaagcucgcgaccgggaugcgcaacgugcccgagaagcagacgcggggcaucuucggggccaucgccggcuucaucgagaacggcugggaggggauggucgacggcugguacggguuccgccaccagaacuccgagggcaccgggcaggccgccgaccugaaguccacccaggcggccaucaaccagaucaacggcaagcugaaccggcucaucggcaagaccaacgagaaguuccaccagaucgagaaggaguucuccgagguggaggggcgcauccaggaccuggagaaguacguggaggacacgaagaucgaccuguggagcuacaacgccgagcuccuggucgcccuggagaaccagcacaccaucgaccucaccgacuccgagaugaacaagcuguucgagcggaccaagaagcagcugcgcgagaacgccgaggacaugggcaacgggugcuucaagaucuaccacaagugcgacaacgacugcaucggcagcauccgcaacgggacguacgaccacgacguguaccgggacgaggcgcucaacaaccgcuuccagaucaagggcguggagcugaaguccggcuacaaggacuggauccuguggaucagcuucgccaucuccugcuuccuccugugcgucgcccugcucggguucaucaugugggccugccagaagggcaacauccggugcaacaucugcaucuga

SEQ ID NO: 71984 - RNA, 1701 nt, Artificial Sequence; identical to SEQ ID NO: 65819
  derived and/or modified CDS sequence (opt1) from hemagglutinin__InfluenzaA__AEX33585

SEQ ID NO: 71985 - RNA, 1701 nt, Artificial Sequence
  derived and/or modified CDS sequence (opt1) from hemagglutinin__InfluenzaA__AEX33596
augaagaccaucaucgcccugagcuacauccucugccugguguucgcccagaagcugcccggcaacgacaacuccaccgcgacgcucugccuggggcaccacgccgucccgaacggcaccaucgugaagaccaucaccaacgaccagaucgaggugacgaacgccaccgagcugguccagagcuccagcaccgggggcaucugcgacagcccccaccagauccucgacggggagaacugcacccugaucgacgcccugcucggcgacccccagugcgacggcuuccagaacaagaagugggaccuguucguggagcgcagcaaggccuacuccaacugcuaccccuacgacgugccggacuacgcgagccugcggucccucgucgccagcuccgggacgcuggaguucaacaacgagagcuucaacuggaccggcgugacccagaacgggaccuccagcgccugcaagcgccgguccaacaagagcuucuucucccgccugaacuggcucacgcaccugaaguucaaguaccccgcccugaacgugaccaugcccaacaacgagaaguucgacaagcucuacaucuggggcguccaccaccccgggaccgacaacgaccagaucagccuguacgcgcaggccuccggccggaucaccgugagcacgaagcgcagccagcagaccgugaucccgaacaucggcucccggccccgcguccgggacauccccagccgcaucuccaucuacuggaccaucgugaagcccggggacauccugcucaucaacagcaccggcaaccugaucgccccgcggggguacuucaagauccgcuccggcaagagcuccaucaugcggagcgacgcccccaucggcaagugcaacuccgagugcaucacgcccaacgggagcauccccaacgacaagccguuccagaacgugaaccgcaucaccuacggcgccugcccccgguacgucaagcagaacacccugaagcucgcgaccgggaugcgcaacgugcccgagaagcagacgcggggcaucuucggggccaucgccggcuucaucgagaacggcugggaggggaugguggacggcugguacggguuccgccaccagaacuccgagggcaccgggcaggccgccgaccugaaguccacccaggcggccaucaaccagaucaacggcaagcugaaccggcucaucggcaagaccaacgagaaguuccaccagaucgagaaggaguucuccgaggucgaggggcgcauccaggaccuggagaaguacguggaggacacgaagaucgaccuguggagcuacaacgccgagcuccugguggcccuggagaaccagcacaccaucgaccucaccgacuccgagaugaacaagcuguucgagcggaccaagaagcagcugcgcgagaacgccgaggacaugggcaacgggugcuucaagaucuaccacaagugcgacaacgcgugcaucggcagcauccgcaacgggacguacgaccacgacgucuaccgggacgaggcccucaacaaccgcuuccagaucaagggcguggagcugaaguccggcuacaaggacuggauccuguggaucagcuucgccaucuccugcuuccuccugugcguggcccugcucggguucaucaugugggccugccagaagggcaacauccggugcaacaucugcaucuga

SEQ ID NO: 71986 - RNA, 1701 nt, Artificial Sequence; identical to SEQ ID NO: 65819
  derived and/or modified CDS sequence (opt1) from hemagglutinin__InfluenzaA__AEX33618

SEQ ID NO: 71987 - RNA, 1701 nt, Artificial Sequence; identical to SEQ ID NO: 65819
  derived and/or modified CDS sequence (opt1) from hemagglutinin__InfluenzaA__AEX33629

SEQ ID NO: 71988 - RNA, 1701 nt, Artificial Sequence; identical to SEQ ID NO: 71985
  derived and/or modified CDS sequence (opt1) from hemagglutinin__InfluenzaA__AEX33640

SEQ ID NO: 71989 - RNA, 1701 nt, Artificial Sequence
  derived and/or modified CDS sequence (opt1) from hemagglutinin__InfluenzaA__AEX33836
augaagaccaucaucgcccugagcuacauccucugccugguguucgcccagaagcugcccggcaacgacaacuccaccgcgacgcucugccuggggcaccacgccgucccgaacggcaccaucgugaagaccaucaccaacgaccagaucgaggugacgaacgccaccgagcugguccagagcuccagcaccgggggcaucugcgacagcccccaccagauccucgacggggagaacugcacccugaucgacgcccugcucggcgacccccagugcgacggcuuccagaacaagaagugggaccuguucguggagcgcuccaaggccuacuccaacugcuaccccuacgacgugccggacuacgcgagccugcggucccucgucgccagcuccgggacgcuggaguucaacaacgagagcuucaacuggaccggcgugacccagaacgggaccuccagcgccugcaagcgccgguccaacaacagcuucuucucccgccugaacuggcucacgcaccugaaguucaaguaccccgcccugaacgugaccaugcccaacaacgagaaguucgacaagcucuacaucuggggcguccaccaccccgggaccgacaacgaccagaucuuccuguacgcgcaggccagcggccggaucaccguguccacgaagcgcagccagcagaccgugaucccgaacaucggcagccggccccgcguccggaacauccccucccgcaucagcaucuacuggaccaucgugaagcccggggacaucuuccugaucaacuccaccggcaaccucaucgccccgcggggguacuucaagauccgcagcggcaaguccagcaucaugcgguccgacgcccccaucggcaagugcaacagcgagugcaucacgcccaacggguccauccccaacgacaagccguuccagaacgugaaccgcaucaccuacggcgccugcccccgguacgucaagcagaacacccugaagcuggcgaccgggaugcgcaacgugcccgagaagcagacgcggggcaucuucggggccaucgccggcuucaucgagaacggcugggaggggaugguggacggcugguacggguuccgccaccagaacagcgagggcaucgggcaggccgccgaccucaaguccacccaggcggccaucaaccagaucaacggcaagcugaaccggcugaucggcaagaccaacgagaaguuccaccagaucgagaaggaguucagcgaggucgaggggcgcauccaggaccucgagaaguacguggaggacaccaagaucgaccugugguccuacaacgccgagcugcucguggcccuggagaaccagcacacgaucgaccugaccgacagcgagaugaacaagcuguucgagcggaccaagaagcagcuccgcgagaacgccgaggacaugggcaacgggugcuucaagaucuaccacaagugcgacaacgcgugcaucggcuccauccgcaacgggaccuacgaccacgacgucuaccgggacgaggcccugaacaaccgcuuccagaucaagggcguggagcucaagagcggcuacaaggacuggauccuguggaucuccuucgccaucagcugcuuccugcucugcguggcccugcugggguucaucaugugggccugccagaagggcaacauccggugcaacaucugcaucuga

SEQ ID NO: 71990 - RNA, 1701 nt, Artificial Sequence; identical to SEQ ID NO: 64654
  derived and/or modified CDS sequence (opt1) from hemagglutinin__InfluenzaA__AEX33880

SEQ ID NO: 71991 - RNA, 1698 nt, Artificial Sequence
  derived and/or modified CDS sequence (opt1) from hemagglutinin__InfluenzaA__AEX33913
augaaggugaagcugcucguccugcugugcaccuucaccgccacguacgccgacaccaucugcaucggcuaccacgcgaacaacagcaccgacaccguggacacggugcucgagaagaacgucaccgugacccacuccgugaaccugcuggaggacagccacaacgggaagcucugccugcugaagggcaucgcgccccuccagcuggggaacugcuccgucgccggcuggauccuggggaacccggagugcgagcuccugaucagccgcgaguccuggagcuacaucguggagaagcccaaccccgagaacgggaccugcuaccccggccacuucgccgacuacgaggagcugcgggagcagcucuccagcguguccagcuucgagcgcuucgagaucuucccgaaggagaacuccuggcccaaccacacgaccaccggggucagcgccuccugcagccacaacggcgaguccagcuucuacaagaaccugcuguggcucaccgggaagaacggccuguaccccaaccuguccaagagcuacgccaacaacaagaagaaggaggugcucgugcuguggggcguccaccacccgcccaacaucggcaaccagcgggcccuguaccacacggagaacgccuacguguccguggucagcagccacuacucccgcaaguucacccccgagaucgccaagcggcccaaggugcgcgaccaggagggccggaucaacuacuacuggacccuccuggagcccggggacaccaucaucuucgaggcgaacggcaaccugaucgccccgcgcuacgccuucgcccucagccggggguucggcuccggcaucaucaacagcaacgcccccauggacgagugcgacgcgaagugccagacgccccagggggccaucaacuccagccugcccuuccagaacgugcacccggucaccaucggcgagugccccaaguacgugcgcuccgccaagcugcggauggugaccgggcuccgcaacauccccagcauccagucccggggccuguucggggccaucgccggcuucaucgagggcggguggaccggcauggucgacgggugguacggcuaccaccaccagaacgagcaggggagcggcuacgcggccgaccagaaguccacgcagaacgccaucaacggcaucaccaacaaggugaacagcgugaucgagaagaugaacacccaguucaccgccgucgggaaggaguucaacaagcuggagcgccggauggagaaccucaacaagaagguggacgacggcuucaucgacaucuggacguacaacgccgagcugcugguccuccuggagaacgagcgcacccuggacuuccacgacuccaacgugaagaaccucuacgagaaggucaagagccagcugaagaacaacgcgaaggagaucgggaacggcugcuucgaguucuaccacaagugcaacgacgagugcauggaguccgugaagaacgggaccuacgacuaccccaaguacagcgaggaguccaagcugaaccgggagaagaucgacggcgugaaguucgagagcaugggcguguaccagauccucgccaucuacuccaccgucgccagcagccuggugcugcucgugucccugggggccaucagcuucuggaugugcuccaacggcagccugcagugccgcaucugcaucuga

SEQ ID NO: 71992 - RNA, 1698 nt, Artificial Sequence
  derived and/or modified CDS sequence (opt1) from hemagglutinin__InfluenzaA__AEX33924
augaaggugaagcugcucguccugcugugcaccuucaccgccacguacgccgacaccaucugcaucggcuaccacgcgaacaacagcaccgacaccguggacacggugcucgagaagaacgucaccgugacccacuccgugaaccugcuggaggacagccacaacgggaagcucugccugcugaagggcaucgcgccccuccagcuggggaacugcuccgucgccggcuggauccuggggaacccggagugcgagagccucaucucccgcgagagcugguccuacaucguggagaagcccagccccgagaacgggaccugcuaccccggccacuucgccgacuacgaggagcugcgggagcagcuguccagcguguccagcuucgagcgcuucgagaucuucccgaaggaguccagcuggcccaaccacacggccaccggggucuccgccagcugcucccacaacggcaagagcuccuucuacaagaaccuccuguggcugaccgggaagaacggccucuaccccaaccugagcaagagcuacgccaacaacaaggagaaggaggugcuggugcucuggggcguccaccacccgcccaacaucggcgaccagcgggcccuguaccacaccgagaacgccuacguguccguggucagcucccacuacagccgcaaguucacgcccgagaucgcgaagcggcccaaggugcgcgaccagaagggccggaucaacuacuacuggacccugcucgagcccggggacaccaucaucuucgaggccaacggcaaccugaucgccccgcgcuacgccuucgcccugucccggggguucggcagcggcaucaucaacuccaacgcgcccauggacgagugcgacgccaagugccagacgccccagggggccaucaacagcucccuccccuuccagaacgugcacccggucaccaucggcgagugccccaaguacgugcgcagcgccaagcugcggauggugaccgggcugcgcaacauccccuccauccagagccggggccucuucggggccaucgcgggcuucaucgagggcggguggaccggcauggucgacgggugguacggcuaccaccaccagaacgagcagggguccggcuacgccgccgaccagaaguccacccagaacgccaucaacggcaucacgaacaaggugaacagcgugaucgagaagaugaacacccaguucaccgccgucgggaaggaguucaacaagcuggagcgccggauggagaaccugaacaagaagguggacgacggcuucaucgacaucuggaccuacaacgcggagcuccugguccugcucgagaacgagcgcacgcuggacuuccacgacagcaacgugaagaaccuguacgagaaggugaagucccagcucaagaacaacgccaaggagaucgggaacggcugcuucgaguucuaccacaagugcaacgacgagugcauggagagcgucaagaacgggaccuacgacuaccccaaguacuccgaggagagcaagcugaaccgggagaagaucgacggcgugaagcuggagagcaugggcguguaccagauccucgccaucuacuccaccgucgccagcucccuggugcugcucgugagccugggggccaucuccuucuggaugugcagcaacggcucccugcagugccgcaucugcaucuga

SEQ ID NO: 71993 - RNA, 1701 nt, Artificial Sequence
  derived and/or modified CDS sequence (opt1) from hemagglutinin__InfluenzaA__AEX33957
augaagaccaucaucgcccugagcuacauccucugccugguguucgcccagaagcugcccggcaucgacaacuccaccgcgacgcucugccuggggcaccacgccgucccgaacggcaccaucgugaagaccaucaccaacgaccagguggaggucacgaacgccaccgagcuggugcagaacagcuccaccgggggcaucugcgacagcccccaccagauccucgacggggagaacugcacccugaucgacgcccugcucggcgacccccagugcgacggcuuccagaacaagaagugggaccuguucguggagcgcuccaaggccuacagcaacugcuaccccuacgacgucccggacuacgcgucccugcggagccucguggccuccagcgggacgcuggaguucaacaacgaguccuucaacuggaccggcgugacccagaacgggaccagcuccgccugcaagcgcggcagcaacaacuccuucuucagccggcugaacuggcucacgcacuccaaguucaaguaccccgcccugaacgucaccaugcccaacaacgaggaguucgacaagcuguacaucuggggcgugcaccaccccgggaccgacaacgaccagaucuuccucuacgcgcaggccagcggccgcaucaccguguccacgaagcggagccagcagaccgucaucccgaacaucgggagccgcccccgggugcgcaacauccccucccggaucagcaucuacuggaccaucgugaagcccggcgacauccugcugaucaacuccaccgggaaccucaucgccccgcgcggcuacuucaagauccggagcggcaaguccagcaucaugcgcuccgacgcccccaucgggaagugcaacagcgagugcaucacgcccaacggcuccauccccaacgacaagccguuccagaacgucaaccggaucaccuacggggccugcccccgcuacgugaagcagaacacccugaagcuggcgaccggcaugcggaacgugcccgagaagcagacgcgcgggaucuucggcgccaucgccggcuucaucgagaacgggugggagggcauggucgacgggugguacggcuuccggcaccagaacagcgaggggaucggccaggccgccgaccucaaguccacccaggcggccaucgaccagaucaacggcaagcugaaccgccugaucgggaagaccaacgagaaguuccaccagaucgagaaggaguucagcgagguggagggccggauccaggaccucgagaaguacguggaggacaccaagaucgaccugugguccuacaacgccgagcugcucgucgcccuggagaaccagcacacgaucgaccugaccgacagcgagaugaacaagcuguucgagaagaccaagaagcagcuccgcgagaacgccgaggacauggggaacggcugcuucaagaucuaccacaagugcgacaacgcgugcaucggguccauccggaacggcaccuacgaccacgacguguaccgcgacgaggcccugaacaaccgcuuccagaucaagggcguggagcucaagagcggguacaaggacuggauccuguggaucuccuucgccaucagcugcuuccugcucugcgucgcccugcugggcuucaucaugugggccugccagaaggggaacauccggugcaacaucugcaucuga

SEQ ID NO: 71994 - RNA, 1701 nt, Artificial Sequence
  derived and/or modified CDS sequence (opt1) from hemagglutinin__InfluenzaA__AEX33968
augaagaccaucaucgcccugagcuacauccucugccugguguucgcccagaagcugcccggcaucgacaacuccaccgcgacgcucugccuggggcaccacgccgucccgaacggcaccaucgugaagaccaucaccaacgaccagaucgaggugacgaacgccaccgagcugguccagaacagcuccaccgggggcaucugcgacagcccccaccagauccucgacggggagaacugcacccugaucgacgcccugcucggcgacccccagugcgacggcuuccagaacaagaagugggaccuguucguggagcgcuccaaggccuacagcaacugcuaccccuacgacgugccggacuacgcgucccugcggagccucgucgccuccagcgggacgcuggaguucaacaacgaguccuucaacuggaccggcgugacccagaacgggaccagcuccgccugcaagcgcggcagcaacaacuccuucuucagccggcugaacuggcucacgcacuccaaguucaaguaccccgcccugaacgugaccaugcccaacaacgaggaguucgacaagcuguacaucuggggcguccaccaccccgggaccgacaacgaccagaucuuccuccacgcgcaggccagcggccgcaucaccguguccacgaagcggagccagcagaccgugaucccgaacaucgggagccgcccccggguccgcaacauccccucccggaucagcaucuacuggaccaucgugaagcccggcgacauccugcugaucaacuccaccgggaaccucaucgccccgcgcggcuacuucaagauccggagcggcaaguccagcaucaugcgcuccgacgcccccaucgggaagugcaacagcgagugcaucacgcccaacggcuccauccccaacgacaagccguuccagaacgugaaccggaucaccuacggggccugcccccgcuacgucaagcagaacacccugaagcuggcgaccggcaugcggaacgugcccgagaagcagacgcgcgggaucuucggcgccaucgccggcuucaucgagaacgggugggagggcaugguggacgggugguacggcuuccggcaccagaacagcgaggggaucggccaggccgccgaccucaaguccacccaggcggccaucgaccagaucaacggcaagcugaaccgccugaucgggaagaccaacgagaaguuccaccagaucgagaaggaguucagcgaggucgagggccggauccaggaccucgagaaguacguggaggacaccaagaucgaccugugguccuacaacgccgagcugcucguggcccuggagaaccagcacacgaucgaccugaccgacagcgagaugaacaagcuguucgagaagaccaagaagcagcuccgcgagaacgccgaggacauggggaacggcugcuucaagaucuaccacaagugcgacaacgcgugcaucggguccauccggaacggcaccuacgaccacgacgucuaccgcgacgaggcccugaacaaccgcuuccagaucaagggcguggagcucaagagcggguacaaggacuggauccuguggaucuccuucgccaucagcugcuuccugcucugcguggcccugcugggcuucaucaugugggccugccagaaggggaacauccggugcaacaucugcaucuga

SEQ ID NO: 71995 - RNA, 1701 nt, Artificial Sequence
  derived and/or modified CDS sequence (opt1) from hemagglutinin__InfluenzaA__AEX33979
augaagaccaucaucgcccugagcuacauccucugccugguguucgcccagaagcugcccggcaacgacaacuccaccgcgacgcucugccuggggcaccacgccgucccgaacggcaccaucgugaagaccaucaccaacgaccagaucgaggugacgaacgccaccgagcugguccagagcuccagcaccggggagaucugcgacagcccccaccagauccucgacggcgagaacugcacccugaucgacgcccugcucggggacccccagugcgacggcuuccagaacaagaagugggaccuguucguggagcgcagcaaggccuacuccaacugcuaccccuacgacgugccggacuacgcgagccugcggucccucgucgccagcuccggcacgcuggaguucaacaacgagagcuucaacuggaccggggugacccagaacggcaccuccagcgccugcauccgccgguccaacaacagcuucuucucccgccugaacuggcucacgcaccugaaguucaaguaccccgcccugaacgugaccaugcccaacaacgagaaguucgacaagcucuacaucuggggcguccaccaccccgggaccgacaacgaccagaucuuccuguacgcgcaggccagcgggcggaucaccguguccacgaagcgcagccagcagaccgugaucccgaacaucggcagccggccccgcguccggaacauccccucccgcaucagcaucuacuggaccaucgugaagcccggcgacauccugcucaucaacuccaccgggaaccugaucgccccgcggggcuacuucaagauccgcagcgggaaguccagcaucaugcgguccgacgcccccaucggcaagugcaacagcgagugcaucacgcccaacggcuccauccccaacgacaagccguuccagaacgugaaccgcaucaccuacggggccugcccccgguacgucaagcagaacacccugaagcucgcgaccggcaugcgcaacgugcccgagaagcagacgcgggggaucuucggcgccaucgccggguucaucgagaacggcugggagggcaugguggacgggugguacggcuuccgccaccagaacagcgaggggaucggccaggccgccgaccugaaguccacccaggcggccaucgaccagaucaacgggaagcugaaccggcucaucggcaagaccaacgagaaguuccaccagaucgagaaggaguucagcgaggucgagggccgcauccaggaccuggagaaguacguggaggacaccaagaucgaccugugguccuacaacgccgagcuccugguggcccuggagaaccagcacacgaucgaccucaccgacagcgagaugaacaagcuguucgagaagaccaagaagcagcugcgggagaacgccgaggacauggggaacggcugcuucaagaucuaccacaagugcgacaacgcgugcaucggguccauccgcaacggcaccuacgaccacgacgucuaccgcgacgaggcccucaacaaccgguuccagaucaacgggguggagcugaaguccggcuacaaggacuggauccuguggaucuccuucgccaucagcugcuuccuccugugcguggcccugcucggcuucaucaugugggccugccagaaggggaacauccgcugcaacaucugcaucuga

SEQ ID NO: 71996 - RNA, 1701 nt, Artificial Sequence
  derived and/or modified CDS sequence (opt1) from hemagglutinin__InfluenzaA__AEX33990
augaagaccaucaucgcccugagcuacauccucuaccugguguucgcccagaagcugcccggcaacgacaacuccaccgcgacgcucugccuggggcaccacgccgucccgaacggcaccaucgugaagaccaucaccaacgaccagaucgaggugacgaacgccaccgagcugguccagagcuccagcaccggggagaucugcgacagcccccaccagauccucgacggcgagaacugcacccugaucgacgcccugcucggggacccccagugcgacggcuuccagaacaagaagugggaccuguucguggagcgcuccaaggccuacuccaacugcuaccccuacgacgugccggacuacgcgagccugcggucccucgucgccagcuccggcacgcuggaguucaacaacgagagcuucaacuggaccggggugacccagaacggcaccuccagcgccugcauccgccgguccaacaacagcuucuucucccgccugaacuggcucacgcaccugaaguucaaguaccccgcccugaacgugaccaugcccaacaacgagaaguucgacaagcucuacaucuggggcguccaccaccccgggaccgacaacgaccagaucuuccuguacgcgcaggccagcgggcggaucaccguguccacgaagcgcagccagcagaccgugaucccgaacaucggcagccggccccgcguccggaacauccccucccgcaucagcaucuacuggaccaucgugaagcccggcgacauccugcucaucaacuccaccgggaaccugaucgccccgcggggcuacuucaagauccagagcgggaaguccagcaucaugcgcuccgacgcccccaucggcaagugcaacagcgagugcaucacgcccaacggcuccauccccaacgacaagccguuccagaacgugaaccggaucaccuacggggccugcccccgcuacgucaagcaggacacccugaagcucgcgaccggcaugcggaacgugcccgagaagcagacgcgcgggaucuucggcgccaucgccggguucaucgagaacggcugggagggcaugguggacgggugguacggcuuccggcaccagaacagcgaggggaucggccaggccgccgaccugaaguccacccaggcggccaucgaccagaucaacgggaagcugaaccgccucaucggcaagaccaacgagaaguuccaccagaucgagaaggaguucagcgaggucgagggccggauccaggaccuggagaaguacguggaggacaccaagaucgaccugugguccuacaacgccgagcuccugguggcccuggagaaccagcacacgaucgaccucaccgacagcgagaugaacaagcuguucgagaagaccaagaagcagcugcgcgagaacgccgaggacauggggaacggcugcuucaagaucuaccacaagugcgacaacgcgugcaucggguccauccggaacggcaccuacgaccacgacgucuaccgcgacgaggcccucaacaaccgcuuccagaucaagagcguggagcugaaguccggguacaaggacuggauccuguggaucagcuucgccaucuccugcuuccuccugugcguggcccugcucggcuucaucaugugggccugccagaagggcaacauccggugcaacaucugcaucuga

SEQ ID NO: 71997 - RNA, 1701 nt, Artificial Sequence
  derived and/or modified CDS sequence (opt1) from hemagglutinin__InfluenzaA__AEX34001
augaagaccaucaucgcccugagcuacauccucugccugguguucgcccagaagcugcccggcaacgacaacuccaccgcgacgcucugccuggggcaccacgccgucccgaacggcaccaucgugaagaccaucaccaacgaccagaucgaggugacgaacgccaccgagcugguccagagcuccagcaccgggggcaucugcgacagcccccaccagauccucgacggggagaacugcacccugaucgacgcccugcucggcgacccccagugcgacggcuuccagaacaagaagugggaccuguucguggagcgcagcaaggccuacuccaacugcuaccccuacgacgugccggacuacgcgagccugcggucccucgucgccagcuccgggacgcuggaguucaacagcgaguccuucaacuggaccggcgugacccagaacgggaccagcuccgccugcaagcgccggagcaacaacuccuucuucagccgccugaacuggcucacgcaccugaaguucaaguaccccgcccugaacgugaccaugcccaacaacgagaaguucgacaagcucuacaucuggggcguccaccaccccgggaccgacaacgaccagaucuuccuguacgcgcaggccuccggccggaucaccgugagcacgaagcgcagccagcagaccgugaucccgaacaucggcucccggccccgcguccggaacauccccagccgcaucuccaucuacuggaccaucgugaagcccggggacauccugcucaucaacagcaccggcaaccugaucgccccgcggggguacuucaagauccgcuccggcaagagcuccaucaugcggagcgacgcccccaucggcaagugcaacuccgagugcaucacgcccaacgggagcauccccaacgacaagccguuccagaacgugaaccgcaucaccuacggcgccugcccccgguacgucaagcagaacacccugaagcucgcgaccgggaugcgcaacgugcccgagaagcagacgcggggcaucuucggggccaucgccggcuucaucgagaacggcugggaggggaugguggacggcugguacggguuccgccaccagaacgccgagggcaucgggcaggccgcggaccugaaguccacccaggccgccaucaaccagaucaacggcaagcugaaccggcucaucggcaagaccaacgagaaguuccaccagaucgagaaggaguucagcgaggucgaggggcgcauccaggaccuggagaaguacguggaggacaccaagaucgaccugugguccuacaacgccgagcuccugguggcccuggagaaccagcacacgaucgaccucaccgacagcgagaugaacaagcuguucgagcggaccaagaagcagcugcgcgagaacgcggaggacaugggcaacgggugcuucaagaucuaccacaagugcgacaacgccugcaucggcuccauccgcaacgggaccuacgaccacgacgucuaccgggacgaggcccucaacaaccgcuuccagaucaagggcguggagcugaaguccggcuacaaggacuggauccuguggaucuccuucgccaucagcugcuuccuccugugcguggcccugcucggguucaucaugugggcgugccagaagggcaacauccggugcaacaucugcaucuga

SEQ ID NO: 71998 - RNA, 1701 nt, Artificial Sequence
  derived and/or modified CDS sequence (opt1) from hemagglutinin__InfluenzaA__AEX34012
augaagaccaucaucgcccugagcuacauccucuaccugguguucgcccagaagcugcccggcaacgacaacuccaccgcgacgcucugccuggggcaccacgccgucccgaacggcaccaucgugaagaccaucaccaacgaccagaucgaggugacgaacgccaccgagcugguccagagcuccagcaccggggagaucugcgacagcccccaccagauccucgacggcgagaacugcacccugaucgacgcccugcucggggacccccagugcgacggcuuccagaacaagaagugggaccuguucguggagcgcagcaaggccuacuccaacugcuaccccuacgacgugccggacuacgcgagccugcggucccucgucgccagcuccggcacgcuggaguucaacaacgagagcuucaacuggaccggggugacccagaacggcaccuccagcgccugcauccgccgguccaacaacagcuucuucucccgccugaacuggcucacgcaccugaaguucaaguaccccgcccugaacgugaccaugcccaacaacgagaaguucgacaagcucuacaucuggggcguccaccaccccgggaccgacaacgaccagaucuuccuguacgcgcaggccagcgggcggaucaccguguccacgaagcgcagccagcagaccgugaucccgaacaucggcagccggccccgcguccggaacauccccucccgcaucagcaucuacuggaccaucgugaagcccggcgacauccugcucaucaacuccaccgggaaccugaucgccccgcggggcuacuucaagauccagagcgggaaguccagcaucaugcgcuccgacgcccccaucggcaagugcaacagcgagugcaucacgcccaacggcuccauccccaacgacaagccguuccagaacgugaaccggaucaccuacggggccugcccccgcuacgucaagcagaacacccugaagcucgcgaccggcaugcggaacgugcccgagaagcagacgcgcgggaucuucggcgccaucgccggguucaucgagaacggcugggagggcaugguggacgggugguacggcuuccggcaccagaacagcgaggggaucggccaggccgccgaccugaaguccacccaggcggccaucgaccagaucaacgggaagcugaaccgccucaucggcaagaccaacgagaaguuccaccagaucgagaaggaguucagcgaggucgagggccggauccaggaccuggagaaguacguggaggacaccaagaucgaccugugguccuacaacgccgagcuccugguggcccuggagaaccagcacacgaucgaccucaccgacagcgagaugaacaagcuguucgagaagaccaagaagcagcugcgcgagaacgccgaggacauggggaacggcugcuucaagaucuaccacaagugcgacaacgcgugcaucggguccauccggaacggcaccuacgaccacgacgucuaccgcgacgaggcccucaacaaccgcuuccagaucaaggggguggagcugaaguccggcuacaaggacuggauccuguggaucuccuucgccaucagcugcuuccuccugugcguggcccugcucggcuucaucaugugggccugccagaaggggaacauccggugcaacaucugcaucuga

SEQ ID NO: 71999 - RNA, 1701 nt, Artificial Sequence; identical to SEQ ID NO: 66458
  derived and/or modified CDS sequence (opt1) from hemagglutinin__InfluenzaA__AEX34023

SEQ ID NO: 72000 - RNA, 1701 nt, Artificial Sequence
  derived and/or modified CDS sequence (opt1) from hemagglutinin__InfluenzaA__AEX34044
augaagaccaucaucgccuucagcuacauccugugccucguguucgcccagaagcugcccggcaucgacaacuccaccgcgacgcugugccucgggcaccacgccgucccgaacggcaccaucgugaagaccaucaccaacgaccagaucgaggugacgaacgccaccgagcugguccagagcuccagcaccgggggcaucugcgacagcccccaccagauccuggacggggagaacugcacccucaucgacgcccugcugggcgacccccagugcgacggcuuccagaacaagaagugggaccucuucguggagcgcagcaaggccuacuccaacugcuaccccuacgacgugccggacuacgcgagccugcggucccuggucgccagcuccgggacgcucgaguucaacaacgagagcuucaacuggaccggcgugacccagaacgggaccuccagcgccugcaagcgcggcuccaacaacagcuucuucucccggcugaacuggcugacgcacagcaaguucaaguaccccgcccucaacgugaccaugcccaacaacgaggaguucgacaagcuguacaucuggggcguccaccaccccgggaccgacaacgaccagaucuuccuguacgcgcaggccuccggccgcaucaccgugagcacgaagcggagccagcagaccgugaucccgaacaucgggucccgcccccggguccgcaacauccccagccggaucuccaucuacuggaccaucgugaagcccggcgacauccuccugaucaacagcaccgggaaccugaucgccccgcgcggcuacuucaagauccgguccggcaagagcuccaucaugcgcagcgacgcccccaucgggaagugcaacuccgagugcaucacgcccaacggcagcauccccaacgacaagccguuccagaacgugaaccggaucaccuacggggccugcccccgcuacgucaagcagaacacccucaagcuggcgaccggcaugcggaacgugcccgagaagcagacgcgcgggaucuucggcgccaucgccggcuucaucgagaacgggugggagggcaugguggacgggugguacggcuuccggcaccagaacuccgaggggaucggccaggccgccgaccugaaguccacccaggcggccaucgaccagaucaacggcaagcucaaccgccugaucgggaagaccaacgagaaguuccaccagaucgagaaggaguucuccgaggucgagggccggauccaggaccuggagaaguacguggaggacaccaagaucgaccucuggagcuacaacgccgagcugcugguggcccucgagaaccagcacacgaucgaccugaccgacuccgagaugaacaagcuguucgagaagaccaagaagcagcuccgcgagaacgccgaggacauggggaacggcugcuucaagaucuaccacaagugcgacaacgcgugcaucgggagcauccggaacggcaccuacgaccacgacgucuaccgcgacgaggcccugaacaaccgcuuccagaucaagggcguggagcugaaguccggguacaaggacuggauccucuggaucagcuucgccaucuccugcuuccugcugugcguggcccuccugggcuucaucaugugggccugccagaaggggaacauccggugcaacaucugcaucuga

SEQ ID NO: 72001 - RNA, 1701 nt, Artificial Sequence
  derived and/or modified CDS sequence (opt1) from hemagglutinin__InfluenzaA__AEX34089
augaagaccaucaucgcccugagcuacauccucugccugguguucgcccagaagcugcccggcaucgacaacuccaccgcgacgcucugccuggggcaccacgccgucccgaacggcaccaucgugaagaccaucaccaacgaccagaucgaggugacgaacgccaccgagcugguccagaacagcuccaccgggggcaucugcgacagcccccaccagauccucgacggggagaacugcacccugaucgacgcccugcucggcgacccccagugcgacggcuuccagaacaagaagugggaccuguucguggagcgcuccaaggccuacagcaacugcuaccccuacgacgugccggacuacgcgucccugcggagccucgucgccuccagcgggacgcuggaguucaacaacgaguccuucaacuggaccggcgugacccagaacgggaccagcuccgccugcaagcgcggcagcuccaacagcuucuucucccggcugaacuggcucacgcacagcaaguucaaguaccccgcccugaacgugaccaugcccaacaacgaggaguucgacaagcuguacaucuggggcguccaccaccccgggaccgacaacgaccagaucuuccucuacgcgcaggccuccggccgcaucaccgugagcacgaagcggagccagcagaccgugaucccgaacaucgggucccgcccccggguccgcaacauccccagccggaucuccaucuacuggaccaucgugaagcccggcgacauccugcugaucaacagcaccgggaaccucaucgccccgcgcggcuacuucaagauccgguccggcaagagcuccaucaugcgcagcgacgcccccaucgggaagugcaacuccgagugcaucacgcccaacggcagcauccccaacgacaagccguuccagaacgugaaccggaucaccuacggggccugcccccgcuacgucaagcagaacacccugaagcuggcgaccggcaugcggaacgugcccgagaagcagacgcgcgggaucuucggcgccaucgccggcuucaucgagaacgggugggagggcaugguggacgggugguacggcuuccggcaccagaacuccgaggggaucggccaggccgccgaccucaagagcacccaggcggccaucgaccagaucaacggcaagcugaaccgccugaucgggaagaccaacgagaaguuccaccagaucgagaaggaguucuccgaggucgagggccggauccaggaccucgagaaguacguggaggacaccaagaucgaccuguggagcuacaacgccgagcugcucguggcccuggagaaccagcacacgaucgaccugaccgacuccgagaugaacaagcuguucgagaagaccaagaagcagcuccgcgagaacgccgaggacauggggaacggcugcuucaagaucuaccacaagugcgacaacgcgugcaucgggagcauccggaacggcaccuacgaccacgacgucuaccgcgacgaggcccugaacaaccgcuuccagaucaagggcguggagcucaaguccggguacaaggacuggauccuguggaucagcuucgccaucuccugcuuccugcucugcguggcccugcugggcuucaucaugugggccugccagaaggggaacauccggugcaacaucugcaucuga

SEQ ID NO: 72002 - RNA, 1701 nt, Artificial Sequence
  derived and/or modified CDS sequence (opt1) from hemagglutinin__InfluenzaA__AEX34123
augaagaccaucaucgcccugagcuacauccucugccugguguucgcccagaagcugcccggcaucgacaacuccaccgcgacgcucugccuggggcaccacgccgucccgaacggcaccaucgugaagaccaucaccaacgaccagaucgaggugacgaacgccaccgagcugguccagaacagcuccaccgggggcaucugcgacagcccccaccagauccucgacggggagaacugcacccugaucgacgcccugcucggcgacccccagugcgacggcuuccagaacaagaagugggaccuguucguggagcgcuccaaggccuacagcaacugcuaccccuacgacgugccggacuacgcgucccugcggagccucgucgccuccagcgggacgcuggaguucaacaacgaguccuucaacuggaccggcgugacccagaacgggaccagcuccgccugcaagcgcggcagcaacaacuccuucuucagccggcugaacuggcucacgcacuccaaguucaaguaccccgcccugaacgugaccaugcccaacaacgaggaguucgacaagcuguacaucuggggcguccaccaccccgggaccgacaacgaccagaucuuccucuacgcgcaggccagcggccgcaucaccguguccacgaagcggagccagcagaccgugaucccgaacaucgggagccgcccccggguccgcaacauccccucccggaucagcaucuacuggaccaucgugaagcccggcgacauccugcugaucaacuccaccgggaaccucaucgccccgcgcggcuacuucaagauccggagcggcaaguccagcaucaugcgcuccgacgcccccaucgggaagugcaacagcgagugcaucacgcccaacggcuccauccccaacgacaagccguuccagaacgugaaccggaucaccuacggggccugcccccgcuacgucaagcagaacacccugaagcuggcgaccggcaugcggaacgugcccgagaagcagacgcgcgggaucuucggcgccaucgccggcuucaucgagaacgggugggagggcaugguggacgggugguacggcuuccggcaccagaacagcgaggggaucggccaggccgccgaccucaaguccacccaggcggccaucgaccagaucaacggcaagcugaaccgccugaucgggaagaccaacgagaaguuccaccagaucgagaaggaguucagcgaggucgagggccggauccaggaccucgagaaguacguggaggacaccaagaucgaccugugguccuacaacgccgagcugcucguggcccuggagaaccagcacacgaucgaccugaccgacagcgagaugaacaagcuguucgagaagaccaagaagcagcuccgcgagaacgccgaggacauggggaacggcugcuucaagaucuaccacaagugcgacaacgcgugcaucggguccauccggaacggcaccuacgaccacgacgucuaccgcgacgaggcccugaacaaccgcuuccagaucaagggcguggagcucaagagcggguacaaggacuggauccuguggaucuccuucgccaucagcugcuuccugcucugcguggcccugcugggcuucaucaugugggccugccagaaggggaacauccggugcaacaucugcaucuga

SEQ ID NO: 72003 - RNA, 1701 nt, Artificial Sequence
  derived and/or modified CDS sequence (opt1) from hemagglutinin__InfluenzaA__AEX34134
augaagaccaucaucgcccugagcuacauccucugccugguguucgcccagaagcugcccggcaacgacaacuccauggcgacccucugccuggggcaccacgccgucccgaacggcacgaucgugaagaccaucaccaacgaccagaucgaggugaccaacgccacggagcugguccagagcuccagcaccggggagaucugcgacagcccccaccagauccucgacggcgagaacugcacccugaucgacgcccugcucggggacccccagugcgacggcuuccagaacaagaagugggaccuguucguggagcgcagcaaggccuacuccaacugcuaccccuacgacgugccggacuacgcgagccugcggucccucgucgccagcuccggcacccuggaguucaacaacgagagcuucaacuggacgggggugacccagaacggcaccuccagcgccugcauccgccgguccaacaacagcuucuucucccgccugaacuggcucacccaccugaaguucaaguaccccgcccugaacgugacgaugcccaacaacgagaaguucgacaagcucuacaucuggggcguccaccaccccgggaccgacaacgaccagaucuuccuguacgcgcaggccagcgggcggaucaccguguccaccaagcgcagccagcagacggugaucccgaacaucggcagccggccccgcguccggaacauccccucccgcaucagcaucuacuggaccaucgugaagcccggcgacauccugcucaucaacuccaccgggaaccugaucgccccgcggggcuacuucaagauccgcagcgggaaguccagcaucaugcgguccgacgcccccaucggcaagugcaacagcgagugcaucacccccaacggcuccauccccaacgacaagccguuccagaacgugaaccgcaucacguacggggccugcccccgguacgucaagcagaacacccugaagcucgcgaccggcaugcgcaacgugcccgagaagcagacccgggggaucuucggcgccaucgccggguucaucgagaacggcugggagggcaugguggacgggugguacggcuuccgccaccagaacagcgaggggaucggccaggccgccgaccugaaguccacgcaggcggccaucgaccagaucaacgggaagcugaaccggcucaucggcaagaccaacgagaaguuccaccagaucgagaaggaguucagcgaggucgagggccgcauccaggaccuggagaaguacguggaggacaccaagaucgaccugugguccuacaacgccgagcuccugguggcccuggagaaccagcacaccaucgaccucacggacagcgagaugaacaagcuguucgagaagaccaagaagcagcugcgggagaacgccgaggacauggggaacggcugcuucaagaucuaccacaagugcgacaacgcgugcaucggguccauccgcaacggcaccuacgaccacgacgucuaccgcgacgaggcccucaacaaccgguuccagaucaaggggguggagcugaaguccggcuacaaggacuggauccuguggaucuccuucgccaucagcugcuuccuccugugcguggcccugcucggcuucaucaugugggccugccagaaggggaacauccgcugcaacaucugcaucuga

SEQ ID NO: 72004 - RNA, 1701 nt, Artificial Sequence; identical to SEQ ID NO: 72002
  derived and/or modified CDS sequence (opt1) from hemagglutinin__InfluenzaA__AEX34145

SEQ ID NO: 72005 - RNA, 1701 nt, Artificial Sequence
  derived and/or modified CDS sequence (opt1) from hemagglutinin__InfluenzaA__AEX34156
augaagaccaucaucgcccugagcuacauccucugccugguguucgcccagaagcugcccggcaacgacaacuccaccgcgacgcucugccuggggcaccacgccgucccgaacggcaccaucgugaagaccaucaccaacgaccagaucgaggugacgaacgccaccgagcugguccagagcuccagcaccggggagaucugcggcagcccccaccagauccucgacggggagaacugcacccugaucgacgcccugcucggcgacccccagugcgacggcuuccagaacaagaagugggaccuguucguggagcgcagcaaggccuacuccaacugcuaccccuacgacgugccggacuacgcgagccugcggucccucgucgccagcuccgggacgcuggaguucaacaacgagagcuucaacuggaccggcgugacccagaacgggaccuccagcgccugcauccgccgguccaacaacagcuucuucucccgccugaacuggcucacgcaccugaaguucaaguaccccgcccugaacgugaccaugcccaacaacgagaaguucgacaagcucuacaucuggggcguccaccaccccgggaccgacaacgaccagaucuuccuguacgcgcaggccagcggccggaucaccguguccacgaagcgcagccagcagaccgugaucccgaacaucggcagccggccccgcguccggaacauccccucccgcaucagcaucuacuggaccaucgugaagcccggggacauccugcucaucaacuccaccggcaaccugaucgccccgcggggguacuucaagauccgcagcggcaaguccagcaucaugcgguccgacgcccccaucggcaagugcaacagcgagugcaucacgcccaacggguccauccccaacgacaagccguuccagaacgugaaccgcaucaccuacggcgccugcccccgguacgucaagcagaacacccugaagcucgcgaccgggaugcgcaacgugcccgagaagcagacgcggggcaucuucggggccaucgccggcuucaucgagaacggcugggaggggaugguggacggcugguacggguuccgccaccagaacagcgagggcaccgggcaggccgccgaccugaaguccacccaggcggccaucgaccagaucaacggcaagcugaaccggcucaucggcaagaccaacgagaaguuccaccagaucgagaaggaguucagcgaggucgaggggcgcauccaggaccuggagaaguacguggaggacacgaagaucgaccugugguccuacaacgccgagcuccugguggcccuggagaaccagcacaccaucgaccucaccgacagcgagaugaacaagcuguucgagaagaccaagaagcagcugcgggagaacgccgaggacaugggcaacgggugcuucaagaucuaccacaagugcgacaacgcgugcaucggcuccauccgcaacgggacguacgaccacgacgucuaccgcgacgaggcccucaacaaccgguuccagaucaagggcguggagcugaaguccggcuacaaggacuggauccuguggaucuccuucgccaucagcugcuuccuccugugcgugguccugcucggguucaucaugugggccugccagaagggcaacauccgcugcaacaucugcaucuga

SEQ ID NO: 72006 - RNA, 1701 nt, Artificial Sequence; identical to SEQ ID NO: 65952
  derived and/or modified CDS sequence (opt1) from hemagglutinin__InfluenzaA__AEX34178

SEQ ID NO: 72007 - RNA, 1701 nt, Artificial Sequence
  derived and/or modified CDS sequence (opt1) from hemagglutinin__InfluenzaA__AEX34188
augaagaccaucaucgcccugagcuacauccucugccugguguucgcccagaaguuccccggcaacgacaacuccaccgcgacgcugugccucgggcaccacgccgucccgaacggcaccaucgugaagaccaucaccaacgaccagaucgaggugacgaacgccaccgagcugguccagagcuccagcaccggggagaucugcgacagcccccaccagauccuggacggcgagaacugcacccucaucgacgcccugcugggggacccccagugcgacggcuuccagaacaagaacugggaccucuucguggagcgcuccaaggccuacuccaacugcuaccccuacgacgugccggacuacgcgagccugcggucccuggucgccagcuccggcacgcucgaguucaacaacgagagcuucaacuggaccggggugacccagaacggcaccuccagcgccugcauccgccgguccaacaacagcuucuucucccgccugaacuggcugacgcaccucaaguucaaguaccccgcccugaacgugaccaugcccaacaacgagaacuucgacaagcuguacaucuggggcguccaccaccccgggaccgacaacgaccagaucuuccucuacgcgcaggccagcgggcggaucaccguguccacgaagcgcagccagcagaccgugaucccgaacaucggcagccggccccgcguccggaacauccccucccgcaucagcaucuacuggaccaucgugaagcccggcgacauccugcugaucaacuccaccgggaaccucaucgccccgcggggcuacuucaagauccgcagcgggaaguccagcaucaugcgguccgacgcccccaucggcaagugcaacagcgagugcaucacgcccaacggcuccauccccaacgacaagccguuccagaacgugaaccgcaucaccuacggggccugcccccgguacgucaagcagaacacccugaagcuggcgaccggcaugcgcaacgugcccgagaagcagacgcgggggaucuucggcgccaucgccggguucaucgagaacggcugggagggcaugguggacgggugguacggcuuccgccaccagaacagcgaggggaucggccaggccgccgaccucaaguccacccaggcggccaucgaccagaucaacgggaagcugaaccggcugaucggcaagaccaacgagaaguuccaccagaucgagaaggaguucagcgaggucgagggccgcauccaggaccucgagaaguacguggaggacaccaagaucgaccugugguccuacaacgccgagcugcucguggcccuggagaaccagcacacgaucgaccugaccgacagcgagaugaacaagcuguucgagaagaccaagaagcagcuccgggagaacgccgaggacauggggaacggcugcuucaagaucuaccacaagugcgacaacgcgugcaucggguccauccgcaacggcaccuacgaccacgacgucuaccgcgacgaggcccugaacaaccgguuccagaucaaggggguggagcucaagagcggcuacaaggacuggauccuguggaucuccuucgccaucagcugcuuccugcucugcaucgcccugcugggcuucaucaugugggccugccagaaggggaacauccgcugcaacaucugcaucuga

SEQ ID NO: 72008 - RNA, 1701 nt, Artificial Sequence; identical to SEQ ID NO: 66458
  derived and/or modified CDS sequence (opt1) from hemagglutinin__InfluenzaA__AEX34199

SEQ ID NO: 72009 - RNA, 1701 nt, Artificial Sequence
  derived and/or modified CDS sequence (opt1) from hemagglutinin__InfluenzaA__AEX34221
augaagaccaucaucgcccugagcuacauccucugccugguguucgcccagaagcugcccggcaucgacaacuccaccgcgacgcucugccuggggcaccacgccgucccgaacggcaccaucgugaagaccaucaccaacgaccagaucgaggugacgaacgccaccgagcugguccagagcuccagcaccgggggcaucugcgacagcccccaccagauccucgacggggagaacugcacccugaucgacgcccugcucggcgacccccagugcgacggcuuccagaacaagaagugggaccuguucguggagcgcuccaaggccuacuccaacugcuaccccuacgacgugccggacuacgcgagccugcggucccucgucgccagcuccgggacgcuggaguucaacaacgagagcuucaacuggaccggcgugacccagaacgggaccuccagcgccugcaagcgcggcuccaacaacagcuucuucucccggcugaacuggcucacgcacagcaaguucaaguaccccgcccugaacgugaccaugcccaacaacgaggaguucgacaagcuguacaucuggggcguccaccaccccgggaccgacaacgaccagaucuuccucuacgcgcaggccuccggccgcaucaccgugagcacgaagcggagccagcagaccgugaucccgaacaucgggucccgcccccggguccgcaacauccccagccggaucuccaucuacuggaccaucgugaagcccggcgacauccugcugaucaacagcaccgggaaccucaucgccccgcgcggcuacuucaagauccgguccggcaagagcuccaucaugcgcagcgacgcccccaucgggaagugcgacuccgagugcaucacgcccaacggcagcauccccaacgacaagccguuccagaacgugaaccggaucaccuacggggccugcccccgcuacgucaagcagaacacccugaagcuggcgaccggcaugcggaacgugcccgagaagcagacgcgcgggaucuucggcgccaucgccggcuucaucgagaacgggugggagggcaugguggacgggugguacggcuuccggcaccagaacuccgaggggaucggccaggccgccgaccucaagagcacccaggcggccaucgaccagaucaacggcaagcugaaccgccugaucgggaagaccaacgagaaguuccaccagaucgagaaggaguucuccgaggucgagggccggauccaggaccucgagaaguacguggaggacaccaagaucgaccuguggagcuacaacgccgagcugcucguggcccuggagaaccagcacacgaucgaccugaccgacuccgagaugaacaagcuguucgagaagaccaagaagcagcuccgcgagaacgccgaggacauggggaacggcugcuucaagaucuaccacaagugcgacaacgcgugcaucgggagcauccggaacggcaccuacgaccacgacgucuaccgcgacgaggcccugaacaaccgcuuccagaucaagggcguggagcucaaguccggguacaaggacuggauccuguggaucagcuucgccaucuccugcuuccugcucugcguggcccugcugggcuucaucaugugggccugccagaaggggaacauccggugcaacaucugcaucuga

SEQ ID NO: 72010 - RNA, 1701 nt, Artificial Sequence; identical to SEQ ID NO: 65952
  derived and/or modified CDS sequence (opt1) from hemagglutinin__InfluenzaA__AEX34243

SEQ ID NO: 72011 - RNA, 1701 nt, Artificial Sequence; identical to SEQ ID NO: 72007
  derived and/or modified CDS sequence (opt1) from hemagglutinin__InfluenzaA__AEX34254

SEQ ID NO: 72012 - RNA, 1701 nt, Artificial Sequence; identical to SEQ ID NO: 65952
  derived and/or modified CDS sequence (opt1) from hemagglutinin__InfluenzaA__AEX34265

SEQ ID NO: 72013 - RNA, 1701 nt, Artificial Sequence
  derived and/or modified CDS sequence (opt1) from hemagglutinin__InfluenzaA__AEX34275
augaagaccaucaucgcccugagcuacauccucugccugguguucgcccagaagcugcccggcaucgacaacuccaccgcgacgcucugccuggggcaccacgccgucccgaacggcaccaucgugaagaccaucaccaacgaccagaucgaggugacgaacgccaccgagcugguccagaacagcuccaccgggggcaucugcgacagcccccaccagauccucgacggggagaacugcacccugaucgacgcccugcucggcgacccccagugcgacggcuuccagaacaagaagugggaccuguucguggagcgcuccaaggccuacagcaacugcuaccccuacgacgugccggacuacgcgucccugcggagccucgucgccuccagcgggacgcuggaguucaacaacgaguccuucaacuggaccggcgugacccagaacgggaccagcuccgccugcaagcgcggcagcaacaacuccuucuucagccggcugaacuggcucacgcacuccaaguucaaguaccccgcccugaacgugaccaugcccaacaacgaggaguucgacaagcuguacaucuggggcguccuccaccccgggaccgacaacgaccagaucuuccuguacgcgcaggccagcggccgcaucaccguguccacgaagcggagccagcagaccgugaucccgaacaucgggagccgcccccggguccgcaacauccccucccggaucagcaucuacuggaccaucgugaagcccggcgacauccugcucaucaacuccaccgggaaccugaucgccccgcgcggcuacuucaagauccggagcggcaaguccagcaucaugcgcuccgacgcccccaucgggaagugcaacagcgagugcaucacgcccaacggcuccauccccaacgacaagccguuccagaacgugaaccggaucaccuacggggccugcccccgcuacgucaagcagaacacccugaagcucgcgaccggcaugcggaacgugcccgagaagcagacgcgcgggaucuucggcgccaucgccggcuucaucgagaacgggugggagggcaugguggacgggugguacggcuuccggcaccagaacagcgaggggaucggccaggccgccgaccugaaguccacccaggcggccaucgaccagaucaacggcaagcugaaccgccucaucgggaagaccaacgagaaguuccaccagaucgagaaggaguucagcgaggucgagggccggauccaggaccuggagaaguacguggaggacaccaagaucgaccugugguccuacaacgccgagcuccugguggcccuggagaaccagcacacgaucgaccucaccgacagcgagaugaacaagcuguucgagaagaccaagaagcagcugcgcgagaacgccgaggacauggggaacggcugcuucaagaucuaccacaagugcgacaacgcgugcaucggguccauccggaacggcaccuacgaccacuacgucuaccgcgacgaggcccucaacaaccgcuuccagaucaagggcguggagcucaagagcggguacaaggacuggauccuguggaucuccuucgccaucagcugcuuccugcugugcguggcccugcucggcuucaucaugugggccugccagaaggggaacauccggugcaacaucugcaucuga

SEQ ID NO: 72014 - RNA, 1698 nt, Artificial Sequence; identical to SEQ ID NO: 66512
  derived and/or modified CDS sequence (opt1) from hemagglutinin__InfluenzaA__AEX34318

SEQ ID NO: 72015 - RNA, 1698 nt, Artificial Sequence
  derived and/or modified CDS sequence (opt1) from hemagglutinin__InfluenzaA__AEX34329
augaaggugaagcugcucguccugcugugcaccuucaccgccacguacgccgacaccaucugcaucggcuaccacgcgaacaacagcaccgacaccguggacacggugcucgagaagaacgucaccgugacccacuccgugaaccugcuggagaacagccacaacgggaagcucugccugcugaagggcaucgcgccccuccagcuggggaacugcuccgucgccggcuggauccuggggaacccggagugcgagcuccuggugagcaaggaguccuggagcuacaucguggagaagcccaaccccgagaacgggaccugcuaccccggccacuucgccgacuacgaggagcugcgcgagcagcucuccagcgucuccagcuucgagcgguucgagaucuucccgaaggaguccagcuggcccaaccacacggugaccgggguguccgccagcugcucccacaacggcgagagcuccuucuaccgcaaccugcuguggcucaccgggaagaacggccuguaccccaaccugagcaaguccuacgccaacaacaaggagaaggagguccucgugcuguggggcgugcaccacccgcccaacaucggcgaccagaaggcccuguaccacaccgagaacgccuacgucagcguggugagcucccacuacagccggaaguucacgcccgagaucgccaagcgccccaagguccgggaccaggagggccgcaucaacuacuacuggacccuccuggagcccggggacaccaucaucuucgaggcgaacggcaaccugaucgccccgcgguacgccuucgcccucucccgcggguucggcagcggcaucaucaacuccaacgcccccauggacaagugcgacgcgaagugccagacgccccagggggccaucaacagcucccugcccuuccagaacgugcacccggugaccaucggcgagugccccaaguacguccggagcgccaagcugcgcauggugaccgggcuccggaacauccccuccauccagagccgcggccuguucggggccaucgccggcuucaucgagggcggguggaccggcaugguggacgggugguacggcuaccaccaccagaacgagcagggguccggcuacgcggccgaccagaaguccacccagaacgccaucaacggcaucacgaacaaggucaacagcgugaucgagaagaugaacacccaguucaccgccgucgggaaggaguucaacaagcuggagcggcgcauggagaaccucaacaagaagguggacgacggcuucaucgacaucuggaccuacaacgccgagcugcuggugcuccuggagaacgagcggacgcuggacuuccacgacagcaacgucaagaaccucuacgagaaggugaagucccagcugaagaacaacgcgaaggagaucgggaacggcugcuucgaguucuaccacaagugcaacgacgagugcauggagagcgugaagaacgggaccuacgacuaccccaaguacuccgaggagagcaagcugaaccgcgagaagaucgagggcgucaagcucgaguccaugggcguguaccagauccuggccaucuacagcaccguggccagcucccugguccuccuggugagccugggggccaucuccuucuggaugugcagcaacggcucccuccagugccggaucugcaucuga

SEQ ID NO: 72016 - RNA, 1701 nt, Artificial Sequence
  derived and/or modified CDS sequence (opt1) from hemagglutinin__InfluenzaA__AEX34352
augaagaccaucaucgcccugagcuacauccucugccugguguucgcccagaagcugcccggcaacgacaacuccaccgcgacgcucugccuggggcaccacgccgucccgaacggcaccaucgugaagaccaucaccaacgaccagaucgaggugacgaacgccaccgagcugguccagagcuccagcaccggggagaucugcgacagcccccaccagauccucgacggcgagaacugcacccugaucgacgcccugcucggggacccccagugcgacggcuuccagaacaagaagugggaccuguucguggagcgcagcaaggccuacuccaacugcuaccccuacgacgugccggacuacgcgagccugcggucccucgucgccagcuccggcacgcuggaguucaacaacgagagcuucaacuggaccggggugacccagaacggcaccuccagcgccugcauccgccgguccaacaacagcuucuucucccgccugaacuggcucacgcaccugaaguucaaguaccccgcccugaacgugaccaugcccaacaacgagaaguucgacaagcucuacaucuggggcguccaccaccccgggaccgacaacgaccagaucuuccuguacgcgcaggccagcgggcggaucaccguguccacgaagcgcagccagcagaccgugaucccgaacaucggcagccggccccgcguccggaacauccccucccgcaucagcaucuacuggaccaucgugaagcccggcgacauccugcucaucaacuccaccgggaaccugaucgccccgcggggcuacuucaagauccgcagcgggaaguccagcaucaugcgguccgacgcccccaucggcaagugcaacagcgagugcaucacgcccaacggcuccauccugaacgacaagcccuuccagaacgugaaccgcaucaccuacggggccugcccgcgguacgucaagcagaacacccucaagcuggcgaccggcaugcgcaacgugcccgagaagcagacgcgggggaucuucggcgccaucgccggguucaucgagaacggcugggagggcaugguggacgggugguacggcuuccgccaccagaacagcgaggggaucggccaggccgccgaccugaaguccacccaggcggccaucgaccagaucaacgggaagcucaaccggcugaucggcaagaccaacgagaaguuccaccagaucgagaaggaguucagcgaggucgagggccgcauccaggaccuggagaaguacguggaggacaccaagaucgaccucugguccuacaacgccgagcugcugguggcccucgagaaccagcacacgaucgaccugaccgacagcgagaugaacaagcuguucgagaagaccaagaagcagcuccgggagaacgccgaggacauggggaacggcugcuucaagaucuaccacaagugcgacaacgcgugcaucggguccauccgcaacggcaccuacgaccacgacgucuaccgcgacgaggcccugaacaaccgguuccagaucaaggggguggagcugaaguccggcuacaaggacuggauccucuggaucuccuucgccaucagcugcuuccugcugugcguggcccuccugggcuucaucaugugggccugccagaaggggaacauccgcugcaacaucugcaucuga

SEQ ID NO: 72017 - RNA, 1701 nt, Artificial Sequence; identical to SEQ ID NO: 66458
  derived and/or modified CDS sequence (opt1) from hemagglutinin__InfluenzaA__AEX34364

SEQ ID NO: 72018 - RNA, 1701 nt, Artificial Sequence; identical to SEQ ID NO: 66458
  derived and/or modified CDS sequence (opt1) from hemagglutinin__InfluenzaA__AEX34375

SEQ ID NO: 72019 - RNA, 1701 nt, Artificial Sequence
  derived and/or modified CDS sequence (opt1) from hemagglutinin__InfluenzaA__AEX34386
augaagaccaucaucgcccugagcuacauccucugccugguguucgcccagaagcugcccggcaacgacaacuccaccgcgacgcucugccuggggcaccacgccgucccgaacggcaccaucgugaagaccaucaccaacgaccagaucgaggugacgaacgccaccgagcugguccagagcuccagcaccggggagaucugcgacagcccccaccagauccucgacggcgagaacugcacccugaucgacgcccugcucggggacccccagugcgacggcuuccagaacaagaagugggaccuguucaucgagcgcagcaaggccuacuccaacugcuaccccuacgacgugccggacuacgcgagccugcggucccucguggccagcuccggcacgcuggaguucaacaacgagagcuucaacuggaccggggucacccagaacggcaccuccagcgccugcauccgccgguccaacaacagcuucuucucccgccugaacuggcucacgcaccugaaguucaaguaccccgcccugaacgugaccaugcccaacaacgagcaguucgacaagcucuacaucuggggcgugcaccaccccgggaccgacaacgaccagaucuuccuguacgcgcaggccagcgggcggaucaccgucuccacgaagcgcagccagcagaccgugaucccgaacaucggcagccggccccgcgugcggaacauccccucccgcaucagcaucuacuggaccaucgucaagcccggcgacauccugcucaucaacuccaccgggaaccugaucgccccgcggggcuacuucaagauccgcagcgggaaguccagcaucaugcgguccgacgcccccaucggcaagugcaacagcgagugcaucacgcccaacggcuccauccccaacgacaagccguuccagaacgugaaccgcaucaccuacggggccugcccccgguacgugaagcagaacacccugaagcucgcgaccggcaugcgcaacguccccgagaagcagacgcgggggaucuucggcgccaucgccggguucaucgagaacggcugggagggcaugguggacgggugguacggcuuccgccaccagaacagcgaggggcggggccaggccgccgaccugaaguccacccaggcggccaucgaccagaucaacgggaagcugaaccgccucaucggcaagaccaacgagaaguuccaccagaucgagaaggaguucagcgagguggagggccggauccaggaccuggagaaguacgucgaggacaccaagaucgaccugugguccuacaacgccgagcuccugguggcccuggagaaccagcacacgaucgaccucaccgacagcgagaugaacaagcuguucgagaagaccaagaagcagcugcgcgagaacgccgaggacauggggaacggcugcuucaagaucuaccacaagugcgacaacgcgugcaucggguccauccgcaacggcaccuacgaccacgacguguaccgggacgaggcccucaacaaccgcuuccagaucaagggggucgagcugaaguccggcuacaaggacuggauccuguggaucuccuucgccaucagcugcuuccuccugugcguggcccugcucggcuucaucaugugggccugccagaaggggaacauccggugcaacaucugcaucuga

SEQ ID NO: 72020 - RNA, 1701 nt, Artificial Sequence
  derived and/or modified CDS sequence (opt1) from hemagglutinin__InfluenzaA__AEX34407
augaagaccaucaucgcccugagcuacauccucugccugguguucgcccagaagcugcccggcaacgacaacuccauggcgacccucugccuggggcaccacgccgucccgaacggcacgaucgugaagaccaucaccaacgaccagaucgaggugaccaacgccacggagcugguccagagcuccagcaccggggagaucugcgacagcccccaccagauccucgacggcgagaacugcacccugaucgacgcccugcucggggacccccagugcgacggcuuccagaacaagaagugggaccuguucguggagcgcagcaaggccuacuccaacugcuaccccuacgacgugccggacuacgcgagccugcggucccucgucgccagcuccggcacccuggaguucaacaacgagagcuucaacuggacgggggugacccagaacggcaccuccagcgccugcauccgccgguccaacaacagcuucuucucccgccugaacuggcucacccaccugaaguucaaguaccccgcccugaacgugacgaugcccaacaacgagcaguucgacaagcucuacaucuggggcguccaccaccccgggaccgacaacgaccagaucuuccuguacgcgcaggccagcgggcggaucaccguguccaccaagcgcagccagcagacggugaucccgaacaucggcagccggccccgcguccggaacauccccucccgcaucagcaucuacuggaccaucgugaagcccggcgacauccugcucaucaacuccaccgggaaccugaucgccccgcggggcuacuucaagauccugagcgggaaguccagcaucaugcgcuccgacgcccccaucggcaagugcaacagcgagugcaucacccccaacggcuccauccccaacgacaagccguuccagaacgugaaccggaucacguacggggccugcccccgcuacgucaagcagaacacccucaagcuggcgaccggcaugcggaacgugcccgagaagcagacccgcgggaucuucggcgccaucgccggguucaucgagaacggcugggagggcaugguggacgggugguacggcuuccggcaccagaacagcgaggggcgcggccaggccgccgaccugaaguccacgcaggcggccaucgaccagaucaacgggaagcucaaccggcugaucggcaagaccaacgagaaguuccaccagaucgagaaggaguucagcgaggucgagggccgcauccaggaccuggagaaguacguggaggacaccaagguggaccucugguccuacaacgccgagcugcuggucgcccucgagaaccagcacaccaucgaccugacggacagcgagaugaacaagcuguucgagaagaccaagaagcagcuccgggagaacgccgaggacauggggaacggcugcuucaagaucuaccacaagugcgacaacgcgugcaucggguccauccgcaacggcaccuacgaccacgacguguaccgcgacgaggcccugaacaaccgguuccagaucaaggggguggagcugaaguccggcuacaaggacuggauccucuggaucuccuucgccaucagcugcuuccugcugugcgucgcccuccugggcuucaucaugugggccugccagaaggggaacauccgcugcaacaucugcaucuga

SEQ ID NO: 72021 - RNA, 1698 nt, Artificial Sequence
  derived and/or modified CDS sequence (opt1) from hemagglutinin__InfluenzaA__AEX34440
augaaggugaagcugcucguccugcugugcaccuucaccgccacguacgccgacaccaucugcaucggcuaccacgcgaacaacagcaccgacaccguggacacggugcucgagaagaacgucaccgugacccacuccgugaaccugcuggaggacagccacaacgggaagcucugccugcugaagggcaucgcgccccuccagcuggggaacugcuccgucgccggcuggauccuggggaacccggagugcgagcuccugaccagccgcgaguccuggagcuacaucguggagaagcccaaccccgagaacggcacgugcuaccccggccacuucgccgacuacgaggagcugcgggagcagcucuccagcguguccagcuucgagcgcuucgagaucuucccgaaggaguccagcuggcccaaccacaccaccaccggggucuccgccagcugcucccacaacggcgagagcuccuucuacaagaaccugcuguggcucacggggaagaacggccuguaccccaaccugagcaaguccuacgccaacaacaaggagaaggaggugcucgugcuguggggcguccaccacccgcccaacaucgggaaccagcgggcccuguaccacaccgagaacgccuacgugagcguggucagcucccacuacagccgcaaguucacccccgagaucgccaagcggcccaaggugcgcgaccaggagggccggaucaacuacuacuggacccuccuggagcccggggacacgaucaucuucgaggcgaacggcaaccugaucgccccgcgcuacgccuucgcccucucccggggguucggcagcggcaucaucaacuccaacgcccccauggacgagugcgacgcgaagugccagacgccccagggggccaucaacagcucccugcccuuccagaacgugcacccggucaccaucggcgagugccccaaguacgugcgcagcgccaagcugcggauggugaccgggcuccgcaacauccccuccauccagagccggggccuguucggggccaucgccggcuucaucgagggcggguggaccggcauggucgacgggugguacggcuaccaccaccagaacgagcagggguccggcuacgcggccgaccagaaguccacccagaacgccaucaacggcaucaccaacaaggugaacagcgugaucgagaagaugaacacccaguucacggccgucgggaaggaguucaacaagcuggagcgccggauggagaaccucaacaagaagguggacgacggcuucaucgacaucuggaccuacaacgccgagcugcugguccuccuggagaacgagcgcacccuggacuuccacgacagcaacgugaagaaccucuacgagaaggugaagucccagcugaagaacaacgcgaaggagaucgggaacggcugcuucgaguucuaccacaagugcaacgacgagugcauggagagcgucaagaacgggaccuacgacuaccccaaguacuccgaggagagcaagcugaaccgggagaagaucgacggcgugaagcucgaguccaugggcguguaccagauccuggccaucuacagcacggucgccagcucccuggugcuccuggugagccugggggccaucuccuucuggaugugcagcaacggcucccuccagugccgcaucugcaucuga

SEQ ID NO: 72022 - RNA, 1698 nt, Artificial Sequence; identical to SEQ ID NO: 64323
  derived and/or modified CDS sequence (opt1) from hemagglutinin__InfluenzaA__AEX34462

SEQ ID NO: 72023 - RNA, 1698 nt, Artificial Sequence
  derived and/or modified CDS sequence (opt1) from hemagglutinin__InfluenzaA__AEX34473
augaaggugaagcugcucguccugcugugcaccuucaccgccacguacgccgacaccaucugcaucggcuaccacgcgaacaacagcaccgacaccguggacacggugcucgagaagaacgucaccgugacccacuccgugaaccugcuggaggacagccacaacgggaagcucugccugcugaagggcaucgcgccccuccagcuggggaacugcuccgucgccggcuggauccuggggaacccggagugcgagcuccugaucagcaaggaguccuggagcuacaucguggagacccccaaccccgagaacggcacgugcuaccccggcuacuucgccgacuacgaggagcugcgcgagcagcucuccagcguguccagcuucgagcgguucgagaucuucccgaaggaguccagcuggcccaaccacaccgucaccgggguguccgccagcugcucccacaacggcaagagcuccuucuaccgcaaccugcuguggcucaccggcaagagcgggcuguaccccaaccuguccaagagcuacgccaacaacaaggagaaggaggugcucguccuguggggcgugcaccacccgcccaacaucggggaccagcgggcccuguaccacacggagaacgccuacgugagcgucguguccagccacuacucccgccgguucacccccgagaucgccaagcgccccaaggugcgggaccaggagggccgcaucaacuacuacuggacccuccuggagcccggggacaccaucaucuucgaggcgaacggcaaccugaucgccccgcgguacgccuucgcccucagccgcggguucggcuccggcaucaucacgagcaacgcccccauggacgagugcgacgcgaagugccagacgccccagggggccaucaacuccagccugcccuuccagaacguccacccggugaccaucggcgagugccccaaguacgugaaguccgccaagcugcggauggucaccgggcuccgcaacauccccagcauccagucccggggccuguucggggccaucgccggcuucaucgagggcggguggaccggcaugguggacgggugguacggcuaccaccaccagaacgagcaggggagcggcuacgcggccgaccagaaguccacccagagcgccaucaacggcaucaccaacaaggugaacuccgucaucgagaagaugaacacccaguucacggccguggggaaggaguucaacaagcuggagcgccggauggagaaccucaacaagaaggucgacgacggcuuccuggacaucuggaccuacaacgccgagcugcucgugcugcuggagaacgagcgcacccucgacuuccacgacagcaacgugaagaaccuguacgagaaggucaagucccagcugaagaacaacgcgaaggagaucgggaacggcugcuucgaguucuaccacaagugcaacgacgagugcauggagagcgugaagaacgggaccuacgacuaccccaaguacuccgaggagagcaagcucaaccgggagaagaucgacggcgugaagcuggagagcaugggcgucuaccagauccuggccaucuacuccacgguggccagcucccucgugcugcuggucagccucggggccaucuccuucuggaugugcagcaacggcucccugcagugccgcaucugcaucuga

SEQ ID NO: 72024 - RNA, 1698 nt, Artificial Sequence
  derived and/or modified CDS sequence (opt1) from hemagglutinin__InfluenzaA__AEX34495
augaaggugaagcugcucguccugcugugcaucuucaccgccaccuacgccgacacgaucugcaucggcuaccacgcgaacaacagcaccgacaccguggacaccgugcucgagaagaacgucacggugacccacuccgugaaccugcuggaggacagccacaacgggaagcucugccugcugaagggcaucgcgccccuccagcuggggaacugcuccgucgccggcuggauccuggggaacccggagugcgagcuccugaucagcaaggaguccuggagcuacaucguggagacccccaaccccgagaacgggaccugcuaccccggcuacuucgccgacuacgaggagcugcgcgagcagcucuccagcguguccagcuucgagcgguucgagaucuucccgaaggaguccagcuggcccaaccacacggucaccgggguguccgccagcugcucccacaacggcaagagcuccuucuaccgcaaccugcuguggcucaccggcaagagcggccuguaccccaaccuguccaagagcuacgccaacaacaaggagaaggaggugcucguccuguggggcgugcaccacccgcccaacaucggggugcagcgggcccuguaccacaccgagaacgccuacgucagcgugguguccagccacuacucccgccgguucacgcccgagaucgccaagcgccccaagguccgggaccaggagggccgcaucaacuacuacuggacccuccuggagcccggggacaccaucaucuucgaggcgaacggcaaccugaucgccccgcgguacgccuucgcccucagccgcggguucggcuccggcaucaucaccagcaacgcccccauggacgagugcgacgcgaagugccagacgccccagggggccaucaacuccagccugcccuuccagaacgugcacccggugaccaucggcgagugccccaaguacgucaaguccgccaagcugcggauggugaccgggcuccgcaacauccccagcauccagucccggggccuguucggggccaucgccggcuucaucgagggcggguggaccggcaugguggacgggugguacggcuaccaccaccagaacgagcaggggagcggcuacgcggccgaccagaaguccacgcagaacgccaucaacggcaucaccaacaaggucaacagcgugaucgagaagaugaacacccaguucaccgccgucgggaaggaguucaacaagcuggagcgccggauggagaaccucaacaagaagguggacgacggcuuccuggacaucuggacguacaacgccgagcugcucgugcugcuggagaacgagcgcacccucgacuuccacgacuccaacgucaagaaccuguacgagaaggucaagagccagcugaagaacaacgcgaaggagaucgggaacggcugcuucgaguucuaccacaagugcaacgacgagugcauggaguccgugaagaacgggaccuacgacuaccccaaguacagcgaggaguccaagcucaaccgggagaagaucgacggcgugaagcuggagagcaugggcguguaccagauccuggccaucuacagcaccguggccuccagccucguccugcuggugucccucggggccaucagcuucuggaugugcuccaacggcagccugcagugccgcaucugcaucuga

SEQ ID NO: 72025 - RNA, 1698 nt, Artificial Sequence; identical to SEQ ID NO: 72024
  derived and/or modified CDS sequence (opt1) from hemagglutinin__InfluenzaA__AEX34506

SEQ ID NO: 72026 - RNA, 1698 nt, Artificial Sequence; identical to SEQ ID NO: 72024
  derived and/or modified CDS sequence (opt1) from hemagglutinin__InfluenzaA__AEX34517

SEQ ID NO: 72027 - RNA, 1698 nt, Artificial Sequence; identical to SEQ ID NO: 72024
  derived and/or modified CDS sequence (opt1) from hemagglutinin__InfluenzaA__AEX34528

SEQ ID NO: 72028 - RNA, 1698 nt, Artificial Sequence; identical to SEQ ID NO: 72024
  derived and/or modified CDS sequence (opt1) from hemagglutinin__InfluenzaA__AEX34539

SEQ ID NO: 72029 - RNA, 1698 nt, Artificial Sequence; identical to SEQ ID NO: 72024
  derived and/or modified CDS sequence (opt1) from hemagglutinin__InfluenzaA__AEX34550

SEQ ID NO: 72030 - RNA, 1698 nt, Artificial Sequence; identical to SEQ ID NO: 72024
  derived and/or modified CDS sequence (opt1) from hemagglutinin__InfluenzaA__AEX34561

SEQ ID NO: 72031 - RNA, 1698 nt, Artificial Sequence; identical to SEQ ID NO: 72024
  derived and/or modified CDS sequence (opt1) from hemagglutinin__InfluenzaA__AEX34572

SEQ ID NO: 72032 - RNA, 1698 nt, Artificial Sequence; identical to SEQ ID NO: 72024
  derived and/or modified CDS sequence (opt1) from hemagglutinin__InfluenzaA__AEX34583

SEQ ID NO: 72033 - RNA, 1698 nt, Artificial Sequence; identical to SEQ ID NO: 72024
  derived and/or modified CDS sequence (opt1) from hemagglutinin__InfluenzaA__AEX34594

SEQ ID NO: 72034 - RNA, 1698 nt, Artificial Sequence; identical to SEQ ID NO: 72024
  derived and/or modified CDS sequence (opt1) from hemagglutinin__InfluenzaA__AEX34605

SEQ ID NO: 72035 - RNA, 1698 nt, Artificial Sequence; identical to SEQ ID NO: 72024
  derived and/or modified CDS sequence (opt1) from hemagglutinin__InfluenzaA__AEX34616

SEQ ID NO: 72036 - RNA, 1698 nt, Artificial Sequence; identical to SEQ ID NO: 72024
  derived and/or modified CDS sequence (opt1) from hemagglutinin__InfluenzaA__AEX34627

SEQ ID NO: 72037 - RNA, 1698 nt, Artificial Sequence; identical to SEQ ID NO: 72024
  derived and/or modified CDS sequence (opt1) from hemagglutinin__InfluenzaA__AEX34638

SEQ ID NO: 72038 - RNA, 1698 nt, Artificial Sequence
  derived and/or modified CDS sequence (opt1) from hemagglutinin__InfluenzaA__AEX34650
augaaggugaagcugcucguccugcugugcaccuucaccgccacguacgccgacaccaucugcaucggcuaccacgcgaacaacagcaccgacaccguggacacggugcucgagaagaacgucaccgugacccacuccgugaaccugcuggaggacagccacaacgggaagcucugccugcugaagggcaucgcgccccuccagcuggggaacugcuccgucgccggcuggauccuggggaacccggagugcgagcuccugaucagcaaggaguccuggagcuacaucguggagacccccaaccccgagaacggcacgugcuaccccggcuacuucgccgacuacgaggagcugcgcgagcagcucuccagcguguccagcuucgagcgguucgagaucuucccgaaggaguccagcuggcccaaccacaccgucaccgggguguccgccagcugcucccacaacggcaagagcuccuucuaccgcaaccugcuguggcucaccgggaagaacggccuguaccccaaccugagcaaguccuacgccaacaacaaggagaaggaggugcucguccuguggggcgugcaccacccgcccaacaucgggaaccagcggagccuguaccacacggagaacgccuacgugagcgucguguccagccacuacucccgccgguucacccccgagaucgccaagcgccccaaggugcgggaccaggagggccgcaucaacuacuacuggacccuccuggagcccggggacaccaucaucuucgaggccaacggcaaccugaucgcgccgcgguucgccuucgcccucagccgcggguucggcuccggcaucaucacgagcaacgcccccauggacgagugcgacgccaagugccagacgccccagggggcgaucaacuccagccugcccuuccagaacguccacccggugaccaucggcgagugccccaaguacgugcgguccgccaagcugcgcauggucaccgggcuccggaacauccccagcauccagucccgcggccuguucggggccaucgccggcuucaucgagggcggguggaccggcaugguggacgggugguacggcuaccaccaccagaacgagcaggggagcggcuacgccgcggaccagaaguccacccagaacgccaucaacggcaucaccaacaaggugaacagcgucaucgagaagaugaacacccaguucacggccguggggaaggaguucaacaagcuggagcggcgcauggagaaccucaacaagaaggucgacgacggcuuccuggacaucuggaccuacaacgccgagcugcucgugcugcuggagaacgagcggacccucgacuuccacgacuccaacgugaagaaccuguacgagaaggucaagagccagcugaagaacaacgccaaggagaucgggaacggcugcuucgaguucuaccacaagugcaacgacgagugcauggaguccgugaagaacgggaccuacgacuaccccaaguacagcgaggaguccaagcucaaccgcgagaagaucgacggcgugaagcuggagagcaugggcgucuaccagauccuggcgaucuacagcacgguggccuccagccucgugcugcuggucucccucggggccaucagcuucuggaugugcuccaacggcagccugcagugccggaucugcaucuga

SEQ ID NO: 72039 - RNA, 1698 nt, Artificial Sequence
  derived and/or modified CDS sequence (opt1) from hemagglutinin__InfluenzaA__AEX34661
augaaggugaagcugcucguccugcugugcaccuucaccgccacguacgccgacaccaucugcaucggcuaccacgcgaacaacagcaccgacaccguggacacggugcucgagaagaacgucaccgugacccacuccgugaaccugcuggaggacagccacaacgggaagcucugccugcugaagggcaucgcgccccuccagcuggggaacugcuccgucgccggcuggauccuggggaacccggagugcgagcuccugaucagcaaggaguccuggagcuacaucguggagacccccaaccccgagaacggcacgugcuaccccggcuacuucgccgacuacgaggagcugcgcgagcagcucuccagcguguccagcuucgagcgguucgagaucuucccgaaggaguccagcuggcccaaccacaccgucaccgggguguccgccagcugcucccacaacggcaagagcuccuucuaccgcaaccugcuguggcucaccgggaagaagggccuguaccccaaccugagcaaguccuacgccaacaacaaggagaaggaggugcucguccuguggggcgugcaccacccgcccaacaucggggaccagcgggcccuguaccacacggagaacgccuacgugagcgucgugagcucccacuacagccgccgguucacccccgagaucgccaagcgccccaaggugcgggaccaggagggccgcaucaacuacuacuggacccuccuggagcccggggacaccaucaucuucgaggcgaacggcaaccugaucgccccgcgguucgccuucgcccucucccgcggguucggcagcggcaucaucacguccaacgcccccauggacgagugcgacgcgaagugccagacgccccagggggccaucaacagcucccugcccuuccagaacguccacccggugaccaucggcgagugccccaaguacgugcggagcgccaagcugcgcauggccaccgggcuccggaacauccccuccauccagagccgcggccuguucggggccaucgcgggcuucaucgagggcggguggaccggcauggucgacgggugguacggcuaccaccaccagaacgagcagggguccggcuacgccgccgaccagaaguccacccagaacgccaucaacggcaucaccaagaaggugaacagcgugaucgagaagaugaacacccaguucacggccgucgggaaggaguucagcaagcuggagcggcgcauggagaaccucaacaagaagguggacgacggcuuccuggacaucuggaccuacaacgcggagcugcucguccugcuggagaacgagcggacccucgacuuccacgacuccaacgugaagaaccuguacgagaaggucaagagccagcugaagaacaacgccaaggagaucgggaacggcugcuucgaguucuaccacaagugcaacgacgagugcauggaguccgugaagaacgggaccuacgacuaccccaaguacagcgaggaguccaagcucaaccgcgagaagaucgacggcgugaagcuggagagcaugggcguguaccagauccuggccaucuacagcacggucgccuccagccucgugcugcuggugucccucggggccaucagcuucuggaugugcuccaacggcagccugcagugccggaucugcaucuga

SEQ ID NO: 72040 - RNA, 1698 nt, Artificial Sequence
  derived and/or modified CDS sequence (opt1) from hemagglutinin__InfluenzaA__AEX34672
augaaggugaagcugcucguccugcugugcaccuucaccgccacguacgccgacaccaucugcaucggcuaccacgcgaacaacagcaccgacaccguggacacggugcucgacaagaacgucaccgugacccacuccgugaaccugcuggaggacagccacaacgggaagcucugccugcugaagggcaucgcgccccuccagcuggggaacugcuccgucgccggcuggauccuggggaacccggagugcgagcuccugaucagccgcgaguccuggagcuacaucguggagaagcccaaccccgagaacgggaccugcuaccccggccacuucgccgacuacgaggagcugcgggagcagcucuccagcguguccagcuucgagcgcuucgagaucuucccgaaggaguccagcuggcccaaccacacgaccaccggggucuccgccagcugcucccacgacggcgagagcuccuucuacaagaaccugcuguggcucaccgggaagaacggccuguaccccaaccugagcaaguccuacgccaacaacaaggagaaggaggugcucgugcuguggggcguccaccacccgcccaacaucggcgugcagcgggcccuguaccacacggagaacgccuacgugagcgucgugagcucccacuacagccgcaaguucacccccgagaucgccaagcggcccaaggugcgcgaccaggagggccggaucaacuacuacuggacccuccuggagcccggggacaccaucaucuucgaggcgaacggcaaccugaucgccccgcgcuacgccuucgcccucucccggggguucggcagcggcaucaucaacuccaacgcccccauggacgagugcgacgcgaagugccagacgccccagggggccaucaacagcucccugcccuuccagaacguccacccggugaccaucggcgagugccccaaguacgugcgcagcgccaagcugcggauggucaccgggcuccgcaacauccccuccauccagagccggggccuguucggggccaucgccggcuucaucgagggcggguggaccggcaugguggacgggugguacggcuaccaccaccagaacgagcagggguccggcuacgcggccgaccagaaguccacgcagaacgccaucaacggcaucaccaacaaggugaacagcgucaucgagaagaugaacacccaguucaccgccguggggaaggaguucaacaagcuggagcgccggauggagaaccucaacaagaaggucgacgacggcuucaucgacaucuggacguacaacgccgagcugcuggugcuccuggagaacgagcgcacccuggacuuccacgacagcaacgugaagaaccucuacgagaaggucaagucccagcugaagaacaacgcgaaggagaucgggaacggcugcuucgaguucuaccacaagugcaacgacgagugcauggagagcgugaagaacgggaccuacgacuaccccaaguacuccgaggagagcaagcugaaccgggagaagaucgacggcgugaagcucgaguccaugggcgucuaccagauccuggccaucuacagcaccguggccagcucccuggugcuccuggucagccugggggccaucuccuucuggaugugcagcaacggcucccuccagugccgcaucugcaucuga

SEQ ID NO: 72041 - RNA, 1698 nt, Artificial Sequence
  derived and/or modified CDS sequence (opt1) from hemagglutinin__InfluenzaA__AEX34683
augaaggugaagcugcucguccugcugugcaccuucaccgccacguacgccgacaccaucugcaucggcuaccacgcgaacaacagcaccgacaccguggacacggugcucgagaagaacgucaccgugacccacuccgugaaccugcuggaggacagccacaacgggaagcucugccugcugaagggcaucgcgccccuccagcuggggaacugcuccgucgccggcuggauccuggggaacccggagugcgagcuccugaucagccgcgaguccuggagcuacaucguggagaagcccaaccccgagaacgggaccugcuaccccggccacuucgccgacuacgaggagcugcgggagcagcucuccagcguguccagcuucgagcgcuucgagaucuucccgaaggaguccagcuggcccuaccacacgaccaccggggucuccgccagcugcucccacaacggcgagagcuccuucuacaagaaccugcuguggcucaccgggaagaacggccuguaccccaaccugagcaaguccuacgccaacaacaaggagaaggaggugcucgugcuguggggcguccaccacccgcccaacaucggcgaccagcgggcccuguaccacacggagaacgccuacgugagcguggucagcucccacuacagccgcaaguucacccccgagaucgccaagcggcccaaggugcgcgaccaggagggccggaucaacuacuacuggacccuccuggagcccggggacaccaucaucuucgaggcgaacggcaaccugaucgccccgcgcuacgccuucgcccucucccggggguucggcagcggcaucaucaacuccaacgcccccauggacgagugcgacgcgaagugccagacgccccagggggccaucaacagcucccugcccuuccagaacgugcacccggucaccaucggcgagugccccaaguacgugcgcagcgccaagcugcggauggugaccgggcuccgcaacauccccuccauccagagccggggccuguucggggccaucgccggcuucaucgagggcggguggaccggcauggucgacgggugguacggcuaccaccaccagaacgagcagggguucggcuacgcggccgaccagaaguccacgcagaacgccaucaacggcaucaccaacaaggugaacagcgugaucgagaagaugaacacccaguucaccgccgucgggaaggaguucaacaagcuggagcgccggauggagaaccucaacaagaagguggacgacggcuucaucgacaucuggacguacaacgccgagcugcugguccuccuggagaacgagcgcacccuggacuuccacgacuccaacgugaagaaccucuacgagaaggucaagagccagcugaagaacaacgcgaaggagaucgggaacggcugcuucgaguucuaccacaagugcaacgacgagugcauggaguccgugaagaacgggaccuacgacuaccccaaguacagcgaggaguccaagcugaaccgggagaagaucgacggcgugaagcucgagagcaugggcguguaccagauccuggccaucuacuccaccgucgccagcagccuggugcuccuggugucccugggggccaucagcuucuggaugugcuccaacggcagccuccagugccgcaucugcaucuga

SEQ ID NO: 72042 - RNA, 1698 nt, Artificial Sequence
  derived and/or modified CDS sequence (opt1) from hemagglutinin__InfluenzaA__AEX34757
augaaggugaagcugcucguccugcugugcaccuucaccgccacguacgccgacaccaucugcaucggcuaccacgcgaacaacagcaccgacaccguggacacggugcucgagaagaacgucaccgugacccacuccgugaaccugcuggaggacagccacaacgggaagcucugccugcugaagggcaucgcgccccuccagcuggggaacugcuccgucgccggcuggauccuggggaacccggagugcgagcuccugaucagccgcgaguccuggagcuacaucguggagaagcccaaccccgagaacgggaccugcuaccccggccacuucgccgacuacgaggagcugcgggagcagcucuccagcguguccagcuucgagcgcuucgagaucuucccgaaggaguccagcuggcccaaccacacgaccaccggggucuccgccagcugcucccacaacggcgggagcuccuucuacaagaaccugcuguggcucacccggaagaacggccuguaccccaaccugagcaaguccuacgccaacaacaaggagaaggaggugcucgugcuguggggcguccaccacccgcccaacaucggcgaccagcgcgcccuguaccacacggagaacgccuacgugagcguggucagcucccacuacagccggaaguucacccccgagaucgccaagcgccccaaggugcgggaccaggagggccgcaucaacuacuacuggacccuccuggagcccggggacaccaucaucuucgaggcgaacggcaaccugaucgccccgcgguacgccuucgcccucucccgcggguucggcagcggcaucaucaacuccaacgcccccauggacgagugcgacgcgaagugccagacgccccagggggccaucaacagcucccugcccuuccagaacgugcacccggucaccaucggcgagugccccaaguacgugcggagcgccaagcugcgcauggugaccgggcuccggaacauccccuccauccagagccgcggccuguucggggccaucgccggcuucaucgagggcggguggaccggcauggucgacgggugguacggcuaccaccaccagaacgagcagggguccggcuacgcggccgaccagaaguccacgcagaacgccaucaacggcaucaccaacaaggugaacagcgugaucgagaagaugaacacccaguucaccgccgucgggaaggaguucaacaagcuggagcggcgcauggagaaccucaacaagaagguggacgacggcuucaucgacaucuggacguacaacgccgagcugcugguccuccuggagaacgagcggacccuggacuuccacgacagcaacgugaagaaccucuacgagaaggugaagucccagcugaagaacaacgcgaaggagaucgggaacggcugcuucgaguucuaccacaagugcaacgacgagugcauggagagcgucaagaacgggaccuacgacuaccccaaguacuccgaggagagcaagcugaaccgcgagaagaucgacggcgugaagcucgaguccaugggcguguaccagauccuggccaucuacagcaccgucgccagcucccuggugcuccuggugagccugggggccaucuccuucuggaugugcagcaacggcucccuccagugccggaucugcaucuga

SEQ ID NO: 72043 - RNA, 1698 nt, Artificial Sequence
  derived and/or modified CDS sequence (opt1) from hemagglutinin__InfluenzaA__AEX34768
augaaggugaagcugcucguccugcugugcaccuucaccgccacguacgccgacaccaucugcaucggcuaccacgcgaacaacagcaccgacaccguggacacggugcucgagaagaacgucaccgugacccacuccgugaaccugcuggaggacagccacaacgggaagcucugccugcugaagggcaucgcgccccuccagcuggggaacugcuccgucgccggcuggauccuggggaacccggagugcgagcuccugaucagccgcgaguccuggagcuacaucguggagaagcccaaccccgagaacgggaccugcuaccccggccacuucgccgacuacgaggagcugcgggagcagcucuccagcguguccagcuucgagcgcuucgagaucuucccgaaggacuccagcuggcccaaccacacgaccaccggggucuccgccagcugcucccacaacggcgagagcuccuucuacaagaaccugcuguggcucaccgggaagaacggccuguaccccaaccugagcaaguccuacgccaacaacaaggagaaggaggugcucgugcuguggggcguccaccacccgcccaacaucggcgaccagcgggcccuguaccacacggagaacgccuacgugagcguggucagcucccacuacagccgcaaguucacccccgagaucgccaagcggcccaaggugcgcgaccagggcgggcggaucaacuacuacuggacccuccuggagcccggcgacaccaucaucuucgaggcgaacgggaaccugaucgccccgcgcuacgccuucgcccucucccggggcuucggcagcgggaucaucaacuccaacgcccccauggacgagugcgacgcgaagugccagacgccccagggcgccaucaacagcucccugcccuuccagaacgugcacccggucaccaucggggagugccccaaguacgugcgcagcgccaagcugcggauggugaccggccuccgcaacauccccuccauccagagccgggggcuguucggcgccaucgccggcuucaucgagggcggguggaccgggauggucgacggcugguacggguaccaccaccagaacgagcagggcuccggcuacgcggccgaccagaaguccacgcagaacgccaucaacgggaucaccaacaaggugaacagcgugaucgagaagaugaacacccaguucaccgccgucggcaaggaguucaacaagcuggagcgccggauggagaaccucaacaagaagguggacgacggguucaucgacaucuggacguacaacgccgagcugcugguccuccuggagaacgagcgcacccuggacuuccacgacagcaacgugaagaaccucuacgagaaggugaagucccagcugaagaacaacgcgaaggagaucggcaacgggugcuucgaguucuaccacaagugcaacgacgagugcauggagagcgucaagaacggcaccuacgacuaccccaaguacuccgaggagagcaagcugaaccgggagaagaucgacggcgugaagcucgaguccauggggguguaccagauccuggccaucuacagcaccgucgccagcucccuggugcuccuggugagccugggcgccaucuccuucuggaugugcagcaacgggucccuccagugccgcaucugcaucuga

SEQ ID NO: 72044 - RNA, 1698 nt, Artificial Sequence
  derived and/or modified CDS sequence (opt1) from hemagglutinin__InfluenzaA__AEX34779
augaaggugaagcugcucguccugcugugcaccuucaccgccacguacgccgacaccaucugcaucggcuaccacgcgaacaacagcaccgacaccguggacacggugcucgagaagaacgucaccgugacccacuccgugaaccugcuggagaacagccacaacgggaagcucugccugcugaagggcaucgcgccccuccagcuggggaacugcuccgucgccggcuggauccuggggaacccggagugcgagcuccugaucagcaaggaguccuggagcuacaucguggagaagcccaaccccgagaacgggaccugcuaccccggccacuucgccgacuacgaggagcugcgcgagcagcucuccagcguguccagcuucgagcgguucgagaucuucccgaaggaguccagcuggcccaaccacacggucaccgggguguccgccagcugcucccacaacggcgagcgcagcuucuaccggaaccugcuguggcucaccgggaagaacggccuguaccccaaccuguccaagagcuacgccaacaacaaggagaaggaggugcucguccuguggggcgugcaccacccgcccaacaucggcaaccagaaggcccuguaccacaccgagaacgccuacguguccgucgugagcagccacuacucccgcaaguucacgcccgagaucgccaagcggcccaaggugcgcgaccaggagggccggaucaacuacuacuggacccuccuggagcccggggacaccaucaucuucgaggcgaacggcaaccugaucgccccgcgcuacgccuucgcccucagccggggguucggcuccggcaucaucaacagcaacgcccccauggacaagugcgacgcgaagugccagacgccccagggggccaucaacuccagccugcccuuccagaacguccacccggugaccaucggcgagugccccaaguacgugcgcuccgccaagcugcggauggucaccgggcuccgcaacauccccagcauccagucccggggccuguucggggccaucgccggcuucaucgagggcggguggaccggcaugguggacgggugguacggcuaccaccaccagaacgagcaggggagcggcuacgcggccgaccagaaguccacccagaacgccaucaacggcaucacgaacaaggugaacagcgucaucgagaagaugaacacccaguucaccgccguggggaaggaguucaacaagcuggagcgccggauggagaaccucaacaagaaggucgacgacggcuucaucgacaucuggaccuacaacgccgagcugcuggugcuccuggagaacgagcgcacgcuggacuuccacgacuccaacgugaagaaccucuacgagaaggucaagagccagcugaagaacaacgcgaaggagaucgggaacggcugcuucgaguucuaccacaagugcaacgacgagugcauggaguccgugaagaacgggaccuacgacuaccccaaguacagcgaggaguccaagcugaaccgggagaagaucgacggcgugaagcucgagagcaugggcgucuaccagauccuggccaucuacuccaccguggccagcagccuggugcuccuggucucccugggggccaucagcuucuggaugugcuccaacggcagccuccagugccgcaucugcaucuga

SEQ ID NO: 72045 - RNA, 1698 nt, Artificial Sequence; identical to SEQ ID NO: 68121
  derived and/or modified CDS sequence (opt1) from hemagglutinin__InfluenzaA__AEX34790

SEQ ID NO: 72046 - RNA, 1698 nt, Artificial Sequence
  derived and/or modified CDS sequence (opt1) from hemagglutinin__InfluenzaA__AEX34801
augaaggugaagcugcucguccugcugugcaccuucaccgccacguacgccgacaccaucugcaucggcuaccacgcgaacaacagcaccgacaccguggacacggugcucgagaagaacgucaccgugacccacuccgugaaccugcuggaggacaaccacaacgggaagcucugccugcugaagggcaucgcgccccuccagcuggggaacugcagcgucgccggcuggauccuggggaacccggagugcgagcuccugaucuccaaggagagcugguccuacaucguggagaagcccaaccccgagaacggcgccugcuaccccggccacuucgccgacuacgaggagcugcgcgagcagcucagcuccgugagcuccuucaagcgguucgagaucuucccgaaggagagcuccuggcccaaccacaccgucacgggggugagcgccuccugcagccacaacggcgaguccagcuucuacaagaaccugcuguggcucaccgggaagaacggccuguaccccaaccuguccaagagcuacgccaacaacaaggagaaggaggugcucguccuguggggcgugcaccacccgcccaacaucggggaccagaugacccuguaccacaaggagaacgccuacguguccgucgugagcagccacuacucccgcaaguucacccccgagaucgccaagcggcccaaggugcgcgaccaggagggccggaucaacuacuacuggacgcuccuggagcccggggacaccaucaucuucgaggcgagcggcaaccugaucgccccgcgcuacgccuucgcccucucccggggguucggcagcggcaucaucaacuccgacgcccccauggacgagugcgacgcgaagugccagacgccccagggggccaucaacagcucccugcccuuccagaacguccacccggugaccaucggcgagugccccaaguacgugcgcagcgccaagcugcggauggucaccgggcuccgcaacauccccuccauccagagccggggccuguucggggccaucgccggcuucaucgagggcggguggaccggcaugguggacgggugguacggcuaccaccaccagaacgagcagggguccggcuacgcggccgaccagaaguccacccagaacgccaucaacggcaucaccaacaaggugaacagcgucaucgagaagaugaacacgcaguucaccgccguggggaaggaguucaacaagcuggagcgccggauggagaaccucaacaagaaggucgacgacggcuucaucgacguguggaccuacaacgccgagcugcuggugcuccuggagaacgagcgcacccuggacuuccacgacagcaacgucaagaaccucuacgagaaggugaagaaccagcugaagaacaacgcgaaggagaucgggaacggcugcuucgaguucuaccacaagugcaacgacgagugcauggaguccgugaagaacgggacguacgacuaccccaaguacagcgaggaguccaagcugagccgggagaagaucgacggcgucaagcucgaguccaugggcguguaccagauccuggccaucuacagcaccguggccagcucccugguccuccuggugagccugggggccaucuccuucuggaugugcagcaacggcucccuccagugccgcaucugcaucuga

SEQ ID NO: 72047 - RNA, 1698 nt, Artificial Sequence
  derived and/or modified CDS sequence (opt1) from hemagglutinin__InfluenzaA__AEX34812
augaaggugaagcugcucguccugcugugcaccuucaccgccacguacgccgacaccaucugcaucggcuaccacgcgaacaacagcaccgacaccguggacacggugcucgagaagaacgucaccgugacccacuccgugaaccugcuggagaacagccacaacgggaagcucugccugcugaagggcaucgcgccccuccagcuggggaacugcuccgucgccggcuggauccuggggaacccggagugcgagcuccugaucagcaaggaguccuggagcuacaucguggagaagcccaaccccgagaacgggaccugcuaccccggccacuucgccgacuacgaggagcugcgcgagcagcucuccagcguguccagcuucgagcgguucgagaucuucccgaaggaguccagcuggcccaaccacacggucaccgggguguccgccagcugcucccacaacggcgagagcuccuucuaccgcaaccugcuguggcucaccgggaagaacggccuguaccccaaccugagcaaguccuacgccaacaacaaggagaaggaggugcucguccuguggggcgugcaccacccgcccaacaucggcgaccagaaggcccuguaccacaccgagaacgccuacgugagcgucgugagcucccacuacagccggaaguucacgcccgagaucgccaagcgccccaaggugcgggaccaggagggccgcaucaacuacuacuggacccuccuggagcccggggacaccaucaucuucgaggcgaacggcaaccugaucgccccgcgguacgccuucgcccucucccgcggguucggcagcggcaucaucaacuccaacgcccccauggacaagugcgacgcgaagugccagacgccccagggggccaucaacagcucccugcccuuccagaacguccacccggugaccaucggcgagugccccaaguacgugcggagcgccaagcugcgcauggucaccgggcuccggaacauccccuccauccagagccgcggccuguucggggccaucgccggcuucaucgagggcggguggaccggcaugguggacgggugguacggcuaccaccaccagaacgagcagggguccggcuacgcggccgaccagaaguccacccagaacgccaucgacggcaucacgaacaaggugaacagcgucaucgagaagaugaacacccaguucaccgccguggggaaggaguucaacaagcuggagcggcgcauggagaaccucaacaagaaggucgacgacggcuucaucgacaucuggaccuacaacgccgagcugcuggugcuccuggagaacgagcggacgcuggacuuccacgacagcaacgugaagaaccucuacgagaaggucaagucccagcugaagaacaacgcgaaggagaucgggaacggcugcuucgaguucuaccacaagugcaacgacgagugcauggagagcgugaagaacgggaccuacgacuaccccaaguacuccgaggagagcaagcugaaccgcgagaagaucgacggcgugaagcucgaguccaugggcgucuaccagauccuggccaucuacagcaccguggccagcucccuggugcuccuggucagccugggggccaucuccuucuggaugugcagcaacggcucccuccagugccggaucugcaucuga

SEQ ID NO: 72048 - RNA, 1698 nt, Artificial Sequence
  derived and/or modified CDS sequence (opt1) from hemagglutinin__InfluenzaA__AEX34834
augaaggugaagcugcucguccugcugugcaccuucaccgccacguacgccgacaccaucugcaucggcuaccacgcgaacaacagcaccgacaccguggacacggugcucgagaagaacgucaccgugacccacuccgugaaccugcuggaggacaaccacaacgggaagcucugccugcugaagggcaucgcgccccuccagcuggggaacugcagcgucgccggcuggauccuggggaacccggagugcgagcuccugaacuccaaggagagcugguccuacaucguggagaagcccaaccccgagaacgggaccugcuaccccggccacuucgccgacuacgaggagcugcgcgagcagcucagcuccgugagcuccuucaagcgguucgagaucuucccgaaggagagcuccuggcccaaccacacggucaccggggugagcgccuccugcagccacaacggcgaguccagcuucuacaagaaccugcuguggcucaccgggaagaacggccuguaccccaaccuguccaagagcuacgccaacaacaaggagaaggaggugcucguccuguggggcgugcaccacccgcccaacaucggcgaccagaugacccuguaccacaaggagaacgccuacguguccgucgugagcagccacuacucccgcaaguucacgcccgagaucaccaagcggcccaaggugcgcgaccaggagggccggaucaacuacuacuggacccuccuggagcccggggacaccaucaucuucgaggccagcggcaaccugaucgccccgcgcuacgcguucgcccucucccggggguucggcagcggcaucaucaacuccaacgcccccauggacgagugcgacgccaagugccagacgccccagggggccaucaacagcucccugcccuuccagaacguccacccggugaccaucggcgagugccccaaguacgugcgcagcgcgaagcugcggauggucaccgggcuccgcaacauccccuccauccagagccggggccuguucggggccaucgccggcuucaucgagggcggguggaccggcaugguggacgggugguacggcuaccaccaccagaacgagcagggguccggcuacgccgccgaccagaaguccacgcagaacgcgaucaacggcaucaccaacaaggugaacagcgucaucgagaagaugaacacccaguucaccgccguggggaaggaguucaacaagcuggagcgccggauggagaaccucaacaagaaggucgacgacggcuucaucgacguguggacguacaacgccgagcugcuggugcuccuggagaacgagcgcacccuggacuuccacgacagcaacgucaagaaccucuacgagaaggugaagaaccagcugaagaacaacgccaaggagaucgggaacggcugcuucgaguucuaccacaagugcaacgacgagugcauggaguccgugaagaacgggaccuacgacuaccccaaguacagcgaggaguccaagcugagccgggagaagaucgacggcgucaagcucgaguccaugggcguguaccagauccuggccaucuacagcaccguggcgagcucccugguccuccuggugagccugggggccaucuccuucuggaugugcagcaacggcucccuccagugccgcaucugcaucuga

SEQ ID NO: 72049 - RNA, 1698 nt, Artificial Sequence
  derived and/or modified CDS sequence (opt1) from hemagglutinin__InfluenzaA__AEX34845
augaaggugaagcugcucguccugcugugcaccuucaccgccacguacgccgacaccaucugcaucggcuaccacgcgaacaacagcaccgacaccguggacacggugcucgagaagaacgucaccgugacccacuccgugaaccugcuggagaacagccacaacgggaagcucugccugcugaagggcaucgcgccccuccagcuggggaacugcuccgucgccggcuggauccuggggaacccggagugcgagcuccuggugcccaaggagagcugguccuacaucguggagaagcccaaccccgagaacgggaccugcuacccgggccacuucgccgacuacgaggagcugcgcgagcagcucagcuccgucagcuccuucgagcgguucgagaucuuccccaaggagagcuccuggcccaaccacacggugaccggggugagcgccuccugcagccacaacggcgaguccagcuucuaccgcaaccugcuguggcucaccgggaagaacggccuguaccccaaccuguccaagagcuacgccaacaacaaggagaaggagguccucgugcuguggggcgugcaccacccgcccaacaucggcgaccagaaggcccuguaccacaccgagaacgccuacgucuccguggugagcagccacuacucccggaaguucacgcccgagaucgccaagcgccccaagguccgggaccaggagggccgcaucaacuacuacuggacccuccuggagccgggggacaccaucaucuucgaggcgaacggcaaccugaucgcgccccgguacgccuucgcccucagccgcggguucggcuccggcaucaucaacagcaacgcccccauggacaagugcgacgccaagugccagacgccccagggggccaucaacuccagccugccguuccagaacgugcaccccgugaccaucggcgagugccccaaguacguccgguccgccaagcugcgcauggugaccgggcuccggaacauccccagcauccagucccgcggccuguucggggccaucgccggcuucaucgagggcggguggaccggcaugguggacgggugguacggcuaccaccaccagaacgagcaggggagcggcuacgcggccgaccagaaguccacccagaacgccaucaacggcaucacgaacaaggucaacagcgugaucgagaagaugaacacccaguucaccgccgucgggaaggaguucaacaagcuggagcggcgcauggagaaccucaacaagaagguggacgacggcuucaucgacaucuggaccuacaacgccgagcugcuggugcuccuggagaacgagcggacgcuggacuuccacgacuccaacgucaagaaccucuacgagaaggucaagagccagcugaagaacaacgcgaaggagaucgggaacggcugcuucgaguucuaccacaagugcaacgacgagugcauggaguccgugaagaacgggaccuacgacuacccgaaguacagcgaggaguccaagcugaaccgcgagaagaucgagggcgugaagcucgagagcaugggcguguaccagauccuggccaucuacuccaccguggccagcagccugguccuccuggugucccugggggccaucagcuucuggaugugcuccaacggcagccuccagugccggaucugcaucuga

SEQ ID NO: 72050 - RNA, 1698 nt, Artificial Sequence; identical to SEQ ID NO: 68121
  derived and/or modified CDS sequence (opt1) from hemagglutinin__InfluenzaA__AEX34856

SEQ ID NO: 72051 - RNA, 1698 nt, Artificial Sequence
  derived and/or modified CDS sequence (opt1) from hemagglutinin__InfluenzaA__AEX34867
augaaggugaagcugcucguccugcugugcaccuucaccgccacguacgccgacaccaucugcaucggcuaccacgcgaacaacagcaccgacaccguggacacggugcucgagaagaacgucaccgugacccacuccgugaaccugcuggagaacagccacaacgggaagcucugccugcugaagggcaucgcgccccuccagcuggggaacugcuccgucgccggcuggauccuggggaacccggagugcgagcuccuggugagcaaggaguccuggagcuacaucguggagaagcccaaccccgagaacgggaccugcuaccccggccacuucgccgacuacgaggagcugcgcgagcagcucaucuccgucagcuccuucgagcgguucgagaucuucccgaaggagagcuccuggcccaaccacacggugaccggggugagcgccuccugcagccacaacggcgaguccagcuucuaccgcaaccugcuguggcucaccgggaagaacggccuguaccccaaccuguccaagagcuacgccaacaacaaggagaaggagguccucgugcuguggggcgugcaccacccgcccaacaucggcgaccagaaggcccuguaccacaccgagaacgccuacgucuccguggugagcagccacuacucccggaaguucacgcccgagaucgccaagcgccccaagguccgggaccaggagggccgcaucaacuacuacuggacccuccuggagcccggggacaccaucaucuucgaggcgaacggcaaccugaucgccccgcgguacgccuucgcccucagccgcggguucggcuccggcaucaucaacagcaacgcccccauggacaagugcgacgcgaagugccagacgccccgcggggccaucaacuccagccugcccuuccagaacgugcacccggugaccaucggcgagugccccaaguacguccgguccgccaagcugcggauggugaccgggcuccgcaacauccccagcauccagucccggggccuguucggggccaucgccggcuucaucgagggcggguggaccggcaugguggacgggugguacggcuaccaccaccagaacgagcaggggagcggcuacgcggccgaccagaaguccacccagaacgccaucaacggcaucacgaacaaggucaacagcgugaucgagaagaugaacacccaguucaccgccgucgggaaggaguucaacaagcuggagcgccggauggagaaccucaacaagaagguggacgacggcuucaucgacaucuggaccuacaacgccgagcugcuggugcuccuggagaacgagcgcacgcuggacuuccacgacuccaacgucaagaaccucuacgagaaggucaagagccagcugaagaacaacgcgaaggagaucgggaacggcugcuucgaguucuaccacaagugcaacgacgagugcauggaguccgugaagaacgggaccuacgacuaccccaaguacagcgaggaguccaagcugaaccgggagaagaucgagggcgugaagcucgagagcaugggcguguaccagauccuggccaucuacuccaccguggccagcagccugguccuccuggugucccugggggccaucagcuucuggaugugcuccaacggcagccuccagugccgcaucugcaucuga

SEQ ID NO: 72052 - RNA, 1698 nt, Artificial Sequence; identical to SEQ ID NO: 68121
  derived and/or modified CDS sequence (opt1) from hemagglutinin__InfluenzaA__AEX34878

SEQ ID NO: 72053 - RNA, 1698 nt, Artificial Sequence
  derived and/or modified CDS sequence (opt1) from hemagglutinin__InfluenzaA__AEX34889
augaaggugaaccugcucguccugcugugcaccuucaccgccacguacgccgacaccaucugcaucggcuaccacgcgaacaacagcaccgacaccguggacacggugcucgagaagaacgucaccgugacccacuccgugaaccugcuggagaacagccacaacgggaagcucugccugcugaagggcaucgcgccccuccagcuggggaacugcuccgucgccggcuggauccuggggaacccggagugcgagcuccugaucagcaaggaguccuggagcuacaucguggagaagcccaaccccgagaacgggaccugcuaccccggccacuucgccgacuacgaggagcugcgcgagcagcucuccagcguguccagcuucgagcgguucgagaucuucccgaaggaguccagcuggcccaaccacacggucaccgggguguccgccagcugcucccacaacggcgagagcuccuucuaccgcaaccugcuguggcucaccgggaagaacggccuguaccccaaccugagcaaguccuacgccaacaacaaggagaaggaggugcucguccuguggggcgugcaccacccgcccaacaucggcgaccagaaggcccuguaccacaccgagaacgccuacgugagcgucgugagcucccacuacagccggaaguucacgcccgagaucgccaagcgccccaaggugcgggaccaggagggccgcaucaacuacuacuggacccuccuggagcccggggacaccaucaucuucgaggcgaacggcaaccugaucgccccgcgguacgccuucgcccucucccgcggguucggcagcggcaucaucaacuccaacgcccccauggacaagugcgacgcgaagugccagacgccccagggggccaucaacagcucccugcccuuccagaacguccacccggugaccaucggcgagugccccaaguacgugcggagcgccaagcugcgcauggucaccgggcuccggaacauccccuccauccagagccgcggccuguucggggccaucgccggcuucaucgagggcggguggaccggcaugguggacgggugguacggcuaccaccaccagaacgagcagggguccggcuacgcggccgaccagaaguccacccagaacgccaucaacggcaucacgaacaaggugaacagcgucaucgagaagaugaacacccaguucaccgccguggggaaggaguucaacaagcuggagcggcgcauggagaaccucaacaagaaggucgacgacggcuucaucgacaucuggaccuacaacgccgagcugcuggugcuccuggagaacgagcggacgcuggacuuccacgacagcaacgugaagaaccucuacgagaaggucaagucccagcugaagaacaacgcgaaggagaucgggaacggcugcuucgaguucuaccacaagugcaacgacgagugcauggagagcgugaagaacgggaccuacgacuaccccaaguacuccgaggagagcaagcugaaccgcgagaagaucgacggcgugaagcucgaguccaugggcgucuaccagauccuggccaucuacagcaccguggccagcucccuggugcuccuggucagccugggggccaucuccuucuggaugugcagcaacggcucccuccagugccggaucugcaucuga

SEQ ID NO: 72054 - RNA, 1698 nt, Artificial Sequence
  derived and/or modified CDS sequence (opt1) from hemagglutinin__InfluenzaA__AEX34900
augaaggugaagcugcucguccugcugugcaccuucaccgccacguacgccgacaccaucugcaucggcuaccacgcgaacaacagcaccgacaccguggacacggugcucgagaagaacgucaccgugacccacuccgugaaccugcuggaggacaaccacaacgggaagcucugccugcugaagggcaucgcgccccuccagcuggggaacugcagcgucgccggcuggauccuggggaacccggagugcgagcuccugaucuccaaggagagcugguccuacaucguggagaagcccaaccccgagaacgggaccugcuaccccggccacuucgccgacuacgaggagcugcgcgagcagcucagcuccgugagcuccuucgagcgguucgagaucuucccgaaggagagcuccuggcccaaccacacggucaccggggugagcgccuccugcagccacaacggcgaguccagcuucuacaagaaccugcuguggcucaccgggaagaacggccuguaccccaaccuguccaagagcuacgccaacaacaaggagaaggaggugcucguccuguggggcgugcaccacccgcccaacaucggcgaccagaugacccuguaccacaaggagaacgccuacguguccgucgugagcagccacuacucccgcaaguucacgcccgagaucgccaagcggcccaaggugcgcgaccaggagggccggaucaacuacuacuggacccuccuggagcccggggacaccaucaucuucgaggccagcggcaaccugaucgcgccgcgcuacgccuucgcccucucccggggguucggcagcggcaucaucaacuccaacgcccccauggacgagugcgacgccaagugccagacgccccagggggcgaucaacagcucccugcccuuccagaacguccacccggugaccaucggcgagugccccaaguacgugcgcagcgccaagcugcggauggucaccgggcuccgcaacauccccuccauccagagccggggccuguucggggccaucgccggcuucaucgagggcggguggaccggcaugguggacgggugguacggcuaccaccaccagaacgagcagggguccggcuacgccgcggaccagaaguccacccagaacgccaucaacggcgugacgaacaaggucaacagcgugaucgagaagaugaacacccaguucaccgccgucgggaaggaguucaacaagcuggagcgccggauggagaaccucaacaagaagguggacgacggcuucaucgacguguggaccuacaacgccgagcugcugguccuccuggagaacgagcgcacgcuggacuuccacgacagcaacgugaagaaccucuacgagaaggugaagaaccagcugaagaacaacgccaaggagaucgggaacggcugcuucgaguucuaccacaagugcaacgacgagugcauggaguccgucaagaacgggaccuacgacuaccccaaguacagcgaggaguccaagcugagccgggagaagaucgacggcguggagcucgaguccaugggcguguaccagauccuggcgaucuacagcaccgucgccagcucccuggugcuccuggugagccugggggccaucuccuucuggaugugcagcaacggcucccuccagugccgcaucugcaucuga

SEQ ID NO: 72055 - RNA, 1698 nt, Artificial Sequence
  derived and/or modified CDS sequence (opt1) from hemagglutinin__InfluenzaA__AEX34911
augaaggugaagcugcucguccugcugugcaccuucaccgccacguacgccgacaccaucugcaucggcuaccacgcgaacaacagcaccgacaccguggacacggugcucgagaagaacgucaccgugacccacuccgugaaccugcuggagaacagccacaacgggaagcucugccugcugaagggcaucgcgccccuccagcuggggaacugcuccgucgccggcuggauccuggggaacccggagugcgagcuccugaucagccaggaguccuggagcuacaucguggagaagcccaaccccgagaacgggaccugcuaccccggccacuucgccgacuacgaggagcugcgcgagcagcucuccagcguguccagcuucgagcgguucgagaucuucccgaaggaguccagcuggcccaaccacacggucaccgggguguccgccagcugcucccacaacggcgagagcuccuucuaccgcaaccugcuguggcucaccgggaagaacggccuguaccccaaccugagcaaguccuacgccaacaacaaggagaaggaggugcucguccuguggggcgugcaccacccgcccaacaucggcgaccagaaggcccuguaccacaccgagaacgccuacgugagcgucgugagcucccacuacagccggaaguucacgcccgagaucgccaagcgccccaaggugcgggaccaggagggccgcaucaacuacuacuggacccuccuggagcccggggacaccaucaucuucgaggcgaacggcaaccugaucgccccgcgguacgccuucgcccucucccgcggguucggcagcggcaucaucaacuccaacgcccccauggacaagugcgacgcgaagugccagacgccccagggggccaucaacagcucccugcccuuccagaacguccacccggugaccaucggcgagugccccaaguacgugcggagcgccaagcugcgcauggucaccgggcuccggaacauccccuccauccagagccgcggccuguucggggccaucgccggcuucaucgagggcggguggaccggcaugguggacgggugguacggcuaccaccaccagaacgagcagggguccggcuacgcggccgaccagaaguccacccagaacgccaucaacggcaucacgaacaaggugaacagcgucaucgagaagaugaacacccaguucaccgccguggggaaggaguucaacaagcuggagcggcgcauggagaaccucaacaagaaggucgacgacggcuucaucgacaucuggaccuacaacgccgagcugcuggugcuccuggagaacgagcggacgcuggacuuccacgacagcaacgugaagaaccucuacgagaaggucaagucccagcugaagaacaacgcgaaggagaucgggaacggcugcuucgaguucuaccacaagugcaacgacgagugcauggagagcgugaagaacgggaccuacgacuaccccaaguacuccgaggagagcaagcugaaccgcgagaagaucgacggcgugaagcucggcuccaugggggucuaccagauccuggccaucuacagcaccguggccagcucccuggugcuccuggucagccugggcgccaucuccuucuggaugugcagcaacgggucccuccagugccggaucugcaucuga

SEQ ID NO: 72056 - RNA, 1698 nt, Artificial Sequence
  derived and/or modified CDS sequence (opt1) from hemagglutinin__InfluenzaA__AEX34922
augaaggugaagcugcucguccugcugugcaccuucaccgccacguacgccgacaccaucugcaucggcuaccacgcgaacaacagcaccgacaccguggacacggugcucgagaagaacgucaccgugacccacuccgugaaccugcuggagaacagccacaacgggaagcucugccugcugaagggcaucgcgccccuccagcuggggaacugcuccgucgccggcuggauccuggggaacccggagugcgagcuccugaucagcaaggaguccuggagcuacaucguggagaagcccaaccccgagaacgggaccugcuaccccggccacuucgccgacuacgaggagcugcgcgagcagcucuccagcguguccagcuucgagcgguucgagaucuucccgaaggaguccagcuggcccaaccacacggucaccgggguguccgccagcugcucccacaacggcgagagcuccuucuaccgcaaccugcuguggcucaccgggaagaacggccuguaccccaaccugagcaaguccuacgccaacaacaaggagaaggaggugcucguccuguggggcgugcaccacccgcccaacaucggcgaccagaaggcccuguaccacaccgagaacgccuacgugagcgucgugagcucccacuacagccggcgcuucacgcccgagaucgccaagcggcccaaggugcgcgaccaggagggccggaucaacuacuacuggacccuccuggagcccggggacaccaucaucuucgaggcgaacggcaaccugaucgccccgcgcuacgccuucgcccucucccggggguucggcagcggcaucaucaacuccaacgcccccauggacaagugcgacgcgaagugccagacgccccagggggccaucaacagcucccugcccuuccagaacguccacccggugaccaucggcgagugccccaaguacgugcgcagcgccaagcugcggauggucaccgggcuccgcaacauccccuccauccagagccggggccuguucggggccaucgccggcuucaucgagggcggguggaccggcaugguggacgggugguacggcuaccaccaccagaacgagcagggguccggcuacgcggccgaccagaaguccacccagaacgccaucaacggcaucacgaacaaggugaacagcgucaucgagaagaugaacacccaguucaccgccguggggaaggaguucaacaagcuggagcgccggauggagaaccucgacaagaaggucgacgacggcuucaucgacaucuggaccuacaacgccgagcugcuggugcuccuggagaacgagcgcacgcuggacuuccacgacagcaacgugaagaaccucuacgagaaggucaagucccagcugaagaacaacgcgaaggagaucgggaacggcugcuucgaguucuaccacaagugcaacgacgagugcauggagagcgugaagaacgggaccuacgacuaccccaaguacuccgaggagagcaagcugaaccgggagaagaucgacggcgugaagcucgaguccaugggcgucuaccagauccuggccaucuacagcaccguggccagcucccuggugcuccuggucagccugggggccaucuccuucuggaugugcagcaacggcucccuccagugccgcaucugcaucuga

SEQ ID NO: 72057 - RNA, 1698 nt, Artificial Sequence; identical to SEQ ID NO: 66512
  derived and/or modified CDS sequence (opt1) from hemagglutinin__InfluenzaA__AEX34933

SEQ ID NO: 72058 - RNA, 1698 nt, Artificial Sequence; identical to SEQ ID NO: 66512
  derived and/or modified CDS sequence (opt1) from hemagglutinin__InfluenzaA__AEX34944

SEQ ID NO: 72059 - RNA, 1698 nt, Artificial Sequence
  derived and/or modified CDS sequence (opt1) from hemagglutinin__InfluenzaA__AEX34955
augaaggccaagcugcucgugcugcugugcaccuucaccgccacguacgcggacaccaucugcaucggcuaccacgccaacaacagcaccgacaccgucgacacggugcucgagaagaacgugaccgucacccacuccgugaaccugcuggagaacagccacaacgggaagcucugccugcugaagggcaucgcgccccuccagcuggggaacugcuccguggccggcuggauccuggggaacccggagugcgagcuccugaucagcaaggaguccuggagcuacaucgucgagaagcccaaccccgagaacgggaccugcuaccccggccacuucgccgacuacgaggagcugcgcgagcagcucuccagcguguccagcuucgagcgguucgagaucuucccgaaggaguccagcuggcccaaccacacggugaccggggucuccgccagcugcucccacaacggcgagagcuccuucuaccgcaaccugcuguggcucaccgggaagaacggccuguaccccaaccugagcaaguccuacgccaacaacaaggagaaggaggugcucgugcuguggggcguccaccacccgcccaacaucggcgaccagaaggcccuguaccacaccgagaacgccuacgugagcguggucagcucccacuacagccggaaguucacgcccgagaucgcgaagcgccccaaggugcgggaccaggagggccgcaucaacuacuacuggacccuccuggagcccggggacaccaucaucuucgaggccaacggcaaccugaucgccccgcgguacgccuucgcccucucccgcggguucggcagcggcaucaucaacuccaacgcgcccauggacaagugcgacgccaagugccagacgccccagggggccaucaacagcucccugcccuuccagaacgugcacccggucaccaucggcgagugccccaaguacgugcggagcgccaagcugcgcauggugaccgggcuccggaacauccccuccauccagagccgcggccuguucggggccaucgcgggcuucaucgagggcggguggaccggcauggucgacgggugguacggcuaccaccaccagaacgagcagggguccggcuacgccgccgaccagaaguccacccagaacgccaucaacggcaucacgaacaaggugaacagcgugaucgagaagaugaacacccaguucaccgccgucgggaaggaguucaacaagcuggagcggcgcauggagaaccucaacaagaagguggacgacggcuucaucgacaucuggaccuacaacgcggagcugcugguccuccuggagaacgagcggacgcuggacuuccacgacagcaacgugaagaaccucuacgagaaggugaagucccagcugaagaacaacgccaaggagaucgggaacggcugcuucgaguucuaccacaagugcaacgacgagugcauggagagcgucaagaacgggaccuacgacuaccccaaguacuccgaggagagcaagcugaaccgcgagaagaucgacggcgugaagcucgaguccaugggcguguaccagauccuggccaucuacagcaccgucgccagcucccuggugcuccuggugagccugggggccaucuccuucuggaugugcagcaacggcucccuccagugccggaucugcaucuga

SEQ ID NO: 72060 - RNA, 1698 nt, Artificial Sequence
  derived and/or modified CDS sequence (opt1) from hemagglutinin__InfluenzaA__AEX34966
augaaggugaagcugcucguccugcugugcaccuucaccgccacguacgccgacaccaucugcaucggcuaccacgcgaacaacagcaccgacaccguggacacggugcucgagaagaacgucaccgugacccacuccgugaaccugcuggagaacagccacaacgggaagcucugccugcugaagggcaucgcgccccuccagcuggggaacugcuccgucgccggcuggauccuggggaacccggagugcgagcuccugaucagcaaggaguccuggagcuacaucguggagaagcccaaccccgagaacgggaccugcuaccccggccacuucgccgacuacgaggagcugcgcgagcagcucuccagcguguccagcuucgagcgguucgagaucuucccgaaggaguccagcuggcccaaccacacggucaccgggguguccgccagcugcucccacaacggcgagagcuccuucuaccgcaaccugcuguggcucaccgggaagaacggccuguaccccaaccugagcaaguccuacgccaacaacaaggagaaggaggugcucguccuguggggcgugcaccacccgcccaacaucggcgaccagaaggcccuguaccacaccgagaacgccuacgugagcgucgugagcucccacuacagccggaaguucacgcccgagaucgccaagcgccccaaggugcgggaccaggagggccgcaucaacuacuacuggacccuccuggagcccggggacaccaucauguucgaggcgaacggcaaccugaucgccccgcgguacgccuucgcccucucccgcggguucggcagcggcaucaucaacuccaacgcccccauggacaagugcgacgcgaagugccagacgccccagggggccaucaacagcucccugcccuuccagaacguccacccggugaccaucggcgagugccccaaguacgugcggagcgccaagcugcgcauggucaccgggcuccggaacauccccuccauccagagccgcggccuguucggggccaucgccggcuucaucgagggcggguggaccggcaugguggacgggugguacggcuaccaccaccagaacgagcagggguccggcuacgcggccgaccagaaguccacccagaacgccaucaacggcaucacgaacaaggugaacagcgucaucgagaagaugaacacccaguucaccgccguggggaaggaguucaacaagcuggagcggcgcauggagaaccucaacaagaaggucgacgacggcuucaucgacaucuggaccuacaacgccgagcugcuggugcuccuggagaacgagcggacgcuggacuuccacgacagcaacgugaagaaccucuacgagaaggucaagucccagcugaagaacaacgcgaaggagaucgggaacggcugcuucgaguucuaccacaagugcaacgacgagugcauggagagcgugaagaacgggaccuacgacuaccccaaguacuccgaggagagcaagcugaaccgcgagaagaucgacggcgugaagcucgaguccaugggcgucuaccagauccuggccaucuacagcaccguggccagcucccuggugcuccuggucagccugggggccaucuccuucuggaugugcagcaacggcucccuccagugccggaucugcaucuga

SEQ ID NO: 72061 - RNA, 1698 nt, Artificial Sequence; identical to SEQ ID NO: 72060
  derived and/or modified CDS sequence (opt1) from hemagglutinin__InfluenzaA__AEX34977

SEQ ID NO: 72062 - RNA, 1698 nt, Artificial Sequence; identical to SEQ ID NO: 72060
  derived and/or modified CDS sequence (opt1) from hemagglutinin__InfluenzaA__AEX34988

SEQ ID NO: 72063 - RNA, 1698 nt, Artificial Sequence; identical to SEQ ID NO: 68121
  derived and/or modified CDS sequence (opt1) from hemagglutinin__InfluenzaA__AEX34999

SEQ ID NO: 72064 - RNA, 1698 nt, Artificial Sequence; identical to SEQ ID NO: 72060
  derived and/or modified CDS sequence (opt1) from hemagglutinin__InfluenzaA__AEX35010

SEQ ID NO: 72065 - RNA, 1698 nt, Artificial Sequence; identical to SEQ ID NO: 72060
  derived and/or modified CDS sequence (opt1) from hemagglutinin__InfluenzaA__AEX35032

SEQ ID NO: 72066 - RNA, 1698 nt, Artificial Sequence; identical to SEQ ID NO: 72060
  derived and/or modified CDS sequence (opt1) from hemagglutinin__InfluenzaA__AEX35043

SEQ ID NO: 72067 - RNA, 1698 nt, Artificial Sequence
  derived and/or modified CDS sequence (opt1) from hemagglutinin__InfluenzaA__AEX35054
augaaggugaagcugcucguccugcugugcaccuucaccgccacguacgccgacaccaucugcaucggcuaccacgcgaacaacagcaccgacaccguggacacggugcucgagaagaacgucaccgugacccacuccgugaaccugcuggagaacagccacaacgggaagcucugccugcugaagggcaucgcgccccuccagcuggggaacugcuccgucgccggcuggauccuggggaacccggagugcgagcuccugaucagcaaggaguccuggagcuacaucguggagaagcccaaccccgagaacgggaccugcuaccccggccacuucgccgacuacgaggagcugcgcgagcagcucuccagcguguccagcuucgagcgguucgagaucuucccgaaggaguccagcuggcccaaccacacggucaccgggguguccgccagcugcucccacaacggcgagagcuccuucuaccgcaaccugcuguggcucaccgggaagaacggccuguaccccaaccugagcaaguccuacgccaacaacaaggagaaggaggugcucguccuguggggcgugcaccacccgcccaacaucggcgaccagaaggcccuguaccacaccgagaacgccuacgugagcgucgugagcucccacuacagccggaaguucacgcccgagaucgccaagcgccccaaggugcgggaccaggagggccgcaucaacuacuacuggacccuccuggagcccggggacaccaucauguucgaggcgaacggcaaccugaucgccccgcgguacgccuucgcccucaaccgcggguucggcuccggcaucaucaacagcaacgcccccauggacaagugcgacgcgaagugccagacgccccagggggccaucaacuccagccugcccuuccagaacguccacccggugaccaucggcgagugccccaaguacgugcgguccgccaagcugcgcauggucaccgggcuccggaacauccccagcauccagucccgcggccuguucggggccaucgccggcuucaucgagggcggguggaccggcaugguggacgggugguacggcuaccaccaccagaacgagcaggggagcggcuacgcggccgaccagaaguccacccagaacgccaucaacggcaucacgaacaaggugaacagcgucaucgagaagaugaacacccaguucaccgccguggggaaggaguucaacaagcuggagcggcgcauggagaaccucaacaagaaggucgacgacggcuucaucgacaucuggaccuacaacgccgagcugcuggugcuccuggagaacgagcggacgcuggacuuccacgacuccaacgugaagaaccucuacgagaaggucaagagccagcugaagaacaacgcgaaggagaucgggaacggcugcuucgaguucuaccacaagugcaacgacgagugcauggaguccgugaagaacgggaccuacgacuaccccaaguacagcgaggaguccaagcugaaccgcgagaagaucgacggcgugaagcucgagagcaugggcgucuaccagauccuggccaucuacuccaccguggccagcagccuggugcuccuggucucccugggggccaucagcuucuggaugugcuccaacggcagccuccagugccggaucugcaucuga

SEQ ID NO: 72068 - RNA, 1698 nt, Artificial Sequence; identical to SEQ ID NO: 72060
  derived and/or modified CDS sequence (opt1) from hemagglutinin__InfluenzaA__AEX35065

SEQ ID NO: 72069 - RNA, 1698 nt, Artificial Sequence; identical to SEQ ID NO: 66512
  derived and/or modified CDS sequence (opt1) from hemagglutinin__InfluenzaA__AEX35076

SEQ ID NO: 72070 - RNA, 1698 nt, Artificial Sequence
  derived and/or modified CDS sequence (opt1) from hemagglutinin__InfluenzaA__AEX35087
augaaggugaagcugcucguccugcugugcaccuucaccgccacguacgccgacaccaucugcaucggcuaccacgcgaacaacagcaccgacaccguggacacggugcucgagaagaacgucaccgugacccacuccgugaaccugcuggaggacaaccacaacgggaagcucugccugcugaagggcaucgcgccccuccagcuggggaacugcagcgucgccggcuggauccuggggaacccggagugcgagcuccugaucuccaaggagagcugguccuacaucguggagaagcccaaccccgagaacgggaccugcuaccccggccacuucgccgacuacgaggagcugcgcgagcagcucagcuccgugagcuccuucaagcgguucgagaucuucccgaaggagagcuccuggcccaaccacacggucaccggggugagcgccuccugcagccacaacggcgaguccagcuucuacaagaaccugcuguggcucaccgggaagaacggccuguaccccaaccuguccaagagcuacgccaacaacaaggagaaggaggugcucguccuguggggcgugcaccacccgcccaacaucggcgaccagaugacccuguaccacaaggagaacgccuacguguccgucgugagcagccacuacucccgcaaguucacgcccgagaucgccaagcggcccaaggugcgcgaccaggagggccggaucaacuacuacuggacccuccuggagcccggggacaccaucaucuucgaggccagcggcaaccugaucgcgccgcgcuacgccuucgcccucucccggggguucggcagcggcaucaucaacuccaacgcccccauggacgagugcgacgccaagugccagacgccccagggggcgaucaacagcucccugcccuuccagaacguccacccggugaccaucggcgagugccccaaguacgugcgcagcgccaagcugcggauggucaccgggcuccgcaacauccccuccauccagagccggggccuguucggggccaucgccggcuucaucgagggcggguggaccggcaugguggacgggugguacggcuaccaccaccagaacgagcagggguccggcuacgccgcggaccagaaguccacccagaacgccaucaacggcaucacgaacaaggugaacagcgucaucgagaagaugaacacccaguucaccgccguggggaaggaguucaacaagcuggagcgccggauggagaaccucaacaagaaggucgacgacggcuucaucgacguguggaccuacaacgccgagcugcuggugcuccuggagaacgagcgcacgcuggacuuccacgacagcaacgucaagaaccucuacgagaaggugaagaaccagcugaagaacaacgccaaggagaucgggaacggcugcuucgaguucuaccacaagugcaacgacgagugcauggaguccgugaagaacgggaccuacgacuaccccaaguacagcgaggaguccaagcugagccgggagaagaucgacggcgucaagcucgaguccaugggcguguaccagauccuggcgaucuacagcaccguggccagcucccugguccuccuggugagccugggggccaucuccuucuggaugugcagcaacggcucccuccagugccgcaucugcaucuga

SEQ ID NO: 72071 - RNA, 1698 nt, Artificial Sequence
  derived and/or modified CDS sequence (opt1) from hemagglutinin__InfluenzaA__AEX35098
augaaggugaagcugcucguccugcugugcaccuucaccgccacguacgccgacaccaucugcaucggcuaccacgcgaacaacagcaccgacaccguggacacggugcucgagaagaacgucaccgugacccacuccgugaaccugcuggagaacagccacaacgggaagcucugccugcugaagggcaucgcgccccuccagcuggggaacugcuccgucgccggcuggauccuggggaacccggagugcgagcuccugaucagcaaggaguccuggagcuacaucguggagaagcccaaccccgagaacgggaccugcuaccccggccacuucgccgacuacgaggagcugcgcgagcagcucuccagcguguccagcuucgagcgguucgagaucuucccgaaggaguccagcuggcccaaccacacggucaccgggguguccgccagcugcucccacaacggcgagagcuccuucuaccgcaaccugcuguggcucaccgggaagaacggccuguaccccaaccugagcaaguccuacgccaacaacaaggagaaggaggugcucguccuguggggcgugcaccacccgcccaacaucggcgaccagaaggcccuguaccacaccgagaacgccuacgugagcgucaugagcucccacuacagccggaaguucacgcccgagaucgccaagcgccccaaggugcgggaccaggagggccgcaucaacuacuacuggacccuccuggagcccggggacaccaucaucuucgaggcgaacggcaaccugaucgccccgcgguacgccuucgcccucucccgcggguucggcagcggcaucaucaacuccaacgcccccauggacaagugcgacgcgaagugccagacgccccagggggccaucaacagcucccugcccuuccagaacgugcacccggucaccaucggcgagugccccaaguacgugcggagcgccaagcugcgcauggugaccgggcuccggaacauccccuccauccagagccgcggccuguucggggccaucgccggcuucaucgagggcggguggaccggcauggucgacgggugguacggcuaccaccaccagaacgagcagggguccggcuacgcggccgaccagaaguccacccagaacgccaucaacggcaucacgaacaaggugaacagcgugaucgagaagaugaacacccaguucaccgccgucgggaaggaguucaacaagcuggagcggcgcauggagaaccucaacaagaagguggacgacggcuucaucgacaucuggaccuacaacgccgagcugcugguccuccuggagaacgagcggacgcuggacuuccacgacagcaacgugaagaaccucuacgagaaggugaagucccagcugaagaacaacgcgaaggagaucgggaacggcugcuucgaguucuaccacaagugcaacgacgagugcauggagagcgucaagaacgggaccuacgacuaccccaaguacuccgaggagagcaagcugaaccgcgagaagaucgacggcgugaagcucgaguccaugggcguguaccagauccuggccaucuacagcaccgucgccagcucccuggugcuccuggugagccugggggccaucuccuucuggaugugcagcaacggcucccuccagugccggaucugcaucuga

SEQ ID NO: 72072 - RNA, 1698 nt, Artificial Sequence
  derived and/or modified CDS sequence (opt1) from hemagglutinin__InfluenzaA__AEX35109
augaaggugaagcugcucguccugcugugcaccuucaccgccacguacgccgacaccaucugcaucggcuaccacgcgaacaacagcaccgacaccguggacacggugcucgagaagaacgucaccgugacccacuccgugaaccugcuggagaacagccacaacgggaagcucugccugcugaagggcaucgcgccccuccagcuggggaacugcuccgucgccggcuggauccuggggaacccggagugcgagcuccugaucagcaaggaguccuggagcuacaucguggagaagcccaaccccgagaacgggaccugcuaccccggccacuucgccgacuacgaggagcugcgcgagcagcucuccagcguguccagcuucgagcgguucgagaucuucccgaaggaguccagcuggcccaaccacacggucaccgggguguccgccagcugcucccacaacggcgagagcuccuucuaccgcaaccugcuguggcucaccgggaagaacggccuguaccccaaccugagcaaguccuacgccaacaacaaggagaaggaggugcucguccuguggggcgugcaccagcccccgaacaucggcgaccagaaggcccuguaccacaccgagaacgccuacgugagcgucgugagcucccacuacagccggaaguucacgcccgagaucgccaagcgccccaaggugcgggaccaggagggccgcaucaacuacuacuggacccuccuggagcccggggacaccaucaucuucgaggcgaacggcaaccugaucgccccgcgguacgccuucgcccucucccgcggguucggcagcggcaucaucaacuccaacgcccccauggacaagugcgacgcgaagugccagacgccccagggggccaucaacagcucccugcccuuccagaacguccacccggugaccaucggcgagugccccaaguacgugcggagcgccaagcugcgcauggucaccgggcuccggaacauccccuccauccagagccgcggccuguucggggccaucgccggcuucaucgagggcggguggaccggcaugguggacgggugguacggcuaccaccaccagaacgagcagggguccggcuacgcggccgaccagaaguccacccagaacgccaucaacggcaucacgaacaaggugaacagcgucaucgagaagaugaacacccaguucaccgccguggggaaggaguucaacaagcuggagcggcgcauggagaaccucaacaagaaggucgacgacggcuucaucgacaucuggaccuacaacgccgagcugcuggugcuccuggagaacgagcggacgcuggacuuccacgacagcaacgugaagaaccucuacgagaaggucaagucccagcugaagaacaacgcgaaggagaucgggaacggcugcuucgaguucuaccacaagugcaacgacgagugcauggagagcgugaagaacgggaccuacgacuaccccaaguacuccgaggagagcaagcugaaccgcgagaagaucgacggcgugaagcucgaguccaugggcgucuaccagauccuggccaucuacagcaccguggccagcucccuggugcuccuggucagccugggggccaucuccuucuggaugugcagcaacggcucccuccagugccggaucugcaucuga

SEQ ID NO: 72073 - RNA, 1698 nt, Artificial Sequence
  derived and/or modified CDS sequence (opt1) from hemagglutinin__InfluenzaA__AEX35120
augaaggugaagcugcucguccugcugugcaccuucaccgccacguacgccgacaccaucugcaucggcuaccacgcgaacaacagcaccgacaccguggacacggugcucgagaagaacgucaccgugacccacuccgugaaccugcuggagaacagccacaacgggaagcucugccugcugaagggcaucgcgccccuccagcuggggaacugcuccgucgccggcuggauccuggggaacccggagugcgagcuccugaucagcaaggaguccuggagcuacaucguggagaagcccaaccccgagaacgggaccugcuaccccggccacuucgccgacuacgaggagcugcgcgagcagcucuccagcguguccagcuucgagcgguucgagaucuucccgaaggaguccagcuggcccaaccacacggucaccgggguguccgccagcugcucccacaacggcgagagcuccuucuaccgcaaccugcuguggcucaccgggaagaacggccuguaccccaaccugagcaaguccuacgccaacaacaaggagaaggaggugcucguccuguggggcgugcaccacccgcccaacaucggcgaccagaaggcccuguaccacaccgagaacgccuacgugagcgucgugagcucccacuacagccggaaguucacgcccgagaucgccaagcgccccaaggugcgggaccgcgagggccggaucaacuacuacuggacccuccuggagcccggggacaccaucaucuucgaggcgaacggcaaccugaucgccccgcgcuacgccuucgcccucucccggggguucggcagcggcaucaucaacuccaacgcccccauggacaagugcgacgcgaagugccagacgccccagggggccaucaacagcucccugcccuuccagaacguccacccggugaccaucggcgagugccccaaguacgugcgcagcgccaagcugcggauggucaccgggcuccgcaacauccccuccauccagagccggggccuguucggggccaucgccggcuucaucgagggcggguggaccggcaugguggacgggugguacggcuaccaccaccagaacgagcagggguccggcuacgcggccgaccagaaguccacccagaacgccaucaacggcaucacgaacaaggugaacagcgucaucgagaagaugaacacccaguucaccgccguggggaaggaguucaacaagcuggagcgccggauggagaaccucaacaagaaggucgacgacggcuucaucgacaucuggaccuacaacgccgagcugcuggugcuccuggagaacgagcgcacgcuggacuuccacgacagcaacgugaagaaccucuacgagaaggucaagucccagcugaagaacaacgcgaaggagaucgggaacggcugcuucgaguucuaccacaagugcaacgacgagugcauggagagcgugaagaacgggaccuacgacuaccccaaguacuccgaggagagcaagcugaaccgggagaagaucgacggcgugaagcucgaguccaugggcgucuaccagauccuggccaucuacagcaccguggccagcucccuggugcuccuggucagccugggggccaucuccuucuggaugugcagcaacggcucccuccagugccgcaucugcaucuga

SEQ ID NO: 72074 - RNA, 1698 nt, Artificial Sequence; identical to SEQ ID NO: 71817
  derived and/or modified CDS sequence (opt1) from hemagglutinin__InfluenzaA__AEX35131

SEQ ID NO: 72075 - RNA, 1698 nt, Artificial Sequence; identical to SEQ ID NO: 71817
  derived and/or modified CDS sequence (opt1) from hemagglutinin__InfluenzaA__AEX35142

SEQ ID NO: 72076 - RNA, 1698 nt, Artificial Sequence
  derived and/or modified CDS sequence (opt1) from hemagglutinin__InfluenzaA__AEX35153
augaaggugaagcugcucguccugcugugcaccuucaccgccacguacgccgacaccaucugcaucggcuaccacgcgaacaacagcaccgacaccguggacacggugcucgagaagaacgucaccgugacccacuccgugaaccugcuggaggacaaccacaacgggaagcucugccugcugaagggcaucgcgccccuccagcuggggaacugcagcgucgccggcuggauccuggggaacccggagugcgagcuccugaucuccaaggagagcugguccuacaucguggagaagcccaaccccgagaacgggaccugcuaccccggccacuucgccgacuacgaggagcugcgcgagcagcucagcuccgugagcuccuucgagcgguucgagaucuucccgaaggagagcuccuggcccaaccacacggucaccggggugagcgccuccugcagccacaacggcgaguccagcuucuacaagaaccugcuguggcucaccgggaagaacggccuguaccccaaccuguccaagagcuacgccaacaacaaggagaaggaggugcucguccuguggggcgugcaccacccgcccaacaucggcaaccagaugacccuguaccacaaggagaacgccuacguguccgucgugagcagccacuacucccgcaaguucacgcccgagaucgccaagcggcccaaggugcgcgaccaggagggccggaucaacuacuacuggacccuccuggagcccggggacaccaucaucuucgaggccagcggcaaccugaucgcgccgcgcuacgccuucgcccucucccggggguucggcagcggcaucaucaacuccaacgcccccauggacgagugcgacgccaagugccagacgccccagggggcgaucaacagcaaccugcccuuccagaacguccacccggugaccaucggcgagugccccaaguacgugcgcuccgccaagcugcggauggucaccgggcuccgcaacauccccagcauccagucccggggccuguucggggccaucgccggcuucaucgagggcggguggaccggcaugguggacgggugguacggcuaccaccaccagaacgagcaggggagcggcuacgccgcggaccagaaguccacccagaacgccaucaacggcaucacgaacaaggugaacagcgucaucgagaagaugaacacccaguucaccgccguggggaaggaguucaacaagcuggagcgccggauggagaaccucaacaagaaggucgacgacggcuucaucgacguguggaccuacaacgccgagcugcuggugcuccuggagaacgagcgcacgcuggacuuccacgacuccaacgucaagagccucuacgagaaggugaagaaccagcugaagaacaacgccaaggagaucgggaacggcugcuucgaguucuaccacaagugcaacgacgagugcauggaguccgugaagaacgggaccuacgacuaccccaaguacagcgaggaguccaagcugagccgggagaagaucgacggcgucaagcucgaguccaugggcguguaccagauccuggcgaucuacagcaccguggccagcucccugguccuccuggugagccugggggccaucuccuucuggaugugcagcaacggcucccuccagugccgcaucugcaucuga

SEQ ID NO: 72077 - RNA, 1698 nt, Artificial Sequence
  derived and/or modified CDS sequence (opt1) from hemagglutinin__InfluenzaA__AEX35164
augaaggugaagcugcucguccugcugugcgccuucaccgccaccuacgcggacacgaucugcaucggcuaccacgccaacaacagcaccgacaccguggacaccgugcucgagaagaacgucacggugacccacuccgugaaccugcuggagaacagccacaacgggaagcucugccugcugaagggcaucgcgccccuccagcuggggaacugcuccgucgccggcuggauccuggggaacccggagugcgagcuccugaucagcaaggaguccuggagcuacaucguggagaagcccaaccccgagaacgggaccugcuaccccggccacuucgccgacuacgaggagcugcgcgagcagcucuccagcguguccagcuucgagcgguucgagaucuucccgaaggaguccagcuggcccaaccacaccgucacggggguguccgccagcugcucccacaacggcgagagcuccuucuaccgcaaccugcuguggcucaccgggaagaacggccuguaccccaaccugagcaaguccuacgccaacaacaaggagaaggaggugcucguccuguggggcgugcaccacccgcccaacaucggcgugcagaaggcccuguaccacaccgagaacgccuacgucagcguggugagcucccacuacagccggaaguucacccccgagaucgcgaagcgccccaagguccgggaccaggagggccgcaucaacuacuacuggacgcuccuggagcccggggacaccaucaucuucgaggccaacggcaaccugaucgccccgcgguacgccuucgcccucucccgcggguucggcagcggcaucaucaacuccaacgcgcccauggacaagugcgacgccaagugccagacgccccagggggccaucaacagcucccugcccuuccagaacgugcacccggugaccaucggcgagugccccaaguacguccggagcgccaagcugcgcauggugaccgggcuccggaacauccccuccauccagagccgcggccuguucggggccaucgcgggcuucaucgagggcggguggaccggcaugguggacgggugguacggcuaccaccaccagaacgagcagggguccggcuacgccgccgaccagaaguccacccagaacgccaucaacggcaucaccaacaaggucaacagcgugaucgagaagaugaacacgcaguucaccgccgucgggaaggaguucaacaagcuggagcggcgcauggagaaccucaacaagaagguggacgacggcuucaucgacaucuggaccuacaacgcggagcugcuggugcuccuggagaacgagcggacccuggacuuccacgacagcaacgucaagaaccucuacgagaaggugaagucccagcugaagaacaacgccaaggagaucgggaacggcugcuucgaguucuaccacaagugcaacgacgagugcauggagagcgugaagaacgggacguacgacuaccccaaguacuccgaggagagcaagcugaaccgcgagaagaucgacggcgucaagcucgaguccaugggcguguaccagauccuggccaucuacagcaccguggccagcucccugguccuccuggugagccugggggccaucuccuucuggaugugcagcaacggcucccuccagugccggaucugcaucuga

SEQ ID NO: 72078 - RNA, 1698 nt, Artificial Sequence
  derived and/or modified CDS sequence (opt1) from hemagglutinin__InfluenzaA__AEX35175
augaaggugaagcugcucguccugcugugcaccuucaccgccacguacgccgacaccaucugcaucggcuaccacgcgaacaacagcaccgacaccguggacacggugcucgagaagaacgucaccgugacccacuccguggaccugcuggaggacagccacaacgggaagcucugccugcugaagggcaucgcgccccuccagcuggggaacugcuccgucgccggcuggauccuggggaacccggagugcgagcuccugaucagcaaggaguccuggagcuacaucguggagacccccaaccccgagaacggcacgugcuaccccggcuacuucgccgacuacgaggagcugcgcgagcagcucuccagcguguccagcuucgagcgguucgagaucuucccgaaggaguccagcuggcccaaccacaccgucaccggggugaccgccuccugcagccacaacggcaaguccagcuucuaccgcaaccugcuguggcucacggggaagaacggccuguaccccaaccuguccaagagcuacgccaacaacaaggagaaggaggugcucguccuguggggcgugcaccacccgcccaacaucggggaccagcgggcccuguaccacaccgagaacgccuacguguccgucgugagcagccacuacucccgccgguucacccccgagaucgccaagcgccccaaggugcgggaccaggagggccgcaucaacuacuacuggacccuccuggagcccggggacacgaucaucuucgaggcgaacggcaaccugaucgccccgcgguucgccuucgcccucaaccgcggguucggcagcggcaucaucaccuccaacgcccccauggacgggugcgacgcgaagugccagacgccccagggcgccaucaacagcucccugcccuuccagaacguccacccggugaccaucggggagugccccaaguacgugcggagcgccaagcugcgcauggccaccggccuccggaacauccccuccauccagagccgcgggcuguucggcgccaucgcgggcuucaucgagggcggguggaccgggauggucgacggcugguacggguaccaccaccagaacgagcagggcuccggcuacgccgccgaccagaaguccacccagaacgccaucaacgggaucaccaacaaggugaacagcgugaucgagaagaugaacacgcaguucaccgccgucggcaaggaguucagcaagcuggagcggcgcauggagaaccucaacaagaagguggacgacggguuccuggacaucuggaccuacaacgcggagcugcucguccugcuggagaacgagcggacccucgacuuccacgacuccaacgugaagaaccuguacgagaaggucaagagccagcugaagaacaacgccaaggagaucggcaacgggugcuucgaguucuaccacaagugcaacgacgagugcauggaguccgugaagaacggcacguacgacuaccccaaguacagcgaggaguccaagcucaaccgcgagaagaucgacggcgugaagcuggagagcauggggguguaccagauccuggccaucuacuccaccgucgccagcagccucgugcugcuggugucccucggcgccaucagcuucuggaugugcuccaacgggagccugcagugccggaucugcaucuga

SEQ ID NO: 72079 - RNA, 1698 nt, Artificial Sequence
  derived and/or modified CDS sequence (opt1) from hemagglutinin__InfluenzaA__AEX35186
augaaggugaagcugcucguccugcugugcaccuucaccgccacguacgccgacaccaucugcaucggcuaccacgcgaacaacagcaccgacaccguggacacggugcucgagaagaacgucaccgugacccacuccgugaaccugcuggaggacagccacaacgggaagcucugccugcugaagggcaucgcgccccuccagcuggggaacugcuccgucgccggcuggauccuggggaacccggagugcgagcuccugaucagccgcgaguccuggagcuacaucguggagaagcccaaccccgagaacgggaccugcuaccccggccacuucgccgacuacgaggagcugcgggagcagcucuccagcguguccagcuucgagcgcuucgagaucuucccgaaggaguccagcuggcccaaccacacgaccaccggggucuccgccagcugcucccacaacggcgagagcuccuucuacaagaaccugcuguggcucaccgggaagaacggccuguaccccaaccugagcaaguccuacgccaacaacaaggagaaggaggugcucgugcuguggggcguccaccacccgcccaacaucggcaaccagcgggcccuguaccacacggagaacgccuacgugagcguggucagcucccacuacagccgcaaguucacccccgagaucgccaagcggcccaaggugcgcgaccaggagggccggaucaacuacuacuggacccuccuggagcccggggacaccaucaucuucgaggcgaacggcaaccugaucgccccgcgcuacgccuucgcccucucccggggguucggcagcggcaucaucaacuccaacgcccccauggacgagugcgacgcgaagugccagacgccccagggggccaucaacagcucccugcccuuccagaacgugcacccggucaccaucggcgagugccccaaguacgugcgcagcgccaagcugcggauggugaccgggcuccgcaacauccccuccauccagagccggggccuguucggggccaucgccggcuucaucgagggcggguggaccggcauggucgacgggugguacggcuaccaccaccagaacgagcagggguccggcuacgcggccgaccagaaguccacgcagaacgccaucaacggcaucaccaacaaggugaacagcgugaucgagaagaugaacacccaguucaccgccgucgggaaggaguucaacaagcuggagcgccggauggagaaccucaacaagaagguggacgacggcuucaucgacaucuggacguacaacgccgagcugcugguccuccuggagaacgagcgcacccuggacuuccacgacagcaacgugaagaaccucuacgagaaggugaagucccagcugaagaacaacgcgaaggagaucgggaacggcugcuucgaguucuaccacaagugcaacgacgagugcauggagagcgucaagaacgggaccuacgacuaccccaaguacuccgaggagagcaagcugaaccgggagaagaucgacggcgugaagcucgaguccaugggcguguaccagauccuggccaucuacagcaccgucgccagcucccuggugcuccuggugagccugggggccaucuccuucuggaugugcagcaacggcucccuccagugccgcaucugcaucuga

SEQ ID NO: 72080 - RNA, 1698 nt, Artificial Sequence; identical to SEQ ID NO: 72079
  derived and/or modified CDS sequence (opt1) from hemagglutinin__InfluenzaA__AEX35197

SEQ ID NO: 72081 - RNA, 1698 nt, Artificial Sequence; identical to SEQ ID NO: 66512
  derived and/or modified CDS sequence (opt1) from hemagglutinin__InfluenzaA__AEX35208

SEQ ID NO: 72082 - RNA, 1701 nt, Artificial Sequence
  derived and/or modified CDS sequence (opt1) from hemagglutinin__InfluenzaA__AEX35219
augaagaccaucaucgcccugagcuacauccucugccugguguucgcccagaagcugcccggcaacgacaacuccaccgcgacgcucugccuggggcaccacgccgucccgaacggcacccuggugaagaccaucaccaacgaccagaucgaggugacgaacgccaccgagcucguccagagcuccagcaccgggggcaucugcgacagcccccaccagauccuggacggggagaacugcacccugaucgacgcccuccugggcgacccccacugcgacggcuuccagaacaaggagugggaccuguucguggagcgcagcaaggccuacuccaacugcuaccccuacgacgugccggacuacgcgagccuccggucccuggucgccagcuccgggacgcuggaguucaacaacgagagcuucaacuggaccggcguggcccagaacgggaccuccagcgccugcaagcgccgguccaacaagagcuucuucucccgccucaacuggcugcaccagcugaaguacaaguaccccgcgcucaacgugaccaugcccaacaacgagaaguucgacaagcuguacaucuggggcguccaccaccccagcacggacuccgaccagaucagccuguacgcccaggccagcgggcgggugaccguguccaccaagcgcagccagcagaccgucaucccgaacaucggcucccggcccugggugcgcgacgugagcucccggaucagcaucuacuggacgaucgucaagcccggcgacauccuccugaucaacuccaccgggaaccugaucgcgccccgcggcuacuucaagauccggagcgggaaguccagcaucaugcgcuccgacgccccgaucggcaagugcaacagcgagugcaucacccccaacggcuccauccccaacgacaagcccuuccagaacgugaaccggaucaccuacggggccugcccgcgcuacgugaagcagaacacgcucaagcuggccaccggcaugcggaacguccccgagaagcagacccgcgggaucuucggcgccaucgccggguucaucgagaacggcugggagggcaugguggacgggugguacggcuuccggcaccagaacagcgaggggaccggccaggccgcggaccugaaguccacgcaggccgccaucaaccagaucaacgggaagcucaaccgccugaucggcaagaccaacgagaaguuccaccagaucgagaaggaguucagcgagguggagggccggauccaggaccuggagaaguacgucgaggacaccaagaucgaccucugguccuacaacgccgagcugcugguggcccucgagaaccagcacaccaucgaccugacggacagcgagaugaacaagcuguucgagcgcaccaagaagcagcuccgggagaacgcggaggacauggggaacggcugcuucaagaucuaccacaagugcgacaacgccugcaucggguccauccgcaacggcaccuacgaccacgacguguaccgcgacgaggcccugaacaaccgguuccagaucaagggggucgagcugaaguccggcuacaaggacuggauccucuggaucagcuucgccauguccugcuuccugcugugcgugguccuccugggcuucaucaugugggccugccagaaggggaacauccgcugcaacaucugcaucuga

SEQ ID NO: 72083 - RNA, 1698 nt, Artificial Sequence; identical to SEQ ID NO: 72024
  derived and/or modified CDS sequence (opt1) from hemagglutinin__InfluenzaA__AEX35230

SEQ ID NO: 72084 - RNA, 1701 nt, Artificial Sequence; identical to SEQ ID NO: 65921
  derived and/or modified CDS sequence (opt1) from hemagglutinin__InfluenzaA__AEX35241

SEQ ID NO: 72085 - RNA, 1698 nt, Artificial Sequence; identical to SEQ ID NO: 72024
  derived and/or modified CDS sequence (opt1) from hemagglutinin__InfluenzaA__AEX35263

SEQ ID NO: 72086 - RNA, 1698 nt, Artificial Sequence; identical to SEQ ID NO: 72024
  derived and/or modified CDS sequence (opt1) from hemagglutinin__InfluenzaA__AEX35274

SEQ ID NO: 72087 - RNA, 1701 nt, Artificial Sequence; identical to SEQ ID NO: 65819
  derived and/or modified CDS sequence (opt1) from hemagglutinin__InfluenzaA__AEX35285

SEQ ID NO: 72088 - RNA, 1701 nt, Artificial Sequence; identical to SEQ ID NO: 71985
  derived and/or modified CDS sequence (opt1) from hemagglutinin__InfluenzaA__AEX35296

SEQ ID NO: 72089 - RNA, 1701 nt, Artificial Sequence
  derived and/or modified CDS sequence (opt1) from hemagglutinin__InfluenzaA__AEX35307
augaagaccaucaucgcccugagcuacauccucugccugguguucgcccagaagauccccggcaacgacaacuccaccgcgacgcugugccucgggcaccacgccgucccgaacggcaccaucgugaagaccaucaccaacgaccagaucgaggugacgaacgccaccgagcugguccagagcuccagcaccgggggcaucugcgacagcccccaccagauccuggacggggagaacugcacccucaucgacgcccugcugggcgacccccagugcgacggcuuccagaacaagaagugggaccucuucguggagcgcuccaaggccuacuccaacugcuaccccuacgacgugccggacuacgcgagccugcggucccuggucgccagcuccgggacgcucgaguucaacaacgagagcuucaacuggaccggcgugacccagaacgggaccuccagcgccugcaagcgccgguccaacaagagcuucuucucccgccugaacuggcugacgcaccucaaguacaaguaccccgcccugaacgugaccaugcccaacaacgagaaguucgacaagcuguacaucuggggcguccaccaccccgggaccgacagcgaccagaucucccucuacgcgcaggccagcggccggaucaccgugagcacgaagcgcucccagcagaccgugaucccgaacaucggcagccggccccgcguccgggacguguccagccgcaucuccaucuacuggaccaucgugaagcccggggacauccugcugaucaacagcaccggcaaccucaucgcgccccggggguacuucaagauccgcuccggcaagagcuccaucaugcggagcgacgccccgaucggcaagugcaacuccgagugcaucacgcccaacgggagcauccccaacgacaagcccuuccagaacgucaaccgcaucaccuacggcgccugcccgcgguacgugaagcagaacacccugaagcuggccaccgggaugcgcaacgugcccgagaagcagacgcggggcaucuucggggccaucgccggcuucaucgagaacggcugggaggggauggucgacggcugguacggguuccgccaccagaacuccgagggcaccgggcaggccgccgaccucaagagcacccaggcggccaucaaccagaucaacggcaagcugaaccggcugaucggcaagaccaacgagaaguuccaccagaucgagaaggaguucuccgagguggaggggcgcauccaggaccucgagaaguacguggaggacacgaagaucgaccuguggagcuacaacgccgagcugcucgucgcccuggagaaccagcacaccaucgaccugaccgacuccgagaugaacaagcuguucgagcggaccaagaagcagcuccgcgagaacgccgaggacaugggcaacgggugcuucaagaucuaccacaagugcgacaacgcgugcaucggcagcauccgcaacgggacguacgaccacgacguguaccgggacgaggcccugaacaaccgcuuccagaucaagggcguggagcucaaguccggcuacaaggacuggauccuguggaucagcuucgccaucagcugcuuccugcucugcgucgugcugcugggguucaucaugugggccugccagaagggcaacauccggugcaacaucugcaucuga

SEQ ID NO: 72090 - RNA, 1701 nt, Artificial Sequence; identical to SEQ ID NO: 71985
  derived and/or modified CDS sequence (opt1) from hemagglutinin__InfluenzaA__AEX35318

SEQ ID NO: 72091 - RNA, 1701 nt, Artificial Sequence
  derived and/or modified CDS sequence (opt1) from hemagglutinin__InfluenzaA__AEX35329
augaagaccaucaucgcccugagcuacuuccucugccugguguucgcccagaagcugcccggcaacgacaacuccaccgcgacgcucugccuggggcaccacgccgucccgaacggcaccaucgugaagaccaucaccaacgaccagaucgaggugacgaacgccaccgagcugguccagaacagcuccaccgggggcaucugcgacagcccccaccagauccucgacggggagaacugcacccugaucgacgcccugcucggcgacccccagugcgacggcuuccagaacaagaagugggaccuguucguggagcgcuccaaggccuacagcaacugcuaccccuacgacgugccggacuacgcgucccugcggagccucgucgccuccagcgggacgcuggaguucaacaacgaguccuucaacuggaccggcgugacccagaacgggaccagcuccgccugcaagcgccggagcaacaaguccuucuucagccgccugaacuggcucacgcaccugaaguacaaguaccccgcccugaacgugaccaugcccaacaacgagaaguucgacaagcucuacaucuggggcguccaccaccccgggaccgacuccgaccagaucagccuguacgcgcaggccuccggccggaucaccgugagcacgaagcgcagccagcagaccgugaucccgaacaucggcucccggccccgcguccgggacgugagcucccgcaucagcaucuacuggaccaucgugaagcccggggacauccugcucaucaacuccaccggcaaccugaucgcgccccggggguacuucaagauccgcagcggcaaguccagcaucaugcgguccgacgccccgaucggcaagugcaacagcgagugcaucacgcccaacggguccauccccaacgacaagcccuuccagaacgucaaccgcaucaccuacggcgccugcccgcgguacgugaagcagaacacccugaagcucgccaccgggaugcgcaacgugcccgagaagcagacgcggggcaucuucggggccaucgccggcuucaucgagaacggcugggaggggauggucgacggcugguacggguuccgccaccagaacagcgagggcaccgggcaggccgccgaccugaaguccacccaggcggccaucaaccagaucaacggcaagcugaaccggcucaucggcaagaccaacgagaaguuccaccagaucgagaaggaguucagcgagguggaggggcgcauccaggaccuggagaaguacguggaggacacgaagaucgaccugugguccuacaacgccgagcuccuggucgcccuggagaaccagcacaccaucgaccucaccgacagcgagaugaacaagcuguucgagcggaccaagaagcagcugcgcgagaacgccgaggacaugggcaacgggugcuucaagaucuaccacaagugcgacaacgcgugcaucggcuccauccgcaacgggacguacgaccacgacguguaccgggacgaggcccucaacaaccgcuuccagaucaagggcguggagcucaagagcggcuacaaggacuggauccuguggaucuccuucgccaucagcugcuuccugcugugcgucgcccugcucggguucaucaugugggccugccagaagggcaacauccggugcaacaucugcaucuga

SEQ ID NO: 72092 - RNA, 1701 nt, Artificial Sequence
  derived and/or modified CDS sequence (opt1) from hemagglutinin__InfluenzaA__AEX35340
augaagaccaucaucgcccugagcuacauccucugccugguguucgcccagaagcugcccggcaacgacaacuccaccgcgacgcucugccuggggcaccacgccgucccgaacggcaccaucgugaagaccaucaccaacgaccagaucgaggugacgaacgccaccgagcugguccagaacagcuccaccgggggcaucugcgacagcccccaccagauccucgacggggagaacugcacccugaucgacgcccugcucggcgacccccagugcgacggcuuccagaacaagaagugggaccuguucguggagcgcuccaaggccuacagcaacugcuaccccuacgacgugccggacuacgcgucccugcggagccucgucgccuccagcgggacgcuggaguucaacaacgaguccuucaacuggaccggcgugacccagaacgggaccagcuccgccugcaagcgccggagcaacaaguccuucuucagccgccugaacuggcucacgcaccugaaguacaaguaccccgcccugaacgugaccaugcccaacaacgagaaguucgacaagcucuacaucuggggcguccaccaccccgggaccgacuccgaccagaucagccuguacgcgcaggccuccggccggaucaccgugagcacgaagcgcagccagcagaccgugaucccgaacaucggcucccggccccgcguccgggacgugagcucccgcaucagcaucuacuggaccaucgugaagcccggggacauccugcucaucaacuccaccggcaaccugaucgcgccccggggguacuucaagauccgcagcggcaaguccagcaucaugcgguccgacgccccgaucggcaagugcaacagcgagugcaucacgcccaacggguccauccccaacgacaagcccuuccagaacgucaaccgcaucaccuacggcgccugcccgcgguacgugaagcagaacacccugaagcucgccaccgggaugcgcaacgugcccgagaagcagacgcggggcaucuucggggccaucgccggcuucaucgagaacggcugggaggggauggucgacggcugguacggguuccgccaccagaacagcgagggcaccgggcaggccgccgaccugaaguccacccaggcggccaucaaccagaucaacggcaagcugaaccggcucaucggcaagaccaacgagaaguuccaccagaucgagaaggaguucagcgagguggaggggcgcauccaggaccuggagaaguacguggaggacacgaagaucgaccugugguccuacaacgccgagcuccuggucgcccuggagaaccagcacaccaucgaccucaccgacagcgagaugaacaagcuguucgagcggaccaagaagcagcugcgcgagaacgccgaggacaugggcaacgggugcuucaagaucuaccacaagugcgacaacgcgugcaucggcuccauccgcaacgggacguacgaccacgacguguaccgggacgaggcccucaacaaccgcuuccagaucaagggcguggagcucaagagcggcuacaaggacuggauccuguggaucuccuucgccaucagcugcuuccugcugugcgucgcccugcucggguucaucaugugggccugccagaagggcaacauccggugcaacaucugcaucuga

SEQ ID NO: 72093 - RNA, 1701 nt, Artificial Sequence; identical to SEQ ID NO: 71985
  derived and/or modified CDS sequence (opt1) from hemagglutinin__InfluenzaA__AEX35351

SEQ ID NO: 72094 - RNA, 1701 nt, Artificial Sequence; identical to SEQ ID NO: 71985
  derived and/or modified CDS sequence (opt1) from hemagglutinin__InfluenzaA__AEX35362

SEQ ID NO: 72095 - RNA, 1701 nt, Artificial Sequence; identical to SEQ ID NO: 65819
  derived and/or modified CDS sequence (opt1) from hemagglutinin__InfluenzaA__AEX35373

SEQ ID NO: 72096 - RNA, 1701 nt, Artificial Sequence
  derived and/or modified CDS sequence (opt1) from hemagglutinin__InfluenzaA__AEX35384
augaagaccaucaucgcccugagcuacauccucugccugguguucgcccagaagcugcccggcaacgacaacuccaccgcgacgcucugccuggggcaccacgccgucccgaacggcaccaucgugaagaccaucaccaacgaccagaucgaggugacgaacgccaccgagcugguccagagcuccagcaccgggggcaucugcgacagcccccaccagauccucgacggggagaacugcacccugaucgacgcccugcucggcgacccccagugcgacggcuuccagaacaagaagugggaccuguucguggagcgcagcaaggccuacuccaacugcuaccccuacgacgugccggacuacgcgagccugcggucccucgucgccagcuccgggacgcuggaguucaacaacgagagcuucaacuggaccggcgugacccagaacgggaccuccagcgccugcaagcgccgguccaacaagagcuucuucucccgccugaacuggcucacgcaccugaaguucaaguaccccgcccugagcgugaccaugcccaacaacgagaaguucgacaagcucuacaucuggggcguccaccaccccgggaccgacaacgaccagaucucccuguacgcgcaggccagcggccggaucaccgugagcacgaagcgcucccagcagaccgugaucccgaacaucggcagccggacccgcguccgggacgugcccucccgcaucagcaucuacuggaccaucgugaagcccggggacauccugcucaucaacuccacgggcaaccugaucgcgccccggggguacuucaagauccgcagcggcaaguccagcaucaugcgguccgacgccccgaucggcaagugcaacagcgagugcaucacccccaacggguccauccccaacgacaagcccuuccagaacgucaaccgcaucaccuacggcgccugcccgcgguacgugaagcagaacacccugaagcucgccacggggaugcgcaacgugcccgagaagcagacccggggcaucuucggggccaucgccggcuucaucgagaacggcugggaggggauggucgacggcugguacggguuccgccaccagaacagcgagggcaccgggcaggccgccgaccugaaguccacccaggcggccaucaaccagaucaacggcaagcugaaccggcucaucggcaagacgaacgagaaguuccaccagaucgagaaggaguucagcgagguggaggggcgcauccaggaccuggagaaguacguggaggacaccaagaucgaccugugguccuacaacgccgagcuccuggucgcccuggagaaccagcacaccaucgaccucaccgacagcgagaugaacaagcuguucgagcggacgaagaagcagcugcgcgagaacgccgaggacaugggcaacgggugcuucaagaucuaccacaagugcgacaacgcgugcaucggcuccauccgcaacgggaccuacgaccacgacguguaccgggacgaggcccucaacaaccgcuuccagaucaagggcguggagcugaaguccggcuacaaggacuggauccuguggaucuccuucgccaucagcugcuuccuccugugcgucgcccugcucggguucaucaugugggccugccagaagggcaacauccggugcaacaucugcaucuga

SEQ ID NO: 72097 - RNA, 1701 nt, Artificial Sequence
  derived and/or modified CDS sequence (opt1) from hemagglutinin__InfluenzaA__AEX35395
augaagaccaucaucgcccugagcuacauccucugccugguguucgcccagaagcugcccggcaacgacaacuccaccgcgacgcucugccuggggcaccacgccgucccgaacggcaccaucgugaagaccaucaccaacgaccagaucgaggugacgaacgccaccgagcugguccagagcuccagcaccggggagaucugcgacagcccccaccagauccucgacggcgagaacugcacccugaucgacgcccugcucggggacccccagugcgacggcuuccagaacaagaaguggaaccuguucguggagcgcagcaaggccuacuccaacugcuaccccuacgacgugccggacuacgcgagccugcggucccucgucgccagcuccggcacgcuggaguucaacaacgagagcuucaacuggaccggggugacccagaacggcaccuccagcgccugcaagcgccgguccaacaagagcuucuucucccgccugaacuggcucacgcaccugaaguucaaguaccccgcccugaacgugaccaugcccaacaacgagaaguucgacaagcucuacaucuggggcguccaccaccccgggaccgacaacgaccagaucagccuguacgcgcaggccuccgggcggaucaccgugagcacgaagcgcagccagcagaccgugaucccgaacaucggcucccggccccgcguccgggacgugcccagccgcaucuccaucuacuggaccaucgugaagcccggcgacauccugcucaucaacagcaccgggaaccugaucgccccgcggggcuacuucaagauccgcuccgggaaguccuccaucaugcggagcgacgcccccaucggcaagugcaacuccgagugcaucacgcccaacggcagcauccccaacgacaagccguuccagaacgucaaccgcaucaccuacggggccugcccccgguacgugaagcagaacacccugaagcucgcgaccggcaugcgcaacgugcccgagaagcagacgcgggggaucuucggcgccaucgccggguucaucgagaacggcugggagggcauggucgacgggugguacggcuuccgccaccagaacuccgaggggaccggccaggccgccgaccucaagagcacccaggcggccaucaaccagaucaacgggaagcugaaccggcugaucggcaagaccaacgagaaguuccaccagaucgagaaggaguucuccgagguggagggccgcauccaggaccuggagaaguacguggaggacacgaagaucgaccuguggagcuacaacgccgagcuccuggucgcccuggagaaccagcacaccaucgaccucaccgacuccgagaugaacaagcuguucgagcggaccaagaagcagcugcgcgagaacgccgaggacauggggaacggcugcuucaagaucuaccacaagugcgacaacgcgugcaucgggagcauccgcaacggcacguacgaccacgacguguaccgggacgaggcccucaacaaccgcuuccagaucaaggggguggagcugaaguccggcuacaaggacuggauccuguggaucagcuucgccaucuccugcuuccuccugugcgucgcccugcucggcuucaucaugugggccugccagaaggggaacauccggugcaacaucugcaucuga

SEQ ID NO: 72098 - RNA, 1701 nt, Artificial Sequence; identical to SEQ ID NO: 65819
  derived and/or modified CDS sequence (opt1) from hemagglutinin__InfluenzaA__AEX35406

SEQ ID NO: 72099 - RNA, 1701 nt, Artificial Sequence; identical to SEQ ID NO: 65819
  derived and/or modified CDS sequence (opt1) from hemagglutinin__InfluenzaA__AEX35417

SEQ ID NO: 72100 - RNA, 1701 nt, Artificial Sequence
  derived and/or modified CDS sequence (opt1) from hemagglutinin__InfluenzaA__AEX35428
augaagaccaucaucgcccugagcuacauccucugccugguguucgcccagaagcugcccggcaacgacaacuccaccgcgacgcucugccuggggcaccacgccgucccgaacggcacccuggugaagaccaucaccaacgaccagaucgaggugacgaacgccaccgagcucguccagagcuccagcaccgggggcaucugcgacagcccccaccagauccuggacggggagaacugcacccugaucgacgcccuccugggcgacccccacugcgacggcuuccagaacaagaagugggaccuguucguggagcgcagcaaggccuacuccaacugcuaccccuacgacgugccggacuacgcgagccuccggucccuggucgccagcuccgggacgcuggaguucaacaacgagagcuucaacuggaccggcguggcccagaacgggaccuccagcgccugcaagcgccgguccgacaagagcuucuucucccgccucaacuggcugcaccagcugaaguacaaguaccccgcgcucaacgugaccaugcccaacaacgagaaguucgacaagcuguacaucuggggcguccaccaccccgggacggacagcgaccagaucucccuguacgcccaggccagcggccggaucaccgugagcaccaagcgcucccagcagaccgugaucccgaacaucggcagccggccccgcguccgggacguguccagccgcaucuccaucuacuggacgaucgugaagcccggggacauccucuucaucaacagcaccggcaaccugaucgcgccccggggguacuucaagauccgcuccggcaagagcuccaucaugcggagcgacgccccgaucgacaagugcaacuccgagugcaucacccccaacggcagcauccccaacgacaagcccuuccagaacgucaaccgcaucaccuacggggccugcccgcgguacgugaagcagaacacgcugaagcucgccaccggcaugcgcaacgugcccgagaagcagacccgggggaucuucggcgccaucgccggguucaucgagaacggcugggagggcauggucgacgggugguacggcuuccgccaccagaacuccgaggggaccggccaggccgcggaccugaaguccacgcaggccgccaucaaccagaucaacgggaagcugaaccggcucaucggcaagaccaacgagaaguuccaccagaucgagaaggaguucuccgagguggagggccgcauccaggaccuggagaaguacguggaggacaccaagaucgaccuguggagcuacaacgccgagcuccuggucgcccuggagaaccagcacaccaucgaccucacggacuccgagaugaacaagcuguucgagcggaccaagaagcagcugcgcgagaacgcggaggacauggggaacggcugcuucaagaucuaccacaagugcgacaacgccugcaucgggagcauccgcaacggcaccuacgaccacgacguguaccgggacgaggcccucaacaaccgcuuccagaucaaggggguggagcugaaguccggcuacaaggacuggauccuguggaucagcuucgccaucagcugcuuccuccugugcgucgcccugcucggcuucaucaugugggcgugccagaaggggaacauccggugcaacaucugcaucuga

SEQ ID NO: 72101 - RNA, 1698 nt, Artificial Sequence
  derived and/or modified CDS sequence (opt1) from hemagglutinin__InfluenzaA__AEX35439
augaaggugaagcugcucguccugcugugcaccuucaccgccacguacgccgacaccaucugcaucggcuaccacgcgaacaacagcaccgacaccguggacacggugcucgagaagaacgucaccgugacccacuccgugaaccugcuggaggacagccacaacgggaagcucugccugcugaagggcaucgcgccccuccagcuggggaacugcuccgucgccggcuggauccuggggaacccggagugcgagcuccugaucagcaaggaguccuggagcuacaucguggagacccccaaccccgagaacggcacgugcuaccccggcuacuucgccgacuacgaggagcugcgcgagcagcucuccagcguguccagcuucgagcgguucgagaucuucccgaaggaguccagcuggcccaaccacaccgucaccgggguguccgccagcugcucccacaacggcaagagcuccuucuaccgcaaccugcuguggcucaccgggaagaacggccuguaccccaaccugagcaaguccuacgccaacaacaaggagaaggaggugcucguccuguggggcgugcaccacccgcccaacaucggggaccagcgggcccuguaccacacggagaacgccuacgugagcgucgugagcucccacuacagccgccgguucacccccgagaucgccaagcgccccaaggugcgggaccaggagggccgcaucaacuacuacuggacccuccuggagcccggggacaccaucaucuucgaggcgaacggcaaccugaucgccccgcgguucgccuucgcccucucccgcggguucggcagcggcaucaucacguccaacgcccccauggacgagugcgacgcgaagugccagacgccccagggggccaucaacagcucccugcccuuccagaacguccacccggugaccaucggcgagugccccaaguacgugcggagcgccaagcugcgcauggucaccgggcuccggaacauccccuccauccagagccgcggccuguucggggccaucgccggcuucaucgagggcggguggaccggcaugguggacgggugguacggcuaccaccaccagaacgagcagggguccggcuacgcggccgaccagaaguccacccagaacgccaucaacggcaucaccaacaaggugaacagcgucaucgagaagaugaacacccaguucacggccguggggaaggaguucaacaagcuggagcggcgcauggagaaccucaacaagaaggucgacgacggcuuccuggacaucuggaccuacaacgccgagcugcucgugcugcuggagaacgagcggacccucgacuuccacgacagcaacgugaagaaccuguacgagaaggucaagucccagcugaagaacaacgcgaaggagaucgggaacggcugcuucgaguucuaccacaagugcaacgacgagugcauggagagcgugaagaacgggaccuacgacuaccccaaguacuccgaggagagcaagcucaaccgcgagaagaucgacggcgugaagcuggaguccaugggcgucuaccagauccuggccaucuacagcacgguggccagcucccucgugcugcuggucagccucggggccaucuccuucuggaugugcagcaacggcucccugcagugccggaucugcaucuga

SEQ ID NO: 72102 - RNA, 1701 nt, Artificial Sequence
  derived and/or modified CDS sequence (opt1) from hemagglutinin__InfluenzaA__AEX35450
augaagaccaucaucgcccugagcuacauccucugccugguguucgcccagaagcugcccggcaacgacaacuccaccgcgacgcucugccuggggcaccacgccgucccgaacggcaccaucgugaagaccaucaccaacgaccagaucgaggugacgaacgccaccgagcugguccagagcuccagcaccgggggcaucugcgacagcccccaccagauccucgacggggagaacugcacccugaucgacgcccugcucggcgacccccagugcgacggcuuccagaacaagaagugggaccuguucguggagcgcagcaaggccuacuccaacugcuaccccuacgacgugccggacuacgcgagccugcggucccucgucgccagcuccgggacgcuggaguucaacaacgagaacuucaacuggaccggcgugacccagaacgggaccagcuccgccugcaagcgccggagcaacaacuccuucuucagccgccugaacuggcucacgcaccugaaguucaaguaccccgcccugaacgugaccaugcccaacaacgagaaguucgacaagcucuacaucuggggcguccaccaccccgggaccgacaacgaccagaucuuccuguacgcgcaggccuccggccggaucaccgugagcacgaagcgcucccagcagaccgugaucccgaacaucggcagccggccccgcguccggaacauccccagccgcaucuccaucuacuggaccaucgugaagcccggggacauccugcucaucaacagcaccggcaaccugaucgccccgcggggguacuucaagauccaguccggcaagagcuccaucaugcgcagcgacgcccccaucggcaagugcaacuccgagugcaucacgcccaacgggagcauccccaacgacaagccguuccagaacgugaaccggaucaccuacggcgccugcccccgcuacgucaagcagaacacccugaagcucgcgaccgggaugcggaacgugcccgagaagcagacgcgcggcaucuucggggccaucgccggcuucaucgagaacggcugggaggggaugguggacggcugguacggguuccggcaccagaacuccgagggcaucgggcaggccgccgaccugaaguccacccaggcggccaucaaccagaucaacggcaagcugaaccgccucaucggcaagaccaacgagaaguuccaccagaucgagaaggaguucuccgaggucgaggggcggauccaggaccuggagaaguacguggaggacaccaagaucgaccuguggagcuacaacgccgagcuccugguggcccuggagaaccagcacacgaucgaccucaccgacuccgagaugaacaagcuguucgagcgcaccaagaagcagcugcgggagaacgccgaggacaugggcaacgggugcuucaagaucuaccacaagugcgacaacgcgugcaucggcagcauccgcaacgggaccuacgaccacgacgucuaccgcgacgaggcccucaacaaccgguuccagaucaagggcguggagcugaaguccggcuacaaggacuggauccuguggaucagcuucgccaucuccugcuuccuccugugcguggcccugcucggguucaucaugugggccugccagaagggcaacauccgcugcaacaucugcaucuga

SEQ ID NO: 72103 - RNA, 1701 nt, Artificial Sequence; identical to SEQ ID NO: 64654
  derived and/or modified CDS sequence (opt1) from hemagglutinin__InfluenzaA__AEX35461

SEQ ID NO: 72104 - RNA, 1701 nt, Artificial Sequence
  derived and/or modified CDS sequence (opt1) from hemagglutinin__InfluenzaA__AEX35472
augaagaccaucaucgcccugagcuacauccucugccugguguucgcccagaagcugcccggcaacgacaacuccaccgcgacgcucugccuggggcaccacgccgucccgaacggcaccaucgugaagaccaucaccaacgaccagaucgaggugacgaacgccaccgagcugguccagagcuccagcaccgggggcaucugcgacagcccccaccagauccucgacggggagaacugcacccugaucgacgcccugcucggcgacccccagugcgacgacuuccagaacaagaagugggaccuguucguggagcgcagcaaggccuacuccaacugcuaccccuacgacgugccggacuacgcgagccugcggucccucgucgccagcuccggcacgcuggaguucaacaacgagagcuucaacuggaccggggugacccagaacggcaccuccagcgccugcaagcgccgguccaacaacagcuucuucucccgccugaacuggcucacgcaccugaaguucaaguaccccgcccugaacgugaccaugcccaacaacgagaaguucgacaagcucuacaucuggggcguccaccaccccgggaccgacaacgaccagaucuuccuguacgcgcaggccagcgggcggaucaccguguccacgaagcgcagccagcagaccgugaucccgaacaucggcagccggccccgcguccggaacauccccucccgcaucagcaucuacuggaccaucgugaagcccggcgacauccugcucaucaacuccaccgggaaccugaucgccccgcggggcuacuucaagauccgcagcgggaaguccagcaucaugcgguccgacgcccccaucggcaagugcaacagcgagugcaucacgcccaacggcuccauccccaacgacaagccguuccagaacgugaaccgcaucaccuacggggccugcccccgguacgucaagcagaacacccugaagcucgcgaccggcaugcgcaacgugcccgagaagcagacgcgggggaucuucggcgccaucgccggguucaucgagaacggcugggagggcaugguggacgggugguacggcuuccgccaccagaacagcgaggggaucggccaggccgccgaccugaaguccacccaggcggccaucaaccagaucaacgggaagcugaaccggcucaucggcaagaccaacgagaaguuccaccagaucgagaaggaguucagcgaggucgagggccgcauccaggaccuggagaaguacguggaggacaccaagaucgaccugugguccuacaacgccgagcuccugguggcccuggagaaccagcacacgaucgaccucaccgacagcgagaugaacaagcuguucgagcggaccaagaagcagcugcgcgagaacgccgaggacauggggaacggcugcuucaagaucuaccacaagugcgacaacgcgugcaucggguccauccgcaacggcaccuacgaccacgacgucuaccgggacgaggcccucaacaaccgcuuccagaucaaggggguggagcugaaguccggcuacaaggacuggauccuguggaucuccuucgccaucagcugcuuccuccugugcgugguccugcucggcuucaucaugugggccugccagaaggggaacauccggugcaacaucugcaucuga

SEQ ID NO: 72105 - RNA, 1701 nt, Artificial Sequence; identical to SEQ ID NO: 64654
  derived and/or modified CDS sequence (opt1) from hemagglutinin__InfluenzaA__AEX35483

SEQ ID NO: 72106 - RNA, 1701 nt, Artificial Sequence
  derived and/or modified CDS sequence (opt1) from hemagglutinin__InfluenzaA__AEX35494
augaagaccaucaucgcccugagcuacauccucugccugguguucgcccagaagcugcccggcaacgacaacuccaccgcgacgcucugccuggggcaccacgccgucccgaacggcaccaucgugaagaccaucaccaacgaccagaucgaggugacgaacgccaccgagcugguccagagcuccagcaccgggggcaucugcgacagcccccaccagauccucgacggggagaacugcacccugaucgacgcccugcucggcgacccccagugcgacggccugcagaacaagaagugggaccuguucguggagcgcagcaaggccuacuccaacugcuaccccuacgacgugccggacuacgcgagccuccggucccuggucgccagcuccgggacgcuggaguucaacaacgagagcuucaacuggaccggcgugacccagaacgggaccuccagcgccugcaagcgccgguccaacaacagcuucuucucccgccucaacuggcugacgcaccugaaguucaaguaccccgcccucaacgugaccaugcccaacaacgagaaguucgacaagcuguacaucuggggcguccaccaccccgggaccgacaacgaccagaucuuccuguacgcgcaggccagcggccggaucaccguguccacgaagcgcagccagcagaccgugaucccgaacaucggcagccggccccgcguccggaacauccccucccgcaucagcaucuacuggaccaucgugaagcccggggacauccuccugaucaacuccaccggcaaccugaucgccccgcggggguacuucaagauccgcagcggcaaguccagcaucaugcgguccgacgcccccaucggcaagugcaacagcgagugcaucacgcccaacggguccauccccaacgacaagccguuccagaacgugaaccgcaucaccuacggcgccugcccccgguacgucaagcagaacacccucaagcuggcgaccgggaugcgcaacgugcccgagaagcagacgcggggcaucuucggggccaucgccggcuucaucgagaacggcugggaggggaugauggacggcugguacggguuccgccaccagaacagcgagggcaucgggcaggccgccgaccugaaguccacccaggcggccaucaaccagaucaacggcaagcucaaccggcugaucggcaagaccaacgagaaguuccaccagaucgagaaggaguucagcgagguggaggggcgcauccaggaccuggagaaguacgucgaggacaccaagaucgaccucugguccuacaacgccgagcugcugguggcccucgagaaccagcacacgaucgaccugaccgacagcgagaugaacaagcuguucgagcggaccaagaagcagcuccgcgagaacgccgaggacaugggcaacgggugcuucaagaucuaccacaagugcgacaacgcgugcaucggcuccauccgcaacgggaccuacgaccacgacguguaccgggacgaggcccugaacaaccgcuuccagaucaagggcgucgagcugaaguccggcuacaaggacuggauccucuggaucuccuucgccaucagcugcuuccugcugugcguggcccuccugggguucaucaugugggccugccagaagggcaacauccggugcaacaucugcaucuga

SEQ ID NO: 72107 - RNA, 1701 nt, Artificial Sequence
  derived and/or modified CDS sequence (opt1) from hemagglutinin__InfluenzaA__AEX35505
augaagaccaucaucgcccugagcuacauccucugccugguguucgcccagaagcugcccggcaacgacaacuccaccgcgacgcucugccuggggcaccacgccgucccgaacggcaccaucgugaagaccaucaccaacgaccagaucgaggugacgaacgccaccgagcugguccagagcuccagcaccgggggcaucugcgacagcccccaccagauccucgacggggagaacugcacccugaucgacgcccugcucggcgacccccagugcgacgacuuccagaacaagaagugggaccuguucguggagcgcagcaaggccuacuccaacugcuaccccuacgacgugccggacuacgcgagccugcggucccucgucgccagcuccggcacgcuggaguucaacaacgagagcuucaacuggaccggggugacccagaacggcaccuccagcgccugcaagcgccgguccaacaacagcuucuucucccgccugaacuggcucacgcaccugaaguucaaguaccccgcccugaacgugaccaugcccaacaacgagaaguucgacaagcucuacaucuggggcguccaccaccccgggaccgacaacgaccagaucuuccuguacgcgcaggccagcgggcggaucaccguguccacgaagcgcagccagcagaccgugaucccgaacaucggcagccggccccgcguccggaacauccccucccgcaucagcaucuacuggaccaucgugaagcccggcgacauccugcucaucaacuccaccgggaaccugaucgccccgcggggcuacuucaagauccugagcgggaaguccagcaucaugcgcuccgacgcccccaucggcaagugcaacagcgagugcaucacgcccaacggcuccauccccaacgacaagccguuccagaacgugaaccggaucaccuacggggccugcccccgcuacgucaagcagaacacccucaagcuggcgaccggcaugcggaacgugcccgagaagcagacgcgcgggaucuucggcgccaucgccggguucaucgagaacggcugggagggcaugguggacgggugguacggcuuccggcaccagaacagcgaggggaucggccaggccgccgaccugaaguccacccaggcggccaucaaccagaucaacgggaagcucaaccgccugaucggcaagaccaacgagaaguuccaccagaucgagaaggaguucagcgaggucgagggccggauccaggaccuggagaaguacguggaggacaccaagaucgaccucugguccuacaacgccgagcugcugguggcccucgagaaccagcacacgaucgaccugaccgacagcgagaugaacaagcuguucgagcgcaccaagaagcagcuccgggagaacgccgaggacauggggaacggcugcuucaagaucuaccacaagugcgacaacgcgugcaucggguccauccgcaacggcaccuacgaccacgacgucuaccgcgacgaggcccugaacaaccgguuccagaucaaggggguggagcugaaguccggcuacaaggacuggauccucuggaucuccuucgccaucagcugcuuccugcugugcguggcccuccugggcuucaucaugugggccugccagaaggggaacauccgcugcaacaucugcaucuga

SEQ ID NO: 72108 - RNA, 1701 nt, Artificial Sequence
  derived and/or modified CDS sequence (opt1) from hemagglutinin__InfluenzaA__AEX35516
augaagaccaucaucgcccugagcuacauccucugccugguguucgcccagaagcugcccggcaacgacaacuccaccgcgacgcucugccuggggcaccacgccgucccgaacggcaccaucgugaagaccaucaccaacgaccagaucgaggugacgaacgccaccgagcugguccagagcuccagcaccgggggcaucugcgacagcccccaccagauccucgacggggagaacugcacccugaucgacgcccugcucggcgacccccagugcgacggccugcagaacaagaagugggaccuguucguggagcgcagcaaggccuacuccaacugcuaccccuacgacgugccggacuacgcgagccuccggucccuggucgccagcuccgggacgcuggaguucaacaacgagagcuucaacuggaccggcgugacccagaacgggaccuccagcgccugcaagcgccgguccaacaacagcuucuucucccgccucaacuggcugacgcaccugaaguucaaguaccccgcccucaacgugaccaugcccaacaacgagaaguucgacaagcuguacaucuggggcguccaccaccccgggaccgacaacgaccagaucuuccuguacgcgcaggccagcggccggaucaccguguccacgaagcgcagccagcagaccgugaucccgaacaucggcagccggccccgcguccggaacauccccucccgcaucagcaucuacuggaccaucgugaagcccggggacauccuccugaucaacuccaccggcaaccugaucgccccgcggggguacuucaagauccgcagcggcaaguccagcaucaugcgguccgacgcccccaucggcaagugcaacagcgagugcaucacgcccaacggguccauccccaacgacaagccguuccagaacgugaaccgcaucaccuacggcgccugcccccgguacgucaagcagaacacccucaagcuggcgaccgggaugcgcaacgugcccgagaagcagacgcggggcaucuucggggccaucgccggcuucaucgagaacggcugggaggggaugguggacggcugguacggguuccgccaccagaacagcgagggcaucgggcaggccgccgaccugaaguccacccaggcggccaucaaccagaucaacggcaagcucaaccggcugaucggcaagaccaacgagaaguuccaccagaucgagaaggaguucagcgaggucgaggggcgcauccaggaccuggagaaguacguggaggacaccaagaucgaccucugguccuacaacgccgagcugcugguggcccucgagaaccagcacacgaucgaccugaccgacagcgagaugaacaagcuguucgagcggaccaagaagcagcuccgcgagaacgccgaggacaugggcaacgggugcuucaagaucuaccacaagugcgacaacgcgugcaucggcuccauccgcaacgggaccuacgaccacgacgucuaccgggacgaggcccugaacaaccgcuuccagaucaagggcguggagcugaaguccggcuacaaggacuggauccucuggaucuccuucgccaucagcugcuuccugcugugcguggcccuccugggguucaucaugugggccugccagaagggcaacauccggugcaacaucugcaucuga

SEQ ID NO: 72109 - RNA, 1701 nt, Artificial Sequence
  derived and/or modified CDS sequence (opt1) from hemagglutinin__InfluenzaA__AEX35527
augaagaccaucaucgcccugagcuacauccucugccugguguucgcccagaagcugcccggcaacgacaacuccaccgcgacgcucugccuggggcaccacgccgucccgaacggcaccaucgugaagaccaucaccaacgaccagaucgaggugacgaacgccaccgagcugguccagagcuccagcaccgggggcaucugcgacagcccccaccagauccucgacggggagaacugcacccugaucgacgcccugcucggcgacccccagugcgacggcuuccagaacaagaagugggaccuguucguggagcgcagcaaggccuacuccaacugcuaccccuacgacgugccggacuacgucagccugcggucccucguggcgagcuccgggacgcuggaguucaacaacgagagcuucaacuggaccggcgugacccagaacgggaccuccagcgccugcaagcgccgguccaacaacagcuucuucucccgccugaacuggcucacgcaccugaaguucaaguaccccgcccugaacgucaccaugcccaacaacgagcaguucgacaagcucuacaucuggggcgugcaccaccccgggaccgacaacgaccagaucagccuguacgcccaggcguccggccggaucaccgugagcacgaagcgcagccagcagaccgucaucccgaacaucggcucccggccccgcgugcgggacauccccagccgcaucuccaucuacuggaccaucgugaagcccggggacauccugcucaucaacagcaccggcaaccugaucgccccgcggggguacuucaagauccgcuccggcaagagcuccaucaugcggagcgacgcccccaucggcaagugcaacuccgagugcaucacgcccaacgggagcauccccaacgacaagccguuccagaacgucaaccgcaucaccuacggcgccugcccccgguacgugaagcagaacacccugaagcucgccaccgggaugcgcaacgugcccgagaagcagacgcggggcaucuucggggcgaucgccggcuucaucgagaacggcugggaggggauggucgacggcugguacggguuccgccaccagaacuccgagggcaucgggcaggccgccgaccugaaguccacccaggccgcgaucaaccagaucaacggcaagcugaaccggcucaucggcaagaccaacgagaaguuccaccagaucgagaaggaguucuccgagguggaggggcgcauccaggaccuggagaaguacguggaggacaccaagaucgaccuguggagcuacaacgccgagcuccuggucgcccuggagaaccagcacacgaucgaccucaccgacuccgagaugaacaagcuguucgagcggaccaagaagcagcugcgcgagaacgccgaggacaugggcaacgggugcuucaagaucuaccacaagugcgacaacgccugcaucggcagcauccgcaacgggaccuacgaccacgacguguaccgggacgaggcgcucaacaaccgcuuccagaucaagggcguggagcugaaguccggcuacaaggacuggauccuguggaucagcuucgccaucuccugcuuccuccugugcgucgcccugcucggguucaucaugugggccugccagaagggcaacauccggugcaacaucugcaucuga

SEQ ID NO: 72110 - RNA, 1701 nt, Artificial Sequence
  derived and/or modified CDS sequence (opt1) from hemagglutinin__InfluenzaA__AEX35549
augaagaccaucaucgcccugagcuacauccucugccugguguucgcccagaagcugcccggcaacgacaacuccaccgcgacgcucugccuggggcaccacgccgucccgaacggcaccaucgugaagaccaucaccaacgaccagaucgaggugacgaacgccaccgagcugguccagagcuccagcaccgggggcaucugcgacagcccccaccagauccucgacggggagaacugcacccugaucgacgcccugcucggcgacccccagugcgacggcuuccagaacaagaagugggaccuguucguggagcgcagcaaggccuacuccaacugcuaccccuacgacgugccggacuacgcgagccugcggucccucaucgccagcuccgggacgcuggaguucaacaacgagagcuucaacuggaccggcgucacccagaacgggaccuccagcgccugcaagcgcggcuccaacaacagcuucuucucccggcugaacuggcucacgcaccugaaguucaaguaccccgcccugaacgugaccaugcccaacaacgaggaguucgacaagcucuacaucuggggcgugcaccaccccgggaccgacaacgaccagaucagccuguacgcgcaggccuccggcaagaucaccgucagcacgaagcgcagccagcagaccgugaucccgaacaucgggucccggccccgcgugcgggacauccccagccgcaucuccaucuacuggaccaucgucaagcccggcgacauccugcucaucaacagcaccgggaaccugaucgccccgcggggcuacuucaagauccgcuccggcaagagcuccaucaugcggagcgacgcccccaucgacaagugcaacuccgagugcaucacgcccaacgggagcauccccaacgacaagccguuccagaacgugaacaagaucaccuacggcgccugcccccgcuacgugaagcagaacacccugaagcucgcgaccgggaugcggaacguccccgagaagcagacgcgcggcaucuucggggccaucgccggcuucaucgagaacggcugggaggggaugguggacggcugguacggguuccggcaccagaacuccgagggcaucgggcaggccgccgaccugaaguccacccaggcggccaucgaccagaucaacggcaagcugaaccgccucaucggcaagaccaacgagaaguuccaccagaucgagaaggaguucuccgagguggaggggcggauccaggaccuggagaaguacgucgaggacaccaagaucgaccuguggagcuacaacgccgagcuccugguggcccuggagaaccagcacacgaucgaccucaccgacuccgagaugaacaagcuguucgagcgcaccaagaagcagcugcgggagaacgccgaggacaugggcaacgggugcuucaagaucuaccacaagugcgacaacgcgugcaucggcagcauccgcaacgggaccuacgaccacgacguguaccgggacgaggcccucaacaaccgcuuccagaucaagggcgucgagcugaaguccggcuacaaggacuggauccuguggaucagcuucgccaucuccugcuuccuccugugcguggcccugcucggguucaucaugugggccugccagaagggcaacauccgcugcaacaucugcaucuga

SEQ ID NO: 72111 - RNA, 1701 nt, Artificial Sequence
  derived and/or modified CDS sequence (opt1) from hemagglutinin__InfluenzaA__AEX35560
augaagaccaucaucgcccugagcuacauccucugccugguguucgcccagaagcugcccggcaacgacaacuccaccgcgacgcucugccuggggcaccacgccgucccgaacggcaccaucgugaagaccaucaccaacgaccagaucgaggugacgaacgccaccgagcugguccagagcuccagcaccgggggcaucugcgacagcccccaccagauccucgacggggagaacugcacccugaucgacgcccugcucggcgacccccagugcgacggcuuccagaacaagaagugggaccuguucguggagcgcagcaaggccuacuccaacugcuaccccuacgacgugccggacuacgucagccugcggucccucguggcgagcuccgggacgcuggaguucaacaacgagagcuucaacuggaccggcgugacccagaacgggaccuccagcgccugcaagcgccgguccaacaacagcuucuucucccgccugaacuggcucacgcaccugaaguucaaguaccccgcccugaacgucaccaugcccaacaacgagcaguucgacaagcucuacaucuggggcgugcaccaccccgggaccgacaacgaccagaucagccuguacgcccaggcguccggccggaucaccgugagcacgaagcgcagccagcagaccgucaucccgaacaucggcucccggccccgcgugcgggacauccccagccgcaucuccaucuacuggaccaucgugaagcccggggacauccugcucaucaacagcaccggcaaccugaucgccccgcggggguacuucaagauccgcuccggcaagagcuccaucaugcggagcgacgcccccaucggcaagugcaacuccgagugcaucacgcccaacgggagcauccccaacgacaagccguuccagaacgucaaccgcaucaccuacggcgccugcccccgguacgugaagcagaacacccugaagcucgccaccgggaugcgcaacgugcccgagaagcagacgcggggcaucuucggggcgaucgccggcuucaucgagaacggcugggaggggauggucgacggcugguacggguuccgccaccagaacuccgugggcaucgggcaggccgccgaccugaaguccacccaggccgcgaucaaccagaucaacggcaagcugaaccggcucaucggcaagaccaacgagaaguuccaccagaucgagaaggaguucuccgagguggaggggcgcauccaggaccuggagaaguacgucgaggacaccaagaucgaccuguggagcuacaacgccgagcuccugguggcccuggagaaccagcacacgaucgaccucaccgacuccgagaugaacaagcuguucgagcggaccaagaagcagcugcgcgagaacgccgaggacaugggcaacgggugcuucaagaucuaccacaagugcgacaacgccugcaucggcagcauccgcaacgggaccuacgaccacgacguguaccgggacgaggcgcucaacaaccgcuuccagaucaagggcgucgagcugaaguccggcuacaaggacuggauccuguggaucagcuucgccaucuccugcuuccuccugugcguggcccugcucggguucaucaugugggccugccagaagggcaacauccggugcaacaucugcaucuga

SEQ ID NO: 72112 - RNA, 1701 nt, Artificial Sequence
  derived and/or modified CDS sequence (opt1) from hemagglutinin__InfluenzaA__AEX35571
augaagaccaucaucgcccugagcuacauccucugccugguguucgcccagaagcugcccggcaacgacaacuccaccgcgacgcucugccuggggcaccacgccgucccgaacggcaccaucgugaagaccaucaccaacgaccagaucgaggugacgaacgccaccgagcugguccagagcuccagcaccgggggcaucugcgacagcccccaccagauccucgacggggagaacugcacccugaucgacgcccugcucggcgacccccagugcgacggcuuccagaacaagaagugggaccuguucguggagcgcagccgggccuacuccaacugcuaccccuacgacgugccggacuacgcgagccugcgcucccucgucgccagcuccgggacgcuggaguucaacaacgagagcuucaacuggaccggcgugacccagaacgggaccuccagcgccugcaagcggcgcuccaacaacagcuucuucucccggcugaacuggcucacgcaccugaaguucaaguaccccgcccugaacgugaccaugcccaacaacgagaaguucgacaagcucuacaucuggggcguccaccaccccgggaccgacaacgaccagaucuuccuguacgcgcaggccagcggccgcaucaccguguccacgaagcggagccagcagaccgugaucccgaacaucggcagccgcccccggguccgcaacauccccucccggaucagcaucuacuggaccaucgugaagcccggggacauccugcucaucaacuccaccggcaaccugaucgccccgcgcggguacuucaagauccggagcggcaaguccagcaucaugcgcuccgacgcccccaucggcaagugcaacagcgagugcaucacgcccaacggguccauccccaacgacaagccguuccagaacgugaaccggaucaccuacggcgccugcccccgcuacgucaagcagaacacccugaagcucgcgaccgggaugcggaacgugcccgagaagcagacgcgcggcaucuucggggccaucgccggcuucaucgagaacggcugggaggggaugguggacggcugguacggguuccggcaccagaacagcgagggcaucgggcaggccgccgaccugaaguccacccaggcggccaucaaccagaucaacggcaagcugaaccgccucaucggcaagaccaacgagaaguuccaccagaucgagaaggaguucagcgaggucgaggggcggauccaggaccuggagaaguacguggaggacaccaagaucgaccugugguccuacaacgccgagcuccugguggcccuggagaaccagcacacgaucgaccucaccgacagcgagaugaacaagcuguucgagcgcaccaagaagcagcugcgcgagaacgccgaggacaugggcaacgggugcuucaagaucuaccacaagugcgacaacgcgugcaucggcuccauccggaacgggaccuacgaccacgacgucuaccgcgacgaggcccucaacaaccgguuccagaucaagggcguggagcugaaguccggcuacaaggacuggauccuguggaucuccuucgccaucagcugcuuccuccugugcguggcccugcucggguucaucaugugggccugccagaagggcaacauccgcugcaacaucugcaucuga

SEQ ID NO: 72113 - RNA, 1701 nt, Artificial Sequence; identical to SEQ ID NO: 64654
  derived and/or modified CDS sequence (opt1) from hemagglutinin__InfluenzaA__AEX35582

SEQ ID NO: 72114 - RNA, 1701 nt, Artificial Sequence
  derived and/or modified CDS sequence (opt1) from hemagglutinin__InfluenzaA__AEX35593
augaagaccaucaucgcccugagcuacauccucugccugguguucgcccagaagcugcccggcaacgacaacuccaccgcgacgcucugccuggggcaccacgccgucccgaacggcaccaucgugaagaccaucaccaacgaccagaucgaggugacgaacgccaccgagcugguccagagcuccagcaccgggggcaucugcgacagcccccaccagauccucgacggggagaacugcacccugaucgacgcccugcucggcgacccccagugcgacggcuuccagaacaagaagugggaccuguucguggagcgcagcaaggccuacuccaacugcuaccccuacgacgugccggacuacgcgagccugcggucccucgucgccagcuccgggacgcuggaguucaacaacgagagcuucaacuggaccggcgugacccagaacgggaccuccagcgccugcaagcgccgguccaacaacagcuucuucucccgccugaacuggcucacgcaccugaaguucaaguaccccgcccugaacgugaccaugcccaacaacgagaaguucgacaagcucuacaucuggggcguccaccaccccgggaccgacaacgaccagaucuuccuguacgcgcaggccagcggccggaucaccguguccacgaagcgcagccagcagaccgugaucccgaacaucggcagccggccccgcguccggaacauccccucccgcaucagcaucuacuggaccaucgugaagcccggggacauccugcucaucaacuccaccggcaaccugaucgccccgcggggguacuucaagauccgcagcggcaaguccagcaucaugcgguccgacgcgccccugggcaagugcaacagcgagugcaucacgcccaacggguccauccccaacgacaagccguuccagaacgugaaccgcaucaccuacggcgccugcccccgguacgucaagcagaacacccucaagcuggccaccgggaugcgcaacgugcccgagaagcagacgcggggcaucuucggggccaucgccggcuucaucgagaacggcugggaggggaugguggacggcugguacggguuccgccaccagaacagcgagggcaucgggcaggccgccgaccugaaguccacccaggcggccaucaaccagaucaacggcaagcucaaccggcugaucggcaagaccaacgagaaguuccaccagaucgagaaggaguucagcgaggucgaggggcgcauccaggaccuggagaaguacguggaggacaccaagaucgaccucugguccuacaacgccgagcugcugguggcccucgagaaccagcacacgaucgaccugaccgacagcgagaugaacaagcuguucgagcggaccaagaagcagcuccgcgagaacgccgaggacaugggcaacgggugcuucaagaucuaccacaagugcgacaacgcgugcaucggcuccauccgcaacgggaccuacgaccacgacgucuaccgggacgaggcccugaacaaccgcuuccagaucaagggcguggagcugaaguccggcuacaaggacuggauccucuggaucuccuucgccaucagcugcuuccugcugugcguggcccuccugggguucaucaugugggccugccagaagggcaacauccggugcaacaucugcaucuga

SEQ ID NO: 72115 - RNA, 1701 nt, Artificial Sequence; identical to SEQ ID NO: 66396
  derived and/or modified CDS sequence (opt1) from hemagglutinin__InfluenzaA__AEX35604

SEQ ID NO: 72116 - RNA, 1701 nt, Artificial Sequence
  derived and/or modified CDS sequence (opt1) from hemagglutinin__InfluenzaA__AEX35615
augaagaccaucaucgcccugagcuacauccucugccugguguucgcccagaagcugcccggcaacgacaacuccaccgcgacgcucugccuggggcaccacgccgucccgaacggcaccaucgugaagaccaucaccaacgaccagaucgaggugacgaacgccaccgagcugguccagagcuccagcaccggggagaucugcgacagcccccaccagauccucgacggcgagaacugcacccugaucgacgcccugcucggggacccccagugcgacggcuuccagaacaagaagugggaccuguucguggagcgcagcaaggccuacuccaacugcuaccccuacgacgugccggacuacgcgagccugcggucccucgucgccagcuccggcacgcuggaguucaacaacgagagcuucaacuggaccggggugacccagaacggcaccuccagcgccugcauccgccgguccaacaacagcuucuucucccgccugaacuggcucacgcaccugaaguucaaguaccccgcccugaacgugaccaugcccaacaacgagaaguucgacaagcucuacaucuggggcguccaccaccccgggaccgacaacgaccagaucuuccuguacgcgcaggccagcgggcggaucaccguguccacgaagcgcagccagcagaccgugaucccgaacaucggcagccggccccgcguccggaacauccccucccgcaucagcaucuacuggaccaucgugaagcccggcgacauccugcucaucaacuccaccgggaaccugaucgccccgcggggcuacuucaagauccgcagcgggaaguccagcaucaugcgguccgacgcccccaucggcaagugcaacagcgagugcaucacgcccaacggcuccauccccaacgacaagccguuccagaacgugaaccgcaucaccuacggggccugcccccgguacgucaagcagaacacccugaagcucgcgaccggcaugcgcaacgugcccgagaagcagacgcgggggaucuucggcgccaucgccggguucaucgagaacggcugggagggcaugguggacgggugguacggcuuccgccaccagaacagcgaggggaucggccaggccgccgaccugaaguccacccaggcggccaucgaccagaucaacgggaagcugaaccggcucaucggcaagaccaacgagaaguuccaccagaucgagaaggaguucagcgaggucgagggccgcauccaggaccuggagaaguacaucgaggacaccaagaucgaccugugguccuacaacgccgagcuccugguggcccuggagaaccagcacacgaucgaccucaccgacagcgagaugaacaagcuguucgagaagaccaagaagcagcugcgggagaacgccgaggacauggggaacggcugcuucaagaucuaccacaagugcgacaacgcgugcaucggguccauccgcaacggcaccuacgaccacgacguguaccgcgacgaggcccucaacaaccgguuccagaucaagggggucgagcugaaguccggcuacaaggacuggauccuguggaucuccuucgccaucagcugcuuccuccugugcguggcccugcucggcuucaucaugugggccugccagaaggggaacauccgcugcaacaucugcaucuga

SEQ ID NO: 72117 - RNA, 1701 nt, Artificial Sequence; identical to SEQ ID NO: 66458
  derived and/or modified CDS sequence (opt1) from hemagglutinin__InfluenzaA__AEX35626

SEQ ID NO: 72118 - RNA, 1701 nt, Artificial Sequence
  derived and/or modified CDS sequence (opt1) from hemagglutinin__InfluenzaA__AEX35637
augaagaccaucaucgcccugagcuacauccucugccugguguucgcccagaagcugcccggcaacgacaacuccaccgcgacgcucugccuggggcaccacgccgucccgaacggcaccaucgugaagaccaucaccaacgaccagaucgaggugacgaacgccaccgagcugguccagagcuccagcaccgggggcaucugcgacagcccccaccagauccucgacggggagaacugcacccugaucgacgcccugcucggcgacccccagugcgacggcuuccagaacaagaagugggaccuguucguggagcgcuccaaggccuacuccaacugcuaccccuacgacgugccggacuacgcgagccugcggucccucgucgccagcuccgggacgcuggaguucaacaacgagagcuucaacuggaccggcgugacccagaacgggaccuccagcgccugcaagcgcggcuccgacaacagcuucuucuccaagcugaacuggcucacgcaccugaaguucaaguaccccgcccugaacgugaccaugcccaacaacgagaaguucgacaagcucuacaucuggggcguccaccaccccgggaccgacaacgaccagaucuucccguacgcgcaggccagcggccggaucaccguguccacgaagcgcagccagcagaccgugauccccaacaucgggagccggccccgcguccggaacauccccucccgcaucagcaucuacuggaccaucgugaagccgggcgacauccugcugaucaacuccaccgggaaccucaucgcgccccggggcuacuucaagauccgcagcggcaaguccagcaucaugcgguccgacgcccccaucgggaagugcaacagcgagugcaucacgcccaacggcuccaucccgaacgacaagcccuuccagaacgugaaccgcaucaccuacggggccugcccccgguacgucaagcagaacacccugaagcuggccaccggcaugcgcaacgugcccgagaagcagacgcgggggaucuucggcgccaucgccggcuucaucgagaacgggugggagggcaugguggacgggugguacggcuuccgccaccagaacagcgaggggaucggccaggccgccgaccucaaguccacccaggcggccaucaaccagaucaacggcaagcugaaccggcugaucgggaagaccaacgagaaguuccaccagaucgagaaggaguucagcgaggucgagggccgcauccaggaccucgagaaguacguggaggacaccaagaucgaccugugguccuacaacgccgagcugcucguggcccuggagaaccagcacacgaucgaccugaccgacagcgagaugaacaagcuguucgagcggaccaagaagcagcuccgcgagaacgccgaggacauggggaacggcugcuucaagaucuaccacaagugcgacaacgcgugcaucggguccauccggaacggcaccuacgaccacgacgucuaccgcgacgaggcccugaacaaccgcuuccagaucaagggcguggagcucaagagcggguacaaggacuggauccuguggaucuccuucgccaucagcugcuuccugcucugcguggcccugcugggcuucaucaugugggccugccagaaggggaacauccggugcaacaucugcaucuga

SEQ ID NO: 72119 - RNA, 1701 nt, Artificial Sequence; identical to SEQ ID NO: 66458
  derived and/or modified CDS sequence (opt1) from hemagglutinin__InfluenzaA__AEX35648

SEQ ID NO: 72120 - RNA, 1701 nt, Artificial Sequence
  derived and/or modified CDS sequence (opt1) from hemagglutinin__InfluenzaA__AEX36102
augaagaccaucaucgcccugagcuacauccucugccugguguucgcccagaagcugcccggcaacaacaacuccaccgcgacgcucugccuggggcaccacgccgucccgaacggcaccaucgugaagaccaucaccaacgaccagaucgaggugacgaacgccaccgagcugguccagagcuccagcaccggggagaucugcgacagcccccaccagauccucgacggcgagaacugcacccugaucgacgcccugcucggggacccccagugcgacggcuuccagaacaagaagugggaccuguucguggagcgcagcaaggccuacuccaacugcuaccccuacgacgugccggacuacgcgagccugcggucccucgucgccagcuccggcacgcuggaguucaacaacgagagcuucaacuggaccggggugacccagaacggcaccuccagcgccugcauccgccgguccaacaacagcuucuucucccgccugaacuggcucacgcaccugaaguucaaguaccccgcccugaacgugaccaugcccaacaacgagaaguucgacaagcucuacaucuggggcguccaccaccccgggaccgacaacgaccagaucuuccuguacgcgcaggccagcgggcggaucaccguguccacgaagcgcagccagcagaccgugaucccgaacaucggcagccggccccgcguccggaacauccccucccgcaucagcaucuacuggaccaucgugaagcccggcgacauccugcucaucaacuccaccgggaaccugaucgccccgcggggcuacuucaagauccgcagcgggaaguccagcaucaugcgguccgacgcccccaucggcaagugcaacagcgagugcaucacgcccaacggcuccauccccaacgacaagccguuccagaacgugaaccgcaucaccuacggggccugcccccgguacgucaagcagaacacccugaagcucgcgaccggcaugcgcaacgugcccgagaagcagacgcgggggaucuucggcgccaucgccggguucaucgagaacggcugggagggcaugguggacgggugguacggcuuccgccaccagaacagcgaggggaucggccaggccgccgaccugaaguccacccaggcggccaucgaccagaucaacgggaagcugaaccggcucaucggcaagaccaacgagaaguuccaccagaucgagaaggaguucagcgaggucgagggccgcauccaggaccuggagaaguacguggaggacaccaagaucgaccugugguccuacaacgccgagcuccugguggcccuggagaaccagcacacgaucgaccucaccgacagcgagaugaacaagcuguucgagaagaccaagaagcagcugcgggagaacgccgaggacauggggaacggcugcuucaagaucuaccacaagugcgacaacgcgugcaucggguccauccgcaacggcaccuacgaccacgacgucuaccgcgacgaggcccucaacaaccgguuccagaucaaggggguggagcugaaguccggcuacaaggacuggauccuguggaucuccuucgccaucagcugcuuccuccugugcguggcccugcucggcuucaucaugugggccugccagaaggggaacauccgcugcaacaucugcaucuga

SEQ ID NO: 72121 - RNA, 1701 nt, Artificial Sequence; identical to SEQ ID NO: 65939
  derived and/or modified CDS sequence (opt1) from hemagglutinin__InfluenzaA__AEX36113

SEQ ID NO: 72122 - RNA, 1701 nt, Artificial Sequence; identical to SEQ ID NO: 66458
  derived and/or modified CDS sequence (opt1) from hemagglutinin__InfluenzaA__AEX36124

SEQ ID NO: 72123 - RNA, 1701 nt, Artificial Sequence
  derived and/or modified CDS sequence (opt1) from hemagglutinin__InfluenzaA__AEX36146
augaagaccaucaucgcccugagcuacauccucugccuggugcuggcccagaagcuccccggcgacgacaacuccaccgcgacgcugugccuggggcaccacgccgucccgaacggcaccaucgugaagaccaucaccaacgaccagaucgaggugacgaacgccaccgagcucguccagagcuccagcaccggggagaucugcgacagcccccaccagauccuggacggcgagaacugcacccugaucgacgcccuccugggggacccccagugcgacggcuuccagaacaagaagugggaccuguucguggagcgcagcaaggccuacuccaacugcuaccccuacgacgugccggacuacgcgagccuccggucccuggucgccagcuccggcacgcuggaguucaacaacgagagcuucaacuggaccggggugacccagaacggcaccuccagcgccugcauccgccgguccaacaacagcuucuucucccgccucaacuggcugacgcaccugaaguucaaguaccccgcccucaacgugaccaugcccaacaacgagcaguucgacaagcuguacaucuggggcguccaccaccccgggaccgacaacgaccagaucuuccuguacgcgcaggccagcgggcggaucaccguguccacgaagcgcagccagcagaccgugaucccgaacaucggcagccggccccgcguccggaacauccccucccgcaucagcaucuacuggaccaucgugaagcccggcgacauccuccugaucaacuccaccgggaaccugaucgccccgcggggcuacuucaagauccgcagcgggaaguccagcaucaugcgguccgacgcccccaucggcaagugcaacagcgagugcaucacgcccaacggcuccauccccaacgacaagccguuccagaacgugaaccgcaucaccuacggggccugcccccgguacgucaagcagaacacccucaagcuggcgaccggcaugcgcaacgugcccgagaagcagacgcgggggaucuucggcgccaucgccggguucaucgagaacggcugggagggcaugguggacgggugguacggcuuccgccaccagaacagcgaggggcggggccaggccgccgaccugaaguccacccaggcggccaucgaccagaucaacgggaagcucaaccgccugaucggcaagaccaacgagaaguuccaccagaucgagaaggaguucagcgaggucgagggccggauccaggaccuggagaaguacguggaggacaccaagaucgaccucugguccuacaacgccgagcugcugguggcccucgagaaccagcacacgaucgaccugaccgacagcgagaugaacaagcuguucgagaagaccaagaagcagcuccgcgagaacgccgaggacauggggaacggcugcuucaagaucuaccacaagugcgacaacgcgugcaucggguccauccgcaacggcaccuacgaccacgacgucuaccgggacgaggcccugaacaaccgcuuccagaucaaggggguggagcugaaguccggcuacaaggacuggauccucuggaucuccuucgccaucagcugcuuccugcugugcguggcccuccugggcuucaucaugugggccugccagaaggggaacauccggugcaacaucugcaucuga

SEQ ID NO: 72124 - RNA, 1701 nt, Artificial Sequence
  derived and/or modified CDS sequence (opt1) from hemagglutinin__InfluenzaA__AEX36168
augaagaccaucaucgcccugagcuacauccucugccugguguucgcccagaagcugcccggcaucgacaacuccaccgcgacgcucugccuggggcaccacgccgucccgaacggcaccaucgugaagaccaucaccaacgaccagaucgaggugacgaacgccaccgagcugguccagagcuccagcaccgggggcaucugcgacagcccccaccagauccucgacggggagaacugcacccugaucgacgcccugcucggcgacccccagugcgacggcuuccagaacaagaagugggaccuguucguggagcgcagcaaggccuacuccaacugcuaccccuacgacgugccggacuacgcgagccugcggucccucgucgccagcuccgggacgcuggaguucaacaacgagagcuucaacugggccggcgugacccagaacgggaccuccagcgccugcaagcgcggcuccgacaacagcuucuucucccggcugaacuggcucacccaccugaaguucaaguaccccgcgcugaacgugacgaugcccaacaacgaggaguucgacaagcucuacaucuggggcguccaccaccccgggaccgacaacgaccagaucuuccuguacgcccaggccagcggccgcaucaccguguccaccaagcggagccagcagacggugaucccgaacaucgggagccgcccccggguccgcaacauccccucccggaucagcaucuacuggaccaucgugaagcccggcgacauccugcucaucaacuccaccgggaaccugaucgccccgcgcggcuacuucaagauccggagcggcaaguccagcaucaugcgcuccgacgcccccaucgggaagugcaacagcgagugcaucacccccaacggcuccauccccaacgacaagccguuccagaacgugaaccggaucacguacggggcgugcccccgcuacgucaagcagaacacccugaagcucgccaccggcaugcggaacgugcccgagaagcagacccgcgggaucuucggcgccaucgccggcuucaucgagaacgggugggagggcaugguggacgggugguacggcuuccggcaccagaacagcgaggggaucggccaggccgcggaccugaaguccacgcaggccgccaucgaccagaucaacggcaagcugaacaagcucaucgggaagaccaacgagaaguuccaccagaucgagaaggaguucagcgaggucgagggccgcauccaggaccuggagaaguacguggaggacaccaagaucgaccugugguccuacaacgccgagcuccugguggcccuggagaaccagcacaccaucgaccucacggacagcgagaugaacaagcuguucgagaagaccaagaagcagcugcgggagaacgcggaggacauggggaacggcugcuucaagaucuaccacaagugcgacaacgccugcaucggguccauccgcaacggcaccuacgaccacgacgucuaccgggacgaggcccucaacaaccgcuucaagaucaagggcguggagcugaaguccggguacaaggacuggauccuguggaucuccuucgccaucagcugcuuccuccugugcguggcccugcucggcuucaucaugugggcgugccagaaggggaacaucaagugcaacaucugcaucuga

SEQ ID NO: 72125 - RNA, 1701 nt, Artificial Sequence; identical to SEQ ID NO: 66458
  derived and/or modified CDS sequence (opt1) from hemagglutinin__InfluenzaA__AEX36179

SEQ ID NO: 72126 - RNA, 1701 nt, Artificial Sequence; identical to SEQ ID NO: 72007
  derived and/or modified CDS sequence (opt1) from hemagglutinin__InfluenzaA__AEX36190

SEQ ID NO: 72127 - RNA, 1701 nt, Artificial Sequence; identical to SEQ ID NO: 72002
  derived and/or modified CDS sequence (opt1) from hemagglutinin__InfluenzaA__AEX36201

SEQ ID NO: 72128 - RNA, 1701 nt, Artificial Sequence
  derived and/or modified CDS sequence (opt1) from hemagglutinin__InfluenzaA__AEX36212
augaagaccaucaucgcccugagcuacauccucugccugguguucgcccagaagcugcccggcaucgacaacuccaccgcgacgcucugccuggggcaccacgccgucccgaacggcaccaucgugaagaccaucaccaacgaccagaucgaggugacgaacgccaccgagcugguccagaacagcuccaccgggggcaucugcgacagcccccaccagauccucgacggggagaacugcacccugaucgacgcccugcucggcgacccccagugcgacggcuuccagaacaagaagugggaccuguucguggagcgcuccaaggccuacagcaacugcuaccccuacgacgugccggacuacgcgucccugcggagccucgucgccuccagcgggacgcuggaguucaacaacgaguccuucaacuggaccggcgugacccagaacgggaccagcuccgccugcaagcgcggcagcaacaacuccuucuucagccggcugaacuggcucacgcacuccaaguucaaguaccccgcccugaacgugaccaugcccaacaacgaggaguucgacaagcuguacaucuggggcguccaccaccccgggaccgacaacgaccagaucuuccucuacgcgcaggccagcggccgcaucaccguguccacgaagaucagccagcagaccgugaucccgaacaucgggagccggccccgcguccggaacauccccucccgcaucagcaucuacuggaccaucgugaagcccggcgacauccugcugaucaacuccaccgggaaccucaucgccccgcggggcuacuucaagauccgcagcggcaaguccagcaucaugcgguccgacgcccccaucgggaagugcaacagcgagugcaucacgcccaacggcuccauccccaacgacaagccguuccagaacgugaaccgcaucaccuacggggccugcccccgguacgucaagcagaacacccugaagcuggcgaccggcaugcgcaacgugcccgagaagcagacgcgggggaucuucggcgccaucgccggcuucaucgagaacgggugggagggcaugguggacgggugguacggcuuccgccaccagaacagcgaggggaucggccaggccgccgaccucaaguccacccaggcggccaucgaccagaucaacggcaagcugaaccggcugaucgggaagaccaacgagaaguuccaccagaucgagaaggaguucagcgaggucgagggccgcauccaggaccucgagaaguacguggaggacaccaagaucgaccugugguccuacaacgccgagcugcucguggcccuggagaaccagcacacgaucgaccugaccgacagcgagaugaacaagcuguucgagaagaccaagaagcagcuccgggagaacgccgaggacauggggaacggcugcuucaagaucuaccacaagugcgacaacgcgugcaucggguccauccgcaacggcaccuacgaccacgacgucuaccgggacgaggcccugaacaaccgcuuccagaucaagggcguggagcucaagagcggguacaaggacuggauccuguggaucuccuucgccaucagcugcuuccugcucugcguggcccugcugggcuucaucaugugggccugccagaaggggaacauccgcugcaacaucugcaucuga

SEQ ID NO: 72129 - RNA, 1701 nt, Artificial Sequence; identical to SEQ ID NO: 72002
  derived and/or modified CDS sequence (opt1) from hemagglutinin__InfluenzaA__AEX36223

SEQ ID NO: 72130 - RNA, 1701 nt, Artificial Sequence
  derived and/or modified CDS sequence (opt1) from hemagglutinin__InfluenzaA__AEX36234
augaagaccaucaucgcccugagcuacauccucugccugguguucgcccagaagcugcccggcaacgacaacuccaccgcgacgcucugccuggggcaccacgccgucccgaacggcaccaucgugaagaccaucaccaacgaccagaucgaggugacgaacgccaccgagcugguccagagcuccagcaccgggggcaucugcgacagcccccaccagauccucgacggggagaacugcacccugaucgacgcccugcucggcgacccccagugcgacggcuuccagaacaagaagugggaccuguucguggagcgcagcaaggccuacuccaacugcuaccccuacgacgugccggacuacgcgagccugcggucccucgucgccagcuccgggacgcuggaguucaacaacgagagcuucaacuggaccggcgugacccagaacgggaccuccagcgccugcaagcgcggcuccgacaacagcuucuucuccaagcugaacuggcucacgcaccugaaguucaaguaccccgcccugaacgugaccaugcccaacaacgagaaguucgacaagcucuacaucuggggcguccaccaccccgggaccgacaacgaccagaucuuccuguacgcgcaggccagcggccggaucaccguguccacgaagcgcagccagcagaccgugaucccgaacaucgggagccggccccgcguccggaacauccccucccgcaucagcaucuacuggaccaucgugaagcccggcgacauccugcucaucaacuccaccgggaaccugaucgccccgcggggcuacuucaagauccgcagcggcaaguccagcaucaugcgguccgacgcccccaucgggaagugcaacagcgagugcaucacgcccaacggcuccauccccaacgacaagccguuccagaacgugaaccgcaucaccuacggggccugcccccgguacgucaagcagaacacccugaagcucgcgaccggcaugcgcaacgugcccgagaagcagacgcgggggaucuucggcgccaucgccggcuucaucgagaacgggugggagggcaugguggacgggugguacggcuuccgccaccagaacagcgaggggaucggccaggccgccgaccugaaguccacccaggcggccaucaaccagaucaacggcaagcugaaccggcucaucgggaagaccaacgagaaguuccaccagaucgagaaggaguucagcgaggucgagggccgcauccaggaccuggagaaguacguggaggacaccaagaucgaccugugguccuacaacgccgagcuccugguggcccuggagaaccagcacacgaucgaccucaccgacagcgagaugaacaagcuguucgagcggaccaagaagcagcugcgcgagaacgccgaggacauggggaacggcugccucaagaucuaccacaagugcgacaacgcgugcaucggguccauccggaacggcaccuacgaccacgacgucuaccgcgacgaggcccugaacaaccgcuuccagaucaagggcguggagcugaaguccggguacaaggacuggauccucuggaucuccuucgccaucagcugcuuccugcugugcguggcccuccugggcuucaucaugugggccugccagaaggggaacauccggugcaacaucugcaucuga

SEQ ID NO: 72131 - RNA, 1701 nt, Artificial Sequence
  derived and/or modified CDS sequence (opt1) from hemagglutinin__InfluenzaA__AEX36245
augaagaccaucaucgcccugagcuacauccucugccugguguucgcccagaagcugcccggcaucgacaacuccaccgcgacgcucugccuggggcaccacgccgucccgaacggcaccaucgugaagaccaucaccaacgaccagaucgaggugacgaacgccaccgagcugguccagaacagcuccaccgggggcaucugcgacagcccccaccagauccucgacggggagaacugcacccugaucgacgcccugcucggcgacccccagugcgacggcuuccagaacaagaagugggaccuguucguggagcgcuccaagacguacagcaacugcuaccccuacgacgugccggacuacgccucccugcggagccucgucgcguccagcgggacccuggaguucaacaacgaguccuucaacuggaccggcgugacccagaacgggacgagcuccgccugcaagcgcggcagcaacaacuccuucuucagccggcugaacuggcucacccacuccaaguucaaguaccccgcccugaacgugaccaugcccaacaacgaggaguucgacaagcuguacaucuggggcguccaccaccccgggaccgacaacgaccagaucuuccucuacgcccaggcgagcggccgcaucacgguguccaccaagcggagccagcagaccgugaucccgaacaucgggagccgcccccggguccgcaacauccccucccggaucagcaucuacuggaccaucgugaagcccggcgacauccugcugaucaacuccacggggaaccucaucgccccgcgcggcuacuucaagauccggagcggcaaguccagcaucaugcgcuccgacgcccccaucgggaagugcaacagcgagugcaucacccccaacggcuccauccccaacgacaagccguuccagaacgugaaccggaucaccuacggggccugcccccgcuacgucaagcagaacacccugaagcuggccacgggcaugcggaacgugcccgagaagcagacccgcgggaucuucggcgcgaucgccggcuucaucgagaacgggugggagggcaugguggacgggugguacggcuuccggcaccagaacagcgaggggaucggccaggccgccgaccucaaguccacccaggccgcgaucgaccagaucaacggcaagcugaaccgccugaucgggaagaccaacgagaaguuccaccagaucgagaaggaguucagcgaggucgagggccggauccaggaccucgagaaguacguggaggacacgaagaucgaccugugguccuacaacgccgagcugcucguggcccuggagaaccagcacaccaucgaccugaccgacagcgagaugaacaagcuguucgagaagaccaagaagcagcuccgcgagaacgccgaggacauggggaacggcugcuucaagaucuaccacaagugcgacaacgccugcaucggguccauccggaacggcacguacgaccacgacgucuaccgcgacgaggcgcugaacaaccgcuuccagaucaagggcguggagcucaagagcggguacaaggacuggauccuguggaucuccuucgccaucagcugcuuccugcucugcguggcccugcugggcuucaucaugugggccugccagaaggggaacauccggugcaacaucugcaucuga

SEQ ID NO: 72132 - RNA, 1701 nt, Artificial Sequence
  derived and/or modified CDS sequence (opt1) from hemagglutinin__InfluenzaA__AEX36256
augaagaccaucaucgcccugagcuacauccucugccugguguucacccagaagcugcccggcaacgacaacuccacggccacccucugccuggggcaccacgcggucccgaacggcaccaucgugaagaccaucacgaacgaccagaucgaggugaccaacgccaccgagcugguccagagcuccagcaccggggagaucugcgacagcccccaccagauccucgacggcgagaacugcacgcugaucgacgcccugcucggggacccccagugcgacggcuuccagaacaagaagugggaccuguucguggagcgcagcaaggccuacuccaacugcuaccccuacgacgugccggacuacgccagccugcggucccucgucgcgagcuccggcacccuggaguucaacaacgagagcuucaacuggaccggggugacccagaacggcacguccagcgccugcauccgcaaguccaacaacagcuucuucucccggcugaacuggcucacccaccugaaguucaaguaccccgcccugaacgugaccaugcccaacaacgagcaguucgacaagcucuacaucuggggcguccaccaccccgggaccgacaacgaccagaucuuccuguacgcccaggcgagcgggcgcaucacgguguccaccaagcggagccagcagaccgugaucccgaacaucggcagccgcccccggguccgcaacauccccucccggaucagcaucuacuggaccaucgugaagcccggcgacauccugcucaucaacuccacggggaaccugaucgccccgcgcggcuacuucaagauccggagcgggaaguccagcaucaugcgcuccgacgcccccaucggcaagugcaacagcgagugcaucacccccaacggcuccauccccaacgacaagccguuccagaacgugaaccggaucaccuacggggccugcccccgcuacgucaagcagaacacccugaagcucgccacgggcaugcggaacgugcccgagaagcagacccgcgggaucuucggcgcgaucgccggguucaucgagaacggcugggagggcaugguggacgggugguacggcuuccggcaccagaacagcgaggggcgcggccaggccgccgaccugaaguccacccaggccgcgaucgaccagaucaacgggaagcugaaccggcucaucggcaagaccaacgagaaguuccaccagaucgagaaggaguucagcgaggucgagggccgcauccaggaccuggagaaguacguggaggacacgaagaucgaccugugguccuacaacgccgagcuccugguggcccuggagaaccagcacaccaucgaccucaccgacagcgagaugaacaagcuguucgagaagaccaagaagcagcugcgggagaacgccgaggacauggggaacggcugcuucaagaucuaccacaagugcgacaacgccugcaucggguccauccgcaacggcacguacgaccacgacgucuaccgcgacgaggcgcucaacaaccgguuccagaucaaggggguggagcugaaguccggcuacaaggacuggauccuguggaucuccuucgccaucagcugcuuccuccugugcguggcccugcucggcuucaucaugugggccugccagaaggggaacauccgcugcaacaucugcaucuga

SEQ ID NO: 72133 - RNA, 1701 nt, Artificial Sequence; identical to SEQ ID NO: 72002
  derived and/or modified CDS sequence (opt1) from hemagglutinin__InfluenzaA__AEX36267

SEQ ID NO: 72134 - RNA, 1701 nt, Artificial Sequence
  derived and/or modified CDS sequence (opt1) from hemagglutinin__InfluenzaA__AEX36289
augaagaccaucaucgcccugagcuacauccucugccugguguucgcccagaagcugcccggcaucgacaacuccaccgcgacgcucugccuggggcaccacgccgucccgaacggcaccaucgugaagaccaucaccaacgaccagaucgaggugacgaacgccaccgagcugguccagaacagcuccaccgggggcaucugcgacagcccccaccagauccucgacggggagaacugcacccugaucgacgcccugcucggcgacccccagugcgacggcuuccagaacaagaagugggaccuguucguggagcgcuccaaggccuacagcaacugcuaccccuacgacgugccggacuacgcgucccugcggagccucgucgccuccagcgggacgcuggaguucaacaacgaguccuucaacuggaccggcgugacccagaacgggaccagcuccgccugcaagcgcggcagcaacaacuccuucuucagccggcugaacuggcucacgcacuccaaguucaaguaccccgcccugaacgugaccaugcccaacaacgaggaguucgacaagcuguacaucuggggcguccaccaccccgggaccgacaacgaccagaucuuccucuacgcgcaggccagcggccgcaucaccguguccacgaagaucagccagcagaccgugaucccgaacaucgggagccggccccgcguccggaacauccccucccgcaucagcaucuacuggaccaucgugaagcccggcgacauccugcugaucaacuccaccgggaaccucaucgccccgcggggcuacuucaagauccgcagcggcaaguccagcaucaugcgguccgacgcccccaucgggaagugcaacagcgagugcaucacgcccaacggcuccauccccaacgacaagccguuccagaacgugaaccgcaucaccuacggggccugcccccgguacgucaagcagaacacccugaagcuggcgaccggcaugcgcaacgugcccgagaagcagacgcgggggaucuucggcgccaucgccggcuucaucgagaacgggugggagggcaugguggacgggugguacggcuaccgccaccagaacagcgaggggaucggccaggccgccgaccucaaguccacccaggcggccaucgaccagaucaacggcaagcugaaccggcugaucgggaagaccaacgagaaguuccaccagaucgagaaggaguucagcgaggucgagggccgcauccaggaccucgagaaguacguggaggacaccaagaucgaccugugguccuacaacgccgagcugcucguggcccuggagaaccagcacacgaucgaccugaccgacagcgagaugaacaagcuguucgagaagaccaagaagcagcuccgggagaacgccgaggacauggggaacggcugcuucaagaucuaccacaagugcgacaacgcgugcaucggguccauccgcaacggcaccuacgaccacgacgucuaccgggacgaggcccugaacaaccgcuuccagaucaagggcguggagcucaagcugggguacaaggacuggauccuguggaucagcuucgccaucuccugcuuccuccugugcguggcccugcucggcuucaucaugugggccugccagaaggggaacauccgcugcaacaucugcaucuga

SEQ ID NO: 72135 - RNA, 1701 nt, Artificial Sequence
  derived and/or modified CDS sequence (opt1) from hemagglutinin__InfluenzaA__AEX36300
augaagaccaucaucgcccugagcuacauccucugccugguguucgcccagaagcugcccggcaucgacaacuccaccgcgacgcucugccuggggcaccacgccgucccgaacggcaccaucgugaagaccaucaccaacgaccagaucgaggugacgaacgccaccgagcugguccagaacagcuccaccgggggcaucugcgacagcccccaccagauccucgacggggagaacugcacccugaucgacgcccugcucggcgacccccagugcgacggcuuccagaacaagaagugggaccuguucguggagcgcuccaaggccuacagcaacugcuaccccuacgacgugccggacuacgcgucccugcggagccucgucgccuccagcgggacgcuggaguucuccaacgagagcuucaacuggaccggcgugacccagaacgggaccuccagcgccugcaagcgcggcuccaacaacagcuucuucuccaagcugaacuggcucacgcacagcaaguucaaguaccccgcccugaacgugaccaugcccaacaacgaggaguucgacaagcuguacaucuggggcguccaccaccccgggaccgacaacgaccagaucuuccucuacgcgcaggccuccggccggaucaccgugagcacgaagcgcagccagcagaccgugaucccgaacaucgggucccggccccgcguccggaacauccccagccgcaucuccaucuacuggaccaucgugaagcccggcgacauccugcugaucaacagcaccgggaaccucaucgccccgcggggcuacuucaagauccgcuccggcaagagcuccaucaugcggagcgacgcccccaucgggaagugcaacuccgagugcaucacgcccaacggcagcauccccaacgacaagccguuccagaacgugaaccgcaucaccuacggggccugcccccgguacgucaagcagaacacccugaagcuggcgaccggcaugcgcaacgugcccgagaagcagacgcgggggaucuucggcgccaucgccggcuucaucgagaacgggugggagggcaugguggacgggugguacggcuuccgccaccagaacuccgaggggaucggccaggccgccgaccucaagagcacccaggcggccaucgaccagaucaacggcaagcugaaccggcugaucgggaagaccaacgagaaguuccaccagaucgagaaggaguucuccgaggucgagggccgcauccaggaccucgagaaguacguggaggacaccaagaucgaccuguggagcuacaacgccgagcugcucguggcccuggagaaccagcacacgaucgaccugaccgacuccgagaugaacaagcuguucgagaagaccaagaagcagcuccgggagaacgccgaggacauggggaacggcugcuucaagaucuaccacaagugcgacaacgcgugcaucgggagcauccgcaacggcaccuacgaccacgacgucuaccgggacgaggcccugaacaaccgcuuccagaucaagggcguggagcucaaguccggguacaaggacuggauccuguggaucagcuucgccaucuccugcuuccugcucugcguggcccugcugggcuucaucaugugggccugccagaaggggaacauccgcugcaacaucugcaucuga

SEQ ID NO: 72136 - RNA, 1701 nt, Artificial Sequence
  derived and/or modified CDS sequence (opt1) from hemagglutinin__InfluenzaA__AEX36311
augaagaccaucaucgcccugagcuacauccucugccugguguucgcccagaagcugcccggcaucgacaacuccaccgcgacgcucugccuggggcaccacgccgucccgaacggcaccaucgugaagaccaucaccaacgaccagaucgaggugacgaacgccaccgagcugguccagagcuccagcaccgggggcaucugcgacagcccccaccagauccucgacggggagaacugcacccugaucgacgcccugcucggcgacccccagugcgacggcuuccagaacaagaagugggaccuguucguggagcgcagcaaggccuacuccaacugcuaccccuacgacgugccggacuacgcgagccugcggucccucgucgccagcuccgggacgcuggaguucaacaacgagagcuucaacugggccggcgugacccagaacgggaccuccagcgccugcaagcgcggcuccaacaacagcuucuucucccggcugaacuggcucacccaccugaaguucaaguaccccgcgcugaacgugacgaugcccaacaacgaggaguucgacaagcucuacaucuggggcguccaccaccccgggaccgacaacgaccagaucuuccuguacgcccaggccagcggccgcaucaccguguccaccaagcggagccagcagacggugaucccgaacaucgggagccgcccccggguccgcaacauccccucccggaucagcaucuacuggaccaucgugaagcccggcgacauccugcucaucaacuccaccgggaaccugaucgccccgcgcggcuacuucaagauccggagcggcaaguccagcaucaugcgcuccgacgcccccaucgggaagugcaacagcgagugcaucacccccaacggcuccauccccaacgacaagccguuccagaacgugaaccggaucacguacggggcgugcccccgcuacgucaagcagaacacccugaagcucgccaccggcaugcggaacgugcccgagaagcagacccgcgggaucuucggcgccaucgccggcuucaucgagaacgggugggagggcaugguggacgggugguacggcuuccggcaccagaacagcgaggggaucggccaggccgcggaccugaaguccacgcaggccgccaucgaccagaucaacggcaagcugaaccgccucaucgggaagaccaacgagaaguuccaccagaucgagaaggaguucagcgaggucgagggccggauccaggaccuggagaaguacguggaggacaccaagaucgaccugugguccuacaacgccgagcuccugguggcccuggagaaccagcacaccaucgaccucacggacagcgagaugaacaagcuguucgagaagaccaagaagcagcugcgcgagaacgcggaggacauggggaacggcugcuucaagaucuaccacaagugcgacaacgccugcaucggguccauccggaacggcaccuacgaccacgacgucuaccgcgacgaggcccucaacaaccgcuuccagaucaagggcguggagcugaaguccggguacaaggacuggauccuguggaucuccuucgccaucagcugcuuccuccugugcguggcccugcucggcuucaucaugugggcgugccagaaggggaacauccggugcaacaucugcaucuga

SEQ ID NO: 72137 - RNA, 1701 nt, Artificial Sequence
  derived and/or modified CDS sequence (opt1) from hemagglutinin__InfluenzaA__AEX36322
augaagaccaucaucgcccugagcuacauccucugccugguguucgcccagaagcugcccggcaucgacaacuccaccgcgacgcucugccuggggcaccacgccgucccgaacggcaccaucgugaagaccaucaccaacgaccagaucgaggugacgaacgccaccgagcugguccagaacagcuccaccgggggcaucugcgacagcccccaccagauccucgacggggagaacugcacccugaucgacgcccugcucggcgacccccagugcgacggcuuccagaacaagaagugggaccuguucguggagcgcuccaaggccuacagcaacugcuaccccuacgacgugccggacuacgcgucccugcggagccucgucgccuccagcgggacgcuggaguucaacaacgaguccuucaacuggaccggcgugacccagaacgggaccagcuccgccugcaagcgcggcagcaacaacuccuucuucagccggcugaacuggcucacgcacuccaaguucaaguaccccgcccugaacgugaccaugcccaacaacgaggaguucgacaagcuguacaucuggggcguccaccaccccgggaccgacaacgaccagaucuucccguacgcgcaggccagcggccgcaucaccguguccacgaagaucagccagcagaccgugauccccaacaucgggagccggccccgcguccggaacauccccucccgcaucagcaucuacuggaccaucgugaagccgggcgacauccuccugaucaacuccaccgggaaccugaucgcgccccggggcuacuucaagauccgcagcggcaaguccagcaucaugcgguccgacgcccccaucgggaagugcaacagcgagugcaucacgcccaacggcuccaucccgaacgacaagcccuuccagaacgugaaccgcaucaccuacggggccugcccccgguacgucaagcagaacacccucaagcuggccaccggcaugcgcaacgugcccgagaagcagacgcgggggaucuucggcgccaucgccggcuucaucgagaacgggugggagggcaugguggacgggugguacggcuuccgccaccagaacagcgaggggaucggccaggccgccgaccugaaguccacccaggcggccaucgaccagaucaacggcaagcucaaccggcugaucgggaagaccaacgagaaguuccaccagaucgagaaggaguucagcgaggucgagggccgcauccaggaccuggagaaguacguggaggacaccaagaucgaccucugguccuacaacgccgagcugcugguggcccucgagaaccagcacacgaucgaccugaccgacagcgagaugaacaagcuguucgagaagaccaagaagcagcuccgggagaacgccgaggacauggggaacggcugcuucaagaucuaccacaagugcgacaacgcgugcaucggguccauccgcaacggcaccuacgaccacgacgucuaccgggacgaggcccugaacaaccgcuuccagaucaagggcguggagcucaagagcggguacaaggacuggauccuguggaucuccuucgccaucagcugcuuccugcugugcaucgcccuccugggcuucaucaugugggccugccagaaggggaacauccgcugcaacaucugcaucuga

SEQ ID NO: 72138 - RNA, 1701 nt, Artificial Sequence
  derived and/or modified CDS sequence (opt1) from hemagglutinin__InfluenzaA__AEX36333
augaagaccaucaucgcccugagcuacauccucugccugguguucgcccagaagcugcccggcaucgacaacuccaccgcgacgcucugccuggggcaccacgccgucccgaacggcaccaucgugaagaccaucaccaacgaccagaucgaggugacgaacgccaccgagcugguccagaacagcuccaccgggggcaucugcgacagcccccaccagauccucgacggggagaacugcacccugaucgacgcccugcucggcgacccccagugcgacggcuuccagaacaagaagugggaccuguucguggagcgcuccaaggccuacagcaacugcuaccccuacgacgugccggacuacgcgucccugcggagccucgucgccuccagcgggacgcuggaguucaacaacgaguccuucaacuggaccggcgugacccagaacgggaccagcuccgccugcaagcgcggcagcaacaacuccuucuucagccggcugaacuggcucacgcacuccaaguucaaguaccccgcccugaacgugaccaugcccaacaacgaggaguucgacaagcuguacaucuggggcguccaccaccccgggaccgacaacgaccagaucuuccucuacgcgcaggccagcggccgcaucaccguguccacgaagcggagccagcagaccgugaucccgaacaucgggagccgcccccggguccgcaacauccccucccggaucagcaucuacuggaccaucgugaagcccggcgacauccugcugaucaacuccaccgggaaccucaucgccccgcgcggcuacuucaagauccggagcggcaaguccagcaucaugcgcuccgacgcccccaucgggaagugcaacagcgagugcaucacgcccaacggcuccauccccaacgacaagccguuccagaacgugaaccggaucaccuacggggccugcccccgcuacgucaagcagaacacccugaagcuggcgaccggcaugcggaacgugcccgagaagcagacgcgcgggaucuucggcgccaucgccggcuucaucgagaacgggugggagggcaugguggacgggugguacggcuuccggcaccagaacagcgaggggaucggccaggccgccgaccucaaguccacccaggcggccaucgaccagaucaacggcaagcugaaccgccugaucgggaagaccaacgagaaguuccaccagaucgagaaggaguucagcgaggucgagggccggauccaggaccucgagaaguacguggaggacaccaagaucgaccugugguccuacaacgccgagcugcucguggcccuggagaaccagcacacgaucgaccugaccgacagcgagaugaacaagcuguucgagaagaccaagaagcagcuccgcgagaacgccgaggacauggggaacggcugcuucaagaucuaccacaagugcgacaacgcgugcaucggguccauccggaacggcaccuacgaccacgacgccuaccgcgacgaggcccugaacaaccgcuuccagaucaagggcgucgagcucaagagcggguacaaggacuggauccuguggaucuccuucgccaucagcugcuuccugcucugcguggcccugcugggcuucaucaugugggcgugccagaaggggaacauccggugcaacaucugcaucuga

SEQ ID NO: 72139 - RNA, 1701 nt, Artificial Sequence
  derived and/or modified CDS sequence (opt1) from hemagglutinin__InfluenzaA__AEX36344
augaagaccaucaucgcccugagcuacauccucugccugguguucgcccagaagcugcccggcaucgacaacuccaccgcgacgcucugccuggggcaccacgccgucccgaacggcaccaucgugaagaccaucaccaacgaccagaucgaggugacgaacgccaccgagcugguccagagcuccagcaccgggggcaucugcgacagcccccaccagauccucgacggggagaacugcacccugaucgacgcccugcucggcgacccccagugcgacggcuuccagaacaagaagugggaccuguucguggagcgcagcaacgccuacuccaacugcuaccccuacgacgugccggacuacgcgagccugcggucccucgucgccagcuccgggacgcuggaguucaacaacgagagcuucaacugggccggcgugacccagaacgggaccuccagcgccugcaagcgcggcuccaacaacagcuucuucucccggcugaacuggcucacccaccugaaguucaaguaccccgcgcugaacgugacgaugcccaacaacgaggaguucgacaagcucuacaucuggggcguccaccaccccgggaccgacaacgaccagaucuuccuguacgcccaggccagcggccgcaucaccguguccaccaagcggagccagcagacggugaucccgaacaucgggagccgcccccggguccgcaacauccccucccggaucagcaucuacuggaccaucgugaagcccggcgacauccugcucaucaacuccaccgggaaccugaucgccccgcgcggcuacuucaagauccggagcggcaaguccagcaucaugcgcuccgacgcccccaucgggaagugcaacagcgagugcaucacccccaacggcuccauccccaacgacaagccguuccagaacgugaaccggaucacguacggggcgugcccccgcuacgucaagcagaacacccugaagcucgccaccggcaugcggaacgugcccgagaagcagacccgcgggaucuucggcgccaucgccggcuucaucgagaacgggugggagggcaugguggacgggugguacggcuuccggcaccagaacagcgaggggaucggccaggccgcggaccugaaguccacgcaggccgccaucgaccagaucaacggcaagcugaaccgccucaucgggaagaccaacgagaaguuccaccagaucgagaaggaguucagcgaggucgagggccggauccaggaccuggagaaguacguggaggacaccaagaucgaccugugguccuacaacgccgagcuccugguggcccuggagaaccagcacaccaucgaccucacggacagcgagaugaacaagcuguucgagaagaccaagaagcagcugcgcgagaacgcggaggacauggggaacggcugcuucaagaucuaccacaagugcgacaacgccugcaucgaguccauccggaacgggaccuacgaccacgacgucuaccgcgacgaggcccucaacaaccgcuuccagaucaagggcguggagcugaaguccggcuacaaggacuggauccuguggaucuccuucgccaucagcugcuuccuccugugcguggcccugcucggguucaucaugugggcgugccagaagggcaacauccggugcaacaucugcaucuga

SEQ ID NO: 72140 - RNA, 1701 nt, Artificial Sequence
  derived and/or modified CDS sequence (opt1) from hemagglutinin__InfluenzaA__AEX36366
augaagaccaucaucgcccugagcuacauccucugccugguguucgcccagaagcuguccggcaacgacaacagcaccgcgacgcucugccuggggcaccacgccguccccaacggcaccaucgugaagaccaucaccaacgaccagaucgaggugacgaacgccaccgagcugguccaguccagcuccaccggggagaucugcgacagcccgcaccagauccucgacggcgagaacugcacccugaucgacgcccugcucggggacccccagugcgacggcuuccagaacaagaagugggaccuguucguggagcgcuccaaggccuacagcaacugcuaccccuacgacgugcccgacuacgcgucccugcggagccucgucgccuccagcggcacgcuggaguucaacaacgaguccuucaacuggaccggggugacccagaacggcaccagcuccgccugcauccgccggagcaacaacuccuucuucagccgccugaacuggcucacgcaccugaaguucaaguacccggcccugaacgugaccaugcccaacaacgagaaguucgacaagcucuacaucuggggcguccaccaccccgggaccgacaacgaccagaucuuccuguacgcgcaggccuccgggcggaucaccgugagcacgaagcgcagccagcagaccgugauccccaacaucggcucccggccgcgcguccggaacauccccagccgcaucuccaucuacuggaccaucgugaagcccggcgacauccugcucaucaacagcaccgggaaccugaucgcgccccggggcuacuucaagauccgcuccggcaagagcuccaucaugcggagcgacgccccgaucgggaagugcaacuccgagugcaucacgcccaacggcagcauccccaacgacaagcccuuccagaacgugaaccgcaucaccuacggggccugcccgcgguacgucaagcagaacacccugaagcucgccaccggcaugcgcaacgugcccgagaagcagacgcgggggaucuucggcgccaucgccggguucaucgagaacggcugggagggcaugguggacgggugguacggcuuccgccaccagaacuccgaggggaucggccaggccgccgaccucaagagcacccaggcggccaucgaccagaucaacgggaagcugaaccggcugaucggcaagaccaacgagaaguuccaccagaucgagaaggaguucuccgaggucgagggccgcauccaggaccuggagaaguacguggaggacaccaagaucgaccuguggagcuacaacgccgagcuccugguggcccuggagaaccagcacacgaucgaccucaccgacuccgagaugaacaagcuguucgagaagaccaagaagcagcugcgggagaacgccgaggacauggggaacggcugcuucaagaucuaccacaagugcgacaacgcgugcaucgggagcauccgcaacggcaccuacgaccacgacgucuaccgcgacgaggcccucaacaaccgguuccagaucaaggggguggagcugaaguccggcuacaaggacuggauccuguggaucagcuucgccaucuccugcuuccuccugugcguggcccugcucggcuucaucaugugggccugccagaaggggaacauccgcugcaacaucugcaucuga

SEQ ID NO: 72141 - RNA, 1701 nt, Artificial Sequence; identical to SEQ ID NO: 65952
  derived and/or modified CDS sequence (opt1) from hemagglutinin__InfluenzaA__AEX36377

SEQ ID NO: 72142 - RNA, 1701 nt, Artificial Sequence
  derived and/or modified CDS sequence (opt1) from hemagglutinin__InfluenzaA__AEX36388
augaagaccaucaucgcccugagcuacauccucugccugguguucgcccagaagcugcccggcaacgacaacuccaccgcgacgcucugccuggggcaccacgccgucccgaacggcaccaucgugaagaccaucaccaacgaccagaucgaggugacgaacgccaccgagcugguccagagcuccagcaccggggagaucugcgacagcccccaccagauccucgacggcgagaacugcacccugaucgacgcccugcucggggacccccagugcgacggcuuccagaacaagaagugggaccuguucguggagcgcagcaaggccuacuccaacugcuaccccuacgacgugccggacuacgcgagccugcggucccucgucgccagcuccggcacgcuggaguucaacaacgagagcuucaacuggaccggggugacccagaacggcaccuccagcgccugcauccgccgguccaacaacagcuucuucucccgccugaacuggcucacgcaccugaaguucaaguaccccgcccugaacgugaccaugcccaacaacgagaaguucgacaagcucuacaucuggggcguccaccaccccgggaccgacaacgaccagaucuuccuguacgcgcaggccagcgggcggaucaccguguccacgaagcgcagccagcagaccgugaucccgaacaucggcagccggccccgcguccggaacauccccucccgcaucagcaucuacuggaccaucgugaagcccggcgacauccugcucaucaacuccaccgggaaccugaucgccccgcggggcuacuucaagauccgcagcgggaaguccagcaucaugcgguccgacgcccccaucggcaagugcaacagcgagugcaucacgcccaacggcuccauccccaacgacaagccguuccagaacgugaaccgcaucaccuacggggccugcccccgguacgucaagcagaacacccugaagcucgcgaccggcaugcgcaacgugcccgagaagcagacgcgggggaucuucggcgccaucgccggguucaucgagaacggcugggagggcaugauggacgggugguacggcuuccgccaccagaacagcgaggggaucggccaggccgccgaccugaaguccacccaggcggccaucgaccagaucaacgggaagcugaaccggcucaucggcaagaccaacgagaaguuccaccagaucgagaaggaguucagcgagguggagggccgcauccaggaccuggagaaguacgucgaggacaccaagaucgaccugugguccuacaacgccgagcuccugguggcccuggagaaccagcacacgaucgaccucaccgacagcgagaugaacaagcuguucgagaagaccaagaagcagcugcgggagaacgccgaggacauggggaacggcugcuucaagaucuaccacaagugcgacaacgcgugcaucggguccauccgcaacggcaccuacgaccacgacguguaccgcgacgaggcccucaacaaccgguuccagaucaagggggucgagcugaaguccggcuacaaggacuggauccuguggaucuccuucgccaucagcugcuuccuccugugcguggcccugcucggcuucaucaugugggccugccagaaggggaacauccgcugcaacaucugcaucuga

SEQ ID NO: 72143 - RNA, 1701 nt, Artificial Sequence
  derived and/or modified CDS sequence (opt1) from hemagglutinin__InfluenzaA__AEX36399
augaagaccaucaucgcccugagcuacauccucugccugguguucgcccagaagcugcccggcaacgacaacuccaccgcgacgcucugccuggggcaccacgccgucccgaacggcaccaucgugaagaccaucaccaacgaccagacggaggugaccaacgccaccgagcugguccagagcuccagcaccggggagaucugcgacagcccccaccagauccucgacggcgagaacugcacgcugaucgacgcccugcucggggacccccagugcgacggcuuccagaacaagaagugggaccuguucguggagcgcagcaaggccuacuccaacugcuaccccuacgacgugccggacuacgcgagccugcggucccucgucgccagcuccggcacccuggaguucaacaacgagagcuucaacuggaccggggugacccagaacggcacguccagcgccugcauccgccgguccaacaacagcuucuucucccgccugaacuggcucacccaccugaaguucaaguaccccgcccugaacgugaccaugcccaacaacgagaaguucgacaagcucuacaucuggggcguccaccaccccgggaccgacaacgaccagaucuuccuguacgcgcaggccagcgggcggaucacgguguccaccaagcgcagccagcagaccgugaucccgaacaucggcagccggccccgcguccggaacauccccucccgcaucagcaucuacuggaccaucgugaagcccggcgacauccugcucaucaacuccacggggaaccugaucgccccgcggggcuacuucaagauccgcagcgggaaguccagcaucaugcgguccgacgcccccaucggcaagugcaacagcgagugcaucacccccaacggcuccauccccaacgacaagccguuccagaacgugaaccgcaucaccuacggggccugcccccgguacgucaagcagaacacccugaagcucgcgacgggcaugcgcaacgugcccgagaagcagacccgggggaucuucggcgccaucgccggguucaucgagaacggcugggagggcaugguggacgggugguacggcuuccgccaccagaacagcgaggggaucggccaggccgccgaccugaaguccacccaggcggccaucgaccagaucaacgggaagcugaaccggcucaucggcaagaccaacgagaaguuccaccagaucgagaaggaguucagcgaggucgagggccgcauccaggaccuggagaaguacguggaggacacgaagaucgaccugugguccuacaacgccgagcuccugguggcccuggagaaccagcacaccaucgaccucaccgacagcgagaugaacaagcuguucgagaagaccaagaagcagcugcgggagaacgccgaggacauggggaacggcugcuucaagaucuaccacaagugcgacaacgcgugcaucggguccauccgcaacggcacguacgaccacgacgucuaccgcgacgaggcccucaacaaccgguuccagaucaaggggguggagcugaaguccggcuacaaggacuggauccuguggaucuccuucgccaucagcugcuuccuccugugcguggcccugcucggcuucaucaugugggccugccagaaggggaacauccgcugcaacaucugcaucuga

SEQ ID NO: 72144 - RNA, 1701 nt, Artificial Sequence
  derived and/or modified CDS sequence (opt1) from hemagglutinin__InfluenzaA__AEX36410
augaagaccaucaucgcccugagcuacauccucugccugguguucgcccagaagcugcccggcaacgacaacuccaccgcgacgcucugccuggggcaccacgccgucccgaacggcaccaucgugaagaccaucaccaacgaccagaucgaggugacgaacgccaccgagcugguccagaacagcuccaccggggagaucugcgacagcccccaccagauccucgacggcgagaacugcacccugaucgacgcccugcucggggacccccagugcgacggcuuccagaacaagaagugggaccuguucguggagcgcuccaaggccuacagcaacugcuaccccuacgacgugccggacuacgcgucccugcggagccucgucgccuccagcggcacgcuggaguucaacaacgaguccuucaacuggaccggggugacccagaacggcaccagcuccgccugcauccgccggagcaacaacuccuucuucagccgccugaacuggcucacgcaccugaaguucaaguaccccgcccugaacgugaccaugcccaacaacgagaaguucgacaagcucuacaucuggggcguccaccaccccgggaccgacaacgaccagaucuuccuguacgcgcaggccuccgggcggaucaccgugagcacgaagcgcucccagcagaccgugaucccgaacaucggcagccggccccgcguccggaacauccccagccgcaucuccaucuacuggaccaucgugaagcccggcgacauccugcucaucaacagcaccgggaaccugaucgccccgcggggcuacuucaagauccgcuccggcaagagcuccaucaugcggagcgacgcccccaucgggaagugcaacuccgagugcaucacgcccaacggcagcauccccaacgacaagccguuccagaacgugaaccgcaucaccuacggggccugcccccgguacgucaagcagaacacccugaagcucgcgaccggcaugcgcaacgugcccgagaagcagacgcgggggaucuucggcgccaucgccggguucaucgagaacggcugggagggcaugguggacgggugguacggcuuccgccaccagaacuccgaggggaucggccaggccgccgaccucaagagcacccaggcggccaucgaccagaucaacgggaagcugaaccggcugaucggcaagaccaacgagaaguuccaccagaucgagaaggaguucuccgaggucgagggccgcauccaggaccuggagaaguacguggaggacaccaagaucgaccuguggagcuacaacgccgagcuccugguggcccuggagaaccagcacacgaucgaccucaccgacuccgagaugaacaagcuguucgagaagaccaagaagcagcugcgggagaacgccgaggacauggggaacggcugcuucaagaucuaccacaagugcgacaacgcgugcaucgggagcauccgcaacggcaccuacgaccacgacgucuaccgcgacgaggcccucaacaaccgguuccagaucaaggggguggagcugaaguccggcuacaaggacuggauccuguggaucagcuucgccaucuccugcuuccuccugugcguggcccugcucggcuucaucaugugggccugccagaaggggaacauccgcugcaacaucugcaucuga

SEQ ID NO: 72145 - RNA, 1701 nt, Artificial Sequence; identical to SEQ ID NO: 66458
  derived and/or modified CDS sequence (opt1) from hemagglutinin__InfluenzaA__AEX36421

SEQ ID NO: 72146 - RNA, 1701 nt, Artificial Sequence
  derived and/or modified CDS sequence (opt1) from hemagglutinin__InfluenzaA__AEX36432
augaagaccaucaucgcccugagcuacauccucugccugguguucgcccagaagcugcccggcaacgacaacuccaccgcgacgcucugccuggggcaccacgccgucccgaacggcaccaucgugaagaccaucaccaacgaccagaucgaggugacgaacgccaccgagcugguccagagcuccagcaccggggagaucugcgacagcccccaccaggugcucgacggcgagaacugcacccugaucgacgcccugcucggggacccccagugcgacggcuuccagaacaagaagugggaccuguucguggagcgcagcaaggccuacuccaacugcuaccccuacgacgucccggacuacgcgagccugcggucccucguggccagcuccggcacgcuggaguucaacaacgagagcuucaacuggaccggggugacccagaacggcaccuccagcgccugcauccgccgguccaacaacagcuucuucucccgccugaacuggcucacgcaccugaaguucaaguaccccgcccugaacgucaccaugcccaacaacgagcaguucgacaagcucuacaucuggggcgugcaccaccccgggaccgacaacgaccagaucuuccuguacgcgcaggccagcgggcggaucaccguguccacgaagcgcagccagcagaccgucaucccgaacaucggcagccggccccgcgugcggaacauccccucccgcaucagcaucuacuggaccaucgugaagcccggcgacauccugcucaucaacuccaccgggaaccugaucgccccgcggggcuacuucaagauccgcagcgggaaguccagcaucaugcgguccgacgcccccaucggcaagugcaacagcgagugcaucacgcccaacggcuccauccccaacgacaagccguuccagaacgucaaccgcaucaccuacggggccugcccccgguacgugaagcagaacacccugaagcucgcgaccggcaugcgcaacgugcccgagaagcagacgcgggggaucuucggcgccaucgccggguucaucgagaacggcugggagggcauggucgacgggugguacggcuuccgccaccagaacagcgaggggcggggccaggccgccgaccugaaguccacccaggcggccaucgaccagaucaacgggaagcugaaccgccucaucggcaagaccaacgagaaguuccaccagaucgagaaggaguucagcgagguggagggccggauccaggaccuggagaaguacguggaggacaccaagaucgaccugugguccuacaacgccgagcuccuggucgcccuggagaaccagcacacgaucgaccucaccgacagcgagaugaacaagcuguucgagaagaccaagaagcagcugcgcgagaacgccgaggacauggggaacggcugcuucaagaucuaccacaagugcgacaacgcgugcaucggguccauccgcaacggcaccuacgaccacgacguguaccgggacgaggcccucaacaaccgcuuccagaucaaggggguggagcugaaguccggcuacaaggacuggauccuguggaucuccuucgccaucagcugcuuccuccugugcgucgcccugcucggcuucaucaugugggccugccagaaggggaacauccggugcaacaucugcaucuga

SEQ ID NO: 72147 - RNA, 1701 nt, Artificial Sequence
  derived and/or modified CDS sequence (opt1) from hemagglutinin__InfluenzaA__AEX36443
augaagaccaucaucgcccugagcuacauccucugccugguguucgcccagaagcugcccggcaacgacaacuccaccgcgacgcucugccuggggcaccacgccgucccgaacggcaccaucgugaagaccaucaccaacgaccagaucgaggugacgaacgccaccgagcugguccagagcuccagcaccggggagaucugcaacagcccccaccagauccucgacggcgagaacugcacccugaucgacgcccugcucggggacccccagugcgacggcuuccagaacaagaagugggaccuguucguggagcgcagcaaggccuacuccaacugcuaccccuacgacgugccggacuacgcgagccugcggucccucgucgccagcuccggcacgcuggaguucaacaacgagagcuucaacuggaccggggugacccagaacggcaccuccagcgccugcauccgccgguccaacaacagcuucuucucccgccugaacuggcucacgcaccugaaguucaaguaccccgcccugaacgugaccaugcccaacaacgaggaguucgacaagcucuacaucuggggcguccaccaccccgggaccgacaacgaccagaucuuccuguacgcgcaggccagcgggcggaucaccguguccacgaagcgcagccagcagaccgugaucccgaacaucggcagccggccccgcguccggaacauccccucccgcaucagcaucuacuggaccaucgugaagcccggcgacauccugcucaucaacuccaccgggaaccugaucgccccgcggggcuacuucaagauccgcagcgggaaguccagcaucaugcgguccgacgcccccaucggcaagugcaacagcgagugcaucacgcccaacggcuccauccccaacgacaagccguuccagaacgugaaccgcaucaccuacggggccugcccccgguacgucaagcagaacacccugaagcucgcgaccggcaugcgcaacgugcccgagaagcagacgcgggggaucuucggcgccaucgccggguucaucgagaacggcugggagggcaugguggacgggugguacggcuuccgccaccagaacagcgaggggaucggccaggccgccgaccugaaguccacccaggcggccaucgaccagaucaacgggaagcugaaccggcucaucggcaagaccaacgagaaguuccaccagaucgagaaggaguucagcgaggucgagggccgcauccaggaccuggagaaguacguggaggacaccaagaucgaccugugguccuacaacgccgagcuccugguggcccuggagaaccagcacacgaucgaccucaccgacagcgagaugaacaagcuguucgagaagaccaagaagcagcugcgggagaacgccgaggacauggggaacggcugcuucaagaucuaccacaagugcgacaacgcgugcaucggguccauccgcaacggcaccuacgaccacgacgucuaccgcgacgaggcccucaacaaccgguuccagaucaaggggguggagcugaaguccggcuacaaggacuggauccuguggaucuccuucgccaucagcugcuuccuccugugcguggcccugcucggcuucaucaugugggccugccagaaggggaacauccgcugcaacaucugcaucuga

SEQ ID NO: 72148 - RNA, 1701 nt, Artificial Sequence
  derived and/or modified CDS sequence (opt1) from hemagglutinin__InfluenzaA__AEX36454
augaagaccaucaucgcccugagcuacauccucugccugguguucgcccagaagcugcccggcaacgacaacuccaccgcgacgcucugccuggggcaccacgccgucccgaacggcaccaucgugaagaccaucaccaacgaccagaucgaggugacgaacgccaccgagcugguccagagcuccagcaccggggagaucugcaacagcccccaccagauccucgacggcgagaacugcacccugaucgacgcccugcucggggacccccagugcgacggcuuccagaacaagaagugggaccuguucguggagcgcagcaaggccuacuccaacugcuaccccuacgacgugccggacuacgcgagccugcggucccucgucgccagcuccggcacgcuggaguucaacaacgagagcuucaacuggaccggggugacccagaacggcaccuccagcgccugcauccgccgguccaacaacagcuucuucucccgccugaacuggcucacgcaccugaaguucaaguaccccgcccugaacgugaccaugcccaacaacgaggaguucgacaagcucuacaucuggggcguccaccaccccgggaccgacaacgaccagaucuuccuguacgcgcaggccagcgggcggaucaccguguccacgaagcgcagccagcagaccgugaucccgaacaucggcagccggccccgcguccggaacauccccucccgcaucagcaucuacuggaccaucgugaagcccggcgacauccugcucaucaacuccaccgggaaccugaucgccccgcggggcuacuucaagauccgcagcgggaaguccagcaucaugcgguccgacgcccccaucggcaagugcaacagcgagugcaucacgcccaacggcuccauccccaacgacaagccguuccagaacgugaaccgcaucaccuacggggccugcccccgguacgucaagcagaacacccugaagcucgcgaccggcaugcgcaacgugcccgagaagcagacgcgggggaucuucggcgccaucgccggguucaucgagaacggcugggagggcaugguggacgggugguacggcuuccgccaccagaacagcgaggggaucggccaggccgccgaccugaaguccacccaggcggccaucgaccagaucaacgggaagcugaaccggcucaucggcaagaccaacgagaaguuccaccagaucgagaaggaguucagcgaggucgagggccgcauccaggaccuggagaaguacguggaggacaccaagaucgaccugugguccuacaacgccgagcuccugguggcccuggagaaccagcacacgaucgaccucaccgacagcgagaugaacaagcuguucgagaagaccaagaagcagcugcgggagaacgccgaggacauggggaacggcugcuucaagaucuaccacaagugcgacaacgcgugcaucggguccauccgcaacggcaccuacgaccacgacgucuaccgcgacgaggcccucaacaaccgguuccagaucaaggggguggagcugaaguccggcuacaaggacuggauccuguggaucuccuucgccaucagcugcuuccuccugugcgugguccugcucggcuucaucaugugggccugccagaaggggaacauccgcugcaacaucugcaucuga

SEQ ID NO: 72149 - RNA, 1701 nt, Artificial Sequence; identical to SEQ ID NO: 65753
  derived and/or modified CDS sequence (opt1) from hemagglutinin__InfluenzaA__AEX36465

SEQ ID NO: 72150 - RNA, 1701 nt, Artificial Sequence
  derived and/or modified CDS sequence (opt1) from hemagglutinin__InfluenzaA__AEX36476
augaagaccaucaucgcccugagcuacauccucugccugguguucgcccagaagcugcccggcaucgacaacuccaccgcgacgcucugccuggggcaccacgccgucccgaacggcaccaucgugaagaccaucaccaacgaccagaucgaggugacgaacgccaccgagcugguccagagcuccagcaccgggggcaucugcgacagcccccaccagauccucgacggggagaacugcacccugaucgacgcccugcucggcgacccccagugcgacggcuuccagaacaagaagugggaccuguucguggagcgcagcaaggccuacuccaacugcuaccccuacgacgugccggacuacgcgagccugcggucccucgucgccagcuccgggacgcuggaguucaacaacgagagcuucaacuggaccggcgugacccagaacgggaccuccagcgccugcaagcgcggcuccaacaacagcuucuucucccggcugaacuggcucacgcacagcaaguucaaguaccccgcccugaacgugaccaugcccaacaacgaggaguucgacaagcuguacaucuggggcguccaccaccccgggaccgacaacgaccagaucuucccguacgcgcaggccuccggccgcaucaccgugagcacgaagcggagccagcagaccgugauccccaacaucgggucccgcccccggauccgcaacauccccagccggaucuccaucuacuggaccaucgucaagccgggcgacauccuccugaucaacagcaccgggaaccugaucgcgccccgcggcuacuucaagauccgguccggcaagagcuccaucaugcgcagcgacgcccccaucgggaagugcgacuccgagugcaucacgcccaacggcagcaucccgaacgacaagcccuuccagaacgugaaccggaucaccuacggggccugcccccgcuacgugaagcagaacacccucaagcuggccaccggcaugcggaacguccccgagaagcagacgcgcgggaucuucggcgccaucgccggcuucaucgagaacgggugggagggcaugguggacgggugguacggcuuccggcaccagaacuccgaggggaucggccaggccgccgaccugaaguccacccaggcggccaucgaccagaucaacggcaagcucaaccgccugaucgggaagaccaacgagaaguuccaccagaucgagaaggaguucuccgagguggagggccggauccaggaccuggagaaguacgucgaggacaccaagaucgaccucuggagcuacaacgccgagcugcugguggcccucgagaaccagcacacgaucgaccugaccgacuccgagaugaacaagcuguucgagaagaccaagaagcagcuccgcgagaacgccgaggacauggggaacggcugcuucaagaucuaccacaagugcgacaacgcgugcaucgggagcauccggaacggcaccuacgaccacgacguguaccgcgacgaggcccugaacaaccgcuuccagaucaagggcgucgagcugaaguccggguacaaggacuggauccucuggaucagcuucgccaucuccugcuuccugcugugcguggcccuccugggcuucaucaugugggccugccagaaggggaacauccggugcaacaucugcaucuga

SEQ ID NO: 72151 - RNA, 1701 nt, Artificial Sequence
  derived and/or modified CDS sequence (opt1) from hemagglutinin__InfluenzaA__AEX36487
augaagaccaucaucgcccugagcuacauccucugccugguguucgcccagaagcugcccggcaucgacaacuccaccgcgacgcucugccuggggcaccacgccgucccgaacggcaccaucgugaagaccaucaccaacgaccagaucgaggugacgaacgccaccgagcugguccagagcuccagcaccgggggcaucugcgacagcccccaccagauccucgacggggagaacugcacccugaucgacgcccugcucggcgacccccagugcgacggcuuccagaacaagaagugggaccuguucguggagcgcagcaaggccuacuccaacugcuaccccuacgacgugccggacuacgcgagccugcggucccucgucgccagcuccgggacgcuggaguucaacaacgagagcuucaacuggaccggcgugacccagaacgggaccuccagcgccugcaagcgcggcuccaacaacagcuucuucucccggcugaacuggcucacgcacagcaaguucaaguaccccgcccugaacgugaccaugcccaacaacgaggaguucgacaagcuguacaucuggggcguccuccaccccgggaccgacaacgaccagaucuuccuguacgcgcaggccuccggccgcaucaccgugagcacgaagcggagccagcagaccgugaucccgaacaucgggucccgcccccggguccgcaacauccccagccggaucuccaucuacuggaccaucgugaagcccggcgacauccugcucaucaacagcaccgggaaccugaucgccccgcgcggcuacuucaagauccgguccggcaagagcuccaucaugcgcagcgacgcccccaucgggaagugcaacuccgagugcaucacgcccaacggcagcauccccaacgacaagccguuccagaacgugaaccggaucaccuacggggccugcccccgcuacgucaagcagaacacccugaagcucgcgaccggcaugcggaacgugcccgagaagcagacgcgcgggaucuucggcgccaucgccggcuucaucgagaacgggugggagggcaugguggacgggugguacggcuuccggcaccagaacuccgaggggaucggccaggccgccgaccugaaguccacccaggcggccaucgaccagaucaacggcaagcugaaccgccucaucgggaagaccaacgagaaguuccaccagaucgagaaggaguucuccgaggucgagggccggauccaggaccuggagaaguacguggaggacaccaagaucgaccuguggagcuacaacgccgagcuccugguggcccuggagaaccagcacacgaucgaccucaccgacuccgagaugaacaagcuguucgagaagaccaagaagcagcugcgcgagaacgccgaggacauggggaacggcugcuucaagaucuaccacaagugcgacaacgcgugcaucgggagcauccggaacggcaccuacgaccacgacgucuaccgcgacgaggcccucaacaaccgcuuccagaucaagggcguggagcugaaguccggguacaaggacuggauccuguggaucagcuucgccaucuccugcuuccuccugugcguggcccugcucggcuucaucaugugggccugccagaaggggaacauccggugcaacaucugcaucuga

SEQ ID NO: 72152 - RNA, 1701 nt, Artificial Sequence; identical to SEQ ID NO: 72002
  derived and/or modified CDS sequence (opt1) from hemagglutinin__InfluenzaA__AEX36498

SEQ ID NO: 72153 - RNA, 1701 nt, Artificial Sequence
  derived and/or modified CDS sequence (opt1) from hemagglutinin__InfluenzaA__AEX36509
augaagaccaucaucgcccugagcuacauccucugccugguguucgcccagaagcugcccggcaucgacaacuccaccgcgacgcucugccuggggcaccacgccgucccgaacggcaccaucgugaagaccaucaccaacgaccagaucgaggugacgaacgccaccgagcugguccagaacagcuccaccgggggcaucugcgacagcccccaccagauccucgacggggagaacugcacccugaucgacgcccugcucggcgacccccagugcgacggcuuccagaacaagaagugggaccuguucguggagcgcuccaaggccuacagcaacugcuaccccuacgacgugccggacuacgcgucccugcggagccucgucgccuccagcgggacgcuggaguucaacaacgaguccuucaacuggaccggcgugacccagaacgggaccagcuccgccugcaagcgcggcagcaacaacuccuucuucagccggcugaacuggcucacgcacuccaaguucaaguaccccgcccugaacgugaccaugcccaacaacgaggaguucgacaagcuguacaucuggggcguccaccaccccgggaccgacaacgaccagaucuucccguacgcgcaggccagcggccgcaucaccguguccacgaagcggagccagcagaccgugauccccaacaucgggagccgcccccggguccgcaacauccccucccggaucagcaucuacuggaccaucgugaagccgggcgacauccuccugaucaacuccaccgggaaccugaucgcgccccgcggcuacuucaagauccggagcggcaaguccagcaucaugcgcuccgacgcccccaucgggaagugcaacagcgagugcaucacgcccaacggcuccaucccgaacgacaagcccuuccagaacgugaaccggaucaccuacggggccugcccccgcuacgucaagcagaacacccucaagcuggccaccggcaugcggaacgugcccgagaagcagacgcgcgggaucuucggcgccaucgccggcuucaucgagaacgggugggagggcaugguggacgggugguacggcuuccggcaccagaacagcgaggggaucggccaggccgccgaccugaaguccacccaggcggccaucgaccagaucaacggcaagcucaaccgccugaucgggaagaccaacgagaaguuccaccagaucgagaaggaguucagcgaggucgagggccggauccaggaccuggagaaguacguggaggacaccaagaucgaccucugguccuacaacgccgagcugcugguggcccucgagaaccagcacacgaucgaccugaccgacagcgagaugaacaagcuguucgagaagaccaagaagcagcuccgcgagaacgccgaggacauggggaacggcugcuucaagaucuaccacaagugcgacaacgcgugcaucggguccauccggaacggcaccuacgaccacgacgucuaccgcgacgaggcccugaacaaccgcuuccagaucaagggcguggagcucaagagcggguacaaggacuggauccuguggaucuccuucgccaucagcugcuuccugcugugcguggcccuccugggcuucaucaugugggccugccagaaggggaacauccggugcaacaucugcaucuga

SEQ ID NO: 72154 - RNA, 1701 nt, Artificial Sequence
  derived and/or modified CDS sequence (opt1) from hemagglutinin__InfluenzaA__AEX36520
augaagaccaucaucgcccugagcuacauccucugccugguguucgcccagaagcugcccggcaacgacaacuccaccgcgacgcucugccuggggcaccacgccgucccgaacggcaccaucgugaagaccaucaccaacgaccagaucgaggugacgaacgccaccgagcugguccagagcuccagcaccggggagaucugcgacagcccccaccagauccucgacggcgagaacugcacccugaucgacgcccugcucggggacccccagugcgacggcuuccagaacaagaagugggaccuguucguggagcgcagcaaggccuacuccaacugcuaccccuacgacgugccggacuacgcgagccugcggucccucgucgccagcuccggcacgcuggaguucaacaacgagagcuucaacuggaccggggugacccagaacggcaccuccagcgccugcauccgccgguccaacaacagcuucuucucccgccugaacuggcucacgcaccugaaguucaaguaccccgcccugaacgugaccaugcccaacaacgagcaguucgacaagcucuacaucuggggcguccaccaccccgggaccgacaacgaccagaucuuccuguacgcgcaggccagcgggcggaucaccguguccacgaagcgcagccagcagaccgugaucccgaacaucggcagccggccccgcguccggaacauccccucccgcaucagcaucuacuggaccaucgugaagcccggcgacauccugcucaucaacuccaccgggaaccugaucgccccgcggggcuacuucaagauccgcagcgggaaguccagcaucaugcgguccgacgcccccaucggcaagugcaacagcgagugcaucacgcccaacggcuccauccccaacgacaagccguuccagaacgugaaccgcaucaccuacggggccugcccccgguacgucaagcagaacacccugaagcucgcgaccggcaugcgcaacgugcccgagaagcagacgcgggggaucuucggcgccaucgccggguucaucgagaacggcugggagggcaugguggacgggugguacggcuuccgccaccagaacagcgaggggcggggccaggccgccgaccugaaguccacccaggcggccaucgaccagaucaacgggaagcugaaccgccucaucggcaagaccaacgagaaguuccaccagaucgagaaggaguucagcgaggucgagggccggauccaggaccuggagaaguacguggaggacaccaagaucgaccugugguccuacaacgccgagcuccugguggcccuggagaaccagcacacgaucgaccucaccgacagcgagaugaacaagcuguucgagaagaccaagaagcagcugcgcgagaacgccgaggacauggggaacggcugcuucaagaucuaccacaagugcgacaacgcgugcaucggguccauccgcaacggcaccuacgaccacaacgucuaccgggacgaggcccucaacaaccgcuuccagaucaaggggguggagcugaaguccggcuacaaggacuggauccuguggaucuccuucgccaucagcugcuuccuccugugcguggcccugcucggcuucaucaugugggccugccagaaggggaacauccggugcaacaucugcaucuga

SEQ ID NO: 72155 - RNA, 1701 nt, Artificial Sequence
  derived and/or modified CDS sequence (opt1) from hemagglutinin__InfluenzaA__AEX36531
augaagaccaucaucgcccugagcuacauccucugccugguguucgcccagaagcugcccggcaacgacaacuccaccgcgacgcucugccuggggcaccacgccgucccgaacggcaccaucgugaagaccaucaccaacgaccagaucgaggugacgaacgccaccgagcugguccagagcuccagcaccggggagaucugcgacagcccccaccagauccucgacggcgagaacugcacccugaucgacgcccugcucggggacccccagugcgacggcuuccagaacaagaagugggaccuguucguggagcgcagcaaggccuacuccaacugcuaccccuacgacgugccggacuacgcgagccugcggucccucgucgccagcuccggcacgcuggaguucaacaacgagagcuucaacuggaccggggugacccagaacggcaccuccagcgccugcauccgccgguccaacaacagcuucuucucccgccugaacuggcucacgcaccugaaguucaaguaccccgcccugaacgugaccaugcccaacaacgagcaguucgacaagcucuacaucuggggcguccaccaccccgggaccgacaacgaccagaucuuccuguacgcgcaggccagcgggcggaucaccguguccacgaagcgcagccagcagaccgugaucccgaacaucggcagccggccccgcguccggaacauccccucccgcaucagcaucuacuggaccaucgugaagcccggcgacauccugcucaucaacuccaccgggaaccugaucgccccgcggggcuacuucaagauccgcagcgggaaguccagcaucaugcgguccgacgcccccaucggcaagugcaacagcgagugcaucacgcccaacggcuccauccccaacgacaagccguuccagaacgugaaccgcaucaccuacggggccugcccccgguacgucaagcagaacacccugaagcucgcgaccggcaugcgcaacgugcccgagaagcagacgcgggggaucuucggcgccaucgccggguucaucgagaacggcugggagggcaugguggacgggugguacggcuuccgccaccagaacagcgaggggcggggccaggccgccgaccugaaguccacccaggcggccaucgaccagaucaacgggaagcugaaccgccucaucggcaagaccaacgagaaguuccaccagaucgagaaggaguucagcgaggucgagggccggauccaggaccuggacaaguacguggaggacaccaagaucgaccugugguccuacaacgccgagcuccugguggcccuggagaaccagcacacgaucgaccucaccgacagcgagaugaacaagcuguucgagaagaccaagaagcagcugcgcgagaacgccgaggacauggggaacggcugcuucaagaucuaccacaagugcgacaacgcgugcaucggguccauccgcaacggcaccuacgaccacgacgucuaccgggacgaggcccucaacaaccgcuuccagaucaaggggguggagcugaaguccggcuacaaggacuggauccuguggaucuccuucgccaucagcugcuuccuccugugcguggcccugcucggcuucaucaugugggccugccagaaggggaacauccggugcaacaucugcaucuga

SEQ ID NO: 72156 - RNA, 1701 nt, Artificial Sequence
  derived and/or modified CDS sequence (opt1) from hemagglutinin__InfluenzaA__AEX36542
augaagaccaucaucgcccugagcuacauccucugccugguguucgcccagaagcugcccggcaacgacaacuccaccgcgacgcucugccuggggcaccacgccgucccgaacggcaccaucgugaagaccaucaccaacgaccagaucgaggugacgaacgccaccgagcugguccagaacagcuccaccggggagaucugcgacagcccccaccagauccucgacggcgagaacugcacccugaucgacgcccugcucggggacccccagugcgacggcuuccagaacaagaagugggaccuguucguggagcgcuccaaggccuacagcaacugcuaccccuacgacgugccggacuacgcgucccugcggagccucgucgccuccagcggcacgcuggaguucaacaacgaguccuucaacuggaccggggugacccagaacggcaccagcuccgccugcauccgccggagcaacaacuccuucuucagccgccugaacuggcucacgcaccugaaguucaaguaccccgcccugaacgugaccaugcccaacaacgagcaguucgacaagcucuacaucuggggcguccaccaccccgggaccgacaacgaccagaucuuccuguacgcgcaggccuccgggcggaucaccgugagcacgaagcgcucccagcagaccgugaucccgaacaucggcagccggccccgcguccggaacauccccagccgcaucuccaucuacuggaccaucgugaagcccggcgacauccugcucaucaacagcaccgggaaccugaucgccccgcggggcuacuucaagauccgcuccggcaagagcuccaucaugcggagcgacgcccccaucgggaagugcaacuccgagugcaucacgcccaacggcagcauccccaacgacaagccguuccagaacgugaaccgcaucaccuacggggccugcccccgguacgucaagcagaacacccugaagcucgcgaccggcaugcgcaacgugcccgagaagcagacgcgggggaucuucggcgccaucgccggguucaucgagaacggcugggagggcaugguggacgggugguacggcuuccgccaccagaacuccgaggggcggggccaggccgccgaccucaagagcacccaggcggccaucgaccagaucaacgggaagcugaaccgccugaucggcaagaccaacgagaaguuccaccagaucgagaaggaguucuccgaggucgagggccggauccaggaccuggagaaguacguggaggacaccaagaucgaccuguggagcuacaacgccgagcuccugguggcccuggagaaccagcacacgaucgaccucaccgacuccgagaugaacaagcuguucgagaagaccaagaagcagcugcgcgagaacgccgaggacauggggaacggcugcuucaagaucuaccacaagugcgacaacgcgugcaucgggagcauccgcaacggcaccuacgaccacgacgucuaccgggacgaggcccucaacaaccgcuuccagaucaaggggguggagcugaaguccggcuacaaggacuggauccuguggaucagcuucgccaucuccugcuuccuccugugcguggcccugcucggcuucaucaugugggccugccagaaggggaacauccggugcaacaucugcaucuga

SEQ ID NO: 72157 - RNA, 1701 nt, Artificial Sequence; identical to SEQ ID NO: 72156
  derived and/or modified CDS sequence (opt1) from hemagglutinin__InfluenzaA__AEX36553

SEQ ID NO: 72158 - RNA, 1701 nt, Artificial Sequence; identical to SEQ ID NO: 72156
  derived and/or modified CDS sequence (opt1) from hemagglutinin__InfluenzaA__AEX36564

SEQ ID NO: 72159 - RNA, 1701 nt, Artificial Sequence
  derived and/or modified CDS sequence (opt1) from hemagglutinin__InfluenzaA__AEX36575
augaagaccaucaucgcccugagcuacauccucugccugguguucgcccagaagcugcccggcaacgggaacuccaccgcgacgcucugccugggccaccacgccgucccgaacgggaccaucgugaagaccaucaccaacgaccagaucgaggugacgaacgccaccgagcugguccagagcuccagcaccggcgagaucugcgacagcccccaccagauccucgacggggagaacugcacccugaucgacgcccugcucggcgacccccagugcgacggcuuccagaacaagaagugggaccuguucguggagcgcuccaaggccuacuccaacugcuaccccuacgacgugccggacuacgcgagccugcggucccucgucgccagcuccgggacgcuggaguucaacaacgagagcuucaacuggaccggcgugacccagaacgggaccuccagcgccugcauccgccgguccaacaacagcuucuucucccgccugaacuggcucacgcaccugaaguucaaguaccccgcccugaacgugaccaugcccaacaacgagcaguucgacaagcucuacaucuggggcguccaccaccccgggaccgacaacgaccagaucuuccuguacgcgcaggccagcggccggaucaccguguccacgaagcgcagccagcagaccgugaucccgaacaucggcagccggccccgcguccggaacauccccucccgcaucagcaucuacuggaccaucgugaagcccggggacauccugcucaucaacuccaccggcaaccugaucgccccgcggggguacuucaagauccgcagcggcaaguccagcaucaugcgguccgacgcccccaucggcaagugcaacagcgagugcaucacgcccaacggguccauccccaacgacaagccguuccagaacgugaaccgcaucaccuacggcgccugcccccgguacgucaagcagaacacccugaagcucgcgaccgggaugcgcaacgugcccgagaagcagacgcggggcaucuucggggccaucgccggcuucaucgagaacggcugggaggggaugguggacggcugguacggguuccgccaccagaacagcgagggccgggggcaggccgccgaccugaaguccacccaggcggccaucgaccagaucaacggcaagcugaaccgccucaucggcaagaccaacgagaaguuccaccagaucgagaaggaguucagcgaggucgaggggcggauccaggaccuggagaaguacguggaggacaccaagaucgacaucugguccuacaacgccgagcugcucguggcccuggagaaccagcacacgaucgaccugaccgacagcgagaugaacaagcuguucgagaagaccaagaagcagcuccgcgagaacgccgaggacaugggcaacgggugcuucaagaucuaccacaagugcgacaacgcgugcaucggcuccauccgcaacgggaccuacgaccacgacgucuaccgggacgaggcccugaacaaccgcuuccagaucaagggcguggagcucaagagcggcuacaaggacuggauccuguggaucuccuucgccaucagcugcuuccugcucugcguggcccugcugggguucaucaugugggccugccagaagggcaacauccggugcaacaucugcaucuga

SEQ ID NO: 72160 - RNA, 1701 nt, Artificial Sequence
  derived and/or modified CDS sequence (opt1) from hemagglutinin__InfluenzaA__AEX36586
augaagaccaucaucgcccugagcuacauccucugccugguguucgcccagaagcugcccggcaacgacaacaacaccgcgacgcucugccuggggcaccacgccgucccgaacggcaccaucgugaagaccaucaccaacgaccagaucgaggugacgaacgccaccgagcugguccaguccagcuccaccggggagaucugcgacagcccccaccagauccucgacggcgagaacugcacccugaucgacgcccugcucggggacccccagugcgacggcuuccagaacaagaagugggaccuguucguggagcgcuccaaggccuacagcaacugcuaccccuacgacgugccggacuacgcgucccugcggagccucgucgccuccagcggcacgcuggaguucaacaacgaguccuucaacuggaccggggugacccagaacggcaccagcuccgccugcauccgccggagcaacaacuccuucuucagccgccugaacuggcucacgcaccugaaguucaaguaccccgcccugaacgugaccaugcccaacaacgagcaguucgacaagcucuacaucuggggcguccaccaccccgggaccgacaacgaccagaucuuccuguacgcgcaggccuccgggcggaucaccgugagcacgaagcgcucccagcagaccgugaucccgaacaucggcagccggccccgcguccggaacauccccagccgcaucuccaucuacuggaccaucgugaagcccggcgacauccugcucaucaacagcaccgggaaccugaucgccccgcggggcuacuucaagauccgcuccggcaagagcuccaucaugcggagcgacgcccccaucgggaagugcaacuccgagugcaucacgcccaacggcagcauccccaacgacaagccguuccagaacgugaaccgcaucaccuacggggccugcccccgguacgucaagcagaacacccugaagcucgcgaccggcaugcgcaacgugcccgagaagcagacgcgggggaucuucggcgccaucgccggguucaucgagaacggcugggagggcaugguggacgggugguacggcuuccgccaccagaacuccgaggggcggggccaggccgccgaccucaagagcacccaggcggccaucgaccagaucaacgggaagcugaaccgccugaucggcaagaccaacgagaaguuccaccagaucgagaaggaguucuccgaggucgagggccggauccaggaccuggagaaguacguggaggacaccaagaucgaccuguggagcuacaacgccgagcuccugguggcccuggagaaccagcacacgaucgaccucaccgacuccgagaugaacaagcuguucgagaagaccaagaagcagcugcgcgagaacgccgaggacauggggaacggcugcuucaagaucuaccacaagugcgacaacgcgugcaucgggagcauccgcaacggcaccuacgaccacgacgucuaccgggacgaggcccucaacaaccgcuuccagaucaaggggguggagcugaaguccggcuacaaggacuggauccuguggaucagcuucgccaucuccugcuuccuccugugcguggcccugcucggcuucaucaugugggccugccagaaggggaacauccggugcaacaucugcaucuga

SEQ ID NO: 72161 - RNA, 1701 nt, Artificial Sequence
  derived and/or modified CDS sequence (opt1) from hemagglutinin__InfluenzaA__AEX36597
augaagaccaucaucgcccugagcuacauccucugccugguguucgcccagaagcugcccggcaacgacaacuccauggcgacccucugccuggggcaccacgccgucccgaacggcacgaucgugaagaccaucaccaacgaccagaucgaggugaccaacgccacggagcugguccagagcuccagcaccggggagaucugcgacagcccccaccagauccucgacggcgagaacugcacccugaucgacgcccugcucggggacccccagugcgacggcuuccagaacaagaagugggaccuguucguggagcgcagcaaggccuacuccaacugcuaccccuacgacgugccggacuacgcgagccugcggucccucgucgccagcuccggcacccuggaguucaacaacgagagcuucaacuggacgggggugacccagaacggcaccuccagcgccugcauccgccgguccaacaacagcuucuucucccgccugaacuggcucacccaccugaaguucaaguaccccgcccugaacgugacgaugcccaacaacgagcaguucgacaagcucuacaucuggggcguccaccaccccgggaccgacaacgaccagaucuuccuguacgcgcaggccagcgggcggaucaccguguccaccaagcgcagccagcagacggugaucccgaacaucggcagccggccccgcguccggaacauccccucccgcaucagcaucuacuggaccaucgugaagcccggcgacauccugcucaucaacuccaccgggaaccugaucgccccgcggggcuacuucaagauccgcagcgggaaguccagcaucaugcgguccgacgcccccaucggcaagugcaacagcgagugcaucacccccaacggcuccauccccaacgacaagccguuccagaacgugaaccgcaucacguacggggccugcccccgguacgucaagcagaacacccugaagcucgcgaccggcaugcgcaacgugcccgagaagcagacccgggggaucuucggcgccaucgccggguucaucgagaacggcugggagggcaugguggacgggugguacggcuuccgccaccagaacagcgaggggcggggccaggccgccgaccugaaguccacgcaggcggccaucgaccagaucaacgggaagcugaaccgccucaucggcaagaccaacgagaaguuccaccagaucgagaaggaguucagcgaggucgagggccggauccaggaccuggagaaguacguggaggacaccaagguggaccugugguccuacaacgccgagcuccuggucgcccuggagaaccagcacaccaucgaccucacggacagcgagaugaacaagcuguucgagaagaccaagaagcagcugcgcgagaacgccgaggacauggggaacggcugcuucaagaucuaccacaagugcgacaacgcgugcaucggguccauccgcaacggcaccuacgaccacgacguguaccgggacgaggcccucaacaaccgcuuccagaucaaggggguggagcugaaguccggcuacaaggacuggauccuguggaucuccuucgccaucagcugcuuccuccugugcgucgcccugcucggcuucaucaugugggccugccagaaggggaacauccggugcaacaucugcaucuga

SEQ ID NO: 72162 - RNA, 1701 nt, Artificial Sequence
  derived and/or modified CDS sequence (opt1) from hemagglutinin__InfluenzaA__AEX36608
augaagaccaucaucgcccugagcuacauccucugccugguguucgcccagaagcugcccggcaacgacaacuccaccgcgacgcucugccuggggcaccacgccgucccgaacggcaccaucgugaagaccaucaccaacgaccagaucgaggugacgaacgccaccgagcugguccagagcuccagcaccgggggcaucugcgacagcccccaccagauccucgacggggagaacugcacccugaucgacgcccugcucggcgacccccagugcgacggcuuccagaacaagaagugggaccuguucguggagcgcagcaaggccuacuccaacugcuaccccuacgacgugccggacuacgcgagccugcggucccucgucgccagcuccgggacgcuggaguucaacaacgagaacuucaacuggaccggcgugacccagaacgggaccagcuccgccugcaagcgccggagcaacaacuccuucuucagccgccugaacuggcucacgcaccugaaguucaaguaccccgcccugaacgugaccaugcccaacaacgagaaguucgacaagcucuacaucuggggcguccaccaccccgggaccgacaacgaccagaucuuccuguacgcgcaggccuccggccggaucaccgugagcacgaagcgcucccagcagaccgugaucccgaacaucggcagccggccccgcguccggaacauccccagccgcaucuccaucuacuggaccaucgugaagcccggggacauccugcucaucaacagcaccggcaaccugaucgccccgcggggguacuucaagauccgcuccggcaagagcuccaucaugcggagcgacgcccccaucggcaagugcaacuccgagugcaucacgcccaacgggagcauccccaacgacaagccguuccagaacgugaaccgcaucaccuacggcgccugcccccgguacgucaagcagaacacccugaagcucgcgaccgggaugcgcaacgugcccgagaagcagacgcggggcaucuucggggccaucgccggcuucaucgagaacggcugggaggggaugguggacggcugguacggguuccgccaccagaacuccgagggcaucgggcaggccgccgaccugaaguccacccaggcggccaucaaccagaucaacggcaagcugaaccggcucaucggcaagaccaacgagaaguuccaccagaucgagaaggaguucuccgaggucgaggggcgcauccaggaccuggagaaguacguggaggacaccaagaucgaccuguggagcuacaacgccgagcuccugguggcccuggagaaccagcacacgaucgaccucaccgacuccgagaugaacaagcuguucgagcggaccaagaagcagcugcgcgagaacgccgaggacaugggcaacgggugcuucaagaucuaccacaagugcgacaacgcgugcaucggcagcauccgcaacgggaccuacgaccacgacgucuaccgggacgaggcccucaacaagcgcuuccagaucaagggcguggagcugaaguccggcuacaaggacuggauccuguggaucagcuucgccaucuccugcuuccuccugugcguggcccugcucggguucaucaugugggccugccagaagggcaacauccggugcaacaucugcaucuga

SEQ ID NO: 72163 - RNA, 1701 nt, Artificial Sequence; identical to SEQ ID NO: 71985
  derived and/or modified CDS sequence (opt1) from hemagglutinin__InfluenzaA__AEX36619

SEQ ID NO: 72164 - RNA, 1701 nt, Artificial Sequence
  derived and/or modified CDS sequence (opt1) from hemagglutinin__InfluenzaA__AEX63617
auggaggccaagcuguucguccucuucugcgccuucaccgcgcugaaggccgacaccaucugcgugggcuaccacgccaacaacagcacggacaccguggacaccauccuggagaagaacgugaccgucacgcacuccgugaaccuccuggagaacagccacaacgggaagcugugcucccucaacggcaagaucccccugcagcuggggaacugcaacguggccggcuggauccucgggaacccgaagugcgaccugcugcucaccgccaacagcugguccuacaucaucgagaccagcaacuccaagaacggcgcgugcuaccccggcgaguucgccgacuacgaggagcugaaggagcagcugagcaccgucuccagcuucgagcgcuucgagaucuuccccaaggccacguccuggcccaaccacgacaccacccgggggaccacgguggccugcagccacuccggcgcgaacagcuucuaccgcaaccuccuguggaucgugaagaaggggaacuccuacccgaagcugagcaaguccuacaccaacaacaagggcaaggagguccucgugaucuggggcgugcaccacccgcccaccgacagcguccagcagacccuguaccagaacaaccacacguacguguccguggggagcagcaaguacuacaagcgguucacccccgagaucgucgcccgccccaaggugcgggagcaggccggccgcaugaacuacuacuggacccugcucgaccagggggacaccaucacguucgaggccaccggcaaccugaucgcccccuggcacgcguucgcccugaagaagggguccagcuccggcaucaugcggagcgacgcccaggugcacaacugcaccaccaagugccagacgccccacggcgcccucaaggggaaccugcccuuccagaacguccacccggugaccaucggcgagugccccaaguacgugaaguccacccagcugcgcauggccaccgggcuccggaacauccccagcauccagucccgcggccuguucggggcgaucgccggcuucaucgagggcggguggacgggcauggucgacgggugguacggcuaccaccaccggaacgagcaggggagcggcuacgccgccgaccagaaguccacccagaucgccaucgacggcaucagcaacaaggugaacuccgugaucgagaagaugaacauccaguucaccagcgucgggaaggaguucaacucccuggagaagcgcauggagaaccucaacaagaagguggacgacggcuuccuggacgucuggaccuacaacgcggagcugcucauccugcuggagaacgagcggacgcucgacuuccacgaccugaacgugaagaaccuguacgagaaggucaagagccagcuccgcaacaacgccaaggagaucgggaacggcugcuucgaguucuaccacaagugcgacaacgagugcauggaguccgugaagaacgggaccuacaacuaccugaaguacagcgaggaguccaagcugaaccgggaggagaucgacggcgugaagcucgagagcaugggcauccaccagauccuggccaucuacuccaccguggccagcagccugguccuccuggugucccugggggccaucagcuucuggaugugcuccaacggcagccuccagugccgcgugugcaucuga

SEQ ID NO: 72165 - RNA, 1698 nt, Artificial Sequence; identical to SEQ ID NO: 67302
  derived and/or modified CDS sequence (opt1) from hemagglutinin__InfluenzaA__AEX92873

SEQ ID NO: 72166 - RNA, 1701 nt, Artificial Sequence; identical to SEQ ID NO: 67857
  derived and/or modified CDS sequence (opt1) from hemagglutinin__InfluenzaA__AEY69088

SEQ ID NO: 72167 - RNA, 1701 nt, Artificial Sequence; identical to SEQ ID NO: 67454
  derived and/or modified CDS sequence (opt1) from hemagglutinin__InfluenzaA__AEY69098

SEQ ID NO: 72168 - RNA, 1701 nt, Artificial Sequence; identical to SEQ ID NO: 67435
  derived and/or modified CDS sequence (opt1) from hemagglutinin__InfluenzaA__AEY69120

SEQ ID NO: 72169 - RNA, 1701 nt, Artificial Sequence; identical to SEQ ID NO: 67637
  derived and/or modified CDS sequence (opt1) from hemagglutinin__InfluenzaA__AEY69131

SEQ ID NO: 72170 - RNA, 1701 nt, Artificial Sequence; identical to SEQ ID NO: 71012
  derived and/or modified CDS sequence (opt1) from hemagglutinin__InfluenzaA__AEY69153

SEQ ID NO: 72171 - RNA, 1701 nt, Artificial Sequence; identical to SEQ ID NO: 67637
  derived and/or modified CDS sequence (opt1) from hemagglutinin__InfluenzaA__AEY69164

SEQ ID NO: 72172 - RNA, 1701 nt, Artificial Sequence; identical to SEQ ID NO: 67637
  derived and/or modified CDS sequence (opt1) from hemagglutinin__InfluenzaA__AEY69175

SEQ ID NO: 72173 - RNA, 1701 nt, Artificial Sequence; identical to SEQ ID NO: 67637
  derived and/or modified CDS sequence (opt1) from hemagglutinin__InfluenzaA__AEY69186

SEQ ID NO: 72174 - RNA, 1701 nt, Artificial Sequence; identical to SEQ ID NO: 67637
  derived and/or modified CDS sequence (opt1) from hemagglutinin__InfluenzaA__AEY69197

SEQ ID NO: 72175 - RNA, 1701 nt, Artificial Sequence; identical to SEQ ID NO: 67637
  derived and/or modified CDS sequence (opt1) from hemagglutinin__InfluenzaA__AEY69208

SEQ ID NO: 72176 - RNA, 1701 nt, Artificial Sequence; identical to SEQ ID NO: 67637
  derived and/or modified CDS sequence (opt1) from hemagglutinin__InfluenzaA__AEY69219

SEQ ID NO: 72177 - RNA, 1701 nt, Artificial Sequence; identical to SEQ ID NO: 67435
  derived and/or modified CDS sequence (opt1) from hemagglutinin__InfluenzaA__AEY69258

SEQ ID NO: 72178 - RNA, 1701 nt, Artificial Sequence; identical to SEQ ID NO: 67637
  derived and/or modified CDS sequence (opt1) from hemagglutinin__InfluenzaA__AEY69269

SEQ ID NO: 72179 - RNA, 1701 nt, Artificial Sequence; identical to SEQ ID NO: 67435
  derived and/or modified CDS sequence (opt1) from hemagglutinin__InfluenzaA__AEY69291

SEQ ID NO: 72180 - RNA, 1701 nt, Artificial Sequence; identical to SEQ ID NO: 67435
  derived and/or modified CDS sequence (opt1) from hemagglutinin__InfluenzaA__AEY69302

SEQ ID NO: 72181 - RNA, 1701 nt, Artificial Sequence; identical to SEQ ID NO: 67435
  derived and/or modified CDS sequence (opt1) from hemagglutinin__InfluenzaA__AEY69313

SEQ ID NO: 72182 - RNA, 1701 nt, Artificial Sequence; identical to SEQ ID NO: 67435
  derived and/or modified CDS sequence (opt1) from hemagglutinin__InfluenzaA__AEY69785

SEQ ID NO: 72183 - RNA, 1701 nt, Artificial Sequence
  derived and/or modified CDS sequence (opt1) from hemagglutinin__InfluenzaA__AEY69807
augaagaccaucaucgcccugagcuacauccucugccugguguucgcccagaagcugcccggcaacgacaacuccaccgcgacgcucugccuggggcaccacgccgucccgaacggcaccaucgugaagaccaucaccaacgaccagaucgaggugacgaacgccaccgagcugguccagagcuccagcaccggggagaucugcgacagcccccaccagauccucgacggcaagaacugcacccugaucgacgcccugcucggggacccccagugcgacggccugcagaacaagaagugggaccuguucguggagcgcuccaaggccuacuccaacugcuaccccuacgacgugccggacuacgcgagccuccggucccuggucgccagcuccggcacgcuggaguucaacaacgagagcuucaacuggaccggggugacccagaacggcaccuccagcgccugcauccgccgguccaagaacagcuucuucucccgccucaacuggcugacgcaccugaacuucaaguaccccgcccucaacgugaccaugcccaacaacgagcaguucgacaagcuguacaucuggggcguccaccaccccgggaccgacaaggaccagaucuuccuguacgcgcaggccagcgggcggaucaccguguccacgaagcgcagccagcagaccgccaucccgaacaucggcagccggccccgcgugcggaacauccccucccgcaucagcaucuacuggaccaucgucaagcccggcgacauccuccugaucaacuccaccgggaaccugaucgccccgcggggcuacuucaagcuccgcagcgggaaguccagcaucaugcgguccgacgcccccaucggcaagugcaacagcgagugcaucacgcccaacggcuccauccccaacgacaagccguuccagaacgugaaccgcaucaccuacggggcgugcccccgguacgugaagcagaacacccugaagcuggccaccggcaugcgcaacguccccgagaagcagacgcgggggaucuucggcgccaucgccggguucaucgagaacggcugggagggcaugguggacgggugguacggcuuccgccaccagaacagcgaggggcggggccaggccgcggaccucaaguccacccaggccgccaucgaccagaucaacgggaagcugaaccgccugaucggcaagaccaacgagaaguuccaccagaucgagaaggaguucagcgagguggagggccggauccaggaccucgagaaguacgucgaggacaccaagaucgaccugugguccuacaacgccgagcugcucguggcccuggagaaccagcacacgaucgaccugaccgacagcgagaugaacaagcuguucgagaagaccaagaagcagcuccgcgagaacgcggaggacauggggaacggcugcuucaagaucuaccacaagugcgacaacgccugcaucggguccauccgcaacggcaccuacgaccacgacguguaccgggacgaggcccugaacaaccgcuuccagaucaagggggucgagcucaagagcggcuacaaggacuggauccuguggaucuccuucgccaucagcugcuuccugcucugcguggcccugcugggcuucaucaugugggcgugccagaaggggaacauccggugcaacaucugcaucuga

SEQ ID NO: 72184 - RNA, 1701 nt, Artificial Sequence; identical to SEQ ID NO: 67637
  derived and/or modified CDS sequence (opt1) from hemagglutinin__InfluenzaA__AEY69818

SEQ ID NO: 72185 - RNA, 1701 nt, Artificial Sequence; identical to SEQ ID NO: 67637
  derived and/or modified CDS sequence (opt1) from hemagglutinin__InfluenzaA__AEY69829

SEQ ID NO: 72186 - RNA, 1701 nt, Artificial Sequence; identical to SEQ ID NO: 67637
  derived and/or modified CDS sequence (opt1) from hemagglutinin__InfluenzaA__AEY69840

SEQ ID NO: 72187 - RNA, 1701 nt, Artificial Sequence; identical to SEQ ID NO: 67637
  derived and/or modified CDS sequence (opt1) from hemagglutinin__InfluenzaA__AEY69851

SEQ ID NO: 72188 - RNA, 1701 nt, Artificial Sequence; identical to SEQ ID NO: 67637
  derived and/or modified CDS sequence (opt1) from hemagglutinin__InfluenzaA__AEY69873

SEQ ID NO: 72189 - RNA, 1701 nt, Artificial Sequence; identical to SEQ ID NO: 67637
  derived and/or modified CDS sequence (opt1) from hemagglutinin__InfluenzaA__AEY69884

SEQ ID NO: 72190 - RNA, 1701 nt, Artificial Sequence; identical to SEQ ID NO: 67637
  derived and/or modified CDS sequence (opt1) from hemagglutinin__InfluenzaA__AEY69895

SEQ ID NO: 72191 - RNA, 1701 nt, Artificial Sequence; identical to SEQ ID NO: 71012
  derived and/or modified CDS sequence (opt1) from hemagglutinin__InfluenzaA__AEY69906

SEQ ID NO: 72192 - RNA, 1701 nt, Artificial Sequence; identical to SEQ ID NO: 67637
  derived and/or modified CDS sequence (opt1) from hemagglutinin__InfluenzaA__AEY69917

SEQ ID NO: 72193 - RNA, 1701 nt, Artificial Sequence
  derived and/or modified CDS sequence (opt1) from hemagglutinin__InfluenzaA__AEY69939
augaagaccaucaucgcccugagcuacauccucugccugguguucgcccagaagauccccggcaacgacaacuccaccgcgacgcugugccucgggcaccacgccgucccgaacggcaccaucgugaagaccaucaccaacgaccagaucgaggugacgaacgccaccgagcugguccagagcuccagcaccggggagaucugcgacagcccccaccagauccuggacggcaagaacugcacccucaucgacgcccugcugggggacccccagugcgacggcuuccagaacaagaagugggaccucuucguggagcgcuccaaggccuacuccaacugcuaccccuacgacgugccggacuacgcgagccugcggucccuggucgccagcuccggcacgcucgaguucaacaacgagagcuucaacuggaccggggugacccagaacggcaccuccagcgccugcauccgccgguccaagaacagcuucuucucccgccugaacuggcugacgcaccucaacuucaaguaccccgcccugaacgugaccaugcccaacaacgagcaguucgacaagcuguacaucuggggcguccaccaccccgggaccgacaaggaccagaucuuccucuacgcgcaggccagcgggcggaucaccguguccacgaagcgcagccagcagaccgccaucccgaacaucggcagccggccccgcgugcggaacauccccucccgcaucagcaucuacuggaccaucgucaagcccggcgacauccugcugaucaacuccaccgggaaccucaucgccccgcggggcuacuucaagauccgcagcgggaaguccagcaucaugcgguccgacgcccccaucggcaagugcaacagcggcugcaucacgcccaacggguccauccccaacgacaagccguuccagaacgugaaccgcaucaccuacggcgugugcccccgguacgucaagcagaacacccugaagcuggcgaccgggaugcgcaacgugcccgagaagcagacgcggggcaucuucggggccaucgccggcuucaucgagaacggcugggaggggaugguggacggcugguacggguuccgccaccagaacagcgagggccgggggcaggccgccgaccucaaguccacccaggcggccaucgaccagaucaacggcaagcugaaccgccugaucggcaagaccaacgagaaguuccaccagaucgagaaggaguucagcgaggucgaggggcggauccaggaccucgagaaguacguggaggacaccaagaucgaccugugguccuacaacgccgagcugcucguggcccuggagaaccagcacacgaucgaccugaccgacagcgagaugaacaagcuguucgagaagaccaagaagcagcuccgcgagaacgccgaggacaugggcaacgggugcuucaagaucuaccacaagugcgacaacgcgugcaucggcuccauccgcaacgggaccuacgaccacgacgucuaccgggacgaggcccugaacaaccgcuuccagaucaagggcguggagcucaagagcggcuacaaggacugguuccuguggaucuccuucgccaucagcugcuuccugcucugcguggcccugcugggguucaucaugugggccugccagaagggcaacauccggugcaacaucugcaucuga

SEQ ID NO: 72194 - RNA, 1701 nt, Artificial Sequence; identical to SEQ ID NO: 72193
  derived and/or modified CDS sequence (opt1) from hemagglutinin__InfluenzaA__AEY69950

SEQ ID NO: 72195 - RNA, 1701 nt, Artificial Sequence; identical to SEQ ID NO: 72193
  derived and/or modified CDS sequence (opt1) from hemagglutinin__InfluenzaA__AEY69961

SEQ ID NO: 72196 - RNA, 1701 nt, Artificial Sequence
  derived and/or modified CDS sequence (opt1) from hemagglutinin__InfluenzaA__AEY69994
augaagaccaucaucgcccugagcuacauccucugccugguguucgcccagaagauccccggcaacgacaacuccaccgcgacgcugugccucgggcaccacgccgucccgaacggcaccaucgugaagaccaucaccaacgaccagaucgaggugacgaacgccaccgagcugguccagagcuccagcaccggggagaucugcgacagcccccaccagauccuggacggcaagaacugcacccucaucgacgcccugcugggggacccccagugcgacggcuuccagaacaagaagugggaccucuucguggagcgcuccaaggccuacuccaacugcuaccccuacgacgugccggacuacgcgagccugcggucccuggucgccagcuccggcacgcucgaguucaacaacgagagcuucaacuggaccggggugacccagaacggcaccuccagcgccugcauccgccgguccaagaacagcuucuucucccgccugaacuggcugacgcaccucaacuucaaguaccccgcccugaacgugaccaugcccaacaacgagcaguucgacaagcuguacaucuggggcguccaccaccccgggaccgacaaggaccagaucuuccucuacgcgcaggccagcgggcggaucaccguguccacgaagcgcagccagcagaccgccaucccgaacaucggcagccggccccgcgugcggaacauccccucccgcaucagcaucuacuggaccaucgucaagcccggcgacauccugcugaucaacuccaccgggaaccucaucgccccgcggggcuacuucaagauccgcagcgggaaguccagcaucaugcgguccgacgcccccaucggcaagugcaacagcggcugcaucacgcccaacggguccauccccaacgacaagccguuccagaacgugaaccgcaucaccuacggcgcgugcccccgguacgugaagcagaacacccugaagcuggccaccgggaugcgcaacguccccgagaagcagacgcggggcaucuucggggccaucgccggcuucaucgagaacggcugggaggggaugguggacggcugguacggguuccgccaccagaacagcgagggccgggggcaggccgcggaccucaaguccacccaggccgccaucgaccagaucaacggcaagcugaaccgccugaucggcaagaccaacgagaaguuccaccagaucgagaaggaguucagcgagguggaggggcggauccaggaccucgagaaguacgucgaggacaccaagaucgaccugugguccuacaacgccgagcugcucguggcccuggagaaccagcacacgaucgaccugaccgacagcgagaugaacaagcuguucgagaagaccaagaagcagcuccgcgagaacgcggaggacaugggcaacgggugcuucaagaucuaccacaagugcgacaacgccugcaucggcuccauccgcaacgggaccuacgaccacgacguguaccgggacgaggcccugaacaaccgcuuccagaucaagggcgucgagcucaagagcggcuacaaggacugguuccuguggaucuccuucgccaucagcugcuuccugcucugcguggcccugcugggguucaucaugugggcgugccagaagggcaacauccggugcaacaucugcaucuga

SEQ ID NO: 72197 - RNA, 1701 nt, Artificial Sequence; identical to SEQ ID NO: 72196
  derived and/or modified CDS sequence (opt1) from hemagglutinin__InfluenzaA__AEY70005

SEQ ID NO: 72198 - RNA, 1701 nt, Artificial Sequence; identical to SEQ ID NO: 67637
  derived and/or modified CDS sequence (opt1) from hemagglutinin__InfluenzaA__AEY70016

SEQ ID NO: 72199 - RNA, 1701 nt, Artificial Sequence
  derived and/or modified CDS sequence (opt1) from hemagglutinin__InfluenzaA__AEY70256
augaagaccaucaucgcccugagcuacauccucugccugguguucgcccagaagcugcccggcaacgacaacuccaccgcgacgcucugccuggggcaccacgccgucccgaacggcaccaucgugaagaccaucaccaacgaccagaucgaggugacgaacgccaccgagcugguccagagcuccagcaccggggagaucugcgacagcccccaccagauccucgacggcaagaacugcacccugaucgacgcccugcucggggacccccagugcgacggcuuccagaacaagaagugggaccuguucguggagcgcagcaaggccuacggcaacugcuaccccuacgacgugccggacuacgcgucccugcggagccucgucgccuccagcgggacgcuggaguucaacaacgaguccuucaacuggaccggcgugacccagaacgggaccagcuccgccugcauccgccggagcaagaacuccuucuucagccgccugaacuggcucacgcaccugaacuucaaguaccccgcccugaacgugaccaugcccaacaacgagcaguucgacaagcucuacaucuggggcguccaccaccccgggaccgacaaggaccagaucuuccuguacgcgcaggccuccggccggaucaccgugagcacgaagcgcucccagcagaccgccaucccgaacaucggcagccggccccgcgugcggaacauccccagccgcaucuccaucuacuggaccaucgucaagcccggggacaugcugcucaucaacagcaccggcaaccugaucgccccgcggggguacuucaagauccgcuccggcaagagcuccaucaugcggagcgacgcccccaucggcaagugcaacuccgagugcaucacgcccaacgggagcauccccaacgacaagccguuccagaacgugaaccgcaucaccuacggcgcgugcccccgguacgugaagcagaacacccugaagcucgccaccgggaugcgcaacguccccgagaagcagacgcggggcaucuucggggccaucgccggcuucaucgagaacggcugggaggggaugguggacggcugguacggguuccgccaccagaacuccgagggccgggggcaggccgcggaccugaaguccacccaggccgccaucgaccagaucaacggcaagcugaaccgccucaucggcaagaccaacgagaaguuccaccagaucgagaaggaguucuccgagguggaggggcggauccaggaccuggagaaguacgucgaggacaccaagaucgaccuguggagcuacaacgccgagcuccugguggcccuggagaaccagcacacgaucgaccucaccgacuccgagaugaacaagcuguucgagaagaccaagaagcagcugcgcgagaacgcggaggacaugggcaacgggugcuucaagaucuaccacaagugcgacaacgccugcaucggcagcauccgcaacgggaccuacgaccacgacguguaccgggacgaggcccucaacaaccgcuuccagaucaagggcgucgagcugaaguccggcuacaaggacuggauccuguggaucagcuucgccaucuccugcuuccuccugugcguggcccugcucggguucaucaugugggcgugccagaagggcaacauccggugcaacaucugcaucuga

SEQ ID NO: 72200 - RNA, 1701 nt, Artificial Sequence; identical to SEQ ID NO: 67637
  derived and/or modified CDS sequence (opt1) from hemagglutinin__InfluenzaA__AEY70267

SEQ ID NO: 72201 - RNA, 1701 nt, Artificial Sequence; identical to SEQ ID NO: 67637
  derived and/or modified CDS sequence (opt1) from hemagglutinin__InfluenzaA__AEY70278

SEQ ID NO: 72202 - RNA, 1701 nt, Artificial Sequence; identical to SEQ ID NO: 67435
  derived and/or modified CDS sequence (opt1) from hemagglutinin__InfluenzaA__AEY70289

SEQ ID NO: 72203 - RNA, 1701 nt, Artificial Sequence; identical to SEQ ID NO: 67637
  derived and/or modified CDS sequence (opt1) from hemagglutinin__InfluenzaA__AEY70300

SEQ ID NO: 72204 - RNA, 1701 nt, Artificial Sequence; identical to SEQ ID NO: 67637
  derived and/or modified CDS sequence (opt1) from hemagglutinin__InfluenzaA__AEY70311

SEQ ID NO: 72205 - RNA, 1701 nt, Artificial Sequence; identical to SEQ ID NO: 67637
  derived and/or modified CDS sequence (opt1) from hemagglutinin__InfluenzaA__AEY70333

SEQ ID NO: 72206 - RNA, 1701 nt, Artificial Sequence; identical to SEQ ID NO: 72196
  derived and/or modified CDS sequence (opt1) from hemagglutinin__InfluenzaA__AEY70344

SEQ ID NO: 72207 - RNA, 1701 nt, Artificial Sequence; identical to SEQ ID NO: 69248
  derived and/or modified CDS sequence (opt1) from hemagglutinin__InfluenzaA__AEY70355

SEQ ID NO: 72208 - RNA, 1701 nt, Artificial Sequence; identical to SEQ ID NO: 67435
  derived and/or modified CDS sequence (opt1) from hemagglutinin__InfluenzaA__AEY70365

SEQ ID NO: 72209 - RNA, 1701 nt, Artificial Sequence; identical to SEQ ID NO: 67637
  derived and/or modified CDS sequence (opt1) from hemagglutinin__InfluenzaA__AEY70376

SEQ ID NO: 72210 - RNA, 1701 nt, Artificial Sequence
  derived and/or modified CDS sequence (opt1) from hemagglutinin__InfluenzaA__AFB18656
augaaggccauccuggugguccuccuguacaccuucgccaccgcgaacgccgacacgcugugcaucggcuaccacgccaacaacagcaccgacaccguggacaccgugcucgagaagaacgucacggugacccacuccgugaaccugcuggaggacaagcacaacgggaagcucugcaagcugcgcggcgucgcgccccugcaccucgggaagugcaacaucgccggcuggauccuggggaacccggagugcgagacccugagcaccgccuccagcugguccuacaucguggagacgagcuccagcgacaacgggaccugcuaccccggcgacuucaucgacuacgaggagcuccgggagcagcuguccagcguguccagcuucgagcgcuucgagaucuuccccaagaccuccagcuggcccaaccacgacuccaacaagggcgucaccgccgccugcccgcacgccggcgcgaagggguucuacaagaaccugaucuggcucgugaagaagggcaacagcuaccccaagcuguccaagagcuacaucaacgacaaggggaaggaggugcugguccucuggggcauccaccaccccuccacgaccgccgaccagcagagccuguaccagaacgccgacaccuacguguucgugggcaccagccgguacuccaagaaguucaagcccgagaucgccauccgcccgaagguccgggaccaggaggggcgcaugaacuacuacuggacgcugguggagcccggcgacaagaucaccuucgaggccaccgggaaccucguggucccccgguacgcguucgccauggagcgcgacgccggcagcggcaucaucaucuccgacacccccgugcacgacugcaacacgaccugccagaccccgaagggggccaucaacaccagccugcccuuccagaacauccaccccaucacgaucggcaagugccccaaguacgugaaguccaccaagcugcggcucgccaccgggcugcgcaacgucccgagcauccagucccggggccuguucggggcgaucgccggcuucaucgagggcggguggaccggcaugguggacgggugguacggcuaccaccaccagaacgagcaggggagcggcuacgccgccgaccucaaguccacgcagaacgccaucgacaagaucaccaacaaggugaacagcgucaucgagaagaugaacacccaguucaccgcggugggcaaggaguucaaccaccuggagaagcgcaucgagaaccugaacaagaaggucgacgacggguuccucgacaucuggacguacaacgccgagcugcuggugcuccuggagaacgagcggacccuggacuaccacgacuccaacgugaagaaccucuacgagaagguccgcaaccagcugaagaacaacgccaaggagaucggcaacgggugcuucgaguucuaccacaagugcgacaacacgugcauggagagcgugaagaacggcaccuacgacuaccccaaguacuccgaggaggccaagcugaaccgggaggagaucgacggggugaagcucgagagcacccgcaucuaccagauccuggccaucuacuccaccgcggccagcucccugguccucguggugagccugggcgccaucuccuucuggaugugcagcaacggcagccugcagugccggaucugcaucuga

SEQ ID NO: 72211 - RNA, 1701 nt, Artificial Sequence; identical to SEQ ID NO: 71074
  derived and/or modified CDS sequence (opt1) from hemagglutinin__InfluenzaA__AFB40597

SEQ ID NO: 72212 - RNA, 1701 nt, Artificial Sequence; identical to SEQ ID NO: 71074
  derived and/or modified CDS sequence (opt1) from hemagglutinin__InfluenzaA__AFB40598

SEQ ID NO: 72213 - RNA, 1701 nt, Artificial Sequence
  derived and/or modified CDS sequence (opt1) from hemagglutinin__InfluenzaA__AFB40599
augaaggccauccuggugguccuccuguacaccuucgccaccgcgaacgccgacacgcugugcaucggcuaccacgccaacaacagcaccgacaccguggacaccgugcucgagaagaacgucacggugacccacuccgugaaccugcuggaggacaagcacaacgggaagcucugcaagcugcgcggcgucgcgccccugcaccucgggaagugcaacaucgccggcuggauccuggggaacccggagugcgagagccuguccaccgcgagcuccuggagcuacaucguggagaccuccagcuccgacaacggcacgugcuaccccggcgacuucaucgacuacgaggagcuccgggagcagcugagcuccgugagcuccuucgagcgcuucgagaucuuccccaagaccagcuccuggcccaaccacgaccugaacaagggggucaccgccgccugcccgcacgccggcgccaagagcuucuacaagaaccucaucuggcuggugaagaaggggaacuccuaccccaagcugagcaaguccuacaucaacgacaagggcaaggaggugcucguccugugggggauccaccaccccagcaccagcgccgaccagcagucccuguaccagaacgccgacgccuacguguucgugggcacgagccgguacuccaagaaguucaagcccgagaucgccauccgcccgaagguccgggaccaggagggccgcaugaacuacuacuggacccucguggagcccggggacaagaucaccuucgaggcgaccggcaaccugguggucccccgguacgccuucgccauggagcgcaacgccgggagcggcaucaucaucuccgacacgcccgugcacgacugcaacacgaccugccagaccccgaagggcgccaucaacaccagccugcccuuccagaacauccaccccaucaccaucgggaagugccccaaguacgugaaguccaccaagcuccggcuggcgaccggccugcgcaacgucccgagcauccagucccggggccucuucggggccaucgccggguucaucgagggcggcuggacggggaugguggacggcugguacggguaccaccaccagaacgagcagggcagcggguacgccgccgaccugaaguccacccagaacgcgaucgacaagaucaccaacaaggugaacagcgucaucgagaagaugaacacccaguucacggccgugggcaaggaguucaaccaccuggagaagcgcaucgagaaccucaacaagaaggucgacgacggcuuccuggacaucuggaccuacaacgccgagcugcucgugcugcuggagaacgagcggacccucgacuaccacgacuccaacgugaagaaccuguacgagaagguccgcagccagcugaagaacaacgccaaggagaucgggaacggcugcuucgaguucuaccacaagugcgacaacacgugcauggaguccgugaagaacgggaccuacgacuaccccaaguacagcgaggaggccaagcucaaccgggaggagaucgacggcgugaagcuggaguccacccgcaucuaccagauccuggcgaucuacagcaccgucgccuccagccucgugcugguggucagccugggggccaucuccuucuggaugugcagcaacggcucccuccagugccggaucugcaucuga

SEQ ID NO: 72214 - RNA, 1701 nt, Artificial Sequence; identical to SEQ ID NO: 67857
  derived and/or modified CDS sequence (opt1) from hemagglutinin__InfluenzaA__AFB40600

SEQ ID NO: 72215 - RNA, 1701 nt, Artificial Sequence
  derived and/or modified CDS sequence (opt1) from hemagglutinin__InfluenzaA__AFB40601
augaaggccauccuggugguccuccuguacaccuucgccaccgcgaacgccgacacgcugugcaucggcuaccacgccaacaacagcaccgacaccguggacaccgugcucgagaagaacgucacggugacccacuccgugaaccugcuggaggacaagcacaacgggaagcucugcaagcugcgcggcgucgcgccccugcaccucgggaagugcaacaucgccggcuggauccuggggaacccggagugcgagagccuguccaccgccagcuccuggagcuacaucguggagaccuccagcuccgacaacggcacgugcuaccccggcgacuucaucgacuacgaggagcuccgggagcagcugagcuccgugagcuccuucgagcgcuucgagaucuuccccgagaccagcuccuggcccaaccacgacagcaacaagggggucaccgccgccugcccgcacgccggcgcgaaguccuucuacaagaaccugaucuggcucgugaagaaggggaacagcuaccccaagcuguccaagagcuacaucaacgacaagggcaaggaggugcugguccucugggggauccaccaccccagcaccuccgccgaccagcagagccuguaccagaacgccgacgccuacguguucgugggcacgucccgguacagcaagaaguucaagcccgagaucgccauccgcccgaagguccggggccaggaggggcgcaugaacuacuacuggacccugguggagcccggcgacaagaucaccuucgaggcgaccgggaaccucguggucccccgguacgccuucgccauggagcgcaacgccggcuccggcaucaucaucagcgacacgcccgugcacgacugcaacacgaccugccagaccccgaagggggccaucaacaccucccugcccuuccagaacauccaccccaucaccaucggcaagugccccaaguacgucaagagcaccaagcugcggcucgcgaccgggcugcgcaacgugccguccauccagagccggggccuguucggggccaucgccggcuucaucgagggcggguggacgggcaugguggacgggugguacggcuaccaccaccagaacgagcagggguccggcuacgccgccgaccucaagagcacccagaacgcgaucgacgagaucaccaacaaggugaacuccgucaucgagaagaugaacacccaguucacggccgugggcaaggaguucaaccaccuggagaagcgcaucgagaaccugaacaagaaggucgacgacggguuccucgacaucuggaccuacaacgccgagcugcuggugcuccuggagaacgagcggacccuggacuaccacgacagcaacgugaagaaccucuacgagaagguccgcucccagcugaagaacaacgccaaggagaucggcaacgggugcuucgaguucuaccacaagugcgacaacacgugcauggagagcgugaagaacggcaccuacgacuaccccaaguacuccgaggaggccaagcugaaccgggaggagaucgacggggugaagcucgagagcacccgcaucuaccagauccuggcgaucuacuccaccgucgccagcagccuggugcucguggucucccugggcgccaucagcuucuggaugugcuccaacggcagccugcagugccggaucugcaucuga

SEQ ID NO: 72216 - RNA, 1701 nt, Artificial Sequence; identical to SEQ ID NO: 66693
  derived and/or modified CDS sequence (opt1) from hemagglutinin__InfluenzaA__AFB40602

SEQ ID NO: 72217 - RNA, 1701 nt, Artificial Sequence; identical to SEQ ID NO: 67857
  derived and/or modified CDS sequence (opt1) from hemagglutinin__InfluenzaA__AFB40603

SEQ ID NO: 72218 - RNA, 1701 nt, Artificial Sequence
  derived and/or modified CDS sequence (opt1) from hemagglutinin__InfluenzaA__AFB40604
augaaggccauccuggugguccuccuguacaccuucgccaccgcgaacgccgacacgcugugcaucggcuaccacgccaacaacagcaccgacaccguggacaccgugcucgagaagaacgucacggugacccacuccgugaaccugcuggaggacaagcacaacgggaagcucugcaagcugcgcggcgucgcgccccugcaccucgggaagugcaacaucgccggcuggauccuggggaacccggagugcgagagccuguccaccgccagcuccuggagcuacaucguggagaccuccagcuccgacaacggcacgugcuaccccggcgacuucaucgacuacgaggagcuccgggagcagcugagcuccgugagcuccuucgagcgcuucgagaucuuccccaagaccagcuccuggcccaaccacgacagcaacaagggggucaccgccgccugcccgcacgccggcgcgaaguccuucuacaagaaccugaucuggcucgugaaggaggggaacagcuaccccaagcuguccaagagcuacaucaacgacaagggcaaggaggugcugguccucugggggauccaccacccgcccaccacggccgaccagcagagccuguaccagaacgccgacaccuacguguucgugggcaccucccgguacagcaagaaguucaagcccgagaucgccauccgccccaagguccgggaccaggagggccgcaugaacuacuacuggacccugguggagcccggggacaagaucacguucgaggccaccggcaaccucguggucccccgguacgcguucgccauggagcgcaacgccggguccggcaucaucaucagcgacaccccggugcacgacugcaacaccacgugccagacccccaagggcgccaucaacaccucccugcccuuccagaacauccaccccaucaccaucgggaagugcccgaaguacgucaagagcacgaagcugcggcucgccaccggccugcgcaacgugcccuccauccagagccgggggcuguucggcgcgaucgccggguucaucgagggcggcuggaccgggaugguggacggcugguacggguaccaccaccagaacgagcagggcuccggguacgccgccgaccucaagagcacccagaacgccaucgacaagaucacgaacaaggugaacuccgucaucgagaagaugaacacccaguucaccgcgguggacaaggaguucaaccaccuggagaagcgcaucggcaaccugaacaagaaggucgacgacggcuuccucgacaucuggaccuacaacgccgagcugcuggugcuccuggagaacgagcggacgcuggacuaccacgacagcaacgugaagaaccucuacgagaagguccgcaaccagcugaagaacaacgccaaggagaucgggaacggcugcuucgaguucuaccacaagugcgacaacacgugcauggaguccgugaagaacgggaccuacgacuaccccaaguacagcgaggaggccaagcugaaccgggaggagaucgacggcgugaagcucgaguccacccgcaucuaccagauccuggccaucuacagcaccgucgcguccagccuggugcucguggucucccugggggccaucagcuucuggaugugcagcaacggcucccugcagugccggaucugcaucuga

SEQ ID NO: 72219 - RNA, 1701 nt, Artificial Sequence; identical to SEQ ID NO: 66693
  derived and/or modified CDS sequence (opt1) from hemagglutinin__InfluenzaA__AFB70138

SEQ ID NO: 72220 - RNA, 1701 nt, Artificial Sequence
  derived and/or modified CDS sequence (opt1) from hemagglutinin__InfluenzaA__AFB70145
augaaggccauccuggugguccuccuguacaccuucgccaccgcgaacgccgacacgcugugcaucggcuaccacgccaacaacagcaccgacaccguggacaccgugcucgagaagaacgucacggugacccacuccgugaaccugcuggaggacaagcacaacgggaagcucugcaagcugcgcggcgucgcgccccugcaccucgggaagugcaacaucgccggcuggauccuggggaacccggagugcgagagccuguccaccgccagcuccuggagcuacaucguggagaccuccagcuccgacaacggcacgugcuaccccggcgacuucaucgacuacgaggagcuccgggagcagcugagcuccgugagcuccuucgagcgcuucgagaucuuccccaagaccagcuccuggcccaaccacgacagcaacaaggggaucaccgccgccugcccgcacgccggcgcgaaguccuucuacaagaaccugaucuggcucgucaagaaggggaacagcuaccccaagcuguccaagagcuacaucaacgacaagggcaaggaggugcuggugcucugggggauccaccaccccagcaccuccgccgaccagcagagccuguaccagaacgccgacgccuacgucuucgugggcacgucccgguacagcaagaaguucaagcccgagaucgccauccgcccgaaggugcgggaccaggagggccgcaugaacuacuacuggacccuggucgagcccggggacaagaucaccuucgaggcgaccggcaaccucguggugccccgguacgccuucgccauggagcgcaacgccggguccggcaucaucaucagcgacacgcccguccacgacugcaacacgaccugccagaccccgaagggcgccaucaacaccucccugcccuuccagaacauccaccccaucaccaucgggaagugccccaaguacgucaagagcaccaagcugcggcucgcgaccggccugcgcaacgugccguccauccagagccgggggcuguucggcgccaucgccggguucaucgagggcggcuggacggggaugguggacggcugguacggguaccaccaccagaacgagcagggcuccggguacgccgccgaccucaagagcacccagaacgcgaucgacgagaucaccaacaaggugaacuccgugaucgagaagaugaacacccaguucacggccgucggcaaggaguucaaccaccuggagaagcgcaucgagaaccugaacaagaagguggacgacggcuuccucgacaucuggaccuacaacgccgagcugcugguccuccuggagaacgagcggacccuggacuaccacgacagcaacgugaagaaccucuacgagaaggugcgcucccagcugaagaacaacgccaaggagaucgggaacggcugcuucgaguucuaccacaagugcgacaacacgugcauggagagcgucaagaacgggaccuacgacuaccccaaguacuccgaggaggccaagcugaaccgggaggagaucgacggcgugaagcucgagagcacccgcaucuaccagauccuggcgaucuacuccaccguggccagcagccugguccucguggugucccugggggccaucagcuucuggaugugcuccaacggcagccugcagugccggaucugcaucuga

SEQ ID NO: 72221 - RNA, 1701 nt, Artificial Sequence
  derived and/or modified CDS sequence (opt1) from hemagglutinin__InfluenzaA__AFB70154
augaaggccauccuggugguccuccuguacaccuucgccaccgcgaacgccgacacgcugugcaucggcuaccacgccaacaacagcaccgacaccguggacaccgugcucgagaagaacgucacggugacccacuccgugaaccugcuggaggacaagcacaacgagaagcucugcaagcugcgcggggucgcgccccugcaccucggcaagugcaacaucgccggguggauccugggcaacccggagugcgagagccuguccaccgccagcuccuggagcuacaucguggagaccuccagcuccgacaacgggacgugcuaccccggcgacuucaucgacuacgaggagcuccgggagcagcugagcuccgugagcuccuucgagcgcuucgagaucuuccccaagaccagcuccuggcccaaccacgacagcaacaagggcgucaccgccgccugcccgcacgccggggcgaaguccuucuacaagaaccugaucuggcucgugaagaagggcaacagcuaccccaagcuguccaagagcuacaucaacgacaaggggaaggaggugcugguccucuggggcauccaccaccccagcaccuccgccgaccagcagagccuguaccagaacgccgacgccuacguguucguggggacgucccgguacagcaagaaguucaagcccgagaucgccauccgcccgaagguccgggaccaggagggccgcaugaacuacuacuggacccugguggagcccggcgacaagaucaccuucgaggcgaccgggaaccucguggucccccgguacgccuucgccauggagcgcaacgccggcuccgggaucaucaucagcgacacgcccgugcacgacugcaacacgaccugccagaccccgaagggcgccaucaacaccucccugcccuuccagaacauccaccccaucaccaucggcaagugccccaaguacgucaagagcaccaagcugcggcucgcgaccgggcugcgcaacgugccguccauccagagccggggccuguucggggccaucgccggcuucaucgagggcggguggacgggcaugguggacgggugguacggcuaccaccaccagaacgagcagggguccggcuacgccgccgaccucaagagcacccagaacgcgaucgacgagaucaccaacaaggugaacuccgucaucgagaagaugaacacccaguucacggccguggggaaggaguucaaccaccuggagaagcgcaucgagaaccugaacaagaaggucgacgacggcuuccucgacaucuggaccuacaacgccgagcugcuggugcuccuggagaacgagcggacccuggacuaccacgacagcaacgugaagaaccucuacgagaagguccgcucccagcugaagaacaacgccaaggagaucggcaacgggugcuucgaguucuaccacaagugcgacaacacgugcauggagagcgugaagaacggcaccuacgacuaccccaaguacuccgaggaggccaagcugaaccgggaggagaucgacggggugaagcucgagagcacccgcaucuaccagauccuggcgaucuacuccaccgucgccagcagccuggugcucguggucucccugggcgccaucagcuucuggaugugcuccaacgggagccugcagugccggaucugcaucuga

SEQ ID NO: 72222 - RNA, 1701 nt, Artificial Sequence; identical to SEQ ID NO: 66693
  derived and/or modified CDS sequence (opt1) from hemagglutinin__InfluenzaA__AFB70156

SEQ ID NO: 72223 - RNA, 1701 nt, Artificial Sequence; identical to SEQ ID NO: 66693
  derived and/or modified CDS sequence (opt1) from hemagglutinin__InfluenzaA__AFB70158

SEQ ID NO: 72224 - RNA, 1701 nt, Artificial Sequence; identical to SEQ ID NO: 72220
  derived and/or modified CDS sequence (opt1) from hemagglutinin__InfluenzaA__AFB70160

SEQ ID NO: 72225 - RNA, 1701 nt, Artificial Sequence; identical to SEQ ID NO: 67887
  derived and/or modified CDS sequence (opt1) from hemagglutinin__InfluenzaA__AFB70162

SEQ ID NO: 72226 - RNA, 1701 nt, Artificial Sequence
  derived and/or modified CDS sequence (opt1) from hemagglutinin__InfluenzaA__AFB70167
augaaggccauccuggugguccuccuguacaccuucgccaccgcgaacgccgacacgcugugcaucggcuaccacgccaacaacagcaccgacaccguggacaccgugcucgagaagaacgucacggugacccacuccgugaaccugcuggaggacaagcacaacgggaagcucugcaagcugcgcggcgucgcgccccugcaccucgggaagugcaacaucgccggcuggauccuggggaacccggagugcgagagccuguccaccgccagcuccuggagcuacaucguggagaccuccagcuccgacaacggcacgugcuaccccggcgacuucaucgacuacgaggagcuccgggagcagcugagcuccgugagcuccuucgagcgcuucgagaucuuccccaagaccagcuccuggcccaaccacgacagcaacaagggggucaccgccgccugcccgcacgccggcgcgaaguccuucuacaagaaccugaucuggcucgugaagaaggggaacagcuaccccaagcuguccaagagcuacaucaacgacaagggcaaggaggugcugguccucugggggauccaccaccccagcaccuccgccgaccagcagagccuguaccagaacgccgacgccuacguguucgugggcacgucccgguacagcaagaaguucaagcccgagaucgccaugcgcccgaagguccgggaccaggagggccgcaugaacuacuacuggacccugguggagcccggggacaagaucaccuucgaggcgaccggcaaccucguggucccccgguacgccuucgccauggagcgcaacgccggguccggcaucaucaucagcgacacgcccgugcacgacugcaacacgaccugccagaccccgaagggcgccaucaacaccucccugcccuuccagaacauccaccccaucaccaucgggaagugccccaaguacgucaagagcaccaagcugcggcucgcgaccggccugcgcaacgugccguccauccagagccgggggcuguucggcgccaucgccggguucaucgagggcggcuggacggggaugguggacggcugguacggguaccaccaccagaacgagcagggcuccggguacgccgccgaccucaagagcacccagaacgcgaucgacgagaucaccaacaaggugaacuccgucaucgagaagaugaacacccaguucacggccgugggcaaggaguucaaccaccuggagaagcgcaucgagaaccugaacaagaaggucgacgacggcuuccucgacaucuggaccuacaacgccgagcugcuggugcuccuggagaacgagcggacccuggacuaccacgacagcaacgugaagaaccucuacgagaagguccgcucccagcugaagaacaacgccaaggagaucgggaacggcugcuucgaguucuaccacaagugcgacaacacgugcauggagagcgugaagaacgggaccuacgacuaccccaaguacuccgaggaggccaagcugaaccgggaggagaucgacggcgugaagcucgagagcacccgcaucuaccagauccuggcgaucuacuccaccgucgccagcagccuggugcucguggucucccugggggccaucagcuucuggaugugcuccaacggcagccugcagugccggaucugcaucuga

SEQ ID NO: 72227 - RNA, 1701 nt, Artificial Sequence; identical to SEQ ID NO: 66693
  derived and/or modified CDS sequence (opt1) from hemagglutinin__InfluenzaA__AFB70177

SEQ ID NO: 72228 - RNA, 1701 nt, Artificial Sequence; identical to SEQ ID NO: 67262
  derived and/or modified CDS sequence (opt1) from hemagglutinin__InfluenzaA__AFB70187

SEQ ID NO: 72229 - RNA, 1701 nt, Artificial Sequence; identical to SEQ ID NO: 67887
  derived and/or modified CDS sequence (opt1) from hemagglutinin__InfluenzaA__AFB70197

SEQ ID NO: 72230 - RNA, 1701 nt, Artificial Sequence; identical to SEQ ID NO: 66693
  derived and/or modified CDS sequence (opt1) from hemagglutinin__InfluenzaA__AFB70207

SEQ ID NO: 72231 - RNA, 1701 nt, Artificial Sequence; identical to SEQ ID NO: 66693
  derived and/or modified CDS sequence (opt1) from hemagglutinin__InfluenzaA__AFB70217

SEQ ID NO: 72232 - RNA, 1701 nt, Artificial Sequence; identical to SEQ ID NO: 66693
  derived and/or modified CDS sequence (opt1) from hemagglutinin__InfluenzaA__AFB70227

SEQ ID NO: 72233 - RNA, 1701 nt, Artificial Sequence
  derived and/or modified CDS sequence (opt1) from hemagglutinin__InfluenzaA__AFB70247
augaaggccauccuggugguccuccuguacaccuucgccaccgcgaacgccgacacgcugugcaucggcuaccacgccaacaacagcaccgacaccguggacaccgugcucgagaagaacgucacggugacccacuccgugaaccugcuggaggacaagcacaacgggaagcucugcaagcugcgcggcgucgcgccccugcaccucgggaagugcaacaucgccggcuggauccuggggaacccggagugcgagagccuguccaccgccagcuccuggagcuacaucguggagaccuccagcuccgacaacggcacgugcuaccccggcgacuucaucgacuacgaggagcuccgggagcagcugagcuccgugagcuccuucgagcgcuucgagaucuuccccaagaccagcuccuggcccaaccacgacagcaacaagggggucaccgccgccugcccgcacgccggcgcgaaguccuucuacaagaaccugaucuggcucgugaagaaggggaacagcuaccccaagcuguccaagagcuacaucaacgacaagggcaaggaggugcugguccucugggggauccaccaccccagcaccuccgccgaccagcagagccuguaccagaacgccgacgccuacguguucgugggcacgucccgguacagcaaggaguucaagcccgagaucgccauccgcccgaagguccgggaccaggagggccgcaugaacuacuacuggacccugguggagcccggggacaagaucaccuucgaggcgaccggcaaccucguggucccccgguacgccuucgccauggagcgcaacgccggguccggcaucaucaucagcgacacgcccgugcacgacugcaacacgaccugccagaccccgaagggcgccaucaacaccucccugcccuuccagaacauccaccccaucaccaucgggaagugccccaaguacgucaagagcaccaagcugcggcucgcgaccggccugcgcaacgugccguccauccagagccgggggcuguucggcgccaucgccggguucaucgagggcggcuggacggggaugguggacggcugguacggguaccaccaccagaacgagcagggcuccggguacgccgccgaccucaagagcacccagaacgcgaucgacgagaucaccaacaaggugaacuccgucaucgagaagaugaacacccaguucacggccgugggcaaggaguucaaccaccuggagaagcgcaucgagaaccugaacaagaaggucgacgacggcuuccucgacaucuggaccuacaacgccgagcugcuggugcuccuggagaacgagcggacccuggacuaccacgacagcaacgugaagaaccucuacgagaagguccgcucccagcugaagaacaacgccaaggagaucgggaacggcugcuucgaguucuaccacaagugcgacaacacgugcauggagagcgugaagaacgggaccuacgacuaccccaaguacuccgaggaggccaagcugaaccgggaggagaucgacggcgugaagcucgagagcacccgcaucuaccagauccuggcgaucuacuccaccgucgccagcagccuggugcucguggucucccugggggccaucagcuucuggaugugcuccaacggcagccugcagugccggaucugcaucuga

SEQ ID NO: 72234 - RNA, 1701 nt, Artificial Sequence
  derived and/or modified CDS sequence (opt1) from hemagglutinin__InfluenzaA__AFB70257
augaaggccauccuggugguccuccuguacaccuucgccaccgcgaacgccgacacgcugugcaucggcuaccacgccaacaacagcaccgacaccguggacaccgugcucgagaagaacgucacggugacccacuccgugaaccugcuggaggacaagcacaacgggaagcucugcaagcugcgcggcgucgcgccccugcaccucgggaagugcaacaucgccggcuggauccuggggaacccggagugcgagagccuguccaccgccagcuccuggagcuacaucguggagaccuccagcuccgacaacggcacgugcuaccccggcgacuucguggacuacgaggagcuccgggagcagcugagcuccgucagcuccuucgagcgcuucgagaucuuccccaagaccagcuccuggcccaaccacgacagcaacaagggggugaccgccgccugcccgcacgccggcgcgaaguccuucuacaagaaccugaucuggcucgugaagaaggggaacagcuaccccaagcuguccaagagcuacaucaacgacaagggcaaggagguccuggugcucugggggauccaccaccccagcaccuccgccgaccagcagagccuguaccagaacgccgacgccuacguguucgucggcacgucccgguacagcaagaaguucaagcccgagaucgccauccgcccgaaggugcgggaccaggagggccgcaugaacuacuacuggacccugguggagcccggggacaagaucaccuucgaggcgaccggcaaccucgucgugccccgguacgccuucgccauggagcgcaacgccggguccggcaucaucaucagcgacacgcccgugcacgacugcaacacgaccugccagaccccgaagggcgccaucaacaccucccugcccuuccagaacauccaccccaucaccaucgggaagugccccaaguacgucaagagcaccaagcugcggcucgcgaccggccugcgcaacgugccguccauccagagccgggggcuguucggcgccaucgccggguucaucgagggcggcuggacggggaugguggacggcugguacggguaccaccaccagaacgagcagggcuccggguacgccgccgaccucaagagcacccagaacgcgaucgacgagaucaccaacaaggucaacuccgugaucgagaagaugaacacccaguucacggccgucggcaaggaguucaaccaccuggagaagcgcaucgagaaccugaacaagaagguggacgacggcuuccucgacaucuggaccuacaacgccgagcugcuggugcuccuggagaacgagcggacccuggacuaccacgacagcaacgucaagaaccucuacgagaaggugcgcucccagcugaagaacaacgccaaggagaucgggaacggcugcuucgaguucuaccacaagugcgacaacacgugcauggagagcgugaagaacgggaccuacgacuaccccaaguacuccgaggaggccaagcugaaccgggaggagaucgacggcgucaagcucgagagcacccgcaucuaccagauccuggcgaucuacuccaccguggccagcagccuggugcucgucgugucccugggggccaucagcuucuggaugugcuccaacggcagccugcagugccggaucugcaucuga

SEQ ID NO: 72235 - RNA, 1701 nt, Artificial Sequence; identical to SEQ ID NO: 71100
  derived and/or modified CDS sequence (opt1) from hemagglutinin__InfluenzaA__AFB70267

SEQ ID NO: 72236 - RNA, 1701 nt, Artificial Sequence; identical to SEQ ID NO: 67163
  derived and/or modified CDS sequence (opt1) from hemagglutinin__InfluenzaA__AFB70277

SEQ ID NO: 72237 - RNA, 1701 nt, Artificial Sequence; identical to SEQ ID NO: 66693
  derived and/or modified CDS sequence (opt1) from hemagglutinin__InfluenzaA__AFB70287

SEQ ID NO: 72238 - RNA, 1701 nt, Artificial Sequence; identical to SEQ ID NO: 66693
  derived and/or modified CDS sequence (opt1) from hemagglutinin__InfluenzaA__AFB70297

SEQ ID NO: 72239 - RNA, 1701 nt, Artificial Sequence; identical to SEQ ID NO: 66693
  derived and/or modified CDS sequence (opt1) from hemagglutinin__InfluenzaA__AFB70307

SEQ ID NO: 72240 - RNA, 1701 nt, Artificial Sequence; identical to SEQ ID NO: 72220
  derived and/or modified CDS sequence (opt1) from hemagglutinin__InfluenzaA__AFB70317

SEQ ID NO: 72241 - RNA, 1701 nt, Artificial Sequence
  derived and/or modified CDS sequence (opt1) from hemagglutinin__InfluenzaA__AFB70327
augaaggccauccuggugguccuccuguacaccuucgccaccgcgaacgccgacacgcugugcaucggcuaccacgccaacaacagcaccgacaccguggacaccgugcucgagaagaacgucacggugacccacuccgugaaccugcuggaggacaagcacaacgggaagcucugcaagcugcgcggcgucgcgccccugcaccucgggaagugcaacaucgccggcuggauccuggggaacccggagugcgagagccuguccaccgccagcuccuggagcuacaucguggagaccuccagcuccgacaacggcacgugcuaccccggcgacuucaucgacuacgaggagcuccgggagcagcugagcuccgugagcuccuucgagcgcuucgagaucuuccccaagaccagcuccuggcccaaccacgacagcaacaagggggucaccgccgccugcccgcacgccggcgcgaaguccuucuacaagaaccugaucuggcucgugaagaaggggaacagcuaccccaagcuguccaagagcuacaucaacgacaagggcaaggaggugcugguccucugggggauccaccaccccagcaccuccgccgaccagcagagccuguaccagaacgccgacgccuacguguucgugggcacgucccgguacagcaagaaguucaagcccgagaucgccauccgcccgaagguccgggaccaggagggccgcaugaacuacuacuggacccugguggagcccggggacaagaucaccuucgaggcgaccggcaaccucguggucccccgguacgccuucgccauggagcgcaacgccggguccggcaucaucaucagcgacacgcccgugcacgacugcaacacgaccugccagaccccgaagggcgccaucaacaccucccugcccuuccagaacauccaccccaucaccaucgggaagugccccaaguacgucaagagcaccaagcugcggcucgcgaccggccugcgcaacgugccguccauccagagccgggggcuguucggcgccaucgccggguucaucgagggcggcuggacggggaugguggacggcugguacggguaccaccaccagaacgagcagggcuccggguacgccgccgaccucaagagcacccagaacgcgaucgacgagaucaccaacaaggugaacuccgucaucgagaagaugaacacccaguucacggccgugggcaaggaguucaaccaccugggcaagcgcaucgagaaccugaacaagaaggucgacgacggguuccucgacaucuggaccuacaacgccgagcugcuggugcuccuggagaacgagcggacccuggacuaccacgacagcaacgugaagaaccucuacgagaagguccgcucccagcugaagaacaacgccaaggagaucggcaacgggugcuucgaguucuaccacaagugcgacaacacgugcauggagagcgugaagaacggcaccuacgacuaccccaaguacuccgaggaggccaagcugaaccgggaggagaucgacggggugaagcucgagagcacccgcaucuaccagauccuggcgaucuacuccaccgucgccagcagccuggugcucguggucucccugggcgccaucagcuucuggaugugcuccaacggcagccugcagugccggaucugcaucuga

SEQ ID NO: 72242 - RNA, 1701 nt, Artificial Sequence; identical to SEQ ID NO: 66693
  derived and/or modified CDS sequence (opt1) from hemagglutinin__InfluenzaA__AFB70337

SEQ ID NO: 72243 - RNA, 1701 nt, Artificial Sequence; identical to SEQ ID NO: 68663
  derived and/or modified CDS sequence (opt1) from hemagglutinin__InfluenzaA__AFB70347

SEQ ID NO: 72244 - RNA, 1701 nt, Artificial Sequence; identical to SEQ ID NO: 66693
  derived and/or modified CDS sequence (opt1) from hemagglutinin__InfluenzaA__AFB70367

SEQ ID NO: 72245 - RNA, 1701 nt, Artificial Sequence; identical to SEQ ID NO: 66693
  derived and/or modified CDS sequence (opt1) from hemagglutinin__InfluenzaA__AFB70377

SEQ ID NO: 72246 - RNA, 1701 nt, Artificial Sequence; identical to SEQ ID NO: 67262
  derived and/or modified CDS sequence (opt1) from hemagglutinin__InfluenzaA__AFB70387

SEQ ID NO: 72247 - RNA, 1701 nt, Artificial Sequence; identical to SEQ ID NO: 66693
  derived and/or modified CDS sequence (opt1) from hemagglutinin__InfluenzaA__AFB70397

SEQ ID NO: 72248 - RNA, 1701 nt, Artificial Sequence; identical to SEQ ID NO: 66693
  derived and/or modified CDS sequence (opt1) from hemagglutinin__InfluenzaA__AFB70407

SEQ ID NO: 72249 - RNA, 1701 nt, Artificial Sequence
  derived and/or modified CDS sequence (opt1) from hemagglutinin__InfluenzaA__AFB77618
augaaggccauccuggugguccuccuguacaccuucgccaccgcgaacgccgacacgcugugcaucggcuaccacgccaacaacagcaccgacaccguggacaccgugcucgagaagaacgucacggugacccacuccgugaaccugcuggaggacaagcacaacgggaagcucugcaagcugcgcggcaucgcgccccugcaccucgggaagugcaacaucgccggcuggauccuggggaacccggagugcgagagccuguccaccgccagcuccuggagcuacaucgucgagaccuccagcuccgacaacggcacgugcuaccccggcgacuucaucaacuacgaggagcuccgggagcagcugagcuccgugagcuccuucgagcgcuucgagaucuuccccaagaccagcuccuggcccaaccacgacagcaacaagggggugaccgccgccugcccgcacgccggcgcgaaguccuucuacaagaaccugaucuggcucgucaagaaggggaacagcuaccccaagcuguccaagagcuacaucaacgacaagggcaaggaggugcuggugcucugggggauccaccaccccaccacgaccggcgaccagcagagccuguaccagaacgccgacggcuacgucuucguggggaccacccgguacuccaagaaguucaagcccgagaucggcauccgcccgaaggugaaggaccaggaggggcggaugaacuacuacuggacgcuggucgagcccggcgacaagaucaccuucgaggccaccggcaaccucguggugccccgcuacgccuucgccauggagcggaacgcggggagcggcaucaucaucuccgacacccccguccacgacugcaacacgaccugccagaccccgaagggggccaucaacaccagccugcccuuccagaacauccaccccaucacgaucggcaagugccccaaguacgugaaguccaccaagcugcgccucgccaccgggcugcggaacgugccgagcauccagucccgcggccuguucggcgccaucgccggguucaucgagggcggguggaccggcauggucgacgggugguacggcuaccaccaccagaacgagcagggcagcggguacgcggccgaccucaaguccacgcagaacgccaucgacaagaucaccaacaaggugaacagcgugaucgagaagaugaacacccaguucaccgccgucggcaaggaguucaaccaccuggagaagcggaucgagaaccugaacaagaagguggacgacggguuccucgacaucuggacguacaacgccgagcugcugguccuccuggagaacgagcgcacccuggacuaccacgacuccaacgugaagaaccucuacgagaaggugcggaaccagcugaagaacaacgcgaaggagaucggcaacgggugcuucgaguucuaccacaagugcgacaacacgugcauggagagcgucaagaacggcaccuacgacuaccccaaguacuccgaggaggccaagcugaaccgcgaggagaucgacggcgugaagcucgagagcacccggaucuaccagauccuggccaucuacuccaccguggccagcucccuggucaugguggugagccucggggccaucuccuucuggaugugcagcaacggcagccugcagugccgcaucugcaucuga

SEQ ID NO: 72250 - RNA, 1701 nt, Artificial Sequence; identical to SEQ ID NO: 70891
  derived and/or modified CDS sequence (opt1) from hemagglutinin__InfluenzaA__AFB77619

SEQ ID NO: 72251 - RNA, 1701 nt, Artificial Sequence; identical to SEQ ID NO: 70891
  derived and/or modified CDS sequence (opt1) from hemagglutinin__InfluenzaA__AFB77620

SEQ ID NO: 72252 - RNA, 1701 nt, Artificial Sequence
  derived and/or modified CDS sequence (opt1) from hemagglutinin__InfluenzaA__AFB77621
augaaggccauccuggugguccuccuguacaccuucgccaccgcgaacgccgacacgcugugcaucggcuaccacgccaacaacagcaccgacaccguggacaccgugcucgagaagaacgucacggugacccacuccgugaaccugcuggaggacaagcacaacgggaagcucugcaagcugcgcggcgucacgccccugcaccucgggaagugcaacaucgccggcuggauccuggggaacccggagugcgagagccuguccaccgccagcuccuggagcuacaucguggagaccuccagcuccgacaacgggaccugcuaccccggcgacuucaucaacuacgaggagcuccgggagcagcugagcuccgugagcuccuucgagcgcuucgagaucuuccccaagaccagcuccuggcccaaccacgacagcaacaagggcgucaccgcggccugcccgcacgccggcgccaaguccuucuacaagaaccugaucuggcucgugaagaaggggaacagcuaccccaagcuguccaagagcuacaucaacgacaagggcaaggaggugcugguccucugggggauccaccaccccagcacgaccgcggaccagcagucccuguaccagaacgccgacgccuacguguucgugggcaccagccgguacuccaagaaguucaagcccgagaucgccauccgcccgaagguccgggaccaggagggccgcaugaacuacuacuggacccugguggagcccggggacaagaucacguucgaggccaccggcaaccucguggucccccgguacgcguucgccauggagcgcaacgccgggagcggcaucaucaucuccgacacccccgugcacgacugcaacaccacgugccagaccccgaagggcgccaucaacaccagccugcccuuccagaacauccaccccaucaccaucgggaagugccccaaguacgugaaguccacgaagcugcggcucgccaccggccugcgcaacaucccgagcauccagucccgggggcuguucggcgcgaucgccggguucaucgagggcggcuggaccgggauggucgacggcugguacggguaccaccaccagaacgagcagggcagcggguacgccgccgaccucaaguccacccagaacgccaucgacaagaucacgaacaaggugaacagcgugaucgagaagaugaacacccaguucaccgcggucggcaaggaguucaaccaccuggagaagcgcaucgagaaccugaacaagaagguggacgacggcuuccucgacaucuggaccuacaacgccgagcugcugguccuccuggagaacgagcggacgcuggacuaccacgacuccaacgugaagaaccucuacgagaaggugcgcaaccagcugaagaacaacgccaaggagaucgggaacggcugcuucgaguucuaccacaagugcgacaacacgugcauggagagcgucaagaacgggaccuacgacuaccccaaguacuccgaggaggccaagcugaaccgggaggagaucgacggcgugaagcucgagagcacccgcaucuaccagauccuggccaucuacuccaccguggcgagcucccugguccucguggugagccugggggccaucagcuucuggaugugcuccaacggcagccugcagugccggaucugcaucuga

SEQ ID NO: 72253 - RNA, 1701 nt, Artificial Sequence
  derived and/or modified CDS sequence (opt1) from hemagglutinin__InfluenzaA__AFB77622
augaaggccauccuggugguccuccuguacaccuucgccaccgcgaacgccgacacgcugugcaucggcuaccacgccaacaacagcaccgacaccguggacaccgugcucgagaagaacgucacggugacccacuccgugaaccugcuggaggacaagcacaacgggaagcucugcaagcugcgcggcgucgcgccccugcaccucgggaagugcaacaucgccggcuggauccuggggaacccggagugcgagagccuguccaccgcgagcuccuggagcuacaucguggagaccuccagcuccgacaacggcacgugcuaccccggcgacuucaucaacuacgaggagcuccgggagcagcugagcuccgugagcuccuucgagcgcuucgagaucuuccccaagaccagcuccuggcccaaccacgacccgaacaagggggucaccgccgccugcccccacgccggcgccaagagcuucuacaagaaccugaucuggcucgugaagaaggggaacuccuaccccaagcugagcaaguccuacaucaacgacaagggcaaggaggugcugguccucugggggauccaccaccccagcaccacggccgaccagcagagccuguaccagaacgccgacgccuacguguucgugggcaccucccgguacagcaagaaguucaagccggagaucgccauccgccccaagguccgggaccaggagggccgcaugaacuacuacuggacccugguggagcccggggacaagaucaccuucgaggcgacgggcaaccucguggucccccgguacgccuucgccauggagcgcaacgccggguccggcaucaucaucagcgacaccccggugcacgacugcaacacgaccugccagacccccaagggcgccaucaacaccucccugcccuuccagaacauccaccccaucaccaucgggaagugcccgaaguacgucaagagcaccaagcugcggcucgcgacgggccugcgcaacgugcccuccauccagagccgggggcuguucggcgccaucgccggguucaucgagggcggcuggaccgggaugguggacggcugguacggguaccaccaccagaacgagcagggcuccggguacgccgccgaccucaagagcacccagaacgcgaucgacaagaucaccaacaaggugaacuccgucaucgagaagaugaacacgcaguucaccgccgugggcaaggaguucaaccaccuggagaagcgcaucgagaaccugaacaagaaggucgacgacggcuuccucgacaucuggaccuacaacgccgagcugcuggugcuccuggagaacgagcggacccuggacuaccacgacagcaacgugaagaaccucuacgagaagguccgcaaccagcugaagaacaacgccaaggagaucgggaacggcugcuucgaguucuaccacaagugcgacaacacgugcauggaguccgugaagaacgggaccuacgacuaccccaaguacagcgaggaggccaagcugaaccgggaggagaucgacggcgugaagcucgaguccacccgcaucuaccagauccuggcgaucuacagcaccgucgccuccagccuggugcucguggucucccugggggccaucagcuucuggaugugcagcaacggcucccugcagugccggaucugcaucuga

SEQ ID NO: 72254 - RNA, 1701 nt, Artificial Sequence; identical to SEQ ID NO: 70891
  derived and/or modified CDS sequence (opt1) from hemagglutinin__InfluenzaA__AFB77623

SEQ ID NO: 72255 - RNA, 1701 nt, Artificial Sequence; identical to SEQ ID NO: 70891
  derived and/or modified CDS sequence (opt1) from hemagglutinin__InfluenzaA__AFB77624

SEQ ID NO: 72256 - RNA, 1701 nt, Artificial Sequence
  derived and/or modified CDS sequence (opt1) from hemagglutinin__InfluenzaA__AFB77625
augaaggccauccuggugguccuccuguacaccuucaccacggccaacgcggacacccugugcaucggcuaccacgccaacaacagcaccgacaccguggacacggugcucgagaagaacgucaccgugacccacuccgugaaccugcuggaggacaagcacaacgggaagcucugcaagcugcgcggcgucgcgccccugcaccucgggaagugcaacaucgccggcuggauccuggggaacccggagugcgagagccuguccaccgccagcuccuggagcuacaucguggagacguccagcuccgacaacgggaccugcuaccccggcgacuucaucaacuacgaggagcuccgggagcagcugagcuccgugagcuccuucgagcgcuucgagaucuuccccaagaccagcuccuggcccaaccacgacagcaacaagggcgucaccgccgccugcccgcacgccggcgccaaguccuucuacaagaaccugaucuggcucgugaagaaggggaacagcuaccccaagcuguccaagagcuacaucaacgacaagggcaaggaggugcugguccucugggggauccaccaccccagcacgaccgcggaccagcagucccuguaccagaacgccgacgccuacguguucgugggcaccagccgguacuccaagaaguucaagcccgagaucgccauccgcccgaagguccgggaccaggagggccgcaugaacuacuacuggacccugguggagcccggggacaagaucacguucgaggccaccggcaaccucguggucccccgguacgcguucgccauggagcgcaacgccgggagcggcaucaucaucuccgacacccccgugcacgacugcaacaccacgugccagaccccgaagggcgccaucaacaccagccugcccuuccagaacauccaccccaucaccaucgggaagugccccaaguacgugaaguccacgaagcugcggcucgccaccggccugcgcaacgucccgagcauccagucccgggggcuguucggcgcgaucgccggguucaucgagggcggcuggaccgggaugguggacggcugguacggguaccaccaccagaacgagcagggcagcggguacgccgccgaccucaaguccacccagaacgccaucgacaagaucacgaacaaggugaacagcgucaucgagaagaugaacacccaguucaccgcggugggcaaggaguucaaccaccuggagaagcgcaucgagaaccugaacaagaaggucgacgacggcuuccucgacaucuggaccuacaacgccgagcugcuggugcuccuggagaacgagcggacgcuggacuaccacgacuccaacgugaagaaccucuacgagaagguccgcaaccagcugaagaacaacgccaaggagaucgggaacggcugcuucgaguucuaccacaagugcgacaacacgugcauggagagcgugaagaacgggaccuacgacuaccccaaguacuccgaggaggccaagcugaaccgggaggagaucgacggcgugaagcucgagagcacccgcaucuaccagauccuggccaucuacuccaccgucgcgagcucccuggugcucguggucagccugggggccaucagcuucuggaugugcuccaacggcagccugcagugccggaucugcaucuga

SEQ ID NO: 72257 - RNA, 1701 nt, Artificial Sequence
  derived and/or modified CDS sequence (opt1) from hemagglutinin__InfluenzaA__AFB77627
augaaggccauccuggugguccuccuguacaccuucgccaccgcgaacgccgacacgcugugcaucggcuaccacgccaacaacagcaccgacaccguggacaccgugcucgagaagaacgucacggugacccacuccgugaaccugcuggaggacaagcacaacgggaagcucugcaagcugcgcggcgucgcgccccugcaccucgggaagugcaacaucgccggcuggauccuggggaacccggagugcgagagccuguccaccgcgagcuccuggagcuacaucguggagaccuccagcuccgacaacggcacgugcuaccccggcgacuucaucaacuacgaggagcuccgggagcagcugagcuccgugagcuccuucgagcgcuucgagaucuucagcaagaccuccagcuggcccaaccacgacuccaacaagggggucaccgccgccugcccccacgccggcgccaagagcuucuacaagaaccugaucuggcucgugaagaaggggaacuccuacccgaagcugagcaagagcuacaucaacgacaagggcaaggaggugcugguccucugggggauccaccaccccuccaccacggccgaccagcagagccuguaccagaacgccgacgccuacguguucgugggcaccucccgguacagcaagaaguucaagcccgagaucgccauccgccccaagguccgggaccaggagggccgcaugaacuacuacuggacccugguggagccgggggacaagaucaccuucgaggcgacgggcaaccucguggucccccgguacgccuucgccauggagcgcaacgccggguccggcaucaucaucagcgacacccccgugcacgacugcaacacgaccugccagacccccaagggcgccaucaacaccucccugccguuccagaacauccaccccaucaccaucgggaagugccccaaguacgucaagagcaccaagcugcggcucgcgacgggccugcgcaacgugcccuccauccagagccgggggcuguucggcgccaucgccggguucaucgagggcggcuggaccgggaugguggacggcugguacggguaccaccaccagaacgagcagggcuccggguacgccgccgaccucaagagcacccagaacgcgaucgacaagaucaccaacaaggugaacuccgucaucgagaagaugaacacgcaguucaccgccgugggcaaggaguucaaccaccuggagaagcgcaucgagaaccugaacaagaaggucgacgacggcuuccucgacaucuggaccuacaacgccgagcugcuggugcuccuggagaacgagcggacccuggacuaccacgacagcaacgugaagaaccucuacgagaagguccgcaaccagcugaagaacaacgccaaggagaucgggaacggcugcuucgaguucuaccacaagugcgacaacacgugcauggaguccgugaagaacgggaccuacgacuacccgaaguacagcgaggaggccaagcugaaccgggaggagaucgacggcgugaagcucgaguccacccgcaucuaccagauccuggcgaucuacagcaccgucgccuccagccuggugcucguggucagccugggggccaucuccuucuggaugugcagcaacggcucccugcagugccggaucugcaucuga

SEQ ID NO: 72258 - RNA, 1701 nt, Artificial Sequence; identical to SEQ ID NO: 70891
  derived and/or modified CDS sequence (opt1) from hemagglutinin__InfluenzaA__AFB77628

SEQ ID NO: 72259 - RNA, 1701 nt, Artificial Sequence
  derived and/or modified CDS sequence (opt1) from hemagglutinin__InfluenzaA__AFB77629
augaaggccauccuggugguccuccuguacaccuucaccacggccaacgcggacacccugugcaucggcuaccacgccaacaacagcaccgacaccguggacacggugcucgagaagaacgucaccgugacccacuccgugaaccugcuggaggacaagcacaacgggaagcucugcaagcugcgcggcgucgcgccccugcaccucgggaagugcaacaucgccggcuggauccuggggaacccggagugcgagagccuguccaccgccagcuccuggagcuacaucguggagacguccagcuccgacaacgggaccugcuaccccggcgacuucaucaacuacgaggagcuccgggagcagcugagcuccgugagcuccuucgagcgcuucgagaucuuccccaagaccagcuccuggcccaaccacgacagcaacaagggcgucaccgccgccugcccgcacgccggcgccaaguccuucuacaagaaccugaucuggcucgugaagaaggggaacagcuaccccaagcuguccaagagcuacaucaacgacaagggcaaggaggugcugguccucugggggauccaccaccccagcacgaccgcggaccagcagucccuguaccagaacgccgacgccuacguguucgugggcaccagccgguacuccaagaaguucaagcccgagaucgccauccgcccgaagguccgggaccaggagggccgcaugaacuacuacuggacccugguggagcccggggacaagaucacguucgaggccaccggcaaccucguggucccccgguacgcguucgccauggagcgcaacgccgggagcggcaucaucaucuccgacacccccgugcacgacugcaacaccacgugccagaccccgaagggcgccaucaacaccagccugcccuuccagaacauccaccccaucaccaucgggaagugccccaaguacgugaaguccacgaagcugcggcucgccaccggccugcgcaacgucccgagcauccagucccgggggcuguucggcgcgaucgccggguucaucgagggcggcuggaccgggaugguggacggcugguacggguaccaccaccagaacgagcagggcagcggguacgccgccgaccucaaguccacccagaacgccaucgacaagaucacgaacaaggugaacagcgucaucgagaagaugaacacccaguucaccgcggugggcaaggaguucaaccaccuggagaagcgcaucgagaaccugaacaagaaggucgacgacggcuuccucgacaucuggaccuacaacgaggagcugcuggugcuccuggagaacgagcggacgcuggacuaccacgacuccaacgugaagaaccucuacgagaagguccgcaaccagcugaagaacaacgccaaggagaucgggaacggcugcuucgaguucuaccacaagugcgacaacacgugcauggagagcgugaagaacgggaccuacgacuaccccaaguacuccgaggaggccaagcugaaccgggaggagaucgacggcgugaagcucgagagcacccgcaucuaccagauccuggccaucuacuccaccgucgccagcucccuggugcucguggucagccugggggcgaucagcuucuggaugugcuccaacggcagccugcagugccggaucugcaucuga

SEQ ID NO: 72260 - RNA, 1701 nt, Artificial Sequence
  derived and/or modified CDS sequence (opt1) from hemagglutinin__InfluenzaA__AFB77630
augaaggccauccuggugguccuccuguacaccuucgccaccgcgaacgccgacacgcugugcaucggcuaccacgccaacaacagcaccgacaccguggacaccgugcucgagaagaacgucacggugacccacuccgugaaccugcuggaggacaagcacaacgggaagcucugcaagcugcgcggcgucgcgccccugcaccucgggaagugcaacaucgccggcuggauccuggggaacccggagugcgagagccuguccaccgccagcuccuggagcuacaucguggagaccuccagcuccgacaacggcacgugcuaccccggcgacuucaucaacuacgaggagcuccgggagcagcugagcuccgugagcuccuucgagcgcuucgagaucuuccccaagaccagcuccuggcccaaccacgagagcaacaagggggucaccgccgccugcccgcacgccggcgcgaaguccuucuacaagaaccugaucuggcucgugaagaaggggaacagcuaccccaagcuguccaagagcuacaucaacgacaagggcaaggaggugcugguccucugggggauccaccaccccagcaccacggccgaccagcagucccuguaccagaacgccgacgccuacguguucgugggcaccagccgguacuccaagaaguucaagcccgagaucgccauccgcccgaagguccgggaccaggagggccgcaugaacuacuacuggacccugguggagcccggggacaagaucaccuucgaggcgacgggcaaccucguggucccccgguacgccuucgccauggagcgcaacgccgggagcggcaucaucaucuccgacacccccgugcacgacugcaacacgaccugccagaccccgaagggcgccaucaacaccagccugcccuuccagaacauccaccccaucaccaucgggaagugccccaaguacgugaaguccaccaagcugcggcucgcgacgggccugcgcaacgucccgagcauccagucccgggggcuguucggcgccaucgccggguucaucgagggcggcuggaccgggaugguggacggcugguacggguaccaccaccagaacgagcagggcagcggguacgccgccgaccucaaguccacccagaacgcgaucgacaagaucaccaacaaggugaacagcgucaucgagaagaugaacacgcaguucaccgccgugggcaaggaguucaaccaccuggagaagcgcaucgagaaccugaacaagaaggucgacgacggcuuccucgacaucuggaccuacaacgccgagcugcuggugcuccuggagaacgagcggacccuggacuaccacgacuccaacgugaagaaccucuacgagaagguccgcaaccagcugaagaacaacgccaaggagaucgggaacggcugcuucgaguucuaccacaagugcgacaacacgugcauggagagcgugaagaacgggaccuacgacuaccccaaguacuccgaggaggccaagcugaaccgggaggagaucgacggcgugaagcucgagagcacccgcaucuaccagauccuggcgaucuacuccaccgucgccagcucccuggugcucguggucagccugggggccaucagcuucuggaugugcuccaacggcagccugcagugccggaucugcaucuga

SEQ ID NO: 72261 - RNA, 1701 nt, Artificial Sequence
  derived and/or modified CDS sequence (opt1) from hemagglutinin__InfluenzaA__AFB77631
augaaggccauccuggugguccuccuguacaccuucaccacggccaacgcggacacccugugcaucggcuaccacgccaacaacagcaccgacaccguggacacggugcucgagaagaacgucaccgugacccacuccgugaaccugcuggaggacaagcacaacgggaagcucugcaagcugcgcggcgucgcgccccugcaccucgggaagugcaacaucgccggcuggauccuggggaacccggagugcgagagccuguccaccgccagcuccuggagcuacaucguggagacguccagcuccgacaacgggaccugcuaccccggcgacuucaucaacuacgaggagcuccgggagcagcugagcuccgugagcuccuucgagcgcuucgagaucuuccccaagaccagcuccuggcccaaccacgacagcaacaagggcgucaccgccgccugcccgcacgccggcgccaaguccuucuacaagaaccugaucuggcucgugaagaaggggaacagcuaccccaagcuguccaagagcuacaucaacgacaagggcaaggaggugcugguccucugggggauccaccaccccagcacgaccgcggaccagcagucccuguaccagaacgccgacgccuacguguucgugggcaccagccgguacuccaagaaguucaagcccgagaucgccauccgcccgaagguccgggaccaggagggccgcaugaacuacuacuggacccugguggagcccggggacaagaucacguucgaggccaccggcaaccucguggucccccgguacgcguucgccauggagcgcaacgccgggagcggcaucaucaucuccgacacccccgugcacgacugcaacaccacgugccagaccccgaagggcgccaucaacaccagccugcccuuccagaacauccaccccaucaccaucgggaagugccccaaguacgugaaguccacgaagcugcggcucgccaccggccugcgcaacgucccgagcauccagucccgggggcuguucggcgcgaucgccggguucaucgagggcggcuggaccgggaugguggacggcugguacggguaccaccaccagaacgagcagggcagcggguacgccgccgaccucaaguccacccagaacgccaucgacaagaucacgaacaaggugaacagcgucaucgagaagaugaacacccaguucaccgcggugggcaaggaguucaaccaccuggagaagcgcaucgagaaccugaacaagaaggucgacgacggcuuccucgacaucuggaccuacaacgccgagcugcuggugcuccuggagaacgagcggacgcuggacuaccacgacuccaacgugaagaaccucuacgagaagguccgcaaccagcugaagaccaacgccaaggagaucgggaacggcugcuucgaguucuaccacaagugcgacaacacgugcauggagagcgugaagaacgggaccuacgacuaccccaaguacuccgaggaggccaagcugaaccgggaggagaucgacggcgugaagcucgagagcacccgcaucuaccagauccuggccaucuacuccaccgucgcgagcucccuggugcucguggucagccugggggccaucagcuucuggaugugcuccaacggcagccugcagugccggaucugcaucuga

SEQ ID NO: 72262 - RNA, 1701 nt, Artificial Sequence
  derived and/or modified CDS sequence (opt1) from hemagglutinin__InfluenzaA__AFB77632
augaaggccauccuggugguccuccuguacaccuucgccaccgcgaacgccgacacgcugugcaucggcuaccacgccaacaacagcaccgacaccguggacaccgugcucgagaagaacgucacggugacccacuccgugaaccugcuggaggacaagcacaacgggaagcucugcaagcugcgcggcgucgcgccccugcaccucgggaagugcaacaucgccggcuggauccuggggaacccggagugcgagagccugaccaccgcguccagcugguccuacaucguggagacgagcuccagcgacaacgggaccugcuaccccggcgacuucaucaacuacgaggagcuccgggagcagcuguccagcguguccagcuucgagcgcuucgagaucuuccccaagaccuccagcuggcccaaccacgacuccaacaagggcgucaccgccgccugcccgcacgccggcgccaagagcuucuacaagaaccugaucuggcucgugaagaaggggaacuccuaccccaagcugagcaaguccuacaucaacgacaagggcaaggaggugcugguccucugggggauccaccaccccagcacgaccgccgaccagcagagccuguaccagaacgccgacgccuacguguucgugggcaccucccgguacagcaagaaguucaagcccgagaucgccauccgcccgaagguccgggaccaggagggccgcaugaacuacuacuggacccugguggagcccggggacaagaucacguucgaggcgaccggcaaccucguggucccccgguacgccuucgccauggagcgcaacgccggguccggcaucaucaucagcgacacccccgugcacgacugcaacaccacgugccagaccccgaagggcgccaucaacaccucccugcccuuccagaacauccaccccaucaccaucgggaagugccccaaguacgucaagagcacgaagcugcggcucgcgaccggccugcgcaacgugccguccauccagagccgggggcuguucggcgccaucgccggguucaucgagggcggcuggaccgggaugguggacggcugguacggguaccaccaccagaacgagcagggcuccggguacgccgccgaccucaagagcacccagaacgcgaucgacaagaucacgaacaaggugaacuccgucaucgagaagaugaacacccaguucaccgccgugggcaaggaguucaaccaccuggagaagcgcaucgagaaccugaacaagaaggucgacgacggcuuccucgacaucuggaccuacaacgccgagcugcuggugcuccuggagaacgagcggacgcuggacuaccacgacagcaacgugaagaaccucuacgagaagguccgcaaccagcugaagaacaacgccaaggagaucgggaacggcugcuucgaguucuaccacaagugcgacaacacgugcauggaguccgugaagaacgggaccuacgacuaccccaaguacagcgaggaggccaagcugaaccgggaggagaucgacggcgugaagcucgaguccacccgcaucuaccagauccuggcgaucuacagcaccgucgccuccagccuggugcucguggucucccugggggccaucagcuucuggaugugcagcaacggcucccugcagugcaagaucugcaucuga

SEQ ID NO: 72263 - RNA, 1701 nt, Artificial Sequence
  derived and/or modified CDS sequence (opt1) from hemagglutinin__InfluenzaA__AFB77633
augaaggccauccuggugguccuccuguacaccuucgccaccgcgaacgccgacacgcugugcaucggcuaccacgccaacaacagcaccgacaccguggacaccgugcucgagaagaacgucacggugacccacuccgugaaccugcuggaggacaagcacaacgggaagcucugcaagcugcgcggcgucgcgccccugcaccucgggaagugcaacaucgccggcuggauccuggggaacccggagugcgagagccuguccaccgcgagcuccuggagcuacaucguggagaccuccagcuccgacaacggcacgugcuaccccggcgacuucaucaacuacgaggagcuccgggagcagcugagcuccgugagcuccuucgagcgcuucgagaucuuccccaagaccagcuccuggcccaaccacgacagcaacaagggggucaccgccgccugcucccacgccggcgccaagagcuucuacaagaaccugaucuggcucgugaagaaggggaacuccuacccgaagcugagcaagagcuacaucaacgacaagggcaaggaggugcugguccucugggggauccaccaccccuccaccacggccgaccagcagagccuguaccagaacgccgacgccuacguguucgugggcaccucccgguacagcaagaaguucaagcccgagaucgccauccgccccaagguccgggaccaggagggccgcaugaacuacuacuggacccugguggagccgggggacaagaucaccuucgaggcgacgggcaaccucguggucccccgguacgccuucgccauggagcgcaacgccggguccggcaucaucaucagcgacacccccgugcacgacugcaacacgaccugccagacccccaagggcgccaucaacaccucccugccguuccagaacauccaccccaucaccaucgggaagugccccaaguacgucaagagcaccaagcugcggcucgcgacgggccugcgcaacgugcccuccauccagagccgggggcuguucggcgccaucgccggguucaucgagggcggcuggaccgggaugguggacggcugguacggguaccaccaccagaacgagcagggcuccggguacgccgccgaccucaagagcacccagaacgcgaucgacaagaucaccaacaaggugaacuccgucaucgagaagaugaacacgcaguucaccgccgugggcaaggaguucaaccaccuggagaagcgcaucgagaaccugaacaagaaggucgacgacggcuuccucgacaucuggaccuacaacgccgagcugcuggugcuccuggagaacgagcggacccuggacuaccacgacagcaacgugaagaaccucuacgagaaggucaagaaccagcugaagaacaacgccaaggagaucgggaacggcugcuucgaguucuaccacaagugcgacaacacgccgaucaagaacgugaagaacgggaccuacgacuaccccaaguacuccgaggaggccaagcugaaccgcgaggagaucgacggcgugaagcucgagagcacccggaucuaccagauccuggcgaucuacuccaccgucgccagcucccuggugcucguggucagccugggggccaucagcuucuggaugugcuccaacggcagccugcagugccgcaucugcaucuga

SEQ ID NO: 72264 - RNA, 1701 nt, Artificial Sequence
  derived and/or modified CDS sequence (opt1) from hemagglutinin__InfluenzaA__AFB77634
augaaggccauccuggugguccuccuguacaccuucgccaccgcgaacgccgacacgcugugcaucggcuaccacgccaacaacagcaccgacaccguggacaccgugcucgagaagaacgucacggugacccacuccgugaaccugcuggaggacaagcacaacgggaagcucugcaagcugcgcggcgucgcgccccugcaccucgggaagugcaacaucgccggcuggauccuggggaacccggagugcgagagccuguccaccgccagcuccuggagcuacaucguggagaccuccagcuccgacaacggcacgugcuaccccggcgacuucaucaacuacgaggagcuccgggagcagcugagcuccgugagcuccuucgagcgcuucgagaucuuccccaagaccagcuccuggcccaaccacgacagcaacaagggggucaccgccgccugcccgcacgccggcgcgaaguccuucuacaagaaccugaucuggcucgugaagaaggggaacagcuaccccaagcuguccaagagcuacaucaacgacaagggcaaggaggugcugguccucugggggauccaccaccccagcaccacggccgaccagcagucccuguaccagaacgccgacgccuacguguucgugggcaccagccgguacuccaagaaguucaagcccgagaucgccauccgcccgaagguccgggaccaggagggccgcaugaacuacuacuggacccugguggagcccggggagaagaucaccuucgaggcgacgggcaaccucguggucccccgguacgccuucgccauggagcgcaacgccgggagcggcaucaucaucuccgacacccccgugcacgacugcaacacgaccugccagaccccgaagggcgccaucaacaccagccugcccuuccagaacauccaccccaucaccaucgggaagugccccaaguacgugaaguccaccaagcugcggcucgcgacgggccugcgcaacgucccgagcauccagucccgggggcuguucggcgccaucgccggguucaucgagggcggcuggaccgggaugguggacggcugguacggguaccaccaccagaacgagcagggcagcggguacgccgccgaccucaaguccacccagaacgcgaucgacaagaucaccaacaaggugaacagcgucaucgagaagaugaacacgcaguucaccgccgugggcaaggaguucaaccaccuggagaagcgcaucgagaaccugaacaagaaggucgacgacggcuuccucgacaucuggaccuacaacgccgagcugcuggugcuccuggagaacgagcggacccuggacuaccacgacuccaacgugaagaaccucuacgagaagguccgcaaccagcugaagaacaacgccaaggagaucgggaacggcugcuucgaguucuaccacaagugcgacaacacgugcauggagagcgugaagaacgggaccuacgacuaccccaaguacuccgaggaggccaagcugaaccgggaggagaucgacggcgugaagcucgagagcacccgcaucuaccagauccuggcgaucuacuccaccgucgccagcucccuggugcucguggucagccugggggccaucagcuucuggaugugcuccaacggcagccugcagugccggaucugcaucuga

SEQ ID NO: 72265 - RNA, 1701 nt, Artificial Sequence
  derived and/or modified CDS sequence (opt1) from hemagglutinin__InfluenzaA__AFB77635
augaaggccauccuggugguccuccuguacaccuucgccaccgcgaacgccgacacgcugugcaucggcuaccacgccaacaacagcaccgacaccguggacaccgugcucgagaagaacgucacggugacccacuccgugaaccugcuggaggacaagcacaacgggaagcucugcaagcugcgcggcgucgcgccccugcaccucgggaagugcaacaucgccggcuggauccuggggaacccggagugcgagagccuguccaccgcgagccccugguccuacaucguggagaccagcuccagcgacaacggcacgugcuaccccggcgacuucaucaacuacgaggagcuccgggagcagcuguccagcguguccagcuucgagcgcuucgagaucuuccccaagaccuccagcuggccgaaccacgacuccaacaagggggucaccgccgccugcccccacgccggcgccaagagcuucuacaagaaccugaucuggcucgugaagaaggggaacuccuaccccaagcugagcaaguccuacaucaacgacaagggcaaggaggugcugguccucugggggauccaccaccccagcaccacggccgaccagcagagccuguaccagaacgccgacgccuacguguucgugggcaccucccgguacagcaagaaguucaagccggagaucgccauccgccccaagguccgggaccaggagggccgcaugaacuacuacuggacccugguggagcccggggacaagaucaccuucgaggcgacgggcaaccucguggucccccgguacgccuucgccauggagcgcaacgccggguccggcaucaucaucagcgacaccccggugcacgacugcaacacgaccugccagacccccaagggcgccaucaacaccucccugcccuuccagaacauccaccccaucaccaucgggaagugcccgaaguacgucaagagcaccaagcugcggcucgcgacgggccugcgcaacgugcccuccauccagagccgggggcuguucggcgccaucgccggguucaucgagggcggcuggaccgggaugguggacggcugguacggguaccaccaccagaacgagcagggcuccggguacgccgccgaccucaagagcacccagaacgcgaucgacaagaucaccaacaaggugaacuccgucaucgagaagaugaacacgcaguucaccgccgugggcaaggaguucaaccaccuggagaagcgcaucgagaaccugaacaagaaggucgacgacggcuuccucgacaucuggaccuacaacgccgagcugcuggugcuccuggagaacgagcggacccuggacuaccacgacagcaacgugaagaaccucuacgagaagguccgcaaccagcugaagaacaacgccaaggagaucgggaacggcugcuucgaguucuaccacaagugcgacaacacgugcauggaguccgugaagaacgggaccuacgacuaccccaaguacagcgaggaggccaagcugaaccgggaggagaucgacggcgugaagcucgaguccacccgcaucuaccagauccuggcgaucuacagcaccgucgccuccagccuggugcucguggucucccugggggccaucagcuucuggaugugcagcaacggcucccugcagugccggaucugcaucuga

SEQ ID NO: 72266 - RNA, 1701 nt, Artificial Sequence
  derived and/or modified CDS sequence (opt1) from hemagglutinin__InfluenzaA__AFB77636
augaaggccauccuggugguccuccuguacaccuucgccaccgcgaacgccgacacgcugugcaucggcuaccacgccaacaacagcaccgacaccguggacaccgugcucgagaagaacgucacggugacccacuccgugaaccugcuggaggacaagcacaacgggaagcucugcaagcugcgcggcgucgcgccccugcaccucgggaagugcaacaucgccggcuggauccuggggaacccggagugcgagagccuguccaccgccagcuccuggagcuacaucguggagaccuccagcuccgacaacggcacgugcuaccccggcgacuucaucaacuacgaggagcuccgggagcagcugagcuccgugagcuccuucgagcgcuucgagaucuuccccaagaccagcuccuggcccaaccacgacagcaacaagggggucaccgccgccugcccgcacgccggcgcgaaguccuucuacaagaaccugaucuggcucgugaagaaggggaacagcuaccccaagcuguccaagagcuacaucaacgacaagggcaaggaggugcugguccucugggggauccaccaccccagcaccacggccgaccagcagucccuguaccagaacgccgacgccuacguguucgugggcaccagccgguacuccaagaaguucaagcccgagaucgccauccgcccgaagguccgggaccaggagggccgcaugaacuacuacuggacccugguggagcccggggacaagaucaccuucgaggcgacgggcaaccucguggucccccgguacgccuucgccauggagcgcaaggccgggagcggcaucaucaucuccgacacccccgugcacgacugcaacacgaccugccagaccccgaagggcgccaucaacaccagccugcccuuccagaacauccaccccaucaccaucgggaagugccccaaguacgugaaguccaccaagcugcggcucgcgacgggccugcgcaacgucccgagcauccagucccgggggcuguucggcgccaucgccggguucaucgagggcggcuggaccgggaugguggacggcugguacggguaccaccaccagaacgagcagggcagcggguacgccgccgaccucaaguccacccagaacgcgaucgacaagaucaccaacaaggugaacagcgucaucgagaagaugaacacgcaguucaccgccgugggcaaggaguucaaccaccuggagaagcgcaucgagaaccugaacaagaaggucgacgacggcuuccucgacaucuggaccuacaacgccgagcugcuggugcuccuggagaacgagcggacccuggacuaccacgacuccaacgugaagaaccucuacgagaagguccgcaaccagcugaagaacaacgccaaggagaucgggaacggcugcuucgaguucuaccacaagugcgacaacacgugcauggagagcgugaagaacgggaccuacgacuaccccaaguacuccgaggaggccaagcugaaccgggaggagaucgacggcgugaagcucgagagcacccgcaucuaccagauccuggcgaucuacuccaccgucgccagcucccuggugaugguggucagccucggggccaucagcuucuggaugugcuccaacggcagccugcagugccggaucugcaucuga

SEQ ID NO: 72267 - RNA, 1701 nt, Artificial Sequence
  derived and/or modified CDS sequence (opt1) from hemagglutinin__InfluenzaA__AFB77637
augaaggccauccuggugguccuccuguacaccuucgccaccgcgaacgccgacacgcugugcaucggcuaccacgccaacaacagcaccgacaccguggacaccgugcucgagaagaacgucacggugacccacuccgugaaccugcuggaggacaagcacaacgggaagcucugcaagcugcgcggcgucgcgccccugcaccucgggaagugcaacaucgccggcuggauccuggggaacccggagugcgagagccuguccaccgccagcuccuggagcuacaucguggagaccuccagcuccgacaacggcacgugcuaccccggcgacuucaucaacuacgaggagcuccgggagcagcugagcuccgugagcuccuucgagcgcuucgagaucuuccccaagaccagcuccuggcccaaccacgacagcaacaagggggucaccgccgccugcccgcacgccggcgcgaaguccuucuacaagaaccugaucuggcucgugaagaaggggaacagcuaccccaagcuguccaagagcuacaucaacgacaagggcaaggaggugcugguccucugggggauccaccaccccagcaccacggccgaccagcagucccuguaccagaacgccgacgccuacguguucgugggcaccagccgguacuccaagaaguucaagcccgagaucgccauccgcccgaagggccgggaccaggaggggcgcaugaacuacuacuggacccuggucgagcccggcgacaagaucaccuucgaggcgacggggaaccucguggugccccgguacgccuucgccauggagcgcaacgccggcagcggcaucaucaucuccgacacccccguccacgacugcaacacgaccugccagaccccgaagggggccaucaacaccagccugcccuuccagaacauccaccccaucaccaucggcaagugccccaaguacgugaaguccaccaagcugcggcucgcgacggggcugcgcaacgugccgagcauccagucccggggccuguucggggccaucgccggcuucaucgagggcggguggaccggcauggucgacgggugguacggcuaccaccaccagaacgagcaggggagcggcuacgccgccgaccucaaguccacccagaacgcgaucgacaagaucaccaacaaggugaacagcgugaucgagaagaugaacacgcaguucaccgccgucggcaaggaguucaaccaccuggagaagcgcaucgagaaccugaacaagaagguggacgacggguuccucgacaucuggaccuacaacgccgagcugcugguccuccuggagaacgagcggacccuggacuaccacgacuccaacgugaagaaccucuacgagaaggugcgcaaccagcugaagaacaacgccaaggagaucggcaacgggugcuucgaguucuaccacaagugcgacaacacgugcauggagagcgucaagaacggcaccuacgacuaccccaaguacuccgaggaggccaagcugaaccgggaggagaucgacggggugaagcucgagagcacccgcaucuaccagauccuggcgaucuacuccaccguggccagcucccugguccucguggugagccugggcgccaucagcuucuggaugugcuccaacggcagccugcagugccggaucugcaucuga

SEQ ID NO: 72268 - RNA, 1701 nt, Artificial Sequence
  derived and/or modified CDS sequence (opt1) from hemagglutinin__InfluenzaA__AFB77638
augaaggccauccuggugguccuccuguacaccuucgccaccgcgaacgccgacacgcugugcaucggcuaccacgccaacaacagcaccgacaccguggacaccgugcucgagaagaacgucacggugacccacuccgugaaccugcuggaggacaagcacaacgggaagcucugcaagcugcgcggcgucgcgccccugcaccucgggaagugcaacaucgccggcuggauccuggggaacccggagugcgagagccuguccaccgccagcuccuggagcuacaucguggagaccuccagcuccgacaacggcacgugcuaccccggcgacuucaucaacuacgaggagcuccgggagcagcugagcuccgugagcuccuucgagcgcuucgagaucuuccccaagaccagcuccuggcccaaccacgacagcaacaagggggucaccgccgccugcccgcacgccggcgcgaaguccuucuacaagaaccugaucuggcucgugaagaaggggaacagcuaccccaagcuguccaaguucuacaucaacgacaagggcaaggaggugcugguccucugggggauccaccaccccagcaccacggccgaccagcagagccuguaccagaacgccgacgccuacguguucgugggcaccucccgguacagcaagaaguucaagcccgagaucgccauccgcccgaagguccgggaccaggagggccgcaugaacuacuacuggacccugguggagcccggggacaagaucaccuucgaggcgacgggcaaccucguggucccccgguacgccuucgccauggagcgcaacgccggguccggcaucaucaucagcgacacccccgugcacgacugcaacacgaccugccagaccccgaagggcgccaucaacaccucccugcccuuccagaacauccaccccaucaccaucgggaagugccccaaguacgucaagagcaccaagcugcggcucgcgacgggccugcgcaacgugccguccauccagagccgggggcuguucggcgccaucgccggguucaucgagggcggcuggaccgggaugguggacggcugguacggguaccaccaccagaacgagcagggcuccggguacgccgccgaccucaagagcacccagaacgcgaucgacaagaucaccaacaaggugaacuccgucaucgagaagaugaacacgcaguucaccgccgugggcaaggaguucaaccaccuggagaagcgcaucgagaaccugaacaagaaggucgacgacggcuuccucgacaucuggaccuacaacgccgagcugcuggugcuccuggagaacgagcggacccuggacuaccacgacagcaacgugaagaaccucuacgagaagguccgcaaccagcugaagaacaacgccaaggagaucgggaacggcugcuucgaguucuaccacaagugcgacaacacgugcauggaguccgugaagaacgggaccuacgacuaccccaaguacagcgaggaggccaagcugaaccgggaggagaucgacggcgugaagcucgaguccacccgcaucuaccagauccuggcgaucuacagcaccgucgccuccagccuggugcucguggucucccugggggccaucagcuucuggaugugcagcaacggcucccugcagugccggaucugcaucuga

SEQ ID NO: 72269 - RNA, 1701 nt, Artificial Sequence; identical to SEQ ID NO: 70891
  derived and/or modified CDS sequence (opt1) from hemagglutinin__InfluenzaA__AFB77639

SEQ ID NO: 72270 - RNA, 1701 nt, Artificial Sequence
  derived and/or modified CDS sequence (opt1) from hemagglutinin__InfluenzaA__AFB77640
augaaggccauccuggugguccuccuguacaccuucgccaccgcgaacgccgacacgcugugcaucggcuaccacgccaacaacagcaccgacaccguggacaccgugcucgagaagaacgucacggugacccacuccgugaaccugcuggaggacaagcacaacgggaagcucugcaagcugcgcggcgucgcgccccugcaccucgggaagugcaacaucgccggcuggauccuggggaacccggagugcgagagccuguccaccgccagcuccuggagcuacaucguggagaccuccagcuccgacaacggcacgugcuaccccggcgacuucaucaacuacgaggagcuccgggagcagcugagcuccgugagcuccuucgagcgcuucgagaucuuccccaagaccagcuccuggcccaaccacgacagcaacaagggggucaccgccgccugcccgcacgccggcgcgaaguccuucuacaagaaccugaucuggcucgugaagaaggggaacagcuaccccaagcuguccaagagcuacaucaacgacaagggcaaggaggugcugguccucugggggauccaccaccccagcaccacggccgaccagcagggccuguaccagaacgccgacgccuacguguucgugggcaccucccgguacagcaagaaguucaagcccgagaucgccauccgcccgaagguccgggaccaggaggggcgcaugaacuacuacuggacccugguggagcccggcgacaagaucaccuucgaggcgacggggaaccucguggucccccgguacgccuucgccauggagcgcaacgccggcuccggcaucaucaucagcgacacccccgugcacgacugcaacacgaccugccagaccccgaagggggccaucaacaccucccugcccuuccagaacauccaccccaucaccaucggcaagugccccaaguacgucaagagcaccaagcugcggcucgcgacggggcugcgcaacgugccguccauccagagccggggccuguucggggccaucgccggcuucaucgagggcggguggaccggcaugguggacgggugguacggcuaccaccaccagaacgagcagggguccggcuacgccgccgaccucaagagcacccagaacgcgaucgacaagaucaccaacaaggugaacuccgucaucgagaagaugaacacgcaguucaccgccgugggcaaggaguucaaccaccuggagaagcgcaucgagaaccugaacaagaaggucgacgacggguuccucgacaucuggaccuacaacgccgagcugcuggugcuccuggagaacgagcggacccuggacuaccacgacagcaacgugaagaaccucuacgagaagguccgcaaccagcugaagaacaacgccaaggagaucggcaacgggugcuucgaguucuaccacaagugcgacaacacgugcauggaguccgugaagaacggcaccuacgacuaccccaaguacagcgaggaggccaagcugaaccgggaggagaucgacggggugaagcucgaguccacccgcaucuaccagauccuggcgaucuacagcaccgucgccuccagccuggugcucguggucucccugggcgccaucagcuucuggaugugcagcaacggcucccugcagugccggaucugcaucuga

SEQ ID NO: 72271 - RNA, 1701 nt, Artificial Sequence
  derived and/or modified CDS sequence (opt1) from hemagglutinin__InfluenzaA__AFB77641
augaaggccauccuggugguccuccuguacaccuucgccaccgcgaacgccgacacgcugugcaucggcuaccacgccaacaacagcaccgacaccguggacaccgugcucgagaagaacgucacggugacccacuccgugaaccugcuggaggacaagcacaacgggaagcucugcaagcugcgcggcgucgcgccccugcaccucgggaagugcaacaucgccggcuggauccuggggaacccggagugcgagagccuguccaccgccagcuccuggagcuacaucguggagaccuccagcuccgacaacggcacgugcuaccccggcgacuucaucaacuacgaggagcuccgggagcagcugagcuccgugagcuccuucgagcgcuucgagaucuuccccaagaccagcuccuggcccaaccacgacagcaacaagggggucaccgccgccugcccgcacgccggcgcgaaguccuucuacaagaaccugaucuggcucgugaagaaggggaacagcuaccccaagcuguccaagagcuacaucaacgacaagggcaaggaggugcugguccucugggggauccaccaccccagcaccacggccgaccagcagucccuguaccagaacgccgacgccuacguguucgugggcaccagccgguacuccaagaaguucaagcccgagaucgccauccgcccgaagguccgggaccaggagggccgcaugaacuacuacuggacccugguggagcccggggacaagaucaccuucgaggcgacgggcaaccucguggucccccgguacgccuucgccauggagcgcaacgccgggagcggcaucaucaucuccgacacccccgugcacgacugcaacacgaccugccagaccccgaagggcgccaucaacaccagccugcccuuccagaacauccaccccaucaccaucgggaagugccccaaguacgugaaguccaccaagcugcggcucgcgacgggccugcgcaacgucccgagcauccagucccgggggcuguucggcgccaucgccggguucaucgagggcggcuggaccgggaugguggacggcugguacggguaccaccaccagaacgagcagggcagcggguacgccgccgaccucaaguccacccagaacgcgaucgacaagaucaccaacaaggugaacagcgucaucgagaagaugaacacgcaguucaccgccgugggcaaggaguucaaccaccuggagaagcgcaucgagaaccugaacaagaaggucgacgacggcuuccucgacaucuggaccuacaacgccgagcugcuggugcuccuggagaacgagcggacccuggacuaccacgacuccaacgugaagaaccucuacgagaagguccgcaaccagcugaagaacaacgccaaggagaucgggaacggcugcuucgaguucuaccacaagugcgacaacaugugcauggagagcgugaagaacgggacguacgacuaccccaaguacuccgaggaggccaagcugaaccgggaggagaucgacggcgugaagcucgagagcacccgcaucuaccagauccuggcgaucuacuccaccgucgccagcucccuggugcucguggucagccugggggccaucagcuucuggaugugcuccaacggcagccugcagugccggaucugcaucuga

SEQ ID NO: 72272 - RNA, 1701 nt, Artificial Sequence; identical to SEQ ID NO: 70891
  derived and/or modified CDS sequence (opt1) from hemagglutinin__InfluenzaA__AFB77642

SEQ ID NO: 72273 - RNA, 1701 nt, Artificial Sequence
  derived and/or modified CDS sequence (opt1) from hemagglutinin__InfluenzaA__AFB77643
augaaggccauccuggugguccuccuguacaccuucgccaccgcgaacgccgacacgcugugcaucggcuaccacgccaacaacagcaccgacaccguggacaccgugcucgagaagaacgucacggugacccacuccgugaaccugcuggaggacaagcacaacgggaagcucugcaagcugcgcggcgucgcgccccugcaccucgggaagugcaacaucgccggcuggauccuggggaacccggagugcgagagccuguccaccgccagcuccuggagcuacaucguggagaccuccagcuccgacaacggcacgugcuaccccggcgacuucaucaacuacgaggagcuccgggagcagcugagcuccgugagcuccuucgagcgcuucgagaucuuccccaagcccagcuccuggccgaaccacgacagcaacaagggggucaccgccgccugcccccacgccggcgcgaaguccuucuacaagaaccugaucuggcucgugaagaaggggaacagcuaccccaagcuguccaagagcuacaucaacgacaagggcaaggaggugcugguccucugggggauccaccaccccagcaccaccgccgaccagcagucccuguaccagaacgccgacgccuacguguucgugggcacgagccgguacuccaagaaguucaagccggagaucgccauccgccccaagguccgggaccaggagggccgcaugaacuacuacuggacccugguggagcccggggacaagaucaccuucgaggcgaccggcaaccucguggucccccgguacgccuucgccauggagcgcaacgccgggagcggcaucaucaucuccgacacgccggugcacgacugcaacacgaccugccagacccccaagggcgccaucaacaccagccugcccuuccagaacauccaccccaucaccaucgggaagugcccgaaguacgugaaguccaccaagcugcggcucgcgaccggccugcgcaacguccccagcauccagucccgggggcuguucggcgccaucgccggguucaucgagggcggcuggacggggaugguggacggcugguacggguaccaccaccagaacgagcagggcagcggguacgccgccgaccucaaguccacccagaacgcgaucgacaagaucaccaacaaggugaacagcgucaucgagaagaugaacacccaguucacggccgugggcaaggaguucaaccaccuggagaagcgcaucgagaaccugaacaagaaggucgacgacggcuuccucgacaucuggaccuacaacgccgagcugcuggugcuccuggagaacgagcggacccuggacuaccacgacuccaacgugaagaaccucuacgagaagguccgcaaccagcugaagaacaacgccaaggagaucgggaacggcugcuucgaguucuaccacaagugcgacaacacgugcauggagagcgugaagaacgggaccuacgacgacaccaaggacuccgaggaggccaagcugaaccgggaggagaucgacggcgugaagcucgagagcacccgcaucuaccagauccuggcgaucuacuccaccgucgccagcucccuggugcucguggucagccugggggccaucagcuucuggaugugcuccaacggcagccugcagugccggaucugcaucuga

SEQ ID NO: 72274 - RNA, 1701 nt, Artificial Sequence
  derived and/or modified CDS sequence (opt1) from hemagglutinin__InfluenzaA__AFB77691
augaagaccaucaucgcccugagcuacauccucugccugguguucgcccagaagcugcccggcaacgacaacuccaccgcgacccucugccuggggcaccacgccgucccgaacggcaccaucgugaagaccaucaccaacgaccagaucgaggugacgaacgccaccgagcugguccagaacagcuccaccggggagaucugcgacagcccccaccagauccucgacggcgagaacugcacccugaucgacgcccugcucggggacccccagugcgacggcuuccagaacaagaagugggaccuguucguggagcgcuccaaggccuacagcaacugcuaccccuacgacgugccggacuacgcgucccugcggagccucgucgccuccagcggcacgcuggaguucaacaacgaguccuucaacuggaccggggugacccagaacggcaccagcuccgccugcauccgccggagcaacaacuccuucuucagccgccugaacuggcucacgcaccugaacuucaaguaccccgcccugaacgugaccaugcccaacaacgagcaguucgagaagcucuacaucuggggcguccaccaccccgggaccgacaaggaccagaucuuccuguacgcgcaggccuccgggcggaucaccgugagcacgaagcgcucccagcaggccgugaucccgaacaucggcagccggcugcgcguccggaacauccccagccgcaucuccaucuacuggaccaucgugaagcccggcgacauccuccugaucaacagcaccgggaaccugaacgcgccccggggcuacuucaagauccgcuccggcaagagcuccaucaugcggagcgacgccccgaucgggaagugcaacuccgagugcaucacccccaacggcagcauccccaacgacaagcccuuccagaacgugaaccgcaucacguacggggccugcccgcgguacgucaagcagaacacccucaagcuggccaccggcaugcgcaacgugcccgagaagcagacccgggggaucuucggcgccaucgccggguucaucgagaacggcugggagggcaugguggacgggugguacggcuuccgccaccagaacuccgaggggcggggccaggccgcggaccucaagagcacgcaggccgccaucgaccagaucaacgggaagcugaaccgccugaucggcaagaccaacgagaaguuccaccagaucgagaaggaguucuccgaggucgagggccggauccaggaccuggagaaguacguggaggacaccaagaucgaccucuggagcuacaacgccgagcugcugguggcccucgagaaccagcacaccaucgaccugacggacuccgagaugaacaagcuguucgagaagaccaagaaccagcuccgcgagaacgcggaggacauggggaacggcugcuucaagaucuaccacaagugcgacaacacgugcaucgggagcauccgcaacggcaccuacgaccacgacgccuaccgggacgaggcccugaacaaccgcuuccagaucaagggggucgagcugaaguccggcuacaaggacuggauccucuggaucagcuucgccaucuccugcuuccugcugugcguggcccuccugggcuucaucaugugggcgugccagaaggggaacauccggugcaacaucugcaucuga

SEQ ID NO: 72275 - RNA, 1701 nt, Artificial Sequence
  derived and/or modified CDS sequence (opt1) from hemagglutinin__InfluenzaA__AFB77692
augaagaccaucaucgcccugagcuacauccucugccugguguucgcccagaagcugcccggcaacgacaacuccaccgcgacgcucugccuggggcaccacgccgucccgaacggcaccaucgugaagaccaucaccaacgaccagaucgaggugacgaacgccaccgagcugguccagaacagcuccaccggggagaucugcgacagcccccaccagauccucgacggcgagaacugcacccugaucgacgcccugcucggggacccccagugcgacggcuuccagaacaagaagugggaccuguucguggagcgcuccaaggccuacagcaacugcuaccccuacgacgugccggacuacgcgucccugcggagccucgucgccuccagcggcacgcuggaguucaacaacgaguccuucaacuggaccggggugacccagaacggcaccagcuccgccugcauccgccggagcaacaacuccuucuucagccgccugaacuggcucacgcaccugaacuucaaguaccccgcccugaacgugaccaugcccaacaacgagcaguucgacaagcucuacaucuggggcguccaccaccccgggaccgacaaggaccagaucuuccuguacgcgcaggccuccgggcggaucaccgugagcacgaagcgcucccagcaggccgugaucccgaacaccggcagccggccccgcguccggaacauccccagccgcaucuccaucuacuggaccaucgugaagcccggcgacauccugcucaucaacagcaccgggaaccugaucgccccgcggggcuacuucaagauccgcuccggcaagagcuccaucaugcggagcgacgcccccaucgggaagugcaacuccgagugcaucacgcccaacggcagcauccccaacgacaagccguuccagaacgugaaccgcaucaccuacggggcgugcccccgguacgucaagcagaacacccugaagcucgccaccggcaugcgcaacgugcccgagaagcagacgcgggggaucuucggcgccaucgccggguucaucgagaacggcugggagggcaugguggacgggugguacggcuuccgccaccagaacuccgaggggcggggccaggccgcggaccucaagagcacccaggccgccaucgaccagaucaacgggaagcugaaccgccugaucggcaagaccaacgagaaguuccaccagaucgagaaggaguucuccgaggucgagggccggauccaggaccuggagaaguacguggaggacaccaagaucgaccuguggagcuacaacgccgagcuccugguggcccuggagaaccagcacacgaucgaccucaccgacuccgagaugaacaagcuguucgagaagaccaagaagcagcugcgcgagaacgcggaggacauggggaacggcugcuucaagaucuaccacaagugcgacaacgccugcaucgggagcauccgcaacggcaccuacgaccacgacgucuaccgggacgaggcccucaacaaccgcuuccagaucaaggggguggagcugaaguccggcuacaaggacuggauccuguggaucagcuucgccaucuccugcuuccuccugugcguggcccugcucggcuucaucaugugggcgugccagaaggggaacauccggugcaacaucugcaucuga

SEQ ID NO: 72276 - RNA, 1701 nt, Artificial Sequence; identical to SEQ ID NO: 71806
  derived and/or modified CDS sequence (opt1) from hemagglutinin__InfluenzaA__AFB77693

SEQ ID NO: 72277 - RNA, 1701 nt, Artificial Sequence
  derived and/or modified CDS sequence (opt1) from hemagglutinin__InfluenzaA__AFB77694
augaagaccaucaucgcccugagcuacauccucugccugguguucgcccagaagcugcccggcaacgacaacuccaccgcgacccucugccuggggcaccacgccgucccgaacggcaccaucgugaagaccaucgccaacgaccagaucgaggugaccaacgccacggagcugguccagaacagcuccaccggggagaucugcgacagcccccaccagauccucgacggcgagaacugcacccugaucgacgcccugcucggggacccccagugcgacgacuuccagaacaagaagugggaccuguucguggagcgcuccaaggcguacagcaacugcuaccccuacgacgugccggacuacgccucccugcggagccucgucgccuccagcggcacccuggaguucaacaacgaguccuucaacuggacgggcgugacccagaacgggaccagcuccgccugcauccgccggagcaacaacuccuucuucagccgccugaacuggcucacccaccugaacuucaaguaccccgcgcugaacgugacgaugcccaacaacgagcaguucgacaagcucuacaucuggggcguccaccaccccgggaccgacaaggaccagaucuuccuguacgcccaggccuccggccggaucaccgugagcaccaagcgcucccagcaggccgugaucccgaacaucgggagccggccccgcguccggaacauccccagccgcaucuccaucuacuggacgaucgugaagcccggcgacauccugcucaucaacagcaccggcaaccugaucgccccgcggggguacuucaagauccgcuccggcaagagcuccaucaugcggagcgacgcgcccaucgggaagugcaacuccgagugcaucacccccaacggcagcauccccaacgacaagccguuccagaacgugaaccgcaucaccuacggcgccugcccccgguacgucaagcagaacacgcugaagcucgccaccgggaugcgcaacgugcccgagaagcagacccggggcaucuucggggccaucgccggcuucaucgagaacgggugggagggcaugguggacggcugguacggguuccgccaccagaacuccgagggccgggggcaggcggccgaccucaagagcacccaggccgccaucgaccagaucaacggcaagcugaaccgccugaucgggaagacgaacgagaaguuccaccagaucgagaaggaguucuccgaggucgagggccggauccaggaccuggagaaguacguggaggacaccaagaucgaccuguggagcuacaacgccgagcuccugguggcgcuggagaaccagcacaccaucgaccucaccgacuccgagaugaacaagcuguucgagaagacgaagaagcagcugcgcgagaacgccgaggacaugggcaacgggugcuucaagaucuaccacaagugcgacaacacgugcaucggcagcauccgcaacgggaccuacgaccacgacgucuaccgggacgaggcccucaacaaccgcuuccagaucaagggcguggagcugaaguccggguacaaggacuggauccuguggaucagcuucgccaucuccugcuuccuccugugcguggcccugcucggcuucaucaugugggcgugccagaagggcaacauccggugcaacaucugcaucuga

SEQ ID NO: 72278 - RNA, 1701 nt, Artificial Sequence
  derived and/or modified CDS sequence (opt1) from hemagglutinin__InfluenzaA__AFB77695
augaagaccaucaucgcccugagcuacauccucugccugguguucgcccagaagcugcccggcaacgacaacuccaccgcgacgcucugccuggggcaccacgccgucccgaacggcaccaucgugaagaccaucaccaacgaccagaucgaggugacgaacgccaccgagcugguccagaacagcuccaccggggagaucugcgacagcccccaccagauccucgacggcgagaacugcacccugaucgacgcccugcucggggacccccagugcgacgacuuccagaacaagaagugggaccuguucguggagcgcuccaaggccuacagcaacugcuaccccuacgacgugccggacuacgcgucccugcggagccucgucgccuccagcggcacgcuggaguucaacaacgaguccuucaacuggaccggcgugacccagaacgggaccagcuccgccugcauccgccggagcaacaacuccuucuucagccgccugaacuggcucacgcaccugaacuucaaguaccccgcccugaacgugaccaugcccaacaacgagcaguucgacaagcucuacaucuggggcguccaccaccccgggaccgacaaggaccagaucuuccuguacgcgcaggccuccggccggaucaccgugagcacgaagcgcucccagcaggccgugaucccgaacaucgggagccggccccgcguccggaacauccccagccgcaucuccaucuacuggaccaucgugaagcccggcgacauccugcucaucaacagcaccggcaaccugaucgccccgcggggguacuucaagauccgcuccggcaagagcuccaucaugcggagcgacgcccccaucgggaagugcaacuccgagugcaucacccccaacggcagcauccccaacgacaagccguuccagaacgugaaccgcaucacguacggcgcgugcccccgguacgucaagcagaacacccugaagcucgccaccgggaugcgcaacgugcccgagaagcagacccggggcaucuucggggccaucgccggcuucaucgagaacgggugggagggcaugguggacggcugguacggguuccgccaccagaacuccgagggccgggggcaggccgcggaccucaagagcacgcaggccgccaucgaccagaucaacggcaagcugaaccgccugaucgggaagaccaacgagaaguuccaccagaucgagaaggaguucuccgaggucgagggccggauccaggaccuggagaaguacguggaggacaccaagaucgaccuguggagcuacaacgccgagcuccugguggcccuggagaaccagcacaccaucgaccucacggacuccgagaugaacaagcuguucgagaagaccaagaagcagcugcgcgagaacgcggaggacaugggcaacgggugcuucaagaucuaccacaagugcgacaacgccugcaucggcagcauccgcaacgggaccuacgaccacgacgucuaccgggacgaggcccucaacaaccgcuuccagaucaagggcguggagcugaaguccggguacaaggacuggauccuguggaucagcuucgccaucuccugcuuccuccugugcguggcccugcucggcuucaucaugugggcgugccagaagggcaacauccggugcaacaucugcaucuga

SEQ ID NO: 72279 - RNA, 1701 nt, Artificial Sequence
  derived and/or modified CDS sequence (opt1) from hemagglutinin__InfluenzaA__AFB78126
augaagaccaucaucgcccugagcuacauccucugccugguguucgcccagaagcugcccggcaacgacaacuccaccgcgacgcucugccuggggcaccacgccgucagcaacggcacccuggugaagaccaucaccaacgaccagaucgaggugacgaacgccaccgagcucguccaguccagcuccaccgggcgcaucugcgacagcccgcaccagauccuggacggcgagaacugcacccugaucgacgcccuccugggggacccccacugcgacggcuuccagaacaaggagugggaccuguucguggagcgguccaaggccuacagcaacugcuaccccuacgacgugcccgacuacgcgucccuccgcagccuggucgccuccagcggcacgcuggaguucaacaacgaguccuucaacuggaccgggguggcccaggacggcaccagcuccgccugcaagcggcgcagcaacaaguccuucuucagccggcucaacuggcugcaccagcugaaguacaaguacccggcgcucaacgugaccaugcccaacaacgagaaguucgacaagcuguacaucuggggcguccaccaccccuccacggacagcgaccagaucagcaucuacgcccaggccuccgggcgcgugaccgugagcaccaagcggucccagcagaccgucauccccaacaucgggagcuccccgugggugcgcggcgccagcucccggaucagcaucuacuggacgaucgugaagcccggcgacauccugcucaucaacuccaccgggaaccugaucgcgccccgcggcuacuucaagauccggagcgggaaguccagcaucaugcgcuccgacgcccccaucggcaagugcaacagcgagugcaucaccccgaacggcuccauccccaacgacaagcccuuccagaacgucaaccggaucaccuacggggccugcccccgcuacgugaagcagaacacgcugaagcucgccaccggcaugcggaacgugccggagaagcagacccgcgggaucuucggcgccaucgccggguucaucgagaacggcugggagggcauggucgacgggugguacggcuuccggcaccagaacagcgaggggaccggccaggcggccgaccugaaguccacgcaggccgccaccaaccagaucaacgggaagcugaaccgccucaucgagaagaccaacgagaaguuccaccagaucgagaaggaguucagcgagguggagggccggauccaggaccuggagaaguacguggaggacaccaagaucgaccugugguccuacaacgccgagcuccuggucgcgcuggagaaccagcacacgaucgaccucaccgacagcgagaugaacaagcuguucgagcgcaccaagaagcagcugcgggagaacgccgaggacaugggcaacgggugcuucaagaucuaccacaagugcgacaacgccugcaucggcagcauccgcaacgggaccuacgaccacgacguguaccgcgacgaggcccucaacaaccgguuccagaucaagggcguggagcugaaguccggguacaaggacuggauccuguggaucagcuucgccaucuccugcuuccuccugugcgucgugcugcucggcuucaucaugugggcgugccagaagggcaacauccgcugcaacaucugcaucuga

SEQ ID NO: 72280 - RNA, 1701 nt, Artificial Sequence
  derived and/or modified CDS sequence (opt1) from hemagglutinin__InfluenzaA__AFC34056
augaagaccaucaucgcccugagcuacauccucugccugguguucgcccagaagcugcccggcaacgacaacuccaccgcgacgcucugccuggggcaccacgccgucccgaacggcaccaucgugaagaccaucaccaacgaccagaucgaggugacgaacgccaccgagcugguccagagcuccagcaccggggagaucugcgacagcccccaccagauccucgacggcgagaacugcacccugaucgacgcccugcucggggacccccagugcgacggcuuccagaacaagaagugggaccuguucguggagcgcagcaaggccuacuccaacugcuaccccuacgacgugccggacuacgcgagccugcggucccucgucgccagcuccggcacgcuggaguucaacaacgagagcuucaacuggaccggggugacccagaacggcaccuccagcgccugcauccgccgguccaacagcuccuucuucagccgccugaacuggcucacgcaccugaacuucaaguaccccgcccugaacgugaccaugcccaacaacgagcaguucgacaagcucuacaucuggggcguccaccaccccgggaccgacaaggaccagaucuuccuguacgcgcaguccagcgggcggaucaccgugagcacgaagcgcucccagcaggccgugaucccgaacaucggcagccggccccgcauccggaacauccccucccgcaucagcaucuacuggaccaucgucaagcccggcgacauccugcucaucaacuccaccgggaaccugaucgccccgcggggcuacuucaagauccgcagcgggaaguccagcaucaugcgguccgacgcccccaucggcaagugcaacagcgagugcaucacccccaacggcuccauccccaacgacaagccguuccagaacgugaaccgcaucacguacggggccugcccccgguacgugaagcagcgcacccugaagcucgcgaccggcaugcggaacguccccgagaagcagacccgcgggaucuucggcgccaucgccggguucaucgagaacggcugggagggcaugguggacgggugguacggcuuccggcaccagaacagcgaggggcgcggccaggccgccgaccugaaguccacgcaggcggccaucgaccagaucaacgggaagcugaaccggcucaucggcaagaccaacgagaaguuccaccagaucgagaaggaguucagcgagguggagggccgcauccaggaccuggagaaguacgucgaggacaccaagaucgaccugugguccuacaacgccgagcuccugguggcccuggagaaccagcacaccaucgaccucacggacagcgagaugaacaagcuguucgagaagaccaagaagcagcugcgcgagaacgccgaggacauggggaacggcugcuucaagaucuaccacaagugcgacaacgcgugcaucggguccauccggaacggcaccuacaaccacgacguguaccgcgacgaggcccucaacaaccgguuccagaucaagggggucgagcugaaguccggcuacaaggacuggauccuguggaucuccuucgccaucagcugcuuccuccugugcguggcccugcucggcuucaucaugugggccugccagaaggggaacauccgcugcaacaucugcaucuga

SEQ ID NO: 72281 - RNA, 1701 nt, Artificial Sequence; identical to SEQ ID NO: 72280
  derived and/or modified CDS sequence (opt1) from hemagglutinin__InfluenzaA__AFC34057

SEQ ID NO: 72282 - RNA, 1701 nt, Artificial Sequence
  derived and/or modified CDS sequence (opt1) from hemagglutinin__InfluenzaA__AFD32426
augaaggccaaccugcucgugcugcugagcgcccucgcggccgccgacgccgacaccaucugcaucggcuaccacgccaacaacuccaccgacacggucgacaccgugcuggagaagaacgugaccgucacccacagcgugaaccugcucgaggacucccacaacgggaagcugugcaagcugcgcggcguggcgccccuccaccuggggaagugcaacaucgccggccggauccuggggaacccggagugcgagagccucuccacggccagcuccuggagcuacaucgucgagacccccuccagcgacaacgggaccugcuaccccggcgacuucaucgacuacgaggagcugcgcgagcagcuguccagcguguccagcuucgagcgguucgagaucuuccccaagaccuccagcuggccgaaccacgacuccaacaagggggugacggccgcgugcccccacgccggcgccaagagcuucuacaagaaccucaucuggcuggucaagaaggggaacuccuaccccaagcugagcaagagcuacaucaacgacaagggcaaggaggugcucgugcugugggggauccaccaccccuccaccagcgccgaccagcagucccuguaccagaacgccgacaccuacgucuucgugggcagcucccgcuacagcaagaaguucaagccggagaucgcgauccggcccaaggugcgcgaccaggagggccggaugaacuacuacuggacccucgucgagcccggggacaagaucacguucgaggccaccggcaaccugguggugccccgcuacgccuucgccauggagcggaacgccggguccggcaucaucaucagcgacaccccgguccacgacugcaacaccaagugccagacgccccugggcgcgaucaacuccagccuccccuaccagaacauccaccccgugaccaucggggagugcccgaaguacgugcgcuccgccaagcugcggauggucaccggccugcgcaacacccccagcauccagucccggggccucuucggcgccaucgccggguucaucgagggcggcuggacggggaugaucgacggcugguacggguaccaccaccagaacgagcagggcagcggguacgccgcggaccagaaguccacccagaacgccaucaacggcaucaccaacaaggugaacaccgugaucgagaagaugaacauccaguucacggccgucggcaaggaguucaacaagcuggagaagcgcauggagaaccugaacaagaagguggacgacggguuccucgacaucuggaccuacaacgccgagcugcugguccuccuggagaacgagcggacccuggacuuccacgacagcaacgugaagaaccucuacgagaaggugaagucccagcugaagaacaacgccaaggagaucggcaacgggugcuucgaguucuaccacaagugcgacaacgagugcauggagagcguccgcaacggcaccuacgacuaccccaaguacuccgaggagagcaagcugaaccgggagaagguggacggggugaagcucgagagcaugggcaucuaccagauccuggcgaucuacuccacggucgccagcucccuggugcuccuggugagccugggcgccaucuccuucuggaugugcagcaacgggucccuccagugccgcaucugcaucuga

SEQ ID NO: 72283 - RNA, 1698 nt, Artificial Sequence
  derived and/or modified CDS sequence (opt1) from hemagglutinin__InfluenzaA__AFD32427
augaaggccaaccugcucgugcugcugagcgcccucgcggccgccgacgccgacaccaucugcaucggcuaccacgccaacaacuccaccgacacggucgacaccgugcuggagaagaacgugaccgucacccacagcgugaaccugcucgaggacucccacaacgggaagcugugcgaccuggacggcgugaagccccucauccugcgcgacugcagcgucgcgggguggcugcucggcaacccgaugugcgacgaguucaucaacgugcccgagugguccuacaucguggagaaggccaaccccgucaacgaccugugcuaccccggggacuucaacgacuacgaggagcugaagcaccuccugagccggaucaaccacuucgagaagauccagaucaucccgaaguccagcugguccagccacgaggccucccugggcgugagcuccgccugccccuaccagggcaagagcuccuucuuccgcaacguggucuggcucaucaagaagaacagcacguaccccaccaucaagcgguccuacaacaacaccaaccaggaggaccugcuggugcucugggggauccaccaccccaacgacgcggccgagcagaccaagcuguaccagaacccgacgaccuacaucagcgugggcaccuccacccugaaccagcgccucgucccccggaucgccacgcgcagcaaggugaacgggcagagcggccggauggaguucuucuggaccauccugaagcccaacgacgccaucaacuucgaguccaacgggaacuucaucgcccccgaguacgcguacaagaucgugaagaagggcgacagcaccaucaugaaguccgagcuggaguacggcaacugcaacaccaagugccagacgccgcucggggccaucaacagcucccugcccuaccagaacauccaccccgucaccaucggcgagugccccaaguacgugcgcagcgccaagcugcggauggugaccgggcuccgcaacaccccguccauccagagccggggccuguucggcgccaucgccggguucaucgagggcggguggacgggcaugaucgacgggugguacggcuaccaccaccagaacgagcagggcuccggguacgcggccgaccagaaguccacccagaacgccaucaacggcaucaccaacaaggucaacaccgugaucgagaagaugaacauccaguucacggccguggggaaggaguucaacaagcuggagaagcgcauggagaaccucaacaagaaggucgacgacggcuuccuggacaucuggaccuacaacgccgagcugcucgugcugcuggagaacgagcggacccucgacuuccacgacagcaacgucaagaaccuguacgagaaggucaagagccagcugaagaacaacgcgaaggagaucgggaacggcugcuucgaguucuaccacaagugcgacaacgagugcauggaguccgugcgcaacggcaccuacgacuaccccaaguacagcgaggaguccaagcucaaccgggagaagguggacggggugaagcuggagagcaugggcaucuaccagauccuggccaucuacuccacgguggccagcucccucguccugcuggugagccucggggccaucagcuucuggaugugcuccaacggcagccugcagugccgcaucugcaucuga

SEQ ID NO: 72284 - RNA, 1722 nt, Artificial Sequence
  derived and/or modified CDS sequence (opt1) from hemagglutinin__InfluenzaA__AFD32428
augaagaccaucaucgcccugagcuacauccucugccugguguucgcccagaagcugcccggcaacgacaacuccaccgcgacgcucugccuggggcaccacgccgucccgaacggcaccaucgugaagaccaucaccaacgaccagaucgaggugacgaacgccaccgagcugguccagagcuccagcaccggggagaucugcgaccucgacggcgugaagccccugauccugcgcgacugcuccguggccggguggcuccugggcaaccccaugugcgacgaguucaucaacguccccgaguggagcuacaucguggagaaggccaacccggugaacgaccugugcuaccccggcgacuucaacgacuacgaggagcucaagcaccuccugucccggaucaaccacuucgagaagauccagaucauccccaagagcuccuggagcucccacgaggcgagccucggggucuccagcgccugccccuaccagggcaaguccagcuucuuccgcaacgugguguggcugaucaagaagaacuccaccuacccgacgaucaagcggagcuacaacaacaccaaccaggaggaccugcucguccugugggggauccaccaccccaacgacgccgccgagcagaccaagcuguaccagaaccccaccacguacaucuccgugggcaccagcacccucaaccagcgccuggugccccggaucgcgacccgcagcaaggucaacgggcaguccggccggauggaguucuucuggacgauccugaagccgaacgacgccaucaacuucgagagcaacggcaacuucaucgcccccgaguacgccuacaagaucgugaagaagggggacuccaccaucaugaaguccgagcucgaguacggcaacugcaacagcgagugcaucacccccaacgggagcauccccaacgacaagccguuccagaacgugaaccgcaucaccuacggcgccugcccccgguacgucaagcagaacacgcugaagcuggcgaccggcaugcgcaacgugcccgagaagcagacccgggggaucuucggcgccaucgccggguucaucgagaacggcugggaggggaugguggacggcugguacggcuuccgccaccagaacuccgaggggcggggccaggccgccgaccucaagagcacccaggcggccaucgaccagaucaacgggaagcugaaccgccugaucggcaagacgaacgagaaguuccaccagaucgagaaggaguucuccgaggucgaggggcggauccaggaccucgagaaguacguggaggacaccaagaucgaccuguggagcuacaacgccgagcugcucguggcccuggagaaccagcacaccaucgaccugaccgacuccgagaugaacaagcuguucgagaagacgaagaagcagcugcgcgagaacgccgaggacaugggcaacggcugcuucaagaucuaccacaagugcgacaacgcgugcaucgggagcauccggaacggcaccuacgaccacgacgucuaccgcgacgaggcccugaacaaccgguuccagaucaaggggguggagcucaaguccggcuacaaggacuggauccuguggaucagcuucgccaucuccugcuuccugcucugcgucgcccugcugggguucaucaugugggccugccagaagggcaacauccgcugcaacaucugcaucuga

SEQ ID NO: 72285 - RNA, 1704 nt, Artificial Sequence
  derived and/or modified CDS sequence (opt1) from hemagglutinin__InfluenzaA__AFD32429
augaagaccaucaucgcccugagcuacauccucugccugguguucgcccagaagcugcccggcaacgacaacuccaccgcgacgcucugccuggggcaccacgccgucccgaacggcaccaucgugaagaccaucaccaacgaccagaucgaggugacgaacgccaccgagcugguccagagcuccagcaccggggagaucugcacccagggcaagcgccccacggaccucgggcagugcggccugcugggcacccucaucgggccgccccagugcgaccaguuccuggaguucgacgccgaccugaucaucgagcggcgcgagggcaccgacgugugcuaccccgggaaguucaccaacgaggagucccuccggcagauccugcgcggcagcgggggcaucgacaaggaguccaugggcuucacguacagcgggauccggaccaacggcgccaccuccgcgugccgccggagcggguccagcuucuacgccgagaugaaguggcugcucuccaacagcgacaacgccgaguucccccagaugaccaaguccuaccgcaacccccggaacaagcccgcccugaucaucuggggcgugcaccacagcggcuccgcgacggagcagaccaagcuguacgggagcggcaacaagcucaucaccgucggguccagcaaguaccagcagagcuucaccccgucccccggcgcccgcccccaggugaacgggcagagcggccggaucgacuuccacuggcugcugcucgaccccaacgacacggugaccuucaccuucaacggcgccuucaucgccccggaccgcgccuccuucuuccgcggggagagccugggcguccaguccgacgugccccuggacagcgggugcaacuccgagugcaucacccccaacggcagcauccccaacgacaagccguuccagaacgugaaccggaucacguacggggcgugcccccgguacgucaagcagaacacccucaagcuggccaccggcaugcgcaacgugcccgagaagcagacccggggcaucuucggggccaucgccggcuucaucgagaacgggugggagggcaugguggacgggugguacggcuuccgccaccagaacuccgagggccgggggcaggccgcggaccucaagagcacgcaggccgccaucgaccagaucaacggcaagcugaaccgccugaucgggaagaccaacgagaaguuccaccagaucgagaaggaguucuccgaggucgagggccggauccaggaccuggagaaguacguggaggacaccaagaucgaccucuggagcuacaacgccgagcugcugguggcccucgagaaccagcacaccaucgaccugacggacuccgagaugaacaagcuguucgagaagaccaagaagcagcuccgcgagaacgcggaggacaugggcaacgggugcuucaagaucuaccacaagugcgacaacgccugcaucggcagcauccgcaacgggaccuacgaccacgacgucuaccgggacgaggcccugaacaaccgcuuccagaucaagggcguggagcugaaguccggguacaaggacuggauccucuggaucagcuucgccaucuccugcuuccugcugugcguggcccuccugggcuucaucaugugggcgugccagaagggcaacauccggugcaacaucugcaucuga

SEQ ID NO: 72286 - RNA, 1701 nt, Artificial Sequence; identical to SEQ ID NO: 64097
  derived and/or modified CDS sequence (opt1) from hemagglutinin__InfluenzaA__AFD63527

SEQ ID NO: 72287 - RNA, 1701 nt, Artificial Sequence
  derived and/or modified CDS sequence (opt1) from hemagglutinin__InfluenzaA__AFD63538
augaagaccaucaucgcccugagcuacauccucugccugguguucgcccagaagcugcccggcaacgacaacuccaccgcgacgcucugccuggggcaccacgccgucccgaacggcaccaucgugaagaccaucaccaacgaccagaucgaggugacgaacgccaccgagcugguccagagcuccagcaccgggggcaucugcgacagcccccaccagauccucgacggggagaacugcacccugaucgacgcccugcucggcgacccccagugcgacggcuuccagaacaagaagugggaccuguucguggagcgcuccaaggccuacuccaacugcuaccccuacgacgugccggacuacgcgagccugcgguccaucgucgccagcuccgggacgcucgaguucaacaacgagagcuucaacuggaccggcgugacccagaacgggaccuccagcgccugcaagcgcaaguccaacaagagcuucuucucccggcugaacuggcugacgcaccucaaguacaaguaccccgcccugaacgugaccaugcccaacaacgagaaguucgacaagcuguacaucuggggcguccaccaccccgggaccgacaacgaccagaucagccucuacgcgcaggccuccggccgcaucaccgugagcacgaagcggagccagcagaccgugaucccgaacaucggcucccgcccccggguccgcgacgugagcucccggaucagcaucuacuggaccaucgugaagcccggggacauccugcugaucaacuccaccggcaaccucaucgcgccccgcggguacuucaagauccggagcggcaaguccagcaucaugcgcuccgacgccccgaucggcaagugcaacagcgagugcaucacgcccaacggguccauccccaacgacaagcccuuccagaacgucaaccggaucaccuacggcgccugcccgcgcuacgugaagcagaacacccugaagcuggccaccgggaugcggaacgugcccgagaagcagacgcgcggcaucuucggggccaucgccggcuucaucgagaacggcugggaggggauggucgacggcugguacggguuccggcaccagaacagcgagggcaccgggcaggccgccgaccucaaguccacccaggcggccaucaaccagaucaacggcaagcugaaccgccugaucggcaagaccaacgagaaguuccaccagaucgagaaggaguucagcgagguggaggggcggauccaggaccucgagaaguacguggaggacacgaagaucgaccugugguccuacaacgccgagcugcucgucgcccuggagaaccagcacaccaucgaccugaccgacagcgagaugaacaagcuguucgagcgcaccaagaagcagcuccgggagaacgccgaggacaugggcaacgggugcuucaagaucuaccacaagugcgacaacgcgugcaucggcuccauccgcaacgggacguacgaccacgacguguaccgcgacgaggcccugaacaaccgguaccagaucaagggcguggagcucaagagcggcuacaaggacuggauccuguggaucuccuucgccaucagcugcuuccugcucugcgucgcccugcugggguucaucaugugggccugccagaagggcaacauccgcugcaacaucugcaucuga

SEQ ID NO: 72288 - RNA, 1701 nt, Artificial Sequence
  derived and/or modified CDS sequence (opt1) from hemagglutinin__InfluenzaA__AFD63549
augaagaccaucaucgcccugagcuacauccucugccugguguucgcccagaagcugcccggcaacgacaacuccaccgcgacgcucugccuggggcaccacgccgucccgaacggcaccaucgugaagaccaucaccaacgaccagaucgaggugacgaacgccaccgagcugguccagaucagcuccaccgggggcaucugcgacagcccccaccagauccucgacggggagaacugcacccugaucgacgcccugcucggcgacccccagugcgacggcuuccagaacaagaagugggaccuguucguggagcgcuccaaggccuacagcaacugcuaccccuacgacgugccggacuacgcgucccugcggagccucgucgccuccagcgggacgcuggaguucaacaacgaguccuucgacuggaccggcgugacccagaacgggaccagcuccgccugcaagcgccggagcaacaaguccuucuucagccgccugaacuggcucacgcaccugaaguacaaguaccccgcccugaacgugaccaugcccaacaacgagaaguucgacaagcucuacaucuggggcguccaccaccccgggaccgacaacgaccagaucucccuguacgcgcaggccagcggccggaucaccguguccacgaagcgcagccagcagaccgugaucccgaacaucggcagccggccccgcguccgggacguguccagccgcaucuccaucuacuggaccaucgugaagcccggggacauccugcucaucaacagcaccggcaaccugaucgcgccccggggguacuucaagauccgcuccggcaagagcuccaucaugcggagcgacgccccgaucggcaagugcaacuccgagugcaucacgcccaacgggagcauccccaacgacaagcccuuccagaacgucaaccgcaucaccuacggcgccugcccgcgguacgugaagcagaacacccugaagcucgccaccgggaugcgcaacgugcccgagaagcagacgcggggcaucuucggggccaucgccggcuucaucgagaacggcugggaggggauggucgacggcugguacggguuccgccaccagaacuccgagggcaccgggcaggccgccgaccucaagagcacccaggcggccaucaaccagaucaacggcaagcugaaccggcugaucggcaagaccaacgagaaguuccaccagaucgagaaggaguucuccgagguggaggggcgcauccaggaccuggagaaguacguggaggacacgaagaucgaccuguggagcuacaacgccgagcuccuggucgcccuggagaaccagcacaccaucgaccucaccgacuccgagaugaacaagcuguucgagcggaccaagaagcagcugcgcgagaacgccgaggacaugggcaacgggugcuucaagaucuaccacaagugcgacaacgcgugcaucggcagcauccgcaacgggacguacgaccacgacguguaccgggacgaggcccucaacaaccgcuuccagaucaagggcguggagcugaaguccggcuacaaggacuggauccuguggaucagcuucgccaucuccugcuuccuccugugcgucgcccugcucggguucaucaugugggccugccagaagggcaacauccggugcaacaucugcaucuga

SEQ ID NO: 72289 - RNA, 1701 nt, Artificial Sequence; identical to SEQ ID NO: 64097
  derived and/or modified CDS sequence (opt1) from hemagglutinin__InfluenzaA__AFD63571

SEQ ID NO: 72290 - RNA, 1701 nt, Artificial Sequence
  derived and/or modified CDS sequence (opt1) from hemagglutinin__InfluenzaA__AFD63615
augaagaccaucaucgcccugagcuacauccucugccugguguucgcccagaagcugcccggcaacgacaacuccaccgcgacgcucugccuggggcaccacgccgucccgaacggcaccaucgugaagaccaucaccaacgaccagaucgaggugacgaacgccaccgagcugguccagagcuccagcaccgggggcaucugcgacagcccccaccagauccucgacggggagaacugcacccugaucgacgcccugcucggcgacccccagugcgacggcuuccagaacaagaagugggaccuguucguggagcgcagcaaggccuacuccaacugcuaccccuacgacgugccggacuacgcgagccugcggucccucgucgccagcuccgggacgcuggaguucaacaacgagagcuucaacuggaccggcgugacccagaacgggaccuccagcgccugcaagcgcaaguccaacaagagcuucuucucccggcugaacuggcucacgcaccugaaguacaaguaccccgcccugaacgugaccaugcccaacaacgagaaguucgacaagcucuacaucuggggcguccaccaccccgggaccgacaacgaccagaucagccuguacgcgcaggccuccggccgcaucaccgugagcacgaagcggagccagcagaccgugaucccgaacaucggcucccgcccccggguccgcgacgugagcucccggaucagcaucuacuggaccaucgugaagcccggggacauccugcucaucaacuccaccggcaaccugaucgcgccccgcggguacuucaagauccggagcggcaaguccagcaucaugcgcuccgacgccccgaucggcaagugcaacagcgagugcaucacgcccaacggguccauccccaacgacaagcccuuccagaacgucaaccggaucaccuacggcgccugcccgcgcuacgugaagcagaacacccugaagcucgccaccgggaugcggaacgugcccgagaagcagacgcgcggcaucuucggggccaucgccggcuucaucgagaacggcugggaggggauggucgacggcugguacggguuccggcaccagaacagcgagggcaccgggcaggccgccgaccugaaguccacccaggcggccaucaaccagaucaacggcaagcugaaccgccucaucggcaagaccaacgagaaguuccaccagaucgagaaggaguucagcgagguggaggagcggauccaggaccuggagaaguacguggaggacacgaagaucgaccugugguccuacaacgccgagcuccuggucgcccuggagaaccagcacaccaucgaccucaccgacagcgagaugaacaagcuguucgagcgcaccaagaagcagcugcgggagaacgccgaggacauggggaacggcugcuucaagaucuaccacaagugcgacaacgcgugcaucggguccauccgcaacggcacguacgaccacgacguguaccgcgacgaggcccucaacaaccgguuccagaucaaggggguggagcugaaguccggcuacaaggacuggauccuguggaucuccuucgccaucagcugcuuccuccugugcgucgcccugcucggcuucaucaugugggccugccagaaggggaacauccgcugcaacaucugcaucuga

SEQ ID NO: 72291 - RNA, 1701 nt, Artificial Sequence
  derived and/or modified CDS sequence (opt1) from hemagglutinin__InfluenzaA__AFD63626
augaagaccaucaucgcccugagcuacauccucugccugguguucgcccagaagcugcccggcaacgacaacuccaccgcgacgcucugccuggggcaccacgccgucccgaacggcaccaucgugaagaccaucaccaacgaccagaucgaggugacgaacgccaccgagcugguccagaucagcuccaccgggggcaucugcgacagcccccaccagauccucgacggggagaacugcacccugaucgacgcccugcucggcgacccccagugcgacggcuuccagaacaagaagugggaccuguucguggagcgcuccaaggccuacagcaacugcuaccccuacgacgugccggacuacgcgucccugcggagccucgucgccuccagcgggacgcuggaguucaacaacgaguccuucgacuggaccggcgugacccagaacgggaccagcuccgccugcaagcgccggagcaacaaguccuucuucagccgccugaacuggcucacgcaccugaaguacaaguaccccgcccugaacgugaccaugcccaacaacgagaaguucgacaagcucuacaucuggggcguccaccaccccgggaccgacuccgaccagaucagccuguacgcgcaggccuccggccggaucaccgugagcacgaagcgcagccagcagaccgugaucccgaacaucggcucccggccccgcguccgggacaucagcucccgcaucagcaucuacuggaccaucgugaagcccggggacauccugcucaucaacuccaccggcaaccugaucgcgccccggggguacuucaagauccgcagcggcaaguccagcaucaugcgguccgacgccccgaucggcaagugcaacagcgagugcaucacgcccaacggguccauccccaacgacaagcccuuccagaacgugaaccgcaucaccuacggcgccugcccgcgguacgucaagcagaacacccugaagcucgccaccgggaugcgcaacgugcccgagaagcagacgcggggcaucuucggggccaucgccggcuucaucgagaacggcugggaggggaugguggacggcugguacggguuccgccaccagaacagcgagggcaccgggcaggccgccgaccugaaguccacccaggcggccaucaaccagaucaacggcaagcugaaccggcucaucggcaagaccaacgagaaguuccaccagaucgagaaggaguucagcgaggucgaggggcgcauccaggaccuggagaaguacguggaggacacgaagaucgaccugugguccuacaacgccgagcuccugguggcccuggagaaccagcacaccaucgaccucaccgacagcgagaugaacaagcuguucgagcggaccaagaagcagcugcgcgagaacgccgaggacaugggcaacgggugcuucaagaucuaccacaagugcgacaacgcgugcaucggcuccauccgcaacgggacguacgaccacgacgucuaccgggacgaggcccucaacaaccgcuuccagaucaagggcguggagcucaagagcggcuacaaggacuggauccuguggaucuccuucgccaucagcugcuuccugcugugcguggcccugcucggguucaucaugugggccugccagaagggcaacauccggugcaacaucugcaucuga

SEQ ID NO: 72292 - RNA, 1701 nt, Artificial Sequence
  derived and/or modified CDS sequence (opt1) from hemagglutinin__InfluenzaA__AFD63637
augaagaccaucaucgcccugagcuacauccucugccugguguucgcccagaagcugcccggcaacgacaacuccaccgcgacgcucugccuggggcaccacgccgucccgaacggcaccaucgugaagaccaucaccaacgaccagaucgaggugacgaacgccaccgagcugguccagaucagcuccaccgggggcaucugcgacagcccccaccagauccucgacggggagaacugcacccugaucgacgcccugcucggcgacccccagugcgacggcuuccagaacaagaagugggaccuguucguggagcgcuccaaggccuacagcaacugcuaccccuacgacgugccggacuacgcgucccugcggagccucgucgccuccagcgggacgcuggaguucaacaacgaguccuucgacuggaccggcgugacccagaacgggaccagcuccacgugcaagcgccggagcaacaaguccuucuucagccgccugaacuggcucacccaccugaaguacaaguaccccgcccugaacgugaccaugcccaacaacgagaaguucgacaagcucuacaucuggggcguccaccaccccgggaccgacuccgaccagaucagccuguacgcccaggcguccggccggaucacggugagcaccaagcgcagccagcagaccgugaucccgaacaucggcucccggccccgcguccgggacgugagcucccgcaucagcaucuacuggaccaucgugaagcccggggacauccugcucaucaacuccacgggcaaccugaucgcgccccggggguacuucaagauccgcagcggcaaguccagcaucaugcgguccgacgccccgaucggcaagugcaacagcgagugcaucacccccaacggguccauccccaacgacaagcccuuccagaacgucaaccgcaucaccuacggcgccugcccgcgguacgugaagcagaacacccugaagcucgccacggggaugcgcaacgugcccgagaagcagacccggggcaucuucggggccaucgccggcuucaucgagaacggcugggaggggauggucgacggcugguacggguuccgccaccagaacagcgagggcaccgggcaggccgccgaccugaaguccacccaggccgcgaucaaccagaucaacggcaagcugaaccggcucaucggcaagacgaacgagaaguuccaccagaucgagaaggaguucagcgagguggaggggcgcauccaggaccuggagaaguacguggaggacaccaagaucgaccugugguccuacaacgccgagcuccuggucgcccuggagaaccagcacaccaucgaccucaccgacagcgagaugaacaagcuguucgagcggacgaagaagcagcugcgcgagaacgccgaggacaugggcaacgggugcuucaagaucuaccacaagugcgacaacgccugcaucggcuccauccgcaacgggaccuacgaccacgacguguaccgggacgaggcgcucaacaaccgcuuccagaucaagggcguggagcucaagagcggcuacaaggacuggauccuguggaucuccuucgccaucagcugcuuccugcugugcgucgcccugcucggguucaucaugugggccugccagaagggcaacauccggugcaacaucugcaucuga

SEQ ID NO: 72293 - RNA, 1701 nt, Artificial Sequence
  derived and/or modified CDS sequence (opt1) from hemagglutinin__InfluenzaA__AFD63648
augaagaccaucaucgcccugagcuacauccucugccugguguucgcccagaagcugcccggcaacgacaacuccauggcgacccucugccuggggcaccacgccgucccgaacggcacgaucgugaagaccaucaccaacgaccagaucgaggugaccaacgccacggagcugguccagaucagcuccaccgggggcaucugcgacagcccccaccagauccucgacggggagaacugcacccugaucgacgcccugcucggcgacccccagugcgacggcuuccagaacaagaagugggaccuguucguggagcgcuccaaggccuacagcaacugcuaccccuacgacgugccggacuacgcgucccugcggagccucgucgccuccagcgggacccuggaguucaacaacgaguccuucgacuggacgggcgugacccagaacgggaccagcuccgccugcaagcgccggagcaacaaguccuucuucagccgccugaacuggcucacccaccugaaguacaaguaccccgcccugaacgugacgaugcccaacaacgagaaguucgacaagcucuacaucuggggcguccaccaccccgggaccgacuccgaccagaucagccuguacgcgcaggccuccggccggaucaccgugagcaccaagcgcagccagcagacggugaucccgaacaucggcucccggccccgcguccgggacgugagcucccgcaucagcaucuacuggaccaucgugaagcccggggacauccugcucaucaacuccaccggcaaccugaucgcgccccggggguacuucaagauccgcagcggcaaguccagcaucaugcgguccgacgccccgaucggcaagugcaacagcgagugcaucacccccaacggguccauccccaacgacaagcccuuccagaacgucaaccgcaucacguacggcgccugcccgcgguacgugaagcagaacacccugaagcucgccaccgggaugcgcaacgugcccgagaagcagacccggggcaucuucggggccaucgccggcuucaucgagaacggcugggaggggauggucgacggcugguacggguuccgccaccagaacagcgagggcacggggcaggccgccgaccugaaguccacccaggcggccaucaaccagaucaacggcaagcugaaccggcucaucggcaagaccaacgagaaguuccaccagaucgagaaggaguucagcgagguggaggggcgcauccaggaccuggagaaguacguggaggacaccaagaucgaccugugguccuacaacgccgagcuccuggucgcccuggagaaccagcacacgaucgaccucaccgacagcgagaugaacaagcuguucgagcggaccaagaagcagcugcgcgagaacgccgaggacaugggcaacgggugcuucaagaucuaccacaagugcgacaacgcgugcaucggcuccauccgcaacgggaccuacgaccacgacguguaccgggacgaggcccucaacaaccgcuuccagaucaagggcguggagcucaagagcggcuacaaggacuggauccuguggaucuccuucgccaucagcugcuuccugcugugcgucgcccugcucggguucaucaugugggccugccagaagggcaacauccggugcaacaucugcaucuga

SEQ ID NO: 72294 - RNA, 1701 nt, Artificial Sequence; identical to SEQ ID NO: 64097
  derived and/or modified CDS sequence (opt1) from hemagglutinin__InfluenzaA__AFD63659

SEQ ID NO: 72295 - RNA, 1701 nt, Artificial Sequence
  derived and/or modified CDS sequence (opt1) from hemagglutinin__InfluenzaA__AFD63681
augaagaccaucaucgcccugagcuacauccucugccugguguucgcccagaagcugcccggcaacgacaacuccaccgcgacgcucugccuggggcaccacgccgucccgaacggcaccaucgugaagaccaucaccaacgaccagaucgaggugacgaacgccaccgagcugguccagagcuccagcaccgggggcaucugcgacagcccccaccagauccucgacggggagaacugcacccugaucgacgcccugcucggcgacccccagugcgacggcuuccagaacaagaagugggaccuguucguggagcgcagcaaggccuacuccaacugcuaccccuacgacgugccggacuacgcgagccugcggucccucgucgccagcuccgggacgcuggaguucaacaacgagagcuucaacuggaccggcgugacccagaacgggaccuccagcgccugcaagcgcaaguccaacaagagcuucuucucccggcugaacuggcucacgcaccugaaguacaaguaccccgcccugaacgugaccaugcccaacaacgagaaguucgacaagcucuacaucuggggcguccaccaccccgggaccgacaacgaccagaucagccuguacgcgcaggccuccggccgcaucaccgugagcacgaagcggagccagcagaccgugaucccgaacaucggcucccgcccccggguccgcgacgugagcucccggaucagcaucuacuggaccaucgugaagcccggggacauccugcucaucaacuccaccggcaaccugaucgcgccccgcggguacuucaagguccggagcggcaaguccagcaucaugcgcuccgacgccccgaucggcaagugcaacagcgagugcaucacgcccaacggguccauccccaacgacaagcccuuccagaacgugaaccggaucaccuacggcgccugcccgcgcuacgugaagcagaacacccugaagcucgccaccgggaugcggaacguccccgagaagcagacgcgcggcaucuucggggccaucgccggcuucaucgagaacggcugggaggggaugguggacggcugguacggguuccggcaccagaacagcgagggcaccgggcaggccgccgaccugaaguccacccaggcggccaucaaccagaucaacggcaagcugaaccgccucaucggcaagaccaacgagaaguuccaccagaucgagaaggaguucagcgagguggaggggcggauccaggaccuggagaaguacgucgaggacacgaagaucgaccugugguccuacaacgccgagcuccugguggcccuggagaaccagcacaccaucgaccucaccgacagcgagaugaacaagcuguucgagcgcaccaagaagcagcugcgggagaacgccgaggacaugggcaacgggugcuucaagaucuaccacaagugcgacaacgcgugcaucggcuccauccgcaacgggacguacgaccacgacguguaccgcgacgaggcccucaacaaccgguuccagaucaagggcgucgagcugaaguccggcuacaaggacuggauccuguggaucuccuucgccaucagcugcuuccuccugugcguggcccugcucggguucaucaugugggccugccagaagggcaacauccgcugcaacaucugcaucuga

SEQ ID NO: 72296 - RNA, 1701 nt, Artificial Sequence
  derived and/or modified CDS sequence (opt1) from hemagglutinin__InfluenzaA__AFD63692
augaagaccaucaucgcccugagcuacauccucugccugguguucgcccagaagcugcccggcaacgacaacuccaccgcgacgcucugccuggggcaccacgccgucccgaacggcaccaucgugaagaccaucaccaacgaccagaucgaggugacgaacgccaccgagcugguccagagcuccagcaccgggggcaucugcgacagcccccaccagauccucgacggggagaacugcacccugaucgacgcccugcucggcgacccccagugcgacggcuuccagaacaagaagugggaccuguucguggagcgcagcaaggccuacuccaacugcuaccccuacgacgugccggacuacgcgagccugcggucccucgucgccagcuccgggacgcuggaguucaacaacgagagcuucgacuggaccggcgugacccagaacgggaccuccagcgccugcaagcgccgguccaacaagagcuucuucucccgccugaacuggcucacgcaccugaaguacaaguaccccgcccugaacgugaccaugcccaacaacgagaaguucgacaagcucuacaucuggggcguccugcaccccgggaccgacagcgaccagaucucccuguacgcgcaggccagcggccggaucaccgugagcacgaagcgcucccagcagaccgugaucccgaacaucggcagccggccccgcguccgggacguguccagccgcaucuccaucuacuggaccaucgugaagcccggggacauccuccugaucaacagcaccggcaaccugaucgcgccccggggguacuucaagauccgcuccggcaagagcuccaucaugcggagcgacgccccgaucggcaagugcaacuccgagugcaucacgcccaacgggagcauccccaacgacaagcccuuccagaacgucaaccgcaucaccuacggcgccugcccgcgguacgugaagcagaacacccucaagcuggccaccgggaugcgcaacgugcccgagaagcagacgcggggcaucuucggggccaucgccggcuucaucgagaacggcugggaggggauggucgacggcugguacggguuccgccaccagaacuccgagggcaccgggcaggccgccgaccugaaguccacccaggcggccaucaaccagaucaacggcaagcucaaccggcugaucggcaagaccaacgagaaguuccaccagaucgagaaggaguucuccgagguggaggggcgcauccaggaccuggagaaguacguggaggacacgaagaucgaccucuggagcuacaacgccgagcugcuggucgcccucgagaaccagcacaccaucgaccugaccgacuccgagaugaacaagcuguucgagcggaccaagaagcagcuccgcgagaacgccgaggacaugggcaacgggugcuucaagaucuaccacaagugcgacaacgcgugcaucggcagcauccgcaacgggacguacgaccacgacguguaccgggacgaggcccugaacaaccgcuuccagaucaagggcguggagcugaaguccggcuacaaggacuggauccucuggaucagcuucgccaucagcugcuuccugcugugcgucgcccuccugggguucaucaugugggccugccagaagggcaacauccggugcaacaucugcaucuga

SEQ ID NO: 72297 - RNA, 1701 nt, Artificial Sequence
  derived and/or modified CDS sequence (opt1) from hemagglutinin__InfluenzaA__AFD63703
augaagaccaucaucgcccugagcuacauccucugccugguguucgcccagaagcugcccggcaacgacaacuccaccgcgacgcucugccuggggcaccacgccgucccgaacggcaccaucgugaagaccaucaccaacgaccagaucgaggugacgaacgccaccgagcugguccagaucagcuccaccagcgggaucugcgacucccccuaccagauccucgacggcgagaacugcacccugaucgacgcccugcucggggacccccagugcgacggcuuccagaacaagaagugggaccuguucguggagcgcagcaaggccuacuccaacugcuaccccuacgacgugccggacuacgcgagccugcggucccucgucgccagcuccggcacgcuggaguucaacaacgagagcuucgacuggaccggggugacccagaacggcaccuccagcgccugcaagcgccgguccaacaagagcuucuucucccgccugaacuggcucacgcaccugaaguacaaguaccccgcccugaacgugaccaugcccaacaacgagaaguucgacaagcucuacaucuggggcguccaccaccccgggaccgacagcgaccagaucucccuguacgcgcaggccagcgggcggaucaccgugagcacgaagcgcucccagcagaccgugaucccgaacaucggcagccggccccgcguccgggacguguccagccagaucuccaucuacuggaccaucgugaagcccggcgacauccugcucaucaacagcaccgggaaccugaucgcgccccgcggcuacuucaagauccgguccggcaagagcuccaucaugcgcagcgacgccccgaucgggaagugcaacuccgagugcaucacgcccaacggcagcauccccaacgacaagcccuuccagaacgucaaccggaucaccuacggggccugcccgcgcuacgugaagcagaacacccugaagcucgccaccggcaugcggaacgugcccgagaagcagacgcgcgggaucuucggcgccaucgccggguucaucgagaacggcugggagggcauggucgacgggugguacggcuuccggcaccagaacuccgaggggaccggccaggccgccgaccucaagagcacccaggcggccaucaaccagaucaacgggaagcugaaccgccugaucggcaagaccaacgagaaguuccaccagaucgagaaggaguucuccgagguggagggccggauccaggaccuggagaaguacguggaggacacgaagaucgaccuguggagcuacaacgccgagcuccuggucgcccuggagaaccagcacaccaucgaccucaccgacuccgagaugaacaagcuguucgagcgcaccaagaagcagcugcgggagaacgccgaggacauggggaacggcugcuucaagaucuaccacaagugcgacaacgcgugcaucgggagcauccgcaacggcacguacgaccacgacguguaccgcgacgaggcccucaacaaccgguuccagaucaaggggguggagcugaaguccggcuacaaggacuggauccuguggaucagcuucgccaucagcugcuuccuccugugcgucgcccugcucggcuucaucaugugggccugccagaaggggaacauccgcugcaacaucugcaucuga

SEQ ID NO: 72298 - RNA, 1701 nt, Artificial Sequence
  derived and/or modified CDS sequence (opt1) from hemagglutinin__InfluenzaA__AFD63714
augaagaccaucaucgcccugagcuacauccucugccugguguucgcccagaagcugcccggcaacgacaacuccaccgcgacgcucugccuggggcaccacgccgucccgaacggcaccaucgugaagaccaucaccaacgaccagaucgaggugacgaacgccaccgagcugguccagaucagcuccaccgggggcaucugcgacagcccccaccagauccucgacggggagaacugcacccugaucgacgcccugcucggcgacccccagugcgacggcuuccagaacaagaagugggaccuguucguggagcgcuccaaggccuacagcaacugcuaccccuacgacgugccggacuacgcgucccugcggagccucgucgccuccagcgggacgcuggaguucaacaacgaguccuucgacuggaccggcgugacccagaacgggaccagcuccacgugcaagcgccggagcaacaaguccuucuucagccgccugaacuggcucacccaccugaaguacaaguaccccgcccugaacgugaccaugcccaacaacgagaaguucgacaagcucuacaucuggggcguccaccaccccgggaccgacaacgaccagaucucccuguacgcccaggcgagcggccggaucacgguguccaccaagcgcagccagcagaccgugaucccgaacaucggcagccggccccgcguccgggacguguccagccgcaucuccaucuacuggaccaucgugaagcccggggacauccugcucaucaacagcacgggcaaccugaucgcgccccggggguacuucaagauccgcuccggcaagagcuccaucaugcggagcgacgccccgaucggcaagugcaacuccgagugcaucacccccaacgggagcauccccaacgacaagcccuuccagaacgucaaccgcaucaccuacggcgccugcccgcgguacgugaagcagaacacccugaagcucgccacggggaugcgcaacgugcccgagaagcagacccggggcaucuucggggccaucgccggcuucaucgagaacggcugggaggggauggucgacggcugguacggguuccgccaccagaacuccgagggcaccgggcaggccgccgaccucaagagcacccaggccgcgaucaaccagaucaacggcaagcugaaccggcugaucggcaagacgaacgagaaguuccaccagaucgagaaggaguucuccgagguggaggggcgcauccaggaccuggagaaguacguggaggacaccaagaucgaccuguggagcuacaacgccgagcuccuggucgcccuggagaaccagcagaccaucgaccucaccgacuccgagaugaacaagcuguucgagcggacgaagaagcagcugcgcgagaacgccgaggacaugggcaacgggugcuucaagaucuaccacaagugcgacaacgccugcaucggcagcauccgcaacgggaccuacgaccacgacguguaccgggacgaggcgcucaacaaccgcuuccacaucaagggcguggagcugaaguccggcuacaaggacuggauccuguggaucagcuucgccaucuccugcuuccuccugugcgucgcccugcucggguucaucaugugggccugccagaagggcaacauccggugcaacaucugcaucuga

SEQ ID NO: 72299 - RNA, 1701 nt, Artificial Sequence
  derived and/or modified CDS sequence (opt1) from hemagglutinin__InfluenzaA__AFD63736
augaagaccaucaucgcccugagcuacauccucugccugguguucgcccagaagcugcccggcaacgacaacuccaccgcgacgcucugccuggggcaccacgccgucccgaacggcaccaucgugaagaccaucaccaacgaccagaucgaggugacgaacgccaccgagcugguccagaucagcuccaccgggggcaucugcgacagcccccaccagauccucgacggggagaacugcacccugaucgacgcccugcucggcgacccccagugcgacggcuuccagaacaagaagugggaccuguucguggagcgcuccaaggccuacagcaacugcuaccccuacgacgugccggacuacgcgucccugcggagccucgucgccuccagcgggacgcuggaguucaacaacgaguccuucgacuggaccggcgugacccagaacgggaccagcuccacgugcaagcgccggagcaacaaguccuucuucagccgccugaacuggcucacccaccugaaguacaaguaccccgcccugaacgugaccaugcccaacaacgagaaguucgacaagcucuacaucuggggcguccaccaccccgggaccgacaacgaccagaucucccuguacgcccaggcgagcggccggaucacgguguccaccaagcgcagccagcagaccgugaucccgaacaucggcagccggccccgcguccgggacguguccagccgcaucuccaucuacuggaccaucgugaagcccggggacauccugcucaucaacagcacgggcaaccugaucgcgccccggggguacuucaagauccgcuccggcaagagcuccaucaugcggagcgacgccccgaucggcaagugcaacuccgagugcaucacccccaacgggagcauccccaacgacaagcccuuccagaacgucaaccgcaucaccuacggcgccugcccgcgguacgugaagcagaacacccugaagcucgccacggggaugcgcaacgugcccgagaagcagacccggggcaucuucggggccaucgccggcuucaucgagaacggcugggaggggauggucgacggcugguacggguuccgccaccagaacuccgagggcaccgggcaggccgccgaccucaagagcacccaggccgcgaucaaccagaucaacggcaagcugaaccggcugaucggcaagacgaacgagaaguuccaccagaucgagaaggaguucuccgagguggaggggcgcauccaggaccuggagaaguacguggaggacaccaagaucgaccuguggagcuacaacgccgagcuccuggucgcccuggagaaccagcacaccaucgaccucaccgacuccgagaugaacaagcuguucgagcggacgaagaagcagcugcgcgagaacgccgaggacaugggcaacgggugcuucaagaucuaccacaagugcgacaacgccugcaucggcagcauccgcaacgggaccuacgaccacgacguguaccgggacgaggcgcucaacaaccgcuuccacaucaagggcguggagcugaaguccggcuacaaggacuggauccuguggaucagcuucgccaucuccugcuuccuccugugcgucgcccugcucggguucaucaugugggccugccagaagggcaacauccggugcaacaucugcaucuga

SEQ ID NO: 72300 - RNA, 1701 nt, Artificial Sequence
  derived and/or modified CDS sequence (opt1) from hemagglutinin__InfluenzaA__AFD63747
augaagaccaucaucgcccugagcuacauccucugccugguguucgcccagaagcugcccggcaacgacaacuccaccgcgacgcucugccuggggcaccacgccgucccgaacggcaccaucgugaagaccaucaccaacgaccagaucgaggugacgaacgccaccgagcugguccagagcuccagcaccgggggcaucugcgacagcccccaccagauccucgacggggagaacugcacccugaucgacgcccugcucggcgacccccagugcgacggcuuccagaacaagaagugggaccuguucguggagcgcagcaaggccuacuccaacugcuaccccuacgacgugccggacuacgcgagccugcggucccucgucgccagcuccgggacgcuggaguucaacaacgagagcuucgacuggaccggcgugacccagaacgggaccuccagcgccugcaagcgccgguccaacaagagcuucuucucccgccugaacuggcucacgcaccugaaguacaaguaccccgcccugaacgugaccaugcccaacaacgagaaguucgacaagcucuacaucuggggcguccaccaccccgggaccgacagcgaccagaucucccuguacgcgcaggccagcggccggaucaccgugagcacgaagcgcucccagcagaccgugaucccgaacaucggcagccggccccgcguccgggacguguccagccgcaucuccaucuacuggaccaucgugaagcccggggacauccugcucaucaacagcaccggcaaccugaucgcgccccggggguacuucaagauccgcuccggcaagagcuccaucaugcggagcgacgccccgaucggcaagugcaacuccgagugcaucacgcccaacgggagcauccccaacgacaagcccuuccagaacgucaaccgcaucaccuacggcgccugcccgcgguacgugaagcagaacacccugaagcucgccaccgggaugcgcaacgugcccgagaagcagacgcggggcaucuucggggccaucgccggcuucaucgagaacggcugggaggggauggucgacggcugguacggguuccgccaccagaacuccgagggcaccgggcaggccgccgaccugaaguccacccaggcggccaucaaccagaucaacggcaagcugaaccggcucaucggcaagaccaacgagaaguuccaccgcaucgagaaggaguucuccgagguggaggggcggauccaggaccuggagaaguacguggaggacacgaagaucgaccuguggagcuacaacgccgagcuccuggucgcccuggagaaccagcacaccaucgaccucaccgacuccgagaugaacaagcuguucgagcgcaccaagaagcagcugcgcgagaacgccgaggacaugggcaacgggugcuucaagaucuaccacaagugcgacaacgcgugcaucggcagcauccggaacgggacguacgaccacgacguguaccgcgacgaggcccucaacaaccgguuccagaucaagggcguggagcugaaguccggcuacaaggacuggauccuguggaucagcuucgccaucagcugcuuccuccugugcgucgcccugcucggguucaucaugugggccugccagaagggcaacauccgcugcaacaucugcaucuga

SEQ ID NO: 72301 - RNA, 1701 nt, Artificial Sequence
  derived and/or modified CDS sequence (opt1) from hemagglutinin__InfluenzaA__AFD63758
augaagaccaucaucgcccugagcuacauccucugccugguguucgcccagaagcugcccggcaacgacaacuccaccgcgacgcucugccuggggcaccacgccgucccgaacggcaccaucgugaagaccaucaccaacgaccagaucgaggugacgaacgccaccgagcugguccagagcuccagcaccgggggcaucugcgacagcccccaccagauccucgacggggagaacugcacccugaucgacgcccugcucggcgacccccagugcgacggcuuccagaacaagaagugggaccuguucguggagcgcagcaaggccuacuccaacugcuaccccuacgacgugccggacuacgcgagccugcggucccucgucgccagcuccgggacgcuggaguucaacaacgagagcuucaacuggaccggcgugacccagaacgggaccuccagcgccugcaagcgcaaguccaacaagagcuucuucucccggcugaacuggcucacgcaccugaaguacaaguaccccgcccugaacgugaccaugcccaacaacgagaaguucgacaagcucuacaucuggggcguccaccaccccgggaccgacaacgaccagaucagccuguacgcgcaggccuccggccgcaucaccgugagcacgaagcggagccagcagaccgugaucccgaacaucggcucccgcccccggguccgcgacgugagcucccggaucagcaucuacuggaccaucgugaagcccggggacauccugcucaucaacuccaccggcaaccugaucgcgccccgcggguacuucaagauccggagcggcaaguccagcaucaugcgcuccgacgccccgaucggcaagugcaacagcgagugcaucacgcccaacggguccauccccaacgacaagcccuuccagaacgucaaccggaucaccuacggcgccugcccgcgcuacgugaagcagaacacccugaagcucgccaccgggaugcggaacgugcccgagaagcagacgcgcggcaucuucggggccaucgccggcuucaucgagaacggcugggaggggauggucgacggcugguacggguuccggcaccagaacagcgagggcaccgggcaggccgccgaccugaaguccacccaggcggccaucaaccagaucaacggcaagcugaaccgccucaucggcaagaccaacgagaaguuccaccagaucgagaaggaguucagcgagguggaggggcggauccaggaccuggagaaguacguggaggacacgaagaucgaccugugguccuacaacgccgagcuccuggucgcccuggagaaccagcacaccaucgaccucaccgacagcgagaugaacaagcuguucgagcgcaccaagaagcagcugcgggagaacgccgaggacaugggcaacgggugcuucaagaucuaccacaagugcgacaacgcgugcaucggcuccauccgcaacgggacguacgaccacgacguguaccgcgacgaggcccucaacaaccgguuccagaucaagggcguggagcugaaguccggcuacaaggacuggauccuguggaucuccuucgccaucagcugcuuccuccugugcgucgcccugcucggguucaucaugugggccugccagaagggcaacauccgcugcaacaucugcaucuga

SEQ ID NO: 72302 - RNA, 1701 nt, Artificial Sequence
  derived and/or modified CDS sequence (opt1) from hemagglutinin__InfluenzaA__AFD63769
augaagaccaucaucgcccugagcuacauccucugccugguguucgcccagaagcugcccggcaacgacaacuccaccgcgacgcucugccuggggcaccacgccgucccgaacggcaccaucgugaagaccaucaccaacgaccagaucgaggugacgaacgccaccgagcugguccagaucagcuccaccgggggcaucugcgacagcccccaccagauccucgacggggagaacugcacccugaucgacgcccugcucggcgacccccagugcgacggcuuccagaacaagaagugggaccuguucguggagcgcuccaaggccuacagcaacugcuaccccuacgacgugccggacuacgcgucccugcggagccucgucgccuccagcgggacgcuggaguucaacaacgaguccuucgacuggaccggcgugacccagaacgggaccagcuccgccugcaagcgccggagcaacaaguccuucuucagccgccugaacuggcucacgcaccugaaguacaaguaccccgcccugaacgugaccaugcccaacaacgagaaguucgacaagcucuacaucuggggcguccaccaccccgggaccgacaacgaccagaucucccuguacgcgcaggccagcggccggaucaccguguccacgaagcgcagccagcagaccgugaucccgaacaucggcagccggccccgcguccgggacguguccagccgcaucuccaucuacuggaccaucgugaagcccggggacauccugcucaucaacagcaccggcaaccugaucgcgccccggggguacuucaagauccgcuccggcaagagcuccaucaugcggagcgacgccccgaucggcaagugcaacuccgagugcaucacgcccaacgggagcauccccaacgacaagcccuuccagaacgucaaccgcaucaccuacggcgccugcccgcgguacgugaagcagaacacccugaagcucgccaccgggaugcgcaacgugcccgagaagcagacgcggggcaucuucggggccaucgccggcuucaucgagaacggcugggaggggauggucgacggcugguacggguuccgccaccagaacuccgagggcaccgggcaggccgccgaccucaagagcacccaggcggccaucaaccagaucaacggcaagcugaaccggcugaucggcaagaccaacgagaaguuccaccagaucgagaaggaguucuccgagguggaggggcgcauccaggaccuggagaaguacguggaggacacgaagaucgaccuguggagcuacaacgccgagcuccuggucgcccuggagaaccagcacaccaucgaccucaccgacuccgagaugaacaagcuguucgagcggaccaagaagcagcugcgcgagaacgccgaggacaugggcaacgggugcuucaagaucuaccacaagugcgacaacgcgugcaucggcagcauccgcaacgggacguacgaccacgacguguaccgggacgaggcccucaacaaccgcuuccacaucaaguccguggagcucaagagcggcuacaaggacuggauccuguggaucuccuucgccaucagcugcuuccugcugugcgucgcccugcucggcuucaucaugugggccugccagaaggggaacauccggugcaacaucugcaucuga

SEQ ID NO: 72303 - RNA, 1701 nt, Artificial Sequence; identical to SEQ ID NO: 64097
  derived and/or modified CDS sequence (opt1) from hemagglutinin__InfluenzaA__AFD63780

SEQ ID NO: 72304 - RNA, 1701 nt, Artificial Sequence; identical to SEQ ID NO: 72301
  derived and/or modified CDS sequence (opt1) from hemagglutinin__InfluenzaA__AFD63791

SEQ ID NO: 72305 - RNA, 1701 nt, Artificial Sequence; identical to SEQ ID NO: 64097
  derived and/or modified CDS sequence (opt1) from hemagglutinin__InfluenzaA__AFD63802

SEQ ID NO: 72306 - RNA, 1701 nt, Artificial Sequence
  derived and/or modified CDS sequence (opt1) from hemagglutinin__InfluenzaA__AFD63813
augaagaccaucaucgcccugagcuacauccucucccugguguucgcccagaaguuccccggcaacgacaacagcaccgcgacgcugugccucgggcaccacgccgucccgaacggcaccaucgugaagaccaucaccaacgaccagaucgaggugacgaacgccaccgagcugguccagaucuccagcaccgggggcaucugcgacagcccccaccagauccuggacggggagaacugcacccucaucgacgcccugcugggcgacccccagugcgacggcuuccagaacaagaagugggaccucuucguggagcgcuccaaggccuacuccaacugcuaccccuacgacgugccggacuacgcgagccugcggucccuggucgccagcuccgggagccucgaguucaacaacgaguccuucgacuggacgggcgugacccagaacgggaccagcuccgccugcaagcgccggagcaacaaguccuucuucagccgccugaacuggcugacccaccucaaguacaaguaccccgcccugaacgugacgaugcccaacaacgagaaguucgacaagcuguacaucuggggcguccaccaccccgggaccgacuccgaccagaucagccucuacgcgcaggccagcggccggaucaccguguccaccaagcgcagccagcagacggugaucccgaacaucggcucccggccccgcguccgggacaucagcucccgcaucagcaucuacuggaccaucgugaagcccggggacauccugcugaucaacuccaccggcaaccucaucgcgccccggggguacuucaagauccgcagcggcaaguccagcaucaugcgguccgacgccccgaucggcaagugcaacagcgagugcaucacccccaacggguccauccccaacgacaagcccuuccagaacgugaaccgcaucacguacggcgccugcccgcgguacgucaagcagaacacccugaagcuggccaccgggaugcgcaacgugcccgagaagcagacccggggcaucuucggggccaucgccggcuucaucgagaacggcugggaggggaugguggacggcugguacggguuccgccaccagaacagcgagggcacggggcaggccgccgaccucaaguccacccaggcggccaucaaccagaucaacggcaagcugaaccggcugaucggcaagaccaacgagaaguuccaccagaucgagaaggaguucagcgaggucgaggggcgcauccaggaccucgagaaguacguggaggacaccaagaucgaccugugguccuacaacgccgagcugcucguggcccuggagaaccagcacacgaucgaccugaccgacagcgagaugaacaagcuguucgagcggaccaagaagcagcuccgcgagaacgccgaggacaugggcaacgggugcuucaagaucuaccacaagugcgacaacgcgugcaucggcuccauccgcaacgggaccuacgaccacgacgucuaccgggacgaggcccugaacaaccgcuuccagaucaagggcguggagcucaagagcggcuacaaggacuggauccuguggaucagcuucgccacguccugcuuccugcucugcguggcccugcugggguucaucaugugggccugccagaagggcaacauccggugcaacaucugcaucuga

SEQ ID NO: 72307 - RNA, 1701 nt, Artificial Sequence; identical to SEQ ID NO: 72291
  derived and/or modified CDS sequence (opt1) from hemagglutinin__InfluenzaA__AFD63824

SEQ ID NO: 72308 - RNA, 1701 nt, Artificial Sequence; identical to SEQ ID NO: 64097
  derived and/or modified CDS sequence (opt1) from hemagglutinin__InfluenzaA__AFD63846

SEQ ID NO: 72309 - RNA, 1701 nt, Artificial Sequence; identical to SEQ ID NO: 65335
  derived and/or modified CDS sequence (opt1) from hemagglutinin__InfluenzaA__AFD63857

SEQ ID NO: 72310 - RNA, 1701 nt, Artificial Sequence; identical to SEQ ID NO: 64097
  derived and/or modified CDS sequence (opt1) from hemagglutinin__InfluenzaA__AFD63868

SEQ ID NO: 72311 - RNA, 1701 nt, Artificial Sequence; identical to SEQ ID NO: 64097
  derived and/or modified CDS sequence (opt1) from hemagglutinin__InfluenzaA__AFD63890

SEQ ID NO: 72312 - RNA, 1701 nt, Artificial Sequence; identical to SEQ ID NO: 64097
  derived and/or modified CDS sequence (opt1) from hemagglutinin__InfluenzaA__AFD63901

SEQ ID NO: 72313 - RNA, 1701 nt, Artificial Sequence; identical to SEQ ID NO: 64097
  derived and/or modified CDS sequence (opt1) from hemagglutinin__InfluenzaA__AFD63912

SEQ ID NO: 72314 - RNA, 1701 nt, Artificial Sequence
  derived and/or modified CDS sequence (opt1) from hemagglutinin__InfluenzaA__AFD63923
augaagaccaucaucgcccugagcuacauccucugccugguguucgcccagaagcugcccggcaacgacaacuccaccgcgacgcucugccuggggcaccacgccgucccgaacggcaccaucgugaagaccaucaccaacgaccagaucgaggugacgaacgccaccgagcugguccagagcuccagcaccgggggcaucugcgacagcccccaccagauccucgacggggagaacugcacccugaucgacgcccugcucggcgacccccagugcgacggcuuccagaacaagaagugggaccuguucguggagcgcagcaaggccuacuccaacugcuaccccuacgacgugccggacuacgcgagccugcggucccucgucgccagcuccgggacgcuggaguucaacaacgagagcuucaacuggaccggcgugacccagaacgggaccuccagcgccugcaagcgcaaguccaacaagagcuucuucucccggcugaacuggcucacgcaccugaaguacaaguaccccgcccugaacgugaccaugcccaacaacgagaaguucgacaagcucuacaucuggggcguccaccaccccgggaccgacaacgaccagaucagccuguacgcgcaggccuccggccgcaucaccgugagcacgaagcggagccagcagaccgugaucccgaacaucggcucccgcccccggguccgcgacaucagcucccggaucagcaucuacuggaccaucgugaagcccggggacauccugcucaucaacuccaccggcaaccugaucgcgccccgcggguacuucaagauccggagcggcaaguccagcaucaugcgcuccgacgccccgaucggcaagugcaacagcgagugcaucacgcccaacggguccauccccaacgacaagcccuuccagaacgugaaccggaucaccuacggcgccugcccgcgcuacgucaagcagaacacccugaagcucgccaccgggaugcggaacgugcccgagaagcagacgcgcggcaucuucggggccaucgccggcuucaucgagaacggcugggaggggaugguggacggcugguacggguuccggcaccagaacagcgagggcaccgggcaggccgccgaccugaaguccacccaggcggccaucaaccagaucaacggcaagcugaaccgccucaucggcaagaccaacgagaaguuccaccagaucgagaaggaguucagcgaggucgaggggcggauccaggaccuggagaaguacguggaggacacgaagaucgaccugugguccuacaacgccgagcuccugguggcccuggagaaccagcacaccaucgaccucaccgacagcgagaugaacaagcuguucgagcgcaccaagaagcagcugcgggagaacgccgaggacaugggcaacgggugcuucaagaucuaccacaagugcgacaacgcgugcaucggcuccauccgcaacgggacguacgaccacgacgucuaccgcgacgaggcccucaacaaccgguuccagaucaagggcguggagcugaaguccggcuacaaggacuggauccuguggaucuccuucgccaucagcugcuuccuccugugcguggcccugcucggguucaucaugugggccugccagaagggcaacauccgcugcaacaucugcaucuga

SEQ ID NO: 72315 - RNA, 1701 nt, Artificial Sequence
  derived and/or modified CDS sequence (opt1) from hemagglutinin__InfluenzaA__AFD63934
augaagaccaucaucgcccugagcuacauccucugccugguguucgcccagaagcugcccggcaacgacaacuccaccgcgacgcucugccuggggcaccacgccgucccgaacggcaccaucgugaagaccaucaccaacgaccagaucgaggugacgaacgccaccgagcugguccagagcuccagcaccgggggcaucugcgacagcccccaccagauccucgacggggagaacugcacccugaucgacgcccugcucggcgacccccagugcgacggcuuccagaacaagaagugggaccuguucguggagcgcagcaaggccuacuccaacugcuaccccuacgacgugccggacuacgcgagccugcggucccucgucgccagcuccgggacgcuggaguucaacaacgagagcuucgacuggaccggcgugacccagaacgggaccuccagcgccugcaagcgccgguccaacaagagcuucuucucccgccugaacuggcucacgcaccugaaguacaaguaccccgcccugaacgugaccaugcccaacaacgagaaguucgacaagcucuacaucuggggcguccaccaccccgggaccgagagcgaccagaucucccuguacgcgcaggccagcggccggaucaccgugagcacgaagcgcucccagcagaccgugaucccgaacaucggcagccggccccgcguccgggacguguccagccgcaucuccaucuacuggaccguggucaagcccggggacauccugcucaucaacagcaccggcaaccugaucgcgccccggggguacuucaagauccgcuccggcaagagcuccaucaugcggagcgacgccccgaucggcaagugcaacuccgagugcaucacgcccaacgggagcauccccaacgacaagcccuuccagaacgugaaccgcaucaccuacggcgccugcccgcgguacgugaagcagaacacccugaagcucgccaccgggaugcgcaacguccccgagaagcagacgcggggcaucuucggggccaucgccggcuucaucgagaacggcugggaggggaugguggacggcugguacggguuccgccaccagaacuccgagggcaccgggcaggccgccgaccugaaguccacccaggcggccaucaaccagaucaacggcaagcugaaccggcucaucggcaagaccaacgagaaguuccaccagaucgagaaggaguucuccgagguggaggggcgcauccaggaccuggagaaguacgucgaggacacgaagaucgaccuguggagcuacaacgccgagcuccugguggcccuggagaaccagcacaccaucgaccucaccgacuccgagaugaacaagcuguucgagcggaccaagaagcagcugcgcgagaacgccgaggacaugggcaacgggugcuucaagaucuaccacaagugcgacaacgcgugcaucggcagcauccgcaacgggacguacgaccacgacguguaccgggacgaggcccucaacaaccgcuuccagaucaagggcgucgagcugaaguccggcuacaaggacuggauccuguggaucagcuucgccaucagcugcuuccuccugugcguggcccugcucggguucaucaugugggccugccagaagggcaacauccggugcaacaucugcaucuga

SEQ ID NO: 72316 - RNA, 1701 nt, Artificial Sequence; identical to SEQ ID NO: 72291
  derived and/or modified CDS sequence (opt1) from hemagglutinin__InfluenzaA__AFD63945

SEQ ID NO: 72317 - RNA, 1701 nt, Artificial Sequence; identical to SEQ ID NO: 72291
  derived and/or modified CDS sequence (opt1) from hemagglutinin__InfluenzaA__AFD63956

SEQ ID NO: 72318 - RNA, 1701 nt, Artificial Sequence; identical to SEQ ID NO: 72291
  derived and/or modified CDS sequence (opt1) from hemagglutinin__InfluenzaA__AFD63967

SEQ ID NO: 72319 - RNA, 1701 nt, Artificial Sequence; identical to SEQ ID NO: 64097
  derived and/or modified CDS sequence (opt1) from hemagglutinin__InfluenzaA__AFD63989

SEQ ID NO: 72320 - RNA, 1701 nt, Artificial Sequence; identical to SEQ ID NO: 64097
  derived and/or modified CDS sequence (opt1) from hemagglutinin__InfluenzaA__AFD64000

SEQ ID NO: 72321 - RNA, 1701 nt, Artificial Sequence
  derived and/or modified CDS sequence (opt1) from hemagglutinin__InfluenzaA__AFD64011
augaagaccaucaucgcccugagcuacauccucugccugguguucgcccagaagcugcccggcaacgacaacuccaccgcgacgcucugccuggggcaccacgccgucccgaacggcaccaucgugaagaccaucaccaacgaccagaucgaggugacgaacgccaccgagcugguccagagcuccagcaccgggggcaucugcgacagcccccaccagauccucgacggggagaacugcacccugaucgacgcccugcucggcgacccccagugcgacggcuuccagaacaagaagugggaccuguucguggagcgcagcaaggccuacuccaacugcuaccccuacgacgugccggacuacgcgagccugcggucccucgucgccagcuccgggacgcuggaguucaacaacgagagcuucgacuggaccggcgugacccagaacgggaccuccagcgccugcaagcgccgguccaacaagagcuucuucucccgccugaacuggcucacgcaccugaaguacaaguaccccgcccugaacgugaccaugcccaacaacgagaaguucgacaagcucuacaucuggggcguccaccaccccgggaccgacagcgaccagaucucccuguacgcgcaggccccgggcaagaucaccgugagcacgaagcggagccagcagaccgugauccccaacaucggcucccgcccccggguccgcgacgugagcucccggaucagcaucuacuggaccaucgugaagcccggggacauccugcucaucaacuccaccggcaaccugaucgccccgcgcggguacuucaagauccggagcggcaaguccagcaucaugcgcuccgacgcccccaucggcaagugcaacagcgagugcaucacgcccaacggguccauccccaacgacaagccguuccagaacgucaaccggaucaccuacggcgccugcccccgcuacgugaagcagaacacccugaagcucgcgaccgggaugcggaacgugcccgagaagcagacgcgcggcaucuucggggccaucgccggcuucaucgagaacggcugggaggggauggucgacggcugguacggguuccggcaccagaacagcgagggcaccgggcaggccgccgaccugaaguccacccaggcggccaucaaccagaucaacggcaagcugaaccgccucaucggcaagaccaacgagaaguuccaccagaucgagaaggaguucagcgagguggaggggcggauccaggaccuggagaaguacguggaggacacgaagaucgaccugugguccuacaacgccgagcuccuggucgcccuggagaaccagcacaccaucgaccucaccgacagcgagaugaacaagcuguucgagcgcaccaagaagcagcugcgggagaacgccgaggacaugggcaacgggugcuucaagaucuaccacaagugcgacaacgcgugcaucggcuccauccgcaacgggacguacgaccacgacguguaccgcgacgaggcccucaacaaccgguuccagaucaagggcguggagcugaaguccggcuacaaggacuggauccuguggaucuccuucgccaucagcugcuuccuccugugcgucgcccugcucggguucaucaugugggccugccagaagggcaacauccgcugcgacaucugcaucuga

SEQ ID NO: 72322 - RNA, 1701 nt, Artificial Sequence; identical to SEQ ID NO: 64097
  derived and/or modified CDS sequence (opt1) from hemagglutinin__InfluenzaA__AFD64022

SEQ ID NO: 72323 - RNA, 1701 nt, Artificial Sequence; identical to SEQ ID NO: 64097
  derived and/or modified CDS sequence (opt1) from hemagglutinin__InfluenzaA__AFD64033

SEQ ID NO: 72324 - RNA, 1701 nt, Artificial Sequence
  derived and/or modified CDS sequence (opt1) from hemagglutinin__InfluenzaA__AFD64044
augaagaccaucaucgcccugagcuacauccucugccugguguucgcccagaagcugcccggcaacgagaacuccaccgcgacgcucugccuggggcaccacgccgucccgaacggcaccaucgugaagaccaucaccaacgaccagaucgaggugacgaacgccaccgagcugguccagagcuccagcaccgggggcaucugcgacagcccccaccagauccucgacggggagaacugcacccugaucgacgcccugcucggcgacccccagugcgacggcuuccagaacaagaagugggaccuguucguggagcgcagcaaggccuacuccaacugcuaccccuacgacgugccggacuacgcgagccugcggucccucgucgccagcuccgggacgcuggaguucaacaacgagagcuucgacuggaccggcgugacccagaacgggaccuccagcgccugcaagcgccgguccaacaagagcuucuucucccgccugaacuggcucacgcaccugaaguacaaguaccccgcccugaacgugaccaugcccaacaacgagaaguucgacaagcucuacaucuggggcguccaccaccccgggaccgacagcgaccagaucucccuguacgcgcaggccagcggccggaucaccgugagcacgaagcgcucccagcagaccgugaucccgaacaucggcagccggccccgcguccgggacguguccagccgcaucuccaucuacuggaccaucgugaagcccggggacauccugcucaucaacagcaccggcaaccugaucgcgccccggggguacuucaagauccgcuccggcaagagcuccaucaugcggagcgacgccccgaucggcaagugcaacuccgagugcaucacgcccaacgggagcauccccaacgacaagcccuuccagaacgucaaccgcaucaccuacggcgccugcccgcgguacgugaagcagaacacccugaagcucgccaccgggaugcgcaacgugcccgagaagcagacgcggggcaucuucggggccaucgccggcuucaucgagaacggcugggaggggauggucgacggcugguacggguuccgccaccagaacuccgagggcaccgggcaggccgccgaccugaaguccacccaggcggccaucaaccagaucaacggcaagcugaaccggcucaucggcaagaccaacgagaaguuccaccagaucgagaaggaguucuccgagguggaggggcgcauccaggaccuggagaaguacguggaggacacgaagaucgaccuguggagcuacaacgccgagcuccuggucgcccuggagaaccagcacaccaucgaccucaccgacuccgagaugaacaagcuguucgagcggaccaagaagcagcugcgcgagaacgccgaggacaugggcaacgggugcuucaagaucuaccacaagugcgacaacgcgugcaucggcagcauccgcaacgggacguacgaccacgacguguaccgggacgaggcccucaacaaccgcuuccagaucaagggcguggagcugaaguccggcuacaaggacuggauccuguggaucagcuucgccaucagcugcuuccuccugugcgucgcccugcucggguucaucaugugggccugccagaagggcaacauccggugcaacaucugcaucuga

SEQ ID NO: 72325 - RNA, 1701 nt, Artificial Sequence; identical to SEQ ID NO: 72301
  derived and/or modified CDS sequence (opt1) from hemagglutinin__InfluenzaA__AFD64055

SEQ ID NO: 72326 - RNA, 1701 nt, Artificial Sequence
  derived and/or modified CDS sequence (opt1) from hemagglutinin__InfluenzaA__AFD64066
augaagaccaucaucgcccugagcuacauccucugccugguguucgcccagaagcugcccggcaacgacaacuccaccgcgacgcucugccuggggcaccacgccgucccgaacggcaccaucgugaagaccaucaccaacgaccagaucgaggugacgaacgccaccgagcugguccagagcuccagcaccgggggcaucugcgacagcccccaccagauccucgacggggagaacugcacccugaucgacgcccugcucggcgacccccagugcgacggcuuccagaacaagaagugggaccuguucguggagcgcagcaaggccuacuccaacugcuaccccuacgacgugccggacuacacgagccugcggucccucgucgcgagcuccgggacccuggaguucaacaacgagagcuucaacuggaccggcgugacccagaacgggacguccagcgccugcaagcgccgguccaacaagagcuucuucucccgccugaacuggcucacccaccugaaguucaaguaccccgcccugaacgugaccaugcccaacaacgagaaguucgacaagcucuacaucuggggcguccaccaccccgggaccgacaacgaccagaucagccuguacgcccaggcguccggccggaucacggugagcaccaagcgcagccagcagaccgugaucccgaacaucggcucccggccccgcguccgggacgugcccagccgcaucuccaucuacuggaccaucgugaagcccggggacauccugcucaucaacagcacgggcaaccugaucgccccgcggggguacuucaagauccgcuccggcaagagcuccaucaugcggagcgacgcccccaucggcaagugcaacuccgagugcaucacccccaacgggagcauccccaacgacaagccguuccagaacgucaaccgcaucaccuacggcgccugcccccgguacgugaagcagaacacccugaagcucgccacggggaugcgcaacgugcccgagaagcagacccggggcaucuucggggcgaucgccggcuucaucgagaacggcugggaggggauggucgacggcugguacggguuccgccaccagaacgccgagggcaccgggcaggccgccgaccugaaguccacccaggcggccaucaaccagaucaacggcaagcugaaccggcucaucggcaagacgaacgagaaguuccaccagaucgagaaggaguucagcgagguggaggggcgcauccaggaccuggagaaguacguggaggacaccaagaucgaccugugguccuacaacgccgagcuccuggucgcccuggagaaccagcacaccaucgaccucaccgacagcgagaugaacaagcuguucgagcggacgaagaagcagcugcgcgagaacgccgaggacaugggcaacgggugcuucaagaucuaccacaagugcgacaacgcgugcaucggcuccauccgcaacgggaccuacgaccacgacguguaccgggacgaggcccucaacaaccgcuuccagaucaagggcguggagcugaaguccggcuacaagaacuggauccuguggaucuccuucgccaucagcugcuuccuccugugcgucgcccugcucggguucaucaugugggccugccagaagggcaacauccggugcaacaucugcaucuga

SEQ ID NO: 72327 - RNA, 1701 nt, Artificial Sequence
  derived and/or modified CDS sequence (opt1) from hemagglutinin__InfluenzaA__AFD64077
augaagaccaucaucgcccugagcuacauccucugccugguguucgcccagaagcugcccggcaacgacaacuccaccgcgacgcucugccuggggcaccacgccgucccgaacggcaccaucgugaagaccaucaccaacgaccagaucgaggugacgaacgccaccgagcugguccagaucagcuccaccggggagaucugcgacagcccccaccagauccucgacggcgagaacugcacccugaucgacgcccugcucggggacccccagugcgacggcuuccagaacaagaagugggaccuguucguggagcgcuccaaggccuacagcaacugcuaccccuacgacgugccggacuacgcgucccugcggagccucgucgccuccagcggcacgcuggaguucaacaacgaguccuucgacuggaccggggugacccagaacggcaccagcuccgccugcaagcgccggagcaacaaguccuucuucagccgccugaacuggcucacgcaccugaaguacaaguaccccgcccugaacgugaccaugcccaacaacgagaaguucgacaagcucuacaucuggggcguccaccaccccgggaccgacuccgaccagaucagccuguacgcgcaggccuccgggcggaucaccgugagcacgaagcgcagccagcagaccgugaucccgaacaucggcucccggccccgcauccgggacgucagcucccgcaucagcaucuacuggaccaucgugaagcccggcgacauccugcucaucaacuccaccgggaaccugaucgcgccccggggcuacuucaagauccgcagcgggaaguccagcaucaugcgguccgacgccccgaucggcaagugcaacagcgagugcaucacgcccaacggcuccauccccaacgacaagcccuuccagaacgugaaccgcaucaccuacggggccugcccgcgguacgucaagcagaacacccugaagcucgccaccggcaugcgcaacgugcccgagaagcagacgcgggggaucuucggcgccaucgccggguucaucgagaacggcugggagggcaugguggacgggugguacggcuuccgccaccagaacagcgaggggaccggccaggccgccgaccugaaguccacccaggcggccaucaaccagaucaacgggaagcugaaccggcucaucggcaagaccaacgagaaguuccaccagaucgagaaggaguucagcgaggucgagggccgcauccaggaccuggagaaguacguggaggacacgaagaucgaccugugguccuacaacgccgagcuccugguggcccuggagaaccagcacaccaucgaccucaccgacagcgagaugaacaagcuguucgagcggaccaagaagcagcugcgcgagaacgccgaggacauggggaacggcugcuucaagaucuaccacaagugcgacaacgcgugcaucggguccauccgcaacggcacguacgaccacgacgucuaccgggacgaggcccucaacaaccgcuuccagaucaaggggguggagcucaagagcggcuacaaggacuggauccuguggaucuccuucgccaucagcugcuuccugcugugcguggcccugcucggcuucaucaugugggccugccagaaggggaacauccggugcaacaucugcaucuga

SEQ ID NO: 72328 - RNA, 1701 nt, Artificial Sequence; identical to SEQ ID NO: 64097
  derived and/or modified CDS sequence (opt1) from hemagglutinin__InfluenzaA__AFD64088

SEQ ID NO: 72329 - RNA, 1701 nt, Artificial Sequence; identical to SEQ ID NO: 64097
  derived and/or modified CDS sequence (opt1) from hemagglutinin__InfluenzaA__AFD64099

SEQ ID NO: 72330 - RNA, 1701 nt, Artificial Sequence; identical to SEQ ID NO: 72301
  derived and/or modified CDS sequence (opt1) from hemagglutinin__InfluenzaA__AFD64110

SEQ ID NO: 72331 - RNA, 1701 nt, Artificial Sequence
  derived and/or modified CDS sequence (opt1) from hemagglutinin__InfluenzaA__AFD64121
augaagaccaucaucgcccugagcuacauccucugccugguguucgcccagaagcugcccggcaacgacaacuccaccgcgacgcucugccuggggcaccacgccgucccgaacggcaccaucgugaagaccaucaccaacgaccagaucgaggugacgaacgccaccgagcugguccagagcuccagcaccgggggcaucugcgacagcccccaccagauccucgacggggagaacugcacccugaucgacgcccugcucggcgacccccagugcgacggcuuccagaacaagaagugggaccuguucguggagcgcagccgggccuacuccaacugcuaccccuacgacgugccggacuacgcgagccugcgcucccucgucgccagcuccgggacgcuggaguucaacaacgagagcuucaacuggaccggcgugacccagaacgggaccuccagcgccugcaagcggaaguccaacaagagcuucuucucccgccugaacuggcucacgcaccugaaguacaaguaccccgcccugaacgugaccaugcccaacaacgagaaguucgacaagcucuacaucuggggcguccaccaccccgggaccgacaacgaccagaucagccuguacgcgcaggccuccggccggaucaccgugagcacgaagcgcagccagcagaccgugaucccgaacaucggcucccggccccgcguccgggacgugagcucccgcaucagcaucuacuggaccaucgugaagcccggggacauccugcucaucaacuccaccggcaaccugaucgcgccccggggguacuucaagauccgcagcggcaaguccagcaucaugcgguccgacgccccgaucggcaagugcaacagcgagugcaucacgcccaacggguccauccccaacgacaagcccuuccagaacgucaaccgcaucaccuacggcgccugcccgcgguacgugaagcagaacacccugaagcucgccaccgggaugcgcaacgugcccgagaagcagacgcggggcaucuucggggccaucgccggcuucaucgagaacggcugggaggggauggucgacggcugguacggguuccgccaccagaacagcgagggcaccgggcaggccgccgaccugaaguccacccaggcggccaucaaccagaucaacggcaagcugaaccggcucaucggcaagaccaacgagaaguuccaccagaucgagaaggaguucagcgagguggaggggcgcauccaggaccuggagaaguacguggaggacacgaagaucgaccugugguccuacaacgccgagcuccuggucgcccuggagaaccagcacaccaucgaccucaccgacagcgagaugaacaagcuguucgagcggaccaagaagcagcugcgcgagaacgccgaggacaugggcaacgggugcuucaagaucuaccacaagugcgacaacgcgugcaucggcuccauccgcaacgggacguacgaccacgacguguaccgggacgaggcccucaacaaccgcuuccagaucaagggcguggagcugaaguccggcuacaaggacuggauccuguggaucuccuucgccaucagcugcuuccuccugugcgucgcccugcucggguucaucaugugggccugccagaagggcaacauccggugcaacaucugcaucuga

SEQ ID NO: 72332 - RNA, 1701 nt, Artificial Sequence; identical to SEQ ID NO: 64097
  derived and/or modified CDS sequence (opt1) from hemagglutinin__InfluenzaA__AFD64132

SEQ ID NO: 72333 - RNA, 1701 nt, Artificial Sequence; identical to SEQ ID NO: 72291
  derived and/or modified CDS sequence (opt1) from hemagglutinin__InfluenzaA__AFD64143

SEQ ID NO: 72334 - RNA, 1701 nt, Artificial Sequence; identical to SEQ ID NO: 64097
  derived and/or modified CDS sequence (opt1) from hemagglutinin__InfluenzaA__AFD64154

SEQ ID NO: 72335 - RNA, 1701 nt, Artificial Sequence
  derived and/or modified CDS sequence (opt1) from hemagglutinin__InfluenzaA__AFD64179
augaagaccaucaucgcccugagcuacauccucugccugguguucgcccagaagcugcccggcaacgacaacuccaccgcgacgcucugccuggggcaccacgccgucccgaacggcaccaucgugaagaccaucaccaacgaccagaucgaggugacgaacgccaccgagcugguccagaucagcuccaccgggggcaucugcgacagcccccaccagauccucgacggggagaacugcacccugaucgacgcccugcucggcgacccccagugcgacggcuuccagaacaagaagugggaccuguucguggagcgcuccaaggccuacagcaacugcuaccccuacgacgugccggacuacgcgucccugcggagccucgucgccuccagcgggacgcuggaguucaacaacgaguccuucgacuggaccggcgugacccagaacgggaccagcuccgccugcaagcgccggagcaacaaguccuucuucagccgccugaacuggcucacgcaccugaaguacaaguaccccgcccugaacgugaccaugcccaacaacgagaaguucgacaagcucuacaucuggggcguccaccaccccgggaccgacuccgaccagaucagccuguacgcgcaggccuccggccggaucaccgugagcacgaagcgcagccagcagaccgugaucccgaacaucggcucccggccccgcguccgggacgugagcucccagaucagcaucuacuggaccaucgugaagcccggggacauccugcucaucaacuccaccggcaaccugaucgcgccccgcggguacuucaagauccggagcggcaaguccagcaucaugcgcuccgacgccccgaucggcaagugcaacagcgagugcaucacgcccaacggguccauccccaacgacaagcccuuccagaacgucaaccggaucaccuacggcgccugcccgcgcuacgugaagcagaacacccugaagcucgccaccgggaugcggaacgugcccgagaagcagacgcgcggcaucuucggggccaucgccggcuucaucgagaacggcugggaggggauggucgacggcugguacggguuccggcaccagaacagcgagggcaccgggcaggccgccgaccugaaguccacccaggcggccaucaaccagaucaacggcaagcugaaccgccucaucggcaagaccaacgagaaguuccaccagaucgagaaggaguucagcgagguggaggggcggauccaggaccuggagaaguacguggaggacacgaagaucgaccugugguccuacaacgccgagcuccuggucgcccuggagaaccagcacaccaucgaccucaccgacagcgagaugaacaagcuguucgagcgcaccaagaagcagcugcgggagaacgccgaggacaugggcaacgggugcuucaagaucuaccacaagugcgacaacgcgugcaucggcuccauccgcaacgggacguacgaccacgacguguaccgcgacgaggcccucaacaaccgguuccagaucaagggcguggagcucaagagcggcuacaaggacuggauccuguggaucuccuucgccaucagcugcuuccugcugugcgucgcccugcucggguucaucaugugggccugccagaagggcaacauccgcugcaacaucugcaucuga

SEQ ID NO: 72336 - RNA, 1701 nt, Artificial Sequence; identical to SEQ ID NO: 72335
  derived and/or modified CDS sequence (opt1) from hemagglutinin__InfluenzaA__AFD64190

SEQ ID NO: 72337 - RNA, 1701 nt, Artificial Sequence; identical to SEQ ID NO: 72291
  derived and/or modified CDS sequence (opt1) from hemagglutinin__InfluenzaA__AFD64201

SEQ ID NO: 72338 - RNA, 1701 nt, Artificial Sequence; identical to SEQ ID NO: 72301
  derived and/or modified CDS sequence (opt1) from hemagglutinin__InfluenzaA__AFD64212

SEQ ID NO: 72339 - RNA, 1701 nt, Artificial Sequence
  derived and/or modified CDS sequence (opt1) from hemagglutinin__InfluenzaA__AFD64223
augaagaccaucaucgcccugagcuacauccucugccugguguucgcccagaagcugcccggcaacgacaacuccaccgcgacgcucugccuggggcaccacgccgucccgaacggcaccaucgugaagaccaucaccaacgaccagaucgaggugacgaacgccaccgagcugguccagagcuccagcaccgggggcaucugcgacagcccccaccagauccucgacggggagaacugcacccugaucgacgcccugcucggcgacccccagugcgacggcuuccagaacaagaagugggaccuguucguggagcgcagcaaggccuacuccaacugcuaccccuacgacgugccggacuacgcgagccugcggucccucgucgccagcuccgggacgcuggaguucaacaacgagagcuucaacuggaccggcgugacccagaacgggaccuccagcgccugcaagcgccgguccaacaagagcuucuucucccgccugaacuggcucacgcaccugaaguacaaguaccccgcccugaacgugaccaugcccaacaacgagaaguucgacaagcucuacaucuggggcguccugcaccccgggaccgacagcgaccagauccggcuguacgcgcaggccuccggccgcaucaccgugagcacgaagcggagccagcagaccgugaucccgaacaucggcucccgcccccggguccgcgacgugagcucccggaucagcaucuacuggaccaucgugaagcccggggacauccuccugaucaacuccaccggcaaccugaucgcgccccgcggguacuucaagauccggagcggcaaguccagcaucaugcgcuccgacgccccgaucggcaagugcaacagcgagugcaucacgcccaacggguccauccccaacgacaagcccuuccagaacgucaaccggaucaccuacggcgccugcccgcgcuacaucaagcagaacacccucaagcuggccaccgggaugcggaacgugcccgagaagcagacgcgcggcaucuucggggccaucgccggcuucaucgagaacggcugggaggggaugguggacggcugguacggguuccggcaccagaacagcgagggcaccgggcaggccgccgaccugaaguccacccaggcggccaucaaccagaucaacggcaagcucaaccgccugaucggcaagaccaacgagaaguuccaccagaucgagaaggaguucagcgaggucgaggggcggauccaggaccuggagaaguacguggaggacacgaagaucgaccucugguccuacaacgccgagcugcugguggcccucgagaaccaguacaccaucgaccugaccgacagcgagaugaacaagcuguucgagcgcaccaagaagcagcuccgcgagaacgccgaggacaugggcaacgggugcuucaagaucuaccacaagugcgacaacgcgugcaucggcuccauccggaacgggacguacgaccacgacgucuaccgcgacgaggcccugaacaaccgguuccagaucaagggcguggagcugaaguccggcuacaaggacuggauccucuggaucuccuucgccaucagcugcuuccugcugugcguggcccuccugggguucaucaugugggccugccagaagggcaacauccgcugcaacaucugcaucuga

SEQ ID NO: 72340 - RNA, 1701 nt, Artificial Sequence
  derived and/or modified CDS sequence (opt1) from hemagglutinin__InfluenzaA__AFD64315
augaagaccaucaucgcccugagcuacauccucugccugguguucgcccagaagcugcccggcaacgacaacuccaccgcgacgcucugccuggggcaccacgccgucccgaacggcaccaucgugaagaccaucaccaacgaccagaucgaggugacgaacgccaccgagcugguccagaucagcuccaccgggggcaucugcgacagcccccaccagauccucgacggggagaacugcacccugaucgacgcccugcucggcgacccccagugcgacggcuuccagaacaagaagugggaccuguucguggagcgcuccaaggccuacagcaacugcuaccccuacgacgugccggacuacgcgucccugcggagccucgucgccuccagcgggacgcuggaguucaacaacgaguccuucgacuggaccggcgugacccagaacgggaccagcuccgccugcaagcgccggagcaacaaguccuucuucagccgccugaacuggcucacgcaccugaaguacaaguaccccgcccugaacgugaccaugcccaacaacgagaaguucgacaagcucuacaucuggggcguccaccaccccgggaccgacuccgaccagaucagccuguacgcgcaggccuccggccggaucaccgugagcacgaagcgcagccagcagaccgugaucccgaacaucggcucccggccccgcguccgggacgugagcucccgcaucagcaucuacuggaccaucgugaagcccggggacauccugcucaucaacuccaccggcaaccugaucgcgccccggggguacuucaagauccgcagcggcaaguccagcaucaugcgguccgacgccccgaucggcaagugcaacagcgagugcaucacgcccaacggguccauccccaacgacaagcccuuccagaacgucaaccgcaucaccuacggcgccugcccgcgguacgugaagcagaacacccugaagcucgccaccgggaugcgcaacgugcccgagaagcagacgcggggcaucuucggggccaucgccggcuucaucgagaacggcugggaggggauggucgacggcugguacggguuccgccaccagaacagcgagggcaccgggcaggccgccgaccugaaguccacccaggcggccaucaaccagaucaacggcaagcugaaccggcucaucggcaagaccaacgagaaguuccaccagaucgagaaggaguucagcgagguggaggggcgcauccaggaccuggagaaguacguggaggacacgaagaucgaccugugguccuacaacgccgagcuccuggucgcccuggagaaccagcacaccaucgaccucaccgacagcgagaugaacaagcuguucgagcggaccaagaaccagcugcgcgagaacgccgaggacaugggcaacgggugcuucaagaucuaccacaagugcgacaacgcgugcaucggcuccauccgcaacgggacguacgaccacgacguguaccgggacgaggcccucaacaaccgcuuccagaucaagggcguggagcucaagagcggcuacaaggacuggauccuguggaucuccuucgccaucagcugcuuccugcugugcgucgcccugcucggguucaucaugugggccugccagaagggcaacauccggugcaacaucugcaucuga

SEQ ID NO: 72341 - RNA, 1701 nt, Artificial Sequence; identical to SEQ ID NO: 72331
  derived and/or modified CDS sequence (opt1) from hemagglutinin__InfluenzaA__AFD64326

SEQ ID NO: 72342 - RNA, 1701 nt, Artificial Sequence; identical to SEQ ID NO: 72301
  derived and/or modified CDS sequence (opt1) from hemagglutinin__InfluenzaA__AFD64337

SEQ ID NO: 72343 - RNA, 1701 nt, Artificial Sequence; identical to SEQ ID NO: 64097
  derived and/or modified CDS sequence (opt1) from hemagglutinin__InfluenzaA__AFD64348

SEQ ID NO: 72344 - RNA, 1701 nt, Artificial Sequence; identical to SEQ ID NO: 72301
  derived and/or modified CDS sequence (opt1) from hemagglutinin__InfluenzaA__AFD64359

SEQ ID NO: 72345 - RNA, 1701 nt, Artificial Sequence
  derived and/or modified CDS sequence (opt1) from hemagglutinin__InfluenzaA__AFD64370
augaagaccaucaucgcccugagcuacauccucugccugguguucgcccagaagcugcccggcaacgacaacuccaccgcgacgcucugccuggggcaccacgccgucccgaacggcaccaucgugaagaccaucaccaacgaccagaucgaggugacgaacgccaccgagcugguccagagcuccagcaccgggggcaucugcgacagcccccaccagauccucgacggggagaacugcacccugaucgacgcccugcucggcgacccccacugcgacggcuuccagaacaagaagugggaccuguucguggagcgcagcaaggccuacuccaacugcuaccccuacgacgugccggacuacgcgagccugcggucccucgucgccagcuccgggacgcuggaguucaacaacgagagcuucaacuggaccggcgugacccagaacgggaccuccagcgccugcaagcgcaaguccaacaagagcuucuucucccggcugaacuggcucacgcaccugaaguacaaguaccccgcccugaacgugaccaugcccaacaacgagaaguucgacaagcucuacaucuggggcguccaccaccccgggaccgacaacgaccagaucagccuguacgcgcaggccuccggccgcaucaccgugagcacgaagcggagccagcagaccgugaucccgaacaucggcucccgcccccggguccgcgacaucagcucccggaucagcaucuacuggaccaucgugaagcccggggacauccugcucaucaacuccaccggcaaccugaucgcgccccgcggguacuucaagauccggagcggcaaguccagcaucaugcgcuccgacgccccgaucggcaagugcaacagcgagugcaucacgcccaacggguccauccccaacgacaagcccuuccagaacgugaaccggaucaccuacggcgccugcccgcgcuacgucaagcagaacacccugaagcucgccaccgggaugcggaacgugcccgagaagcagacgcgcggcaucuucggggccaucgccggcuucaucgagaacggcugggaggggaugguggacggcugguacggguuccggcaccagaacagcgagggcaccgggcaggccgccgaccugaaguccacccaggcggccaucaaccagaucaacggcaagcugaaccgccucaucggcaagaccaacgagaaguuccaccagaucgagaaggaguucagcgaggucgaggggcggauccaggaccuggagaaguacguggaggacacgaagaucgaccugugguccuacaacgccgagcuccugguggcccuggagaaccagcacaccaucgaccucaccgacagcgagaugaacaagcuguucgagcgcaccaagaagcagcugcgggagaacgccgaggacaugggcaacgggugcuucaagaucuaccacaagugcgacaacgcgugcaucggcuccauccgcaacgggacguacgaccacgacgucuaccgcgacgaggcccucaacaaccgguuccagaucaagggcguggagcugaaguccggcuacaaggacuggauccuguggaucuccuucgccaucagcugcuuccuccugugcguggcccugcucggguucaucaugugggccugccagaagggcaacauccgcugcaacaucugcaucuga

SEQ ID NO: 72346 - RNA, 1701 nt, Artificial Sequence; identical to SEQ ID NO: 64097
  derived and/or modified CDS sequence (opt1) from hemagglutinin__InfluenzaA__AFD64381

SEQ ID NO: 72347 - RNA, 1701 nt, Artificial Sequence; identical to SEQ ID NO: 72301
  derived and/or modified CDS sequence (opt1) from hemagglutinin__InfluenzaA__AFD64392

SEQ ID NO: 72348 - RNA, 1701 nt, Artificial Sequence; identical to SEQ ID NO: 72291
  derived and/or modified CDS sequence (opt1) from hemagglutinin__InfluenzaA__AFD64403

SEQ ID NO: 72349 - RNA, 1701 nt, Artificial Sequence; identical to SEQ ID NO: 72291
  derived and/or modified CDS sequence (opt1) from hemagglutinin__InfluenzaA__AFD64414

SEQ ID NO: 72350 - RNA, 1701 nt, Artificial Sequence
  derived and/or modified CDS sequence (opt1) from hemagglutinin__InfluenzaA__AFD64425
augaagaccaucaucgcccugagcuacauccucugccugguguucgcccagaagcugcccggcaacgacaacuccaccgcgacgcucugccuggggcaccacgccgucccgaacggcaccaucgugaagaccaucaccaacgaccagaucgaggugacgaacgccaccgagcugguccagaucagcuccaccgggggcaucugcgacagcccccaccagauccucgacggggagaacugcacccugaucgacgcccugcucggcgacccccagugcgacggcuuccagaacaagaagugggaccuguucguggagcgcuccaaggccuacagcaacugcuaccccuacgacgugccgaacuacgcgucccugcggagccucgucgccuccagcgggacgcuggaguucaacaacgaguccuucgacuggaccggcgugacccagaacgggaccagcuccgccugcaagcgccggagcaacaaguccuucuucagccgccugaacuggcucacgcaccugaaguacaaguaccccgcccugaacgugaccaugcccaacaacgagaaguucgacaagcucuacaucuggggcguccaccaccccgggaccgacuccgaccagaucagccuguacgcgcaggccuccggccggaucaccgugagcacgaagcgcagccagcagaccgugaucccgaacaucggcucccggccccgcguccgggacgugagcucccgcaucagcaucuacuggaccaucgugaagcccggggacauccugcucaucaacuccaccggcaaccugaucgcgccccggggguacuucaagauccgcagcggcaaguccagcaucaugcgguccgacgccccgaucggcaagugcaacagcgagugcaucacgcccaacggguccauccccaacgacaagcccuuccagaacgucaaccgcaucaccuacggcgccugcccgcgguacgugaagcagaacacccugaagcucgccaccgggaugcgcaacgugcccgagaagcagacgcggggcaucuucggggccaucgccggcuucaucgagaacggcugggaggggauggucgacggcugguacggguuccgccaccagaacagcgagggcaccgggcaggccgccgaccugaaguccacccaggcggccaucaaccagaucaacggcaagcugaaccggcucaucggcaagaccaacgagaaguuccaccagaucgagaaggaguucagcgagguggaggggcgcauccaggaccuggagaaguacguggaggacacgaagaucgaccugugguccuacaacgccgagcuccuggucgcccuggagaaccagcacaccaucgaccucaccgacagcgagaugaacaagcuguucgagcggaccaagaagcagcugcgcgagaacgccgaggacaugggcaacgggugcuucaagaucuaccacaagugcgacaacgcgugcaucggcuccauccgcaacgggacguacgaccacaacguguaccgggacgaggcccucaacaaccgcuuccagaucaagggcguggagcucaagagcggcuacaaggacuggauccuguggaucuccuucgccaucagcugcuuccugcugugcgucgcccugcucggguucaucaugugggccugccagaagggcaacauccggugcaacaucugcaucuga

SEQ ID NO: 72351 - RNA, 1701 nt, Artificial Sequence; identical to SEQ ID NO: 64097
  derived and/or modified CDS sequence (opt1) from hemagglutinin__InfluenzaA__AFD64436

SEQ ID NO: 72352 - RNA, 1701 nt, Artificial Sequence; identical to SEQ ID NO: 64097
  derived and/or modified CDS sequence (opt1) from hemagglutinin__InfluenzaA__AFD64447

SEQ ID NO: 72353 - RNA, 1701 nt, Artificial Sequence
  derived and/or modified CDS sequence (opt1) from hemagglutinin__InfluenzaA__AFD64458
augaagaccaucaucgcccugagcuacauccucugccugguguucgcccagaagcugcccggcaacgacaacuccaccgcgacgcucugccuggggcaccacgccguccagaacggcaccaucgugaagaccaucaccaacgaccagaucgaggugacgaacgccaccgagcugguccagagcuccagcaccgggggcaucugcgacuccccgcaccagauccucgacggggagaacugcacccugaucgacgcccugcucggcgacccccagugcgacggcuuccagaacaagaagugggaccuguucguggagcgcagcaaggccuacuccaacugcuaccccuacgacgugcccgacuacgcgagccugcggucccucgucgccagcuccgggacgcuggaguucaacaacgagagcuucgacuggaccggcgugacccagaacgggaccuccagcgccugcaagcgccgguccaacaagagcuucuucucccgccugaacuggcucacgcaccugaaguacaaguacccggcccugaacgugaccaugcccaacaacgagaaguucgacaagcucuacaucuggggcguccaccaccccgggaccgacagcgaccagaucucccuguacgcgcaggccagcggccggaucaccgugagcacgaagcgcucccagcagaccgugauccccaacaucggcagccggccgcgcguccgggacguguccagccgcaucuccaucuacuggaccaucgugaagcccggggacauccugcucaucaacagcaccggcaaccugaucgcgccccggggguacuucaagauccgcuccggcaagagcuccaucaugcggagcgacgcccccaucggcaagugcaacuccgagugcaucacgccgaacgggagcauccccaacgacaagcccuuccagaacgucaaccgcaucaccuacggcgccugcccccgguacgugaagcagaacacccugaagcucgccaccgggaugcgcaacgugccggagaagcagacgcggggcaucuucggggccaucgccggcuucaucgagaacggcugggaggggauggucgacggcugguacggguuccgccaccagaacuccgagggcaccgggcaggccgccgaccucaagagcacccaggcggccaucaaccagaucaacggcaagcugaaccggcugaucggcaagaccaacgagaaguuccaccagaucgagaaggaguucuccgagguggaggggcgcauccaggaccuggagaaguacguggaggacacgaagaucgaccuguggagcuacaacgccgagcuccuggucgcccuggagaaccagcacaccaucgaccucaccgacuccgagaugaacaagcuguucgagcggaccaagaagcagcugcgcgagaacgccgaggacaugggcaacgggugcuucaagaucuaccacaagugcgacaacgcgugcaucggcagcauccgcaacgggacguacgaccacgacguguaccgggacgaggcccucaacaaccgcuuccagaucaagggcguggagcugaaguccggcuacaaggacuggauccuguggaucagcuucgccaucagcugcuuccuccugugcgucgcccugcucggguucaucaugugggccugccagaagggcaacauccggugcaacaucugcaucuga

SEQ ID NO: 72354 - RNA, 1701 nt, Artificial Sequence; identical to SEQ ID NO: 70879
  derived and/or modified CDS sequence (opt1) from hemagglutinin__InfluenzaA__AFD64795

SEQ ID NO: 72355 - RNA, 1701 nt, Artificial Sequence; identical to SEQ ID NO: 71006
  derived and/or modified CDS sequence (opt1) from hemagglutinin__InfluenzaA__AFD64799

SEQ ID NO: 72356 - RNA, 1701 nt, Artificial Sequence
  derived and/or modified CDS sequence (opt1) from hemagglutinin__InfluenzaA__AFD64802
augaagaccaucaucgcccugagcuacauccucugccugguguucgcccagaagcugcccggcaacgacaacuccaccgcgacgcucugccuggggcaccacgccgucccgaacggcaccaucgugaagaccaucaccaacgaccagaucgaggugacgaacgccaccgagcugguccagagcuccagcaccggggagaucugcaacagcccccaccagauccucgacggcgagaacugcacccugaucgacgcccugcucggggacccccagugcgacggcuuccagaacaagaagugggaccuguucguggagcgcagcaaggcccacuccaacugcuaccccuacgacgugccggacuacgcgagccugcggucccucgucgccagcuccggcacgcuggaguucaacaacgagagcuucaacuggaccggggugacccagaacggcaccuccagcgccugcauccgccgguccaacaacagcuucuucucccgccugaacuggcucacgcaccugaacuucaaguaccccgcccugaacgugaccaugcccaacaacgagcaguucgacaagcucuacaucuggggcguccaccaccccgggaccgacaaggaccagaccuuccuguacgcgcaggccagcgggcggaucacgguguccaccaagcgcagccagcaggccgugaucccgaacaucggcagccggccccgcguccggaacauccccucccgcgugagcaucuacuggaccaucgugaagcccggcgacauccugcucaucaacuccaccgggaaccugaucgccccgcggggcuacuucaagauccgcagcgggaaguccagcaucaugcgguccgacgcccccaucggcaagugcaacagcgcgugcaucacgcccaacggcuccauccccaacgacaagccguuccagaacgucaaccgcaucaccuacggggccugcccccgguacgugaagcagaacacccugaagcucgccaccggcaugcgcaacgugcccgagaagcagacgcgggggaucuucggcgccaucgccggguucaucgagaacggcugggagggcauggucgacgggugguacggcuuccgccaccagaacagcgaggggcggggccaggcggccgaccugaaguccacccaggccgccaucgaccagaucaacgggaagcugaaccgccucaucggcaagaccaacgagaaguuccaccagaucgagaaggaguucagcgagguggagggccggauccaggaccuggagaaguacguggaggacaccaagaucgaccugugguccuacaacgccgagcuccuggucgcgcuggagaaccagcacacgaucgaccucaccgacagcgagaugaacaagcuguucgagaagaccaagaagcagcugcgcgagaacgccgaggacauggggaacggcugcuucaagaucuaccacaagugcgacaacgccugcaucggguccauccgcaacggcaccuacgaccacgacguguaccgggacgaggcccucaacaaccgcuuccagaucaaggggguggagcugaaguccgaguacaaggacuggauccuguggaucuccuucgccaucagcugcuuccuccugugcgucgcgcugcucggcuucaucaugugggccugccagaagggcaacauccggugcaacaucugcaucuga

SEQ ID NO: 72357 - RNA, 1701 nt, Artificial Sequence
  derived and/or modified CDS sequence (opt1) from hemagglutinin__InfluenzaA__AFD64804
augaagaccaucaucgcccugagcuacauccucugccugguguucgcccagaagcugcccggcaacgacaacuccaccgcgacgcucugccuggggcaccacgccgucccgaacggcaccaucgugaagaccaucaccaacgaccagaucgaggugacgaacgccaccgagcugguccagagcuccagcaccggggagaucugcaacagcccccaccagauccucgacggcgagaacugcacccugaucgacgcccugcucggggacccccagugcgacggcuuccagaacaagaagugggaccuguucguggagcgcagcaaggcccacuccaacugcuaccccuacgacgugccggacuacgcgagccugcggucccucgucgccagcuccggcacgcuggaguucaacaacgagagcuucaacuggaccggggugacccagaacggcaccuccagcgccugcauccgccgguccaacaacagcuucuucucccgccugaacuggcucacgcaccugaacuucaaguaccccgcccugaacgugaccaugcccaacaacgagcaguucgacaagcucuacaucuggggcguccaccaccccgggaccgacaaggaccagaucuuccuguacgcgcaggccagcgggcggaucaccguguccacgaagcgcagccagcaggccgugaucccgaacaucggcagccggccccgcguccggaacauccccucccgcgugagcaucuacuggaccaucgugaagcccggcgacauccugcucaucaacuccaccgggaaccugaucgccccgcggggcuacuucaagauccgcagcgggaaguccagcaucaugcgguccgacgcccccaucggcaagugcaacagcgcgugcaucacccccaacggcuccauccccaacgacaagccguuccagaacgucaaccgcaucacguacggggccugcccccgguacgugaagcagaacacccugaagcucgccaccggcaugcgcaacgugcccgagaagcagacccgggggaucuucggcgccaucgccggguucaucgagaacggcugggagggcaugauggacgggugguacggcuuccgccaccagaacagcgaggggcggggccaggcggccgaccugaaguccacgcaggccgccaucgaccagaucaacgggaagcugaaccgccucaucggcaagaccaacgagaaguuccaccagaucgagaaggaguucagcgaggucgagggccggauccaggaccuggagaaguacguggaggacaccaagaucgaccugugguccuacaacgccgagcuccugguggcgcuggagaaccagcacaccaucgaccucacggacagcgagaugaacaagcuguucgagaagaccaagaagcagcugcgcgagaacgccgaggacauggggaacggcugcuucaagaucuaccacaagugcgacaacgccugcaucggguccauccgcaacggcaccuacgaccacgacgucuaccgggacgaggcccucaacaaccgcuuccagaucaaggggguggagcugaaguccggcuacaaggacuggauccuguggaucuccuucgccaucagcugcuuccuccugugcguggcgcugcucggcuucaucaugugggccugccagaaggggaacauccggugcaacaucugcaucuga

SEQ ID NO: 72358 - RNA, 1701 nt, Artificial Sequence
  derived and/or modified CDS sequence (opt1) from hemagglutinin__InfluenzaA__AFD64806
augaagaccaucaucgcccugagcuacauccucugccugguguucgcccagaagcugcccggcaacgacaacuccaccgcgacgcucugccuggggcaccacgccgucccgaacggcaccaucgugaagaccaucaccaacgaccagaucgaggugacgaacgccaccgagcugguccagagcuccagcaccggggagaucugcaacagcccccaccagauccucgacggcgagaacugcacccugaucgacgcccugcucggggacccccagugcgacggcuuccagaacaagaagugggaccuguucguggagcgcagcaaggcccacuccaacugcuaccccuacgacgugccggacuacgcgagccugcggucccucgucgccagcuccggcacgcuggaguucaacaacgagagcuucaacuggaccggggugacccagaacggcaccuccagcgccugcauccgccgguccaacaacagcuucuucucccgccugaacuggcucacgcaccugaacuucaaguaccccgcccugaacgugaccaugcccaacaacgagcaguucgacaagcucuacaucuggggcguccaccaccccgggaccgacaaggaccagaccuuccuguacgcgcaggccagcgggcggaucacgguguccaccaagcgcagccagcaggccgugaucccgaacaucggcagccggccccgcguccggaacauccccucccgcgugagcaucuacuggaccaucgugaagcccggcgacauccugcucaucaacuccaccgggaaccugaucgccccgcggggcuacuucaagauccgcagcgggaaguccagcaucaugcgguccgacgcccccaucggcaagugcaacagcgcgugcaucacgcccaacggcuccauccccaacgacaagccguuccagaacgucaaccgcaucaccuacggggccugcccccgguacgugaagcagaacacccugaagcucgccaccggcaugcgcaacgugcccgagaagcagacgcgggggaucuucggcgccaucgccggguucaucgagaacggcugggagggcauggucgacgggugguacggcuuccgccaccagaacagcgaggggcggggccaggcggccgaccugaaguccacccaggccgccaucgaccagaucaacgggaagcugaaccgccucaucggcaagaccaacgagaaguuccaccagaucgagaaggaguucagcgagguggagggccggauccaggaccuggagaaguacguggaggacaccaagaucgaccugugguccuacaacgccgagcuccuggucgcgcuggagaaccagcacacgaucgaccucaccgacagcgagaugaacaagcuguucgagaagaccaagaagcagcugcgcgagaacgccgaggacauggggaacggcugcuucaagaucuaccacaagugcgacaacgccugcaucggguccauccgcaacggcaccuacgaccacgacguguaccgggacgaggcccucaacaaccgcuuccagaucaaggggguggagcugaaguccggcuacaaggacuggauccuguggaucuccuucgccaucagcugcuuccuccugugcgucgcgcugcucggcuucaucaugugggccugccagaaggggaacauccggugcaacaucugcaucuga

SEQ ID NO: 72359 - RNA, 1701 nt, Artificial Sequence
  derived and/or modified CDS sequence (opt1) from hemagglutinin__InfluenzaA__AFD64807
augaagaccaucaucgcccugagcuacauccucugccugguguucgcccagaagcugcccggcaacgacaacuccaccgcgacgcucugccuggggcaccacgccgucccgaacggcaccaucgugaagaccaucaccaacgaccagaucgaggugacgaacgccaccgagcugguccagagcuccagcaccggggagaucugcaacagcccccaccagauccucgacggcgagaacugcacccugaucgacgcccugcucggggacccccagugcgacggcuuccagaacaagaagugggaccuguucguggagcgcagcaaggcccacuccaacugcuaccccuacgacgugccggacuacgcgagccugcggucccucgucgccagcuccggcacgcuggaguucaacaacgagagcuucaacuggaccggggugacccagaacggcaccuccagcgccugcauccgccgguccaacaacagcuucuucucccgccugaacuggcucacgcaccugaacuucaaguaccccgcccugaacgugaccaugcccaacaacgagcaguucgacaagcucuacaucuggggcguccaccaccccgggaccgacaaggaccagaccuuccuguacgcgcaggccagcgggcggaucacgguguccaccaagcgcagccagcaggccgugaucccgaacaucggcagccggccccgcguccgggacauccccucccgcgugagcaucuacuggaccaucgugaagcccggcgacauccugcucaucaacuccaccgggaaccugaucgccccgcggggcuacuucaagauccgcagcgggaaguccagcaucaugcgguccgacgcgccccugggcaagugccacagcgccugcaucacgcccaacggcuccauccccaacgacaagccguuccagaacgucaaccgcaucaccuacggggccugcccccgguacgugaagcagaacacccucaagcuggccaccggcaugcgcaacgugcccgagaagcagacgcgggggaucuucggcgccaucgccggguucaucgagaacggcugggagggcauggucgacgggugguacggcuuccgccaccagaacagcgaggggcggggccaggcggccgaccugaaguccacccaggccgccaucgaccagaucaacgggaagcucaaccgccugaucggcaagaccaacgagaaguuccaccagaucgagaaggaguucagcgagguggagggccggauccaggaccuggagaaguacguggaggacaccaagaucgaccucugguccuacaacgccgagcugcuggucgcgcucgagaaccagcacacgaucgaccugaccgacagcgagaugaacaagcuguucgagaagaccaagaagcagcuccgcgagaacgccgaggacauggggaacggcugcuucaagaucuaccacaagugcgacaacgccugcaucggguccauccgcaacggcaccuacgaccacgacauguaccgggacgaggcccugaacaaccgcuuccagaucaaggggguggagcugaaguccggcuacaaggacuggauccucuggaucuccuucgccaucagcugcuuccugcugugcguggcgcuccugggcuucaucaugugggccugccagaaggggaacauccggugcaacaucugcaucuga

SEQ ID NO: 72360 - RNA, 1701 nt, Artificial Sequence
  derived and/or modified CDS sequence (opt1) from hemagglutinin__InfluenzaA__AFD64810
augaagaccaucaucgcccugagcuacauccucugccugguguucgcccagaagcugcccggcaacgacaacuccaccgcgacgcucugccuggggcaccacgccgucccgaacggcaccaucgugaagaccaucaccaacgaccagaucgaggugacgaacgccaccgagcugguccagagcuccagcaccggggagaucugcaacagcccccaccagauccucgacggcgagaacugcacccugaucgacgcccugcucggggacccccagugcgacggcuuccagaacaagaagugggaccuguucguggagcgcagcaaggcccacuccaacugcuaccccuacgacgugccggacuacgcgagccugcggucccucgucgccagcuccggcacgcuggaguucaacaacgagagcuucaacuggaccggggugacccagaacggcaccuccagcgccugcauccgccgguccaacaacagcuucuucucccgccugaacuggcucacgcaccugaacuucaaguaccccgcccugaacgugaccaugcccaacaacgagcaguucgacaagcucuacaucuggggcguccaccaccccgggaccgacaaggaccagaucuuccuguacgcgcaggccagcgggcggaucaccguguccacgaagcgcagccagcaggccgugaucccgaacaucggcagccggccccgcguccggaacauccccucccgcgugagcaucuacuggaccaucgugaagcccggcgacauccugcucaucaacuccaccgggaaccugaucgccccgcggggcuacuucaagauccgcagcgggaaguccagcaucaugcgguccgacgcccccaucggcaagugcaacagcgcgugcaucacccccaacggcuccauccccaacgacaagccguuccagaacgucaaccgcaucacguacggggccugcccccgguacgugaagcagaacacccugaagcucgccaccggcaugcgcaacgugcccgagaagcagacccgggggaucuucggcgccaucgccggguucaucgagaacggcugggagggcauggucgacgggugguacggcuuccgccaccagaacagcgaggggcggggccaggcggccgaccugaaguccacgcaggccgccaucgaccagaucaacgggaagcugaaccgccucaucggcaagaccaacgagaaguuccaccagaucgagaaggaguucagcgagguggagggccggauccaggaccuggagaaguacguggaggacaccaagaucgaccugugguccuacaacgccgagcuccuggucgcgcuggagaaccagcacaccaucgaccucacggacagcgagaugaacaagcuguucgagaagaccaagaagcagcugcgcgagaacgccgaggacauggggaacggcugcuucaagaucuaccacaagugcgacaacgccugcaucggguccauccgcaacggcaccuacgaccccgacguguaccgggacgaggcccucaacaaccgcuuccagaucaaggggguggagcugaaguccggcuacaaggacuggauccuguggaucuccuucgccaucagcugcuuccuccugugcgucgcgcugcucggcuucaucaugugggccugccagaaggggaacauccggugcaacaucugcaucuga

SEQ ID NO: 72361 - RNA, 1701 nt, Artificial Sequence
  derived and/or modified CDS sequence (opt1) from hemagglutinin__InfluenzaA__AFD64812
augaagaccaucaucgcccugagcuacauccucugccugguguucgcccagaagcugcccggcaacgacaacuccaccgcgacgcucugccuggggcaccacgccgucccgaacggcaccaucgugaagaccaucaccaacgaccagaucgaggugacgaacgccaccgagcugguccagagcuccagcaccggggagaucugcaacagcccccaccagauccucgacggcgagaacugcacccugaucgacgcccugcucggggacccccagugcgacggcuuccagaacaagaagugggaccuguucguggagcgcagcaaggcccacuccaacugcuaccccuacgacgugccggacuacgcgagccugcggucccucgucgccagcuccggcacgcuggaguucaacaacgagagcuucaacuggaccggggugacccagaacggcaccuccagcgccugcauccgccgguccaacaacagcuucuucucccgccugaacuggcucacgcaccugaacuucaaguaccccgcccugaacgugaccaugcccaacaacgagcaguucgacaagcucuacaucuggggcguccaccaccccgggaccgacaaggaccagaccuuccuguacgcgcaggccagcgggcggaucacgguguccaccaagcgcagccagcaggccgugaucccgaacaucggcagccggccccgcguccggaacauccccucccgcgugagcaucuacuggaccaucgugaagcccggcgacauccugcucaucaacuccaccgggaaccugaucgccccgcggggcuacuucaagauccgcagcgggaaguccagcaucaugcgguccgacgcccccaucggcaagugcaacagcgcgugcaucacgcccaacggcuccauccccaacgacaagccguuccagaacgucaaccgcaucaccuacggggccugcccccgguacgugaagcagaacacccugaagcucgccaccggcaugcgcaacgugcccgagaagcagacgcgggggaucuucggcgccaucgccggguucaucgagaacggcugggagggcauggucgacgggugguacggcuuccgccaccagaacagcgaggggcggggccaggcggccgaccugaaguccacccaggccgccaccgaccagaucaacgggaagcugaaccgccucaucggcaagaccaacgagaaguuccaccagaucgagaaggaguucagcgagguggagggccggauccaggaccuggagaaguacguggaggacacgaagaucgaccugugguccuacaacgccgagcuccuggucgcgcuggagaaccagcacaccaucgaccucaccgacagcgagaugaacaagcuguucgagaagaccaagaagcagcugcgcgagaacgccgaggacauggggaacggcugcuucaagaucuaccacaagugcgacaacgccugcaucggguccauccgcaacggcacguacgaccacgacguguaccgggacgaggcccucaacaaccgcuuccagaucaaggggguggagcugaaguccggcuacaaggacuggauccuguggaucuccuucgccaucagcugcuuccuccugugcgucgcgcugcucggcuucaucaugugggccugccagaaggggaacauccggugcaacaucugcaucuga

SEQ ID NO: 72362 - RNA, 1701 nt, Artificial Sequence
  derived and/or modified CDS sequence (opt1) from hemagglutinin__InfluenzaA__AFD64814
augaagaccaucaucgcccugagcuacauccucugccugguguucgcccagaagcugcccggcaacgacaacuccaccgcgacgcucugccuggggcaccacgccgucccgaacggcaccaucgugaagaccaucaccaacgaccagaucgaggugacgaacgccaccgagcugguccagagcuccagcaccggggagaucugcaacagcccccaccagauccucgacggcgagaacugcacccugaucgacgcccugcucggggacccccagugcgacggcuuccagaacaagaagugggaccuguucguggagcgcagcaaggcccacuccaacugcuaccccuacgacgugccggacuacgcgagccugcggucccucgucgccagcuccggcacgcuggaguucaacaacgagagcuucaacuggaccggggugacccagaacggcaccuccagcgccugcauccgccgguccaacaacagcuucuucucccgccugaacuggcucacgcaccugaacuucaaguaccccgcccugaacgugaccaugcccaacaacgagcaguucgacaagcucuacaucuggggcguccaccaccccgggaccgacaaggaccagaccuuccuguacgcgcaggccagcgggcggaucacgguguccaccaagcgcagccagcaggccgugaucccgaacaucggcagccggccccgcguccggaacauccccucccgcgugagcaucuacuggaccaucgugaagcccggcgacauccugcucaucaacuccaccgggaaccugaucgccccgcggggcuacuucaagauccgcagcgggaaguccagcaucaugcgguccgacgcccccaucggcaagugcaacagcgcgugcaucacgcccaacggcuccauccccaacgacaagccguuccagaacgucaaccgcaucaccuacggggccugcccccgguacgugaagcagaacacccugaagcucgccaccggcaugcgcaacgugcccgagaagcagacgcgggggaucuucggcgccaucgccggguucaucgagaacggcugggagggcauggucgacgggugguacggcuuccgccaccagaacagcgaggggcggggccaggcggccgaccugaaguccacccaggccgccaucgaccagaucaacgggaagcugaaccgccucaucggcaagaccaacgagaaguuccaccagaucgagaaggaguucagcgagguggagggccggauccaggaccuggagaaguacguggaggacaccaagaucgaccugugguccuacaacgccgagcuccuggucgcgcuggagaaccagcacacgaucgaccucaccgacagcgagaugaacaagcuguucgagaagaccaagaagcagcugcgcgagaacgccgaggacauggggaacggcugcuucaagaucuaccacaagugcgacaacgccugcaucggguccauccgcaacggcaccuacgaccccgacguguaccgggacgaggcccucaacaaccgcuuccagaucaaggggguggagcugaaguccggcuacaaggacuggauccuguggaucuccuucgccaucagcugcuuccuccugugcgucgcgcugcucggcuucaucaugugggccugccagaaggggaacauccggugcaacaucugcaucuga

SEQ ID NO: 72363 - RNA, 1701 nt, Artificial Sequence
  derived and/or modified CDS sequence (opt1) from hemagglutinin__InfluenzaA__AFD64816
augaagaccaucaucgcccugagcuacauccucugccugguguucgcccagaagcugcccgagaacgacaacuccaccgcgacgcucugccugggccaccacgccgucccgaacgggaccaucgugaagaccaucaccaacgaccagaucgaggugacgaacgccaccgagcugguccagagcuccagcaccggcgagaucugcaacagcccccaccagauccucgacggggagaacugcacccugaucgacgcccugcucggcgacccccagugcgacggguuccagaacaagaagugggaccuguucguggagcgcagcaaggcccacuccaacugcuaccccuacgacgugccggacuacgcgagccugcggucccucgucgccagcuccggcacgcuggaguucaacaacgagagcuucaacuggaccggcgugacccagaacgggaccuccagcgccugcaugcgccgguccaacaacagcuucuucucccgccugaacuggcucacgcaccugaacuucaaguaccccgcccugaacgugaccaugcccaacaacgagcaguucgacaagcucuacaucuggggcguccaccaccccgggaccgacaaggaccagaucuuccuguacgcgcaggccagcggccggaucaccguguccacgaagcgcagccagcaggccgugaucccgaacaucgggagccggccccgcguccggaacauccccucccgcgugagcaucuacuggaccaucgugaagcccggcgacauccugcucaucaacuccaccggcaaccugaucgccccgcggggguacuucaagauccgcagcggcaaguccagcaucaugcgguccgacgcccccaucgggaagugcaacagcgcgugcaucacccccaacggcuccauccccaacgacaagccguuccagaacgucaaccgcaucacguacggcgccugcccccgguacgugaagcagaacacccugaagcucgccaccgggaugcgcaacgugcccgagaagcagacccggggcaucuucggggccaucgccggcuucaucgagaacgggugggagggcauggucgacggcugguacggguuccgccaccagaacagcgagggccgggggcaggcggccgaccugaaguccacgcaggccgccaucgaccagaucaacggcaagcugaaccgccucaucgggaagaccaacgagaaguuccaccagaucgagaaggaguucagcgagguggagggccggauccaggaccuggagaaguacguggaggacaccaagaucgaccugugguccuacaacgccgagcuccuggucgcgcuggagaaccagcacaccaucgaccucacggacagcgagaugaacaagcuguucgagaagaccaagaagcagcugcgcgagaacgccgaggacaugggcaacgggugcuucaagaucuaccacaagugcgacaacgccugcaucggcuccauccgcaacgggaccuacgaccacgacguguaccgggacgaggcccucaacaaccgcuuccagaucaagggcguggagcugaaguccggguacaaggacuggauccuguggaucuccuucgccaucagcugcuuccuccugugcgucgcgcugcucggcuucaucaugugggccugccagaagggcaacauccggugcaacaucugcaucuga

SEQ ID NO: 72364 - RNA, 1701 nt, Artificial Sequence
  derived and/or modified CDS sequence (opt1) from hemagglutinin__InfluenzaA__AFD64818
augaagaccaucaucgcccugagcuacauccucugccugguguucgcccagaagcugcccggcaacgacaacuccaccgcgacgcucugccuggggcaccacgccgucccgaacggcaccaucgugaagaccaucaccaacgaccagaucgaggugacgaacgccaccgagcugguccagagcuccagcaccggggagaucugcaacagcccccaccagauccucgacggcgagaacugcacccugaucgacgcccugcucggggacccccagugcgacggcuuccagaacaagaagugggaccuguucguggagcgcagcaaggcccacuccaacugcuaccccuacgacgugccggacuacgcgagccugcggucccucgucgccagcuccggcacgcuggaguucaacaacgagagcuucaacuggaccggggugacccagaacggcaccuccagcgccugcauccgccgguccaacaacagcuucuucucccgccugaacuggcucacgcaccugaacuucaaguaccccgcccugaacgugaccaugcccaacaacgagcaguucgacaagcucuacaucuggggcguccaccaccccgggaccgacaaggaccagaccuuccuguacgcgcaggccagcgggcggaucacgguguccaccaagcgcagccagcaggccgugaucccgaacaucggcagccggccccgcguccggaacauccccucccgcgugagcaucuacuggaccaucgugaagcccggcgacauccugcucaucaacuccaccgggaaccugaucgccccgcggggcuacuucaagauccgcagcgggaaguccagcaucaugcgguccgacgcgccccugggcaagugcaucagcgccugcaucacgcccaacggcuccauccccaacgacaagccguuccagaacgucaaccgcaucaccuacggggccugcccccgguacgugaagcagaacacccucaagcuggccaccggcaugcgcaacgugcccgagaagcagacgcgggggaucuucggcgccaucgccggguucaucgagaacggcugggagggcauggucgacgggugguacggcuuccgccaccagaacagcgaggggcggggccaggcggccgaccugaaguccacccaggccgccaucgaccagaucaacgggaagcucaaccgccugaucggcaagaccaacgagaaguuccaccagaucgagaaggaguucagcgagguggagggccggauccaggaccuggagaaguacguggaggacaccaagaucgaccucugguccuacaacgccgagcugcuggucgcgcucgagaaccagcacacgaucgaccugaccgacagcgagaugaacaagcuguucgagaagaccaagaagcagcuccgcgagaacgccgaggacauggggaacggcugcuucaagaucuaccacaagugcgacaacgccugcaucggguccauccgcaacggcaccuacgaccacgacguguaccgggacgaggcccugaacaaccgcuuccagaucaaggggguggagcugaaguccggcuacaaggacuggauccucuggaucuccuucgccaucagcugcuuccugcugugcgucgcgcuccugggcuucaucaugugggccugccagaaggggaacauccggugcaacaucugcaucuga

SEQ ID NO: 72365 - RNA, 1701 nt, Artificial Sequence
  derived and/or modified CDS sequence (opt1) from hemagglutinin__InfluenzaA__AFD64819
augaagaccaucaucgcccugagcuacauccucugccugguguucgcccagaagcugcccggcaacgacaacuccaccgcgacgcucugccuggggcaccacgccgucccgaacggcaccaucgugaagaccaucaccaacgaccagaucgaggugacgaacgccaccgagcugguccagagcuccagcaccggggagaucugcaacagcccccaccagauccucgacggcgagaacugcacccugaucgacgcccugcucggggacccccagugcgacggcuuccagaacaagaagugggaccuguucguggagcgcagcaaggcccacuccaacugcuaccccuacgacgugccggacuacgcgagccugcggucccucgucgccagcuccggcacgcuggaguucaacaacgagagcuucaacuggaccggggugacccagaacggcaccuccagcgccugcauccgccgguccaacaacagcuucuucucccgccugaacuggcucacgcaccugaacuucaaguaccccgcccugaacgugaccaugcccaacaacgagcaguucgacaagcucuacaucuggggcguccaccaccccgggaccgacaaggaccagaccuuccuguacgcgcaggccagcgggcggaucacgguguccaccaagcgcagccagcaggccgugaucccgaacaucggcagccggccccgcauccggaacauccccucccgcgucagcaucuacuggaccaucgugaagcccggcgacauccugcucaucaacuccaccgggaaccugaucgccccgcggggcuacuucaagauccgcagcgggaaguccagcaucaugcgguccgacgcccccaucggcaagugcaucagcgcgugcaucacgcccaacggcuccauccccaacgacaagccguuccagaacgugaaccgcaucaccuacggggccugcccccgguacgucaagcagaacacccugaagcucgccaccggcaugcgcaacgugcccgagaagcagacgcgggggaucuucggcgccaucgccggguucaucgagaacggcugggagggcaugguggacgggugguacggcuuccgccaccagaacagcgaggggcggggccaggcggccgaccugaaguccacccaggccgccaucgaccagaucaacgggaagcugaaccgccucaucggcaagaccaacgagaaguuccaccagaucgagaaggaguucagcgaggucgagggccggauccaggaccuggagaaguacguggaggacaccaagaucgaccugugguccuacaacgccgagcuccugguggcgcuggagaaccagcacacgaucgaccucaccgacagcgagaugaacaagcuguucgagaagaccaagaagcagcugcgcgagaacgccgaggacauggggaacggcugcuucaagaucuaccacaagugcgacaacgccugcaucggguccauccgcaacggcaccuacgaccccgacgucuaccgggacgaggcccucaacaaccgcuuccagaucaaggggguggagcugaaguccggcuacaaggacuggauccuguggaucuccuucgccaucagcugcuuccuccugugcguggcgcugcucggcuucaucaugugggccugccagaaggggaacauccggugcaacaucugcaucuga

SEQ ID NO: 72366 - RNA, 1701 nt, Artificial Sequence; identical to SEQ ID NO: 71006
  derived and/or modified CDS sequence (opt1) from hemagglutinin__InfluenzaA__AFD64820

SEQ ID NO: 72367 - RNA, 1701 nt, Artificial Sequence
  derived and/or modified CDS sequence (opt1) from hemagglutinin__InfluenzaA__AFD64822
augaagaccaucaucgcccugagcuacauccucugccugguguucgcccagaagcugcccggcaacgacaacuccaccgcgacgcucugccuggggcaccacgccgucccgaacggcaccaucgugaagaccaucaccaacgaccagaucgaggugacgaacgccaccgagcugguccagagcuccagcaccggggagaucugcaacagcccccaccagauccucgacggcgagaacugcacccugaucgacgcccugcucggggacccccagugcgacggcuuccagaacaagaagugggaccuguucguggagcgcagcaaggcccacuccaacugcuaccccuacgacgugccggacuacgcgagccugcggucccucgucgccagcuccggcacgcuggaguucaacaacgagagcuucaacuggaccggggugacccagaacggcaccuccagcgccugcaugcgccgguccaacaacagcuucuucucccgccugaacuggcucacgcaccugaacuucaaguaccccgcccugaacgugaccaugcccaacaacgagcaguucgacaagcucuacaucuggggcguccaccaccccgggaccgacaaggaccagaucuuccuguacgcgcaggccagcgggcggaucaccguguccacgaagcgcagccagcaggccgugaucccgaacaucggcagccggccccgcguccggaacauccccucccgcgugagcaucuacuggaccaucgugaagcccggcgacauccugcucaucaacuccaccgggaaccugaucgccccgcggggcuacuucaagauccgcagcgggaaguccagcaucaugcgguccgacgcccccaucggcaagugcaacagcgcgugcaucacccccaacggcuccauccccaacgacaagccguuccagaacgucaaccgcaucacguacggggccugcccccgguacgugaagcagaacacccugaagcucgccaccggcaugcgcaacgugcccgagaagcagacccgggggaucuucggcgccaucgccggguucaucgagaacggcugggagggcauggucgacgggugguacggcuuccgccaccagaacagcgaggggcggggccaggcggccgaccugaaguccacgcaggccgccaucgaccagaucaacgggaagcugaaccgccucaucggcaagaccaacgagaaguuccaccagaucgagaaggaguucagcgagguggagggccggauccaggaccuggagaaguacguggaggacaccaagaucgaccugugguccuacaacgccgagcuccuggucgcgcuggagaaccagcacaccaucgaccucacggacagcgagaugaacaagcuguucgagaagaccaagaagcagcugcgcgagaacgccgaggacauggggaacggcugcuucaagaucuaccacaagugcgacaacgccugcaucggguccauccgcaacggcaccuacgaccacgacguguaccgggacgaggcccucaacaaccgcuuccagaucaaggggguggagcugaaguccggcuacaaggacuggauccuguggaucuccuucgccaucagcugcuuccuccugugcgucgcgcugcucggcuucaucaugugggccugccagaaggggaacauccggugcaacaucugcaucuga

SEQ ID NO: 72368 - RNA, 1701 nt, Artificial Sequence
  derived and/or modified CDS sequence (opt1) from hemagglutinin__InfluenzaA__AFD64823
augaagaccaucaucgcccugagcuacauccucugccugguguucgcccagaagcugcccggcaacgacaacuccaccgcgacgcucugccuggggcaccacgccgucccgaacggcaccaucgugaagaccaucaccaacgaccagaucgaggugacgaacgccaccgagcugguccagagcuccagcaccggggagaucugcaacagcccccaccagauccucgacggcgagaacugcacccugaucgacgcccugcucggggacccccagugcgacggcuuccagaacaagaagugggaccuguucguggagcgcagcaaggcccacuccaacugcuaccccuacgacgugccggacuacgcgagccugcggucccucgucgccagcuccggcacgcuggaguucaacaacgagagcuucaacuggaccggggugacccagaacggcaccuccagcgccugcauccgccgguccaacaacagcuucuucucccgccugaacuggcucacgcaccugaacuucaaguaccccgcccugaacgugaccaugcccaacaacgagcaguucgacaagcucuacaucuggggcguccaccaccccgggaccgacaaggaccagaucuuccuguacgcgcaggccgccgggcggaucaccgugagcacgaagcgcucccagcaggccgugaucccgaacaucggcagccggccccgcguccggaacauccccagccgcguguccaucuacuggaccaucgugaagcccggcgacauccugcucaucaacagcaccgggaaccugaucgccccgcggggcuacuucaagauccgcuccgggaaguccuccaucaugcggagcgacgcgcccaucggccgcugcaacuccgccugcaucacccccaacggcagcauccccaacgacaagccguuccagaacgucaaccggaucacguacggggccugcccccgcuacgugaagcagaacacccugaagcucgccaccggcaugcggaacgugcccgagaagcagacccgcgggaucuucggcgccaucgcgggguucaucgagaacggcugggagggcauggucgacgggugguacggcuuccggcaccagaacuccgaggggcgcggccaggccgccgaccucaagagcacgcaggccgccaucgaccagaucaacgggaagcugaaccggcugaucggcaagaccaacgagaaguuccaccagaucgagaaggaguucuccgagguggagggccgcauccaggaccuggagaaguacguggaggacaccaagaucgaccuguggagcuacaacgcggagcuccuggucgcccuggagaaccagcacaccaucgaccucacggacuccgagaugaacaagcuguucgagaagaccaagaagcagcugcgcgagaacgccgaggacauggggaacggcugcuucaagaucuaccacaagugcgacaacgccugcaucgggagcauccggaacggcaccuacgaccacgacguguaccgcgacgaggcccucaacaaccgguuccagaucaaggggguggagcugaaguccggcuacaaggacuggauccuguggaucagcuucgcgaucuccugcuuccuccugugcgucgcccugcucggcuucaucaugugggccugccagaaggggaacauccgcugcaacaucugcaucuga

SEQ ID NO: 72369 - RNA, 1701 nt, Artificial Sequence
  derived and/or modified CDS sequence (opt1) from hemagglutinin__InfluenzaA__AFD64824
augaagaccaucaucgcccugagcuacauccucugccugguguucgcccagaagcugcccggcaacgacaacuccaccgcgacgcucugccuggggcaccacgccgucccgaacggcaccaucgugaagaccaucaccaacgaccagaucgaggugacgaacgccaccgagcugguccagagcuccagcaccggggagaucugcaacagcccccaccagauccucgacggcgagaacugcacccugaucgacgcccugcucggggacccccagugcgacggcuuccagaacaagaagugggaccuguucguggagcgcagcaaggcccacuccaacugcuaccccuacgacgugccggacuacgcgagccugcggucccucgucgccagcuccggcacgcuggaguucaacaacgagagcuucaacuggaccggggugacccagaacggcaccuccagcgccugcauccgccgguccaacaacagcuucuucucccgccugaacuggcucacgcaccugaacuucaaguaccccgcccugaacgugaccaugcccaacaacgagcaguucgacaagcucuacaucuggggcguccaccaccccgggaccgacaaggaccagaccuuccuguacgcgcaggccagcgggcggaucacgguguccaccaagcgcagccagcaggccgugaucccgaacaucggcagccggccccgcguccggaacauccccucccgcgugagcaucuacuggaccaucgugaagcccggcgacauccugcucaucaacuccaccgggaaccugaucgccccgcggggcuacuucaagauccgcagcgggaaguccagcaucaugcgguccgacgcccccaucggcaagugcaacagcgcgugcaucacgcccaacggcuccauccccaacgacaagccguuccagaacgucaaccgcaucaccuacggggccugcccccgguacgugaagcagaacacccugaagcucgccaccggcaugcgcaacgugcccgagaagcagacgcgggggaucuucggcgccaucgccggguucaucgagaacggcugggagggcauggucgacgggugguacggcuuccgccaccagaacagcgaggggcggggccaggcggccgaccugaaguccacccaggccgccaucgaccagaucaacgggaagcugaaccgccucaucggcaagaccaacgagaaguuccaccagaucgagaaggaguucagcgagguggagggccggauccaggaccuggagaaguacguggaggacaccaagaucgaccugugguccuacaacgccgagcuccuggucgcgcuggagaaccagcacacgaucgaccucaccgacagcgagaugaacaagcuguucgagaagaccaagaagcagcugcgcgagaacgccgaggacauggggaacggcugcuucaagaucuaccacaagugcgacaacgccugcaucggguccauccgcaacggcaccuacgaccacgacguguaccgggacgaggcccucaacaaccgcuuccagaucaaggggguggagcugaaguccggcuacaaggacuggauccuguggaucuccuucgccacgagcugcuuccuccugugcgucgcgcugcucggcuucaucaugugggccugccagaaggggaacauccggugcaacaucugcaucuga

SEQ ID NO: 72370 - RNA, 1701 nt, Artificial Sequence; identical to SEQ ID NO: 72358
  derived and/or modified CDS sequence (opt1) from hemagglutinin__InfluenzaA__AFD64825

SEQ ID NO: 72371 - RNA, 1701 nt, Artificial Sequence; identical to SEQ ID NO: 72358
  derived and/or modified CDS sequence (opt1) from hemagglutinin__InfluenzaA__AFD64827

SEQ ID NO: 72372 - RNA, 1701 nt, Artificial Sequence
  derived and/or modified CDS sequence (opt1) from hemagglutinin__InfluenzaA__AFD64828
augaagaccaucaucgcccugagcuacauccucugccugguguucgcccagaagcugcccggcaacgacaacuccaccgcgacgcucugccuggggcaccacgccgucccgaacggcaccaucgugaagaccaucaccaacgaccagaucgaggugacgaacgccaccgagcugguccagagcuccagcaccggggagaucugcaacagcccccaccagauccucgacggcgagaacugcacccugaucgacgcccugcucggggacccccagugcgacggcuuccagaacaagaagugggaccuguucguggagcgcagcaaggcccacuccaacugcuaccccuacgacgugccggacuacgcgagccugcggucccucgucgccagcuccggcacgcuggaguucaacaacgagagcuucaacuggaccggggugacccagaacggcaccuccagcgccugcauccgccgguccaacaacagcuucuucucccgccugaacuggcucacgcaccugaacuucaaguaccccgcccugaacgugaccaugcccaacaacgagcaguucgacaagcucuacaucuggggcguccaccaccccgggaccgacaaggaccagaucuuccuguacgcgcaggccagcgggcggaucaccguguccacgaagcgcagccagcaggccgugaucccgaacaucggcagccggccccgcguccggaacauccccucccgcgugagcaucuacuggaccaucgugaagcccggcgacauccugcucaucaacuccaccgggaaccugaucgccccgcggggcuacuucaagauccgcagcgggaaguccagcaucaugcgguccgacgcccccaucggcaagugcaacagcgcgugcaucacccccaacggcuccauccccaacgacaagccguuccagaacgucaaccgcaucacguacggggccugcccccgguacgugaagcagaacacccugaagcucgccaccggcaugcgcaacgugcccgagaagcagacccgggggaucuucggcgccaucgccggguucaucgagaacggcugggagggcaugauggacgggugguacggcuuccgccaccagaacagcgaggggcggggccaggcggccgaccugaaguccacgcaggccgccaucgaccagaucaacgggaagcugaaccgccucaucggcaagaccaacgagaaguuccaccagaucgagaaggaguucagcgaggucgagggccggauccaggaccuggagaaguacguggaggacaccaagaucgaccugugguccuacaacgccgagcuccugguggcgcuggagaaccagcacaccaucgaccucacggacagcgagaugaacaagcuguucgagaagaccaagaagcagcugcgcgagaacgccgaggacauggggaacggcugcuucaagaucuaccacaagugcgacaacgccugcaucggguccauccgcaacggcaccuacgaccccgacgucuaccgggacgaggcccucaacaaccgcuuccagaucaaggggguggagcugaaguccggcuacaaggacuggauccuguggaucuccuucgccaucagcugcuuccuccugugcguggcgcugcucggcuucaucaugugggccugccagaaggggaacauccggugcaacaucugcaucuga

SEQ ID NO: 72373 - RNA, 1701 nt, Artificial Sequence; identical to SEQ ID NO: 72367
  derived and/or modified CDS sequence (opt1) from hemagglutinin__InfluenzaA__AFD64830

SEQ ID NO: 72374 - RNA, 1701 nt, Artificial Sequence; identical to SEQ ID NO: 71006
  derived and/or modified CDS sequence (opt1) from hemagglutinin__InfluenzaA__AFD98095

SEQ ID NO: 72375 - RNA, 1701 nt, Artificial Sequence
  derived and/or modified CDS sequence (opt1) from hemagglutinin__InfluenzaA__AFD98106
augaagaccaucaucgcccugagcuacauccucugccugguguucgcccagaagcugcccggcaacgacaacuccaccgcgacgcucugccuggggcaccacgccgucccgaacggcaccaucgugaagaccaucaccaacgaccagaucgaggugacgaacgccaccgagcugguccagagcuccagcgccggggagaucugcgacagcccccaccacauccucgacggcgagaacugcacccugaucgacgcccugcucggggacccccagugcgacggcuuccagaacaagaagugggaccuguucguggagcgcagccgggcguacuccaacugcuaccccuacgacgugccggacuacgccagccugcgcucccucgucgccagcuccggcacccuggaguucaacaacgagagcuucaacuggacgggggugacccagaacggcaccuccagcgccugcauccggcgcuccaacaacagcuucuucucccggcugaacuggcucacccaccugaacuucaaguaccccgcgcugaacgugacgaugcccaacaacgagcaguucgacaagcucuacaucuggggcguccaccaccccgggaccgacaaggaccagaucuuccuguacgcccaggccagcgggcgcaucaccguguccaccaagcggagccagcaggccgugaucccgaacaucggcagccgcccccggguccgcaacauccccucccggaucagcaucuacuggacgaucgugaagcccggcgacauccugcucaucaacuccaccgggaaccugaucgccccgcgcggcuacuucaagauccggagcgggaaguccagcaucaugcgcuccgacgcgcccaucggcaagugcaacagcgagugcaucacccccaacggcuccauccccaacgacaagccguuccagaacgugaaccggaucaccuacggggccugcccccgcuacgucaagcagagcacgcugaagcucgccaccggcaugcggaacgugcccgagaagcagacccgcgggaucuucggcgccaucgccggguucaucgagaacggcugggagggcaugauggacgggugguacggcuuccggcaccagaacuccgaggggcgcggccaggcggccgaccugaaguccacccaggccgccaucgaccagaucaacgggaagcugaaccggcucaucggcaagacgaacgagaaguuccaccagaucgagaaggaguucuccgagguggagggccgcauccaggaccuggagaaguacgucgaggacaccaagaucgaccuguggagcuacaacgccgagcuccugguggcgcuggagaaccagcacaccaucgaccucaccgacuccgagaugaacaagcuguucgagaagacgaagaagcagcugcgcgagaacgccgaggacauggggaacggcugcuucaagaucuaccacaagugcgacaacgccugcaucgggagcauccggaacggcaccuacgaccacgacguguaccgcgacgaggcccucaacaaccgguuccagaucaagggggucgagcugaaguccggcuacaaggacuggauccuguggaucagcuucgccaucuccugcuuccuccugugcguggcgcugcucggcuucaucaugugggccugccagaaggggaacauccgcugcaacaucugcaucuga

SEQ ID NO: 72376 - RNA, 1701 nt, Artificial Sequence
  derived and/or modified CDS sequence (opt1) from hemagglutinin__InfluenzaA__AFD98128
augaagaccaucaucgcccugagcuacauccucugccugguguucgcccagaagcugcccggcaacgacaacuccaccgcgacgcucugccuggggcaccacgccgucccgaacggcaccaucgugaagaccaucaccaacgaccagaucgaggugacgaacgccaccgagcugguccagaacagcuccaccggggagaucugcaacagcccccaccagauccucgacggcgagaacugcacccugaucgacgcccugcucggggacccccagugcgacggcuuccagaacaagaagugggaccuguucguggagcgcuccaaggcccacagcaacugcuaccccuacgacgugccggacuacgcgucccugcggagccucgucgccuccagcggcacgcuggaguucaacaacgaguccuucaacuggaccggggugacccagaacggcaccagcuccgccugcauccgcaagagcaacaacuccuucuucagccggcugaacuggcucacgcaccugaacuucaaguaccccgcccugaacgugaccaugcccaacaacgagcaguucgacaagcucuacaucuggggcguccaccaccccgggaccgacaaggaccagaucuuccuguacgcgcaggccgccgggcgcaucaccguguccacgaagcggagccagcaggccgugaucccgaacaucggcucccgcccccggguccgcaacauccccagccgggugagcaucuacuggaccaucgugaagcccggcgacauccugcucaucaacuccaccgggaaccugaucgccccgcgcggcuacuucaagauccggagcgggaaguccagcaucaugcgcuccgacgcgcccaucggcaagugcaacagcgccugcaucacccccaacggcuccauccccaacgacaagccguuccagaacgucaaccggaucacguacggggccugcccccgcuacgugaagcagaacacccugaagcucgccaccggcaugcggaacgugcccgagaagcagacccgcgggaucuucggcgccaucgcgggguucaucgagaacggcugggagggcauggucgacgggugguacggcuuccggcaccagaacagcgaggggcgcggccaggccgccgaccugaaguccacgcaggccgccaucgaccagaucaacgggaagcugaaccggcucaucggcaagaccaacgagaaguuccaccagaucgagaaggaguucagcgagguggagggccgcauccaggaccuggagaaguacguggaggacaccaagaucgaccugugguccuacaacgcggagcuccuggucgcccuggagaaccagcacaccaucgaccucacggacagcgagaugaacaagcuguucgagaagaccaagaagcagcugcgggagaacgccgaggacauggggaacggcugcuucaagaucuaccacaagugcgacaacgccugcaucggguccauccgcaacggcaccuacgaccacgacguguaccgcgacgaggcccucaacaaccgguuccagaucaaggggguggagcucaagagcggcuacaaggacuggauccuguggaucuccuucgcgaucagcugcuuccugcugugcgucgcccugcucggcuucaucaugugggccugccagaaggggaacauccgcugcaacaucugcaucuga

SEQ ID NO: 72377 - RNA, 1701 nt, Artificial Sequence; identical to SEQ ID NO: 71006
  derived and/or modified CDS sequence (opt1) from hemagglutinin__InfluenzaA__AFD98139

SEQ ID NO: 72378 - RNA, 1701 nt, Artificial Sequence
  derived and/or modified CDS sequence (opt1) from hemagglutinin__InfluenzaA__AFD98161
augaagaccaucaucgcccugagcuacauccucugccugguguucgcccagaagcugcccggcaacgacaacuccaccgcgacgcucugccuggggcaccacgccgucccgaacggcaccaucgugaagaccaucaccaacgaccagaucgaggugacgaacgccaccgagcugguccagaacagcuccgccggggagaucugcgacagcccccaccacauccucgacggcgagaacugcacccugaucgacgcccugcucggggacccccagugcgacggcuuccagaacaagaagugggaccuguucguggagcgcucccgggcguacagcaacugcuaccccuacgacgugccggacuacgccucccugcgcagccucgucgccuccagcggcacccuggaguucaacaacgaguccuucaacuggacgggggugacccagaacggcaccagcuccgccugcauccggcgcagcaacaacuccuucuucagccggcugaacuggcucacccaccugaacuucaaguaccccgcgcugaacgugacgaugcccaacaacgagcaguucgacaagcucuacaucuggggcguccaccaccccgggaccgacaaggaccagaucuuccuguacgcccaggccuccgggcgcaucaccgugagcaccaagcggucccagcaggccgugaucccgaacaucggcagccgcccccggguccgcaacauccccagccggaucuccaucuacuggacgaucgugaagcccggcgacauccugcucaucaacagcaccgggaaccugaucgccccgcgcggcuacuucaagauccgguccggcaagagcuccaucaugcgcagcgacgcgcccaucgggaagugcaacuccgagugcaucacccccaacggcagcauccccaacgacaagccguuccagaacgugaaccggaucaccuacggggccugcccccgcuacgucaagcaguccacgcugaagcucgccaccggcaugcggaacgugcccgagaagcagacccgcgggaucuucggcgccaucgccggguucaucgagaacggcugggagggcaugauggacgggugguacggcuuccggcaccagaacagcgaggggcgcggccaggcggccgaccugaaguccacccaggccgccaucgaccagaucaacgggaagcugaaccggcucaucggcaagacgaacgagaaguuccaccagaucgagaaggaguucagcgagguggagggccgcauccaggaccuggagaaguacgucgaggacaccaagaucgaccugugguccuacaacgccgagcuccugguggcgcuggagaaccagcacaccaucgaccucaccgacagcgagaugaacaagcuguucgagaagacgaagaagcagcugcgcgagaacgccgaggacauggggaacggcugcuucaagaucuaccacaagugcgacaacgccugcaucggguccauccggaacggcaccuacgaccacgacguguaccgcgacgaggcccucaacaaccgguuccagaucaagggggucgagcucaagagcggcuacaaggacuggauccuguggaucuccuucgccaucagcugcuuccugcugugcguggcgcugcucggcuucaucaugugggccugccagaaggggaacauccgcugcaacaucugcaucuga

SEQ ID NO: 72379 - RNA, 1701 nt, Artificial Sequence
  derived and/or modified CDS sequence (opt1) from hemagglutinin__InfluenzaA__AFD98172
augaagaccaucaucgcccugagcuacauccucugccugguguucgcccagaagcugcccggcaacgacaacuccaccgcgacgcucugccuggggcaccacgccgucccgaacggcaccaucgugaagaccaucaccaacgaccagaucgaggugacgaacgccaccgagcugguccagagcuccagcgccggggagaucugcgacagcccccaccacauccucgacggcgagaacugcacccugaucgacgcccugcucggggacccccagugcgacggcuuccagaacaagaagugggaccuguucguggagcgcagccgggcguacuccaacugcuaccccuacgacgugccggacuacgccagccugcgcucccucgucgccagcuccggcacccuggaguucaacaacgagagcuucaacuggacgggggugacccagaacggcaccuccagcgccugcauccggcgcuccaacaacagcuucuucucccggcugaacuggcucacccaccugaacuucaaguaccccgcgcugaacgugacgaugcccaacaacgagcaguucgacaagcucuacaucuggggcguccaccaccccgggaccgacaaggaccagaucuuccuguacgcccaggccagcgggcgcaucaccguguccaccaagcggagccagcaggccgugaucccgaacaucggcagccgcccccggguccgcaacauccccucccggaucagcaucuacuggacgaucgugaagcccggcgacauccugcucaucaacuccaccgggaaccugaucgccccgcgcggcuacuucaagauccggagcgggaaguccagcaucaugcgcuccgacgcgcccaucggcaagugcaacagcgagugcaucacccccaacggcuccauccccaacgacaagccguuccagaacgugaaccggaucaccuacggggccugcccccgcuacgucaagcagagcacgcugaagcucgccaccggcaugcggaacgugcccgagaagcagacccgcgggaucuucggcgccaucgccggguucaucgagaacggcugggagggcaugauggacgggugguacggcuuccggcaccagaacuccgaggggcgcggccaggcggccgaccugaaguccacccaggccgccaucgaccagaucaacgggaagcugaaccggcucaucggcaagacgaacgagaaguuccaccagaucgagaaggaguucuccgagguggagggccgcauccaggaccuggagaaguacgucgaggacaccaagaucgaccuguggagcuacaacgccgagcuccugguggcgcuggagaaccagcacaccaucgaccucaccgacuccgagaugaacaagcuguucgagaagacgaagaagcagcugcgcgagaacgccgaggacauggggaacggcugcuucaagaucuaccacaagugcgacaacgccugcaucgggagcauccggaacggcaccuacgaccacgacguguaccgcgacgaggcccucaacaaccgguuccagaucaagggggucgagcugaaguccggcuacaaggacugggugcuguggaucagcuucgccaucuccugcuuccuccugugcguggcgcugcucggcuucaucaugugggccugccagaaggggaacauccgcugcaacaucugcaucuga

SEQ ID NO: 72380 - RNA, 1701 nt, Artificial Sequence
  derived and/or modified CDS sequence (opt1) from hemagglutinin__InfluenzaA__AFD98183
augaagaccaucaucgcccugagcuacauccucugccugguguucgcccagaagcugcccggcaacgacaacuccaccgcgacgcucugccuggggcaccacgccgucccgaacggcaccaucgugaagaccaucaccaacgaccagaucgaggugacgaacgccaccgagcugguccagagcuccagcaccggggagaucugcaacagcccccaccagauccucgacggcgagaacugcacccugaucgacgcccugcucggggacccccagugcgacggcuuccagaacaagaagugggaccuguucguggagcgcagcaaggcccacuccaacugcuaccccuacgacgugccggacuacgcgagccugcggucccucgucgccagcuccggcacgcuggaguucaacaacgagagcuucaacuggaccggggugacccagaacggcaccuccagcgccugcauccgccgguccaacaacagcuucuucucccgccugaacuggcucacgcaccugaacuucaaguaccccgcccugaacgugaccaugcccaacaacgagcaguucgacaagcucuacaucuggggcguccaccaccccgggaccgacaaggaccagaucuuccuguacgcgcaggccagcgggcggaucaccguguccacgaagcgcagccagcaggccgugcugccgaacaucggcagccggccccgcguccggaacauccccucccgcgugagcaucuacuggaccaucgugaagcccggcgacauccuccugaucaacuccaccgggaaccugaucgccccgcggggcuacuucaagauccgcagcgggaaguccagcaucaugcgguccgacgcccccaucggcaagugcaacagcacgugcaucacccccaacggcuccauccccaacgacaagccguuccagaacgucaaccgcaucaccuacggggcgugcccccgguacgugaagcagaacacccucaagcuggccaccggcaugcgcaacgugcccgagaagcagacgcgggggaucuucggcgccaucgccggguucaucgagaacggcugggagggcauggucgacgggugguacggcuuccgccaccagaacagcgaggggcggggccaggccgcggaccugaaguccacccaggccgccaucgaccagaucaacgggaagcucaaccgccugaucggcaagaccaacgagaaguuccaccagaucgagaaggaguucagcgagguggagggccggauccaggaccuggagaaguacguggaggacaccaagaucgaccucugguccuacaacgccgagcugcuggucgcccucgagaaccagcacacgaucgaccugaccgacagcgagaugaacaagcuguucgagaagaccaagaagcagcuccgcgagaacgcggaggacauggggaacggcugcuucaagaucuaccacaagugcgacaacgccugcaucggguccauccgcaacggcaccuacgaccacgacguguaccgggacgaggcccugaacaaccgcuuccagaucaaggggguggagcugaaguccggcuacaaggacuggauccucuggaucuccuucgccaucagcugcuuccugcugugcgucgcccuccugggcuucaucaugugggcgugccagaaggggaacauccggugcaacaucugcaucuga

SEQ ID NO: 72381 - RNA, 1701 nt, Artificial Sequence; identical to SEQ ID NO: 70879
  derived and/or modified CDS sequence (opt1) from hemagglutinin__InfluenzaA__AFD98194

SEQ ID NO: 72382 - RNA, 1701 nt, Artificial Sequence; identical to SEQ ID NO: 70933
  derived and/or modified CDS sequence (opt1) from hemagglutinin__InfluenzaA__AFD98205

SEQ ID NO: 72383 - RNA, 1701 nt, Artificial Sequence; identical to SEQ ID NO: 72375
  derived and/or modified CDS sequence (opt1) from hemagglutinin__InfluenzaA__AFD98215

SEQ ID NO: 72384 - RNA, 1701 nt, Artificial Sequence; identical to SEQ ID NO: 71006
  derived and/or modified CDS sequence (opt1) from hemagglutinin__InfluenzaA__AFD98226

SEQ ID NO: 72385 - RNA, 1701 nt, Artificial Sequence
  derived and/or modified CDS sequence (opt1) from hemagglutinin__InfluenzaA__AFD98237
augaagaccaucaucgcccugagcuacauccucugccugguguccgcccagaagcugcccggcaacgacaacagcaccgcgacgcucugccuggggcaccacgccgucccgaacggcaccaucgugaagaccaucaccaacgaccagaucgaggugacgaacgccaccgagcugguccaguccagcuccaccggggagaucugcaacagcccccaccagauccucgacggcgagaacugcacccugaucgacgcccugcucggggacccccagugcgacggcuuccagaacaagaagugggaccuguucguggagcgcuccaaggcccacagcaacugcuaccccuacgacgugccggacuacgcgucccugcggagccucgucgccuccagcggcacgcuggaguucaacaacgaguccuucaacuggaccggggugacccagaacggcaccagcuccgccugcauccgccggagcaacaacuccuucuucagccgccugaacuggcucacgcaccugaacuucaaguaccccgcccugaacgugaccaugcccaacaacgagcaguucgacaagcucuacaucuggggcguccaccaccccgggaccgacaaggaccagaucuuccuguacgcgcaggccuccgggcggaucaccgugagcacgaagcgcagccagcaggccgugaucccgaacaucggcucccggccccgcguccggaacauccccagccgcguguccaucuacuggaccaucgugaagcccggcgacauccugcucaucaacagcaccgggaaccugaucgccccgcggggcuacuucaagauccgcuccggcaagagcuccaucaugcggagcgacgcccccaucgggaagugcaacuccgcgugcaucacccccaacggcagcauccccaacgacaagccguuccagaacgucaaccgcaucacguacggggccugcccccgguacgugaagcagaacacccugaagcucgccaccggcaugcgcaacgugcccgagaagcagacccgggggaucuucggcgccaucgccggguucaucgagaacggcugggagggcauggucgacgggugguacggcuuccgccaccagaacuccgaggggcggggccaggcggccgaccucaagagcacgcaggccgccaucgaccagaucaacgggaagcugaaccgccugaucggcaagaccaacgagaaguuccaccagaucgagaaggaguucuccgagguggagggccggauccaggaccuggagaaguacguggaggacaccaagaucgaccuguggagcuacaacgccgagcuccuggucgcgcuggagaaccagcacaccaucgaccucacggacuccgagaugaacaagcuguucgagaagaccaagaagcagcugcgcgagaacgccgaggacauggggaacggcugcuucaagaucuaccacaagugcgacaacgccugcaucgggagcauccgcaacggcaccuacgaccacgacguguaccgggacgaggcccucaacaaccgcuuccagaucaaggggguggagcugaaguccggcuacaaggacuggauccuguggaucagcuucgccaucuccugcuuccuccugugcgucgcgcugcucggcuucaucaugugggccugccagaaggggaacauccggugcaacaucugcaucuga

SEQ ID NO: 72386 - RNA, 1701 nt, Artificial Sequence; identical to SEQ ID NO: 72378
  derived and/or modified CDS sequence (opt1) from hemagglutinin__InfluenzaA__AFD98248

SEQ ID NO: 72387 - RNA, 1701 nt, Artificial Sequence
  derived and/or modified CDS sequence (opt1) from hemagglutinin__InfluenzaA__AFD98259
augaagaccaucaucgcccugagcuacauccucugccugguguucgcccagaagcugcccggcaacgacaacuccaccgcgacgcucugccuggggcaccacgccgucccgaacggcaccaucgugaagaccaucaccaacgaccagaucgaggugacgaacgccaccgagcugguccagagcuccagcgccggggagaucugcgacagcccccaccacauccucgacggcgagaacugcacccugaucgacgcccugcucggggacccccagugcgacggcuuccagaacaagaagugggaccuguucguggagcgcagcaaggcguacuccaacugcuaccccuacgacgugcaggacuacgccagccugcggucccucgucgccagcuccggcacccuggaguucaacaacgagagcuucaacuggacgggggugacccagaacggcaccuccagcgccugcauccgccgguccaacaacagcuucuucucccgccugaacuggcucacccaccugaacuucaaguacccggcgcugaacgugacgaugcccaacaacgagcaguucgacaagcucuacaucuggggcguccaccaccccgggaccgacaaggaccagaucuuccuguacgcccaggccagcgggcggaucaccguguccaccaagcgcagccagcaggccgugauccccaacaucggcagccggccgcgcguccggaacauccccucccgcaucagcaucuacuggacgaucgugaagcccggcgacauccugcucaucaacuccaccgggaaccugaucgcgccccggggcuacuucaagauccgcagcgggaaguccagcaucaugcgguccgacgccccgaucggcaagugcaacagcgagugcaucacccccaacggcuccauccccaacgacaagcccuuccagaacgugaaccgcaucaccuacggggccugcccgcgguacgucaagcagagcacgcugaagcucgccaccggcaugcgcaacgugcccgagaagcagacccgggggaucuucggcgccaucgccggguucaucgagaacggcugggagggcaugauggacgggugguacggcuuccgccaccagaacuccgaggggcggggccaggcggccgaccugaaguccacccaggccgccaucgaccagaucaacgggaagcugaaccgccucaucggcaagacgaacgagaaguuccaccagaucgagaaggaguucuccgagguggagggccggauccaggaccuggagaaguacgucgaggacaccaagaucgaccuguggagcuacaacgccgagcuccugguggcgcuggagaaccagcacaccaucgaccucaccgacuccgagaugaacaagcuguucgagaagacgaagaagcagcugcgcgagaacgccgaggacauggggaacggcugcuucaagaucuaccacaagugcgacaacgccugcaucgggagcauccgcaacggcaccuacgaccacgacguguaccgggacgaggcccucaacaaccgcuuccagaucaagggggucgagcugaaguccggcuacaaggacuggauccuguggaucagcuucgccaucuccugcuuccuccugugcguggcgcugcucggcuucaucaugugggccugccagaaggggaacauccggugcaacaucugcaucuga

SEQ ID NO: 72388 - RNA, 1701 nt, Artificial Sequence
  derived and/or modified CDS sequence (opt1) from hemagglutinin__InfluenzaA__AFD98270
augaaggccauccuggugguccuccuguacaccuucgugaccgccaacgcggacacgcugugcaucggcuaccacgccaacaacagcaccgacaccguggacaccguccucgagaagaacgugacggugacccacuccgucaaccugcuggaggacaagcacaacgggaagcucugcaagcugcgcggcgugacgccccugcaccucgggaagugcaacaucgccggcuggauccuggggaacccggagugcgagagccuguccaccgccagcuccuggagcuacaucguggagaccuccagcuccgacaacgggaccugcuaccccggcgacuucaucaacuacgaggagcuccgggagcagcugagcuccgucagcuccuucgagcgcuucgagaucuuccccaacaccagcuccuggcccaaccacgacagcaacaagggcgugaccgccgcgugcccgcacgccggcgccaaguccuucuacaagaaccugaucuggcucgugaagaaggggaacagcuaccccaagcuguccaagagcuacaucaacgacaagggcaaggagguccuggugcucugggggauccaccaccccagcacgaccgccgaccagcagucccuguaccagaacgcggacgccuacguguucgucggcaccagccgguacuccaagaaguucaagcccgagaucgccauccgcccgaaggugcgggaccaggagggccgcaugaacuacuacuggacccugguggagcccggggacaagaucacguucgaggccaccggcaaccucgucgugccccgguacgccuucgcgauggagcgcaacgccgggagcggcaucaucaucuccgacacccccgugcacgacugcaacaccacgugccagaccccgaagggcgccaucaacaccagccugcccuuccagaacauccaccccaucaccaucgggaagugccccaaguacgucaaguccacgaagcugcggcucgccaccggccugcgcaacgugccgagcauccagucccgggggcuguucggcgccaucgcgggguucaucgagggcggcuggaccgggaugguggacggcugguacggguaccaccaccagaacgagcagggcagcggguacgccgccgaccucaaguccacccagaacgccaucgacaagaucacgaacaaggucaacagcgugaucgagaagaugaacacccaguucaccgccgucggcaaggaguucaaccaccuggagaagcgcaucgagaaccugaacaagaagguggacgacggcuuccucgacaucuggaccuacaacgcggagcugcuggugcuccuggagaacgagcggacgcuggacuaccacgacuccaacgucaagaaccucuacgagaaggugcgcaaccagcugaagaacaacgccaaggagaucgggaacggcugcuucgaguucuaccacaagugcgacaacacgugcauggagagcgugaagaacgggaccuacgacuaccccaaguacuccgaggaggccaagcugaaccgggaggagaucgacggcgucaagcucgagagcacccgcaucuaccagauccuggccaucuacuccaccguggccagcucccuggugcucgucgugagccugggggcgaucagcuucuggaugugcuccaacggcagccugcagugccggaucugcaucuga

SEQ ID NO: 72389 - RNA, 1701 nt, Artificial Sequence
  derived and/or modified CDS sequence (opt1) from hemagglutinin__InfluenzaA__AFD98280
augaaggccauccuggugguccuccuguacaccuucgccaccgcgaacgccgacacgcugugcaucggcuaccacgccaacaacagcaccgacaccguggacaccgugcucgagaagaacgucacggugacccacuccgugaaccugcuggaggacaagcacaacgggaagcucugcaagcugcgcggcgucgcgccccugcaccucgggaagugcaacaucgccggcuggauccuggggaacccggagugcgacagccuguccaccgcccggagcugguccuacaucguggagaccagcuccagcgacaacggcacgugcuaccccggcgacuucaucgacuacgaggagcuccgcgagcagcuguccagcguguccagcuucgagcgguucgagaucuuccccaagaccuccagcuggcccaaccacgacuccaacaagggggucaccgccgccugcccgcacgccggcgcgaagggguucuacaagaaccugaucuggcucgugaagaagggcaacagcuaccccaagcuguccaagagcuacaucaacgacaaggggaaggaggugcugguccucuggggcauccaccaccccuccaccacggccgaccagcagagccuguaccagaacgccgacaccuacguguucgugggcaccagccgcuacuccaagaaguucaagcccgagaucgccauccggccgaagguccgcgaccaggaggggcggaugaacuacuacuggacccugguggagcccggcgacaagaucacguucgaggccaccgggaaccucguggucccccgcuacgcguucgccauggagcggaacgccggcagcggcaucaucaucuccgacacccccgugcacgacugcaacaccacgugccagaccccgaagggggccaucaacaccagccugcccuuccagaacauccaccccaucaccaucggcaagugccccaaguacgugaaguccacgaagcugcgccucgccaccgggcugcggaacgucccgagcauccagucccgcggccuguucggggcgaucgccggcuucaucgagggcggguggaccggcaugguggacgggugguacggcuaccaccaccagaacgagcaggggagcggcuacgccgccgaccucaaguccacccagaacgccaucgacaagaucacgaacaaggugaacagcgucaucgagaagaugaacacccaguucaccgcggugggcaaggaguucaaccaccuggagaagcggaucgagaaccugaacaagaaggucgacgacggguuccucgacaucuggaccuacaacgccgagcugcuggugcuccuggagaacgagcgcacgcuggacuaccacgacuccaacgugaagaaccucuacgagaagguccggaaccagcugaagaacaacgccaaggagaucggcaacgggugcuucgaguucuaccacaagugcgacaacacgugcauggagagcgugaagaacggcaccuacgacuaccccaaguacuccgaggaggccaagcugaaccgcgaggagaucgacggggugaagcucgagagcacccggaucuaccagauccuggccaucuacuccaccgucgcgagcucccuggugcucguggucagccugggcgccaucuccuucuggaugugcagcaacggcagccugcagugccgcaucugcaucuga

SEQ ID NO: 72390 - RNA, 1701 nt, Artificial Sequence; identical to SEQ ID NO: 72367
  derived and/or modified CDS sequence (opt1) from hemagglutinin__InfluenzaA__AFD98290

SEQ ID NO: 72391 - RNA, 1701 nt, Artificial Sequence; identical to SEQ ID NO: 71110
  derived and/or modified CDS sequence (opt1) from hemagglutinin__InfluenzaA__AFD98310

SEQ ID NO: 72392 - RNA, 1701 nt, Artificial Sequence; identical to SEQ ID NO: 70478
  derived and/or modified CDS sequence (opt1) from hemagglutinin__InfluenzaA__AFD98320

SEQ ID NO: 72393 - RNA, 1701 nt, Artificial Sequence; identical to SEQ ID NO: 72378
  derived and/or modified CDS sequence (opt1) from hemagglutinin__InfluenzaA__AFD98340

SEQ ID NO: 72394 - RNA, 1701 nt, Artificial Sequence
  derived and/or modified CDS sequence (opt1) from hemagglutinin__InfluenzaA__AFD98351
augaagaccaucaucgcccugagcuacauccucugccugguguucgcccagaagcugcccggcaacgacaacuccaccgcgacgcucugccuggggcaccacgccgucccgaacggcaccaucgugaagaccaucaccaacgaccagaucgaggugacgaacgccaccgagcugguccagagcuccagcgccggggagaucugcgacagcccccaccacauccucgacggcgagaacugcacccugaucgacgcccugcucggggacccccagugcgacggcuuccagaacaagaagugggaccuguucguggagcgcagccgggcguacuccaacugcuaccccuacgacgugccggacuacgccagccugcgcucccucgucgccagcuccggcacccuggaguucaacaacgagagcuucaacuggacgggggugacccagaacggcaccuccagcgccugcauccggcgcuccaacaacagcuucuucucccggcugaacuggcucacccaccugaacuucaaguaccccgcgcugaacgugacgaugcccaacaacgagcaguucgacaagcucuacaucuggggcguccaccaccccgggaccgacaaggaccagaucuuccuguacgcccaggccagcgggcgcaucaccguguccaccaagcggagccagcaggccgugaucccgaacaucggcagccgcccccggguccgcaacauccccucccggaucagcaucuacuggacgaucgugaagcccggcgacauccugcucaucaacuccaccgggaaccugaucgccccgcgcggcuacuucaagauccggagcgggaaguccagcaucaugcgcuccgacgcgcccaucggcaagugcaacagcgagugcaucacccccaacggcuccauccccaacgacaagccguuccagaacgugaaccggaucaccuacggggccugcccccgcuacgucaagcagagcacgcugaagcucgccaccggcaugcggaacgugcccgagaagcagacccgcgggaucuucggcgccaucgccggguucaucgagaacggcugggagggcaugauggacgggugguacggcuuccggcaccagaacuccgaggggcgcggccaggcggccgaccugaaguccacccaggccgccaucgaccagaucaacgggaagcugaaccggcucaucggcaagacgaacgagaaguuccaccagaucgagaaggaguucuccgagguggagggccgcauccaggaccuggagaaguacgucgaggacaccaagaucgaccuguggagcuacaacgccgagcuccugguggcgcuggagaaccagcacaccaucgaccucaccgacuccgagaugaacaagcuguucgagaagacgaagaagcagcugcgcgagaacgccgaggacauggggaacggcugcuucaagaucuaccacaagugcgacaacgccugcaucgggaccauccggaacggcaccuacgaccacgacguguaccgcgacgaggcccucaacaaccgguuccagaucaagggggucgagcucaagagcggcuacaaggacuggauccuguggaucuccuucgccaucagcugcuuccugcugugcguggcgcugcucggcuucaucaugugggccugccagaaggggaacauccgcugcaacaucugcaucuga

SEQ ID NO: 72395 - RNA, 1701 nt, Artificial Sequence
  derived and/or modified CDS sequence (opt1) from hemagglutinin__InfluenzaA__AFD98362
augaagaccaucaucgcccugagcuacauccucugccugguguucgcccagaagcugcccggcaacgacaacuccauggcgacccucugccuggggcaccacgccgucccgaacggcacgaucgugaagaccaucaccaacgaccagaucgaggugaccaacgccacggagcugguccagaacagcuccaccggggagaucugcgacagcccccaccagauccucgacggcgagaacugcacccugaucgacgcccugcucggggacccccagugcgacggcuuccagaacaagaagugggaccuguucguggagcgcuccaaggccuacagcaacugcuaccccuacgacgugccggacuacgcgucccugcggagccucgucgccuccagcggcacccuggaguucaacaacgaguccuucaacuggacgggggugacccagaacggcaccagcuccgccugcauccgccggagcaacaacuccuucuucagccgccugaacuggcucacccaccugaacuucaaguaccccgcccugaacgugacgaugcccaacaacgagcaguucgacaagcucuacaucuggggcguccaccaccccgggaccgacaaggaccagaucuuccuguacgcgcaggccuccgggcggaucaccgugagcaccaagcgcggccagcaggccgugaucccgaacaucggcucccggccccgcguccggaacauccccagccgcaucagcaucuacuggacgaucgugaagcccggggacauccugcucaucaacuccaccggcaaccugaucgccccgcggggguacuucaagauccgcagcggcaaguccagcaucaugcgguccgacgcccccaucggcaagugcaacagcgagugcaucacccccaacggguccauccccaacgacaagccguuccagaacgugaaccgcaucaccuacggcgcgugcccccgguacgucaagcagaacacgcugaagcucgccaccgggaugcgcaacgugcccgagaagcagacccggggcaucuucggggccaucgccggcuucaucgagaacggcugggaggggaugguggacggcugguacggguuccgccaccagaacagcgagggccgggggcaggccgcggaccugaaguccacccaggccgccaucgaccagaucaacggcaagcugaaccgccucgucggcaagacgaacgagaaguuccaccagaucgagaaggaguucagcgagguggaggggcggauccaggaccuggagaaguacguggaggacaccaagaucgaccugugguccuacaacgccgagcuccuggucgcccuggagaaccagcacaccaucgaccucaccgacagcgagaugaacaagcuguucgagaagacgaagaagcagcugcgcgagaacgcggaggacaugggcaacgggugcuucaagaucuaccacaagugcgacaacgccugcaucggcuccauccgcaacgggaccuacgaccacgacguguaccgggacgaggcccucaacaaccgcuuccagaucaagggcguggagcucaagagcggcuacaaggacuggauccuguggaucuccuucgccaucagcugcuuccugcugugcgucgcccugcucggguucaucaugugggcgugccagaagggcaacauccggugcaacaucugcaucuga

SEQ ID NO: 72396 - RNA, 1701 nt, Artificial Sequence; identical to SEQ ID NO: 72375
  derived and/or modified CDS sequence (opt1) from hemagglutinin__InfluenzaA__AFD98373

SEQ ID NO: 72397 - RNA, 1701 nt, Artificial Sequence; identical to SEQ ID NO: 71006
  derived and/or modified CDS sequence (opt1) from hemagglutinin__InfluenzaA__AFD98384

SEQ ID NO: 72398 - RNA, 1701 nt, Artificial Sequence
  derived and/or modified CDS sequence (opt1) from hemagglutinin__InfluenzaA__AFD98395
augaagaccaucaucgcccugagcuacauccucugccugguguucgcccagaagcugcccggcgacgacaacuccaccgcgacgcucugccuggggcaccacgccgucccgaacggcaccaucgugaagaccaucaccaacgaccagaucgaggugacgaacgccaccgagcugguccagaacagcuccgccggggagaucugcgacagcccccaccacauccucgacggcgagaacugcacccugaucgacgcccugcucggggacccccagugcgacggcuuccagaacaagaagugggaccuguucguggagcgcucccgggcguacagcaacugcuaccccuacgacgugccggacuacgccucccugcgcagccucgucgccuccagcggcacccuggaguucaacaacgaguccuucaacuggacgggggugacccagaacggcaccagcuccgccugcauccggcgcagcaacaacuccuucuucagccggcugaacuggcucacccaccugaacuucaaguaccccgcgcugaacgugacgaugcccaacaacgagcaguucgacaagcucuacaucuggggcguccaccaccccgggaccgacaaggaccagaucuuccuguacgcccaggccuccgggcgcaucaccgugagcaccaagcggucccagcaggccgugaucccgaacaucggcagccgcccccggguccgcaacauccccagccggaucuccaucuacuggacgaucgugaagcccggcgacauccugcucaucaacagcaccgggaaccugaucgccccgcgcggcuacuucaagauccgguccggcaagagcuccaucaugcgcagcgacgcgcccaucgggaagugcaacuccgagugcaucacccccaacggcagcauccccaacgacaagccguuccagaacgugaaccggaucaccuacggggccugcccccgcuacgucaagcaguccacgcugaagcucgccaccggcaugcggaacgugcccgagaagcagacccgcgggaucuucggcgccaucgccggguucaucgagaacggcugggagggcaugauggacgggugguacggcuuccggcaccagaacagcgaggggcgcggccaggcggccgaccugaaguccacccaggccgccaucgaccagaucaacgggaagcugaaccggcucaucggcaagacgaacgagaaguuccaccagaucgagaaggaguucagcgagguggagggccgcauccaggaccuggagaaguacgucgaggacaccaagaucgaccugugguccuacaacgccgagcuccugguggcgcuggagaaccagcacaccaucgaccucaccgacagcgagaugaacaagcuguucgagaagacgaagaagcagcugcgcgagaacgccgaggacauggggaacggcugcuucaagaucuaccacaagugcgacaacgccugcaucggguccauccggaacggcaccuacgaccacgacguguaccgcgacgaggcccucaacaaccgguuccagaucaagggggucgagcucaagagcggcuacaaggacuggauccuguggaucuccuucgccaucagcugcuuccugcugugcguggcgcugcucggcuucaucaugugggccugccagaaggggaacauccgcugcaacaucugcaucuga

SEQ ID NO: 72399 - RNA, 1701 nt, Artificial Sequence; identical to SEQ ID NO: 72375
  derived and/or modified CDS sequence (opt1) from hemagglutinin__InfluenzaA__AFD98406

SEQ ID NO: 72400 - RNA, 1701 nt, Artificial Sequence; identical to SEQ ID NO: 72378
  derived and/or modified CDS sequence (opt1) from hemagglutinin__InfluenzaA__AFD98417

SEQ ID NO: 72401 - RNA, 1701 nt, Artificial Sequence
  derived and/or modified CDS sequence (opt1) from hemagglutinin__InfluenzaA__AFD98428
augaagaccaucaucgcccugagcuacauccucugccugguguucgcccagaagcugcccggcaacgacaacuccaccgcgacgcucugccuggggcaccacgccgucccgaacggcaccaucgugaagaccaucaccaacgaccagaucgaggugacgaacgccaccgagcugguccagagcuccagcaccggggagaucugcaacagcccccaccagauccucgacggcgagaacugcacccugaucgacgcccugcucggggacccccagugcgacggcuuccagaacaagaagugggaccuguucguggagcgcagcaaggcccacuccaacugcuaccccuacgacgugccggacuacgcgagccugcggucccucgucgccagcuccggcacgcuggaguucaacaacgagagcuucaacuggaccggggugacccagaacggcaccuccagcgccugcauccgccgguccaacaacagcuucuucucccgccugaacuggcucacgcaccugaacuucaaguaccccgcccugaacgugaccaugcccaacaacgagcaguucgacaagcucuacaucuggggcguccaccaccccgggaccgacaaggaccagaccuuccuguacgcgcaggccagcgggcggaucacgguguccaccaagcgcagccagcaggccgugaucccgaacaucggcagccggccccgcguccggaacauccccucccgcgugagcaucuacuggaccaucgugaagcccggcgacauccugcucaucaacuccaccgggaaccugaucgccccgcggggcuacuucaagauccgcagcgggaaguccagcaucaugcgguccgacgcccccaucggcaagugcaacagcgcgugcaucacgcccaacggcuccauccccaacgacaagccguuccagaacgucaaccgcaucaccuacggggccugcccccgguacgugaagcagaacacccugaagcucgccaccggcaugcgcaacgugcccgagaagcagacgcgggggaucuucggcgccaucgccggguucaucgagaacggcugggagggcauggucgacgggugguacggcuuccgccaccagaacagcgaggggcggggccaggcggccgaccugaaguccacccaggccgccaucgaccagaucaacgggaagcugaaccgccucaucggcaagaccaacgagaaguuccaccagaucgagaaggaguucagcgagguggagggccggauccaggaccuggagaaguacguggaggacaccaagaucgaccugugguccuacaacgccgagcuccuggucgcgcuggagaaccagcacacgaucgaccucaccgacagcgagaugaacaagcuguucgagaagaccaagaagcagcugcgcgagaacgccgaggacauggggaacggcugcuucaagaucuaccacaagugcgacaacgccugcaucggguccauccgcaacggcaccuacgaccacgacguguaccgggacgaggcccucaacaaccgcuuccagaucaaggggguggagcugaaguccggcuacaaggacuggauccuguggaucuccuucacgaucagcugcuuccuccugugcgucgcccugcucggcuucaucaugugggcgugccagaaggggaacauccggugcaacaucugcaucuga

SEQ ID NO: 72402 - RNA, 1701 nt, Artificial Sequence; identical to SEQ ID NO: 70891
  derived and/or modified CDS sequence (opt1) from hemagglutinin__InfluenzaA__AFD98439

SEQ ID NO: 72403 - RNA, 1701 nt, Artificial Sequence
  derived and/or modified CDS sequence (opt1) from hemagglutinin__InfluenzaA__AFD98449
augaagaccaucaucgcccugagcuacauccucugccugguguucgcccagaagcugcccggcaacgacaacuccaccgcgacgcucugccuggggcaccacgccgucccgaacggcaccaucgugaagaccaucaccaacgaccagaucgaggugacgaacgccaccgagcugguccagagcuccagcaccggggagaucugcgacagcccccaccagauccucgacggcaagaacugcacccugaucgacgcccugcucggggacccccagugcgacggcuuccagaacaagaagugggaccuguucguggagcgcagcaaggccuacuccaacugcuaccccuacgacgugccggacuacgcgagccugcggucccucgucgccagcuccggcacgcuggaguucaacaacgagaacuucaacuggaccggggugacccagaacggcaccagcuccgccugcauccgccggagcaagaacuccuucuucagccgccugaacuggcucacgcaccugaacuucaaguuccccgcccugaacgugaccaugcccaacaacgagcaguucgacaagcucuacaucuggggcguccaccaccccgggaccgacaaggaccagaucuuccuguacgcgcaggccuccgggcggaucaccgugagcacgaagcgcucccagcagaccgccaucccgaacaucggcagccggccccgcgugcggaacauccccagccgcaucuccaucuacuggaccaucgucaagcccggcgacauccugcucaucaacagcaccgggaaccugaucgccccgcggggcuacuucaagauccgcuccgggaaguccuccaucaugcggagcgacgcccccaucggcaagugcaacuccgagugcaucacgcccaacggcagcauccccaacgacaagccguuccagaacgugaaccgcaucaccuacggggcgugcccccgguacgugaagcagaacacccugaagcucgccaccggcaugcgcaacguccccgagaagcagacgcgggggaucuucggcgccaucgccggguucaucgagaacggcugggagggcaugguggacgggugguacggcuuccgccaccagaacuccgaggggcggggccaggccgcggaccucaagagcacccaggccgccaucgaccagaucaacgggaagcugaaccgccugaucggcaagaccaacgagaaguuccaccagaucgagaaggaguucuccgagguggagggccggauccaggaccuggagaaguacgucgaggacaccaagaucgaccuguggagcuacaacgccgagcuccugguggcccuggagaaccagcacacgaucgaccucaccgacuccgagaugaacaagcuguucgagaagaccaagaagcagcugcgcgagaacgcggaggacauggggaacggcugcuucaagaucuaccacaagugcgacaacgccugcaucgggagcauccgcaacggcaccuacaaccacgacguguaccgggacgaggcccucaacaaccgcuuccagaucaagggggucgagcugaaguccggcuacaaggacuggauccuguggaucagcuucgccaucuccugcuuccuccugugcguggcccugcucggcuucaucaugugggcgugccagaaggggaacauccggugcaacaucugcaucuga

SEQ ID NO: 72404 - RNA, 1701 nt, Artificial Sequence
  derived and/or modified CDS sequence (opt1) from hemagglutinin__InfluenzaA__AFD98460
augaagaccaucaucgcccugagcuacauccucugccugguguucgcccagaagcugcccggcaacgacaacuccaccgcgacgcucugccuggggcaccacgccgucccgaacggcaccaucgugaagaccaucaccaacgaccagaucgaggugacgaacgccaccgagcugguccagagcuccagcgccggggagaucugcgacagcccccaccacauccucgacggcgagaacugcacccugaucgacgcccugcucggggacccccagugcgacggcuuccagaacaagaagugggaccuguucguggagcgcagccgggcguacuccaacugcuaccccuacgacgugccggacuacgccagccugcgcucccucgucgccagcuccggcacccuggaguucaacaacgagagcuucaacuggacgggggugacccagaacggcaccuccagcgccugcauccggcgcuccaacaacagcuucuucuccaagcugaacuggcucacccaccugaacuucaaguaccccgcgcugaacgugacgaugcccaacaacgagcaguucgacaagcucuacaucuggggcguccaccaccccgggaccgacaaggaccagaucuuccuguacgcccaggccagcgggcggaucaccguguccaccaagcgcagccagcaggccgugaucccgaacaucggcagccggccccgcguccggaacauccccucccgcaucagcaucuacuggacgaucgugaagcccggcgacauccugcucaucaacuccaccgggaaccugaucgccccgcggggcuacuucaagauccgcagcgggaaguccagcaucaugcgguccgacgcgcccaucggcaagugcaacagcgagugcaucacccccaacggcuccauccccaacgacaagccguuccagaacgugaaccgcaucaccuacggggccugcccccgguacgucaagcagagcacgcugaagcucgccaccggcaugcgcaacgugcccgagaagcagacccgggggaucuucggcgccaucgccggguucaucgagaacggcugggagggcaugauggacgggugguacggcuuccgccaccagaacuccgaggggcggggccaggcggccgaccugaaguccacccaggccgccaucgaccagaucaacgggaagcugaaccgccucaucggcaagacgaacgagaaguuccaccagaucgagaaggaguucuccgagguggagggccggauccaggaccuggagaaguacgucgaggacaccaagaucgaccuguggagcuacaacgccgagcuccugguggcgcuggagaaccagcacaccaucgaccucaccgacuccgagaugaacaagcuguucgagaagacgaagaagcagcugcgcgagaacgccgaggacauggggaacggcugcuucaagaucuaccacaagugcgacaacgccugcaucgggagcauccgcaacggcaccuacgaccacgacguguaccgggacgaggcccucuccaaccgcuuccagaucaagggggucgagcucaagagcggcuacaaggacuggauccuguggaucuccuucgccaucagcugcuuccugcugugcguggcgcugcucggcuucaucaugugggccugccagaaggggaacauccggugcaacaucugcaucuga

SEQ ID NO: 72405 - RNA, 1701 nt, Artificial Sequence; identical to SEQ ID NO: 70891
  derived and/or modified CDS sequence (opt1) from hemagglutinin__InfluenzaA__AFD98471

SEQ ID NO: 72406 - RNA, 1701 nt, Artificial Sequence
  derived and/or modified CDS sequence (opt1) from hemagglutinin__InfluenzaA__AFD98481
augaagaccaucaucgcccugagcuacauccucugccugguguucgcccagaagcugcccggcaacgacaacuccaccgcgacgcucugccuggggcaccacgccgucccgaacggcaccaucgugaagaccaucaccaacgaccagaucgaggugacgaacgccaccgagcugguccagaacagcuccaccggggagaucugcaacagcccccaccagauccucgacggcgagaacugcacccugaucgacgcccugcucggggacccccagugcgacggcuuccagaacaagaagugggaccuguucguggagcgcuccaaggcccacagcaacugcuaccccuacgacgugccggacuacgcgucccugcggagccucgucgccuccagcggcacgcuggaguucaacaacgaguccuucaacuggaccggggugacccagaacggcaccagcuccgccugcauccgccggagcaacaacuccuucuucagccgccugaacuggcucacgcaccugaacuucaaguaccccgcccugaacgugaccaugcccaacaacgagcaguucgacaagcucuacaucuggggcguccaccaccccgggaccgacaaggaccagaucuuccuguacgcgcaggccgccgggcggaucaccguguccacgaagcgcagccagcaggccgugaucccgaacaucggcucccggccccgcguccggaacauccccagccgcgugagcaucuacuggaccaucgugaagcccggcgacauccugcucaucaacuccaccgggaaccugaucgccccgcggggcuacuucaagauccgcagcgggaaguccagcgucaugcgguccgacgcgcccaucggcaagugcaacagcgccugcaucacccccaacggcuccauccccaacgacaagccguuccagaacgugaaccgcaucacguacggggccugcccccgguacgugaagcagaacacccugaagcucgccaccggcaugcgcaacguccccgagaagcagacccgggggaucuucggcgccaucgcgggguucaucgagaacggcugggagggcaugguggacgggugguacggcuuccgccaccagaacagcgaggggcggggccaggccgccgaccugaaguccacgcaggccgccaucgaccagaucaacgggaagcugaaccgccucaucggcaagaccaacgagaaguuccaccagaucgagaaggaguucagcgagguggagggccggauccaggaccuggagaaguacgucgaggacaccaagaucgaccugugguccuacaacgcggagcuccugguggcccuggagaaccagcacaccaucgaccucacggacagcgagaugaacaagcuguucgagaagaccaagaagcagcugcgcgagaacgccgaggacauggggaacggcugcuucaagaucuaccacaagugcgacaacgccugcaucggguccauccgcaacggcaccuacgaccacgacguguaccgggacgaggcccucaacaaccgcuuccagaucaagggggucgagcucaagagcggcuacaaggacuggauccuguggaucuccuucgcgaucagcugcuuccugcugugcguggcccugcucggcuucaucaugugggccugccagaaggggaacauccggugcaacaucugcaucuga

SEQ ID NO: 72407 - RNA, 1701 nt, Artificial Sequence; identical to SEQ ID NO: 71006
  derived and/or modified CDS sequence (opt1) from hemagglutinin__InfluenzaA__AFD98492

SEQ ID NO: 72408 - RNA, 1701 nt, Artificial Sequence
  derived and/or modified CDS sequence (opt1) from hemagglutinin__InfluenzaA__AFD98503
augaagaccaucaucgcccugagcuacauccucugccugguguucgcccagaagcugcccggcaacgacaacuccaccgcgacgcucugccuggggcaccacgccgucccgaacggcaccaucgugaagaccaucaccaacgaccagaucgaggugacgaacgccaccgagcugguccagagcuccagcgccggggagaucugcgacagcccccaccacauccucgacggcgagaacugcacccugaucgacgcccugcucggggacccccagugcgacggcuuccagaacaagaagugggaccuguucguggagcgcagccgggcguacuccaacugcuaccccuacgacgugccggacuacgccagccugcgcucccucgucgccagcuccggcacccuggaguucaacaacgagagcuucaacuggacgggggugacccagaacggcaccuccagcgccugcauccggcgcuccaacaacagcuucuucucccggcugaacuggcucacccaccugaacuucaaguaccccgcgcugaacgugacgaugcccaacaacgagcaguucgacaagcucuacaucuggggcguccaccaccccgggaccgacaaggaccagaucuuccuguacgcccaggccagcgggcgcaucaccguguccaccaagcggagccagcaggccgugaucccgaacaucggcagccgcccccggguccgcaacauccccucccggaucagcaucuacuggacgaucgugaagcccggcgacauccugcucaucaacuccaccgggaaccugaucgccccgcgcggcuacuucaagauccggagcgggaaguccagcaucaugcgcuccgacgcgcccaucggcaagugcaacagcgagugcaucacccccaacggcuccauccccaacgacaagccguuccagaacgugaaccggaucaccuacggggccugcccccgcuacgucaagcagagcacgcugaagcucgccaccggcaugcggaacgugcccgagaagcagaccaaggggaucuucggcgccaucgccggguucaucgagaacggcugggagggcaugauggacgggugguacggcuuccgccaccagaacuccgaggggcggggccaggcggccgaccugaaguccacccaggccgccaucgaccagaucaacgggaagcugaaccgccucaucggcaagacgaacgagaaguuccaccagaucgagaaggaguucuccgagguggagggccggauccaggaccuggagaaguacgucgaggacaccaagaucgaccuguggagcuacaacgccgagcuccugguggcgcuggagaaccagcacaccaucgaccucaccgacuccgagaugaacaagcuguucgagaagacgaagaagcagcugcgcgagaacgccgaggacauggggaacggcugcuucaagaucuaccacaagugcgacaacgccugcaucgggagcauccgcaacggcaccuacgaccacgacguguaccgggacgaggcccucaacaaccgcuuccagaucaagggggucgagcugaaguccggcuacaaggacuggauccuguggaucagcuucgccaucuccugcuuccuccugugcguggcgcugcucggcuucaucaugugggccugccagaaggggaacauccggugcaacaucugcaucuga

SEQ ID NO: 72409 - RNA, 1701 nt, Artificial Sequence; identical to SEQ ID NO: 71006
  derived and/or modified CDS sequence (opt1) from hemagglutinin__InfluenzaA__AFD98514

SEQ ID NO: 72410 - RNA, 1701 nt, Artificial Sequence; identical to SEQ ID NO: 72358
  derived and/or modified CDS sequence (opt1) from hemagglutinin__InfluenzaA__AFD98525

SEQ ID NO: 72411 - RNA, 1701 nt, Artificial Sequence; identical to SEQ ID NO: 70879
  derived and/or modified CDS sequence (opt1) from hemagglutinin__InfluenzaA__AFD98558

SEQ ID NO: 72412 - RNA, 1701 nt, Artificial Sequence
  derived and/or modified CDS sequence (opt1) from hemagglutinin__InfluenzaA__AFD98569
augaagaccaucaucgcccugagcuacauccucugccugguguucgcccagaagcugcccggcaacgacaacuccaccgcgacgcucugccuggggcaccacgccgucccgaacggcaccaucgugaagaccaucaccaacgaccagaucgaggugacgaacgccaccgagcugguccagagcuccagcaccggggagaucugcaacagcccccaccagauccucgacggcgagaacugcacccugaucgacgcccugcucggggacccccagugcgacggcuuccagaacaagaagugggaccuguucguggagcgcagcaaggcccacuccaacugcuaccccuacgacgugccggacuacgcgagccugcggucccucgucgccagcuccggcacgcuggaguucaacaacgagagcuucaacuggaccggggugacccagaacggcaccuccagcgccugcauccgccgguccaacaacagcuucuucucccgccugaacuggcucacgcaccugaacuucaaguaccccgcccugaacgugaccaugcccaacaacgagcaguucgacaagcucuacaucuggggcguccaccaccccgggaccgacaaggaccagaccuuccuguacgcgcaggccagcgggcggaucacgguguccaccaagcgcagccagcaggccgugaucccgaacaucggcagccggccccgcguccggaacauccccucccgcgugagcaucuacuggaccaucgugaagcccggcgacauccugcucaucaacuccaccgggaaccugaucgccccgcggggcuacuucaagauccgcagcgggaaguccagcaucaugcgguccgacgcccccaucggcaagugcaacagcgcgugcaucacgcccaacggcuccauccccaacgacaagccguuccagaacgucaaccgcaucaccuacggggccugcccccgguacgugaagcagaacacccugaagcucgccaccggcaugcgcaacgugcccgagaagcagacgcgggggaucuucggcgccaucgccggguucaucgagaacggcugggagggcauggucgacgggugguacggcuuccgccaccagaacagcgaggggcggggccaggcggccgaccugaaguccacccaggccgccaucgaccagaucaacgggaagcugaaccgccucaucggcaagaccaacgagaaguuccaccagaucgagaaggaguucagcgagguggagggccggauccaggaccuggagaaguacguggaggacaccaagaucgaccugugguccuacaacgccgagcuccuggucgcgcuggagaaccagcacacgaucgaccucaccgacagcgagaugaacaagcuguucgagaagaccaagaagcagcugcgcgagaacgccgaggacauggggaacggcugcuucaagaucuaccacgagugcgacaacgccugcaucggguccauccgcaacggcaccuacgaccacgacguguaccgggacgaggcccucaacaaccgcuuccagaucaaggggguggagcugaaguccggcuacaaggacuggauccuguggaucuccuucgccaucagcugcuuccuccugugcgucgcgcugcucggcuucaucaugugggccugccagaaggggaacauccggugcaacaucugcaucuga

SEQ ID NO: 72413 - RNA, 1701 nt, Artificial Sequence; identical to SEQ ID NO: 70879
  derived and/or modified CDS sequence (opt1) from hemagglutinin__InfluenzaA__AFD98580

SEQ ID NO: 72414 - RNA, 1701 nt, Artificial Sequence
  derived and/or modified CDS sequence (opt1) from hemagglutinin__InfluenzaA__AFE02942
augaaggccauccuggugguccuccuguacaccuucgccaccgcgaacgccgacacgcugugcaucggcuaccacgccaacaacagcaccgacaccguggacacccuccuggagaagaacgugacggucacccacuccgugaaccugcucgaggacaagcacaacgggaagcugugcaagcugcgcggcguggcgccccuccaccuggggaagugcaacaucgccggcuggauccuggggaacccggagugcgagagccucuccaccgcgagcuccuggagcuacaucgucgagaccuccaacagcgacaacggcacgugcuaccccggcgacuucaucgacuacgaggagcugcgggagcagcuguccagcguguccagcuucgagcgcuucgagaucuuccccaagaccuccagcuggcccaaccacgacuccaacaagggggugaccgccgccugcccgcacgccggcgccaagagcuucuacaagaaccucaucuggcuggucaagaaggggaacuccuaccccaagcugagcaaguccuacaucaacgacaagggcaaggaggugcucgugcugugggggauccaccaccccagcaccagcgccgaccagcagucccuguaccagaacgccgacgccuacgucuucguguggacgagccgguacuccaagaaguucaagcccgagaucgccauccgcccgaaggugcgggaccaggagggccgcaugaacuacuacuggacccucgucgagcccggcgacaagaucaccuucgaggcgaccgggaaccugguggugccccgguacgccuucgccauggaccgcaacgccggcagcgggaucaucaucuccgacacgcccguccacgacugcaacacgaccugccagaccccgaagggcgccaucaacaccagccugcccuuccagaacauccaccccaucaccaucggcaagugccccaaguacgugaaguccaccaagcuccggcuggcgaccgggcugcgcaacgugccgagcauccagucccggggccucuucggggccaucgccggcuucaucgagggcggguggacgggcauggucgacgggugguacggcuaccaccaccagaacgagcaggggagcggcuacgccgccgaccugaaguccacccagaacgcgaucgacgagaucaccaacaaggugaacagcgugaucgagaagaugaacacccaguucacggccgucgggaaggaguucaaccaccuggagaagcgcaucgagaaccucaacaagaagguggacgacggcuuccuggacaucuggaccuacaacgccgagcugcucguccugcuggagaacgagcggacccucgacuaccacgacuccaacgugaagaaccuguacgagaaggugcgcagccagcugaagaacaacgccaaggagaucggcaacgggugcuucgaguucuaccacaagugcgacaacacgugcauggaguccgucaagaacggcaccuacgacuaccccaaguacagcgaggaggccaagcucaaccgggaggagaucgacggggugaagcuggaguccacccgcaucuaccagauccuggcgaucuacagcaccguggccuccagccucguccugguggugagccugggcgccaucuccuucuggaugugcagcaacgggucccuccagugccggaucugcaucuga

SEQ ID NO: 72415 - RNA, 1701 nt, Artificial Sequence; identical to SEQ ID NO: 67857
  derived and/or modified CDS sequence (opt1) from hemagglutinin__InfluenzaA__AFE18688

SEQ ID NO: 72416 - RNA, 1701 nt, Artificial Sequence; identical to SEQ ID NO: 64674
  derived and/or modified CDS sequence (opt1) from hemagglutinin__InfluenzaA__AFE47624

SEQ ID NO: 72417 - RNA, 1701 nt, Artificial Sequence; identical to SEQ ID NO: 65424
  derived and/or modified CDS sequence (opt1) from hemagglutinin__InfluenzaA__AFE47635

SEQ ID NO: 72418 - RNA, 1701 nt, Artificial Sequence; identical to SEQ ID NO: 71006
  derived and/or modified CDS sequence (opt1) from hemagglutinin__InfluenzaA__AFF18506

SEQ ID NO: 72419 - RNA, 1701 nt, Artificial Sequence
  derived and/or modified CDS sequence (opt1) from hemagglutinin__InfluenzaA__AFF57124
augaaggccauccuggugguccuccuguacaccuucgccaccgcgaacgccgacacgcugugcaucggcuaccacgccaacaacagcaccgacaccguggacaccgugcucgagaagaacgucacggugacccacuccgugaaccugcuggaggacaagcacaacgggaagcucugcaagcugcgcggcgucgcgccccugcaccucgggaagugcaacaucgccggcuggauccuggggaacccggagugcgagagccuguccaccgccagcuccuggagcuacaucguggagaccuccagcuccgacaacggcacgugcuaccccggcgacuucaucaacuacgaggagcuccgggagcagcugagcuccgugagcuccuucgagcgcuucgagaucuuccccaagaccagcuccuggcccaaccacgacagcaacaagggggucaccgccgccugcccgcacgccggcgcgaaguccuucuacaagaaccugaucuggcucgugaagaaggagaacagcuaccccaagcuguccaagagcuacaucaacgacaaggggaaggaggugcugguccucuggggcauccaccaccccagcaccacggccgaccagcagcggcuguaccagaacgccgacgccuacguguucguggggaccucccgcuacagcaagaaguucaagcccgagaucgccauccggccgaagguccgcgaccaggagggccggaugaacuacuacuggacccugguggagcccggcgacaagaucaccuucgaggcgacggggaaccucguggucccccgcuacgccuucgccauggagcggaacgccggcuccgggaucaucaucagcgacacccccgugcacgacugcaacacgaccugccagaccccgaagggcgccaucaacaccucccugcccuuccagaacauccaccccaucaccaucggcaagugccccaaguacgucaagagcaccaagcugcgccucgcgacggggcugcggaacgugccguccauccagagccgcggccuguucggggccaucgccggcuucaucgagggcggguggaccggcaugguggacgggugguacggcuaccaccaccagaacgagcagggguccggcuacgccgccgaccucaagagcacccagaacgcgaucgacaagaucaccaacaaggugaacuccgucaucgagaagaugaacacgcaguucaccgccguggggaaggaguucaaccaccuggagaagcggaucgagaaccugaacaagaaggucgacgacggcuuccucgacaucuggaccuacaacgccgagcugcuggugcuccuggagaacgagcgcacccuggacuaccacgacagcaacgugaagaaccucuacgagaagguccggaaccagcugaagaacaacgccaaggagaucggcaacgggugcuucgaguucuaccacaagugcgacaacacgugcauggaguccgugaagaacggcaccuacgacuaccccaaguacagcgaggaggccaagcugaaccgcgaggagaucgacggggugaagcucgaguccacccggaucuaccagauccuggcgaucuacagcaccgucgccuccagccuggugcucguggucucccugggcgccaucagcuucuggaugugcagcaacgggucccugcagugccgcaucugcaucuga

SEQ ID NO: 72420 - RNA, 1701 nt, Artificial Sequence
  derived and/or modified CDS sequence (opt1) from hemagglutinin__InfluenzaA__AFF57128
augaaggccauccuggugguccuccuguacaccuucgccaccgcgaacgccgacacgcugugcaucggcuaccacgccaacaacagcaccgacaccguggacaccgugcucgagaagaacgucacggugacccacuccgugaaccugcuggaggacaagcacaacgggaagcucugcaagcugcgcggcgucgcgccccugcaccucgggaagugcaacaucgccggcuggauccuggggaacccggagugcgagagccuguccaccgccagcuccuggagcuacaucguggagaccuccagcuccgacaacggcacgugcuaccccggcgacuucaucaacuacgaggagcuccgggagcagcugagcuccgugagcuccuucgagcgcuucgagaucuuccccaagaccagcuccuggcccaaccacgacagcaacaagggggucaccgccgccugcccgcacgccggcgcgaaguccuucuacaagaaccugaucuggcucgugaagaaggggaacagcuaccccaagcuguccaagagcuacaucaacgacaagggcaaggaggugcugguccucugggggauccaccaccccagcaccacggccgaccagcaguccaucuaccagaacgccgacgccuacguguucgugggcaccagccgguacuccaagaaguucaagcccgagaucgccauccgcccgaagguccgggaccaggagggccgcaugaacuacuacuggacccugguggagcccggggacaagaucaccuucgaggcgacgggcaaccugguggucccccgguacgccuucgccauggagcgcaacgccgggagcggcaucaucaucuccgacacccccgugcacgacugcaacacgaccugccagaccccgaagggcgccaucaacaccagccuccccuuccagaacauccaccccaucaccaucgggaagugccccaaguacgugaaguccaccaagcugcggcuggcgacgggccuccgcaacgucccgagcauccagucccgggggcuguucggcgccaucgccggguucaucgagggcggcuggaccgggaugguggacggcugguacggguaccaccaccagaacgagcagggcagcggguacgccgccgaccugaaguccacccagaacgcgaucgacaagaucaccaacaaggugaacagcgucaucgagaagaugaacacgcaguucaccgccgugggcaaggaguucaaccaccucgagaagcgcaucgagaaccugaacaagaaggucgacgacggcuuccuggacaucuggaccuacaacgccgagcuccuggugcugcucgagaacgagcggacccuggacuaccacgacuccaacgugaagaaccuguacgagaagguccgcaaccagcucaagaacaacgccaaggagaucgggaacggcugcuucgaguucuaccacaagugcgacaacacgugcauggagagcgugaagaacgggaccuacgacuaccccaaguacuccgaggaggccaagcugaaccgggaggagaucgacggcgugaagcuggagagcacccgcaucuaccagauccucgcgaucuacuccaccgucgccagcucccuggugcugguggucagccucggggccaucagcuucuggaugugcuccaacggcagccugcagugccggaucugcaucuga

SEQ ID NO: 72421 - RNA, 1701 nt, Artificial Sequence
  derived and/or modified CDS sequence (opt1) from hemagglutinin__InfluenzaA__AFF57132
augaaggccauccuggugguccuccuguacaccuucgccaccgcgaacgccgacacgcugugcaucggcuaccacgccaacaacagcaccgacaccguggacaccgugcucgagaagaacgucacggugacccacuccgugaaccugcuggaggacaagcacaacgggaagcucugcaagcugcgcggcgucgcgccccugcaccucgggaagugcaacaucgccggcuggauccuggggaacccggagugcgagagccuguccaccgccagcuccuggagcuacaucguggagaccuccagcuccgacaacggcacgugcuaccccggcgacuucaucgacuacgaggagcuccgggagcagcugagcuccgugagcuccuucgagcgcuucgagaucuuccccaagaccagcuccuggcccaaccacgacagcaacaagggggucaccgccgccugcccgcacgccggcgcgaagggguucuacaagaaccugaucuggcucgugaagaagggcaacuccuaccccaagcugagcaaguccuacaucaacgacaaggggaaggaggugcugguccucuggggcauccaccaccccagcaccacggccgaccagcagagcaucuaccagaacgccgacaccuacguguucgugggcaccucccgguacagcaagaaguucaagcccgagaucgccauccgcccgaagguccgggaccaggaggggcgcaugaacuacuacuggacccugguggagcccggcgacaagaucacguucgaggccaccgggaaccugguggucccccgguacgcguucgccauggagcgcaacgccggcuccggcaucaucaucagcgacacccccgugcacgacugcaacaccacgugccagaccccgaagggggccaucaacaccucccuccccuuccagaacauccaccccaucaccaucggcaagugccccaaguacgucaagagcacgaagcugcggcuggccaccgggcuccgcaacgugccguccauccagagccggggccuguucggggcgaucgccggcuucaucgagggcggguggaccggcaugguggacgggugguacggcuaccaccaccagaacgagcagggguccggcuacgccgccgaccucaagagcacccagaacgccaucgacaagaucacgaacaaggugaacuccgucaucgagaagaugaacacccaguucaccgcggugggcaaggaguucaaccaccuggagaagcgcaucgagaaccugaacaagaaggucgacgacggguuccuggacaucuggaccuacaacgccgagcuccuggugcugcucgagaacgagcggacgcuggacuaccacgacagcaacgugaagaaccuguacgagaagguccgcaaccagcucaagaacaacgccaaggagaucggcaacgggugcuucgaguucuaccacaagugcgacaacacgugcauggaguccgugaagaacgagaccuacgacuaccccaaguacagcgaggaggccaagcugaaccgggaggagaucgacggcgugaagcuggaguccacccgcaucuaccagauccucgccaucuacagcaccgucgcguccagccuggugcugguggucucccucggggccaucagcuucuggaugugcagcaacggcucccugcagugccggaucugcaucuga

SEQ ID NO: 72422 - RNA, 1701 nt, Artificial Sequence
  derived and/or modified CDS sequence (opt1) from hemagglutinin__InfluenzaA__AFF57136
augaaggccauccuggugguccuccuguacaccuucgccaccgcgaacgccgacacgcugugcaucggcuaccacgccaacaacagcaccgacaccguggacaccgugcucgagaagaacgucacggugacccacuccgugaaccugcuggaggacaagcacaacgggaagcucugcaagcugcgcggcgucgcgccccugcaccucgggaagugcaacaucgccggcuggauccuggggaacccggagugcgagagccuguccaccgccagcuccuggagcuacaucguggagaccuccagcuccgacaacggcacgugcuaccccggcgacuucaucgacuacgaggagcuccgggagcagcugagcuccgugagcuccuucgagcgcuucgagaucuuccccaagaccagcuccuggcccaaccacgacagcaacaagggggucaccgccgccugcccgcacgccggcgcgaaguccuucuacaagaaccugaucuggcucgugaagaaggggaacagcuaccccaagcuguccaagagcuacaucaacgacaagggcaaggaggugcugguccucugggggauccaccaccccagcaccuccgccgaccagcagagccuguaccagaacgccgacgccuacguguucgugggcuccagccgguacuccaagaaguucaagcccgagaucgccauccgcccgaagguccgggaccgcgagggccggaugaacuacuacuggacgcugguggagcccggggacaagaucaccuucgaggcgaccggcaaccucguggucccccgcuacgccuucgccauggagcggaacgccgggagcggcaucaucaucuccgacacccccguguacgacugcaacacgaccugccagaccccgaagggcgccaucaacaccagccugcccuuccagaacauccaccccaucacgaucgggaagugccccaaguacgugaaguccaccaagcugcgccucgcgaccggccugcggaacgucccgagcauccagucccgcgggcuguucggcgccaucgccggguucaucgagggcggcuggaccgggaugguggacggcugguacggguaccaccaccagaacgagcagggcagcggguacgccgccgaccucaaguccacgcagaacgcgaucgacgagaucaccaacaaggugaacagcgucaucgagaagaugaacacccaguucaccgccgugggcaaggaguucaaccaccuggagaagcggaucgagaaccugaacaagaaggucgacgacggcuuccucgacaucuggacguacaacgccgagcugcuggugcuccuggagaacgagcgcacccuggacuaccacgacuccaacgugaagaaccucuacgagaagguccggagccagcugaagaacaacgccaaggagaucgggaacggcugcuucgaguucuaccacaagugcgacaacacgugcauggaguccgugaagaacgggaccuacgacuaccccaaguacagcgaggaggccaagcugaaccgcgaggagaucgacggcgugaagcucgaguccacccggaucuaccagauccuggcgaucuacagcaccgucgccagcucccuggugcucguggucagccugggggccaucuccuucuggaugugcagcaacggcucccugcagugccgcaucugcaucuga

SEQ ID NO: 72423 - RNA, 1701 nt, Artificial Sequence
  derived and/or modified CDS sequence (opt1) from hemagglutinin__InfluenzaA__AFF57144
augaaggccauccuggugguccuccuguacaccuucgccaccgcgaacgccgacacgcugugcaucggcuaccacgccaacaacagcaccgacaccguggacaccgugcucgagaagaacgucacggugacccacuccgugaaccugcuggaggacaagcacaacgggaagcucugcaagcugcgcggcgucgcgccccugcaccucgggaagugcaacaucgccggcuggauccuggggaacccggagugcgagagccuguccaccgccagcuccuggagcuacaucguggagaccuccagcuccgacaacggcacgugcuaccccggcgacuucaucgacuacgaggagcuccgggagcagcugagcuccgugagcuccuucgagcgcuucgagaucuuccccaagaccagcuccuggcccaaccacgacagcaacaagggggucaccgccgccugcccgcacgccggcgcgaaguccuucuacaagaaccugaucuggcucgugaagaaggggaacagcuaccccaagcuguccaagagcuacaucaacgacaagggcaaggaggugcugguccucugggggauccaccaccccagcaccuccgacgaccagcagagccuguaccagaacgaggacgccuacguguucgugggcuccagccgguacuccaagaaguucaagcccgagaucgccauccgcccgaagguccgggaccgcgagggccggaugaacuacuacuggacgcugguggagcccggggacaagaucaccuucgaggccaccggcaaccucguggucccccgcuacgccuucgcgauggagcggaacgccgggagcggcaucaucaucuccgacacccccgugcacgacugcaacacgaccugccagaccccgaagggcgccaucaacaccagccugcccuuccagaacauccaccccaucacgaucgggaagugccccaaguacgugaaguccaccaagcugcgccucgccaccggccugcggaacgucccgagcauccagucccgcgggcuguucggcgccaucgcgggguucaucgagggcggcuggaccgggaugguggacggcugguacggguaccaccaccagaacgagcagggcagcggguacgccgccgaccucaaguccacgcagaacgccaucgacgagaucaccaacaaggugaacagcgucaucgagaagaugaacacccaguucaccgccgugggcaaggaguucaaccaccuggagaagcggaucgagaaccugaacaagaaggucgacgacggcuuccucgacaucuggacguacaacgcggagcugcuggugcuccuggagaacgagcgcacccuggacuaccacgacuccaacgugaagaaccucuacgagaagguccggagccagcugaagaacaacgccaaggagaucgggaacggcugcuucgaguucuaccacaagugcgacaacacgugcauggaguccgugaagaacgggaccuacgacuaccccaaguacagcgaggaggccaagcugaaccgcgaggagaucgacggcgugaagcucgaguccacccggaucuaccagauccuggccaucuacagcaccgucgccagcucccuggugcucguggucagccugggggcgaucuccuucuggaugugcagcaacggcucccugcagugccgcaucugcaucuga

SEQ ID NO: 72424 - RNA, 1701 nt, Artificial Sequence
  derived and/or modified CDS sequence (opt1) from hemagglutinin__InfluenzaA__AFF57148
augaaggccauccuggugguccuccuguacaccuucgccaccgcgaacgccgacacgcugugcaucggcuaccacgccaacaacagcaccgacaccguggacacccuccuggagaagaacgugacggucacccacuccgugaaccugcucgaggacaagcacaacgggaagcugugcaagcugcgcggcguggcgccccuccaccuggggaagugcaacaucgccggcuggauccuggggaacccggagugcgagagccucuccaccgccagcuccuggagcuacaucgucgagaccuccagcuccgacaacggcacgugcuaccccggcgacuucaucgacuacgaggagcugcgggagcagcugagcuccgugagcuccuucgagcgcuucgagaucuuccccaagaccagcuccuggcccaaccacgacagcaacaagggggugaccgccgccugcccgcacgccggcgcgaaguccuucuacaagaaccucaucuggcuggucaagaaggggaacagcuaccccaagcuguccaagagcuacaucaacgacaagggcaaggaggugcucgugcugugggggauccaccaccccagcaccuccgacgaccagcagagccuguaccagaacgaggacgccuacgucuucgugggcuccagccgguacuccaagaaguucaagcccgagaucgccauccgcccgaaggugcgggaccgcgagggccggaugaacuacuacuggacgcucgucgagcccggggacaagaucaccuucgaggccaccggcaaccugguggugccccgcuacgccuucgcgauggagcggaacgccgggagcggcaucaucaucuccgacacccccguccacgacugcaacacgaccugccagaccccgaagggcgccaucaacaccagccugcccuuccagaacauccaccccaucacgaucgggaagugccccaaguacgugaaguccaccaagcuccgccuggccaccggccugcggaacgugccgagcauccagucccgcggccucuucggggccaucgcgggguucaucgagggcggcuggaccgggauggucgacggcugguacggguaccaccaccagaacgagcagggcagcggguacgccgccgaccugaaguccacgcagaacgccaucgacgagaucaccaacaaggugaacagcgugaucgagaagaugaacacccaguucaccgccgucggcaaggaguucaaccaccuggagaagcggaucgagaaccucaacaagaagguggacgacggcuuccuggacaucuggacguacaacgcggagcugcucguccugcuggagaacgagcgcacccucgacuaccacgacuccaacgugaagaaccuguacgagaaggugcggagccagcugaagaacaacgccaaggagaucgggaacggcugcuucgaguucuaccacaagugcgacaacacgugcauggaguccgucaagaacgggaccuacgacuaccccaaguacagcgaggaggccaagcucaaccgcgaggagaucgacggcgugaagcuggaguccacccggaucuaccagauccuggccaucuacagcaccguggccagcucccucguccugguggugagccugggggcgaucuccuucuggaugugcagcaacggcucccuccagugccgcaucugcaucuga

SEQ ID NO: 72425 - RNA, 1701 nt, Artificial Sequence
  derived and/or modified CDS sequence (opt1) from hemagglutinin__InfluenzaA__AFF57160
augaaggccauccuggugguccuccuguacaccuucgccaccgcgaacgccgacacgcugugcaucggcuaccacgccaacaacagcaccgacaccguggacaccgugcucgagaagaacgucacggugacccacuccgugaaccugcuggaggacaagcacaacgggaagcucugcaagcugcgcggcgucgcgccccugcaccucgggaagugcaacaucgccggcuggauccuggggaacccggagugcgagagccuguccaccgccagcuccuggagcuacaucguggagaccuccagcuccgacaacggcacgugcuaccccggcgacuucaucgacuacgaggagcuccgggagcagcugagcuccgugagcuccuucgagcgcuucgagaucuuccccaagaccagcuccuggcccaaccacgacagcaacaagggggucaccgccgccugcccgcacgccggcgcgaaguccuucuacaagaaccugaucuggcucgugaagaaggggaacagcuaccccaagcuguccgagagcuacaucaacgacaagggcaaggaggugcugguccucugggggauccaccaccccagcaccuccgccgaccagcagagccuguaccagaacgaggacgccuacguguucgugggcuccagccgguacuccaagaaguucaagcccgagaucgccauccgcccgaagguccgggaccgcgagggccggaugaacuacuacuggacgcugguggagcccggggacaagaucaccuucgaggccaccggcaaccucguggucccccgcuacgcguucgccauggagcggaacgccgggagcggcaucaucaucuccgacacccccgugcacgacugcaacacgaccugccagaccccgaagggcgccaucaacaccagccugcccuuccagaacauccaccccaucacgaucgggaagugccccaaguacgugaaguccaccaagcugcgccucgccaccggccugcggaacgucccgagcauccagucccgcgggcuguucggcgcgaucgccggguucaucgagggcggcuggaccgggaugguggacggcugguacggguaccaccaccagaacgagcagggcagcggguacgccgccgaccucaaguccacgcagaacgccaucgacgagaucaccaacaaggugaacagcgucaucgagaagaugaacacccaguucaccgcggugggcaaggaguucaaccaccuggagaagcggaucgagaaccugaacaagaaggucgacgacggcuuccucgacaucuggacguacaacgccgagcugcuggugcuccuggagaacgagcgcacccuggacuaccacgacuccaacgugaagaaccucuacgagaagguccggagccagcugaagaacaacgccaaggagaucgggaacggcugcuucgaguucuaccacaagugcgacaacacgugcauggaguccgugaagaacgggaccuacgacuaccccaaguacagcgaggaggccaagcugaaccgcgaggagaucgacggcgugaagcucgaguccacccggaucuaccagauccuggccaucuacagcaccgucgcgagcucccuggugcucguggucagccugggggccaucuccuucuggaugugcagcaacggcucccugcagugccgcaucugcaucuga

SEQ ID NO: 72426 - RNA, 1701 nt, Artificial Sequence
  derived and/or modified CDS sequence (opt1) from hemagglutinin__InfluenzaA__AFF57164
augaaggccauccuggugguccuccuguacaccuucgccaccgcgaacgccgacacgcugugcaucggcuaccacgccaacaacagcaccgacaccguggacaccgugcucgagaagaacgucacggugacccacuccgugaaccugcuggaggacaagcacaacgagaagcucugcaagcugcgcggggucgcgccccugcaccucggcaagugcaacaucgccggguggauccugggcaacccggagugcgagagccuguccaccgccagcuccuggagcuacaucguggagaccuccagcuccgacaacgggacgugcuaccccggcgacuucaucgacuacgaggagcuccgggagcagcugagcuccgugagcuccuucgagcgcuucgagaucuuccccaagaccagcuccuggcccaaccacgacagcaacaagggcgucaccgccgccugcccgcacgccggggcgaaguccuucuacaagaaccugaucuggcucgugaagaagggcaacagcuaccccaagcuguccaagagcuacaucaacgacaaggggaaggaggugcugguccucuggggcauccaccaccccagcaccuccgccgaccagcagagccuguaccagaacgccgacgccuacguguucgugggguccagccgguacuccaagaaguucaagcccgagaucgccauccgcccgaagguccgggaccgcgagggccggaugaacuacuacuggacgcugguggagcccggcgacaagaucaccuucgaggcgaccgggaaccucguggucccccgcuacgccuucgccauggagcggaacgccggcagcgggaucaucaucuccgacacccccgugcacgacugcaacacgaccugccagaccccgaagggcgccaucaacaccagccugcccuuccagaacauccaccccaucacgaucggcaagugccccaaguacgugaaguccaccaagcugcgccucgcgaccgggcugcggaacgucccgagcauccagucccgcggccuguucggggccaucgccggcuucaucgagggcggguggaccggcaugguggacgggugguacggcuaccaccaccagaacgagcaggggagcggcuacgccgccgaccucaaguccacgcagaacgcgaucgacgagaucaccaacaaggugaacagcgucaucgagaagaugaacacccaguucaccgccguggggaaggaguucaaccaccuggagaagcggaucgagaaccugaacaagaaggucgacgacggcuuccucgacaucuggacguacaacgccgagcugcuggugcuccuggagaacgagcgcacccuggacuaccacgacuccaacgugaagaaccucuacgagaagguccggagccagcugaagaacaacgccaaggagaucggcaacgggugcuucgaguucuaccacaagugcgacaacacgugcauggaguccgugaagaacggcaccuacgacuaccccaaguacagcgaggaggccaagcugaaccgcgaggagaucgacggggugaagcucgaguccacccggaucuaccagauccuggcgaucuacagcaccgucgccagcucccuggugcucguggucagccugggcgccaucuccuucuggaugugcagcaacgggucccugcagugccgcaucugcaucuga

SEQ ID NO: 72427 - RNA, 1701 nt, Artificial Sequence; identical to SEQ ID NO: 72426
  derived and/or modified CDS sequence (opt1) from hemagglutinin__InfluenzaA__AFF57168

SEQ ID NO: 72428 - RNA, 1701 nt, Artificial Sequence
  derived and/or modified CDS sequence (opt1) from hemagglutinin__InfluenzaA__AFF57172
augaaggccauccuggugguccuccuguacaccuucgccaccgcgaacgccgacacgcugugcaucggcuaccacgccaacaacagcaccgacaccguggacaccgugcucgagaagaacgucacggugacccacuccgugaaccugcuggaggacaagcacaacgggaagcucugcaagcugcgcggcgucgcgccccugcaccucgggaagugcaacaucgccggcuggauccuggggaacccggagugcgagagccuguccaccgccagcuccuggagcuacaucguggagaccuccagcuccgacaacggcacgugcuaccccggcgacuucaucgacuacgaggagcuccgggagcagcugagcuccgugagcuccuucgagcgcuucgagaucuuccccaagaccagcuccuggcccaaccacgacagcaacaagggggucaccgccgccugcccgcacgccggcgcgaaguccuucuacaagaaccugaucuggcucgugaagaaggggaacagcuaccccaagcuguccaagagcuacaucaacgacaagggcaaggaggugcugguccucugggggauccaccaccccagcaccuccgccgaccagcagagccuguaccagaacgaggacgccuacguguucgugggcuccagccgguacuccaagaaguucaagcccgagaucgccauccgcccgaagguccgggaccgcgagggccggaugaacuacuacuggacgcugguggagcccggggacaagaucaccuucgaggccaccggcaaccucguggucccccgcuacgcguucgccauggagcggaacgccgggagcggcaucaucaucuccgacacccccgugcacgacugcaacacgaccugccagaccccgaagggcgccaucaacaccagccugcccuuccagaacauccaccccaucacgaucgggaagugccccaaguacgugaaguccaccaagcugcgccucgccaccggccugcggaacgucccgagcauccagucccgcgggcuguucggcgcgaucgccggguucaucgagggcggcuggaccgggaugguggacggcugguacggguaccaccaccagaacgagcagggcagcggguacgccgccgaccucaaguccacgcagaacgccaucgacgagaucaccaacaaggugaacagcgucaucgagaagaugaacacccaguucaccgcggugggcaaggaguucaaccaccuggagaagcggaucgagaaccugaacaagaaggucgacgacggcuuccucgacaucuggacguacaacgccgagcugcuggugcuccuggagaacgagcgcacccuggacuaccacgacuccaacgugaagaaccucuacgagaagguccggagccagcugaagaacaacgccaaggagaucgggaacggcugcuucgaguucuaccacaagugcgacaacacgugcauggaguccgugaagaacgggaccuacgacuaccccaaguacagcgaggaggccaagcugaaccgcgaggagaucgacggcgugaagcucgaguccacccggaucuaccagauccuggccaucuacagcaccgucgcgagcucccuggugcucguggucagccugggggccaucuccuucuggaugugcagcaacggcucccugcagugccgcaucugcaucuga

SEQ ID NO: 72429 - RNA, 1701 nt, Artificial Sequence
  derived and/or modified CDS sequence (opt1) from hemagglutinin__InfluenzaA__AFF57176
augaaggccauccuggugguccuccuguacaccuucgccaccgcgaacgccgacacgcugugcaucggcuaccacgccaacaacagcaccgacaccguggacaccgugcucgagaagaacgucacggugacccacuccgugaaccugcuggaggacaagcacaacgggaagcucugcaagcugcgcggcgucgcgccccugcaccucgggaagugcaacaucgccggcuggauccuggggaacccggagugcgagagccuguccaccgccagcuccuggagcuacaucguggagaccuccagcuccgacaacggcacgugcuaccccggcgacuucaucgacuacgaggagcuccgggagcagcugagcuccgugagcuccuucgagcgcuucgagaucuuccccaagaccagcuccuggcccaaccacgacagcaacaagggggucaccgccgccugcccgcacgccggcgcgaaguccuucuacaagaaccugaucuggcucgugaagaaggagaacagcuaccccaagcuguccaagagcuacaucaacgacaaggggaaggaggugcugguccucuggggcauccaccaccccagcaccuccgccgaccagcagagccuguaccagaacgccgacgccuacguguucgugggguccagccgguacuccaagaaguucaagcccgagaucgccauccgcccgaagguccgggaccgcgagggccggaugaacuacuacuggacgcugguggagcccggcgacaagaucaccuucgaggcgaccgggaaccucguggucccccgcuacgccuucgccauggagcggaacgccggcagcgggaucaucaucuccgacacccccgugcacgacugcaacacgaccugccagaccccgaagggcgccaucaacaccagccugcccuuccagaacauccaccccaucacgaucggcaagugccccaaguacgugaaguccaccaagcugcgccucgcgaccgggcugcggaacgucccgagcauccagucccgcggccuguucggggccaucgccggcuucaucgagggcggguggaccggcaugguggacgggugguacggcuaccaccaccagaacgagcaggggagcggcuacgccgccgaccucaaguccacgcagaacgcgaucgacgagaucaccaacaaggugaacagcgucaucgagaagaugaacacccaguucaccgccguggggaaggaguucaaccaccuggagaagcggaucgagaaccugaacaagaaggucgacgacggcuuccucgacaucuggacguacaacgccgagcugcuggugcuccuggagaacgagcgcacccuggacuaccacgacuccaacgugaagaaccucuacgagaagguccggagccagcugaagaacaacgccaaggagaucggcaacgggugcuucgaguucuaccacaagugcgacaacacgugcauggaguccgugaagaacggcaccuacgacuaccccaaguacagcgaggaggccaagcugaaccgcgaggagaucgacggggugaagcucgaguccacccggaucuaccagauccuggcgaucuacagcaccgucgccagcucccuggugcucguggucagccugggcgccaucuccuucuggaugugcagcaacgggucccugcagugccgcaucugcaucuga

SEQ ID NO: 72430 - RNA, 1701 nt, Artificial Sequence
  derived and/or modified CDS sequence (opt1) from hemagglutinin__InfluenzaA__AFF57184
augaaggccauccuggugguccuccuguacaccuucgccaccgcgaacgccgacacgcugugcaucggcuaccacgccaacaacagcaccgacaccguggacaccgugcucgagaagaacgucacggugacccacuccgugaaccugcuggaggacaagcacaacgggaagcucugcaagcugcgcggcgucgcgccccugcaccucgggaagugcaacaucgccggcuggauccuggggaacccggagugcgagagccuguccaccgccagcuccuggagcuacaucguggagaccuccagcuccgacaacggcacgugcuaccccggcgacuucaucgacuacgaggagcuccgggagcagcugagcuccgugagcuccuucgagcgcuucgagaucuuccccaagaccagcuccuggcccaaccacgacagcaacaagggggucaccgccgccugcccgcacgccggcgcgaaguccuucuacaagaaccugaucuggcucgugaagaaggagaacagcuaccagaagcuguccaagagcuacaucaacgacaaggggaaggaggugcugguccucuggggcauccaccaccccagcaccuccgccgaccagcagagccuguaccagaacgccgacgccuacguguucgugggguccagccgguacuccaagaaguucaagcccgagaucgccauccgccccaagguccgggaccgcgagggccggaugaacuacuacuggacgcugguggagccgggcgacaagaucaccuucgaggcgaccgggaaccucguggucccccgcuacgccuucgccauggagcggaacgccggcagcgggaucaucaucuccgacacccccgugcacgacugcaacacgaccugccagacccccaagggcgccaucaacaccagccugccguuccagaacauccaccccaucacgaucggcaagugccccaaguacgugaaguccaccaagcugcgccucgcgaccgggcugcggaacguccccagcauccagucccgcggccuguucggggccaucgccggcuucaucgagggcggguggaccggcaugguggacgggugguacggcuaccaccaccagaacgagcaggggagcggcuacgccgccgaccucaaguccacgcagaacgcgaucgacgagaucaccaacaaggugaacagcgucaucgagaagaugaacacccaguucaccgccguggggaaggaguucaaccaccuggagaagcggaucgagaaccugaacaagaaggucgacgacggcuuccucgacaucuggacguacaacgccgagcugcuggugcuccuggagaacgagcgcacccuggacuaccacgacuccaacgugaagaaccucuacgagaagguccggagccagcugaagaacaacgccaaggagaucggcaacgggugcuucgaguucuaccacaagugcgacaacacgugcauggaguccgugaagaacggcaccuacgacuacccgaaguacagcgaggaggccaagcugaaccgcgaggagaucgacggggugaagcucgaguccacccggaucuaccagauccuggcgaucuacagcaccgucgccagcucccuggugcucguggucagccugggcgccaucuccuucuggaugugcagcaacgggucccugcagugccgcaucugcaucuga

SEQ ID NO: 72431 - RNA, 1701 nt, Artificial Sequence; identical to SEQ ID NO: 72423
  derived and/or modified CDS sequence (opt1) from hemagglutinin__InfluenzaA__AFF57188

SEQ ID NO: 72432 - RNA, 1707 nt, Artificial Sequence
  derived and/or modified CDS sequence (opt1) from hemagglutinin__InfluenzaA__AFF60787
auggagaagaucgugcugcuguucgccaucgucagccuggugaaguccgaccagaucugcaucggcuaccacgccaacaacagcaccgagcaggucgacaccaucauggagaagaacgugacggugacccacgcgcaggacauccuggagaagacccacaacgggaagcucugcgaccuggacggcgugaagccccugauccuccgcgacugcuccgucgccggguggcugcugggcaacccgaugugcgacgaguucaucaacgugcccgaguggagcuacaucguggagaaggccaaccccgucaacgaccucugcuaccccggggacuucaacgacuacgaggagcugaagcaccuccucucccggaucaaccacuucgagaagauccagaucauccccaagagcuccuggagcucccacgaggccagccugggcguguccagcgccugcccguaccagggcaaguccagcuucuuccgcaacguggucuggcugaucaagaagaacuccaccuaccccacgaucaagcggagcuacaacaacaccaaccaggaggaccuccuggugcugugggggauccaccaccccaacgacgcggccgagcagaccaagcucuaccagaacccgaccacguacaucuccgugggcaccagcacccugaaccagcgccuggucccccggaucgccacccgcuccgaggugaacgggcagagcggccggauggaguucuucuggacgauccucaagcccaacgacgccaucaacuucgagagcaacgggaacuucaucgcgcccgaguacgccuacaagaucgugaagaagggcgacuccaccaucaugaaguccgagcuggaguacggcaacugcaacaccaagugccagaccccgaugggggccaucaacagcagcaugcccuuccacaacauccacccccugacgaucggcgagugccccaaguacgucaaguccaaccgccucgugcuggccaccgggcugcggaacagcccgcagcgcgagcggcgccggaagaagcgcggccucuucggcgccaucgcgggguucaucgagggcggguggcagggcaugguggacgggugguacggcuaccaccacuccaacgagcagggcagcggguacgccgccgacaaggaguccacccagaaggccaucgacggcgucaccaacaaggugaacagcaucaucgacaagaugaacacgcaguucgaggccguggggcgggaguucaacaaccuggagcgccggaucgagaaccugaacaagaagauggaggacggcuuccucgacgucuggaccuacaacgcggagcugcuggugcucauggagaacgagcgcacccuggacuuccacgacuccaacgucaagaaccuguacgacaaggugcggcuccagcugcgcgacaacgccaaggagcuggggaacggcugcuucgaguucuaccacaagugcgacaacgagugcauggagagcgugcggaacggcaccuacgacuacccccaguacuccgaggaggcccgccucaagcgcgaggagaucagcggggucaagcuggaguccaucggcaucuaccagauccugagcaucuacuccacgguggccagcucccucgcccuggcgaucaugguggccgggcugagccucuggaugugcagcaacggcucccugcagugccggaucugcaucuga

SEQ ID NO: 72433 - RNA, 1701 nt, Artificial Sequence
  derived and/or modified CDS sequence (opt1) from hemagglutinin__InfluenzaA__AFG29042
augaaggccauccuggugguccuccuguacaccuucgccaccgcgaacgccgacacgcugugcaucggcuaccacgccaacaacagcaccgacaccguggacaccgugcucgagaagaacgucacggugacccacuccgugaaccugcuggaggacaagcacaacgggaagcucugcaagcugcgcggcgucgcgccccugcaccucgggaagugcaacaucgccggcuggauccuggggaacccggagugcgagagccuguccaccgcgagcuccuggagcuacaucguggagaccuucuccagcgacaacggcacgugcuaccccggcgacuucaucgacuacgaggagcuccgggagcagcuguccagcguguccagcuucgagcgcuucgagaucuuccccaagaccuccagcuggcccaaccacgacuccaacaagggggucaccgccgccugcccgcacgccggcgccaagagcuucuacaagaaccugaucuggcucgugaagaaggggaacuccuaccccaagcugagcaaguccuacaucaacgacaagggcaaggaggugcugguccucugggggauccaccaccccagcaccagcgccgaccagcagucccuguaccagaacgccgacgccuacguguucgugggcacgagccgguacuccaagaaguucaagcccgagaucgccauccgcccgaagguccgggaccaggagggccgcaugaacuacuacuggacccugaucgagcccggggacaagaucaccuucgaggcgaccggcaaccucguggugccccgguacgccuucgccauggagcgcaacgccgggagcggcaucaucaucuccgacacgcccguccacgacugcaacacgaccugccagaccccgaagggcgccaucaacaccagccugcccuuccagaacauccaccccaucaccaucgggaagugccccaaguacgugaaguccaccaagcugcggcucgcgaccggccugcgcaacgugccgagcauccagucccgggggcuguucggcgccaucgccggguucaucgagggcggcuggacggggauggucgacggcugguacggguaccaccaccagaacgagcagggcagcggguacgccgccgaccucaaguccacccagaacgcgaucgacgagaucaccaacaaggugaacagcgugaucgagaagaugaacacccaguucacggccgucggcaaggaguucaaccaccuggagaagcgcaucgagaaccugaacaagaagguggacgacggcuuccucgacaucuggaccuacaacgccgagcugcugguccuccuggagaacgagcggacccuggacuaccacgacuccaacgugaagaaccucuacgagaaggugcgcagccagcugaagaacaacgccaaggagaucgggaacggcugcuucgaguucuaccacaagugcgacaacacgugcauggaguccgucaagaacgggaccuacgacuaccccaaguacagcgaggaggccaagcugaaccgggaggagaucgacggcgugaagcucgaguccacccgcaucuaccagauccuggcgaucuacagcaccguggccuccagccugguccucguggugagccugggggccaucuccuucuggaugugcagcaacggcucccugcagugccggaucugcaucuga

SEQ ID NO: 72434 - RNA, 1701 nt, Artificial Sequence
  derived and/or modified CDS sequence (opt1) from hemagglutinin__InfluenzaA__AFG29044
augaaggccauccuggugguccuccuguacaccuucgccaccgcgaacgccgacacgcugugcaucggcuaccacgccaacaacagcaccgacaccguggacaccgugcucgagaagaacgucacggugacccacuccgugaaccugcuggaggacaagcacaacgggaagcucugcaagcugcgcggcgucgcgccccugcaccucgggaagugcaacaucgccggcuggauccuggggaacccggagugcgagagccuguccaccgccagcuccuggagcuacaucguggagacccccaacuccgacaacggcacgugcuaccccggcgacuucaucgacuacgaggagcuccgggagcagcugagcuccgugagcuccuucgagcgcuucgagaucuuccccaagaccagcuccuggccgaaccacgacagcaacaagggggucaccgccgccugcccccacgccggcgcgaaguccuucuacaagaaccugaucuggcucgugaagaaggggaacagcuaccccaagcuguccaagagcuacaucaacgacaagggcaaggaggugcugguccucugggggauccaccacccgcccaccuccacggaccagcagagccuguaccagaacgccgacgccuacguguucgugggcaccagccgguacuccaagaaguucaagcccgagaucgccauccgccccaagguccggggccaggaggggcgcaugaacuacuacuggacccugguggagcccggcgacaagaucaccuucgaggccacggggaaccucguggucccgcgguacgcguucgccauggagcgcaacgccggcagcggcaucaucaucuccgacacccccgugcacgacugcaacacgaccugccagacccccaagggggccaucaacaccagccugcccuuccagaacauccacccgaucaccaucggcaagugccccaaguacgugaaguccaccaagcugcggcucgccacggggcugcgcaacguccccagcauccagucccggggccuguucggggcgaucgccggcuucaucgagggcggguggaccggcaugguggacgggugguacggcuaccaccaccagaacgagcaggggagcggcuacgccgccgaccucaaguccacccagaacgccaucgacaagaucaccaacaaggugaacagcgucaucgagaagaugaacacgcaguucaccgcggugggcaaggaguucaaccaccuggagaagcgcaucgagaaccugaacaagaaggucgacgacggguuccucgacaucuggaccuacaacgccgagcugcuggugcuccuggagaacgagcggacccuggacuaccacgacuccaacgugaagaaccucuacgagaagguccgcagccagcugaagaacaacgccaaggagaucggcaacgggugcuucgaguucuaccacaagugcgacaacacgugcauggaguccgugaagaacggcaccuacgacuaccccaaguacagcgaggaggccaagcugaaccgggaggagaucgacggggugaagcucgaguccacccgcaucuaccagauccuggccaucuacagcaccgucgcguccagccuggugcucguggucucccugggcgccaucagcuucuggaugugcagcaacggcucccugcagugccggaucugcaucuga

SEQ ID NO: 72435 - RNA, 1701 nt, Artificial Sequence; identical to SEQ ID NO: 66693
  derived and/or modified CDS sequence (opt1) from hemagglutinin__InfluenzaA__AFG31060

SEQ ID NO: 72436 - RNA, 1701 nt, Artificial Sequence; identical to SEQ ID NO: 69248
  derived and/or modified CDS sequence (opt1) from hemagglutinin__InfluenzaA__AFG31070

SEQ ID NO: 72437 - RNA, 1701 nt, Artificial Sequence; identical to SEQ ID NO: 66680
  derived and/or modified CDS sequence (opt1) from hemagglutinin__InfluenzaA__AFG31080

SEQ ID NO: 72438 - RNA, 1701 nt, Artificial Sequence
  derived and/or modified CDS sequence (opt1) from hemagglutinin__InfluenzaA__AFG31100
augaaggccauccuggugguccuccuguacaccuucgccaccgcgaacgccgacacgcugugcaucggcuaccacgccaacaacagcaccgacaccguggacaccgugcucgagaagaacgucacggugacccacuccgugaaccugcuggaggacaagcacaacgggaagcucugcaagcugcgcggcgucgcgccccugcaccucgggaagugcaacaucgccggcuggauccuggggaacccggagugcgagagccuguccaccgcgagcuccuggagcuacaucguggagaccuccagcuccgacaacggcacgugcuaccccggcgacuucaucgacuacgaggagcuccgggagcagcugagcuccgugagcuccuucgagcgcuucgagaucuuccccaagaccagcuccuggcccaaccacgaccugaacaagggggucaccgccgccugcccgcacgccggcgccaagagcuucuacaagaaccucaucuggcuggugaagaaggggaacuccuaccccaagcugagcaaguccuacaucaacgacaagggcaaggaggugcucguccugugggggauccaccaccccagcaccagcgccgaccagcagucccuguaccagaacgccgacgccuacguguucgugggcacgagccgguacuccaagaaguucaagcccgagaucgccauccgcccgaagguccgggaccaggagggccgcaugaacuacuacuggacccucguggagcccggggacaagaucaccuucgaggcgaccggcaaccugguggucccccgguacgccuucgccauggagcgcaacgccgggagcggcaucaucaucuccgacacgcccgugcacgacugcaacacgaccugccagaccccgaagggcgccaucaacaccagccugcccuuccagaacauccaccccaucaccaucgggaagugccccaaguacgugaaguccaccaagcuccggcuggcgaccggccugcgcaacgucccgagcauccagucccggggccucuucggggccaucgccggguucaucgagggcggcuggacggggaugguggacggcugguacggguaccaccaccagaacgagcagggcagcggguacgccgccgaccugaaguccacccagaacgcgaucgacgagaucaccaacaaggugaacagcgucaucgagaagaugaacacccaguucacggccgugggcaaggaguucaaccaccuggagaagcgcaucgagaaccucaacaagaaggucgacgacggcuuccuggacaucuggaccuacaacgccgagcugcucgugcugcuggagaacgagcggacccucgacuaccacgacuccaacgugaagaaccuguacgagaagguccgcagccagcugaagaacaacgccaaggagaucgggaacggcugcuucgaguucuaccacaagugcgacaacacgugcauggaguccgugaagaacgggaccuacgacuaccccaaguacagcgaggaggccaagcucaaccgggaggagaucgacggcgugaagcuggaguccacccgcaucuaccagauccuggcgaucuacagcaccgucgccuccagccucgugcugaucgugagccugggggccaucuccuucuggaugugcagcaacggcucccuccagugccggaucugcaucuga

SEQ ID NO: 72439 - RNA, 1701 nt, Artificial Sequence; identical to SEQ ID NO: 66693
  derived and/or modified CDS sequence (opt1) from hemagglutinin__InfluenzaA__AFG31110

SEQ ID NO: 72440 - RNA, 1701 nt, Artificial Sequence; identical to SEQ ID NO: 66935
  derived and/or modified CDS sequence (opt1) from hemagglutinin__InfluenzaA__AFG31120

SEQ ID NO: 72441 - RNA, 1701 nt, Artificial Sequence; identical to SEQ ID NO: 66935
  derived and/or modified CDS sequence (opt1) from hemagglutinin__InfluenzaA__AFG31130

SEQ ID NO: 72442 - RNA, 1701 nt, Artificial Sequence; identical to SEQ ID NO: 66935
  derived and/or modified CDS sequence (opt1) from hemagglutinin__InfluenzaA__AFG31140

SEQ ID NO: 72443 - RNA, 1701 nt, Artificial Sequence; identical to SEQ ID NO: 67795
  derived and/or modified CDS sequence (opt1) from hemagglutinin__InfluenzaA__AFG31150

SEQ ID NO: 72444 - RNA, 1701 nt, Artificial Sequence; identical to SEQ ID NO: 67795
  derived and/or modified CDS sequence (opt1) from hemagglutinin__InfluenzaA__AFG31160

SEQ ID NO: 72445 - RNA, 1701 nt, Artificial Sequence; identical to SEQ ID NO: 66693
  derived and/or modified CDS sequence (opt1) from hemagglutinin__InfluenzaA__AFG31170

SEQ ID NO: 72446 - RNA, 1701 nt, Artificial Sequence; identical to SEQ ID NO: 66693
  derived and/or modified CDS sequence (opt1) from hemagglutinin__InfluenzaA__AFG31180

SEQ ID NO: 72447 - RNA, 1701 nt, Artificial Sequence; identical to SEQ ID NO: 66693
  derived and/or modified CDS sequence (opt1) from hemagglutinin__InfluenzaA__AFG31190

SEQ ID NO: 72448 - RNA, 1701 nt, Artificial Sequence; identical to SEQ ID NO: 66693
  derived and/or modified CDS sequence (opt1) from hemagglutinin__InfluenzaA__AFG31200

SEQ ID NO: 72449 - RNA, 1701 nt, Artificial Sequence; identical to SEQ ID NO: 66693
  derived and/or modified CDS sequence (opt1) from hemagglutinin__InfluenzaA__AFG31210

SEQ ID NO: 72450 - RNA, 1701 nt, Artificial Sequence; identical to SEQ ID NO: 66693
  derived and/or modified CDS sequence (opt1) from hemagglutinin__InfluenzaA__AFG31220

SEQ ID NO: 72451 - RNA, 1701 nt, Artificial Sequence; identical to SEQ ID NO: 69248
  derived and/or modified CDS sequence (opt1) from hemagglutinin__InfluenzaA__AFG31230

SEQ ID NO: 72452 - RNA, 1701 nt, Artificial Sequence; identical to SEQ ID NO: 66693
  derived and/or modified CDS sequence (opt1) from hemagglutinin__InfluenzaA__AFG31240

SEQ ID NO: 72453 - RNA, 1701 nt, Artificial Sequence; identical to SEQ ID NO: 66693
  derived and/or modified CDS sequence (opt1) from hemagglutinin__InfluenzaA__AFG31250

SEQ ID NO: 72454 - RNA, 1701 nt, Artificial Sequence; identical to SEQ ID NO: 66693
  derived and/or modified CDS sequence (opt1) from hemagglutinin__InfluenzaA__AFG31260

SEQ ID NO: 72455 - RNA, 1701 nt, Artificial Sequence; identical to SEQ ID NO: 66693
  derived and/or modified CDS sequence (opt1) from hemagglutinin__InfluenzaA__AFG31270

SEQ ID NO: 72456 - RNA, 1701 nt, Artificial Sequence; identical to SEQ ID NO: 66693
  derived and/or modified CDS sequence (opt1) from hemagglutinin__InfluenzaA__AFG31280

SEQ ID NO: 72457 - RNA, 1701 nt, Artificial Sequence; identical to SEQ ID NO: 66693
  derived and/or modified CDS sequence (opt1) from hemagglutinin__InfluenzaA__AFG31290

SEQ ID NO: 72458 - RNA, 1701 nt, Artificial Sequence
  derived and/or modified CDS sequence (opt1) from hemagglutinin__InfluenzaA__AFG31300
augaaggccauccuggugguccuccuguacaccuucgccaccgcgaacgccgacacgcugugcaucggcuaccacgccaacaacagcaccgacaccguggacaccgugcucgagaagaacgucacggugacccacuccgugaaccugcuggaggacaagcacaacgggaagcucugcaagcugcgcggcgucgcgccccugcaccucgggaagugcaacaucgccggcuggauccuggggaacccggagugcgagagccuguccaccgccagcuccuggagcuacaucguggagaccuccagcuccgacaacggcacgugcuaccccggcgacuucaucgacuacgaggagcuccgggagcagcugagcuccgugagcuccuucgagcgcuucgagaucuuccccaagaccagcuccuggcccaaccacgacagcaacaagggggucaccgccgccugcccgcacgccggcgcgaaguccuucuacaagaaccugaucuggcucgugaagaaggggaacagcuaccccaagcuguccaagagcuacaucaacgacaagggcaaggaggugcugguccucugggggauccaccaccccagcaccuccgccgaccagcagagccuguaccagaacgccgacgccuacguguucgugggcacgucccgguacagcaagaaguucaagcccgagaucgccauccgcccgaagguccgggaccaggagggccgcaugaacuacuacuggacccugguggagcccggggacaagaucaccuucgaggcgaccggcaaccucguggucccccgguacgccuucgccauggagcgcaacgccggguccggcaucaucaucagcgacacgcccgugcacgacugcaacacgaccugccagaccccgaagggcgccaucaacaccucccugcccuuccagaacaucaaccccaucaccaucgggaagugccccaaguacgucaagagcaccaagcugcggcucgcgaccggccugcgcaacgugccguccauccagagccgggggcuguucggcgccaucgccggguucaucgagggcggcuggacggggaugguggacggcugguacggguaccaccaccagaacgagcagggcuccggguacgccgccgaccucaagagcacccagaacgcgaucgacgagaucaccaacaaggugaacuccgucaucgagaagaugaacacccaguucacggccgugggcaaggaguucaaccaccuggagaagcgcaucgagaaccugaacaagaaggucgacgacggcuuccucgacaucuggaccuacaacgccgagcugcuggugcuccuggagaacgagcggacccuggacuaccacgacagcaacgugaagaaccucuacgagaagguccgcucccagcugaagaacaacgccaaggagaucgggaacggcugcuucgaguucuaccacaagugcgacaacacgugcauggagagcgugaagaacgggaccuacgacuaccccaaguacuccgaggaggccaagcugaaccgggaggagaucgacggcgugaagcucgagagcacccgcaucuaccagauccuggcgaucuacuccaccgucgccagcagccuggugcucguggucucccugggggccaucagcuucuggaugugcuccaacggcagccugcagugccggaucugcaucuga

SEQ ID NO: 72459 - RNA, 1701 nt, Artificial Sequence; identical to SEQ ID NO: 69248
  derived and/or modified CDS sequence (opt1) from hemagglutinin__InfluenzaA__AFG31310

SEQ ID NO: 72460 - RNA, 1701 nt, Artificial Sequence; identical to SEQ ID NO: 66693
  derived and/or modified CDS sequence (opt1) from hemagglutinin__InfluenzaA__AFG31323

SEQ ID NO: 72461 - RNA, 1701 nt, Artificial Sequence; identical to SEQ ID NO: 66693
  derived and/or modified CDS sequence (opt1) from hemagglutinin__InfluenzaA__AFG31333

SEQ ID NO: 72462 - RNA, 1701 nt, Artificial Sequence; identical to SEQ ID NO: 66693
  derived and/or modified CDS sequence (opt1) from hemagglutinin__InfluenzaA__AFG31343

SEQ ID NO: 72463 - RNA, 1701 nt, Artificial Sequence; identical to SEQ ID NO: 66693
  derived and/or modified CDS sequence (opt1) from hemagglutinin__InfluenzaA__AFG31353

SEQ ID NO: 72464 - RNA, 1701 nt, Artificial Sequence; identical to SEQ ID NO: 66693
  derived and/or modified CDS sequence (opt1) from hemagglutinin__InfluenzaA__AFG31363

SEQ ID NO: 72465 - RNA, 1701 nt, Artificial Sequence; identical to SEQ ID NO: 66693
  derived and/or modified CDS sequence (opt1) from hemagglutinin__InfluenzaA__AFG31376

SEQ ID NO: 72466 - RNA, 1701 nt, Artificial Sequence; identical to SEQ ID NO: 66693
  derived and/or modified CDS sequence (opt1) from hemagglutinin__InfluenzaA__AFG31386

SEQ ID NO: 72467 - RNA, 1701 nt, Artificial Sequence; identical to SEQ ID NO: 66693
  derived and/or modified CDS sequence (opt1) from hemagglutinin__InfluenzaA__AFG31396

SEQ ID NO: 72468 - RNA, 1701 nt, Artificial Sequence; identical to SEQ ID NO: 66693
  derived and/or modified CDS sequence (opt1) from hemagglutinin__InfluenzaA__AFG31406

SEQ ID NO: 72469 - RNA, 1701 nt, Artificial Sequence; identical to SEQ ID NO: 66693
  derived and/or modified CDS sequence (opt1) from hemagglutinin__InfluenzaA__AFG31416

SEQ ID NO: 72470 - RNA, 1701 nt, Artificial Sequence; identical to SEQ ID NO: 66693
  derived and/or modified CDS sequence (opt1) from hemagglutinin__InfluenzaA__AFG31426

SEQ ID NO: 72471 - RNA, 1701 nt, Artificial Sequence; identical to SEQ ID NO: 66693
  derived and/or modified CDS sequence (opt1) from hemagglutinin__InfluenzaA__AFG31436

SEQ ID NO: 72472 - RNA, 1701 nt, Artificial Sequence; identical to SEQ ID NO: 66693
  derived and/or modified CDS sequence (opt1) from hemagglutinin__InfluenzaA__AFG31446

SEQ ID NO: 72473 - RNA, 1701 nt, Artificial Sequence; identical to SEQ ID NO: 66693
  derived and/or modified CDS sequence (opt1) from hemagglutinin__InfluenzaA__AFG31456

SEQ ID NO: 72474 - RNA, 1701 nt, Artificial Sequence; identical to SEQ ID NO: 66693
  derived and/or modified CDS sequence (opt1) from hemagglutinin__InfluenzaA__AFG31466

SEQ ID NO: 72475 - RNA, 1701 nt, Artificial Sequence; identical to SEQ ID NO: 67795
  derived and/or modified CDS sequence (opt1) from hemagglutinin__InfluenzaA__AFG31486

SEQ ID NO: 72476 - RNA, 1701 nt, Artificial Sequence; identical to SEQ ID NO: 66693
  derived and/or modified CDS sequence (opt1) from hemagglutinin__InfluenzaA__AFG31496

SEQ ID NO: 72477 - RNA, 1701 nt, Artificial Sequence; identical to SEQ ID NO: 66693
  derived and/or modified CDS sequence (opt1) from hemagglutinin__InfluenzaA__AFG31506

SEQ ID NO: 72478 - RNA, 1701 nt, Artificial Sequence; identical to SEQ ID NO: 66693
  derived and/or modified CDS sequence (opt1) from hemagglutinin__InfluenzaA__AFG31516

SEQ ID NO: 72479 - RNA, 1701 nt, Artificial Sequence; identical to SEQ ID NO: 66784
  derived and/or modified CDS sequence (opt1) from hemagglutinin__InfluenzaA__AFG31526

SEQ ID NO: 72480 - RNA, 1701 nt, Artificial Sequence; identical to SEQ ID NO: 66693
  derived and/or modified CDS sequence (opt1) from hemagglutinin__InfluenzaA__AFG31536

SEQ ID NO: 72481 - RNA, 1701 nt, Artificial Sequence; identical to SEQ ID NO: 69248
  derived and/or modified CDS sequence (opt1) from hemagglutinin__InfluenzaA__AFG31546

SEQ ID NO: 72482 - RNA, 1701 nt, Artificial Sequence; identical to SEQ ID NO: 69248
  derived and/or modified CDS sequence (opt1) from hemagglutinin__InfluenzaA__AFG31556

SEQ ID NO: 72483 - RNA, 1701 nt, Artificial Sequence; identical to SEQ ID NO: 66693
  derived and/or modified CDS sequence (opt1) from hemagglutinin__InfluenzaA__AFG31566

SEQ ID NO: 72484 - RNA, 1701 nt, Artificial Sequence; identical to SEQ ID NO: 66935
  derived and/or modified CDS sequence (opt1) from hemagglutinin__InfluenzaA__AFG31586

SEQ ID NO: 72485 - RNA, 1701 nt, Artificial Sequence; identical to SEQ ID NO: 66935
  derived and/or modified CDS sequence (opt1) from hemagglutinin__InfluenzaA__AFG31596

SEQ ID NO: 72486 - RNA, 1701 nt, Artificial Sequence; identical to SEQ ID NO: 66935
  derived and/or modified CDS sequence (opt1) from hemagglutinin__InfluenzaA__AFG31606

SEQ ID NO: 72487 - RNA, 1701 nt, Artificial Sequence; identical to SEQ ID NO: 66935
  derived and/or modified CDS sequence (opt1) from hemagglutinin__InfluenzaA__AFG31616

SEQ ID NO: 72488 - RNA, 1701 nt, Artificial Sequence; identical to SEQ ID NO: 66935
  derived and/or modified CDS sequence (opt1) from hemagglutinin__InfluenzaA__AFG31626

SEQ ID NO: 72489 - RNA, 1701 nt, Artificial Sequence; identical to SEQ ID NO: 66693
  derived and/or modified CDS sequence (opt1) from hemagglutinin__InfluenzaA__AFG31636

SEQ ID NO: 72490 - RNA, 1701 nt, Artificial Sequence; identical to SEQ ID NO: 66693
  derived and/or modified CDS sequence (opt1) from hemagglutinin__InfluenzaA__AFG31646

SEQ ID NO: 72491 - RNA, 1701 nt, Artificial Sequence; identical to SEQ ID NO: 67857
  derived and/or modified CDS sequence (opt1) from hemagglutinin__InfluenzaA__AFG31656

SEQ ID NO: 72492 - RNA, 1701 nt, Artificial Sequence; identical to SEQ ID NO: 67857
  derived and/or modified CDS sequence (opt1) from hemagglutinin__InfluenzaA__AFG31666

SEQ ID NO: 72493 - RNA, 1701 nt, Artificial Sequence
  derived and/or modified CDS sequence (opt1) from hemagglutinin__InfluenzaA__AFG71865
augaagaccaucaucgcccugagcuacaucuucugccucgcccugggccaggaccugcccgggaacgacaacuccaccgcgacgcucugccugggccaccacgccgugccgaacgggacccuggucaagaccaucaccaacgaccagaucgaggugacgaacgccaccgagcucgugcagagcuccagcaccggcaagaucugcaacaacccccaccgcauccuggacgggaucgacugcacccugaucgacgcccuccugggcgacccccacugcgacgucuuccagaacgagacgugggaccuguucguggagcgguccaaggccuucagcaacugcuaccccuacgacgugccggacuacgcgucccuccgcagccuggucgccuccagcggcacccuggaguucaucaccgagggguucaccuggacgggcgugacccagaacgggggcuccaacgccugcaagcgggggcccggcaucggcuucuucagccgccucaacuggcugaccaaguccgggagcaccuaccccgugcugaacgucacgaugcccaacaacgacaacuucgacaagcucuacaucuggggcgugcaccacccguccaccaaccaggagcagaccagccuguacgugcaggccuccgggcgggucaccgugagcacgcgccggucccagcagaccaucauccccaacaucggcagccgccccugggugcggggccugagcucccgcaucagcaucuacuggaccaucgucaagcccggggacgugcucgugaucaacuccaacggcaaccugaucgcgccgcggggguacuucaagaugcgcaccggcaagagcuccaucaugcggagcgacgcccccaucgacacgugcaucuccgagugcaucacccccaacgggagcauccccaacgacaagccguuccagaacgucaacaagaucaccuacggcgccugccccaaguacgugaagcagaacacccugaagcucgccacgggcaugcgcaacgugcccgagaagcagacccgggggcuguucggcgccaucgcgggguucaucgagaacggcugggaggggaugaucgacggcugguacggcuuccgccaccagaacuccgaggggaccggccaggccgccgaccucaagagcacccaggccgccaucgaccagaucaacgggaagcugaaccgggucaucgagaagacgaacgagaaguuccaccagaucgagaaggaguucuccgagguggagggccgcauccaggaccuggagaaguacguggaggacaccaagaucgaccuguggagcuacaacgcggagcuccuggucgcccuggagaaccagcacaccaucgaccucaccgacuccgagaugaacaagcuguucgagaagacgcggcgccagcugcgggagaacgccgaggacauggggaacggcugcuucaagaucuaccacaagugcgacaacgccugcaucgagagcauccgcaacggcaccuacgaccacgacguguaccgcgacgaggcccucaacaaccgguuccagaucaagggggucgagcugaaguccggcuacaaggacuggauccuguggaucagcuucgcgaucuccugcuuccuccugugcguggugcugcucggguucaucaugugggccugccagcgcggcaacauccggugcaacaucugcaucuga

SEQ ID NO: 72494 - RNA, 1701 nt, Artificial Sequence; identical to SEQ ID NO: 65580
  derived and/or modified CDS sequence (opt1) from hemagglutinin__InfluenzaA__AFG71876

SEQ ID NO: 72495 - RNA, 1701 nt, Artificial Sequence
  derived and/or modified CDS sequence (opt1) from hemagglutinin__InfluenzaA__AFG71898
augaagaccaucaucgcccugagcuaccucuucugccuggccuucggccaggaccugcccgggaacgacaacuccaccgcgacgcucugccugggccaccacgccgugccgaacgggacccuggucaagaccaucaccgacgaccagaucgaggugacgaacgccaccgagcucgugcagagcuccagcaccggcaagaucugcaacaacccccaccgcauccuggacgggaucgacugcacccugaucgacgcccuccugggcgacccccacugcgacgucuuccagaacgagacgugggaccuguucguggagcgguccaaggccuucagcaacugcuaccccuacgacgugccggacuacgcgucccuccgcagccuggucgccuccagcggcacccuggaguucaccaccgagggguucacguggaccggcgugacccagaacgggggcuccaacgccugcaagcgggggcccggcagcggcuucuucucccgccucaacuggcugaccaagagcggguccacguaccccgugcugaacgucaccaugagcaacaacgacaacuucgacaagcucuacaucuggggcgugcaccaccccuccaccaaccaggagcagaccagccuguacgugcaggccuccgggcgggucacggugagcacccgccggagccagcagaccaucaucccgaacaucggcucccgccccugggugcggggccugagcucccgcaucagcaucuacuggaccaucgucaagcccggggacgugcucgugaucaacuccaacggcaaccugaucgcgccccggggguacuucaagaugcgcacgggcaagagcuccaucaugcggagcgacgccccgaucgacacgugcgucuccgagugcaucacccccaacgggagcauccccaacgacaagcccuuccagaacgugaacaagaucaccuacggcgccugcccgaaguacgugaagcagaacacccugaagcucgccaccggcaugcgcaacguccccgagaagcagacccgggggcuguucggcgccaucgcgggguucaucgagaacggcugggaggggaugaucgacggcugguacggcuuccgccaccagaacuccgaggggaccggccaggccgccgaccucaagagcacgcaggccgccaucgaccagaucaacgggaagcugaaccgggugaucgagaagaccaacgagaaguuccaccagaucgagaaggaguucuccgagguggagggccgcauccaggaccuggagaaguacgucgaggacaccaagaucgaccuguggagcuacaacgcggagcuccugguggcccuggagaaccagcacaccaucgaccucacggacuccgagaugaacaagcuguucgagaagacccggcgccagcugcgggagaacgccgaggacauggggaacggcugcuucaagaucuaccacaagugcgacaacgccugcaucgagagcauccgcaacggcaccuacgaccacgacgucuaccgcgacgaggcccucaacaaccgguuccagaucaaggggguggagcugaaguccggcuacaaggacuggauccuguggaucagcuucgcgaucuccugcuuccuccugugcgugguccugcucggguucaucaugugggccugccagcgcggcaacauccggugcaacaucugcaucuga

SEQ ID NO: 72496 - RNA, 1701 nt, Artificial Sequence
  derived and/or modified CDS sequence (opt1) from hemagglutinin__InfluenzaA__AFG71920
augaagaccaucaucgcccugagcuacaucuucugccucgcccugggccaggaccugcccgggaacgacaacuccaccgcgacgcucugccugggccaccacgccgugccgaacgggacccuggucaagaccaucaccaacgaccagaucgaggugacgaacgccaccgagcucgugcagagcuccagcaccggcaagaucugcaacaacccccaccgcauccuggacgggaucaacugcacccugaucgacgcccuccugggcgacccccacugcgacgucuuccaggacgagacgugggaccuguucguggagcgguccaaggccuucagcaacugcuaccccuacgacgugccggacuacgcgucccuccgcagccugaucgccuccagcggcacccuggaguucaucaccgagggguucaccuggacgggcgucacccagaacgggggcuccaacgccugcaagcgggggcccggcagcggcuucuucucccgccucaacuggcugaccaagagcggguccaccuaccccgugcugaacgugacgaugcccaacaacgacaacuucgacaagcucuacaucuggggcguccaccacccgagcaccaaccaggagcagaccucccuguacgugcaggccagcgggcgggugaccgucuccacgcgccggagccagcagaccaucauccccaacaucggcagccgccccugggugcggggccuguccagccgcaucuccaucuacuggaccaucgugaagcccggggacguccucgugaucaacagcaacggcaaccugaucgcgccgcggggguacuucaagaugcgcaccggcaaguccagcaucaugcgguccgacgcccccaucgacacgugcaucagcgagugcaucacccccaacggguccauccccaacgacaagccguuccagaacgugaacaagaucaccuacggcgccugccccaaguacgucaagcagaacacccugaagcucgccacgggcaugcgcaacgugcccgagaagcagacccgggggcuguucggcgccaucgcgggguucaucgagaacggcugggaggggaugaucgacggcugguacggcuuccgccaccagaacagcgaggggaccggccaggccgccgaccugaaguccacccaggccgccaucgaccagaucaacgggaagcucaaccgggugaucgagaagacgaacgagaaguuccaccagaucgagaaggaguucagcgaggucgagggccgcauccaggaccuggagaaguacguggaggacaccaagaucgaccugugguccuacaacgcggagcuccugguggcccuggagaaccagcacaccaucgaccucaccgacagcgagaugaacaagcuguucgagaagacgcggcgccagcugcgggagaacgccgaggacauggggaacggcugcuucaagaucuaccacaagugcgacaacgccugcaucgaguccauccgcaacggcaccuacgaccacgacgucuaccgcgacgaggcccucaacaaccgguuccagaucaaggggguggagcucaagagcggcuacaaggacuggauccuguggaucuccuucgcgaucagcugcuuccugcugugcgucgugcugcucggguucaucaugugggccugccagcgcggcaacauccggugcaacaucugcaucuga

SEQ ID NO: 72497 - RNA, 1701 nt, Artificial Sequence
  derived and/or modified CDS sequence (opt1) from hemagglutinin__InfluenzaA__AFG71931
augaagaccaucaucgcccugagcuacaucuucugccucgugaucggccaggaccugcccgggaacgagaacuccaccgccacgcugugccucggccaccacgcggucccgaacgggacccuggugaagaccaucaccaacgaccagaucgaggugacgaacgccaccgagcugguccagagcuccagcaccggcaagaucugcaacaacccccaccgcauccucgacgggaucgacugcacccugaucgacgcccugcucggcgacccccacugcgacggcuuccagaacgagacgugggaccuguucguggagcgguccaaggccuucagcaacugcuaccccuacgacgugccggacuacgccucccugcgcagccucgucgcguccagcgggacccuggaguucaucaccgagggcuucaccuggacgggggugacccagaacggcggguccaacgccugcaagcggggccccggcaucggguucuucagccgccugaacuggcucaccaaguccggcagcaccuaccccgugcugaacgucacgaugcccaacaacgacaacuucgacaagcuguacaucuggggcgugcaccacccguccaccaaccaggagcagaccagccucuacgugcaggccuccgggcgggucaccgugagcacgcgccggucccagcagaccaucauccccaacaucggcagccgccccugggugcgggggcugagcucccgcaucagcaucuacuggaccaucgucaagcccggcgacgugcuggugaucaacuccaacgggaaccucaucgccccgcggggcuacuucaagaugcgcaccggcaagagcuccaucaugcggagcgacgcgcccaucgacacgugcaucuccgagugcaucacccccaacgggagcauccccaacgacaagccguuccagaacgucaacaagaucaccuacggcgccugccccaaguacgugaagcagaacacccugaagcuggccacggggaugcgcaacgugcccgagaagcagacccggggccucuucggggccaucgccggcuucaucgagaacgggugggagggcaugaucgacggcugguacggguuccgccaccagaacuccgagggcaccgggcaggcggccgaccucaagagcacccaggccgccaucgaccagaucaacggcaagcugaaccgggucaucgagaagacgaacgagaaguuccaccagaucgagaaggaguucuccgagguggaggggcgcauccaggaccucgagaaguacguggaggacaccaagaucgaccuguggagcuacaacgccgagcugcucgucgcgcuggagaaccagcacaccaucgaccugaccgacuccgagaugaacaagcuguucgagaagacgcggcgccagcugcgggagaacgccgaggacaugggcaacggcugcuucaagaucuaccacaagugcgacaacgccugcaucgagagcauccgcaacgggaccuacgaccacgacguguaccgcgacgaggcccugaacaaccgguuccagaucaagggcgucgagcucaaguccggguacaaggacuggauccuguggaucagcuucgccaucuccugcuuccugcucugcguggugcugcugggcuucaucaugugggcgugccagcgcggcaacauccggugcaacaucugcaucuga

SEQ ID NO: 72498 - RNA, 1701 nt, Artificial Sequence
  derived and/or modified CDS sequence (opt1) from hemagglutinin__InfluenzaA__AFG71942
augaagaccaucaucgcccugagcuacaucuucuaccucgcccugucccaggaccugcccggcaacgacaacagcaaggcgacccucugccuggggcaccacgccgugccgaacggcacgcuggucaagaccaucaccgacgaccagaccgaggugacgaacgccaccgagcucgugcaguccagcuccaccgggaagaucugcaacaacccccaccgcauccuggacggcauggacugcacccugaucgacgcccuccugggggacccccacugcgacgucuuccagaacgagacgugggaccuguucguggagcggagcaaggccuucuccaacugcuaccccuacgacgugccggacuacgcgagccuccgcucccuggucgccagcuccggcacccuggaguucaucaccgagggcuucaccuggacggaggugacccagaacgggggcagcaucgccugcaagcgggggcccgacuccggcuucuucagccgccucaacuggcugaccaaguccgggcggaccuaccccgugcugaacgucacgaugcccaacaacgacaacuucgacaagcucuacaucuggggcgugcaccacccgagcaccgaccaggagcagaccaaccuguacgugcagaccuccggccgcgucacggugagcacccggcgcucccagcagaccaucauccccaacaucgggagccggcccugggugcgcggccugagcucccggaucagcaucuacuggaccaucgucaagcccggggacgugcucgugaucaacuccaacggcaaccugaucgccccgcgcggcuacuucaagaugcggacgggcaagagcuccaucaugcgcagcgacgcgcccaucgacacgugcaucuccgagugcaucacccccaacgggagcauccccaacgacaagccguuccagaacgucaacaagaucaccuacggggccugccccaaguacgugaagcagaacacccugaagcucgccaccggcaugcggaacgugcccgagaagcagacccgcgggcuguucggcgccaucgccggcuucaucgagaacgggugggagggcaugaucgacgggugguacggcuuccggcaccagaacuccgaggggaccggccaggcggccgaccucaagagcacgcaggccgccaucgaccagaucaacggcaagcugaaccgcaucaucgagaagaccaacgagaaguuccaccagaucgagaaggaguucuccgaggucgaggggcggauccaggaccuggagaaguacguggaggacaccaagaucgaccuguggagcuacaacgccgagcuccugguggcgcuggagaaccagcacaccaucgaccucacggacuccgagaugaacaagcuguucgagaagacccgccggcagcugcgcgagaacgccgaggacaugggcaacgggugcuucaagaucuaccacaagugcgacaacgccugcaucgagagcauccgcaacggcaccuacgaccacgacgucuaccgggacgaggcccucaacaaccgcuuccagaucaaggggguggagcugaaguccggcuacaaggacuggauccuguggaucagcuucgccaucuccugcuuccuccugugcgucgugcugcucggcuucaucaugugggcgugccagcgggggaacauccgcugcaacaucugcaucuga

SEQ ID NO: 72499 - RNA, 1701 nt, Artificial Sequence
  derived and/or modified CDS sequence (opt1) from hemagglutinin__InfluenzaA__AFG71953
augaagaccaucaucgcccugagcuacaucuucugccucgugcugggccaggaccugcccgggaacgacaaguccaccgccacgcucugccugggccaccacgcggucccgaacgggacccuggugaagaccaucaccaacgaccagaucgaggugacgaacgccaccgagcucguccagagcuccagcaccggcaagaucugcaacaacccccaccgcauccuggacgggaucgacugcacccugaucgacgcccuccugggcgacccccacugcgacggcuuccagaacgagacgugggaccuguucguggagcgguccaaggccuucagcaacugcuaccccuacgacgugccggacuacgccucccuccgcagccuggucgcguccagcgggacccuggaguucaucaccgagggcuucaccuggacgggggugacccagaacggcggguccaacgccugcaagcggggccccggcagcggguucuucucccgccucaacuggcugaccaagagcggcuccaccuaccccgugcugaacgucacgaugcccaacaacgacaacuucgacaagcucuacaucuggggcgugcaccacccgagcaccaaccaggagcagaccucccuguacgugcaggccagcgggcgggucaccguguccacgaagcgcagccagcagaccaucauccccaacaucggcagccggcccugggugcgcgggcccuccagccggaucuccaucuacuggaccaccgucaagccgggcgacauccugaucaucaacagcaacgggaaccucaucgcgccccgcggcuacuucaagaugcggacggggaaguccagcaucaugcgcuccgacgcccccaucggcgccugcaucagcgagugcaucacccccaacggcuccaucccgaacgacaagcccuuccagaacgugaacaagaucaccuacggggccugccccaaguacgugaagcagaacacccugaagcuggccacgggcaugcggaacguccccgagaagcagacccgcggccucuucggggccaucgcgggguucaucgagaacggcugggagggcaugaucgacgggugguacggcuuccggcaccagaacagcgaggggaccggccaggccgccgaccugaaguccacccaggccgccaucgaccagaucaacgggaagcugaaccgcgugaucgagaagacgaacgagaaguuccaccagaucgagaaggaguucagcgagguggagggccggauccaggaccucgagaaguacgucgaggacaccaagaucgaccugugguccuacaacgcggagcugcucguggcccuggagaaccagcacaccaucgaccugaccgacagcgagaugaacaagcuguucgagaagacgcgccggcagcuccgcgagaacgccgaggacaugggcaacgggugcuucaagaucuaccacaagugcgacaacgccugcaucggcuccauccggaacgggaccuacgaccacgacguguaccgcgacgaggcccugaacaaccgcuuccagaucaagggcgucgagcucaagagcggcuacaaggacuggauccuguggaucuccuucgcgaucagcugcuuccugcucugcgugguccugcugggggugaucaugugggccugccagaagggcaacauccggugcaacaucugcaucuga

SEQ ID NO: 72500 - RNA, 1701 nt, Artificial Sequence; identical to SEQ ID NO: 64329
  derived and/or modified CDS sequence (opt1) from hemagglutinin__InfluenzaA__AFG71975

SEQ ID NO: 72501 - RNA, 1701 nt, Artificial Sequence
  derived and/or modified CDS sequence (opt1) from hemagglutinin__InfluenzaA__AFG71996
augaagaccaucaucgcccugagcuacaucuucugccucgugcugggccagaacuuccccgggaacgacaacuccaccgccacgcugugccucggccaccacgcggucccgaacgggacccuggugaagaccaucaccaacgaccagaucgaggugacgaacgccaccgagcugguccagagcuccagcaccggcaagaucugcaacaacccccaccgcauccucgacgggaucgacugcacccugaucgacgcccugcucggcgacccccacugcgacggcuuccagaacgagacgugggaccuguucguggagcgguccaaggccuucagcaacugcuaccccuacgacgugccggacuacgccucccugcgcagccucgucgcguccagcgggacccuggaguucaucaacgagggcuucaccuggaccggggugacgcagaacggcggguccaacgccugcaagcggggccccgacaucggcuucuucagccgccugaacuggcucuacaaguccgggaacaccuaccccgugcugaacgucagcaugcccaacaacgacaacuucgacaagcuguacaucuggggcgugcaccacccguccaccgaccaggagcagaccagccucuacgugcaggccuccgggcgggucacggugagcaccaagcgcucccagcagaccaucauccccaacaucggcagccggcccugggugcgcggccugagcucccggaucagcaucuacuggaccaucgucaagcccggggacauccuggugaucaacuccaacggcaaccucaucgccccgcgcggguacuucaagaugcggacgggcaagagcuccaucaugcgcagcgacgcguccaucgggaccugcaucagcgagugcaucacccccaacggcuccauccccaacgacaagcccuuccagaacgugaacaagaucaccuacggcgccugcccgaaguacgucaagcagaacacgcugaagcuggccaccgggaugcggaacgugcccgagaagcagacccgcggcaucuucggggccaucgccggcuucaucgagaacgggugggagggcaugaucgacggcugguacggguuccggcaccagaacagcgagggcaccgggcaggcggccgaccucaaguccacgcaggccgccaucgaccagaucaacggcaagcugaaccgcaucaucgagaagaccaacgagaaguuccaccagaucgagaaggaguucagcgagguggaggggcggauccaggaccuggagaaguacgucgaggacaccaagaucgaccucugguccuacaacgccgagcugcugguggcgcucgagaaccagcacaccaucgaccugacggacagcgagaugaacaagcuguucgagaagacccgccggcagcuccgcgagaacgccgaggacaugggcaacggcugcuucaagaucuaccacaagugcgacaacgccugcaucggguccauccggaacggcaccuacgaccacgacguguaccgcgacgaggcccugaacaaccgcuuccagaucaagggggucgagcucaagagcggcuacaaggacuggauccuguggaucuccuucgccaucagcugcuuccugcugugcgugguccuccugggcuucaucaugugggcgugccagaaggggaacauccggugcaacaucugcaucuga

SEQ ID NO: 72502 - RNA, 1701 nt, Artificial Sequence
  derived and/or modified CDS sequence (opt1) from hemagglutinin__InfluenzaA__AFG72007
augaagaccaucaucgcccugagcuacaucuucugccucgugcugggccgcgacuucccccggaacgacaacuccaccgccacgcugugccucgggcaccacgcggucccgaacggcacccuggugaagaccaucaccaacgaccagaucgaggugacgaacgccaccgagcugguccagagcuccagcaccgggaagaucugcaacaacccccaccgcauccucgacggcauggacugcacccugaucgacgcccugcucggggacccccacugcgacggccugcagaacggcacgugggaccuguucguggagcgguccaaggccuucagcaacugcuaccccuacgacgugccggacuacgccucccuccgcagccuggucgcguccagcgggacccuggaguucaucaacgagggcuucaccuggaccggggugacgcagaacggcggguccaacgccugcaagcggggccccgacagcggcuucuucucccgccucaacuggcuguacaagagcgggaacaccuaccccgugcugaacgucaccaugcccaacaacgacaacuucgacaagcucuacaucuggggcgugcaccacccguccaccgaccaggaccagacgagccuguacgugcaggccuccgggcgggucaccgugagcaccaagcgcucccagcagaccgugauccccaacaucggcccccggcccuggguccgcggccugagcagccggaucuccaucuacuggacgaucgugaagccgggggacauccuccugaucaacagcaacggcaaccugaucgcgccccgcggguacuucaagaugcggaccggcaaguccagcaucaugcgcuccgacgcccccaucgggaccugcaucagcgagugcaucacccccaacggcuccaucccgaacgacaagcccuuccagaacgugaacaagaucacguacggcgccugccccaaguacgucaagcagaacacccucaagcuggccaccgggaugcggaacgugcccgagaagcagacccgcggcaucuucggggccaucgccggcuucaucgagaacgggugggagggcaugaucgacggcugguacggguuccggcaccagaacagcgagggcacggggcaggcggccgaccugaaguccacccaggccgccaucgaccagaucaacggcaagcucaaccgcgugaucgagaagaccaacgagaaguuccaccagaucgagaaggaguucagcgaggucgaggggcggauccaggaccuggagaaguacguggaggacaccaagaucgaccugugguccuacaacgccgagcuccugguggcgcuggagaaccagcacacgaucgaccucaccgacagcgagaugaacaagcuguucgagaagacccgccggcagcugcgcgagaacgccgaggacaugggcaacggcugcuucaagaucuaccaccgcugcgacaacgccugcaucggguccauccggaacggcaccuacgaccacgacgucuaccgcgacgaggcccucaacaaccgguuccagaucaaggggguggagcucaagagcggcuacaaggacuggauccuguggaucuccuucgccaucagcugcuuccugcugugcgucgugcugcucggcuucaucaugugggcgugccagaaggggaacauccgcugcaacaucugcaucuga

SEQ ID NO: 72503 - RNA, 1701 nt, Artificial Sequence
  derived and/or modified CDS sequence (opt1) from hemagglutinin__InfluenzaA__AFG72029
augaagaccaucaucgcccugagcuacaucuucugccucguguucggccagaaccugcccgggaacgacaacuccaccgccacgcugugccucggccaccacgcggucccgaacgggacccuggugaagaccaucaccaacgaccagaucgaggugacgaacgccaccgagcugguccagagcuccagcaccggccgcaucugcgacagcccccaccggauccucgacgggaagaacugcacccugaucgacgcccugcucggcgacccccacugcgacggcuuccagaacgagaagugggaccuguucguggagcgcuccaaggccuucuccaacugcuaccccuacgacgugccggacuacgccagccugcggucccucaucgcgagcuccgggacgcuggaguucaucaacgagggcuucaacuggaccggggucacccagagcggcggguccuacgccugcaagcgcggcagcgacaacuccuucuucagccggcugaacuggcucuacgaguccgagagcaaguaccccgugcugaacgugaccaugcccaacaacggcaacuucgacaagcuguacaucuggggcguccaccaccccuccacggacaaggagcagaccaaccucuacgugcgcgccagcggccgggugaccgucagcaccaagcgcucccagcagacgaucaucccgaacaucgggagccggcccugggugcgcggccuguccagccggaucuccaucuacuggaccaucgugaagcccggcgacauccugcucaucaacagcaacgggaaccugaucgcgccccgcggcuacuucaagauccggaccgggaaguccagcaucaugcgcuccgacgccccgaucgggaccugcagcuccgagugcaucacgcccaacgggagcauccccaacgacaagcccuuccagaacgucaacaagaucaccuacggcgccugcccgaaguacgugaagcagaacacccugaagcucgccaccggcaugcggaacgugcccgagaagcagacgcgcgggaucuucggcgccaucgccggguucaucgagaacggcugggaggggauggucgacggcugguacggcuuccggcaccagaacuccgaggggaccggccaggcggccgaccucaagagcacccaggccgccaucgaccagaucaacgggaagcugaaccgcgugaucgagaagaccaacgagaaguuccaccagaucgagaaggaguucuccgagguggagggccggauccaggaccucgagaaguacgucgaggacacgaagaucgaccuguggagcuacaacgccgagcugcucguggcgcuggagaaccagcacaccaucgaccugaccgacuccgagaugaacaagcuguucgagaagacccgccggcagcugcgcgagaacgccgaggacauggggaacggcugcuucaagaucuaccacaagugcgacaacgccugcaucggcagcauccgcaacgggacguacgaccacgacguguaccgggacgaggcccugaacaaccgcuuccagaucaagggcgucgagcucaaguccggguacaaggacuggauccuguggaucagcuucgccaucagcugcuuccugcucugcgugguccugcugggcuucaucaugugggcgugccagaagggcaacauccggugcaacaucugcaucuga

SEQ ID NO: 72504 - RNA, 1701 nt, Artificial Sequence
  derived and/or modified CDS sequence (opt1) from hemagglutinin__InfluenzaA__AFG72040
augaagaccaucaucgcccugagcuacaucuucugccucguguucgcccagaaccugcccggcaacgacaacuccaccgcgacgcugugccucgggcaccacgccgucccgaacggcacccuggugaagaccaucaccaacgaccagaucgaggugacgaacgccaccgagcugguccagagcuccagcaccgggcgcaucugcgacagcccccaccggauccucgacggcaagaacugcacccugguggacgcccugcucggggacccccacugcgacggcuuccagaacgagaagugggaccuguucguggagcgcuccaaggccuucuccaacugcuaccccuacgacgucccggacuacgcgagccugcggucccucguggccagcuccggcacgcuggaguucaucaacgagagcuucaacuggaccggggugacccaguccggcgggagcuacgccugcaagcgcggcuccgacaacagcuucuucucccggcugaacuggcucuacgagagcgaguccaaguaccccguccugaacgugaccaugcccaacaacgggaacuucgacaagcuguacaucuggggcgugcaccaccccagcacggacaaggagcagaccaaccucuacguccgcgccagcggccgggugaccguguccaccaagcgcagccagcagacgaucaucccgaacaucgggucccggcccuggguccgcggccugagcucccggaucagcaucuacuggaccaucgugaagcccggggacauccugcucaucaacuccaacggcaaccugaucgcgccccgcggcuacuucaagauccggaccggcaagagcuccaucaugcgcagcgacgccccgaucgggaccugcuccagcgagugcaucacgcccaacggguccauccccaacgacaagcccuuccagaacgugaacaagaucaccuacggcgccugcccgaaguacgucaagcagaacacccugaagcucgccaccgggaugcggaacgugcccgagaagcagacgcgcggcaucuucggcgccaucgcgggguucaucgagaacggcugggaggggaugguggacggcugguacggguuccggcaccagaacagcgagggcaccggccaggccgccgaccugaaguccacccaggccgccaucgaccagaucaacgggaagcugaaccgcgucaucgagaagaccaacgagaaguuccaccagaucgagaaggaguucagcgagguggagggccggauccaggaccucgagaaguacguggagaacacgaagaucgaccugugguccuacaacgcggagcugcucgucgcccuggagaaccagcacaccaucgaccugaccgacagcgagaugaacaagcuguucgagaagacccgccggcagcuccgcgagaacgccgaggacauggggaacggcugcuucaagaucuaccacaagugcgacaacgccugcaucggguccauccgcaacggcacguacgaccacgacguguaccgggacgaggcccugaacaaccgcuuccagaucaagggcgucgagcucaagagcggguacaaggacuggauccuguggaucagcuucgcgaucuccugcuuccugcucugcguggugcugcugggcuucaucaugugggccugccagaaggggaacauccggugcaacaucugcaucuga

SEQ ID NO: 72505 - RNA, 1701 nt, Artificial Sequence
  derived and/or modified CDS sequence (opt1) from hemagglutinin__InfluenzaA__AFG72051
augaagaccaucaucgcccugagcuacaucuucugccucguguucgcccagaaccugcccggcaacgacaacuccaccgcgacgcugugccucgggcaccacgccgucccgaacggcacccuggugaagaccaucaccaacgaccagaucgaggugacgaacgccaccgagcugguccagagcuccagcaccgggcgcaucugcgacagcccccaccggauccucgacggcaagaacugcacccugguggacgcccugcucggggacccccacugcgacggcuuccagaacgagaagugggaccuguucguggagcgcuccaaggccuucuccaacugcuaccccuacgacgucccggacuacgcgagccugcggucccucguggccagcuccggcacgcuggaguucaucaacgagagcuucaacuggaccggggugacccaguccggcgggagcuacgccugcaagcgcggcuccgacaacagcuucuucucccggcugaacuggcucuacgagagcgaguccaaguaccccguccugaacgugaccaugcccaacaacgggaacuucgacaagcuguacaucuggggcgugcaccaccccagcacggacaaggagcagaccaaccucuacguccgcgccagcggccgggugaccguguccaccaagcgcaaccagcagacggucaucccgaacaucgggagccggcccugggugcgcggccuguccagccggaucuccaucuacuggaccaucgugaagcccggggacauccugcucaucaacagcaacggcaaccugaucgcgccccgcggcuacuucaagauccacaacgggaaguccagcaucaugcgguccgacgccccgaucgggaccugcagcuccgagugcaucacccccaacggcagcauccccaacgacaagcccuuccagaacgucaacaagaucacguacggcgccugcccgaaguacgugaagcagaacacccugaagcucgccaccgggaugcgcaacgugcccgagaagcagacccggggcaucuucggcgccaucgcgggguucaucgagaacggcugggaggggauggucgacggcugguacggguuccgccaccggaacuccgagggcacgggccaggccgccgaccucaagagcacccaggccgccaucgaccagaucaacgggaagcugaaccgcgugaucgagaagaccaacgagaaguuccaccagaucgagaaggaguucuccgagguggagggccggauccaggaccucgagaaguacgucgaggacaccaagaucgaccuguggagcuacaacgcggagcugcucguggcccuggagaaccagcacacgaucgaccugaccgacuccgagaugaacaagcuguucgagaagacccgccggcagcugcgcgagaacgccgaggacauggggaacggcugcuucaagaucuaccacaagugcgacaacgccugcaucgggagcauccgcaacggcaccuacgaccacgacgucuaccgggacgaggcccugaacaaccgcuuccagaucaagggcguggagcucaaguccggguacaaggacuggauccuguggaucagcuucgcgaucagcugcuuccugcucugcgugguccugcugggcuucaucaugugggccugccagaaggggaacauccggugcaacaucugcaucuga

SEQ ID NO: 72506 - RNA, 1701 nt, Artificial Sequence
  derived and/or modified CDS sequence (opt1) from hemagglutinin__InfluenzaA__AFG72085
augaagaccaucaucgcccugagcuacaucuucugccucguguucgcccagaagcugcccggcaacgacaacuccaccgcgacgcugugccucgggcaccacgccgucccgaacggcacccuggugaagaccaucaccaacgaccagaucgaggugacgaacgccaccgagcugguccagagcuccagcaccgggcgcaucugcgacagcccccaccggauccucgacggcaagaacugcacccugaucgacgcccugcucggggacccccacugcgacggcuuccagaacgagaagugggaccuguucguggagcgcagcaaggccuacuccaacugcuaccccuacgacgugccggacuacgcgagccugcggucccucgucgccagcuccggcacgcuggaguucaucaacgaggacuucaacuggaucggggugacccagagcggcggguccugcgccugcaagcgcggcagcgugaacuccuucuucagccggcugaacuggcuccacgaguccgagcagaaguaccccgcccugaacgucaccaugcccaacaacgggaaguucgacaagcuguacaucuggggcgugcaccaccccagcaccgaccgcgagcagacgaaccucuacgugcgggcguccggccgcgucaccgugagcaccaagcggagccagcagaccgugaucccgaacaucgggucccgccccuggguccggggccugagcucccgcaucagcaucuacuggacgaucgugaagcccggggacauccugcucaucaacuccaucggcaaccugaucgcgccccggggcuacuucaagauccgcaccggcaagagcuccaucaugcggagcgacgccccgaucgggaccugcuccagcgagugcaucacccccaacggguccauccccaacgacaagcccuuccagaacgugaacaagaucacguacggcgccugcccgcgcuacgucaagcagaacacccugaagcucgccaccgggaugcggaacgugcccgagaagcagacccgcggcaucuucggcgccaucgccggguucaucgagaacggcugggaggggaugguggacggcugguacggguuccggcaccagaacagcgagggcacgggccaggccgccgaccugaaguccacccaggccgcgaucgaccagaucaacgggaagcugaaccgccucaucgagaagaccaacgagaaguuccaccagaucgagaaggaguucagcgaggucgagggccggauccaggaccuggagaaguacguggaggacaccaagaucgaccugugguccuacaacgccgagcuccugguggcccuggagaaccagcacacgaucgaccucaccgacagcgagaugaacaagcuguucgagaagacccgcaagcagcugcgcgagaacgccgaggacauggggaacggcugcuucaagaucuaccacaagugcgacaacgccugcaucggguccauccggaacggcaccuacgaccacgacgucuaccgcgacgaggcgcucaacaaccgguuccagaucaagggcguggagcugaaguccggguacaaggacuggauccuguggaucuccuucgccaucagcugcuuccuccugugcgucgugcugcucggcuucaucaugugggccugccagaaggggaacauccgcugcaacaucugcaucuga

SEQ ID NO: 72507 - RNA, 1701 nt, Artificial Sequence
  derived and/or modified CDS sequence (opt1) from hemagglutinin__InfluenzaA__AFG72107
augaagaccaucaucgcccugagcuacaucuucugccucguguucgcccagaagcugcccggcaacgacaacuccaccgcgacgcugugccucgggcaccacgccgucccgaacggcacccuggugaagaccaucaccaacgaccagaucgaggugacgaacgccaccgagcugguccagagcuccagcaccgggcgcaucugcgacagcccccaccggauccucgacggcaagaacugcacccugaucgacgcccugcucggggacccccacugcgacggcuuccagaacgagaagugggaccuguucguggagcgcagcaaggccuucuccaacugcuaccccuacgacgugccggacuacgcgagccugcggucccucaucgccagcuccggcacgcuggaguucaucaacgaggaguucaacuggaccggggucacccagaacggcgggagcuacgccugcaagcgcggcuccgugaacagcuucuucucccggcugaacuggcuccacgagagcgaguacaaguaccccgcccugaacgugaccaugcccaacaacgggcgcuucgacaagcuguacaucuggggcguccaccaccccuccacggaccgggagcagaccaaccucuacgugcgcgcgagcggccgggugaccgucuccaccaagcgcagccagcagacggugaucccgaacaucgggccccggcccugggugcgcggccugagcucccggaucagcaucuacuggaccaucgucaagcccggggacauccugcucaucaacuccaccggcaaccugaucgccccgcgcggcuacuucaagauccacaccgggaaguccuccaucaugcggagcgacgcccccaucggcacgugcuccagcgagugcaucacccccaacggguccauccccaacgacaagccguuccagaacgugaacaagaucaccuacggcgccugcccccgcuacgugaagcagaacacccugaagcucgccacggggaugcggaacguccccgagaagcagacccgcggcaucuucggcgcgaucgccggguucaucgagaacggcugggaggggaugguggacggcugguacggguuccggcaccagaacagcgagggcaccggccaggccgccgaccugaaguccacccaggccgcgaucgaccagaucaacgggaagcugaaccgccucaucgagaagacgaacgagaaguuccaccagaucgagaaggaguucagcgagguggagggccggauccaggaccuggagaaguacgucgaggacaccaagaucgaccugugguccuacaacgccgagcuccugguggcccuggagaaccagcacaccaucgaccucaccgacagcgagaugaacaagcuguucgagaagacgcgcaagcagcugcgcgagaacgccgaggacauggggaacggcugcuucaagaucuaccacaagugcgacaacgccugcaucggguccauccggaacggcaccuacgaccacgacguguaccgcgacgaggcggucaacaaccgguuccagaucaagggcguggagcucaagagcggguacaaggacuggauccuguggaucuccuucgccaucagcugcuuccugcucugcgucauccugcugggcuucaucaugugggccugccagaaggggaacauccgcugcaacaucugcaucuga

SEQ ID NO: 72508 - RNA, 1701 nt, Artificial Sequence
  derived and/or modified CDS sequence (opt1) from hemagglutinin__InfluenzaA__AFG72118
augaagaccaucaucgcccugagcuacaucuucugccucguguucgcccagaagcugcccggcaacgacaacuccaccgcgacgcugugccucgggcaccacgccgucccgaacggcacccuggugaagaccaucaccaacgaccagaucgaggugacgaacgccaccgagcugguccagaacagcuccaccgggcgcaucugcaacagcccccaccggauccucgacggcaagaacugcacccugaucgacgcccugcucggggacccccacugcgacggcuuccagaacaaggagugggaccuguucguggagcgcuccaaggccuacagcaacugcuaccccuacgacgugccggacuacgcgucccugcggagccucgucgccuccagcggcacgcuggaguucaucaacgaggacuucaacuggaccgggguggcccaguccggcgggagcuacgccugcaagcgcggcuccgugaacagcuucuucucccggcugaacuggcuccacgagagcgaguacaaguaccccgcgcugaacgucaccaugcccaacaacgggaaguucgacaagcuguacaucuggggcgugcaccaccccuccaccgaccgcgagcagacgaaccucuacgugcgggccagcggccgcgucaccguguccaccaagcggagccagcagaccgugaucccgaacaucgggagccgccccuggguccggggccuguccagccgcaucuccaucuacuggacgaucgugaagcccggggacauccugcucaucaacagcaccggcaaccugaucgcgccccggggcuacuucaagauccgcaccgggaaguccagcaucaugcgguccgacgccccgaucgggaccugcagcuccgagugcaucacgcccaacggcagcauccccaacgacaagcccuuccagaacgugaaccgcaucaccuacggcgccugcccgcgguacgucaagcagaacacccugaagcucgccaccgggaugcgcaacgugcccgagcggcagacgcgcggcaucuucggcgccaucgccggguucaucgagaacggcugggaggggaugguggacggcugguacggguuccggcaccagaacuccgagggcaccggccaggccgccgaccucaagagcacccaggcggccaucgaccagaucaacgggaagcugaaccgccugaucgagaagaccaacgagaaguuccaccagaucgagaaggaguucuccgaggucgagggccgcauccaggaccuggagaaguacguggaggacacgaagaucgaccuguggagcuacaacgccgagcuccugguggcccuggagaaccagcacaccaucgaccucaccgacuccgagaugaacaagcuguucgagaagacccggaagcagcugcgcgagaacgccgaggacauggggaacggcugcuucaagaucuaccacaagugcgacaacgcgugcaucgggagcauccggaacggcacguacaaccacgacgucuaccgcgacgaggcccucaacaaccgguuccagaucaagggcguggagcugaaguccggguacaaggacuggauccuguggaucagcuucgccaucuccugcuuccuccugugcgucgugcugcucggcuucaucaugugggccugccagaaggggaacauccgcugcaacaucugcaucuga

SEQ ID NO: 72509 - RNA, 1701 nt, Artificial Sequence
  derived and/or modified CDS sequence (opt1) from hemagglutinin__InfluenzaA__AFG72129
augaagaccaucaucgcccugagcuacaucuucugccucguguucgcccagaagcugcccggcaacgacaacuccaccgcgacgcugugccucgggcaccacgccgucccgaacggcacccuggugaagaccaucaccaacgaccagaucgaggugacgaacgccaccgagcugguccagagcuccagcaccgggcgcaucugcgacagcccccaccggauccucgacggcaagaacugcacccugaucgacgcccugcucggggacccccacugcgacggcuuccagaacaaggagugggaccuguucguggagcgcagcaaggccuacuccaacugcuaccccuacgacgugccggacuacgcgagccugcggucccucgucgccagcuccggcacgcuggaguucaucaacgaggacuucaacuggaccgggguggcccagagcggcggguccuacgccugcaagcgcggcagcgugaacuccuucuucagccggcugaacuggcuccacgaguccgaguacaaguaccccgcgcugaacgucaccaugcccaacaacgggaaguucgacaagcuguacaucuggggcgugcaccaccccagcaccgaccgcgagcagacgaaccucuacgugcgggccuccggccgcgucaccgugagcaccaagcggagccagcagaccgugaucccgaacaucgggucccgccccuggguccggggccugagcuccgggaucagcaucuacuggacgaucgugaagcccggcgacauccugcucaucaacuccaccggcaaccugaucgcgccccgcggguacuucaagauccggaccggcaagagcuccaucaugcgcagcgacgccccgaucgggaccugcuccagcgagugcaucacgcccaacggcuccauccccaacgacaagcccuuccagaacgugaaccggaucaccuacggggccugcccgcgcuacgucaagcagaacacccugaagcucgccaccggcaugcggaacgugcccgagaagcagacgcgcggcaucuucggggccaucgccggcuucaucgagaacgggugggagggcaugguggacgggugguacggcuuccggcaccagaacagcgagggcaccgggcaggccgccgaccugaaguccacccaggcggccaucaaccagaucaacggcaagcugaaccgccucaucgagaagaccaacgagaaguuccaccagaucgagaaggaguucagcgaggucgaggggcggauccaggaccuggagaaguacguggaggacacgaagaucgaccugugguccuacaacgccgagcuccugguggcccuggagaaccagcacaccaucgaccucaccgacagcgagaugaacaagcuguucgagaagacccgcaagcagcugcgcgagaacgccgaggacaugggcaacgggugcuucaagaucuaccacaagugcgacaacgcgugcaucggcuccauccggaacggcacguacgaccacgacgucuaccgcgacgaggcccucaacaaccgguuccagaucaaggggguggagcugaaguccggcuacaaggacuggauccuguggaucuccuucgccaucagcugcuuccuccugugcgucgugcugcucggguucaucaugugggccugccagaagggcaacauccgcugcaacaucugcaucuga

SEQ ID NO: 72510 - RNA, 1701 nt, Artificial Sequence
  derived and/or modified CDS sequence (opt1) from hemagglutinin__InfluenzaA__AFG72140
augaagaccaucaucgcccugagcuacaucuucugccucguguucgcccagaagcugcccggcaacgacaacuccaccgcgacgcugugccucgggcaccacgccgucccgaacggcacccuggugaagaccaucaccaacgaccagaucgaggugacgaacgccaccgagcugguccagagcuccagcaccgggcgcaucugcgacagcccccaccggauccucgacggcaagaacugcacccugaucgacgcccugcucggggacccccacugcgacggcuuccagaacaaggagugggaccuguucguggagcgcagcaaggccuacuccaacugcuaccccuacgacgugccggacuacgcgagccugcggucccucgucgccagcuccggcacgcuggaguucaucaacgaggacuucaacuggaccgggguggcccagagcggcggguccuacgccugcaagcgcggcagcgugaacuccuucuucagccggcugaacuggcuccacgaguccgaguacaaguaccccgcgcugaacgucaccaugcccaacaacgggaaguucgacaagcuguacaucuggggcgugcaccaccccagcaccgaccgcgagcagacgaaccucuacgugcgggcccugggccgcgucaccguguccaccaagcggagccagcagaccgugaucccgaacaucgggagccgccccuggguccggggccuguccagccgcaucuccaucuacuggacgaucgugaagcccggggacauccuccugaucaacagcaccggcaaccugaucgcgccccggggcuacuucaagauccgcaccgggaaguccagcaucaugcgguccgacgccccgaucgggaccugcagcuccgagugcaucacgcccaacggcagcauccccaacaacaagcccuuccagaacgugaaccgcaucaccuacggcgccugcccgcgguacgucaagcagaacacccucaagcuggccaccgggaugcgcaacgugcccgagaagcagacgcggggcaucuucggcgccaucgccggguucaucgagaacggcugggaggggaugguggacggcugguacggguuccgccaccagaacuccgagggcaccggccaggccgccgaccugaaguccacccaggcggccaucgaccagaucaacgggaagcucaaccggcugaucgagaagaccaacgagaaguuccaccagaucgagaaggaguucuccgaggucgagggccgcauccaggaccuggagaaguacguggaggacacgaagaucgaccucuggagcuacaacgccgagcugcugguggcccucgagaaccagcacaccaucgaccugaccgacuccgagaugaacaagcuguucgagaagacccgcaagcagcuccgggagaacgccgaggacauggggaacggcugcuucaagaucuaccacaagugcgacaacgcgugcaucgggagcauccgcaacggcacguacgaccacgacgucuaccgggacgaggcccugaacaaccgcuuccagaucaagggcguggagcugaaguccggguacaaggacuggauccucuggaucagcuucgccaucuccugcuuccugcugugcgucgugcuccugggcuucaucaugugggccugccagaaggggaacauccggugcaacaucugcaucuga

SEQ ID NO: 72511 - RNA, 1701 nt, Artificial Sequence
  derived and/or modified CDS sequence (opt1) from hemagglutinin__InfluenzaA__AFG72151
augaagaccaucaucgcccugagcuacauccucugccugguguucgcccagaagcugcccggcaacgacaacuccaccgcgacgcucugccuggggcaccacgccgucccgaacggcacccuggugaagaccaucaccaacgaccagaucgaggugacgaacgccaccgagcucguccagagcuccagcaccgggcgcaucugcgacagcccccaccggauccuggacggcaagaacugcacccugaucgacgcccuccugggggacccccacugcgacggcuuccagaacaaggagugggaccuguucguggagcgcagcaaggccuacuccaacugcuaccccuacgacgugccggacuacgcgagccuccggucccuggucgccagcuccggcacgcuggaguucaccaacgaggacuucaacuggaccgggguggcccagagcggcgaguccuacgccugcaagcgcgggagcgugaaguccuucuucagccggcucaacuggcugcacgaguccgacuacaaguaccccgcgcugaacgucaccaugcccaacaacggcaaguucgacaagcucuacaucuggggcgugcaccaccccagcacggaccgcgagcagaccucccuguacgugcgggccagcgggcgcgucaccgugagcaccaagcggucccagcagacggugaucccgaacaucggcagccgccccuggguccgggggcuguccagccgcaucuccaucuacuggaccaucgugaagcccggcgacauccuccugaucaacagcaccgggaaccugaucgcgccccggggcuacuucaagauccgcaccggcaaguccagcaucaugcgguccgacgccccgaucgggacgugcagcuccgagugcaucacccccaacggcagcauccccaacgacaagcccuuccagaacgugaaccgcaucaccuacggggccugcccgcgguacgucaagcagaacacccucaagcuggccacgggcaugcgcaacgugcccgagaagcagacccgggggaucuucggcgccaucgccggcuucaucgagaacgggugggagggcaugguggacgggugguacggcuuccgccaccagaacuccgaggggaccggccaggccgccgaccugaaguccacccaggcggccaucgaccagaucaacggcaagcucaaccggcugaucgagaagacgaacgagaaguuccaccagaucgagaaggaguucuccgaggucgaggggcgcauccaggaccuggagaaguacguggaggacaccaagaucgaccucuggagcuacaacgccgagcugcugguggcccucgagaaccagcacaccaucgaccugaccgacuccgagaugaacaagcuguucgagaagacgcgcaagcagcuccgggagaacgccgaggacaugggcaacgggugcuucaagaucuaccacaagugcgacaacgcgugcaucggcagcauccgcaacgggaccuacgaccacgacgucuaccgggacgaggcccugaacaaccgcuuccagaucaagggcguggagcugaaguccggcuacaaggacuggauccucuggaucagcuucgccaucagcugcuuccugcugugcgucgugcuccugggguucaucaugugggccugccagaagggcaacauccggugcaacaucugcaucuga

SEQ ID NO: 72512 - RNA, 1701 nt, Artificial Sequence
  derived and/or modified CDS sequence (opt1) from hemagglutinin__InfluenzaA__AFG72184
augaagaccaucaucgcccugagcuacauccucugccugguguucgcccagaagcugcccggcaacgacaacuccaccgcgacgcucugccuggggcaccacgccgucccgaacggcacccuggugaagaccaucaccaacgaccagaucgaggugacgaacgccaccgagcucguccagagcuccagcaccgggcgcaucugcgacagcccccaccggauccuggacggcaagaacugcacccugaucgacgcccuccugggggacccccacugcgacgacuuccagaacaaggagugggaccuguucguggagcgcagcaaggccuacuccaacugcuaccccuacgacgugccggacuacgcgagccuccggucccuggucgccagcuccggcacgcuggaguucaucaacgaggacuucaacuggaccggcguggcccagagcggggaguccuacgccugcaagcgcggcagcgugaaguccuucuucagccggcucaacuggcugcacgaguccgaguacaaguaccccgcgcugaacgucaccaugcccaacaacgacaaguucgacaagcucuacaucuggggcgugcaccaccccagcaccgagcgcgagcagacgucccuguacauccgggccagcggccgcgugaccgucagcaccaagcggucccagcagaccgugaucccgaacaucgggagccgccccugggugcggggccuguccagccgcaucuccaucuacuggacgaucgucaagcccggcgacauccuccugaucaacagcaccgggaaccugaucgcgccccggggcuacuucaagauccgcaccgggaaguccagcaucaugcgguccgacgccccgaucgggaccugcagcuccgagugcaucacgcccaacggcagcauccccaacgacaagcccuuccagaacgugaaccgcaucaccuacggggccugcccgcgguacgugaagcagaacacccucaagcuggccaccggcaugcgcaacguccccgagaagcagacgcgggggaucuucggcgccaucgccggguucaucgagaacggcugggagggcaugguggacgggugguacggcuuccgccaccagaacuccgaggggaccggccaggccgccgaccugaaguccacccaggcggccaucgaccagaucaacgggaagcucaaccggcugaucgagaagaccaacgagaaguuccaccagaucgagaaggaguucuccgagguggagggccgcauccaggaccuggagaaguacgucgaggacacgaagaucgaccucuggagcuacaacgccgagcugcugguggcccucgagaaccagcacaccaucgaccugaccgacuccgagaugaacaagcuguucgagaagacccgcaagcagcuccgggagaacgccgaggacaugggcaacgggugcuucaagaucuaccacaagugcgacaacgcgugcaucggcagcauccgcaacgggacguacgaccacgacguguaccgggacgaggcccugaacaaccgcuuccagaucaagggcgucgagcugaaguccggguacaaggacuggauccucuggaucagcuucgccaucagcugcuuccugcugugcgugguccuccugggcuucaucaugugggccugccagaagggcaacauccggugcaacaucugcaucuga

SEQ ID NO: 72513 - RNA, 1701 nt, Artificial Sequence; identical to SEQ ID NO: 72511
  derived and/or modified CDS sequence (opt1) from hemagglutinin__InfluenzaA__AFG72195

SEQ ID NO: 72514 - RNA, 1701 nt, Artificial Sequence
  derived and/or modified CDS sequence (opt1) from hemagglutinin__InfluenzaA__AFG72206
augaagaccaucaucgcccugagcuacauccucugccugguguucgcccagaagcugcccggcaacgacaacuccaccgcgacgcucugccuggggcaccacgccgucccgaacggcacccuggugaagaccaucaccaacgaccagaucgaggugacgaacgccaccgagcucguccagagcuccagcaccgggaagaucugcgacagcccccaccgcauccuggacggcaagaacugcacccugaucgacgcccuccugggggacccccacugcgacggcuuccagaacaaggagugggaccuguucguggagcggagcaaggccuacuccaacugcuaccccuacgacgugccggacuacgcgagccuccgcucccuggucgccagcuccggcacgcuggaguucaucaacgaggacuucaacuggaccgggguggcccagagcggcgaguccuacgccugcaagcgggggagcgugaaguccuucuucagccgccucaacuggcugcacgaguccgacuacaaguaccccgcgcugaacgucaccaugcccaacaacggcaaguucgacaagcucuacaucuggggcgugcaccaccccagcaccgaccgggagcagacgucccuguacauccgcgccagcgggcgggugaccgucagcaccaagcgcucccagcagaccgugaucccgaacaucggcagccggcccugggugcgcgggcuguccagccggaucuccaucuacuggacgaucgucaagcccggcgacauccuccugaucaacagcaccgggaaccugaucgcgccccgcggcuacuucaagauccggaccggcaaguccagcaucaugcgcuccgacgccccgaucgggaccugcagcuccgagugcaucacgcccaacggcagcauccccaacgacaagcccuuccagaacgugaaccggaucaccuacggggccugcccgcgcuacgugaagcagaacacccucaagcuggccaccggcaugcggaacguccccgagaagcagacgcgcgggaucuucggcgccaucgccggcuucaucgagaacgggugggagggcaugguggacgggugguacggcuuccggcaccagaacuccgaggggaccggccaggccgccgaccugaaguccacccaggcggccaucgaccagaucaacggcaagcucaaccgccugaucgagaagaccaacgagaaguuccaccagaucgagaaggaguucuccgagguggaggggcggauccaggaccuggagaaguacgucgaggacacgaagaucgaccucuggagcuacaacgccgagcugcugguggcccucgagaaccagcacaccaucgaccugaccgacuccgagaugaacaagcuguucgagaagacccgcaagcagcuccgcgagaacgccgaggacaugggcaacgggugcuucaagaucuaccacaagugcgacaacgcgugcaucggcagcauccggaacgggacguacgaccacgacguguaccgcgacgaggcccugaacaaccgguuccagaucaagggcgucgagcugaaguccggcuacaaggacuggauccucuggaucagcuucgccaucagcugcuuccugcugugcgugguccuccugggguucaucaugugggccugccagaagggcaacauccgcugcaacaucugcaucuga

SEQ ID NO: 72515 - RNA, 1701 nt, Artificial Sequence
  derived and/or modified CDS sequence (opt1) from hemagglutinin__InfluenzaA__AFG72217
augaagaccaucaucgcccugagcuacauccucugccugguguucgcccagaagcugcccggcaacgacaacuccaccgcgacgcucugccuggggcaccacgccgucccgaacggcacccuggugaagaccaucaccaacgaccagaucgaggugacgaacgccaccgagcucguccagagcuccagcaccgggcgcaucugcgacagcccccaccggauccuggacggcaagaacugcacccugaucgacgcccuccugggggacccccacugcgacggcuuccagaacaaggagugggaccuguucguggagcgcuccaaggccuacuccaacugcuaccccuacgacgugccggacuacgcgagccuccggucccuggucgccagcuccggcacgcuggaguucaucaacgaggacuucaacuggaccgggguggcccaggacggcgggagcuacgccugcaagcgcggcuccgugaacagcuucuucucccggcucaacuggcugcacaagcuggaguacaaguaccccgcgcucaacgucaccaugcccaacaacgggaaguucgacaagcuguacaucuggggcgugcaccaccccagcaccgacuccgaccagacgagccuguacgugcgcgccuccggccgggucaccgugagcaccaagcgcagccagcagaccgugacgccgaacaucgggucccggcccuggguccgcggccucagcucccggaucagcaucuacuggaccaucgugaagcccggggacauccugcugaucuccagcaccggcaaccucaucgcgccccgcggcuacuucaagauccggaacgggaaguccagcaucaugcgcuccgacgccccgaucggcaacugcagcuccgagugcaucacccccaacgggagcauccccaacgacaagcccuuccagaacgugaaccggaucacguacggcgccugcccgcgcuacgucaagcagaacacccugaagcuggccaccgggaugcggaacgugcccgagaagcagacccgcggcaucuucggcgccaucgccggguucaucgagaacggcugggaggggaugguggacggcugguacggguuccggcaccagaacuccgagggcacgggccaggccgccgacaucaagagcacccaggcggccaucgaccagaucaacgggaagcucaaccgccugaucgagaagaccaacgagaaguuccaccagaucgagaaggaguucuccgaggucgagggccggauccaggaccuggagaaguacguggaggacaccaagaucgaccucuggagcuacaacgccgagcugcugguggcccucgagaaccagcacacgaucgaccugaccgacuccgagaugaacaagcuguucgagaagacccgcaagcagcuccgcgagaacgccgaggacauggggaacggcugcuucaagaucuaccacaagugcgacaacgcgugcaucgggagcauccggaacggcaccuacgaccacgacgucuaccgcgacgaggcccugaacaaccgguuccagaucaagggcguggagcugaaguccggguacaaggaccucauccuguggaucagcuucgccaucagcugcuuccugcucugcgucgugcugcugggcuucaucaugugggccugccagaaggggaacauccgcugcaacaucugcaucuga

SEQ ID NO: 72516 - RNA, 1701 nt, Artificial Sequence
  derived and/or modified CDS sequence (opt1) from hemagglutinin__InfluenzaA__AFG72228
augaagaccaucaucgcccugagcuacauccucugccugguguucgcccagaagcugcccggcaacgacaacuccaccgcgacgcucugccuggggcaccacgccgucccgaacggcacccuggugaagaccaucaccaacgaccagaucgaggugacgaacgccaccgagcucguccagagcuccagcaccgggcgcaucugcgacagcccccaccggauccuggacggcaagaacugcacccugaucgacgcccuccugggggacccccacugcgacggcuuccagaacaaggagugggaccuguucguggagcgcagcaaggccuacuccaacugcuaccccuacgacgugccggacuacgcgagccuccggucccuggucgccagcuccggcacgcuggaguucaccaacgaggacuucaacuggaccgggguggcccagagcggcgaguccuacgccugcaagcgcgggagcgugaaguccuucuucagccggcucaacuggcugcacgaguccgacuacaaguaccccgagcugaacgucaccaugcccaacaacggcaaguucgacaagcucuacaucuggggcgugcaccaccccagcacggaccgcgagcagaccucccuguacgugcgggcgagcgggcgcgucaccgugagcaccaagcggucccagcagacggugaucccgaacaucggcagccgccccuggguccgggggcuguccagccgcaucuccaucuacuggaccaucgugaagcccggcgacauccuccugaucaacagcaccgggaaccugaucgcgccccggggcuacuucaagauccgcaccggcaaguccagcaucaugcgguccgacgccccgaucgggacgugcagcuccgagugcaucacccccaacggcagcauccccaacgacaagcccuuccagaacgugaaccgcaucaccuacggggccugcccgcgguacgucaagcagaacacccucaagcuggccacgggcaugcgcaacgugcccgagaagcagacccgggggaucuucggcgccaucgccggcuucaucgagaacgggugggagggcaugguggacgggugguacggcuuccgccaccagaacuccgaggggaccggccaggccgccgaccugaaguccacccaggccgcgaucgaccagaucaacggcaagcucaaccggcugaucgagaagacgaacgagaaguuccaccagaucgagaaggaguucuccgaggucgaggggcgcauccaggaccuggagaaguacguggaggacaccaagaucgaccucuggagcuacaacgccgagcugcugguggcccucgagaaccagcacaccaucgaccugaccgacuccgagaugaacaagcuguucgagaagacgcgcaagcagcuccgggagaacgccgaggacaugggcaacgggugcuucaagaucuaccacaagugcgacaacgccugcaucggcagcauccgcaacgggaccuacgaccacgacgucuaccgggacgaggcgcugaacaaccgcuuccagaucaagggcguggagcugaaguccggcuacaaggacuggauccucuggaucagcuucgccaucagcugcuuccugcugugcgucgugcuccugggguucaucaugugggccugccagaagggcaacauccggugcaacaucugcaucuga

SEQ ID NO: 72517 - RNA, 1701 nt, Artificial Sequence
  derived and/or modified CDS sequence (opt1) from hemagglutinin__InfluenzaA__AFG72239
augaagaccaucaucgcccugagcuacauccucugccuggugcuggcccagaagcuccccggcuccgacaacagcaccgcgacgcugugccuggggcaccacgccgucccgaacggcacccucgugaagaccaucaccaacgaccagaucgaggugacgaacgccaccgagcugguccaguccagcaccaccgggcgcaucugcgacagcccccaccggauccuggacggcaagaacugcacgcucaucgacgcccugcugggggacccccacugcgacggcuuccagaacaaggagugggaccucuucguggagcgcuccaaggccuacuccaacugcuaccccuacgacgugccggacuacgcgagccugcggucccuggucgccagcuccggcacccucgaguucaccaacgaggacuucaacuggaccgggguggcccagagcggcgaguccuacgccugcaagcgcgggagcgugaaguccuucuucagccggcugaacuggcugcacgaguccgacuacaaguaccccgcgcucaacgucacgaugcccaacaacggcaaguucgacaagcuguacaucuggggcgugcaccaccccagcaccgaccgcgagcagaccucccuguacgugcgggccagcgggcgcgucaccgugagcacgaagcggucccagcagaccgugaucccgaacaucggcagccgccccuggguccgggggcucuccagccgcaucuccaucuacuggaccaucgugaagcccggcgacauccugcugaucaacagcaccgggaaccucaucgcgccccggggcuacuucaagauccgcacgggcaaguccagcaucaugcgguccgacgccccgaucgggaccugcagcuccgagugcaucacccccaacggcagcauccccaacgacaagcccuuccagaacgugaaccgcaucaccuacggggccugcccgcgguacgucaagcagaacacgcugaagcuggccaccggcaugcgcaacgugcccgagaagcagacccgggggaucuucggcgccaucgccggcuucaucgagaacgggugggagggcaugguggacgggugguacggcuuccgccaccagaacuccgaggggaccggccaggccgccgaccucaagagcacgcaggcggccaucgaccagaucaacggcaagcugaaccggcugaucgagaagaccaacgagaaguuccaccagaucgagaaggaguucuccgaggucgaggggcgcauccaggaccucgagaaguacguggaggacaccaagaucgaccuguggagcuacaacgccgagcugcucguggcccuggagaaccagcacaccaucgaccugacggacuccgagaugaacaagcuguucgagaagacccgcaagcagcuccgggagaacgccgaggacaugggcaacgggugcuucaagaucuaccacaagugcgacaacgcgugcaucggcagcauccgcaacgggaccuacgaccacgacgucuaccgggacgaggcccugaacaaccgcuuccagaucaagggcguggagcucaaguccggcuacaaggacuggauccuguggaucagcuucgccaucagcugcuuccugcucugcgucgugcugcugggguucaucaugugggccugccagaagggcaacauccggugcaacaucugcaucuga

SEQ ID NO: 72518 - RNA, 1701 nt, Artificial Sequence; identical to SEQ ID NO: 72511
  derived and/or modified CDS sequence (opt1) from hemagglutinin__InfluenzaA__AFG72272

SEQ ID NO: 72519 - RNA, 1701 nt, Artificial Sequence
  derived and/or modified CDS sequence (opt1) from hemagglutinin__InfluenzaA__AFG72316
augaagaccaucaucgcccugagccacauccucugccugguguucgcccagaagcugcccggcaacgacaacuccaccgcgacgcucugccuggggcaccacgccgucccgaacggcacccuggugaagaccaucaccaacgaccagaucgaggugacgaacgccaccgagcucguccagagcuccagcaccgggcgcaucugcgacagcccccaccggauccuggacggcaagaacugcacccugaucgacgcccuccugggggacccccacugcgacggcuuccagaacaaggagugggaccuguucguggagcgcagcaaggccuacuccaacugcuaccccuacgacgugccggacuacgcgagccuccggucccuggucgccagcuccggcacgcuggaguucaucaacgaggacuucaacuggaccgggguggcccaggacggcgggagcuacgccugcaagcgcggcuccgugaacagcuucuucucccggcucaacuggcugcacaagcuggaguacaaguaccccgcgcucaacgucaccaugcccaacaacgggaaguucgacaagcuguacaucuggggcgugcaccaccccagcaccgacuccgaccagacgagccuguacgugcgcgccuccggccgggucaccgugagcaccaagcgcagccagcagaccgugacgccgaacaucgggucccggcccuggguccgcggccucagcucccggaucagcaucuacuggaccaucgugaagcccggggacauccugcugaucaacuccaccggcaaccucaucgcgccccgcggcuacuucaagauccggaacgggaaguccuccaucaugcgcagcgacgugccgaucggcaacugcuccagcgagugcaucacccccaacggguccauccccaacgacaagcccuuccagaacgucaaccggaucacguacggcgccugcccgcgcuacgugaagcagaacacccugaagcuggccaccgggaugcggaacgugcccgagaagcagacccgcggcaucuucggcgccaucgccggguucaucgagaacggcugggaggggauggucgacggcugguacggguuccggcaccagaacagcgagggcacgggccaggccgccgaccucaaguccacccaggccgcgaucgaccagaucaacgggaagcugaaccgccugaucgagaagaccaacgagaaguuccaccagaucgagaaggaguucagcgagguggagggccggauccaggaccucgagaaguacguggaggacaccaagaucgaccugugguccuacaacgccgagcugcucgucgcccuggagaaccagcacacgaucgaccugaccgacagcgagaugaacaagcuguucgagaagacccgcaagcagcuccgcgagaacgccgaggacauggggaacggcugcuucaagaucuaccacaagugcgacaacgccugcaucggguccauccggaacggcaccuacgaccacgacguguaccgcgacgaggcgcugaacaaccgguuccagaucaagggcgucgagcucaagagcggguacaaggacuggauccuguggaucuccuucgccaucagcugcuuccugcucugcguggugcugcugggcuucaucaugugggccugccagaaggggaacauccgcugcaacaucugcaucuga

SEQ ID NO: 72520 - RNA, 1701 nt, Artificial Sequence
  derived and/or modified CDS sequence (opt1) from hemagglutinin__InfluenzaA__AFG72339
augaagaccaucaucgcccugagcuacauccucugccugguguucgcccagaagcugcccggcaacgacaacuccaccgcgacgcucugccuggggcaccacgccgucccgaacggcacccuggugaagaccaucaccaacgaccagaucgaggugacgaacgccaccgagcucguccagagcuccagcaccgggcgcaucugcgacagcccccaccggauccuggacggcaagaacugcacccugaucgacgcccuccugggggacccccacugcgacggcuuccagaacaaggagugggaccuguucguggagcgcagcaaggccuacuccaacugcuaccccuacgacgugccggacuacgucagccuccggucccugguggcgagcuccggcacgcuggaguucaucaacgaggacuucaacuggaccgggguggcccaggacggcgggagcuacacgugcaagcgcggcuccgucaacagcuucuucucccggcucaacuggcugcacaagagcgaguacaaguaccccgcccugaacgugaccaugcccaacaacgggaaguucgacaagcucuacaucuggggcgugcaccaccccuccaccgacagcgaccagaccucccuguacguccgcgccagcggccgggugaccgugagcaccaagcgcucccagcagacggucaccccgaacaucgggagccggcccugggugcgcggccuguccagccggaucuccaucuacuggaccaucgugaagcccggggacauccuccugaucaacagcaccggcaaccugaucgcgccccgcggcuacuucaagauccggaacgggaaguccagcaucaugcgcuccgacgccccgaucggcacgugcagcuccgagugcaucacccccaacgggagcauccccaacgacaagcccuuccagaacgucaaccggaucaccuacggcgccugcccgcgcuacgugaagcagaacacccucaagcuggccacggggaugcggaacgugcccgagaagcagacccgcggcaucuucggcgccaucgcgggguucaucgagaacggcugggaggggauggucgacggcugguacggguuccggcaccagaacuccgagggcaccggccaggccgccgaccugaaguccacccaggccgccaucgaccagaucaacgggaagcucaaccgccugaucgagaagacgaacgagaaguuccaccagaucgagaaggaguucuccgagguggagggccggauccaggaccuggagaaguacguggaggacaccaagaucgaccucuggagcuacaacgcggagcugcuggucgcccucgagaaccagcacaccaucgaccugaccgacuccgagaugaacaagcuguucgagaagacgcgcaagcagcuccgcgagaacgccgaggacauggggaacggcugcuucaagaucuaccacaagugcgacaacgccugcaucgggagcauccggaacggcaccuacgaccacgacguguaccgcgacgaggcccugaacaaccgguuccagaucaagggcgucgagcugaaguccggguacaaggacuggauccucuggaucagcuucgcgaucagcugcuuccugcugugcguggugcuccugggcuucaucaugugggccugccagaaggggaacauccgcugcaacaucugcaucuga

SEQ ID NO: 72521 - RNA, 1701 nt, Artificial Sequence
  derived and/or modified CDS sequence (opt1) from hemagglutinin__InfluenzaA__AFG72350
augaagaccaucaucgcccugagcuacauccucugccugguguucgcccagaagcugcccggcaacgacaacuccaccgcgacgcucugccuggggcaccacgccgucccgaacggcacccuggugaagaccaucaccaacgaccagaucgaggugacgaacgccaccgagcucguccagagcuccagcaccgggcgcaucugcgacagcccccaccggauccuggacggcaagaacugcacccugaucgacgcccuccugggggacccccacugcgacggcuuccagaacaaggagugggaccuguucguggagcgcagcaaggccuacuccaacugcuaccccuacgacgugccggacuacgucagccuccggucccugguggcgagcuccggcacgcuggaguucaucaacgaggacuucaacuggaccgggguggcccaggacggccgcagcuacgccugcaagcggggguccgucaacagcuucuucucccgccucaacuggcugcacaagagcgaguacaaguaccccgcccugaacgugaccaugcccaacaacggcaaguucgacaagcucuacaucuggggcgugcaccaccccuccaccgacagcgaccagacgucccuguacguccgggcgagcgggcgcgugaccgugagcaccaagcggucccagcagaccgucacgccgaacaucggcagccgccccugggugcgggggcuguccagccgcaucuccaucuacuggaccaucgugaagcccggcgacauccuccugaucaacagcaccgggaaccugaucgcgccccggggcuacuucaagauccgcaacggcaaguccagcaucaugcgguccgacgccccgaucgggaucugcagcuccgagugcaucacccccaacggcagcauccccaacgacaagcccuuccagaacgucaaccgcaucacguacggggccugcccgcgguacgugaagcagaacacccucaagcuggccaccggcaugcgcaacgugcccgagaagcagacccgggggaucuucggcgccaucgccggcuucaucgagaacgggugggagggcauggucgacgggugguacggcuuccgccaccagaacuccgaggggacgggccaggccgccgaccugaaguccacccaggccgcgaucgaccagaucaacggcaagcucaaccggcugaucgagaagaccaacgagaaguuccaccagaucgagaaggaguucuccgagguggaggggcgcauccaggaccuggagaaguacguggaggacaccaagaucgaccucuggagcuacaacgccgagcugcuggucgcccucgagaaccagcacacgaucgaccugaccgacuccgagaugaacaagcuguucgagaagacccgcaagcagcuccgggagaacgccgaggacaugggcaacgggugcuucaagaucuaccacaagugcgacaacgccugcaucggcagcauccgcaacgggaccuacgaccacgacguguaccgggacgaggcgcugaacaaccgcuuccagaucaagggcgucgagcugaaguccggcuacaaggacuggauccucuggaucagcuucgccaucagcugcuuccugcugugcguggugcuccugggguucaucaugugggccugccagaagggcaacauccggugcaacaucugcaucuga

SEQ ID NO: 72522 - RNA, 1701 nt, Artificial Sequence
  derived and/or modified CDS sequence (opt1) from hemagglutinin__InfluenzaA__AFG72372
augaagaccaucaucgcccugagcuacauccucugccugguguucgcccagaagcugcccggcaacgacaacuccaccgcgacgcucugccuggggcaccacgccgucccgaacggcacccuggugaagaccaucaccaacgaccagaucgaggugacgaacgccaccgagcucguccagagcuccagcaccgggcgcaucugcgacagcccccaccggauccuggacggcaagaacugcacccugaucgacgcccuccugggggacccccacugcgacggcuuccagaacaaggagugggaccuguucguggagcgcuccaaggccuacuccaacugcuaccccuacgacgugccggacuacgcgagccuccggucccuggucgccagcuccggcacgcuggaguucaucaacgaggacuucaacuggaccgggguggcccaggacggcaagagcuacacgugcaagcgcggguccgugaacagcuucuucucccggcucaacuggcugcacaagcuggaguacaaguaccccgcccucaacgucaccaugcccaacaacggcaaguucgacaagcuguacaucuggggcgugcaccaccccagcaccgacuccgaccagaccagccuguacgugcgcgcguccgggcgggucaccgugagcaccaagcgcagccagcagacggugaucccgaacaucggcucccggcccuggguccgcgggcucagcucccggaucagcaucuacuggaccaucgugaagcccggcgacauccugcugaucaacuccaccgggaaccucaucgcgccccgcggcuacuucaagauccggaacggcaagagcuccaucaugcgcagcgacgccccgaucgggaacugcuccagcgagugcaucacccccaacggcuccauccccaacgacaagcccuuccagaacgugaaccggaucacguacggggccugcccgcgcuacgucaagcagaacacccugaagcuggccaccggcaugcggaacgugcccgagaagcagacccgcgggaucuucggcgccaucgccggcuucaucgagaacgggugggagggcaugguggacgggugguacggcuuccggcaccagaacagcgaggggacgggccaggccgccgaccucaaguccacccaggccgcgaucgaccagaucaacggcaagcugaaccgccugaucgagaagaccaacgagaaguuccaccagaucgagaaggaguucagcgaggucgaggggcggauccaggaccucgagaaguacguggaggacaccaagaucgaccugugguccuacaacgccgagcugcucguggcccuggagaaccagcacacgaucgaccugaccgacagcgagaugaacaagcuguucgagcgcacccgcaagcagcuccgggagaacgccgaggacaugggcaacgggugcuucaagaucuaccacaagugcgacaacgccugcaucggcuccauccgcaacgggaccuacgaccacgacgucuaccgggacgaggcgcugaacaaccgcuuccagaucaagggcguggagcucaagagcggcuacaaggacuggauccuguggaucuccuucgccaucagcugcuuccugcucugcgucgugcugcugggguucaucaugugggccugccagaagggcaacauccggugcaacaucugcaucuga

SEQ ID NO: 72523 - RNA, 1701 nt, Artificial Sequence; identical to SEQ ID NO: 65048
  derived and/or modified CDS sequence (opt1) from hemagglutinin__InfluenzaA__AFG72383

SEQ ID NO: 72524 - RNA, 1701 nt, Artificial Sequence
  derived and/or modified CDS sequence (opt1) from hemagglutinin__InfluenzaA__AFG72394
augaagaccaucaucgcccugagcuacauccucugccugguguucgcccagaagcugcccggcaacgacaacuccaccgcgacgcucugccuggggcaccacgccgucccgaacggcacccuggugaagaccaucaccaacgaccagaucgaggugacgaacgccaccgagcucguccagagcuccagcaccgggcgcaucugcgacagcccccaccggauccuggacggcaagaacugcacccugaucgacgcccuccugggggacccccacugcgacggcuuccagaacaaggagugggaccuguucguggagcgcagcaaggccuacuccaacugcuaccccuacgacgugccggacuacgcgagccuccggucccuggucgccagcuccggcacgcuggaguucaucaacgaggacuucaacuggaccgggguggcccaggacggcaagagcuacgccugcaagcgcggguccgugaacagcuucuucucccggcucaacuggcugcacaagcuggaguacaaguaccccgcgcucaacgucaccaugcccaacaacggcaaguucgacaagcuguacaucuggggcgugcaccaccccagcaccgacuccgaccagacgagccuguacgugcgcgccuccgggcgggucaccguggccaccaagcgcagccagcagaccgugaucccgaacaucggcuuccggcccuggguccgcgggcagagcuccggcaucagcaucuacuggacgaucgugaagcccggggacauccuccugaucaacuccaccggcaaccugaucgcgccccggggcuacuucaagauccgcaacgggaaguccuccaucaugcggagcgacgccccgaucggcaacugcuccagcgagugcaucacccccaacggguccauccccaacgacaagcccuuccagaacgugaaccgcaucaccuacggcgccugcccgcgguacgucaagcagaacacgcucaagcuggccaccgggaugcgcaacgugcccgagaagcagacccggggcaucuucggcgccaucgccggguucaucgagaacggcugggaggggaugguggacggcugguacggguuccgccaccagaacagcgagggcaccggccaggccgcggaccugaaguccacgcaggccgccaucgaccagaucaacgggaagcucaaccggcugaucgagaagaccaacgagaaguuccaccagaucgagaaggaguucagcgaggucgagggccgcauccaggaccuggagaaguacguggaggacaccaagaucgaccucugguccuacaacgccgggcugcugguggcccucgagaaccagcacaccaucgaccugacggacagcgagaugaacaagcuguucgagcggacccgcaagcagcuccgcgagaacgcggaggacaugggcaacgggugcuucaagaucuaccacaagugcgacaacgccugcaucggcuccauccggaacggcaccuacgaccacgacgucuaccgcgacgaggcccugaacaaccgguuccagaucaaggggguggagcucaagagcggcuacaaggacuggauccuguggaucuccuucgccaucagcugcuuccugcugugcgucgugcuccugggguucaucaugugggccugccagaagggcaacauccgcugcaacaucugcaucuga

SEQ ID NO: 72525 - RNA, 1701 nt, Artificial Sequence
  derived and/or modified CDS sequence (opt1) from hemagglutinin__InfluenzaA__AFG72405
augaagaccaucaucgcccugagcuacauccucugccugguguucgcccagaagcugcccggcaacgacaacuccaccgcgacgcucugccuggggcaccacgccgucccgaacggcacccuggugaagaccaucaccaacgaccagaucgaggugacgaacgccaccgagcucguccagagcuccagcaccgggcgcaucugcgacagcccccaccggauccuggacggcaagaacugcacccugaucgacgcccuccugggggaccccaacugcgacggcuuccagaacaaggagugggaccuguucguggagcgcagcaaggccuacuccaacugcuaccccuacgacgugccggacuacgcgagccuccggucccuggucgccagcuccggcacgcuggaguucaccaacgaggacuucaacuggaccgggguggcccaggacggcgggagcuacgccugcaagcgcggcuccgugaaguccuucuucucccggcucaacuggcugcacaagcuggaguacaaguaccccgcgcucaacgucaccaugcccaacaacgggaaguucgacaagcuguacaucuggggcgugcaccaccccagcacggacuccgaccagaccagccuguacgugcgcgccuccggccgggucaccgugagcaccaagcgcagccagcagacggugaccccgaacaucgggucccggcccuggguccgcggccucagcucccggaucagcaucuacuggaccaucgugaagcccggggacauccugcugaucaacuccaccggcaaccucaucgcgccccgcggcuacuucaagauccggaacggcaagagcuccaucaugcgcagcgacgccccgaucgggacgugcuccagcgagugcaucacccccaacggguccauccccaacgacaagcccuuccagaacgugaaccggaucaccuacggcgccugcccgcgcuacgucaagcagaacacccugaagcuggccacggggaugcggaacgugcccgagaagcagacccgcggcaucuucggcgccaucgccggguucaucgagaacggcugggaggggaugguggacggcugguacggguuccggcaccagaacagcgagggcaccggccaggccgccgaccucaaguccacccaggcggccaucaaccagaucaacgggaagcugaaccgccugaucgagaagacgaacgagaaguuccaccagaucgagaaggaguucagcgaggucgagggccggauccaggaccucgagaaguacguggaggacaccaagaucgaccugugguccuacaacgccgagcugcucguggcccuggagaaccagcacaccaucgaccugaccgacagcgagaugaacaagcuguucgagaagacgcgcaagcagcuccgcgagaacgccgaggacauggggaacggcugcuucaagaucuaccacaagugcgacaacgcgugcaucggguccauccggaacggcaccuacgaccacgacgucuaccgcgacgaggcccugaacaaccgguuccagaucaagggcguggagcucaagagcggguacaaggacuggauccuguggaucuccuucgccaucagcugcuuccugcucugcgucgugcugcugggcuucaucaugugggccugccagaaggggaacauccgcugcaacaucugcaucuga

SEQ ID NO: 72526 - RNA, 1701 nt, Artificial Sequence
  derived and/or modified CDS sequence (opt1) from hemagglutinin__InfluenzaA__AFG72449
augaagaccaucaucgcccugagcuacauccucugccugguguucgcccagaagcugcccggcaacgacaacuccaccgcgacgcucugccuggggcaccacgccgucccgaacggcacccuggugaagaccaucaccaacgaccagaucgaggugacgaacgccaccgagcucguccagagcuccagcaccgggcgcaucugcuacagcccccaccggauccuggacggcaacaacugcacccugaucgacgcccuccugggggacccccacugcgacggcuuccagaacaaggagugggaccuguucguggagcgcuccaaggccuacuccaacugcuaccccuacgacgugccggacuacgcgagccuccggucccuggucgccagcuccggcacgcuggaguucaucaacgaggacuucaacuggaccgggguggcccaggacggcaagagcuacgccugcaagcgcggguccgugaagggcuucuucagccggcucaacuggcugcacaagcuggaguacaaguaccccgcgcucaacgucaccaugcccaacaacgggaaguucgacaagcuguacaucuggggcgugcaccaccccuccaccgacagcgaccagacgucccuguacgugcgcgccagcggcggggucaccguguccaccaagcggagccagcagaccgugaucccgagcaucggcucccgccccuggguccgggggcucagcucccgcaucagcaucuacuggacgaucgugaagcccggcgacauccugcugaucaacuccaccggcaaccucaucgcgccccggggguacuucaagauccgcaacggcaagagcuccaucaugcggagcgacgccccgaucgggaacugcuccagcgagugcaucacccccaacggcuccauccccaacgacaagcccuuccagaacgugaaccgcaucaccuacggggccugcccgcgguacgucaagcagaacacgcugaagcuggccaccggcaugcgcaacgugcccgagaagcagacccggggcaucuucggggccaucgccggcuucaucgagaacgggugggagggcaugguggacgggugguacggcuuccgccaccagaacagcgagggcaccgggcaggccgccgaccucaaguccacgcaggcggccaucgaccagaucaacggcaagcugaaccggcugaucgagaagaccaacgagaaguuccaccagaucgagaaggaguucagcgaggucgaggggcgcauccaggaccucgagaaguacguggaggacaccaagaucgaccugugguccuacaacgccgagcugcucguggcccuggagaaccagcacaccaucgaccugacggacagcgagaugaacaagcuguucgagcggacccgcaagcagcuccgcgagaacgccgaggacaugggcaacgggugcuucaagaucuaccacaagugcgacaacgcgugcaucggcuccauccggaacggcaccuacgaccacgacgucuaccgcgacgaggcccugaacaaccgguuccagaucaaggggguggagcucaagagcggcuacaaggacuggauccuguggaucuccuucgccaucagcugcuuccugcucugcgucgugcugcugggguucaucaugugggccugccagaagggcaacauccgcugcaacaucugcaucuga

SEQ ID NO: 72527 - RNA, 1701 nt, Artificial Sequence; identical to SEQ ID NO: 65077
  derived and/or modified CDS sequence (opt1) from hemagglutinin__InfluenzaA__AFG72460

SEQ ID NO: 72528 - RNA, 1701 nt, Artificial Sequence
  derived and/or modified CDS sequence (opt1) from hemagglutinin__InfluenzaA__AFG72504
augaagaccaucaucgcccugagcuacauccucugccugguguucgcccagaagcugcccggcaacgacaacuccaccgcgacgcucugccuggggcaccacgccgucccgaacggcacccuggugaagaccaucaccaacgaccagaucgaggugacgaacgccaccgagcucguccagagcuccagcaccgggcgcaucugcgacagcccccaccggauccuggacggcaagaacugcacccugaucgacgcccuccugggggacccccacugcgacggcuuccagaacaaggagugggaccuguucguggagcgcagcaaggccuacuccaacugcuaccccuacgacgugccggacuacgcgagccuccggucccuggucgccagcuccggcacgcuggaguucaucaacgaggacuucaacuggaccgggguggcccaggacggcaagagcuacgccugcaagcgcggguccgugaaguccuucuucucccggcucaacuggcugcacaagcuggaguacaaguaccccgcgcucaacgucaccaugcccaacaacggcaaguucgacaagcuguacaucuggggcgugcaccaccccagcaccgacuccgaccagacgagccuguacgugcgcgccuccgggcgggucaccgugagcaccaagcgcagccagcagaccgugaucccgaacaucggcuuccggcccuggguccgcgggcucuccagccggaucuccaucuacuggacgaucgugaagcccggcgacauccugcugaucaacagcaccgggaaccucaucgcgccccgcggcuacuucaagauccggaacggcaaguccagcaucauccgcuccgacgccccgaucgggaacugcagcuccgagugcaucacccccaacggcagcauccccaacgacaagcccuuccagaacgugaaccggaucaccuacggggccugcccgcgcuacgucaagcagaacacgcugaagcuggccaccggcaugcggaacgugcccgagaagcagacccgcgggaucuucggcgccaucgccggcuucaucgagaacgggugggagggcaugguggacgggugguacggcuuccggcaccagaacuccgaggggaccggccaggccgccgaccucaagagcacgcaggcggccaucgaccagaucaacggcaagcugaaccgccugaucgagaagaccaacgagaaguuccaccagaucgagaaggaguucuccgaggucgaggggcggauccaggaccucgagaaguacguggaggacaccaagaucgaccuguggagcuacaacgccggccugcucguggcccuggagaaccagcacaccaucgaccugacggacuccgagaugaacaagcuguucgagcgcacccgcaagcagcuccgggagaacgccgaggacauggggaacggcugcuucaagaucuaccacaagugcgacaacgcgugcaucgggagcauccgcaacggcaccuacgaccacgacgucuaccgggacgaggcccugaacaaccgcuuccagaucaagggcguggagcucaaguccggguacaaggacuggauccuguggaucagcuucgccaucuccugcuuccugcucugcgucgugcugcugggcuucaucaugugggccugccagaaggggaacauccggugcaacaucugcaucuga

SEQ ID NO: 72529 - RNA, 1701 nt, Artificial Sequence
  derived and/or modified CDS sequence (opt1) from hemagglutinin__InfluenzaA__AFG72515
augaagaccaucaucgcccugagcuacauccucugccugguguucgcccagaagcugcccggcaacgacaacuccaccgcgacgcucugccuggggcaccacgccgucccgaacggcacccuggugaagaccaucaccaacgaccagaucgaggugacgaacgccaccgagcucguccagagcucccccaccgggcgcaucugcgacagcccccaccggauccuggacggcaagaacugcacccugaucgacgcccuccugggggacccccacugcgacggcuuccagaacaaggagugggaccuguucguggagcgcuccaaggccuacagcaacugcuacccguacgacgugcccgacuacgcgucccuccggagccuggucgccuccagcggcacgcuggaguucaucaacgagaacuucaacuggaccgggguggcccaggacggcaaguccuacgccugcaagcgcgggagcgugaacuccuucuucagccggcucaacuggcugcacaagcuggaguacaaguaccccgcgcucaacgucaccaugcccaacaacggcaaguucgacaagcuguacaucuggggcgugcaccacccguccaccgacagcgaccagacgucccuguacgugcgcgccagcgggcgggucaccguguccaccaagcgcagccagcagaccgugauccccgacaucggcuaccggcccuggguccgcgggcucagcucccggaucagcaucuacuggacgaucgugaagcccggcgacauccugcugaucaacuccaccgggaaccucaucgccccgcgcggcuacuucaagauccggaacggcaagagcuccaucaugcgcagcgacgcccccaucgggaacugcuccagcgagugcaucacccccaacggcuccauccccaacgacaagccguuccagaacgugaaccggaucaccuacggggccugcccccgcuacgucaagcagaacacgcugaagcuggcgaccggcaugcggaacgugcccgagaagcagacccgcgggaucuucggcgccaucgccggcuucaucgagaacgggugggagggcaugguggacgggugguacggcuuccggcaccagaacagcgaggggaccggccaggccgccgaccucaaguccacgcaggcggccaucgaccagaucaacggcaagcugaaccgccuggucgagaagaccaacgagaaguuccaccagaucgagaaggaguucagcgagguggaggggcggauccaggaccucgagaaguacguggaggacaccaagaucgaccugugguccuacaacgccgagcugcucgucgcccuggagaaccagcacaccaucgaccugacggacagcgagaugaacaagcuguucgagcgcacccgcaagcagcuccgggagaacgccgaggacaugggcaacgggugcuucaagaucuaccacaagugcgacaacgcgugcaucggcuccauccgcaacgggaccuacgaccacgacguguaccgggacgaggcccugaacaaccgcuuccagaucaagggcgucgagcucaagagcggcuacaaggacuggauccuguggaucuccuucgccaucagcugcuuccugcucugcguggugcugcugggguucaucaugugggccugccagaagggcaacauccggugcaacaucugcaucuga

SEQ ID NO: 72530 - RNA, 1701 nt, Artificial Sequence
  derived and/or modified CDS sequence (opt1) from hemagglutinin__InfluenzaA__AFG72526
augaagaccaucaucgcccugagcuacauccucugccugguguucgcccagaagcugcccggcaacgacaacuccaccgcgacgcucugccuggggcaccacgccgucccgaacggcacccuggugaagaccaucaccaacgaccagaucgaggugacgaacgccaccgagcucguccagagcuccagcaccgggcgcaucugcgacagcccccaccggauccuggacggcaagaacugcacccugaucgacgcccuccugggggacccccacugcgacggcuuccagaacaaggagugggaccuguucguggagcgcuccaaggccuacuccagcugcuaccccuacgacgugccggacuacgcgucccuccggagccuggucgccuccagcggcacgcuggaguucaucaacgaggacuucaacuggaccgggguggcccaggacggcaaguccuacgccugcaagcgcgggagcgugaacuccuucuucagccggcucaacuggcugcacaagcuggaguacaaguaccccgcgcucaacgucaccaugcccaacaacggcaaguucgacaagcuguacaucuggggcgugcaccaccccuccaccgacagcgaccagacgucccuguacgugcgcgccagcgggcgggucaucgugagcaccaagcgcucccagcagaccgugaucccgaacaucggcagccggcccuggguccgcgggcucuccagccggaucuccaucuacuggaccaucgugaagcccggcgacauccugcugaucaacagcacggggaaccucaucgcgccccgcggcuacuucaagauccggaccggcaaguccagcaucaugcgcuccgacgccccgaucgggaacugcagcuccgagugcaucacccccaacggcagcauccccaacgacaagcccuuccagaacgugaaccggaucaccuacggggccugcccgcgcuacgucaagcagaacacgcugaagcuggccaccggcaugcggaacgugcccgagaagcagacccgcgggaucuucggcgccaucgccggcuucaucgagaacgggugggagggcaugguggacgggugguacggcuuccggcaccagaacuccgaggggaccggccaggccgccgaccucaagagcacgcagaccgcgaucaaccagaucaacggcaagcugaaccgccugaucgagaagaccaacgagaaguuccaccagaucgagaaggaguucuccgaggucgaggggcggauccaggaccucgagaaguacguggaggacaccaagaucgaccuguggagcuacaacgccgagcugcucguggcccuggagaaccagcacacgaucgaccugaccgacuccgagaugaacaagcuguucgagcgcacccgcaagcagcuccgggagaacgccgaggacaugggcaacgggugcuucaagaucuaccacaagugcgacaacgccugcaucggcagcauccgcaacgggaccuacgaccacgacgucuaccgggacgaggcgcugaacaaccgcuuccagaucaagggcguggagcucaaguccggcuacaaggacuggauccuguggaucagcuucgccaucagcugcuuccugcucugcgucgugcugcugggguucaucaugugggccugccagaagggcaacauccggugcaacaucugcaucuga

SEQ ID NO: 72531 - RNA, 1701 nt, Artificial Sequence
  derived and/or modified CDS sequence (opt1) from hemagglutinin__InfluenzaA__AFG72581
augaagaccaucaucgcccugagcuacauccucugccugguguucgcccagaagcugcccggcaacgacaacuccaccgcgacgcucugccuggggcaccacgccgucccgaacggcacccuggugaagaccaucaccaacgaccagaucgaggugacgaacgccaccgagcucguccagagcuccagcaccgggcgcaucugcgacagcccccaccggauccuggacggcaagaacugcacccugaucgacgcccuccugggggacccccacugcgacggcuuccagaacaaggagugggaccuguucguggagcgcuccaaggccuacuccaacugcuaccccuacgacgugccggacuacgcgagccuccggucccuggucgccagcuccggcacgcuggaguucaucaacgaggacuucaacuggaccgggguggcccaggacggcaagagcuacgccugcaagcgcggguccgugaacagcuucuucucccggcucaacuggcugcacaagcuggaguacaaguaccccgcgcucaacgucaccaugcccaacaacggcaaguucgacaagcuguacaucuggggcgugcaccaccccagcaccgacuccgaccagacgagccuguacgugcgcgccuccgggggcgucaccgugagcaccaagcggagccagcagaccgugaucccgaacaucggguaccgccccuggguccggggccucuccagccgcaucuccaucuacuggacgaucgugaagcccggggacauccugcugaucaacagcaccggcaaccucaucgcgccccggggcuacuucaagauccgcaacgggaaguccagcaucaugcgguccgacgccccgaucggcaacugcagcuccgagugcaucacccccaacgggagcaucuccaacgacaagcccuuccagaacgugaaccgcaucaccuacggcgccugcccccgguacgucaagcagaacacgcugaagcuggccaccgggaugcgcaacgugccggagaagcagacccggggcaucuucggcgccaucgccggguucaucgagaacggcugggaggggaugguggacggcugguacggguuccgccaccagaacagcgagggcaccggccaggccgccgaccucaaguccacgcaggcggccaucgaccagaucaacgggaagcugaaccggcugaucgagaagaccaacgagaaguuccaccagaucgagaaggaguucagcgaggucgagggccgcauccaggaccucgagaaguacguggaggacaccaagaucgaccugugguccuacaacgccgagcugcucguggcccuggagaaccagcacaccaucgaccugacggacagcgagaugaacaagcuguucgagcggacccgcaagcagcuccgcgagaacgccgaggacauggggaacggcugcuucaagaucuaccacaagugcgacaacgcgugcaucggguccauccggaacggcaccuacgaccacgacgucuaccgcgacgaggcccugaacaaccgguuccagaucaagggcguggagcucaagagcggguacaaggacuggauccuguggaucuccuucgccaucagcugcuuccugcucugcgucgugcugcugggcuucaucaugugggccugccagaaggggaacauccgcugcaacaucugcaucuga

SEQ ID NO: 72532 - RNA, 1701 nt, Artificial Sequence
  derived and/or modified CDS sequence (opt1) from hemagglutinin__InfluenzaA__AFG72603
augaagaccaucaucgcccugagcuacauccucugccugguguucgcccagaagcugcccggcaacgacaacuccaccgcgacgcucugccuggggcaccacgccgucccgaacggcacccuggugaagaccaucaccaacgaccagaucgaggugacgaacgccaccgagcucguccagagcuccagcaccgggcgcaucugcgacagcccccaccggauccuggacggcaagaacugcacccugaucgacgcccuccugggggacccccacugcgacggcuuccagaacaaggagugggaccuguucguggagcgcagcaaggccuacuccaacugcuaccccuacgacgugccggacuacgcgagccuccggucccuggucgccagcuccggcacgcuggaguucaccaaggagggguucaacuggaccggcguggcccaggacgggaaguccuacgccugcaagcgcggcuccgugaacagcuucuucucccggcucaacuggcugcacaagcuggaguacaaguaccccgcgcucaacgucaccaugcccaacaacgacaaguucgacaagcuguacaucuggggcgugcaccaccccagcacggacuccgaccagaccagccuguacgugcaggccuccgggcgcgucaccgugagcaccaagcggagccagcagacggugaucccgaacaucggcucccgccccuggguccgggggaucagcucccgcaucagcaucuacuggaccaucgugaagcccggcgacauccuccugaucaacuccaccgggaaccugaucgcgccccggggcuacuucaagauccgcaacggcaagagcuccaucaugcggagcgacgccccgaucgggaacugcaaguccgagugcaucacccccaacggcagcauccccaacgacaagcccuuccagaacgugaaccgcaucacguacggggccugcccgcgguacgucaagcagaacacccucaagcuggccaccggcaugcgcaacgugcccgagaagcagacccgggggaucuucggcgccaucgccggcuucaucgagaacgggugggagggcaugguggacgggugguacggcuuccgccaccagaacuccgaggggacgggccaggccgccgaccucaagagcacccaggcggccaccgaccagaucaacggcaagcugaaccggcugaucgagaagaccaacgagaaguuccaccagaucgagaaggaguucuccgaggucgaggggcgcauccaggaccuggagaaguacguggaggacacgaagaucgaccucuggagcuacaacgccgagcugcugguggcccucgagaaccagcacaccaucgaccugaccgacuccgagaugaacaagcuguucgagcggacccgcaagcagcuccgcgagaacgccgaggacaugggcaacgggugcuucaagaucuaccacaagugcgacaacgcgugcaucggcagcauccggaacgggacguacgaccacgacgucuaccgcgacgaggcccugaacaaccgguuccagaucaagggcguggagcugaaguccggcuacaaggacuggauccucuggaucagcuucgccaucuccugcuuccugcugugcgucgugcuccugggguucaucaugugggccugccagaagggcaacauccgcugcaacaucugcaucuga

SEQ ID NO: 72533 - RNA, 1701 nt, Artificial Sequence
  derived and/or modified CDS sequence (opt1) from hemagglutinin__InfluenzaA__AFG72614
augaagaccaucaucgcccugagcuacauccucugccugguguucgcccagaagcugcccggcaacgacaacuccaccgcgacgcucugccuggggcaccacgccgucccgaacggcacccuggugaagaccaucaccaacgaccagaucgaggugacgaacgccaccgagcucguccagagcuccagcaccgggcgcaucugcgacagcccccaccggauccuggacggcaagaacugcacccugaucgacgcccuccugggggacccccacugcgacggcuuccagaacaaggagugggaccuguucguggagcgcagcaaggccuacuccaacugcuaccccuacgacgugccggacuacgcgagccuccggucccuggucgccagcuccggcacgcuggaguucaccaacgagggguucaacuggaccggcguggcccaggacgggaccagcuacuccugcaagcgcggcagcgugaaguccuucuucagccggcucaacuggcugcacaagcuggaguacaaguaccccgcccucaacgucgcgaugcccaacaacgacaaguucgacaagcuguacaucuggggcgugcaccaccccuccacggacagcgaccagaccucccuguacgugcaggccagcgggcgcgucaccgugagcaccaagcggucccagcagacggugaucccgaacaucggcagccgccccuggguccgcgggguguccagccggaucuccaucuacuggaccaucgugaagcccggcgacauccuccugaucaacagcaccgggaaccugaucgcgccccggggcuacuucaagauccgcuccggcaagagcuccaucaugcggagcgacgccccgaucgggaacugcaacuccgagugcaucacccccaacggcagcauccccaacgacaagcccuuccagaacgucaaccgcaucacguacggggccugcccgcgguacgugaagcagaacacccucaagcuggccaccggcaugcgcaacgugcccgagaagcagacccgggggaucuucggcgccaucgccggcuucaucgagaacgggugggagggcauggucgacgggugguacggcuuccgccaccagaacuccgaggggacgggccaggccgccgaccugaaguccacccaggcggccaucaaccagaucaacggcaagcucaaccggcugaucgagaagaccaacgagaaguuccaccagaucgagaaggaguucuccgagguggaggggcgcauccaggaccuggagaaguacguggaggacaccaagaucgaccucuggagcuacaacgccgagcugcuggucgcccucgagaaccagcacacgaucgaccugaccgacuccgagaugaacaagcuguucgagcggacccgcaagcagcuccgcgagaacgccgaggacaugggcaacgggugcuucaagaucuaccacaagugcgacaacgcgugcaucggcagcauccggaacgggaccuacgaccacgacguguaccgcgacgaggcccugaacaaccgguuccagaucaagggcgucgagcugaaguccggcuacaaggacuggauccucuggaucagcuucgccaucagcugcuuccugcugugcguggugcuccugggguucaucaugugggccugccagaagggcaacauccgcugcaacaucugcaucuga

SEQ ID NO: 72534 - RNA, 1701 nt, Artificial Sequence
  derived and/or modified CDS sequence (opt1) from hemagglutinin__InfluenzaA__AFG72625
augaagaccaucaucgcccugagcuacauccucugccugguguucgcccagaagcugcccggcaacgacaacuccaccgcgacgcucugccuggggcaccacgccgucccgaacggcacccuggugaagaccaucaccaacgaccagaucgaggugacgaacgccaccgagcucguccagagcuccagcaccgggcgcaucugcgacagcccccaccggauccuggacggcaagaacugcacccugaucgacgcccuccugggggacccccacugcgacggcuuccagaacaaggagugggaccuguucguggagcgcagcaaggccuacuccaacugcuaccccuacgacgugccggacuacgcgagccuccggucccuggucgccagcuccggcacgcuggaguucaccaacgagggguucaacuggaccggcguggcccaggacgggaccagcuacgccugcaagcgcggcuccgugaaguccuucuucucccggcucaacuggcugcacaagcuggaguacaaguaccccgcgcucaacgucacgaugcccaacaacgacaaguucgacaagcuguacaucuggggcgugcaccaccccagcaccgacuccgaccagaccagccuguacgugcaggccuccgggcgcgucaccgugagcacgaagcggagccagcagaccgugaucccgaacaucggcucccgccccuggguccgggggaucagcucccgcaucagcaucuacuggaccaucgugaagcccggcgacauccuccugaucaaguccaccgggaaccugaucgcgccccggggcuacuucaagauccgcagcggcaaguccagcaucaugcgguccgacgccccgaucgggaacugcaacagcgagugcaucacgcccaacggcuccauccccaacgacaagcccuuccagaacgugaaccgcaucaccuacggggccugcccgcgguacgucaagcagaacacccucaagcuggccaccggcaugcgcaacgugcccgagaagcagacgcgggggaucuucggcgccaucgccggcuucaucgagaacgggugggagggcaugguggacgggugguacggcuuccgccaccagaacagcgaggggaccggccaggccgccgaccugaaguccacccaggcggccaucaaccagaucaacggcaagcucaaccggcugaucgagaagaccaacgagaaguuccaccagaucgagaaggaguucagcgaggucgaggggcgcauccaggaccuggagaaguacguggaggacacgaagaucgaccucugguccuacaacgccgagcugcugguggcccucgagaaccagcacaccaucgaccugaccgacagcgagaugaacaagcuguucgagcggacccgcaagcagcuccgcgagaacgccgaggacaugggcaacgggugcuucaagaucuaccacaagugcgacaacgcgugcaucggcuccauccggaacgggacguacgaccacgacgucuaccgcgacgaggcccugaacaaccgguuccagaucaagggcguggagcucaagagcggcuacaaggacuggauccuguggaucuccuucgccaucagcugcuuccugcugugcgucgugcuccugggguucaucaugugggccugccagaagggcaacauccgcugcaacaucugcaucuga

SEQ ID NO: 72535 - RNA, 1701 nt, Artificial Sequence
  derived and/or modified CDS sequence (opt1) from hemagglutinin__InfluenzaA__AFG72636
augaagaccaucaucgcccugagcuacauccucugccugguguucgcccagaagcugcccggcaacgacaacuccaccgcgacgcucugccuggggcaccacgccgucccgaacggcacccuggugaagaccaucaccaacgaccagaucgaggugacgaacgccaccgagcucguccagagcuccagcaccgggcgcaucugcgacagcccccaccggauccuggacggcaagaacugcacccugaucgacgcccuccugggggacccccacugcgacggcuuccagaacaaggagugggaccuguucguggagcgcagcaaggccuacuccaacugcuaccccuacgacgugccggacuacgcgagccuccggucccuggucgccagcuccggcacgcuggaguucaccaacgagggguucaacuggaccggcguggcccaggacgggaaguccuacgccugcaagcgcggcuccgucaagagcuucuucucccggcucaacuggcugcacaagcuggaguucaaguaccccgcgcucaacgugaccaugcccaacaacgacaaguucgacaagcuguacaucuggggcgugcaccaccccagcacggacuccgaccagaccagccuguacgugcaggccuccgggcgcgucaccgugagcaccaagcggagccagcagacggugaucccgaacaucggcucccgccccuggguccgggggaucagcucccgcaucagcaucuacuggaccaucgugaagcccggcgacauccuccugaucaacuccaccgggaaccugaucgcgccccggggcuacuucaagauccgcaacggcaagagcuccaucaugcggagcgacgccccgaucgacaacugcaacuccgagugcaucacccccaacgggagcauccccaacgacaagcccuuccagaacgugaaccgcaucacguacggcgccugcccgcgguacgucaagcagaacacccucaagcuggccaccgggaugcgcaacgugcccgagaagcagacccggggcaucuucggggccaucgccggcuucaucgagaacggcugggaggggaugguggacggcugguacggguuccgccaccagaacuccgagggcacggggcaggccgccgaccucaagagcacccaggcggccaucgaccagaucaacggcaagcugaaccggcugaucgagaagaccaacgagaaguuccaccagaucgagaaggaguucuccgaggucgagggccgcauccaggaccuggagaaguacguggaggacaccaagaucgaccucuggagcuacaacgccgagcugcugguggcccucgagaaccagcacacgaucgaccugaccgacuccgagaugaacaagcuguucgagcggacccgcaagcagcuccgcgagaacgccgaggacauggggaacggcugcuucaagaucuaccacaagugcgacaacgcgugcaucgggagcauccggaacggcaccuacgaccacgacgucuaccgcgacgaggcccugaacaaccgguuccagaucaaggggguggagcugaaguccggcuacaaggacuggauccucuggaucagcuucgccaucuccugcuuccugcugugcgucgugcuccugggcuucaucaugugggccugccagaaggggaacauccgcugcaacaucugcaucuga

SEQ ID NO: 72536 - RNA, 1701 nt, Artificial Sequence
  derived and/or modified CDS sequence (opt1) from hemagglutinin__InfluenzaA__AFG72658
augaagaccaucaucgcccugagcuacauccucugccuggccuucgcgcagaagcugcccggcaacgacaacuccaccgccacgcucugccuggggcaccacgccgugccgaacggcacccuggucaagaccaucaccaacgaccagaucgaggugacgaacgccaccgagcucgugcagagcuccagcaccgggcgcaucugcgacagcccccaccggauccuggacggcaagaacugcacccugaucgacgcccuccugggggacccccacugcgacggcuuccagaacaaggagugggaccuguucgucgagcgcagcaaggcguacuccaacugcuaccccuacgacgugccggacuacgccagccuccggucccugguggccagcuccggcacgcuggaguucaccaacgagggguucaacuggaccggcgucgcccaggacgggaaguccuacgcgugcaagcgcggcuccgugaacagcuucuucucccggcucaacuggcugcacaagcuggaguacaaguaccccgcccucaacgugaccaugcccaacaacgacaaguucgacaagcuguacaucuggggcguccaccaccccagcacggacuccgaccagaccagccuguacgugcaggccuccgggcgcgugaccgucagcaccaagcggagccagcagacggugaucccgaacaucggcucccgccccugggugcgggggaucagcucccgcaucagcaucuacuggaccaucgucaagcccggcgacauccuccugaucaacuccaccgggaaccugaucgcgccccggggcuacuucaagauccgcaacggcaagagcuccaucaugcggagcgacgccccgaucgacaacugcaacuccgagugcaucacccccaacgggagcauccccaacgacaagcccuuccagaacgugaaccgcaucacguacggcgccugcccgcgguacgugaagcagaacacccucaagcuggccaccgggaugcgcaacguccccgagaagcagacccggggcaucuucggggccaucgccggcuucaucgagaacggcugggaggggaugguggacggcugguacggguuccgccaccagaacuccgagggcacggggcaggccgcggaccucaagagcacccaggccgccaucgaccagaucaacggcaagcugaaccggcugaucgagaagaccaacgagaaguuccaccagaucgagaaggaguucuccgagguggagggccgcauccaggaccuggagaaguacgucgaggacaccaagaucgaccucuggagcuacaacgccgagcugcugguggcccucgagaaccagcacacgaucgaccugaccgacuccgagaugaacaagcuguucgagcggacccgcaagcagcuccgcgagaacgcggaggacauggggaacggcugcuucaagaucuaccacaagugcgacaacgccugcaucgggagcauccggaacggcaccuacgaccacgacguguaccgcgacgaggcccugaacaaccgguuccagaucaagggggucgagcugaaguccggcuacaaggacuggauccucuggaucagcuucgccaucuccugcuuccugcugugcgugguccuccugggcuucaucaugugggccugccagaaggggaacauccgcugcaacaucugcaucuga

SEQ ID NO: 72537 - RNA, 1701 nt, Artificial Sequence
  derived and/or modified CDS sequence (opt1) from hemagglutinin__InfluenzaA__AFG72680
augaagaccaucaucgcccugagcuacauccucugccugguguucgcccagaagcugcccggcaacgacaacuccaccgcgacgcucugccuggggcaccacgccgucccgaacggcacccuggugaagaccaucaccaacgaccagaucgaggugacgaacgccaccgagcucguccagagcuccagcaccgggaucaucugcgacagcccccaccgcauccuggacggcaagaacugcacccugaucgacgcccuccugggggacccccacugcgacggcuuccagaacaaggagugggaccuguucguggagcggagcaaggccuacuccaacugcuaccccuacgacgugccggacuacgcgagccuccgcucccuggucgccagcuccggcacgcuggaguucaccaacgagggguucaacuggaccggcguggcccaggacgggaccagcuacgccugcaagcggggcuccgugaaguccuucuucucccgccucaacuggcugcacaagcuggaguacaaguaccccgcgcucaacgucacgaugcccaacaacgacaaguucgacaagcuguacaucuggggcgugcaccaccccagcaccgacuccgaccagaccagccuguacgugcaggccuccgggcgggucaccgugagcacgcgccggagccagcagaccgugaucccgaacaucggcucccgccccuggguccgcggggugagcucccggaucagcaucuacuggaccaucgugaagcccggcgacauccuccugaucaacuccaccgggaaccugaucgcgccccggggcuacuucaagauccgcagcggcaaguccagcaucaugcgguccgacgccccgaucgggaacugcaacagcgagugcaucacgcccaacggcuccauccccaacgacaagcccuuccagaacgucaaccgcaucaccuacggggccugcccgcgguacgugaagcagaacacccucaagcuggccaccggcaugcgcaacgugcccgagaagcagacgcgggggaucuucggcgccaucgccggcuucaucgagaacgggugggagggcauggucgacgggugguacggcuuccgccaccagaacagcgaggggaccggccaggccgccgaccugaaguccacccaggcggccaucaaccagaucaaccggaagcucaaccgccugaucgagaagaccaacgagaaguuccaccagaucgagaaggaguucagcgagguggagggccggauccaggaccuggagaaguacguggaggacacgaagaucgaccucugguccuacaacgccgagcugcuggucgcccucgagaaccagcacaccaucgaccugaccgacagcgagaugaacaagcuguucgagcgcacccgcaagcagcuccgggagaacgccgaggacauggggaacggcugcuucaagaucuaccacaagugcgacaacgcgugcaucggguccauccgcaacggcacguacgaccacgacguguaccgggacgaggcccugaacaaccgcuuccagaucaagggggucgagcucaagagcggcuacaaggacuggauccuguggaucuccuucgccaucagcugcuuccugcugugcguggugcuccugggcuucaucaugugggccugccagaaggggaacauccggugcaacaucugcaucuga

SEQ ID NO: 72538 - RNA, 1701 nt, Artificial Sequence
  derived and/or modified CDS sequence (opt1) from hemagglutinin__InfluenzaA__AFG72691
augaagaccaucaucgcccugagcuacauccucugccugguguucgcccagaagcugcccggcaacgacaacuccaccgcgacgcucugccuggggcaccacgccgucccgaacggcacccuggugaagaccaucaccaacgaccagaucgaggugacgaacgccaccgagcucguccagagcuccagcaccgggcgcaucugcgacagcccccaccggauccuggacggcaagaacugcacccugaucgacgcccuccugggggacccccacugcgacggcuucaagaacaaggagugggaccuguucguggagcgcagcacggccuacuccaacugcuaccccuacgacgugccggacuacgcgagccuccggucccuggucgccagcuccggcacccuggaguucaccaacgagggguucaacuggaccggcguggcccaggacgggacgagcuacgccugcaagcgcggcuccgugaaguccuucuucucccggcucaacuggcugcacaagcuggaguacaaguaccccgcgcucaacgucaccaugcccaacaacgacaaguucgacaagcuguacaucuggggcgugcaccaccccagcaccgacuccgaccagaccagccuguacgugcaggccuccgggcgcgucacggugagcaccaagcggagccagcagaccgugaucccgaacaucggcucccgccccuggguccgcggggugagcucccggaucagcaucuacuggaccaucgugaagcccggcgacauccuccugaucaacuccacggggaaccugaucgcgccccggggcuacuucaagauccgcagcggcaaguccagcaucaugcgguccgacgccccgaucgacaacugcaacagcgagugcaucacccccaacggguccauccccaacggcaagcccuuccagaacgucaaccgcaucaccuacggggccugcccgcgguacgugaagcagaacacccucaagcuggccacgggcaugcgcaacgugcccgagaagcagacccgggggaucuucggcgccaucgccggcuucaucgagaacgggugggagggcauggucgacgggugguacggcuuccgccaccagaacagcgaggggaccggccaggccgccgaccugaaguccacccaggcggccaucaaccagaucaacggcaagcucaaccggcugaucgagaagacgaacgagaaguuccaccagaucgagaaggaguucagcgagguggaggggcgcauccaggaccuggagaaguacguggaggacaccaagaucgaccucugguccuacaacgccgagcugcuggucgcccucgagaaccagcacaccaucgaccugaccgacagcgagaugaacaagcuguucgagcggacgcgcaagcagcuccgcgagaacgccgaggacaugggcaacgggugcuucaagaucuaccacaagugcgacaacgcgugcaucggcuccauccggaacgggaccuacgaccacgacguguaccgcgacgaggcccugaacaaccgguuccagaucaagggcgucgagcucaagagcggcuacaaggacuggauccuguggaucuccuucgccaucagcugcuuccugcugugcguggugcuccugggguucaucaugugggccugccagaagggcaacauccgcugcaacaucugcaucuga

SEQ ID NO: 72539 - RNA, 1701 nt, Artificial Sequence
  derived and/or modified CDS sequence (opt1) from hemagglutinin__InfluenzaA__AFG72713
augaagaucaucaucgcccugagcuacauccucugccugguguucgcccagaagcugcccggcaacgacaacuccaccgcgacccucugccuggggcaccacgccgucccgaacggcacgcuggugaagaccaucaccaacgaccagaucgaggugaccaacgccacggagcucguccagagcuccagcaccgggcgcaucugcgacagcccccaccagauccuggacggcaagaacugcacccugaucgacgcccuccugggggacccccacugcgacggcuucaagaacaaggagugggaccuguucguggagcggagcaccgccuacuccaacugcuaccccuacgacgugccggacuacgcgagccuccgcucccuggucgccagcuccggcacgcuggaguucaccaacgagggguucaacuggaccggcguggcccaggacgggaccagcuacgccugcaagcggggcuccgugaaguccuucuucucccgccucaacuggcugcacaagcuggaguacaaguaccccgcgcucaacgucacgaugcccaacaacgacaaguucgacaagcuguacaucuggggcgugcaccaccccagcaccgacuccgaccagaccagccuguacgugcaggccuccgggcgggucaccgugagcacgaagcgcagccagcagaccgugaucccgaacaucggcucccggcccuggguccgcgggaucagcucccggaucagcaucuacuggaccaucgugaagcccggcgacauccuccugaucuccagcaccgggaaccugaucgcgccccgcggcuacuucaagauccgguccggcaagagcuccaucauccgcagcgacgccccgaucgacaacugcaacuccgagugcaucacgcccaacgggagcauccccaacgacaagcccuuccagaacgugaaccggaucaccuacggcgccugcccgcgcuacgucaagcagaacacccucaagcuggccaccgggaugcggaacgugcccgagaagcagacgcgcggcaucuucggggccaucgccggcuucaucgagaacggcugggaggggaugguggacggcugguacggguuccggcaccagaacuccgagggcaccgggcaggccgccgaccucaagagcacccaggcggccaucaaccagaucaacggcaagcugaaccgccugaucgagaagaccaacgagaaguuccaccagaucgagaaggaguucuccgaggucgagggccggauccaggaccuggagaaguacguggaggacacgaagaucgaccucuggagcuacaacgccgagcugcugguggcccucgagaaccagcacaccaucgaccugaccgacuccgagaugaacaagcuguucgagcgcacccggaagcagcuccgcgagaacgccgaggacauggggaacggcugcuucaagaucuaccacaagugcgacaacgcgugcaucgggagcauccgcaacggcacguacgaccacgacgucuaccgggacgaggcccugaacaaccgcuuccagaucaaggggguggagcugaaguccggcuacaaggacuggauccucuggaucagcuucgccaucagcugcuuccugcugugcgucgugcuccugggcuucaucaugugggccugccagaaggggaacauccggugcaacaucugcaucuga

SEQ ID NO: 72540 - RNA, 1701 nt, Artificial Sequence
  derived and/or modified CDS sequence (opt1) from hemagglutinin__InfluenzaA__AFG72724
augaagaccaucaucgcccugagcuacauccucugccugguguucgcccagaagcugcccggcaacgacaacuccaccgcgacgcucugccuggggcaccacgccgucccgaacggcacccuggugaagaccaucaccaacgaccagaucgaggugacgaacgccaccgagcucguccagagcuccagcaccgggcgcaucugcgacagcccccaccggauccuggacggcaagaacugcacccugaucgacgcccuccugggggacccccacugcgacggcuuccagaacaaggagugggaccuguucguggagcgcagcaaggccuacuccaacugcuaccccuacgacgugccggacuacgcgagccuccggucccuggucgccagcuccggcacgcuggaguucaccaacgagggguucaacuggaccggcguggcccaggacgggaccagcuacgccugcaagcgcggcuccgugaaguccuucuucucccggcucaacuggcugcacaagcuggaguacaaguaccccgcgcucaacgucacgaugcccaacaacgacaaguucgacaagcuguacaucuggggcgugcaccaccccagcaccgacuccgaccagaccagccuguacgugcaggccuccgggcgcgucaccgugagcacgaagcggagccagcagaccgugaucccgaacaucggcucccgccccuggguccgcggggugagcucccggaucagcaucuacuggaccaucgugaagcccggcgacauccuccugaucaacuccaccgggaaccugaucgcgccccggggcuacuucaagauccgcagcggcaaguccagcaucaugcgguccgacgccccgaucgacaacugcaacagcgagugcaucacgcccaacggguccauccccaacgacaagcccuuccagaacgucaaccgcaucaccuacggcgccugcccgcgguacgugaagcagaacacccucaagcuggccaccgggaugcgcaacgugcccgagaagcagacgcggggcaucuucggggccaucgccggcuucaucgagaacggcugggaggggauggucgacggcugguacggguuccgccaccagaacagcgagggcaccgggcaggccgccgaccugaaguccacccaggcggccaucaaccagaucaacggcaagcucaaccggcugaucgagaagaccaacgagaaguuccaccagaucgagaaggaguucagcgagguggagggccgcauccaggaccuggagaaguacguggaggacacgaagaucgaccucugguccuacaacgccgagcugcuggucgcccucgagaaccagcacaccaucgaccugaccgacagcgagaugaacaagcuguucgagcggacccgcaagcagcuccgcgagaacgccgaggacauggggaacggcugcuucaagaucuaccacaagugcgacaacgugugcaucggguccauccggaacggcacguacgaccacgacgucuaccgcgacgaggcgcugaacaaccgguuccagaucaaggggguggagcucaagagcggcuacaaggacuggauccuguggaucuccuucgccaucagcugcuuccugcugugcgugguccuccugggcuucaucaugugggccugccagaaggggaacauccgcugcaacaucugcaucuga

SEQ ID NO: 72541 - RNA, 1701 nt, Artificial Sequence
  derived and/or modified CDS sequence (opt1) from hemagglutinin__InfluenzaA__AFG72735
augaagaccaucaucgcccugagcuacauccucugccugguguucgcccagaagcugcccggcaacgacaacuccaccgcgacgcucugccuggggcaccacgccgucccgaacggcacccuggugaagaccaucaccaacgaccagaucgaggugacgaacgccaccgagcucguccagagcuccagcaccgggcgcaucugcgacagcccccaccggauccuggacggcaagaacugcacccugaucgacgcccuccugggggacccccacugcgacggcuucaagaacaaggagugggaccuguucguggagcgcagcacggccuacuccaacugcuaccccuacgacgugccggacuacgcgagccuccggucccuggucgccagcuccggcacccuggaguucaccaacgagggguucaacuggaccggcguggcccaggacgggacgagcuacgccugcaagcgcggcuccgugaaguccuucuucucccggcucaacuggcugcacaagcuggaguacaaguaccccgcgcucaccgucaccaugcccaacaacgacaaguucgacaagcuguacaucuggggcgugcaccaccccagcaccgacuccgaccagacgagcaucuacgugcaggccuccgggcgcgucaccgugagcaccaagcggagccagcagaccgugaucccgaacaucggcucccgccccuggguccgcggggugagcucccggaucagcaucuacuggacgaucgugaagcccggcgacauccugcucaucaacuccaccgggaaccugaucgcgccccggggcuacuucaagauccgcagcggcaaguccagcaucaugcgguccgacgccccgaucgacaacugcaacagcgagugcaucacccccaacggguccauccccaacgacaagcccuuccagaacgucaaccgcaucaccuacggcgccugcccgcgguacgugaagcagaacacgcugaagcucgccaccgggaugcgcaacgugcccgagaagcagacccggggcaucuucggggccaucgccggcuucaucgagaacggcugggaggggauggucgacggcugguacggguuccgccaccagaacagcgagggcaccgggcaggccgccgaccugaaguccacgcaggcggccaucaaccagaucaacggcaagcugaaccggcucaucgagaagaccaacgagaaguuccaccagaucgagaaggaguucagcgagguggagggccgcauccaggaccuggagaaguacguggaggacaccaagaucgacaucugguccuacaacgccgagcugcucgucgcccuggagaaccagcacaccaucgaccugacggacagcgagaugaacaagcuguucgagcggacccgcaagcagcuccgcgagaacgccgaggacauggggaacggcugcuucaagaucuaccacaagugcgacaacgcgugcaucggguccauccggaacggcaccuacgaccacgacguguaccgcgacgaggcccugaacaaccgguuccagaucaagggggucgagcucaagagcggcuacaaggacuggauccuguggaucuccuucgccaucagcugcuuccugcucugcguggugcugcugggcuucaucaugugggccugccagaaggggaacauccgcugcaacaucugcaucuga

SEQ ID NO: 72542 - RNA, 1701 nt, Artificial Sequence
  derived and/or modified CDS sequence (opt1) from hemagglutinin__InfluenzaA__AFG72757
augaagaccaucaucgcccugagcuacauccucugccugguguucgcccagaagauccccggcaacgacaacuccaccgcgacgcugugccucgggcaccacgccgucccgaacggcacccuggugaagaccaucaccaacgaccagaucgaggugacgaacgccaccgagcugguccagagcuccagcaccgggcgcaucugcgacagcccccaccggauccucgacggcgagaacugcacccugaucgacgcccugcucggggacccccacugcgacggcuuccagaacaaggagugggaccuguucguggagcgcuccaaggccuacuccaacugcuaccccuacgacgugccggacuacgcgagccugcggucccucgucgccagcuccggcacgcuggaguucaacaacgagagcuucaacuggaccgggguggcccagaacggcaccuccuacgccugcaagcgcagcuccaucaagagcuucuucucccggcugaacuggcuccaccagcugaaguacaaguaccccgcgcugaacgugaccaugcccaacaacgacaaguucgacaagcucuacaucuggggcguccaccaccccagcacggacuccgaccagaccagcaucuacgcccaggccagcgggcgcgugaccguguccaccaagcggagccagcagacggucaucccgaacaucgggucccgccccugggugcggggcaucagcucccgcaucagcauccacuggaccaucgugaagcccggcgacauccugcugaucaacuccaccgggaaccucaucgcgccccggggcuacuucaagauccgcagcgggaaguccagcaucaugcgguccgacgccccgaucggcaagugcaacagcgagugcaucacccccaacggcuccauccccaacgacaagcccuuccagaacgucaaccgcaucacguacggggccugcccgcgguacgugaagcagaacacccugaagcuggccaccggcaugcgcaacgugcccgagaagcagacccgggggaucuucggcgccaucgccggguucaucgagaacggcugggagggcauggucgacgggugguacggcuuccgccaccagaacagcgaggggacgggccaggccgcggaccucaaguccacccaggccgccaucaaccagaucaacgggaagcugaaccggcugaucgagaagaccaacgagaaguuccaccagaucgagaaggaguucagcgagguggagggccgcauccaggaccucgagaaguacguggaggacaccaagaucgaccugugguccuacaacgccgagcugcucgucgcccuggagaaccagcacacgaucgaccugaccgacagcgagaugaacaagcuguucgagcggacccgcaagcagcuccgcgagaacgcggaggacaugggcaacgggugcuucaagaucuaccacaagugcgacaacgccugcaucggcuccauccggaacgggaccuacgaccacgacguguaccgcgacgaggcccugaacaaccgguuccagaucaagggcguggagcucaagagcggguacaaggacuggauccuguggaucagcuucgccaucuccugcuuccugcucugcgucgugcugcugggcuucaucaugugggccugccagaagggcaacauccgcugcaacaucugcaucuga

SEQ ID NO: 72543 - RNA, 1701 nt, Artificial Sequence
  derived and/or modified CDS sequence (opt1) from hemagglutinin__InfluenzaA__AFG72779
augaagaccaucaucgcccugagcuacauccucugccugguguucgcccagaagcugcccggcaacgacaacuccaccgcgacgcucugccuggggcaccacgccgucccgaacggcacccuggugaagaccaucaccaacgaccagaucgaggugacgaacgccaccgagcucguccagagcuccagcaccgggcgcaucugcgacagcccccaccggauccuggacggcgagaacugcacccugaucgacgcccuccugggggacccccacugcgacggcuuccagaacaaggagugggaccuguucguggagcgcagcaaggccuacuccaacugcuaccccuacgacgugccggacuacgcgagccuccggucccuggucgccagcuccggcacgcuggaguucaacaacgagagcuucaacuggaccgggguggcccagaacggcaccuccagcgccugcaagcgccgguccaucaagagcuucuucucccgccucaacuggcugcaccagcugaaguacaaguaccccgcgcucaacgugaccaugcccaacaacgacaaguucgacaagcuguacaucuggggcguccaccaccccagcacggacuccgaccagaccagccuguacgcccaggccagcgggcgggugaccguguccacccgccggagccagcagacggucaucccgaacaucgggucccgccccugggugcggggcgugagcuccggcaucagcaucuacuggaccaucgucaagcccggggacauccuccugaucaacuccaccggcaaccugaucgcgccccgcggguacuucaagauccggagcggcaaguccagcaucaugcgcuccgacgccccgaucggcaagugcaacagcgagugcaucacccccaacggguccauccccaacgacaagcccuuccagaacgugaaccggaucacguacggcgccugcccgcgcuacgugaagcagaacacccucaagcuggccaccgggaugcggaacguccccgagaagcagacccgcggcaucuucggggccaucgccggcuucaucgagaacggcugggaggggaugguggacggcugguacggguuccggcaccagaacagcgagggcacggggcaggccgcggaccugaaguccacccaggccgccaucaaccagaucaacggcaagcucaaccgccugaucgagaagaccaacgagaaguuccaccagaucgagaaggaguucagcgagguggagggccggauccaggaccuggagaaguacgucgaggacaccaagaucgaccucugguccuacaacgccgagcugcugguggcccucgagaaccagcacacgaucgaccugaccgacagcgagaugaacaagcuguucgagcgcacccgcaagcagcuccgggagaacgcggaggacauggggaacggcugcuucaagaucuaccacaagugcgacaacgccugcaucggguccauccgcaacggcaccuacgaccacgacguguaccgggacgaggcccugaacaaccgcuuccagaucaagggggucgagcugaaguccggcuacaaggacuggauccucuggaucagcuucgccaucuccugcuuccugcugugcgugguccuccugggcuucaucaugugggccugccagaaggggaacauccggugcaacaucugcaucuga

SEQ ID NO: 72544 - RNA, 1701 nt, Artificial Sequence
  derived and/or modified CDS sequence (opt1) from hemagglutinin__InfluenzaA__AFG72801
augaagaccaucaucgcccugagcuacauccucugccugguguucgcccagaagcugcccggcaacgacaacuccaccgcgacgcucugccuggggcaccacgccgucagcaacggcacccuggugaagaccaucaccaacgaccagaucgaggugacgaacgccaccgagcucguccaguccagcuccaccgggcgcaucugcgacagcccgcaccagauccuggacggcgagaacugcacccugaucgacgcccuccugggggacccccacugcgacggcuuccagaacaaggagugggaccuguucguggagcgguccaaggccuacagcaacugcuaccccuacgacgugcccgacuacgcgucccuccgcagccuggucgccuccagcggcacgcuggaguucaacaacgaguccuucaacuggaccgggguggcccagaacggcaccagcuccgccugcaagcggcgcagcaacaaguccuucuucagccggcucaacuggcugcaccagcugaaguacaaguacccggcgcucaacgugaccaugcccaacaacgagaaguucgacaagcuguacaucuggggcguccaccaccccuccacggacagcgaccagaucagcaucuacgcccaguccagcgggcgcgugaccguguccaccaagcggagccagcagaccgucauccccaacaucggguccagcccgugggugcgcggcguguccagccggaucuccaucuacuggacgaucgucaagcccggcgacauccugcucaucaacagcaccgggaaccugaucgcgccccgcggcuacuucaagauccgguccggcaagagcuccaucaugcgcagcgacgcccccaucgggaagugcaacuccgagugcaucaccccgaacggcagcauccccaacgacaagcccuuccagaacgugaaccggaucaccuacggggccugcccccgcuacgugaagcagaacacgcugaagcucgccaccggcaugcggaacgucccggagaagcagacccgcgggaucuucggcgccaucgccggguucaucgagaacggcugggagggcaugguggacgggugguacggcuuccggcaccagaacuccgaggggaccggccaggccgccgaccucaagagcacgcaggcggccaucaaccagaucaacgggaagcugaaccgccugaucgagaagaccaacgagaaguuccaccagaucgagaaggaguucuccgagguggagggccggauccaggaccuggagaaguacgucgaggacaccaagaucgaccuguggagcuacaacgccgagcuccugguggcccuggagaaccagcacaccaucgaccucacggacagcgagaugaacaagcuguucgagcgcaccaagaagcagcugcgggagaacgccgaggacaugggcaacgggugcuucaagaucuaccacaagugcgacaacgcgugcaucggcuccauccgcaacgggaccuacgaccacgacguguaccgcgacgaggcccucaacaaccgguuccagaucaagggcgucgagcucaagagcggguacaaggacuggauccuguggaucuccuucgccaucagcugcuuccugcugugcgugguccugcucggcuucaucaugugggccugccagaagggcaacauccgcugcaacaucugcaucuga

SEQ ID NO: 72545 - RNA, 1701 nt, Artificial Sequence
  derived and/or modified CDS sequence (opt1) from hemagglutinin__InfluenzaA__AFG72812
augaagaccaucaucgcccugagcuacauccucugccugguguucgcccagaagcugcccggcaacgacaacuccaccgcgacgcucugccuggggcaccacgccgucccgaacggcacccuggugaagaccaucaccaacgaccagaucgaggugacgaacgccaccgagcucguccagagcuccagcaccgggcgcaucugcgacagcccccaccagauccuggacggcgagaacugcacccugaucgacgcccuccugggggacccccacugcgacggcuuccagaacaaggagugggaccuguucguggagcgguccaaggccuacuccaacugcuaccccuacgacgugccggacuacgucagccuccgcucccugguggcgagcuccggcacgcuggaguucaacaacgagagcuucaacuggaccgggguggcccagaacggcaccuccagcgccugcaagcggcgcuccaacaagagcuucuucucccggcucaacuggcugcaccagcugaaguacaaguaccccgcccucaacgucaccaugcccaacaacgagaaguucgacaagcuguacaucuggggcgugcaccaccccgggacggacagcgaccagaucucccuguacgcgcaggccagcgggcgcgugaccgucagcaccaagcggucccagcagaccgugaucccgaacaucggcagccgccccugggugcggggcgucuccagccgcaucuccaucuacuggacgaucgugaagcccggggacauccuccugaucaacagcaccggcaaccugaucgcgccccggggguacuucaagauccgcuccggcaagagcuccaucaugcggagcgacgccccgaucggcaagugcaacuccgagugcaucacccccaacgggagcauccccaacgacaagcccuuccagaacgugaaccgcaucaccuacggcgccugcccgcgguacgucaagcagaacacgcucaagcuggccaccgggaugcgcaacgugcccgagaagcagacccggggcaucuucggggccaucgccggcuucaucgagaacggcugggaggggaugauggacggcugguacggguuccgccaccugaacuccgagggcaccgggcaggccgccgaccucaagagcacgcaggcggccaucaaccagaucaacggcaagcugaaccggcugaucgagaagaccaacgagaaguuccaccagaucgagaaggaguucuccgagguggagggccgcauccaggaccucgagaaguacgucgaggacaccaagaucgaccuguggagcuacaacgccgagcugcucguggcccuggagaaccagcacaccaucgaccugacggacuccgagaugaacaagcuguucgagcggaccaagaagcagcuccgcgagaacgccgaggacauggggaacggcugcuucaagaucuaccacaagugcgacaacgcgugcaucgggagcauccgcaacggcaccuacgaccacgacguguaccgggacgaggcccugaacaaccgcuuccagaucaagggggucgagcucaaguccggcuacaaggacuggauccuguggaucagcuucgccaucagcugcuuccugcucugcaucgugcugcugggcuucaucaugugggccugccagaaggggaacauccggugcaacaucugcaucuga

SEQ ID NO: 72546 - RNA, 1701 nt, Artificial Sequence
  derived and/or modified CDS sequence (opt1) from hemagglutinin__InfluenzaA__AFG72823
augaagaccaucaucgcccugagcuacauccucugccugguguucgcccagaagcugcccggcaacgacaacuccaccgcgacgcucugccuggggcaccacgccgucccgaacggcaccaucgugaagaccaucaccaacgaccagaucgaggugacgaacgccaccgagcugguccagagcuccagcaccgggggcaucugcgacagcccccaccagauccucgacggggagaacugcacccugaucgacgcccugcucggcgacccccagugcgacggcuuccagaacaagaagugggaccuguucguggagcgcagcaaggccuacuccaacugcuaccccuacgacgugccggacuacgcgagccugcggucccucgucgccagcuccgggacgcuggaguucaacaacgagagcuucaacuggaccggcgugacccagaacgggaccuccagcgccugcaagcgccgguccaacaagagcuucuucucccgccugaacuggcucacgcaccugaaguacaaguaccccgcccugaacgugaccaugcccaacaacgagaaguucgacaagcucuacaucuggggcguccugcaccccgggaccgacagcgaccagaucucccuguacgcgcaggccagcggccggaucaccgugagcacgaagcgcucccagcagaccgugaucccgaacaucggcagccggccccgcguccgcgggguguccagccggaucuccaucuacuggaccaucgugaagcccggcgacauccuccugaucaacagcaccgggaaccugaucgcgccccggggcuacuucaagauccgcuccggcaagagcuccaucaugcggagcgacgccccgaucgggaagugcaacuccgagugcaucacgcccaacggcagcauccccaacgacaagcccuuccagaacgucaaccgcaucaccuacggggccugcccgcgguacaucaagcagaacacccucaagcuggccaccggcaugcgcaacgugcccgagaagcagacgcgggggaucuucggcgccaucgccggcuucaucgagaacgggugggagggcaugguggacgggugguacggcuuccgccaccagaacuccgaggggaccggccaggccgccgaccugaaguccacccaggcggccaucaaccagaucaacggcaagcucaaccggcugaucgggaagaccaacgagaaguuccaccagaucgagaaggaguucuccgaggucgagggccgcauccaggaccuggagaaguacguggaggacacgaagaucgaccucuggagcuacaacgccgagcugcugguggcccucgagaaccagcacaccaucgaccugaccgacuccgagaugaacaagcuguucgagcggaccaagaagcagcuccgcgagaacgccgaggacauggggaacggcugcuucaagaucuaccacaagugcgacaacgcgugcaucgggagcauccgcaacggcacguacgaccacgacgucuaccgggacgaggcccugaacaaccgcuuccagaucaagggcguggagcugaaguccggguacaaggacuggauccucuggaucagcuucgccaucagcugcuuccugcugugcguggcccuccugggcuucaucaugugggccugccagaaggggaacauccggugcaacaucugcaucuga

SEQ ID NO: 72547 - RNA, 1701 nt, Artificial Sequence
  derived and/or modified CDS sequence (opt1) from hemagglutinin__InfluenzaA__AFG72834
augaagaccaucaucgcccugagcuacauccucugccugguguucgcccagaagcugcccggcaacgacaacuccaccgcgacgcucugccuggggcaccacgccgucccgaacggcacccuggugaagaccaucaccaacgaccagaucgaggugacgaacgccaccgagcucguccagagcuccagcaccgggcgcaucugcgacagcccccaccagauccuggacggcgagaacugcacccugaucgacgcccuccugggggacccccacugcgacggcuuccagaacaaggagugggaccuguucguggagcggagcaaggccuacuccaacugcuaccccuacgacgugccggacuacgucagccuccgcucccugguggcgagcuccggcacgcuggaguucaacaacgagagcuucaacuggaccgggguggcccagaacggcaccuccagcgccugcaagcggcgcuccaacaagagcuucuucucccggcucaacuggcugcaccagcugaaguacaaguaccccgcccucaacgucaccaugcccaacaacgagaaguucgacaagcuguacaucuggggcgugcaccaccccgggacggacagcgaccagaucucccuguacgcgcaggccagcgggcgcgugaccgucagcaccaagcggucccagcagaccgugaucccgaacaucggcagccgccccugggugcggggcgucuccagccgcaucuccaucuacuggacgaucgugaagcccggggacauccuccugaucaacagcaccggcaaccugaucgcgccccggggguacuucaagauccaguccggcaagagcuccaucaugcgcagcgacgccccgaucggcaagugcaacuccgagugcaucacccccaacgggagcauccccaacgacaagcccuuccagaacgugaaccggaucaccuacggcgccugcccgcgcuacgucaagcagaacacgcucaagcuggccaccgggaugcggaacgugcccgagaagcagacccgcggcaucuucggggccaucgccggcuucaucgagaacggcugggaggggaugauggacggcugguacggguuccggcaccagaacuccgagggcaccgggcaggccgccgaccugaaguccacgcaggcggccaucaaccagaucaacggcaagcucaaccgccugaucgagaagaccaacgagaaguuccaccagaucgagaaggaguucuccgagguggagggccggauccaggaccuggagaaguacgucgaggacaccaagaucgaccucuggagcuacaacgccgagcugcugguggcccucgagaaccagcacaccaucgaccugacggacuccgagaugaacaagcuguucgagcgcaccaagaagcagcuccgggagaacgccgaggacauggggaacggcugcuucaagaucuaccacaagugcgacaacgcgugcaucgggagcauccgcaacggcaccuacgaccacgacguguaccgcgacgaggcccugaacaaccgguuccagaucaagggggucgagcugaaguccggcuacaaggacuggauccucuggaucagcuucgccaucagcugcuuccugcugugcaucgugcuccugggcuucaucaugugggccugccagaaggggaacauccgcugcaacaucugcaucuga

SEQ ID NO: 72548 - RNA, 1701 nt, Artificial Sequence
  derived and/or modified CDS sequence (opt1) from hemagglutinin__InfluenzaA__AFG72845
augaagaccaucaucgcccugagcuacauccucugccugguguucgcccagaagcugcccggcaacgacaacuccaccgcgacgcucugccuggggcaccacgccgucccgaacggcacccuggugaagaccaucaccaacgaccagaucgaggugacgaacgccaccgagcucguccagagcuccagcaccucccgcaucugcgacagcccccaccagauccuggacggggagaacugcacccugaucgacgcccuccugggcgacccccacugcgacggguuccagaacaaggagugggaccuguucguggagcgguccaaggccuacagcaacugcuaccccuacgacgugccggacuacgucucccuccgcagccugguggcguccagcggcacgcuggaguucaacaacgaguccuucaacuggaccggcguggcccagaacgggaccagcuccgccugcaagcggcgcagcgacaaguccuucuucagccggcucaacuggcugcaccagcugcgcuacaaguaccccgcccucaacgucaccaugcccaacaacgagaaguucgacaagcuguacaucuggggcgugcaccaccccgggacggacuccgaccagaucagccuguacgcgcaggccagcggccgggugaccaucuccaccaagcgcagccagcagaccgucaucccgaacaucgggucccggcccugggugcgcggcgugagcucccggaucagcauccacuggacgaucgucaagcccggcgacauccuccugaucaacuccaccgggaaccugaucgcgccccgcggcuacuucaagauccggagcgggaaguccagcaucaugcgcuccgacgccccgaucggcaagugcaacagcgagugcaucacccccaacggcuccauccccaacgacaagcccuuccagaacgugaaccggaucaccuacggggccugcccgcgcuacgugaagcagaagacgcucaagcuggccaccggcaugcggaacguccccgagaagcagacccgcgggaucuucggcgccaucgccggguucaucgagaacggcugggagggcaugauggacgggugguacggcuuccggcaccagaacagcgaggggaccggccaggccgccgaccugaaguccacgcaggcggccaucaaccagaucaacgggaagcucaaccgccugaucgagaagaccaacgagaaguuccaccagaucgagaaggaguucagcgagguggagggccggauccaggaccuggagaaguacguggaggacaccaagaucgaccucugguccuacaacgccgagcugcuggucgcccucgagaaccagcacaccaucgaccugacggacagcgagaugaacaagcuguucgagcgcaccaagaagcagcuccgcgagaacgccgaggacaugggcaacgggugcuucaagaucuaccacaagugcgacaacgcgugcaucggcuccauccggaacgggaccuacgaccacgacguguaccgcgacgaggcccugaacaaccgguuccagaucaagggcguggagcucaagagcggguacaaggacuggauccuguggaucagcuucgccaucuccugcuuccugcugugcaucguccuccugggcuucaucaugugggccugccagaagggcaacauccgcugcaacaucugcaucuga

SEQ ID NO: 72549 - RNA, 1701 nt, Artificial Sequence
  derived and/or modified CDS sequence (opt1) from hemagglutinin__InfluenzaA__AFG72856
augaagaccaucaucgcccugagcuacauccucugccugguguucgcccagaagcugcccggcaacgacaacuccaccgcgacgcucugccuggggcaccacgccgucccgaacggcaccaucgugaagaccaucaccaacgaccagaucgaggugacgaacgccaccgagcugguccagagcuccagcaccgggggcaucugcgacagcccccaccagauccucgacggggagaacugcacccugaucgacgcccugcucggcgacccccagugcgacggcuuccagaacaagaagugggaccuguucguggagcgcagcaaggccuacuccaacugcuaccccuacgacgugccggacuacgcgagccugcggucccucaucgccagcuccgggacgcuggaguucaccaacgagagcuucaacuggaccggcgucacccagaacgggacguccagcgccugcaagcgccgguccaacaagagcuucuucucccgccugaacuggcucacccaccugaaguacaaguaccccgcccugaacgugaccaugcccaacaacgagaaguucgacaagcucuacaucuggggcgugcaccaccccgggaccgacagcgaccagaucucccuguacgcgcaggccagcggccggaucacggucagcaccaagcgcucccagcagaccgugaucccgaacaucggcagccggccccgcgugcgggacaucuccagccgcaucuccaucuacuggaccaucgucaagcccggggacauccugcucaucaacagcacgggcaaccugaucgcgccccggggguacuucaagauccgcuccggcaagagcuccaucaugcggagcgacgccccgaucggcaagugcaacuccgagugcaucacccccaacgggagcauccccaacgacaagcccuuccagaacgugaaccgcaucaccuacggcgccugcccgcgguacgugaagcagaacacccugaagcucgccacggggaugcgcaacguccccgagaagcagacccggggcaucuucggggccaucgccggcuucaucgagaacggcugggaggggaugguggacggcugguacggguuccgccaccagaacuccgagggcaccgggcaggccgccgaccugaaguccacccaggcggccaucaaccagaucaacggcaagcugaacaagcucaucggcaagacgaacgagaaguuccaccagaucgagaaggaguucuccgagguggaggggcggauccaggaccuggagaaguacgucgaggacaccaagaucgaccuguggagcuacaacgccgagcuccugguggcccuggagaaccagcacaccaucgaccucaccgacuccgagaugaacaagcuguucgagcgcacgaagaagcagcugcgggagaacgccgaggacaugggcaacgggugcuucaagaucuaccacaagugcgacaacgcgugcaucggcagcauccgcaacgggaccuacgaccacgacguguaccgcgacgaggcccucaacaaccgguuccagaucaagggcgucgagcugaaguccggcuacaaggacuggauccuguggaucagcuucgccaucagcugcuuccuccugugcguggugcugcucggguucaucaugugggccugccagaagggcaacauccgcugcaacaucugcaucuga

SEQ ID NO: 72550 - RNA, 1701 nt, Artificial Sequence
  derived and/or modified CDS sequence (opt1) from hemagglutinin__InfluenzaA__AFG72867
augaagaccaucaucgcccugagcuacauccucugccugguguucgcccagaagcugcccggcaacgacaacuccaccgcgacgcucugccuggggcaccacgccgucccgaacggcacccuggugaagaccaucaccaacgaccagaucgaggugacgaacgccaccgagcucguccagagcuccagcaccgggcgcaucugcgacagcccccaccagauccuggacggcgagaacugcacccugaucgacgcccuccugggggacccccacugcgacggcuuccagaacaaggagugggaccuguucguggagcggagcaaggccuacuccaacugcuaccccuacgacgugccggacuacgucagccuccgcucccugguggcgagcuccggcacgcuggaguucaacaacgagagcuucaacuggaccgggguggcccagaacggcaccuccagcgccugcaagcggcgcuccaacaagagcuucuucucccggcucaacuggcugcaccagcugaagaacaaguaccccgcccucaacgucaccaugcccaacaacgagaaguucgacaagcuguacaucuggggcgugcaccaccccgggacggacagcgaccagaucucccuguacgcgcaggccagcgggcgcgugaccgucagcaccaagcggucccagcagaccgugaucccgaacaucggcagccgcccccgggugcgcgacaucuccagccggaucuccaucuacuggacgaucgucaagcccggcgacauccuccugaucaacagcaccgggaaccugaucgcgccccgcggcuacuucaagauccgguccgggaaguccuccaucaugcgcagcgacgccccgaucggcaagugcaacuccgagugcaucacccccaacggcagcauccccaacgacaagcccuuccagaacgugaaccggaucaccuacggggccugcccgcgcuacgugaagcagaacacgcucaagcuggccaccggcaugcggaacguccccgagaagcagacccgcgggaucuucggcgccaucgccggguucaucgagaacggcugggagggcaugauggacgggugguacggcuuccggcaccagaacuccgaggggaccggccaggccgccgaccucaagagcacgcaggcggccaucaaccagaucaacgggaagcugaaccgccugaucgagaagaccaacgagaaguuccaccagaucgagaaggaguucuccgagguggagggccggauccaggaccuggagaaguacguggaggacaccaagaucgaccucuggagcuacaacgccgagcugcuggucgcccucgagaaccagcacaccaucgaccugacggacuccgagaugaacaagcuguucgagcgcaccaagaagcagcuccgcgagaacgccgaggacaugggcaacgggugcuucaagaucuaccacaagugcgacaacgcgugcaucggcagcauccggaacgggaccuacgaccacgacguguaccgcgacgaggcccugaacaaccgguuccagaucaagggcguggagcugaaguccggguacaaggacuggauccucuggaucagcuucgccaucagcugcuuccugcugugcaucguccuccugggcuucaucaugugggccugccagaagggcaacauccgcugcaacaucugcaucuga

SEQ ID NO: 72551 - RNA, 1701 nt, Artificial Sequence
  derived and/or modified CDS sequence (opt1) from hemagglutinin__InfluenzaA__AFG72922
augaagaccaucaucgcccugagcuacauccucugccugguguucgcccagaagcugcccggcgacgacaacuccaccgcgacgcucugccuggggcaccacgccgucccgaacggcaccaucgugaagaccaucaccaacgaccagaucgaggugacgaacgccaccgagcugguccagagcuccagcaccggggagaucugcgacagcccccaccagauccucgacggcgagaacugcacccugaucgacgcccugcucggggacccccagugcgacggcuuccagaacaagaagugggaccuguucguggagcgcagcaaggccuacuccaacugcuaccccuacgacgugccggacuacgcgagccugcggucccucgucgccagcuccggcacgcuggaguucaacaacgagagcuucaacuggaccggggugacccagaacggcaccuccagcuccugcauccgcaagagcaacaacuccuucuucagccggcugaacuggcucacgcaccugaaguucaaguaccccgcccugaacgugaccaugcccaacaacgagcaguucgacaagcucuacaucuggggcguccaccaccccgggaccgacaacgaccagaucuuccuguacgcccaggcguccgggcgcaucaccgugagcacgaagcggagccagcagaccgugaucccgaacaucggcucccgcccccggguccgcaacauccccagccggaucuccaucuacuggaccaucgugaagcccggcgacauccugcucaucaacagcaccgggaaccugaucgccccgcgcggcuacuucaagauccgguccgggaaguccuccaucaugcgcagcgacgcccccaucggcaagugcaacuccgagugcaucacgcccaacggcagcauccccaacgacaagccguuccagaacgugaaccggaucaccuacggggccugcccccgcuacgucaagcagaacacccugaagcucgccaccggcaugcggaacgugcccgagaagcagacgcgcgggaucuucggcgcgaucgccggguucaucgagaacggcugggagggcaugguggacgggugguacggcuuccggcaccagaacuccgaggggcgcggccaggccgccgaccucaagagcacccaggccgcgaucgaccagaucaacgggaagcugaaccggcugaucggcaagaccaacgagaaguuccaccagaucgagaaggaguucuccgaggucgagggccgcauccaggaccuggagaaguacguggaggacaccaagaucgaccuguggagcuacaacgccgagcuccugguggcccuggagaaccagcacacgaucgaccucaccgacuccgagaugaacaagcuguucgagaagaccaagaagcagcugcgggagaacgccgaggacauggggaacggcugcuucaagaucuaccacaagugcgacaacgccugcaucgggagcauccgcaacggcaccuacgaccacgacgucuaccgcgacgaggcgcucaacaaccgguuccagaucaaggggguggagcugaaguccggcuacaaggacuggauccuguggaucagcuucgccaucuccugcuuccuccugugcguggcccugcucggcuucaucaugugggccugccagaaggggaacauccgcugcaacaucugcaucuga

SEQ ID NO: 72552 - RNA, 1701 nt, Artificial Sequence
  derived and/or modified CDS sequence (opt1) from hemagglutinin__InfluenzaA__AFG72933
augaagaccaucaucgcccugagcuacauccucugccugguguucgcccagaagcugcccggcaacgacaacuccaccgcgacgcucugccuggggcaccacgccgucccgaacggcaccaucgugaagaccaucaccaacgaccagaucgaggugacgaacgccaccgagcugguccagagcuccagcaccggggagaucugcgacagcccccaccagauccucgacggcgagaacugcacccugaucgacgcccugcucggggacccccagugcgacggcuuccagaacaagaagugggaccuguucguggagcgcagcaaggccuacuccaacugcuaccccuacgacgugccggacuacgcgagccugcggucccucgucgccagcuccggcacgcuggaguucaacaacgagagcuucaacuggaccggggugacccagaacggcaccuccagcgccugcgugcgccgguccaacaacagcuucuucucccgccugaacuggcucacgcaccugaaguucaaguaccccgcccugaacgucaccaugcccaacaacgagcaguucgacaagcucuacaucuggggcgugcaccaccccgggaccgacaacgaccagaucuuccuguacgcgcaggccagcgggcggaucaccguguccacgaagcgcagccagcagaccgucaucccgaacaucggcagccggccccgcgugcggaacauccccucccgcaucagcaucuacuggaccaucgugaagcccggcgacauccugcucaucaacuccaccgggaaccugaucgccccgcggggcuacuucaagauccgcagcgggaaguccagcaucaugcgguccgacgcccccaucggcaagugcaacagcgagugcaucacgcccaacggcuccauccccaacgacaagccguuccagaacgucaaccgcaucaccuacggggccugcccccgguacgugaagcagaacacccugaagcucgcgaccggcaugcgcaacgugcccgagaagcagacgcgggggaucuucggcgccaucgccggguucaucgagaacggcugggagggcauggucgacgggugguacggcuuccgccaccagaacagcgaggggcggggccaggccgccgaccugaaguccacccaggcggccaucgaccagaucaacgggaagcugaaccgccucaucggcaagaccaacgagaaguuccaccagaucgagaaggaguucagcgagguggagggccggauccaggaccuggagaaguacguggaggacaccaagaucgaccugugguccuacaacgccgagcuccuggucgcccuggagaaccagcacacgaucgaccucaccgacagcgagaugaacaagcuguucgagaagaccaagaagcagcugcgcgagaacgccgaggacauggggaacggcugcuucaagaucuaccacaagugcgacaacgcgugcaucggguccauccgcaacggcaccuacgaccacgacguguaccgggacgaggcccucaacaaccgcuuccagaucaaggggguggagcugaaguccggcuacaaggacuggauccuguggaucuccuucgccaucagcugcuuccuccugugcgucgcccugcucggcuucaucaugugggccugccagaaggggaacauccggugcaacaucugcaucuga

SEQ ID NO: 72553 - RNA, 1701 nt, Artificial Sequence
  derived and/or modified CDS sequence (opt1) from hemagglutinin__InfluenzaA__AFG72955
augaagaccaucaucgcccugagcuacauccucugccugguguucgcccagaagcugcccggcaacgacaacuccaccgcgacgcucugccuggggcaccacgccgucccgaacggcaccaucgugaagaccaucaccaacgaccagaucgaggugacgaacgccaccgagcugguccagagcuccagcaccggggagaucugcgacagcccccaccagauccucgacggcgagaacugcacccugaucgacgcccugcucggggacccccagugcgacggcuuccagaacaagaagugggaccuguucguggagcgcagcaaggccuacuccaacugcuaccccuacgacgugccggacuacgcgagccugcggucccucaucgccagcuccggcacgcuggaguucaacaacgagagcuucaacuggaccggggucacccagaacggcaccuccagcgccugcauccgccgguccaacaacagcuucuucucccgccugaacuggcucacgcaccuccgguucaaguaccccgcccugaacgugaccaugcccaacaacgagcaguucgacaagcuguacaucuggggcgugcaccaccccgggaccgacaacgaccagaucuuccuguacgcgcaggccagcgggcgcaucaccgucuccacgaagcggagccagcagaccgugaucccgaacaucggcagccgcccccgggugcgcaacauccccucccggaucagcaucuacuggaccaucgucaagcccggcgacauccugcucaucaacuccaccgggaaccugaucgccccgcgcggcuacuucaagauccggagcgggaaguccagcaucaugcgcuccgacgcccccaucggcaagugcaacagcgagugcaucacgcccaacggcuccauccccaacgacaagccguuccagaacgugaaccggaucaccuacggggccugcccccgcuacgugaagcagaacacccugaagcucgcgaccggcaugcggaacguccccgagaagcagacgcgcgggaucuucggcgccaucgccggguucaucgagaacggcugggagggcaugguggacgggugguacggcuuccggcaccagaacagcgaggggcgcggccaggccgccgaccugaaguccacccaggcggccaucgaccagaucaacgggaagcugaaccggcucaucggcaagaccaacgagaaguuccaccagaucgagaaggaguucagcgagguggagggccgcauccaggaccuggagaaguacgucgaggacaccaagaucgaccugugguccuacaacgccgagcuccugguggcccuggagaaccagcacacgaucgaccucaccgacagcgagaugaacaagcuguucgagaagaccaagaagcagcugcgcgagaacgccgaggacauggggaacggcugcuucaagaucuaccacaagugcgacaacgcgugcaucggguccauccggaacggcaccuacgaccacgacguguaccgcgacgaggcccucaacaaccgguuccagaucaagggggucgagcugaaguccggcuacaaggacuggauccuguggaucuccuucgccaucagcugcuuccuccugugcguggcccugcucggcuucaucaugugggccugccagaaggggaacauccgcugcaacaucugcaucuga

SEQ ID NO: 72554 - RNA, 1701 nt, Artificial Sequence; identical to SEQ ID NO: 65664
  derived and/or modified CDS sequence (opt1) from hemagglutinin__InfluenzaA__AFG98808

SEQ ID NO: 72555 - RNA, 1701 nt, Artificial Sequence; identical to SEQ ID NO: 65664
  derived and/or modified CDS sequence (opt1) from hemagglutinin__InfluenzaA__AFG98819

SEQ ID NO: 72556 - RNA, 1701 nt, Artificial Sequence
  derived and/or modified CDS sequence (opt1) from hemagglutinin__InfluenzaA__AFG98830
augaagaccaucaucgcccugagcuacaucuucugccucgugcugggccaggaccugcccgggaacgacaaguccaccgccacgcucugccugggccaccacgcggucccgaacgggacccuggugaagaccaucaccaacgaccagaucgaggugacgaacgccaccgagcucguccagagcuccagcaccggcaagaucugcaacaacccccaccgcauccuggacgggaucgacugcacccugaucgacgcccuccugggcgacccccacugcgacggcuuccagaacgagacgugggaccuguucguggagcgguccaaggccuucagcaacugcuaccccuacgacgugccggacuacgccucccuccgcagccuggucgcguccagcgggacccuggaguucaucaccgagggcuucaccuggacgggggugacccagaacggcggguccagcgccugcaagcggggccccggcuccggguucuucagccgccucaacuggcugaccaaguccggcagcaccuaccccgugcugaacgucacgaugcccaacaacgacaacuucgacaagcucuacaucuggggcgugcaccacccguccaccaaccaggagcagaccagccuguacgugcaggccuccgggcgggucaccgugagcacgcgccggagccagcagaccaucauccccaacaucggcucccgccccugggugcgggggcugagcucccgcaucagcaucuacuggaccaucgucaagcccggcgacauccucaucaucaacuccaacgggaaccugaucgccccgcggggcuacuucaagaugcgcaccggcaagagcuccaucaugcggagcgacgcgcccaucgacacgugcaucuccgagugcaucacccccaacgggagcauccccaacgacaagccguuccagaacgugaacaagaucaccuacggcgccugccccaaguacgugaagcagaacacccugaagcucgccacggggaugcgcaacguccccgagaagcagacccggggccuguucggggccaucgccggcuucaucgagaacgggugggagggcaugaucgacggcugguacggguuccgccaccagaacuccgagggcaccgggcaggcggccgaccucaagagcacccaggccgccaucgaccagaucaacggcaagcugaaccgggugaucgagaagacgaacgagaaguuccaccagaucgagaaggaguucuccgagguggaggggcgcauccaggaccuggagaaguacgucgaggacaccaagaucgaccuguggagcuacaacgccgagcuccugguggcgcuggagaaccagcacaccaucgaccucaccgacuccgagaugaacaagcuguucgagaagacgcggcgccagcugcgggagaacgccgaggacaugggcaacggcugcuucaagaucuaccacaagugcgacaacgccugcaucgggagcauccgcaacggcaccuacgaccacgacguguaccgcgacgaggcccucaacaaccgguuccagaucaagggggucgagcugaaguccggcuacaaggacuggauccuguggaucagcuucgccaucuccugcuuccuccugugcgugguccugcucggcuucaucaugugggcgugccagaaggggaacauccgcugcaacaucugcaucuga

SEQ ID NO: 72557 - RNA, 1701 nt, Artificial Sequence
  derived and/or modified CDS sequence (opt1) from hemagglutinin__InfluenzaA__AFG98841
augaagaccaucaucgcccugagcuacaucuucugccucgugcugggccaggaccugcccgggaacgacaaguccaccgccacgcucugccugggccaccacgcggucccgaacgggacccuggugaagaccaucaccaacgaccagaucgaggugacgaacgccaccgagcucguccagagcuccagcaccggcaagaucugcaacaacccccaccgcauccuggacgggaucgacugcacccugaucgacgcccuccugggcgacccccacugcgacggcuuccagaacgagacgugggaccuguucguggagcgguccaaggccuucagcaacugcuaccccuacgacgugccggacuacgccucccuccgcagccuggucgcguccagcgggacccuggaguucaucaccgagggcuucaccuggacgggggugacccagaacggcggguccaacgccugcaagcggggccccggcagcggguucuucucccgccucaacuggcugaccaagagcggcuccaccuaccccgugcugaacgucacgaugcccaacaacgacaacuucgacaagcucuacaucuggggcgugcaccacccgagcaccaaccaggagcagaccucccuguacgugcaggccagcgggcgggucaccguguccacgcgccggagccagcagaccaucauccccaacaucggcagccgccccugggugcgggggcuguccagccgcaucuccaucuacuggaccaucgucaagcccggcgacauccucaucaucaacagcaacgggaaccugaucgccccgcggggcuacuucaagaugcgcaccgggaaguccagcaucaugcgguccgacgcgcccaucggcacgugcaucagcgagugcaucacccccaacggcuccauccccaacgacaagccguuccagaacgugaacaagaucaccuacggggccugccccaaguacgugaagcagaacacccugaagcucgccacgggcaugcgcaacguccccgagaagcagacccgggggcuguucggcgccaucgccggguucaucgagaacggcugggagggcaugaucgacgggugguacggcuuccgccaccagaacagcgaggggaccggccaggcggccgaccugaaguccacccaggccgccaucgaccagaucaacgggaagcucaaccgggugaucgagaagacgaacgagaaguuccaccagaucgagaaggaguucagcgagguggagggccgcauccaggaccuggagaaguacgucgaggacaccaagaucgaccugugguccuacaacgccgagcuccugguggcgcuggagaaccagcacaccaucgaccucaccgacagcgagaugaacaagcuguucgagaagacgcggcgccagcugcgggagaacgccgaggacaugggcaacgggugcuucaagaucuaccacaagugcgacaacgccugcaucggcuccauccgcaacgggaccuacgaccacgacguguaccgcgacgaggcccucaacaaccgguuccagaucaagggcgucgagcucaagagcggcuacaaggacuggauccuguggaucuccuucgccaucagcugcuuccugcugugcgugguccugcucggguucaucaugugggcgugccagaagggcaacauccgcugcaacaucugcaucuga

SEQ ID NO: 72558 - RNA, 1701 nt, Artificial Sequence; identical to SEQ ID NO: 64329
  derived and/or modified CDS sequence (opt1) from hemagglutinin__InfluenzaA__AFG98852

SEQ ID NO: 72559 - RNA, 1701 nt, Artificial Sequence
  derived and/or modified CDS sequence (opt1) from hemagglutinin__InfluenzaA__AFG98863
augaagaccaucaucgcccugagcuacaucuucugccucgugcugggccaggaccugcccgggaacgacaacuccaccgccacgcucugccugggccaccacgcggucccgaacgggacccuggugaagaccaucaccaacgaccagaucgaggugacgaacgccaccgagcucguccagagcuccagcaccggcaagaucugcaacaacccccaccgcauccuggacgggaucgacugcacccugaucgacgcccuccugggcgacccccacugcgacggcuuccagaacgagacgugggaccuguucguggagcgguccaaggccuucagcaacugcuaccccuacgacgugccggacuacgccucccuccgcagccuggucgcguccagcgggacccuggaguucaucaacgagggcuucaccuggaccggggugacgcagaacggcggguccagcgccugcaagcggggccccgacuccggcuucuucagccgccucaacuggcuguacaaguccgggagcaccuaccccgugcugaacgucaccaugcccaacaacgacaacuucgacaagcucuacaucuggggcgugcaccacccguccaccaaccaggagcagacgagccuguacgugcaggccuccgggcgggucaccgugagcaccaagcgcagccagcagaccaucauccccaacaucggcucccggcccugggugcgcggccugagcucccggaucagcaucuacuggacgaucgucaagcccggggacauccucgugaucaacuccaacggcaaccugaucgccccgcgcggguacuucaagaugcggaccggcaagagcuccaucaugcgcagcgacgcgcccaucgggaccugcaucuccgagugcaucacccccaacggcagcauccccaacgacaagccguuccagaacgugaacaagaucacguacggcgccugccccaaguacgucaagcagaacacccugaagcucgccaccgggaugcggaacgugcccgagaagcagacccgcggccuguucggggccaucgccggcuucaucgagaacgggugggagggcaugaucgacggcugguacggguuccggcaccagaacuccgagggcacggggcaggcggccgaccucaagagcacccaggccgccaucgaccagaucaacggcaagcugaaccgcgugaucgagaagaccaacgagaaguuccaccagaucgagaaggaguucuccgaggucgaggggcggauccaggaccuggagaaguacguggaggacaccaagaucgaccuguggagcuacaacgccgagcuccugguggcgcuggagaaccagcacacgaucgaccucaccgacuccgagaugaacaagcuguucgagaagacccgccggcagcugcgcgagaacgccgaggacaugggcaacggcugcuuccggaucuaccacaagugcgacaacgccugcaucgggagcauccgcaacggcaccuacgaccacgacgucuaccgcgacgaggcccucaacaaccgguuccagaucaaggggguggagcugaaguccggcuacaaggacuggauccuguggaucagcuucgccaucuccugcuuccuccugugcgucgugcugcucggcuucaucaugugggcgugccagaaggggaacauccgcugcaacaucugcaucuga

SEQ ID NO: 72560 - RNA, 1701 nt, Artificial Sequence
  derived and/or modified CDS sequence (opt1) from hemagglutinin__InfluenzaA__AFG98874
augaagaccaucaucgcccugagcuacaucuucugccucgugcugggccaggacuuccccgggaacgacaacuccaccgccacgcugugccucggccaccacgcggucccgaacgggacccuggugaagaccaucaccaacgaccagaucgaggugacgaacgccaccgagcugguccagagcuccagcaccggcaagaucugcaacaacccccaccgcauccucgacgggaucgacugcacccugaucgacgcccugcucggcgacccccacugcgacggcuuccagaacgagacgugggaccuguucguggagcgguccaaggccuucagcaacugcuaccccuacgacgugccggacuacgccucccugcgcagccucgucgcguccagcgggacccuggaguucaucaacgagggcuucaccuggaccggggugacgcagaacggcggguccaacgccugcaagcggggccccgacaacggcuucuucagccgccugaacuggcucuacaaguccgggagcaccuaccccgugcugaacgucaccaugcccaacaacgacaacuucgacaagcuguacaucuggggcgugcaccacccguccaccgaccaggagcagacgagccucuacgugcaggccuccgggcgggucaccgugagcaccaagcgcucccagcagaccaucauccccaacaucggcagccggcccugggugcgcggccugagcucccggaucagcaucuacuggacgaucgucaagcccggggacauccuggugaucaacuccaacggcaaccucaucgccccgcgcggguacuucaagaugcggaccggcaagagcuccaucaugcgcagcgacgcgcccaucgggaccugcaucuccgagugcaucacccccaacggcagcauccccaacgacaagccguuccagaacgugaacaagaucacguacggcgccugccccaaguacgucaagcagaacacccugaagcuggccaccgggaugcggaacgugcccgagaagcagacccgcggccucuucggggccaucgccggcuucaucgagaacgggugggagggcaugaucgacggcugguacggguuccggcaccagaacuccgagggcacggggcaggcggccgaccucaagagcacccaggccgccaucgaccagaucaacggcaagcugaaccgcgugaucgagaagaccaacgagaaguuccaccagaucgagaaggaguucuccgaggucgaggggcggauccaggaccucgagaaguacguggaggacaccaagaucgaccuguggagcuacaacgccgagcugcucguggcgcuggagaaccagcacacgaucgaccugaccgacuccgagaugaacaagcuguucgagaagacccgccggcagcugcgcgagaacgccgaggacaugggcaacggcugcuucaagaucuaccacaagugcgacaacgccugcaucgggagcauccggaacggcaccuacgaccacgacgucuaccgcgacgaggcccugaacaaccgcuuccagaucaaggggguggagcucaaguccggcuacaaggacuggauccuguggaucagcuucgccaucuccugcuuccugcucugcgucgugcugcugggcuucaucaugugggcgugccagaaggggaacauccggugcaacaucugcaucuga

SEQ ID NO: 72561 - RNA, 1701 nt, Artificial Sequence
  derived and/or modified CDS sequence (opt1) from hemagglutinin__InfluenzaA__AFG98885
augaagaccaucaucgcccugagcuacaucuucugccucgugcugggccaggacuuccccgggaacgacaacuccaccgccacgcugugccucggccaccacgcggucccgaacgggacccuggugaagaccaucaccaacgaccagaucgaggugacgaacgccaccgagcugguccagagcuccagcaccggcaagaucugcaacaacccccaccgcauccucgacgggaucgacugcacccugaucgacgcccugcucggcgacccccacugcgacggcuuccagaacgagacgugggaccuguucguggagcgguccaaggccuucagcaacugcuaccccuacgacgugccggacuacgccucccugcgcagccucgucgcguccagcgggacccuggaguucaucaacgagggcuucaccuggaccggggugacgcagaacggcggguccaacgccugcaagcggggcaccgacagcggcuucuucucccgccugaacuggcucuacaagagcggguccaccuaccccgugcugaacgucaccaugcccaacaacgacaacuucgacaagcuguacaucuggggcgugcaccaccccagcacggaccaggagcagaccucccucuacgugcaggccagcgggcgggucaccguguccaccaagcgcagccagcagacgaucaucccgaacaucggcagccggcccugggugcgcggccuguccagccggaucuccaucuacuggaccaucgucaagcccggggacauccuggugaucaacagcaacggcaaccucaucgcgccccgcggguacuucaagaugcggaccggcaaguccagcaucaugcgcuccgacgccccgaucgggaccugcaucagcgagugcaucacgcccaacggcuccauccccaacgacaagcccuuccagaacgugaacaagaucaccuacggcgccugcccgaaguacgucaagcagaacacccugaagcuggccaccgggaugcggaacgugcccgagaagcagacgcgcggccucuucggggccaucgccggcuucaucgagaacgggugggagggcaugaucgacggcugguacggguuccggcaccagaacagcgagggcaccgggcaggcggccgaccugaaguccacccaggccgccaucgaccagaucaacggcaagcugaaccgcgugaucgagaagaccaacgagaaguuccaccagaucgagaaggaguucagcgaggucgaggggcggauccaggaccucgagaaguacguggaggacacgaagaucgaccugugguccuacaacgccgagcugcucguggcgcuggagaaccagcacaccaucgaccugaccgacagcgagaugaacaagcuguucgagaagacccgccggcagcuccgcgagaacgccgaggacaugggcaacggcugcuucaagaucuaccacaagugcgacaacgccugcaucggguccauccggaacggcacguacgaccacgacgucuaccgcgacgaggcccugaacaaccgcuuccagaucaaggggguggagcucaagagcggcuacaaggacuggauccuguggaucuccuucgccaucagcugcuuccugcucugcgucgugcugcugggcuucaucaugugggcgugccagaaggggaacauccggugcaacaucugcaucuga

SEQ ID NO: 72562 - RNA, 1701 nt, Artificial Sequence
  derived and/or modified CDS sequence (opt1) from hemagglutinin__InfluenzaA__AFG98896
augaagaccaucaucgcccugagcuacaucuucugccucgugcugggccaggacuuccccgggaacgacaacuccaccgccacgcugugccucggccaccacgcggucccgaacgggacccuggugaagaccaucaccaacgaccagaucgaggugacgaacgccaccgagcugguccagagcuccagcaccggcaagaucugcaacaacccccaccgcauccucgacgggaucaacugcacccugaucgacgcccugcucggcgacccccacugcgacggcuuccagaacgagacgugggaccuguucguggagcgguccaaggccuucagcaacugcuaccccuacgacgugccggacuacgccucccugcgcagccucgucgcguccagcgggacccuggaguucaucaacgagggcuucaccuggaccggggugacgcagaacggcggguccaacgccugcaagcggggccccgacagcggcuucuucucccgccugaacuggcucuacaagagcggguccgccuaccccgugcugaacgucaccaugcccaacaacgacaacuucgacaagcuguacaucuggggcgugcaccacccgagcaccgaccaggagcagaccaaccucuacgugcagacguccgggcgggucaccgugagcaccaagcgcucccagcagaccaucauccccaacaucggcagccggcccugggugcgcggccugagcucccggaucagcaucuacuggacgaucgucaagcccggggacauccuggugaucaacuccaacggcaaccucaucgccccgcgcggguacuucaagaugcggaccggcaagagcuccaucaugcgcagcgacgcgcccaucgggaccugcaucuccgagugcaucacccccaacggcagcauccccaacgacaagccguuccagaacgugaacaagaucacguacggcgccugccccaaguacgucaagcagaacacccugaagcuggccaccgggaugcggaacgugcccgagaagcagacccgcggcaucuucggggccaucgccggcuucaucgagaacgggugggagggcaugaucgacggcugguacggguuccggcaccagaacuccgagggcacggggcaggcggccgaccucaagagcacccaggccgccaucgaccagaucaacggcaagcugaaccgcgugaucgagaagaccaacgagaaguuccaccagaucgagaaggaguucuccgaggucgaggggcggauccaggaccuggagaaguacguggaggacaccaagaucgaccucuggagcuacaacgccgagcugcugguggcgcucgagaaccagcacacgaucgaccugaccgacuccgagaugaacaagcuguucgagaagacccgccggcagcuccgcgagaacgccgaggacaugggcaacggcugcuucaagaucuaccacaagugcgacaacgccugcaucgggagcauccggaacggcaccuacgaccacgacgucuaccgcgacgaggcccugaacaaccgcuuccagaucaaggggguggagcugaaguccggcuacaaggacuggauccucuggaucagcuucgccaucuccugcuuccugcugugcgucgugcuccugggcuucaucaugugggcgugccagaaggggaacauccggugcaacaucugcaucuga

SEQ ID NO: 72563 - RNA, 1701 nt, Artificial Sequence
  derived and/or modified CDS sequence (opt1) from hemagglutinin__InfluenzaA__AFG98907
augaagaccaucaucgcccugagcuacaucuucugccucgugcugggccaggaccugcccgggaacgacaacuccaccgccacgcucugccugggccaccacgcggucccgaacgggacccuggugaagaccaucaccaacgaccagaucgaggugacgaacgccaccgagcucguccagagcuccagcaccggcaagaucugcaacaacccccaccgcauccuggacgggaucaacugcacccugaucgacgcccuccugggcgacccccacugcgacggcuuccagaacgagaagugggaccuguucguggagcgguccaaggccuucagcaacugcuaccccuacgacgugccggacuacgccucccuccgcagccuggucgcguccagcgggacgcuggaguucaucaacgagggcuucaacuggaccggggugacccagaacggcggguccaacgccugcaagcggggccccgacugcggcuucuucagccgccucaacuggcuguacaaguccgggagcaccuaccccgugcugaacgucacgaugcccaacaacgacaacuucgacaagcucuacaucuggggcgugcaccacccguccaccgaccaggagcagaccaaccuguacgugcaggccagcgggcgggucaccguguccacgaagcgcagccagcagaccaucauccccaacaucggcucccggcccugggugcgcggccugagcagccggaucuccaucuacuggaccaucgucaagcccggggacauccucgugaucaacagcaacggcaaccugaucgccccgcgcggguacuucaagaugcggaccggcaaguccagcaucaugcgcuccgacgcgcccaucgggacgugcaucagcgagugcaucacccccaacggcuccauccccaacgacaagccguuccagaacgugaacaagaucaccuacggcgccugccccaaguacgucaagcagaacacccugaagcucgccacggggaugcggaacgugcccgagaagcagacccgcggcaucuucggggccaucgccggcuucaucgagaacgggugggagggcaugaucgacggcugguacggguuccggcaccagaacagcgagggcaccgggcaggcggccgaccugaaguccacccaggccgccaucgaccagaucaacggcaagcugaaccgcgugaucgagaagacgaacgagaaguuccaccagaucgagaaggaguucagcgaggucgaggggcggauccaggaccucgagaaguacguggaggacaccaagaucgaccugugguccuacaacgccgagcugcucguggcgcuggagaaccagcacaccaucgaccugaccgacagcgagaugaacaagcuguucgagaagacgcgccggcagcuccgcgagaacgccgaggacaugggcaacggcugcuucaagaucuaccacaagugcgacaacgccugcaucggguccauccggaacggcaccuacaaccacgacgucuaccgcgacgaggcccugaacaaccgcuuccagaucaaggggguggagcucaagagcggcuacaaggacuggauccuguggaucuccuucgccaucagcugcuuccugcucugcgucgugcugcugggcuucaucaugugggcgugccagaaggggaacauccggugcaacaucugcaucuga

SEQ ID NO: 72564 - RNA, 1701 nt, Artificial Sequence
  derived and/or modified CDS sequence (opt1) from hemagglutinin__InfluenzaA__AFG98918
augaagaccaucaucgcccugagcuacaucuucugccucgugcugggccaggaccugcccgggaacgacaacuccaccgccacgcucugccugggccaccacgcggucccgaacgggacccuggugaagaccaucaccaacgaccagaucgaggugacgaacgccaccgagcucguccagagcuccagcaccggcaagaucugcaacaacccccaccgcauccuggacgggaucaacugcacccugaucgacgcccuccugggcgacccccacugcgacggcuuccagaacgagaagugggaccuguucguggagcgguccaaggccuucagcaacugcuaccccuacgacgugccggacuacgccucccuccgcagccuggucgcguccagcgggacgcuggaguucaucaacgagggcuucaacuggaccggggugacccagaacggcggguccaacgccugcaagcggggccccgaccgcggcuucuucagccggcucaacuggcuguacaaguccgggagcaccuaccccgugcugaacgucacgaugcccaacaacgacaacuucgacaagcucuacaucuggggcgugcaccacccguccaccgaccaggagcagaccaaccuguacgugcaggccagcgggcgcgucaccguguccacgaagcggagccagcagaccaucauccccaacaucggcucccgccccugggugcggggccugagcagccgcaucuccaucuacuggaccaucgucaagcccggggacauccucgugaucaacagcaacggcaaccugaucgccccgcggggguacuucaagaugcgcaccggcaaguccagcaucaugcgguccgacgcgcccaucgggacgugcaucagcgagugcaucacccccaacggcuccauccccaacgacaagccguuccagaacgugaacaagaucaccuacggcgccugccccaaguacgucaagcagaacacccugaagcucgccacggggaugcgcaacgugcccgagaagcagacccggggcaucuucggggccaucgccggcuucaucgagaacgggugggagggcaugaucgacggcugguacggguuccgccaccagaacagcgagggcaccgggcaggcggccgaccugaaguccacccaggccgccaucgaccagaucaacggcaagcugaaccgggugaucgagaagacgaacgagaaguuccaccagaucgagaaggaguucagcgaggucgaggggcgcauccaggaccucgagaaguacguggaggacaccaagaucgaccugugguccuacaacgccgagcugcucguggcgcuggagaaccagcacaccaucgaccugaccgacagcgagaugaacaagcuguucgagaagacgcggcgccagcuccgggagaacgccgaggacaugggcaacggcugcuucaagaucuaccacaagugcgacaacgccugcaucggguccauccgcaacggcaccuacaaccacgacgucuaccgcgacgaggcccugaacaaccgguuccagaucaaggggguggagcucaagagcggcuacaaggacuggauccuguggaucuccuucgccaucagcugcuuccugcucugcgucgugcugcugggcuucaucaugugggcgugccagaaggggaacauccgcugcaacaucugcaucuga

SEQ ID NO: 72565 - RNA, 1701 nt, Artificial Sequence
  derived and/or modified CDS sequence (opt1) from hemagglutinin__InfluenzaA__AFG98929
augaagaccgugaucgcccugagcuacaucuucugccucguccugggccaggaccugcccgggaacgacaacuccaccgccacgcucugccugggccaccacgcggugccgaacgggacccuggugaagaccaucaccaacgaccagaucgaggucacgaacgccaccgagcucgugcagagcuccagcaccggcaagaucugcaacaacccccaccgcauccuggacgggaucaacugcacccugaucgacgcccuccugggcgacccccacugcgacggcuuccagaacgagaagugggaccuguucguggagcgguccaaggccuucagcaacugcuaccccuacgacgucccggacuacgccucccuccgcagccugguggcguccagcgggacgcuggaguucaucaacgagggcuucaacuggaccggggugacccagaacggcggguccaacgccugcaagcggggccccgacaucggcuucuucagccgccucaacuggcuguacaaguccgggagcaccuaccccguccugaacgugacgaugcccaacaacgacaacuucgacaagcucuacaucuggggcgugcaccacccguccaccgaccaggagcagaccaaccuguacguccaggccagcgggcgggugaccguguccacgaagcgcagccagcagaccaucauccccaacaucggcucccggcccuggguccgcggccugagcagccggaucuccaucuacuggaccaucgugaagcccggggacauccucgugaucaacagcaacggcaaccugaucgccccgcgcggguacuucaagaugcggaccggcaaguccagcaucaugcgcuccgacgcgcccaucgggacgugcaucagcgagugcaucacccccaacggcuccauccccaacgacaagccguuccagaacgucaacaagaucaccuacggcgccugccccaaguacgugaagcagaacacccugaagcucgccacggggaugcggaacgugcccgagaagcagacccgcggcaucuucggggccaucgccggcuucaucgagaacgggugggagggcaugaucgacggcugguacggguuccggcaccagaacagcgagggcaccgggcaggcggccgaccugaaguccacccaggccgccaucgaccagaucaacggcaagcugaaccgcgucaucgagaagacgaacgagaaguuccaccagaucgagaaggaguucagcgagguggaggggcggauccaggaccucgagaaguacguggaggacaccaagaucgaccugugguccuacaacgccgagcugcucgucgcgcuggagaaccagcacaccaucgaccugaccgacagcgagaugaacaagcuguucgagaagacgcgccggcagcuccgcgagaacgccgaggacaugggcaacggcugcuucaagaucuaccacaagugcgacaacgccugcaucggguccauccggaacggcaccuacaaccacgacguguaccgcgacgaggcccugaacaaccgcuuccagaucaagggggucgagcucaagagcggcuacaaggacuggauccuguggaucuccuucgccaucagcugcuuccugcucugcguggugcugcugggcuucaucaugugggcgugccagaaggggaacauccggugcaacaucugcaucuga

SEQ ID NO: 72566 - RNA, 1701 nt, Artificial Sequence
  derived and/or modified CDS sequence (opt1) from hemagglutinin__InfluenzaA__AFG98940
augaagaccaucaucgcccugagcuacaucuucugccucgugcugggccaggaccugcccgggaacgacaacuccaccgccacgcucugccugggccaccacgcggucccgaacgggacccuggugaagaccaucaccaacgaccagaucgaggugacgaacgccaccgagcucguccagagcuccagcaccggcaagaucugcaacaacccccaccgcauccuggacgggaucaacugcacccugaucgacgcccuccugggcgacccccacugcgacggcuuccagaacgagaagugggaccuguucguggagcgguccaaggccuucagcaacugcuaccccuacgacgugccggacuacgccucccuccgcagccuggucgcguccagcgggacgcuggaguucaucaacgagggcuucaacuggaccggggugacccagaacggcggguccaacgccugcaagcggggccccgacagcggcuucuucucccgccucaacuggcuguacaagagcggguccaccuaccccgugcugaacgucacgaugcccaacaaggacaacuucgacaagcucuacaucuggggcgugcaccacccgagcaccgaccaggagcagaccaaccuguacgugcaggccuccgggcgggucaccgugagcacgaagcgcucccagcagaccaucauccccaacaucggcagccggcccugggugcgcggcaugagcucccggaucagcaucuacuggaccaucgucaagcccggggacauccuggugaucaacuccaacggcaaccucaucgccccgcgcggguacuucaagaugcggaccggccgcagcuccaucaugcggagcgacgcgcccaucgggacgugcaucuccgagugcaucacccccaacggcagcauccccaacgaccgcccguuccagaacgugaacaagaucaccuacggcgccugccccaaguacgucaagcagaacacccugaagcuggccacggggaugcggaacgugcccgagaagcagacccgcggcaucuucggggccaucgccggcuucaucgagaacgggugggagggcaugaucgacggcugguacggguuccggcaccagaacuccgagggcaccgggcaggcggccgaccucaagagcacccaggccgccaucgaccagaucaacggcaagcugaaccgcgugaucgagaagacgaacgagaaguuccaccagaucgagaaggaguucuccgaggucgaggggcggauccaggaccuggagaaguacguggaggacaccaagaucgaccucuggagcuacaacgccgagcugcugguggcgcucgagaaccagcacaccaucgaccugaccgacuccgagaugaacaagcuguucgagaagacgcgccggcagcuccgcgagaacgccgaggacaugggcaacggcugcuucaagaucuaccacaagugcgacaacgccugcaucgagagcauccgcaacgggaccuacaaccacgacgucuaccgggacgaggcccugaacaaccgcuuccagaucaagggcguggagcugaaguccggguacaaggacuggauccucuggaucagcuucgccaucuccugcuuccugcugugcgucgugcuccugggcuucaucaugugggcgugccagaagggcaacauccggugcaacaucugcaucuga

SEQ ID NO: 72567 - RNA, 1701 nt, Artificial Sequence
  derived and/or modified CDS sequence (opt1) from hemagglutinin__InfluenzaA__AFG98962
augaagaccaucaucgcccugagcuacaucuucugccucgugcuggcccaggaccugcccggcaacgacaacuccaccgcgacgcucugccuggggcaccacgccgucccgaacggcacccuggugaagaccaucaccaacgaccagaucgaggugacgaacgccaccgagcucguccagagcuccagcaccgggaagaucugcaacaacccccaccgcauccuggacggcaucaacugcacccugaucgacgcccuccugggggacccccacugcgacggcuuccagaacgagaagugggaccuguucguggagcgguccaaggccuucagcaacugcuaccccuacgacgugccggacuacgcgucccuccgcagccuggucgccuccagcggcacgcuggaguucaucaacgagggguucaacuggaccggcgugacccagaacgggggcuccaacgccugcaagcgggggcccgacagcggcuucuucucccgccucaacuggcuguacaagagcggcuccaccuaccccgugcugaacgucacgaugcccaacaacgacaacuucgacaagcucuacaucuggggcgugcaccacccgagcaccgaccaggagcagaccaaccuguacgugcaggccuccgggcgggucaccgugagcacgaagcgcucccagcagaccaucauccccaacguggggagccggcccuggguccgcggccugagcucccggaucagcaucuacuggaccaucgugaagcccggcgacauccucgugaucaacuccaacgggaaccugaucgcgccgcgcggcuacuucaagaugcggaccggcaagagcuccaucaugcgcagcgacgcccccaucgggacgugcuccagcgagugcaucacccccaacggguccauccccaacgacaagccguuccagaacgucaacaagaucaccuacggcgccugccccaaguacgugaagcagaacacccugaagcucgccacgggcaugcggaacgugcccgagaagcagacccgcgggaucuucggcgccaucgcgggguucaucgagaacggcugggaggggaugaucgacggcugguacggcuuccggcaccagaacagcgaggggaccggccaggccgccgaccugaaguccacccaggccgccaucgaccagaucaacgggaagcugaaccgcgucaucgagaagacgaacgagaaguuccaccagaucgagaaggaguucagcgagguggagggccggauccaggaccucgagaaguacguggaggacaccaagaucgaccugugguccuacaacgcggagcugcucgucgcccuggagaaccagcacaccaucgaccugaccgacagcgagaugaacaagcuguucgagaagacgcgccggcagcuccgcgagaacgccgaggacauggggaacggcugcuucaagaucuaccacaagugcgacaacgccugcaucggcuccauccggaacgggaccuacgaccacgacguguaccgcgacgaggcccugaacaaccgcuuccagaucaagggcgucgagcucaagagcggguacaaggacuggauccuguggaucuccuucgcgaucagcugcuuccugcucugcguggugcugcugggcuucaucaugugggccugccagaagggcaacauccggugcaacaucugcaucuga

SEQ ID NO: 72568 - RNA, 1701 nt, Artificial Sequence
  derived and/or modified CDS sequence (opt1) from hemagglutinin__InfluenzaA__AFG98973
augaagaccaucaucgcccugagcuacaucuucugccucgugcugggccaggacuucccccgcaacgacaacuccaccgccacgcugugccucgggcaccacgcggucccgaacggcacccuggugaagaccaucaccaacgaccagaucgaggugacgaacgccaacgagcugguccagagcuccagcaccgggaagaucugcaacaacccccaccggauccucgacggcauggacugcacccugaucgacgcccugcucggggacccccacugcgacggccugcagaacgagaccugggaccuguucguggagcgcuccaaggccuucagcaacugcuaccccuacgacgugccggacuacgccucccuccggagccuggucgcguccagcggcacgcuggaguucaucaacgagggguucaccuggaccggcgugacccagaacgggggcuccaacgccugcaagcgcgggcccgaccggggcuucuucagccgccucaacuggcuguacaaguccggcaacacguaccccgugcugaacgucaccaugcccaacaacgacaacuucgacaagcucuacaucuggggcgugcaccacccgagcaccgaccaggaccagaccucccuguacgugcaggccagcgggcgggucacgguguccaccaagcgcagccagcagaccgugauccccaacaucgggccccggcccuggguccgcggccuguccagcggcaucagcaucuacuggaccaucgugaagccgggggacauccuccugaucaacuccaacggcaaccugaucgcgccccggggguacuucaagaugcgcacgggcaagagcuccaucaugcggagcgacgcccccaucgggaccugcaucuccgagugcaucacccccaacggcagcaucccgaacgacaagcccuuccagaacgugaacaagaucaccuacggcgccugccccaaguacgucaagcagaacacgcucaagcuggccaccgggaugcgcaacgugcccgagaagcagacccggggcaucuucggggccaucgccggcuucaucgagaacgggugggagggcaugaucgacggcugguacggguuccgccaccagaacuccgagggcaccgggcaggcggccgaccucaagagcacgcaggccgccaucgaccagaucaacggcaagcugaaccgggugaucgagaagaccaacgagaaguuccaccagaucgagaaggaguucuccgaggucgaggggcgcauccaggaccuggagaaguacguggaggacaccaagaucgaccuguggagcuacaacgccgagcuccugguggcgcuggagaaccagcacaccaucgaccucacggacuccgagaugaacaagcuguucgagaagacccggcgccagcugcgggagaacgccgaggacaugggcaacggcugcuucaagaucuaccaccgcugcgacaacgccugcaucgggagcauccgcaacggcaccuacgaccacgacgucuaccgggacgaggcccucaacaaccgcuuccagaucaaggggguggagcugaaguccggcuacaaggacuggauccuguggaucagcuucgccaucuccugcuuccuccugugcgucgugcugcucggcuucaucaugugggcgugccagaaggggaacauccggugcaacaucugcaucuga

SEQ ID NO: 72569 - RNA, 1701 nt, Artificial Sequence
  derived and/or modified CDS sequence (opt1) from hemagglutinin__InfluenzaA__AFG98984
augaagaccaucaucgcccugagcuacaucuucugccucgugcugggccaggacuucccccgcaacgacaacuccaccgccacgcugugccucgggcaccacgcggucccgaacggcacccuggugaagaccaucaccaacgaccagaucgaggugacgaacgccaccgagcugguccagagcuccagcaccgggaagaucugcaacaacccccaccggauccucgacggcauggacugcacccugaucgacgcccugcucggggacccccacugcgacggccugcagaacgagacgugggaccuguucguggagcgcuccaaggccuucagcaacugcuaccccuacgacgugccggacuacgccucccuccggagccuggucgcguccagcggcacccuggaguucaucaacgagggguucaccuggaccggcgugacgcagaacgggggcuccaacgccugcaagcgcgggcccgaccggggcuucuucagccgccucaacuggcuguacaaguccggcaacaccuaccccgugcugaacgucaccaugcccaacaacgacaacuucgacaagcucuacaucuggggcgugcaccacccgagcaccgaccaggaccagacgucccuguacgugcaggccagcgggcgggucaccguguccaccaagcgcagccagcagaccgugauccccaacaucgggccccggcccuggguccgcggccuguccagcggcaucagcaucuacuggacgaucgugaagccgggggacauccuccugaucaacuccaacggcaaccugaucgcgccccggggguacuucaagaugcgcaccggcaagagcuccaucaugcggagcgacgcccccaucgggaccugcaucuccgagugcaucacccccaacggcagcaucccgaacgacaagcccuuccagaacgugaacaagaucacguacggcgccugccccaaguacgucaagcagaacacccucaagcuggccaccgggaugcgcaacgugcccgagaagcagacccggggcaucuucggggccaucgccggcuucaucgagaacgggugggagggcaugaucgacggcugguacggguuccgccaccagaacuccgagggcacggggcaggcggccgaccucaagagcacccaggccgccaucgaccagaucaacggcaagcugaaccgggugaucgagaagaccaacgagaaguuccaccagaucgagaaggaguucuccgaggucgaggggcgcauccaggaccuggagaaguacguggaggacaccaagaucgaccuguggagcuacaacgccgagcuccugguggcgcuggagaaccagcacacgaucgaccucaccgacuccgagaugaacaagcuguucgagaagacccggcgccagcugcgggagaacgccgaggacaugggcaacggcugcuucaagaucuaccaccgcugcgacaacgccugcaucgggagcauccgcaacggcaccuacgaccacgacgucuaccgggacgaggcccucaacaaccgcuuccagaucaaggggguggagcugaaguccggcuacaaggacuggauccuguggaucagcuucgccaucuccugcuuccuccugugcgucgugcugcucggcuucaucaugugggcgugccagaaggggaacauccggugcaacaucugcaucuga

SEQ ID NO: 72570 - RNA, 1704 nt, Artificial Sequence
  derived and/or modified CDS sequence (opt1) from hemagglutinin__InfluenzaA__AFG98995
augaagaccaucaucgcccugagcuacaucuucugccucguguucgcccaggaccugcccggcaacgacaacaacuccaccgcgacgcugugccucgggcaccacgccgucccgaacggcacccuggugaagaccaucaccaacgaccagaucgaggugacgaacgccaccgagcugguccagagcuccagcaccgggaagaucugcaacaacccccaccgcauccucgacggcaucaacugcacccugaucgacgcccugcucggggacccccacugcgacggcuuccagaacgagaagugggaccuguucguggagcgguccaaggccuucagcaacugcuaccccuacgacgugccggacuacgcgucccugcgcagccucgucgccuccagcggcacgcuggaguucaucaacgagggguucaacuggaccggcgugacccagaacgggggcuccaacgccugcaagcgggggcccgacaucggcuucuucagccgccugaacuggcucuacaaguccggcagcaccuaccccgugcagaacgucacgaugcccaacaacgacaacuccgacaagcuguacaucuggggcgugcaccacccgagcaccgacaaggagcagaccgaccuguacgugcaggccuccgggaaggucaccgugagcacgaagcggucccagcagaccaucauccccaacguggggagccgccccuggguccggggccucagcucccgcaucagcaucuacuggaccaucgugaagcccggcgacauccuggugaucaacuccaacgggaaccugaucgcgccgcggggcuacuucaagaugcgcaccggcaagagcuccaucaugcggagcgacgcccccaucgggacgugcuccagcgagugcaucacccccaacggguccauccccaacgacaagccguuccagaacgucaacaagaucaccuacggcgccugccccaaguacgugaagcagaacacccucaagcuggccacgggcaugcgcaacgugcccgagaagcagacccgggggaucuucggcgccaucgcgggguucaucgagaacggcugggaggggaugaucgacggcugguacggcuuccgccaccagaacagcgaggggaccggccaggccgccgaccugaaguccacccaggccgccaucgaccagaucaacgggaagcucaaccgggucaucgagaagacgaacgagaaguuccaccagaucgagaaggaguucagcgagguggagggccgcauccaggaccuggagaaguacguggaggacaccaagaucgaccugugguccuacaacgcggagcuccuggucgcccuggagaaccagcacaccaucgaccucaccgacagcgagaugaacaagcuguucgagaagacgcggcgccagcugcgggagaacgccgaggacauggggaacggcugcuucaagaucuaccacaagugcgacaacgccugcaucggcuccauccgcaacgggaccuacgaccacgacguguaccgggacgaggcccucaacaaccgcuuccagaucaagggcgucgagcucaagagcggguacaaggacuggauccuguggaucuccuucgcgaucagcugcuuccugcugugcguggugcugcucggcuucaucaugugggccugccagaagggcaacauccgcugcaacaucugcaucuga

SEQ ID NO: 72571 - RNA, 1701 nt, Artificial Sequence
  derived and/or modified CDS sequence (opt1) from hemagglutinin__InfluenzaA__AFG99006
augaagaccaucaucgcccugagcuacaucuucugccucgugcugggccaggacuucccccgcaacgacaacuccaccgccacgcugugccucgggcaccacgcggucccgaacggcacccuggugaagaccaucaccaacgaccagaucgaggugacgaacgccaccgagcugguccagagcuccagcaccgggaagaucugcaacaacccccaccggauccucgacggcauggacugcacccugaucgacgcccugcucggggacccccacugcgacggccugcagaacgagacgugggaccuguucguggagcgcuccaaggccuucagcaacugcuaccccuacgacgugccggacuacgccucccuccggagccuggucgcguccagcggcacccuggaguucaucaacgagggguucaccuggaccggcgugacgcagaacgggggcuccaacgccugcaagcgcgggcccgaccggggcuucuucagccgccucaacuggcuguacaaguccggcaacaccuaccccgugcugaacgucaccaugcccaacaacgacaacuucgacaagcucuacaucuggggcgugcaccacccgagcaccgaccaggaccagacgucccuguacgugcaggccagcggccgggucaccguguccaccaagcgcagccagcagaccgugauccccaacaucgggccccggcccuggguccgcggccuguccagccggaucagcaucuacuggacgaucgugaagccgggcgacauccuccugaucaacuccaacgggaaccugaucgcgccccgcggcuacuucaagaugcggaccggcaagagcuccaucaugcgcagcgacgcccccaucgggaccugcaucuccgagugcaucacccccaacgggagcaucccgaacgacaagcccuuccagaacgugaacaagaucacguacggggccugccccaaguacgucaagcagaacacccucaagcuggccaccggcaugcggaacgugcccgagaagcagacccgcgggaucuucggcgccaucgccggguucaucgagaacggcugggaggggaugaucgacggcugguacggcuuccggcaccagaacuccgaggggacgggccaggcggccgaccucaagagcacccaggccgccaucgaccagaucaacgggaagcugaaccgcgugaucgagaagaccaacgagaaguuccaccagaucgagaaggaguucuccgaggucgagggccggauccaggaccuggagaaguacguggaggacaccaagaucgaccuguggagcuacaacgccgagcuccugguggcgcuggagaaccagcacacgaucgaccucaccgacuccgagaugaacaagcuguucgagaagacccgccggcagcugcgcgagaacgccgaggacauggggaacggcugcuucaagaucuaccaccgcugcgacaacgccugcaucggcagcauccggaacgggaccuacgaccacgacgucuaccgcgacgaggcccucaacaaccgguuccagaucaagggcguggagcugaaguccggguacaaggacuggauccuguggaucagcuucgccaucuccugcuuccuccugugcgucgugcugcucggcuucaucaugugggcgugccagaagggcaacauccgcugcaacaucugcaucuga

SEQ ID NO: 72572 - RNA, 1701 nt, Artificial Sequence; identical to SEQ ID NO: 64788
  derived and/or modified CDS sequence (opt1) from hemagglutinin__InfluenzaA__AFG99017

SEQ ID NO: 72573 - RNA, 1701 nt, Artificial Sequence
  derived and/or modified CDS sequence (opt1) from hemagglutinin__InfluenzaA__AFG99028
augaagaccaucaucgcccugagcuacaucuucugccucguguucgcccaggaccugcccggcaacgacaacuccaccgcgacgcugugccucgggcaccacgccgucccgaacggcacccuggugaagaccaucaccaacgaccagaucgaggugacgaacgccaccgagcugguccagagcuccagcaccgggaagaucugcggcaacccccaccgcauccucgacgggaucaacugcacccugaucgacgcccugcucggcgacccccacugcgacggcuuccagaacgagaagugggaccuguucguggagcgguccaaggccuucagcaacugcuaccccuacgacgugccggacuacgcgucccugcgcagccucgucgccuccagcgggacgcuggaguucaucaacgagggcuucaacuggaccggggugacccagaacggcggguccagcgccugcaagcggggccccgacaacggcuucuucucccgccugaacuggcucuacaagagcggguccaccuaccccgugcagaacgucacgaugcccaacaacgacaacagcgacaagcuguacaucuggggcgugcaccacccguccaccgacaaggagcagaccgaccuguacgugcaggccagcgggaaggucaccguguccacgaagcggagccagcagaccgugauccccaacgucggcagccgccccugggugcggggccucuccagccgcguguccaucuacuggaccaucgucaagcccggggacauccuggugaucaacagcaacggcaaccugaucgcgccgcggggguacuucaagaugcgcaccggcaaguccagcaucaugcgguccgacgcccccaucgggacgugcagcuccgagugcaucacccccaacggcagcauccccaacgacaagccguuccagaacgugaacaagaucaccuacggcgccugccccaaguacgucaagcagaacacccucaagcuggccacggggaugcgcaacgugcccgagaagcagacccggggcaucuucggggccaucgcgggcuucaucgagaacgggugggagggcaugaucgacggcugguacggguuccgccaccagaacuccgagggcaccgggcaggccgccgaccucaagagcacccaggccgccaucgaccagaucaacggcaagcugaaccgggugaucgagaagacgaacgagaaguuccaccagaucgagaaggaguucuccgaggucgaggggcgcauccaggaccuggagaaguacguggaggacaccaagaucgaccuguggagcuacaacgcggagcuccuggucgcccuggagaaccagcacaccaucgaccucaccgacuccgagaugaacaagcuguucgagaagacgcggcgccagcugcgggagaacgccgaggacaugggcaacggcugcuucaagaucuaccacaagugcgacaacgccugcaucgggagcauccgcaacggcaccuacgaccacgacguguaccgggacgaggcccucaacaaccgcuuccagaucaaggggguggagcugaaguccggcuacaaggacuggauccuguggaucagcuucgcgaucuccugcuuccuccugugcgucgugcugcucggcuucaucaugugggccugccagaaggggaacauccgcugcaacaucugcaucuga

SEQ ID NO: 72574 - RNA, 1701 nt, Artificial Sequence
  derived and/or modified CDS sequence (opt1) from hemagglutinin__InfluenzaA__AFG99039
augaagaccaucaucgcccugagcuacaucuucugccucguguucgcccaggaccugcccggcaacgacaacuccaccgcgacgcugugccucgggcaccacgccgucccgaacggcacccuggugaagaccaucaccaacgaccagaucgaggugacgaacgccaccgagcugguccagagcuccagcaccgggaagaucugcgacaacccccaccgcauccucgacggcaucaacugcacccugaucgacgcccugcucggggacccccacugcgacggcuuccagaacgagaagugggaccuguucguggagcgguccaaggccuucagcaacugcuaccccuacgacgugccggacuacgcgucccugcgcagccucgucgccuccagcggcacgcuggaguucaucaacgagggguucaacuggaccggcgugacccagaacgggggcuccagcgccugcaagcgggggcccgacaacggcuucuucucccgccugaacuggcucuacaagagcggcuccaccuaccccgugcagaacgucgccaugcccaacaacgacaacagcgacaagcuguacaucuggggcgugcaccacccguccacggacaaggagcagaccgaccuguacgugcaggcgagcggcaaggucaccguguccaccaagcggagccagcagacggugauccccaacgucgggagccgccccugggugcggggccucuccagccgcguguccaucuacuggaccaucgucaagcccggcgacauccuggugaucaacagcaacgggaaccugaucgccccgcggggcuacuucaagaugcgcaccgggaaguccagcaucaugcgguccgacgcccccaucgggaccugcagcuccgagugcaucacgcccaacgggagcauccccaacgacaagccguuccagaacgugaacaagaucaccuacggcgccugccccaaguacgucaagcagaacacccucaagcuggccaccggcaugcgcaacgugcccgagaagcagacgcgggggaucuucggcgcgaucgccggguucaucgagaacggcugggaggggaugaucgacggcugguacggcuuccgccaccagaacuccgaggggaccggccaggccgccgaccucaagagcacccaggccgcgaucgaccagaucaacgggaagcugaaccgggugaucgagaagaccaacgagaaguuccaccagaucgagaaggaguucuccgaggucgagggccgcauccaggaccuggagaaguacguggaggacacgaagaucgaccuguggagcuacaacgccgagcuccuggucgcccuggagaaccagcacaccaucgaccucaccgacuccgagaugaacaagcuguucgagaagacccggcgccagcugcgggagaacgccgaggacauggggaacggcugcuucaagaucuaccacaagugcgacaacgccugcaucggcagcauccgcaacgggacguacgaccacgacguguaccgggacgaggcgcucaacaaccgcuuccagaucaagggcguggagcugaaguccggguacaaggacuggauccuguggaucagcuucgccaucuccugcuuccuccugugcgucgugcugcucggcuucaucaugugggccugccagaagggcaacauccgcugcaacaucugcaucuga

SEQ ID NO: 72575 - RNA, 1701 nt, Artificial Sequence; identical to SEQ ID NO: 64788
  derived and/or modified CDS sequence (opt1) from hemagglutinin__InfluenzaA__AFG99050

SEQ ID NO: 72576 - RNA, 1701 nt, Artificial Sequence
  derived and/or modified CDS sequence (opt1) from hemagglutinin__InfluenzaA__AFG99061
augaagaccaucaucgcccugagcuacaucuucugccucguguucgcccaggaccugcccggcaacgacaacuccaccgcgacgcugugccucgggcaccacgccgucccgaacggcacccuggugaagaccaucaccaacgaccagaucgaggugacgaacgccaccgagcugguccagagcuccagcaccgggaagaucugcgacaacccccaccgcauccucgacggcaucaacugcacccugaucgacgcccugcucggggacccccacugcgacggcuuccagaacgagaagugggaccuguucguggagcgguccaaggccuucagcaacugcuaccccuacgacgugccggacuacgcgucccugcgcagccucgucgccuccagcggcacgcuggaguucaucaacgagggguucaacuggaccggcgugacccagaacgggggcuccagcgccugcaagcgggggcccgacaacggcuucuucucccgccugaacuggcucuacaagagcggcuccaccuaccccgugcagaacgucacgaugcccaacaacgacaacagcgacaagcuguacaucuggggcgugcaccacccguccaccgacaaggagcagaccgaccuguacgugcaggccagcgggaaggucaccguguccacgaagcggagccagcagaccgugauccccaacgucgggagccgccccugggugcggggccucuccagccgcguguccaucuacuggaccaucgucaagcccggcgacauccuggugaucaacagcaacgggaaccugaucgcgccgcggggcuacuucaagaugcgcaccgggaaguccagcaucaugcgguccgacgcccccaucggcacgugcagcuccgagugcaucacccccaacgggagcauccccaacgacaagccguuccagaacgugaacaagaucaccuacggcgccugccccaaguacaucaagcagaacacccucaagcuggccacgggcaugcgcaacguccccgagaagcagacccgggggaucuucggcgccaucgcgggguucaucgagaacggcugggaggggaugaucgacggcugguacggcuuccgccaccagaacuccgaggggaccggccaggccgccgaccucaagagcacccaggccgccaucgaccagaucaacgggaagcugaacaaggugaucgagaagacgaacgagaaguuccaccagaucgagaaggaguucuccgagguggagggccggauccaggaccuggagaaguacgucgaggacaccaagaucgaccuguggagcuacaacgcggagcuccugguggcccuggagaaccagcacaccaucgaccucaccgacuccgagaugaacaagcuguucgagaagacgcgccggcagcugcgcgagaacgccgaggacauggggaacggcugcuucaagaucuaccacaagugcgacaacgccugcaucggcagcauccggaacgggaccuacgaccacgacgucuaccgcgacgaggcccucaacaaccgguuccagaucaagggcguggagcugaaguccggguacaaggacuggauccuguggaucagcuucgcgaucuccugcuuccuccugugcgugguccugcucggcuucaucaugugggccugccagaagggcaacauccgcugcaacaucugcaucuga

SEQ ID NO: 72577 - RNA, 1701 nt, Artificial Sequence
  derived and/or modified CDS sequence (opt1) from hemagglutinin__InfluenzaA__AFG99072
augaagaccaucaucgcccugagcuacaucuucugccucguguucgcccaggaccugcccggcaacgacaacuccaccgcgacgcugugccucgggcaccacgccgucccgaacggcacccuggugaagaccaucaccaacgaccagaucgaggugacgaacgccaccgagcugguccagagcuccagcaccgggaagaucugcgacaacccccaccgcauccucgacggcaagaacugcacccugaucgacgcccugcucggggacccccacugcgacggcuuccagaacgagaagugggaccuguucguggagcgguccaaggccuucagcaacugcuaccccuacgacgugccggacuacgcgucccugcgcagccucgucgccuccagcggcacgcuggaguucaucaacgagggguucaacuggaccggcgugacccagaacgggggcuccagcgccugcaagcgggggcccgacaacggcuucuucucccgccugaacuggcucuacaagagcggcuccaccuaccccgugcagaacgucacgaugcccaacaacgacaacagcgaccggcuguacaucuggggcgugcaccacccguccaccgacaaggagcagaccgaccuguacgugcaggccagcgggaaggucaccguguccacgaagcgcagccagcagaccgugauccccaacgucgggagccggcccugggugcgcggccucuccagccggguguccaucuacuggaccaucgucaagcccggcgacauccuggugaucaacagcaacgggaaccugaucgcgccgcgcggcuacuucaagaugcggaccgggaaguccagcaucaugcgcuccgacgcccccaucggcacgugcagcuccgagugcaucacccccaacgggagcauccccaacgacaagccguuccagaacgugaacaagaucaccuacggcgccugccccaaguacgucaagcagaacacccucaagcuggccacgggcaugcggaacgugcccgagaagcagacccgcgggaucuucggcgccaucgcgggguucaucgagaacggcugggaggggaugaucgacggcugguacggcuuccggcaccagaacuccgaggggaccggccaggccgccgaccucaagagcacccaggccgccaucgaccagaucaacgggaagcugaaccgcgugaucgagaagacgaacgagaaguuccaccagaucgagaaggaguucuccgaggucgagggccggauccaggaccuggagaaguacguggaggacaccaagaucgaccuguggagcuacaacgcggagcuccuggucgcccuggagaaccagcacaccaucgaccucaccgacuccgagaugaacaagcuguucgagaagacgcgccggcagcugcgcgagaacgccgaggacauggggaacggcugcuucaagaucuaccacaagugcgacaacgccugcaucggcagcauccggaacgggaccuacaaccacgacguguaccgcgacgaggcccucaacaaccgcuuccagaucaagggcguggagcugaaguccggguacaaggacuggauccuguggaucagcuucgcgaucuccugcuuccuccugugcgucgugcugcucggcuucaucaugugggccugccagaagggcaacauccggugcaacaucugcaucuga

SEQ ID NO: 72578 - RNA, 1701 nt, Artificial Sequence
  derived and/or modified CDS sequence (opt1) from hemagglutinin__InfluenzaA__AFG99083
augaagaccaucaucgcccugagcuacaucuucugccucguguucgcccaggaccugcccggcaacgacaacuccaccgcgacgcugugccucgggcaccacgccgucccgaacggcacccuggugaagaccaucaccaacgaccagaucgaggugacgaacgccaccgagcugguccagagcuccagcaccgggaagaucugcgacaacccccaccgcauccucgacggcaucaacugcacccugaucgacgcccugcucggggacccccacugcgacggcuuccagaacgagaagugggaccuguucguggagcgguccaaggccuucagcaacugcuaccccuacgacgugccggacuacgcgucccugcgcagccucgucgccuccagcggcacgcuggaguucaucaacgagggguucaacuggaccggcgugacccagaacgggggcuccagcgccugcaagcgggggcccgacaagggcuucuucucccgccugaacuggcucuacaagagcggcuccaccuaccccgugcagaacgucacgaugcccaacaacgacaacagcgacaagcuguacaucuggggcgugcaccacccguccaccgacaaggagcagaccgaccuguacgugcaggccagcgggaaggucaccguguccacgaagcggagccagcagaccgugauccccaacgucgggagccgccccugggugcggggccucuccagccgcguguccaucuacuggaccaucgucaagcccggcgacauccuggugaucaacagcaacgggaaccugaucgcgccgcggggcuacuucaagaugcucaccgggaaguccagcaucaugcgcuccgacgcccccaucggcacgugcagcuccgagugcaucacccccaacgggagcauccccaacgacaagccguuccagaacgugaacaagaucaccuacggcgccugccccaaguacgucaagcagaacacccugaagcuggccacgggcaugcggaacgugcccgagaagcagacccgcgggaucuucggcgccaucgcgggguucaucgagaacggcugggaggggaugaucgacggcugguacggcuuccggcaccagaacuccgaggggaccggccaggccgccgaccucaagagcacccaggccgccaucgaccagaucaacgggaagcugaaccgcgugaucgagaagacgaacgagaaguuccaccagaucgagaaggaguucuccgaggucgagggccggauccacgaccuggagaaguacguggaggacaccaagaucgaccucuggagcuacaacgcggagcugcuggucgcccucgagaaccagcacaccaucgaccugaccgacuccgagaugaacaagcuguucgagaagacgcgccggcagcuccgcgagaacgccgaggacauggggaacggcugcuucaagaucuaccacaagugcgacaacgccugcaucggcagcauccggaacgggaccuacgaccacgacguguaccgcgacgaggcccugaacaaccgguuccagaucaagggcguggagcugaaguccggguacaaggacuggauccucuggaucagcuucgcgaucuccugcuuccugcugugcgucgugcuccugggcuucaucaugugggccugccagaagggcaacauccgcugcaacaucugcaucuga

SEQ ID NO: 72579 - RNA, 1701 nt, Artificial Sequence
  derived and/or modified CDS sequence (opt1) from hemagglutinin__InfluenzaA__AFG99094
augaagaccaucaucgcccugagcuacaucuucugccucguguucgcccaggaccugcccggcaacgacaacuccaccgcgacgcugugccucgggcaccacgccgucccgaacggcacccuggugaagaccaucaccaacgaccagaucgaggugacgaacgccaccgagcugguccagagcuccagcaccgggaagaucugcgacaacccccaccgcauccucgacggcaucaacugcacccugaucgacgcccugcucggggacccccacugcgacggcuuccagaacgagaagugggaccuguucguggagcgguccaaggccuucagcaacugcuaccccuacgacgugccggacuacgcgucccugcgcagccucgucgccuccagcggcacgcuggaguucaucaacgagggguucaacuggaccggcgugacccagaacgggggcuccggggccugcaagcggggccccgacaacggcuucuucagccgccugaacuggcucuacaaguccgggagcaccuaccccgugcagaacgucacgaugcccaacaacgacaacuccgacaagcuguacaucuggggcgugcaccacccgagcaccgacaaggagcagaccgaccuguacgugcaggccuccgggaaggucaccgugagcacgaagcggucccagcagaccgugauccccaacgucggcagccgccccugggugcggggccucagcucccgcgugagcaucuacuggaccaucgucaagcccggggacauccuggugaucaacuccaacggcaaccugaucgcgccgcggggguacuucaagaugcgcaccggcaagagcuccaucaugcggagcgacgcccccaucgggacgugcuccagcgagugcaucacccccaacggcuccauccccaacgacaagccguuccagaacgugaacaagaucaccuacggcgccugccccaaguacgucaagcagaacacccucaagcuggccacggggaugcgcaacgugcccgagaagcagacccggggcaucuucggggccaucgcgggcuucaucgagaacgggugggagggcaugaucgacggcugguacggguuccgccaccagaacagcgagggcaccgggcaggccgccgaccugaaguccacccaggccgccaucgaccagaucaacggcaagcucaaccgggugaucgagaagacgaacgagaaguuccaccagaucgagaaggaguucagcgaggucgaggggcgcauccaggaccuggagaaguacguggaggacaccaagaucgaccugugguccuacaacgcggagcuccuggucgcccuggagaaccagcacaccaucgaccucaccgacagcgagaugaacaagcuguucgagaagacgcggcgccagcugcgggagaacgccgaggacaugggcaacggcugcuucaagaucuaccacaagugcgacaacgccugcaucggguccauccgcaacggcaccuacgaccacgacguguaccgggacgaggcccucaacaaccgcuuccagaucaaggggguggagcucaagagcggcuacaaggacuggauccuguggaucuccuucgcgaucagcugcuuccugcugugcgucgugcugcucggcuucaucaugugggccugccagaaggggaacauccgcugcaacaucugcaucuga

SEQ ID NO: 72580 - RNA, 1701 nt, Artificial Sequence
  derived and/or modified CDS sequence (opt1) from hemagglutinin__InfluenzaA__AFG99116
augaagaccaucaucgcccugagcuacaucuucugccucguguucgcccagaaccugcccggcaacgacaacuccaccgcgacgcugugccucgggcaccacgccgucccgaacggcacccuggugaagaccaucaccaacgaccagaucgaggugacgaacgccaccgagcugguccagagcuccagcaccgggcgcaucugcgacagcccccaccggauccucgacggcaagaacugcacccugguggacgcccugcucggggacccccacugcgacggcuuccagaacgagaagugggaccuguucguggagcgcuccaaggccuucuccaacugcuaccccuacgacgucccggacuacgcgagccugcggucccucguggccagcuccggcacgcuggaguucaucaacgagagcuucaacuggaccggggugacccaguccggcgggagcuacgccugcaagcgcggcuccgacaacagcuucuucucccggcugaacuggcucuacgagagcgaguccaaguaccccguccugaacgugaccaugcccaacaacgggaacuucgacaagcuguacaucuggggcgugcaccaccccagcacggacaaggagcagaccaaccucuacguccgcgccagcggccgggugaccguguccaccaagcgcagccagcagacgaucaucccgaacaucgggucccggcccuggguccgcggccugagcucccggaucagcaucuacuggaccaucgugaagcccggggacauccugcucaucaacuccaacggcaaccugaucgcgccccgcggcuacuucaagauccggaccggcaagagcuccaucaugcgcagcgacgccccgaucgggaccugcuccagcgagugcaucacgcccaacggguccauccccaacgacaagcccuuccagaacgugaacaagaucaccuacggcgccugcccgaaguacgucaagcagaacacccugaagcucgccaccgggaugcggaacgugcccgagaagcagacgcgcggcaucuucggcgccaucgcgggguucaucgagaacggcugggaggggaugguggacggcugguacggguuccggcaccagaacagcgagggcaccggccaggccgccgaccugaaguccacccaggccgccaucgaccagaucaacgggaagcugaaccgcgucaucgagaagaccaacgagaaguuccaccagaucgagaaggaguucagcgagguggagggccggauccaggaccucgagaaguacguggaggacacgaagaucgaccugugguccuacaacgcggagcugcucgucgcccuggagaaccagcacaccaucgaccugaccgacagcgagaugaacaagcuguucgagaagacccgccggcagcuccgcgagaacgccgaggacauggggaacggcugcuucaagaucuaccacaagugcgacaacgccugcaucggguccauccgcaacggcacguacgaccacgacguguaccgggacgaggcccugaacaaccgcuuccagaucaagggcgucgagcucaagagcggguacaaggacuggauccuguggaucagcuucgcgaucuccugcuuccugcucugcguggugcugcugggcuucaucaugugggccugccagaaggggaacauccggugcaacaucugcaucuga

SEQ ID NO: 72581 - RNA, 1701 nt, Artificial Sequence
  derived and/or modified CDS sequence (opt1) from hemagglutinin__InfluenzaA__AFG99127
augaagaccaucaucgcccugagcuacauccucugccugguguucgcccagaaccugcccggcaacgacaacuccaccgcgacgcucugccuggggcaccacgccgucccgaacggcacccuggugaagaccaucaccaacgaccagaucgaggugacgaacgccaccgagcucguccagagcuccagcaccgggcgcaucugcgacagcccccaccggauccuggacggcaagaacugcacccugguggacgcccuccugggggacccccacugcgacggcuuccagaacgagaagugggaccuguucguggagcgcagcaaggccuucuccaacugcuaccccuacgacgucccggacuacgcgagccuccggucccugguggccagcuccggcacgcuggaguucaucaacgagagcuucaacuggaccggggugacccaguccggcgggagcuacgccugcaagcgcggcuccgacaacagcuucuucucccggcucaacuggcuguacgagagcgaguccaaguaccccguccugaacgugaccaugcccaacaacgggaacuucgacaagcucuacaucuggggcgugcaccaccccagcacggacaaggagcagaccaaccuguacguccgcgccagcggccgggugaccguguccaccaagcgcagccagcagacgaucaucccgaacaucgggucccggcccuggguccgcggccugagcucccggaucagcaucuacuggaccaucgugaagcccggggacauccuccugaucaacuccaacggcaaccugaucgcgccccgcggcuacuucaagauccggaccggcaagagcuccaucaugcgcagcgacgccccgaucgggaccugcuccagcgagugcaucacgcccaacggguccauccccaacgacaagcccuuccagaacgugaacaagaucaccuacggcgccugcccgaaguacgucaagcagaacacccucaagcuggccaccgggaugcggaacgugcccgagaagcagacgcgcggcaucuucggcgccaucgcgggguucaucgagaacggcugggaggggaugguggacggcugguacggguuccggcaccagaacagcgagggcaccggccaggccgccgaccugaaguccacccaggccgccaucgaccagaucaacgggaagcucaaccgcgucaucgagaagaccaacgagaaguuccaccagaucgagaaggaguucagcgagguggagggccggauccaggaccuggagaaguacguggaggacacgaagaucgaccugugguccuacaacgcggagcuccuggucgcccuggagaaccagcacaccaucgaccucaccgacagcgagaugaacaagcuguucgagaagacccgccggcagcugcgcgagaacgccgaggacauggggaacggcugcuucaagaucuaccacaagugcgacaacgccugcaucggguccauccgcaacggcacguacgaccacgacguguaccgggacgaggcccucaacaaccgcuuccagaucaagggcgucgagcugaaguccggguacaaggacuggauccuguggaucagcuucgcgaucuccugcuuccuccugugcguggugcugcucggcuucaucaugugggccugccagaaggggaacauccggugcaacaucugcaucuga

SEQ ID NO: 72582 - RNA, 1701 nt, Artificial Sequence
  derived and/or modified CDS sequence (opt1) from hemagglutinin__InfluenzaA__AFG99138
augaagaccaucaucgcccugagcuacaucuucugccucguguucgcccagaaccugcccggcaacgacaacuccaccgcgacgcugugccucgggcaccacgccgucccgaacggcacccuggugaagaccaucaccaacgaccagaucgaggugacgaacgccaccgagcugguccagagcuccagcaccgggcgcaucugcgacagcccccaccggauccucgacggcaagaacugcacccugguggacgcccugcucggggacccccacugcgacggcuuccagaacgagaagugggaccuguucguggagcgcuccaaggccuucuccaacugcuaccccuacgacgucccggacuacgcgagccugcggucccucguggccagcuccggcacgcuggaguucaucaacgagagcuucaacuggaccggggugacccaguccggcgggagcuccgccugcaagcgcggcagcgacaacuccuucuucagccggcugaacuggcucuacgaguccgagagcaaguaccccguccugaacgugaccaugcccaacaacgggaacuucgacaagcuguacaucuggggcgugcaccaccccagcacggacaaggagcagaccaaccucuacguccgcgccuccggccgggugaccgugagcaccaagcgcaaccagcagacggucaucccgaacaucgggucccggcccugggugcgcggccugagcucccggaucagcaucuacuggaccaucgugaagcccggggacauccugcucaucaacuccaacggcaaccugaucgcgccccgcggcuacuucaagauccggaacggcaagagcuccaucaugcgcagcgacgccccgaucgggaccugcuccagcgagugcaucacccccaacggguccauccccaacgacaagcccuuccagaacgucaacaagaucacguacggcgccugcccgaaguacgugaagcagaacacccugaagcucgccaccgggaugcggaacgugcccgagaagcagacccgcggcaucuucggcgccaucgcgggguucaucgagaacggcugggaggggauggucgacggcugguacggguuccggcaccgcaacagcgagggcacgggccaggccgccgaccugaaguccacccaggccgccaucgaccagaucaacgggaagcugaaccgggugaucgagaagaccaacgagaaguuccaccagaucgagaaggaguucagcgagguggagggccgcauccaggaccucgagaaguacgucgaggacaccaagaucgaccugugguccuacaacgcggagcugcucguggcccuggagaaccagcacacgaucgaccugaccgacagcgagaugaacaagcuguucgagaagacccggcgccagcuccgcgagaacgccgaggacauggggaacggcugcuucaagaucuaccacaagugcgacaacgccugcaucggguccauccggaacggcaccuacgaccacgacgucuaccgcgacgaggcccugaacaaccgguuccagaucaagggcguggagcucaagagcggguacaaggacuggauccuguggaucagcuucgcgaucuccugcuuccugcucugcgugguccugcugggcuucaucaugugggccugccagaaggggaacauccgcugcaacaucugcaucuga

SEQ ID NO: 72583 - RNA, 1701 nt, Artificial Sequence
  derived and/or modified CDS sequence (opt1) from hemagglutinin__InfluenzaA__AFG99149
augaagaccaucaucgcccugagcuacauccucugccugguguucgcccagaaccugcccggcaacgacaacuccaccgcgacgcucugccuggggcaccacgccgucccgaacggcacccuggugaagaccaucaccaacgaccagaucgaggugacgaacgccaccgagcucguccagagcuccagcaccgggcgcaucugcgacagcccccaccggauccuggacggcaagaacugcacccugaucgacgcccuccugggggacccccacugcgacggcuuccagaacgagaagugggaccuguucguggagcgcagccgggccuucuccaacugcuaccccuacgacgugccggacuacgcgagccuccgcucccuggucgccagcuccggcacgcuggaguucaucaacgagggguucaacuggaccggcgugacccagagcgggggcuccuacgccugcaagcgggggagcgacaacuccuucuucagccgccucaacuggcuguacgaguccgagagcaaguaccccgugcugaacgucaccaugcccaacaacggcaaguucgacaagcucuacaucuggggcgugcaccaccccuccacggacaaggagcagaccaaccuguacgugcgggccagcgggcgcgucaccgugagcaccaagcggucccagcagacggugaucccgaacaucggcagccgccccuggguccgggggcuguccagccgcaucuccaucuacuggaccaucgugaagcccggcgacauccuccugaucaacagcaccggcaaccugaucgcgccccggggguacuucaagauccgcaccggcaaguccagcaucaugcgguccgacgccccgaucgggacgugcagcuccgagugcaucacccccaacggcagcauccccaacgacaagcccuuccagaacgugaacaagaucaccuacggggccugcccgcgcuacgucaagcagaacacccucaagcuggccacgggcaugcggaacgugcccgagaagcagacccgcggcaucuucggggccaucgcgggcuucaucgagaacgggugggagggcaugguggacgggugguacggcuuccggcaccagaacuccgagggcaccgggcaggccgccgaccugaaguccacccaggccgccaucgaccagaucaacggcaagcucaaccgcgucaucgagaagacgaacgagaaguuccaccagaucgagaaggaguucuccgagguggaggggcggauccaggaccuggagaaguacguggaggacaccaagaucgaccuguggagcuacaacgcggagcuccuggucgcccuggagaaccagcacaccaucgaccucaccgacgccgagaugaacaagcuguucgagaagacgcgcaagcagcugcgcgagaacgccgaggacaugggcaacgggugcuucaagaucuaccacaagugcgacaacgccugcaucggcuccauccggaacggcaccuacgaccacgacguguaccgcgacgaggcgcucaacaaccgguuccagaucaagggggucgagcucaagagcggcuacaaggacuggauccuguggaucuccuucgccaucagcugcuuccugcugugcguggugcugcucggguucaucaugugggccugccagaagggcaacauccgcugcaacaucugcaucuga

SEQ ID NO: 72584 - RNA, 1701 nt, Artificial Sequence
  derived and/or modified CDS sequence (opt1) from hemagglutinin__InfluenzaA__AFG99171
augaagaccaucaucgcccugagcuacaucuucugccucguguucgcccagaaccugcccggcaacgacaacuccaccgcgacgcugugccucgggcaccacgccgucccgaacggcacccuggugaagaccaucaccaacgaccagaucgaggugacgaacgccaccgagcugguccagagcuccagcaccgggcgcaucugcgacagcccccaccggauccucgacggcaagaacugcacccugguggacgcccugcucggggacccccacugcgacggcuuccagaacgagaagugggaccuguucguggagcgcuccaaggccuucuccaacugcuaccccuacgacgucccggacuacgcgagccugcggucccucguggccagcuccggcacgcuggaguucaccaacgagagcuucaacuggaccggggugacccaguccggcgggagcuacgccugcaagcgcggcuccgacaacagcuucuucucccggcugaacuggcucuacgagagcgaguccaaguaccccguccugaacgugacgaugcccaacaacgggaacuucgacaagcuguacaucuggggcgugcaccaccccagcaccgacaaggagcagaccaaccucuacguccgcgccagcggccgggugaccguguccacgaagcgcaaccagcagaccgucaucccgaacaucgggagccggcccugggugcgcggccuguccagccggaucuccaucuacuggaccaucgugaagcccggggacauccugcucaucaacagcaacggcaaccugaucgcgccccgcggcuacuucaagauccggaacgggaaguccagcaucaugcgcuccgacgccccgaucgggaccugcagcuccgagugcaucacgcccaacggcagcauccccaacgacaagcccuuccagaacgucaacaagaucaccuacggcgccugcccgaaguacgugaagcagaacacccugaagcucgccaccgggaugcggaacgugcccgagaagcagacgcgcggcaucuucggcgccaucgcgggguucaucgagaacggcugggaggggauggucgacggcugguacggguuccggcaccgcaacuccgagggcaccggccaggccgccgaccucaagagcacccaggccgccaucgaccagaucaacgggaagcugaaccgggugaucgagaagaccaacgagaaguuccaccagaucgagaaggaguucuccgagguggagggccgcauccaggaccucgagaaguacgucgaggacacgaagaucgaccuguggagcuacaacgcggagcugcucguggcccuggagaaccagcacaccaucgaccugaccgacuccgagaugaacaagcuguucgagaagacccggcgccagcugcgcgagaacgccgaggacauggggaacggcugcuucaagaucuaccacaagugcgacaacgccugcaucgggagcauccggaacggcacguacgaccacgacgucuaccgcgacgaggcccugaacaaccgguuccagaucaagggcguggagcucaaguccggguacaaggacuggauccuguggaucagcuucgcgaucagcugcuuccugcucugcgugguccugcugggcuucaucaugugggccugccagaaggggaacauccgcugcaacaucugcaucuga

SEQ ID NO: 72585 - RNA, 1701 nt, Artificial Sequence
  derived and/or modified CDS sequence (opt1) from hemagglutinin__InfluenzaA__AFG99182
augaagaccaucaucgcccugagcuacaucuucugccucguguucgcccagaagcugcccggcaacgacaacuccaccgcgacgcugugccucgggcaccacgccgucccgaacggcacccuggugaagaccaucaccaacgaccagaucgaggugacgaacgccaccgagcugguccagagcuccagcaccgggcgcaucugcgacagcccccaccggauccucgacggcaagaacugcacccugaucgacgcccugcucggggacccccacugcgacggcuuccagaacgagaagugggaccuguucguggagcgcagcaaggccuucuccaacugcuaccccuacgacgugccggacuacgcgagccugcggucccucgucgccagcuccggcacgcuggaguucaucaacgagggguucaacuggaccggcgugacccagagcgggggcuccuacgccugcaagcgcgggagcgugaacuccuucuucagccggcugaacuggcucuacgaguccgaguacaaguaccccgcccugaacgucaccaugcccaacaacggcaaguucgacaagcuguacaucuggggcgugcaccaccccagcacggacaaggagcagaccaaccucuacgugcgcgcguccgggcgggucaccgugagcaccaagcgcagccagcagacggugaucccgaacaucggcucccggcccuggguccgcgggcugagcucccggaucagcaucuacuggaccaucgugaagcccggcgacauccugcucaucaacuccaccggcaaccugaucgcgccccgcggguacuucaagauccggaccggcaagagcuccaucaugcgcagcgacgccccgaucgggacgugcuccagcgagugcaucacccccaacggcuccauccccaacgacaagcccuuccagaacgugaacaagaucaccuacggggccugcccgcgguacgucaagcagaacacccugaagcucgccacgggcaugcgcaacgugcccgagaagcagacccggggcaucuucggggccaucgccggcuucaucgagaacgggugggagggcaugguggacgggugguacggcuuccgccaccagaacagcgagggcaccgggcaggccgccgaccugaaguccacccaggccgcgaucgaccagaucaacggcaagcugaaccggcucaucgagaagacgaacgagaaguuccaccagaucgagaaggaguucagcgaggucgaggggcgcauccaggaccuggagaaguacguggaggacaccaagaucgaccugugguccuacaacgccgagcuccugguggcccuggagaaccagcacaccaucgaccucaccgacagcgagaugaacaagcuguucgagaagacgcggaagcagcugcgcgagaacgccgaggacaugggcaacgggugcuucaagaucuaccacaagugcgacaacgccugcaucggcuccauccgcaacggcaccuacgaccacgacgucuaccgggacgaggcgcucaacaaccgcuuccagaucaaggggguggagcugaaguccggcuacaaggacuggauccuguggaucuccuucgccaucagcugcuuccuccugugcgucgugcugcucggguucaucaugugggccugccagaagggcaacauccggugcaacaucugcaucuga

SEQ ID NO: 72586 - RNA, 1701 nt, Artificial Sequence
  derived and/or modified CDS sequence (opt1) from hemagglutinin__InfluenzaA__AFG99193
augaagaccaucaucgcccugagcuacaucuccugccucguguucgcccagaagcugcccggcaacgacaacagcaccgcgacgcugugccucgggcaccacgccgucccgaacggcacccuggugaagaccaucaccaacgaccagaucgaggugacgaacgccaccgagcugguccaguccagcuccaccgggcgcaucugcgacagcccccaccggauccucgacggcaagaacugcacccugaucgacgcccugcucggggacccccacugcgacggcuuccagaacgagaagugggaccuguucguggagcgcuccaaggccuucagcaacugcuaccccuacgacgugccggacuacgcgucccugcggagccucgucgccuccagcggcacgcuggaguucaucaacgagggguucaacuggaccggcgugacccaguccgggggcagcuacgccugcaagcgcggguccgugaacagcuucuucucccggcugaacuggcucuacgagagcgaguccaaguaccccgcccugaacgucaccaugcccaacaacggcaaguucgagaagcuguacaucuggggcgugcaccaccccagcacggacaaggagcagaccaaccucuacgugcgcgcgagcgggcgggucaccguguccaccaagcgcagccagcagacggugaucccgaacaucggcccccggcccuggguccgcgggcuguccagccggaucuccaucuacuggaccaucgugaagcccggcgacauccugcucaucaacagcaccggcaaccugaucgccccgcgcggguacuucaagauccggaccggcaaguccagcaucaugcgcuccgacgcccccaucgggacgugcagcuccgagugcaucacccccaacggcagcauccccaacgacaagccguuccagaacgugaacaagaucaccuacggggccugcccccgguacgucaagcagaacacccugaagcucgccacgggcaugcgcaacgugcccgagaagcagacccggggcaucuucggggcgaucgccggcuucaucgagaacgggugggagggcaugguggacgggugguacggcuuccgccaccagaacuccgagggcaccgggcaggccgccgaccucaagagcacccaggccgcgaucgaccagaucaacggcaagcugaaccggcucaucgagaagacgaacgagaaguuccaccagaucgagaaggaguucuccgaggucgaggggcgcauccaggaccuggagaaguacguggaggacaccaagaucgaccuguggagcuacaacgccgagcuccugguggcccuggagaaccagcacaccaucgacaugaccgacuccgagaugaacaagcuguucgagaagacgcggaagcagcugcgcgagaacgccgaggacaugggcaacgggugcuucaagaucuaccacaagugcgacaacgccugcaucggcagcauccgcaacggcaccuacgaccacgacgucuaccgggacgaggcgcugaacaaccgcuuccagaucaaggggguggagcucaaguccggcuacaaggacuggauccuguggaucagcuucgccaucagcugcuuccugcucugcgucgugcugcugggguucaucaugugggccugccagaagggcaacauccggugcaacaucugcaucuga

SEQ ID NO: 72587 - RNA, 1701 nt, Artificial Sequence
  derived and/or modified CDS sequence (opt1) from hemagglutinin__InfluenzaA__AFG99204
augaagaccaucaucgcccugagcuacaucuucugccucggcuucgcccagaagcugcccgggaacgacaacuccaccgcgacgcugugccucggccaccacgccgugccgaacgggacccuggucaagaccaucaccaacgaccagaucgaggugacgaacgccaccgagcuggugcagagcuccagcaccggccgcaucugcgacagcccccaccggauccucgacgggaagaacugcacccugaucgacgcccugcucggcgacccccacugcgacggcuuccagaacgagaagugggaccuguucgucgagcgcagcaaggccuucuccaacugcuaccccuacgacgugccggacuacgcgagccugcggucccucguggccagcuccgggacgcuggaguucaucaacgagggcuucaacuggaccggggucacccagagcggcggguccuacgccugcaagcgcggcagcgugaacuccuucuucagccggcugaacuggcucuacaaguccgagagcaaguaccccgcccugaacgugaccaugcccaacaacggcaaguucgacaagcuguacaucuggggcguccaccaccccuccacggacaaggagcagaccaaccucuacgugcgcgcgagcgggcgggugaccgucagcaccaagcgcucccagcagacggugaucccgaacaucgggagccggcccugggugcgcggccuguccagccggaucuccaucuacuggaccaucgucaagcccggcgacauccugcucaucaacagcaccgggaaccugaucgcgccccgcggcuacuucaagauccggaccgggaaguccagcaucauccgcuccgacgccccgaucggcacgugcagcuccgagugcaucacccccaacgggagcauccccaacgacaagcccuuccagaacgugaacaagaucaccuacggcgccugcccgcgguacgugaagcagaacacccugaagcucgccacgggcaugcgcaacguccccgagaagcagacccgggggaucuucggcgccaucgccggguucaucgagaacggcugggaggggaugguggacggcugguacggcuuccgccaccagaacuccgaggggaccggccaggccgccgaccugaaguccacccaggccgcgaucgaccagaucaacgggaagcugaaccggcucaucgagaagacgaacgagaaguuccaccagaucgagaaggaguucuccgagguggagggccgcauccaggaccuggagaaguacgucgaggacaccaagaucgaccuguggagcuacaacgccgagcuccugguggcccuggagaaccagcacaccaucgaccucaccgacuccgagaugaacaagcuguucgagaagacgcggaagcagcugcgcgagaacgccgaggacauggggaacggcugcuucaagaucuaccacaagugcgacaacgccugcaucggcagcauccgcaacgggaccuacgaccacgacguguaccgggacgaggcgcucaacaaccgcuuccagaucaagggcgucgagcugaaguccggguacaaggacuggauccuguggaucagcuucgccaucagcugcuuccuccugugcgugguccugcucggcuucaucaugugggccugccagaagggcaacauccggugcaacaucugcaucuga

SEQ ID NO: 72588 - RNA, 1701 nt, Artificial Sequence
  derived and/or modified CDS sequence (opt1) from hemagglutinin__InfluenzaA__AFG99215
augaagaccaucaucgcccugagcuacaucuucugccucguguucgcccagaagcugcccggcaacgacaacuccaccgcgacgcugugccucgggcaccacgccgucccgaacggcacccuggugaagaccaucaccaacgaccagaucgaggugacgaacgccaccgagcugguccagagcuccagcaccgggcgcaucugcgacagcccccaccggauccucgacggcaagaacugcacccugaucgacgcccugcucggggacccccacugcgacggcuuccagaacgagaagugggaccuguucaucgagcgcagcaaggccuucuccaacugcuaccccuacgacgugccggacuacgcgagccugcggucccucguggccagcuccggcacgcuggaguucaucaacgagggguucaacuggaccggcgucacccagagcgggggcuccuacgccugcaagcgcgggagcgugaacuccuucuucagccggcugaacuggcucuacgaguccgaguacaaguaccccgcccugaacgugaccaugcccaacaacggcaaguucgacaagcuguacaucuggggcguccaccaccccagcacggagaaggagcagaccaaccucuacgugcgcgcguccgggcgggugaccgucagcaccaagcgcagccagcagacggugaccccgaacaucggcucccggcccugggugcgcgggcugagcucccggaucagcaucuacuggaccaucgucaagcccggcgacauccugcucaucaacuccaccggcaaccugaucgcgccccgcggguacuucaagauccggacgggcaagagcuccaucaugcgcagcgacgccccgaucgggaccugcuccagcgagugcaucacccccaacggcuccauccccaacgacaagcccuuccagaacgugaacaagaucaccuacggggccugcccgcgguacgugaagcagaacacgcugaagcucgccaccggcaugcgcaacguccccgagaagcagacccggggcaucuucggggccaucgccggcuucaucgagaacgggugggagggcaugguggacgggugguacggcuuccgccaccagaacagcgagggcaccgggcaggccgccgaccugaaguccacgcaggccgcgaucgaccagaucaacggcaagcugaaccggcucaucgagaagaccaacgagaaguuccaccagaucgagaaggaguucagcgagguggaggggcgcauccaggaccuggagaaguacgucgaggacaccaagaucgaccugugguccuacaacgccgagcuccugguggcccuggagaaccagcacaccaucgaccucacggacagcgagaugaacaagcuguucgagaagacccggaagcagcugcgcgagaacgccgaggacaugggcaacgggugcuucaagaucuaccacaagugcgacaacgccugcaucggcuccauccgcaacggcaccuacgaccacgacguguaccgggacgaggcgcucaacaaccgcuuccagaucaagggggucgagcugaaguccggcuacaaggacuggauccuguggaucuccuucgccaucagcugcuuccuccugugcgugguccugcucggguucaucaugugggccugccagaagggcaacauccggugcaacaucugcaucuga

SEQ ID NO: 72589 - RNA, 1701 nt, Artificial Sequence
  derived and/or modified CDS sequence (opt1) from hemagglutinin__InfluenzaA__AFG99226
augaagaccaucaucgcccugagcuacaucuucugccucguguucgcccagaagcugcccggcaacgacaacuccaccgcgacgcugugccucgggcaccacgccgucccgaacggcacccuggugaagaccaucaccaacgaccagaucgaggugacgaacgccaccgagcugguccagagcuccagcaccgggcgcaucugcgacagcccccaccggauccucgacggcaagaacugcacccugaucgacgcccugcucggggacccccacugcgacggcuuccagaacgagaagugggaccuguucguggagcgcuccaaggccuucuccaacugcuaccccuacgacgugccggacuacgcgagccugcggucccucgucgccagcuccggcacgcuggaguucaucaacgagggguucaacuggaccggcgugacccagagcgggggcuccuacgccugcaagcgcgggagcgugaacuccuucuucagccggcugaacuggcucuacgaguccgaguacaaguaccccgcccugaacgucaccaugcccaacaacggcaaguucgacaagcuguacaucuggggcgugcaccaccccagcacggacaaggagcagaccaaccucuacgugcgcgcguccgggcgggucaccgugagcaccaagcgcagccagcagacggugaucccgaacaucggcucccggcccuggguccgcgggcugagcucccggaucagcaucuacuggaccaucgugaagcccggcgacauccuguccaucaacagcaccggcaaccucaucgcgccccgcggguacuucaagauccggaccggcaaguccagcaucaugcgcuccgacgccccgaucgggacgugcagcuccgagugcaucacccccaacggcagcauccccaacgacaagcccuuccagaacgugaacaagaucaccuacggggccugcccgcgguacgucaagcagaacacccugaagcuggccacgggcaugcgcaacgugcccgagaagcagacccggggcaucuucggggccaucgccggcuucaucgagaacgggugggagggcaugguggacgggugguacggcuuccgccaccagaacuccgagggcaccgggcaggccgccgaccucaagagcacccaggccgcgaucgaccagaucaacggcaagcugaaccggcugaucgagaagacgaacgagaaguuccaccagaucgagaaggaguucuccgaggucgaggggcgcauccaggaccucgagaaguacguggaggacaccaagaucgaccuguggagcuacaacgccgagcugcucguggcccuggagaaccagcacaccaucgaccugaccgacuccgagaugaacaagcuguucgagaagacgcggaagcagcuccgcgagaacgccgaggacaugggcaacgggugcuucaagaucuaccacaagugcgacaacgccugcaucggcagcauccgcaacggcaccuacgaccacgacgucuaccgggacgaggcgcugaacaaccgcuuccagaucaaggggguggagcucaaguccggcuacaaggacuggauccuguggaucagcuucgccaucagcugcuuccugcucugcgucgugcugcugggguucaucaugugggccugccagaagggcaacauccggugcaacaucugcaucuga

SEQ ID NO: 72590 - RNA, 1701 nt, Artificial Sequence
  derived and/or modified CDS sequence (opt1) from hemagglutinin__InfluenzaA__AFG99237
augaagaccaucaucgcccugagcuacaucuucugccucguguucgcccagaagcugcccggcaacgacaacuccaccgcgacgcugugccucgggcaccacgccgucccgaacggcacccuggugaagaccaucaccaacgaccagaucgaggugacgaacgccaccgagcugguccagagcuccagcaccgggcgcaucugcgacagcccccaccggauccucgacggcaagaacugcacccugaucgacgcccugcucggggacccccacugcgacggcuuccagaacgagaagugggaccuguucguggagcgcagcaaggccuucuccaacugcuaccccuacgacgugccggacuacgcgagccugcggucccucgucgccagcuccggcacgcuggaguucaucaacgaggacuucaacuggaccggggugacccagagcggcggguccuacgccugcaagcgcgagagcgugaacuccuucuucagccggcugaacuggcucuacgaguccgaguacaaguaccccgcccugaacgucaccaugcccaacaacggcaaguucgagaagcuguacaucuggggcgugcaccaccccagcacggacaaggagcagaccaaccucuacgugcgcgcguccgggcgggucaccgugagcaccaagcgcagccagcagacggugaucccgaacaucggcucccggcccuggguccgcgggcugagcucccggaucagcaucuacuggaccaucgugaagcccggcgacauccugcucaucaacuccaccgggaaccugaucgcgccccgcggcuacuucaagauccggaccggcaagagcuccaucaugcgcagcgacgccccgaucgggacgugcuccagcgagugcaucacccccaacggcuccauccccaacgacaagcccuuccagaacgugaacaagaucaccuacggggccugcccgcgguacguccgccagaacacccugaagcucgccacgggcaugcggaacgugcccgagaagcagacccgcgggaucuucggcgccaucgccggcuucaucgagaacgggugggagggcaugguggacgggugguacggcuuccggcaccagaacagcgaggggaccggccaggccgccgaccugaaguccacccaggccgcgaucgaccagaucaacggcaagcugaaccgccucaucgagaagacgaacgagaaguuccaccagaucgagaaggaguucagcgaggucgaggggcggauccaggaccuggagaaguacguggaggacaccaagaucgaccugugguccuacaacgccgagcuccugguggcccuggagaaccagcacaccaucgaccucaccgacagcgagaugaacaagcuguucgagaagacgcgcaagcagcugcgcgagaacgccgaggacaugggcaacgggugcuucaagaucuaccacaagugcgacaacgccugcaucggcuccauccggaacgggaccuacgaccacgacgucuaccgcgacgaggcgcucaacaaccgguuccagaucaagggcguggagcugaaguccggcuacaaggacuggauccuguggaucuccuucgccaucagcugcuuccuccugugcgucgugcugcucggguucaucaugugggccugccagaagggcaacauccgcugcaacaucugcaucuga

SEQ ID NO: 72591 - RNA, 1701 nt, Artificial Sequence
  derived and/or modified CDS sequence (opt1) from hemagglutinin__InfluenzaA__AFG99248
augaagaccaucaucgcccugagcuacaucuucugccucguguucgcccagaagcugcccggcaacgacaacuccaccgcgacgcugugccucgggcaccacgccgucccgaacggcacccuggugaagaccaucaccaacgaccagaucgaggugacgaacgccaccgagcugguccagagcuccagcaccgggcgcaucugcgacagcccccaccggauccucgacggcaagaacugcacccugaucgacgcccugcucggggacccccacugcgacggcuuccagaacgagaagugggaccuguucguggagcgcagcaaggccuacuccaacugcuaccccuacgacgugccggacuacgcgagccugcggucccucgucgccagcuccggcacgcuggaguucaucaacgaggacuucaacuggaccggggugacccagagcggcgggucccacgccugcaagcgcggcagcgugaacuccuucuucagccggcugaacuggcuccacgaguccgaguacaaguaccccgcccugaacgucaccaugcccaacaacgggaaguucgacaagcuguacaucuggggcgugcaccaccccaucacggaccgcgagcagaccaaccucuacgugcgggcgagcggccgcgucaccguguccaccaagcggagccagcagacggugaucccgaacaucggguuccgccccuggguccggggccugagcucccgcaucagcaucuacuggaccaucgugaagcccggggacauccugcucaucaacuccaccggcaaccugaucgcgccccggggcuacuucaagauccgcaacggcaagagcuccaucaugcggagcgacgccccgaucgggaccugcuccagcgagugcaucacgcccaacggguccauccccaacgacaagcccuuccagaacgugaacaagaucaccuacggcgccugcccgcgcuacgucaagcagaacacccugaagcucgccaccgggaugcggaacgugcccgagaagcagacgcgcggcaucuucggcgccaucgccggguucaucgagaacggcugggaggggaugguggacggcugguacggguuccggcaccagaacagcgagggcaccggccaggccgccgaccugaaguccacccaggccgcgaucgaccagaucaacgggaagcugaaccgccucaucgagaagaccaacgagaaguuccaccagaucgagaaggaguucagcgaggucgagggccggauccaggaccuggagaaguacguggaggacacgaagaucgaccugugguccuacaacgccgagcuccugguggcccuggagaaccagcacaccaucgaccucaccgacagcgagaugaacaagcuguucgagaagacccgcaagcagcugcgcgagaacgccgaggacauggggaacggcugcuucaagaucuaccacaagugcgacaacgccugcaucggguccauccggaacggcacguacgaccacgacgucuaccgcgacgaggcgcucaacaaccgguuccagaucaagggcguggagcugaaguccggguacaaggacuggauccuguggaucuccuucgccaucagcugcuuccuccugugcgucgugcugcucggcuucaucaugugggccugccagaaggggaacauccgcugcaacaucugcaucuga

SEQ ID NO: 72592 - RNA, 1701 nt, Artificial Sequence
  derived and/or modified CDS sequence (opt1) from hemagglutinin__InfluenzaA__AFG99259
augaagaccaucaucgcccugagcuacaucuucugccucguguucgcccagaagcugcccggcaacgacaacuccaccgcgacgcugugccucgggcaccacgccgucccgaacggcacccuggugaagaccaucaccaacgaccagguggaggucacgaacgccaccgagcuggugcagagcuccagcaccgggcgcaucugcgacagcccccaccggauccucgacggcaagaacugcacccugaucgacgcccugcucggggacccccacugcgacggcuuccagaacgagaagugggaccuguucguggagcgcagcaaggccuacuccaacugcuaccccuacgacgucccggacuacgcgagccugcggucccucguggccagcuccggcacgcuggaguucaucaacgaggacuucaacuggaccggggugacccagagcggcggguccuacgccugcaagcgcggcagcgucaacuccuucuucagccggcugaacuggcuccacaaguccgaguacaaguaccccgcccugaacgugaccaugcccaacaacgggaaguucgacaagcuguacaucuggggcgugcaccaccccagcacggaccgcgagcagaccaaccucuacguccgggcguccggccgcgugaccgugagcaccaagcggagccagcagacggucaucccgaacaucgggucccgccccugggugcggggccugagcucccgcaucagcaucuacuggaccaucgugaagcccggggacauccugcucaucaacuccaccggcaaccugaucgcgccccggggcuacuucaagauccgcaccgggaaguccuccaucaugcggagcgacgccccgaucggcacgugcuccagcgagugcaucacccccaacggguccauccccaacgacaagcccuuccagaacgucaacaagaucaccuacggcgccugcccgcgcuacgugaagcagaacacccugaagcucgccacggggaugcggaacgugcccgagaagcagacccgcggcaucuucggcgccaucgccggguucaucgagaacggcugggaggggauggucgacggcugguacggguuccggcaccagaacagcgagggcaccggccaggccgccgaccugaaguccacccaggccgcgaucgaccagaucaacgggaagcugaaccgccucaucgagaagacgaacgagaaguuccaccagaucgagaaggaguucagcgagguggagggccggauccaggaccuggagaaguacguggaggacaccaagaucgaccugugguccuacaacgccgagcuccuggucgcccuggagaaccagcacaccaucgaccucaccgacagcgagaugaacaagcuguucgagaagacgcgcaagcagcugcgcgagaacgccgaggacauggggaacggcugcuucaagaucuaccacaagugcgacaacgccugcaucggguccauccggaacggcaccuacgaccacgacguguaccgcgacgaggcgcucaacaaccgguuccagaucaagggcgucgagcucaagagcggguacaaggacuggauccuguggaucuccuucgccaucagcugcuuccugcugugcguggugcugcucggcuucaucaugugggccugccagaaggggaacauccgcugcaacaucugcaucuga

SEQ ID NO: 72593 - RNA, 1701 nt, Artificial Sequence
  derived and/or modified CDS sequence (opt1) from hemagglutinin__InfluenzaA__AFG99270
augaagaccaucaucgcccugagcuacaucuucugccucguguucgcccagaagcugcccggcaacgacaacuccaccgcgacgcugugccucgggcaccacgccgucccgaacggcacccuggugaagaccaucaccaacgaccagaucgaggugacgaacgccaccgagcugguccagagcuccagcaccgggcgcaucugcgacagcccccaccggauccucgacggcaagaacugcacccugaucgacgcccugcucggggacccccacugcgacggcuuccagaacaaggagugggaccuguucguggagcgcagcaaggccuacuccaacugcuaccccuacgacgugccggacuacgcgagccugcggucccucgucgccagcuccggcacgcuggaguucaucaacgaggacuucaacuggaccgggguggcccagagcggcggguccuacgccugcaagcgcggcagcgugaacuccuucuucagccggcugaacuggcuccacaaguccgaguacaaguaccccgcgcugaacgucaccaugcccaacaacgggaaguucgacaagcuguacaucuggggcgugcaccaccccagcaccgaccgcgagcagacgaaccucuacgugcgggccuccggccgcgucaccgugagcaccaagcggagccagcagaccgugaucccgaacaucgggucccgccccuggguccggggccugagcucccgcaucagcaucuacuggacgaucgugaagcccggggacauccugcucaucaacuccaccggcaaccugaucgcgccccggggcuacuucaagauccgcaccggcaagagcuccaucaugcggagcgacgccccgaucgggaccugcuccagcgagugcaucacgcccaacggguccauccccaacgacaagcccuuccagaacgugaaccgcaucaccuacggcgccugcccgcgguacgucaagcagaacacccugaagcucgccaccgggaugcgcaacgugcccgagaagcagacgcggggcaucuucggcgccaucgccggguucaucgagaacggcugggaggggaugguggacggcugguacggguuccgccaccacaacagcgagggcaccggccaggccgccgaccugaaguccacccaggcggccaucgaccagaucaacgggaagcugaaccggcucaucgagaagaccaacgagaaguuccaccagaucgagaaggaguucagcgaggucgagggccgcauccaggaccuggagaaguacguggaggacacgaagaucgaccugugguccuacaacgccgagcuccugguggcccuggagaaccagcacaccaucgaccucaccgacagcgagaugaacaagcuguucgagaagacccgcaagcagcugcgggagaacgccgaggacauggggaacggcugcuucaagaucuaccacaagugcgacaacgcgugcaucggguccauccgcaacggcacguacgaccacgacgucuaccgggacgaggcccucaacaaccgcuuccagaucaagggcguggagcugaaguccggguacaaggacuggauccuguggaucuccuucgccaucagcugcuuccuccugugcgucgugcugcucggcuucaucaugugggccugccagaaggggaacauccggugcaacaucugcaucuga

SEQ ID NO: 72594 - RNA, 1701 nt, Artificial Sequence
  derived and/or modified CDS sequence (opt1) from hemagglutinin__InfluenzaA__AFG99281
augaagaccaucaucgcccugagcuacaucuucugccucguguucgcccagaagcugcccggcaacgacaacuccaccgcgacgcugugccucgggcaccacgccgucccgaacggcacccuggugaagaccaucaccaacgaccagaucgaggugacgaacgccaccgagcugguccagagcuccagcaccgggcgcaucugcgacagcccccaccggauccucgacggcaagaacugcacccugaucgacgcccugcucggggacccccacugcgacggcuuccagaacgagaagugggaccuguucguggagcgcagcaaggccuucuccaacugcuaccccuacgacgugccggacuacgcgagccugcggucccucgucgccagcuccggcacgcuggaguucaucaacgaggaguucaacuggaccggggugacccagagcggcggguccuacgccugcaagcgcggcagcgugaacuccuucuucagccggcugaacuggcuccacaaguccgaguacaaguaccccgcccugaacgucaccaugcccaacaacgggcgcuucgacaagcuguacaucuggggcgugcaccaccccagcacggaccgggagcagaccaaccucuacgugcgcgcguccggccgggucaccgugagcaccaagcgcagccagcagacggugaucccgaacaucgggccccggcccuggguccgcggccuguccagccggaucuccaucuacuggaccaucgugaagcccggggacauccugcucaucaacagcaccggcaaccugaucgccccgcgcggcuacuucaagauccacaccgggaaguccagcaucaugcgguccgacgcccccaucggcacgugcagcuccgagugcaucacccccaacgggagcauccccaacgacaagccguuccagaacgugaacaagaucaccuacggcgccugcccccgcuacgucaagcagaacacccugaagcucgccacggggaugcggaacgugcccgacaagcagacccgcggcaucuucggcgcgaucgccggguucaucgagaacggcugggaggggaugguggacggcugguacggguuccggcaccagaacuccgagggcaccggccaggccgccgaccugaaguccacccaggccgcgaucgaccagaucaacgggaagcugaaccgccucaucgagaagacgaacgagaaguuccaccagaucgagaaggaguucuccgaggucgagggccggauccaggaccuggagaaguacguggaggacaccaagaucgaccuguggagcuacaacgccgagcuccugguggcccuggagaaccagcacaccaucgaccucaccgacuccgagaugaacaagcuguucgagaagacgcgcaagcagcugcgcgagaacgccgaggacauggggaacggcugcuucaagaucuaccacaagugcgacaacgccugcaucgggagcauccggaacggcaccuacgaccacgacgucuaccgcgacgaggcgcucaacaaccgguuccagaucaagggcguggagcugaaguccggguacaaggacuggauccuguggaucagcuucgccaucuccugcuuccuccugugcgucgugcugcucggcuucaucaugugggccugccagaaggggaacauccgcugcaacaucugcaucuga

SEQ ID NO: 72595 - RNA, 1701 nt, Artificial Sequence
  derived and/or modified CDS sequence (opt1) from hemagglutinin__InfluenzaA__AFG99292
augaagaccaucaucgcccugagcuacaucuucugccucguguucgcccagaagcugcccggcaacgacaacuccaccgcgacgcugugccucgggcaccacgccgucccgaacggcacccuggugaagaccaucaccaacgaccagguggaggucacgaacgccaccgagcuggugcagagcuccagcaccgggcgcaucugcgacagcccccaccggauccucgacggcaagaacugcacccugaucgacgcccugcucggggacccccacugcgacggcuuccagaacgagaagugggaccuguucguggagcgcagcaaggccuacuccaacugcuaccccuacgacgucccggacuacgcgagccugcggucccucguggccagcuccggcacgcuggaguucaucaacgaggacuucaacuggaccggggugacccagagcggcggguccuacgccugcaagcgcggcagcgucaacuccuucuucagccggcugaacuggcuccacgaguccgaguacaaguaccccgcccugaacgugaccaugcccaacaacgggaaguucgacaagcuguacaucuggggcgugcaccaccccagcacggaccgcgagcagaccaaccucuacguccgggcguccggccgcgugaccgugagcaccaagcggagccagcagacggucaucccgaacaucgggucccgccccugggugcggggccugagcucccgcaucagcaucuacuggaccaucgugaagcccggggacauccugcucaucaacuccaccggcaaccugaucgcgccccggggcuacuucaagauccgcaccgggaaguccuccaucaugcggagcgacgccccgaucggcacgugcuccagcgagugcaucacccccaacggguccauccccaacgacaagcccuuccagaacgucaacaagaucaccuacggcgccugcccgcgcuacgugaagcagaacacccugaagcucgccacggggaugcggaacgugcccgagaagcagacccgcggcaucuucggcgccaucgccggguucaucgagaacggcugggaggggauggucgacggcugguacggguuccggcaccagaacagcgagggcaccggccaggccgccgaccugaaguccacccaggccgcgaucgaccagaucaacgggaagcugaaccgccucaucgagaagacgaacgagaaguuccaccagaucgagaaggaguucagcgagguggagggccggauccaggaccuggagaaguacguggaggacaccaagaucgaccugugguccuacaacgccgagcuccuggucgcccuggagaaccagcacaccaucgaccucaccgacagcgagaugaacaagcuguucgagaagacgcgcaagcagcugcgcgagaacgccgaggacauggggaacggcugcuucaagaucuaccacaagugcgacaacgccugcaucggguccauccggaacggcaccuacgaccacgacguguaccgcgacgaggcgcucaacaaccgguuccagaucaagggcgucgagcucaagagcggguacaaggacuggauccuguggaucuccuucgccaucagcugcuuccugcugugcguggugcugcucggcuucaucaugugggccugccagaaggggaacauccgcugcaacaucugcaucuga

SEQ ID NO: 72596 - RNA, 1701 nt, Artificial Sequence
  derived and/or modified CDS sequence (opt1) from hemagglutinin__InfluenzaA__AFG99303
augaagaccaucaucgcccugagcuacaucuucugccucguggucgcccagaagcugcccggcaacgacaacuccaccgcgacgcugugccucgggcaccacgccgugccgaacggcacccuggugaagaccaucaccaacgaccagaucgaggucacgaacgccaccgagcuggugcagagcuccagcaccgggcgcaucugcgacagcccccaccggauccucgacggcaagaacugcacccugaucgacgcccugcucggggacccccacugcgacggcuuccagaacaaggagugggaccuguucguggagcgcagcaaggccuacuccaacugcuaccccuacgacgucccggacuacgcgagccugcggucccucguggccagcuccggcacgcuggaguucaucaacgaggacuucaacuggaccgggguggcccagagcggcggguccuacgccugcaagcgcggcagcgucaacuccuucuucagccggcugaacuggcuccacgaguccgaguacaaguaccccgcgcugaacgugaccaugcccaacaacgggaaguucgacaagcuguacaucuggggcgugcaccaccccagcaccgaccgcgagcagacgaaccucuacguccgggccuccggccgcgugaccgugagcaccaagcggagccagcagaccgucaucccgaacaucgggucccgccccugggugcggggccugagcucccgcaucagcaucuacuggacgaucgugaagcccggggacauccugcucaucaacuccaccggcaaccugaucgcgccccggggcuacuucaagauccgcaccggcaagagcuccaucaugcggagcgacgccccgaucgggaccugcuccagcgagugcaucacgcccaacggguccaucagcaacgacaagcccuuccagaacgucaaccgcaucaccuacggcgccugcccccgguacgugaagcagaacacccugaagcucgccaccgggaugcgcaacgugccggagaagcagacgcggggcaucuucggcgccaucgccggguucaucgagaacggcugggaggggauggucgacggcugguacggguuccgccaccagaacuccgagggcaccggccaggccgccgaccugaaguccacccaggcggccaucgaccagaucaacgggaagcugaaccggcucaucgagaagaccaacgagaaguuccaccagaucgagaaggaguucuccgagguggagggccgcauccaggaccuggagaaguacguggaggacacgaagaucgaccuguggagcuacaacgccgagcuccuggucgcccuggagaaccagcacaccaucgaccucaccgacuccgagaugaacaagcuguucgagaagacccgcaagcagcugcgggagaacgccgaggacauggggaacggcugcuucaagaucuaccacaagugcgacaacgcgugcaucgggagcauccgcaacggcacguacgaccacgacguguaccgggacgaggcccucaacaaccgcuuccagaucaagggcgucgagcugaaguccggguacaaggacuggauccuguggaucagcuucgccaucagcugcuuccuccugugcguggugcugcucggcuucaucaugugggccugccagaaggggaacauccggugcaacaucugcaucuga

SEQ ID NO: 72597 - RNA, 1701 nt, Artificial Sequence
  derived and/or modified CDS sequence (opt1) from hemagglutinin__InfluenzaA__AFG99314
augaagaccaucaucgcccugagcuacaucuucugccucguguucgcccagaagcugcccggcaacgacaacuccaccgcgacgcugugccucgggcaccacgccgucccgaacggcacccuggugaagaccaucaccaacgaccagaucgaggugacgaacgccaccgagcugguccagagcuccagcaccgggcgcaucugcgacagcccccaccggauccucgacggcaagaacugcacccugaucgacgcccugcucggggacccccacugcgacagcuuccagaacgagaagugggaccuguucguggagcgcuccaaggccuacagcaacugcuaccccuacgacgugccggacuacgcgucccugcggagccucgucgccuccagcggcacgcuggaguucaucaacgaggacuucaacuggaccggcgugacccaguccgggggcagcuacgccugcaagcgcggguccgugaacagcuucuucucccggcugaacuggcuccacgagagcgaguacaaguaccccgcccugaacgucaccaugcccaacaacggcaaguucgacaagcuguacaucugggggauccaccaccccuccacggaccgcgagcagaccaaccucuacgugcgggcgagcggccgcgugaccgucagcaccaagcggucccagcagacggugaucccgaacaucggcagccgccccugggugcgggggcuguccagccgcaucuccaucuacuggaccaucgucaagcccggcgacauccugcucaucaacagcaccgggaaccugaucgcgccccggggcuacuucaagcugcgcaccggcaaguccagcaucaugcgguccgacgccccgaucgggacgugcagcuccgagugcaucacccccaacggcagcauccccaacgacaagcccuuccagaacgugaacaagaucaccuacggggccugcccgcgcuacgugaagcagaacacccucaagcuggccacgggcaugcggaacguccccgagaagcagacccgcgggaucuucggcgccaucgccggcuucaucgagaacgggugggagggcaugguggacgggugguacggcuuccggcaccagaacuccgaggggaccggccaggccgccgaccugaaguccacccaggccgcgaucgaccagaucaacggcaagcucaaccgccugaucgagaagacgaacgagaaguuccaccagaucgagaaggaguucuccgagguggaggggcggauccaggaccuggagaaguacgucgaggacaccaagaucgaccucuggagcuacaacgccgagcugcugguggcccucgagaaccagcacaccaucgaccugaccgacuccgagaugaacaagcuguucgagaagacgcgcaagcagcuccgcgagaacgccgaggacaugggcaacgggugcuucaagaucuaccacaagugcgacaacgccugcaucggcagcauccggaacgggaccuacgaccacgacguguaccgcgacgaggcgcugaacaaccgguuccagaucaagggcgucgagcugaaguccggcuacaaggacuggauccucuggaucagcuucgccaucagcugcuuccugcugugcgugguccuccugggguucaucaugugggccugccagaagggcaacauccgcugcaacaucugcaucuga

SEQ ID NO: 72598 - RNA, 1701 nt, Artificial Sequence
  derived and/or modified CDS sequence (opt1) from hemagglutinin__InfluenzaA__AFG99336
augaagaccaucaucgcccugagcuacaucuucugccucguguucgcccagaagcugcccggcaacgacaacuccaccgcgacgcugugccucgggcaccacgccgucccgaacggcacccuggugaagaccaucaccaacgaccagaucgaggugacgaacgccaccgagcugguccagagcuccagcaccgggcgcaucugcgacagcccccaccggauccucgacggcaagaacugcacccugaucgacgcccugcucggggacccccacugcgacggcuuccagaacaaggagugggaccuguucguggagcgcagcaaggccuacuccaacugcuaccccuacgacgugccggacuacgcgagccugcggucccucgucgccagcuccggcacgcuggaguucaucaacgaggacuucaacuggaccgggguggcccagagcggcggguccuacgccugcaagcgcggcagcgugaacuccuucuucagccggcugaacuggcuccacaaguccgaguacaaguaccccgcgcugaacgucaccaugcccaacaacgggaaguucgacaagcuguacaucuggggcgugcaccaccccagcaccgaccgcgagcagacgaaccucuacgugcgggccuccggccgcgucaccgugagcaccaagcggagccagcagaccgugaucccgaacaucgggucccgccccuggguccggggccugagcucccgcaucagcaucuacuggacgaucgugaagcccggggacauccugcucaucaacuccaccggcaaccugaucgcgccccggggcuacuucaagauccgcaccggcaagagcuccaucaugcggagcgacgccccgaucgggaccugcuccagcgagugcaucacgcccaacggguccauccccaacgacaagcccuuccagaacgugaaccgcaucaccuacggcgccugcccgcgguacgucaagcagaacacccugaagcucgccaccgggaugcgcaacgugcccgagaagcagacgcggggcaucuucggcgccaucgccggguucaucgagaacggcugggaggggaugguggacggcugguacggguuccgccaccagaacagcgagggcaccggccaggccgccgaccugaaguccacccaggcggccaucgaccagaucaacgggaagcugaaccggcucaucgagaagaccaacgagaaguuccaccagaucgagaaggaguucagcgaggucgagggccgcauccaggaccuggagaaguacguggaggacacgaagaucgaccugugguccuacaacgccgagcuccugguggcccuggagaaccagcacaccaucgaccucaccgacagcgagaugaacaagcuguucgagaagacccgcaagcagcugcgggagaacgccgaggacauggggaacggcugcuucaagaucuaccacaagugcgacaacgcgugcaucggguccauccgcaacggcacguacgaccacgacgucuaccgggacgaggcccucaacaaccgcuuccagaucaagggcguggagcugaaguccggguacaaggacuggauccuguggaucuccuucgccaucagcugcuuccuccugugcgucgugcugcucggcuucaucaugugggccugccagaaggggaacauccggugcaacaucugcaucuga

SEQ ID NO: 72599 - RNA, 1701 nt, Artificial Sequence
  derived and/or modified CDS sequence (opt1) from hemagglutinin__InfluenzaA__AFG99347
augaagaccaucaucgcccugagcuacaucuucugccucguguucgcccagaagcugcccggcaacgacaacuccaccgcgacgcugugccucgggcaccacgccgucccgaacggcacccuggugaagaccaucaccaacgaccagaucgaggugacgaacgccaccgagcugguccagagcuccagcaccgggcgcaucugcgacagcccccaccggauccucgacggcaagaacugcacccugaucgacgcccugcucggggacccccacugcgacggcuuccagaacaaggagugggaccuguucguggagcgcagcaaggccuacuccaacugcuaccccuacgacgugccggacuacgcgagccugcggucccucgucgccagcuccggcacgcuggaguucaucaacgaggacuucaacuggaccgggguggcccagagcggcggguccuacgccugcaagcgcggcagcgugaacuccuucuucagccggcugaacuggcuccacaagcccgaguacaaguaccccgcgcugaacgucaccaugcccaacaacgggaaguucgacaagcuguacaucuggggcgugcaccacccguccaccgaccgcgagcagacgaaccucuacgugcgggccagcggccgcgucaccguguccaccaagcggagccagcagaccgugauccccaacaucgggagccgccccuggguccggggccuguccagccgcaucuccaucuacuggacgaucgugaagcccggggacauccugcucaucaacagcaccggcaaccugaucgccccgcggggcuacuucaagauccgcaccgggaaguccagcaucaugcgguccgacgcccccaucgggaccugcagcuccgagugcaucacgcccaacggcagcauccccaacgacaagccguuccagaacgugaaccgcaucaccuacggcgccugcccccgguacgucaagcagaacacccugaagcucgcgaccgggaugcgcaacgugcccgagaagcagacgcggggcaucuucggcgccaucgccggguucaucgagaacggcugggaggggaugguggacggcugguacggguuccgccaccagaacuccgagggcaccggccaggccgccgaccugaaguccacccaggcggccaucgaccagaucaacgggaagcugaaccggcucaucgacaagaccaacgagaaguuccaccagaucgagaaggaguucuccgaggucgagggccgcauccaggaccuggagaaguacguggaggacacgaagaucgaccuguggagcuacaacgccgagcuccugguggcccuggagaaccagcacaccaucgaccucaccgacuccgagaugaacaagcuguucgagaagacccgcaagcagcugcgggagaacgccgaggacauggggaacggcugcuucaagaucuaccacaagugcgacaacgcgugcaucgggagcauccgcaacggcacguacgaccacgacgucuaccgggacgaggcccucaacaaccgcuuccagaucaagggcguggagcugaaguccggguacaaggacuggauccuguggaucagcuucgccaucuccugcuuccuccugugcgucgugcugcucggcuucaucaugugggccugccagaaggggaacauccggugcaacaucugcaucuga

SEQ ID NO: 72600 - RNA, 1701 nt, Artificial Sequence
  derived and/or modified CDS sequence (opt1) from hemagglutinin__InfluenzaA__AFG99358
augaagaccaucaucgcccugagccacauccucugccugguguucgcccagaagcugcccggcaacgacaacuccaccgcgacgcucugccuggggcaccacgccgucccgaacggcacccuggugaagaccaucaccaacgaccagaucgaggugacgaacgccaccgagcucguccagagcuccagcaccgggcgcaucugcgacagcccccaccggauccuggacggcaagaacugcacccugaucgacgcccuccugggggacccccacugcgacggcuuccagaacaaggagugggaccuguucguggagcgcagcaaggccuacuccaacugcuaccccuacgacgugccggacuacgcgagccuccggucccuggucgccagcuccggcacgcuggaguucaucaacgaggacuucaacuggaccgggguggcccaggacggcgggagcuacgccugcaagcgcggcuccgugaacagcuucuucucccggcucaacuggcugcacaagcuggaguacaaguaccccgcgcucaacgucaccaugcccaacaacgggaaguucgacaagcuguacaucuggggcgugcaccaccccagcaccgacuccgaccagacgagccuguacgugcgcgccuccggccgggucaccgugagcaccaagcgcagccagcagaccgugacgccgaacaucgggucccggcccuggguccgcggccucagcucccggaucagcaucuacuggaccaucgugaagcccggggacauccugcugaucaacuccaucggcaaccucaucgcgccccgcggcuacuucaagauccggaacgggaaguccuccaucaugcgcagcgacgugccgaucggcaacugcuccagcgagugcaucacccccaacggguccauccccaacgacaagcccuuccagaacgucaaccggaucaccuacggcgccugcccgcgcuacgugaagcagaacacgcugaagcuggccaccgggaugcggaacgugcccgagaagcagacccgcggcaucuucggcgccaucgccggguucaucgagaacggcugggaggggauggucgacggcugguacggguuccggcaccagaacagcgagggcaccggccaggccgccgaccucaaguccacgcaggccgcgaucgaccagaucaacgggaagcugaaccgccugaucgagaagaccaacgagaaguuccaccagaucgagaaggaguucagcgagguggagggccggauccaggaccucgagaaguacguggaggacaccaagaucgaccugugguccuacaacgccgagcugcucgucgcccuggagaaccagcacaccaucgaccugacggacagcgagaugaacaagcuguucgagaagacccgcaagcagcuccgcgagaacgccgaggacauggggaacggcugcuucaagaucuaccacaagugcgacaacgccugcaucggguccauccggaacggcaccuacgaccacgacguguaccgcgacgaggcgcugaacaaccgguuccagaucaagggcgucgagcucaagagcggguacaaggacuggauccuguggaucuccuucgccaucagcugcuuccugcucugcguggugcugcugggcuucaucaugugggccugccagaaggggaacauccgcugcaacaucugcaucuga

SEQ ID NO: 72601 - RNA, 1701 nt, Artificial Sequence
  derived and/or modified CDS sequence (opt1) from hemagglutinin__InfluenzaA__AFG99369
augaagaccaucaucgcccugagcuacaucuucugccucguguucgcccagaagcugcccggcaacgacaacuccaccgcgacgcugugccucgggcaccacgccgucccgaacggcacccuggugaagaccaucaccaacgaccagaucgaggugacgaacgccaccgagcugguccagagcuccagcaccgggcgcaucugcgacagcccccaccggauccucgacggcaagaacugcacccugaucgacgcccugcucggggacccccacugcgacggcuuccagaacaaggagugggaccuguucguggagcgcagcaaggccuacuccaacugcuaccccuacgacgugccggacuacgcgagccugcggucccucgucgccagcuccggcacgcuggaguucaucaacgaggacuucaacugggccgggguggcccagagcggcggguccuacgcgugcaagcgcggcagcgugaacuccuucuucagccggcugaacuggcuccacgaguccgaguacaaguaccccgcccugaacgucaccaugcccaacaacgggaaguucgacaagcuguacaucuggggcgugcaccaccccagcaccgaccgcgagcagaccaaccucuacgugcgggccuccggccgcgucacggugagcaccaagcggagccagcagaccgugaucccgaacaucgggucccgccccuggguccggggccugagcucccgcaucagcaucuacuggaccaucgugaagcccggggacauccugcucaucaacuccacgggcaaccugaucgcgccccggggcuacuucaagauccgcaccggcaagagcuccaucaugcggagcgacgccccgaucgggaccugcuccagcgagugcaucacccccaacggguccauccccaacgacaagcccuuccagaacgugaaccgcaucacguacggcgccugcccgcgguacgucaagcagaacacccugaagcucgccaccgggaugcgcaacgugcccgagaagcagacccggggcaucuucggcgccaucgccggguucaucgagaacggcugggaggggaugguggacggcugguacggguuccgccaccagaacagcgagggcacgggccaggccgcggaccugaaguccacccaggccgccaucgaccagaucaacgggaagcugaaccggcucaucgagaagaccaacgagaaguuccaccagaucgagaaggaguucagcgaggucgagggccgcauccaggaccuggagaaguacguggaggacaccaagaucgaccugugguccuacaacgccgagcuccugguggcccuggagaaccagcacacgaucgaccucaccgacagcgagaugaacaagcuguucgagaagacccgcaagcagcugcgggagaacgcggaggacauggggaacggcugcuucaagaucuaccacaagugcgacaacgccugcaucggguccauccgcaacggcaccuacgaccacgacgucuaccgggacgaggcccucaacaaccgcuuccagaucaagggcguggagcugaaguccggguacaaggacuggauccuguggaucuccuucgccacgagcugcuuccuccugugcgucgugcugcucggcuucaucaugugggccugccagaaggggaacauccggugcaacaucugcaucuga

SEQ ID NO: 72602 - RNA, 1701 nt, Artificial Sequence
  derived and/or modified CDS sequence (opt1) from hemagglutinin__InfluenzaA__AFG99380
augaagaccaucaucgcccugagcuacaucuucugccucguguucgcccagaagcugcccggcaacgacaacuccaccgcgacgcugugccucgggcaccacgccgucccgaacggcacccuggugaagaccaucaccaacgaccagaucgaggugacgaacgccaccgagcugguccagagcuccagcaccgggcgcaucugcgacagcccccaccggauccucgacggcaagaacugcacccugaucgacgcccugcucggggacccccacugcgacggcuuccagaacaaggagugggaccuguucguggagcgcagcaaggccuacuccaacugcuaccccuacgacgugccggacuacgcgagccugcggucccucgucgccagcuccggcacgcuggaguucaucaacgaggacuucaacuggaccgggguggcccagagcggcggguccuacgccugcaagcgcggcagcgugaacuccuucuucagccggcugaacuggcuccacgaguccgaguacaaguaccccgcgcugaacgucaccaugcccaacaacgggaaguucgacaagcuguacaucuggggcgugcaccaccccagcaccgaccgcgagcagacgaaccucuacgugcgggccuccggccgcgucaccgugagcaccaagcggagccagcagaccgugaucccgaacaucgggucccgccccuggguccggggccugagcucccgcaucagcaucuacuggacgaucgugaagcccggggacauccugcucaucaacuccaccggcaaccugaucgcgccccggggcuacuucaagauccgcaccggcaagagcuccaucaugcggagcgacgccccgaucgggaccugcuccagcgagugcaucacgcccaacggguccauccccaacgacaagcccuuccagaacgugaaccgcaucaccuacggcgccugcccgcgguacgucaagcagaacacccugaagcucgccaccgggaugcgcaacgugcccgagaagcagacgcggggcaucuucggcgccaucgccggguucaucgagaacggcugggaggggaugguggacggcugguacggguuccgccaccagaacagcgagggcaccggccaggccgccgaccugaaguccacccaggcggccaucgaccagaucaacgggaagcugaaccggcucaucgagaagaccaacgagaaguuccaccagaucgagaaggaguucagcgaggucgagggccgcauccaggaccuggagaaguacguggaggacacgaagaucgaccugugguccuacaacgccgagcuccugguggcccuggagaaccagcacaccaucgaccucaccgacagcgagaugaacaagcuguucgagaagacccgcaagcagcugcgggagaacgccgaggacauggggaacggcugcuucaagaucuaccacaagugcgacaacgcgugcaucggguccauccgcaacggcacguacgaccacgacgucuaccgggacgaggcccucaacaaccgcuuccagaucaagggcguggagcugaaguccggguacaaggacuggauccuguggaucuccuucgccaucagcugcuuccuccugugcgucgugcugcucggcuucaucaugugggccugccagaaggggaacauccggugcaacaucugcaucuga

SEQ ID NO: 72603 - RNA, 1701 nt, Artificial Sequence; identical to SEQ ID NO: 72602
  derived and/or modified CDS sequence (opt1) from hemagglutinin__InfluenzaA__AFG99391

SEQ ID NO: 72604 - RNA, 1701 nt, Artificial Sequence
  derived and/or modified CDS sequence (opt1) from hemagglutinin__InfluenzaA__AFG99402
augaagaccaucaucgcccugagcuacaucuucugccucguguucgcccagaagcugcccggcaacgacaacuccaccgcgacgcugugccucgggcaccacgccgucccgaacggcacccuggugaagaccaucaccaacgaccagaucgaggugacgaacgccaccgagcugguccagagcuccagcaccgggcgcaucugcgacagcccccaccggauccucgacggcaagaacugcacccugaucgacgcccugcucggggacccccacugcgacggcuuccagaacgagaagugggaccuguucguggagcgcagcaaggccuacuccaacugcuaccccuacgacgugccggacuacgcgagccugcggucccucgucgccagcuccggcacgcuggaguucaucaacgaggacuucaacuggaccggggugacccagagcggcggguccuacgccugcaagcgcggcagcgugaacuccuucuucagccggcugaacuggcuccacaaguccgaguacaaguaccccgcccugaacgucaccaugcccaacaacgggaaguucgacaagcuguacaucuggggcgugcaccaccccgugacggaccgcgagcagaccaaccucuacguccgggcgagcggccgcgugaccguguccaccaagcggagccagcagacggucaucccgaacaucgggagccgccccugggugcggggccuguccagccgcaucuccaucuacuggaccaucgugaagcccggggacauccugcucaucaacagcaccggcaaccugaucgcgccccggggcuacuucaagauccgcaccgggaaguccagcaucaugcgguccgacgccccgaucggcacgugcagcuccgagugcaucacccccaacgggagcauccccaacgacaagcccuuccagaacgucaacaagaucaccuacggcgccugcccgcgcuacgugaagcagaacacccugaagcucgccacggggaugcggaacgugcccgagaagcagacccgcggcaucuucggcgccaucgccggguucaucgagaacggcugggaggggauggucgacggcugguacggguuccggcaccagaacuccgagggcaccggccaggccgccgaccugaaguccacccaggccgcgaucgaccagaucaacgggaagcugaaccgccucaucgagaagacgaacgagaaguuccaccagaucgagaaggaguucuccgagguggagggccggauccaggaccuggagaaguacguggaggacaccaagaucgaccuguggagcuacaacgccgagcuccuggucgcccuggagaaccagcacaccaucgaccucaccgacuccgagaugaacaagcuguucgagaagacgcgcaagcagcugcgcgagaacgccgaggacauggggaacggcugcuucaagaucuaccacaagugcgacaacgccugcaucgggagcauccggaacggcaccuacgaccacgacguguaccgcgacgaggcgcucaacaaccgguuccagaucaagggcgucgagcugaaguccggguacaaggacuggauccuguggaucagcuucgccaucuccugcuuccuccugugcguggugcugcucggcuucaucaugugggccugccagaaggggaacauccgcugcaacaucugcaucuga

SEQ ID NO: 72605 - RNA, 1701 nt, Artificial Sequence
  derived and/or modified CDS sequence (opt1) from hemagglutinin__InfluenzaA__AFG99413
augaagaccaucaucgcccugagcuacaucuucugccucguguucgcccagaagcugcccggcaacgacaacuccaccgcgacgcugugccucgggcaccacgccgucccgaacggcacccuggugaagaccaucaccaacgaccagaucgaggugacgaacgccaccgagcugguccagagcuccagcaccgggcgcaucugcgacagcccccaccggauccucgacggcaagaacugcacccugaucgacgcccugcucggggacccccacugcgacggcuuccagaacaaggagugggaccuguucguggagcgcagcaaggccuacuccaacugcuaccccuacgacgugccggacuacgcgagccugcggucccucgucgccagcuccggcacgcuggaguucaucaacgaggacuucaacuggaccgggguggcccagagcggcggguccuacgccugcaagcgcggcagcgugaacuccuucuucagccggcugaacuggcuccacgaguccgaguacaaguaccccgcgcugaacgucaccaugcccaacaacgggaaguucgacaagcuguacaucuggggcgugcaccaccccagcaccgaccgcgagcagacgaaccucuacgugcgggccuccggccgcgucaccgugagcaccaagcggagccagcagaccgugaucccgaacaucgggucccgccccuggguccggggccugagcucccgcaucagcaucuacuggacgaucgugaagcccggggacauccugcucaucaacuccaccggcaaccugaucgcgccccggggcuacuucaagauccgcaccggcaagagcuccaucaugcggagcgacgccccgaucgggaccugcuccagcgagugcaucacgcccaacggguccauccccaacgacaagcccuuccagaacgugaaccgcaucaccuacggcgccugcccgcgguacgucaagcagaacacccugaagcucgccaccgggaugcgcaacgugcccgagaagcagacgcggggcaucuucggcgccaucgccggguucaucgagaacggcugggaggggaugguggacggcugguacggguuccgccaccagaacagcgagggcaccggccaggccgccgaccugaaguccacccaggcggccaucgaccagaucaacgggaagcugaaccggcucaucgagaagaccaacgagaaguuccaccagaucgagaaggaguucagcgaggucgagggccgcauccaggaccuggagaaguacguggaggacacgaagaucgaccugugguccuacaacgccgagcuccugguggcccuggagaaccagcacaccaucgaccucaccgacagcgagaugaacaagcuguucgagaagacccgccggcagcugcgcgagaacgccgaggacauggggaacggcugcuucaagaucuaccacaagugcgacaacgcgugcaucggguccauccggaacggcacguacgaccacgacgucuaccgcgacgaggcccucaacaaccgguuccagaucaagggcguggagcugaaguccggguacaaggacuggauccuguggaucuccuucgccaucagcugcuuccuccugugcgucgugcugcucggcuucaucaugugggccugccagaaggggaacauccgcugcaacaucugcaucuga

SEQ ID NO: 72606 - RNA, 1701 nt, Artificial Sequence
  derived and/or modified CDS sequence (opt1) from hemagglutinin__InfluenzaA__AFG99424
augaagaccaucaucgcccugagcuacaucuucugccucguguucgcccagaagcugcccggcaacgacaacuccaccgcgacgcugugccucgggcaccacgccgucccgaacggcacccuggugaagaccaucaccaacgaccagaucgaggugacgaacgccaccgagcugguccagagcuccagcaccgggcgcaucugcgacagcccccaccggauccucgacggcaagaacugcacccugaucgacgcccugcucggggacccccacugcgacggcuuccagaacaaggagugggaccuguucguggagcgcagcaaggccuacuccaacugcuaccccuacgacgugccggacuacgcgagccugcggucccucgucgccagcuccggcacgcuggaguucaucaacgaggacuucaacuggaccgggguggcccagagcggcggguccuacgccugcaagcgcggcagcgugaacuccuucuucagccggcugaacuggcuccacaaguccgaguacaaguaccccgcgcugaacgucaccaugcccaacaacgggaaguucgacaagcuguacaucuggggcgugcaccaccccagcaccgaccgcgagcagacgaaccucuacgugcgggccuccggccgcgucaccgugagcaccaagcggagccagcagaccgugaucccgaacaucgggucccgccccuggguccggggccugagcucccgcaucagcaucuacuggacgaucgugaagcccggggacauccugcucaucaacuccaccggcaaccugaucgcgccccggggcuacuucaagauccgcaccggcaagagcuccaucaugcggagcgacgccccgaucgggaccugcuccagcgagugcaucacgcccaacggguccauccccaacgacaagcccuuccagaacgugaaccgcaucaccuacggcgccugcccgcgguacgucaagcagaacacccugaagcucgccaccgggaugcgcaacgugcccgagaagcagacgcggggcaucuucggcgccaucgccggguucaucgagaacggcugggaggggaugguggacggcugguacggguuccgccaccagaacagcgagggcaccggccaggccgccgaccugaaguccacccaggcggccaucgaccagaucaacgggaagcugaaccggcucaucgagaagaccaacgagaaguuccaccagaucgagaaggaguucagcgaggucgagggccgcauccaggaccuggagaaguacguggaggacacgaagaucgaccugugguccuacaacgccgagcuccugguggcccuggagaaccagcacaccaucgaccucaccgacagcgagaugaacaagcuguucgagaagacccgccggcagcugcgcgagaacgccgaggacauggggaacggcugcuucaagaucuaccacaagugcgacaacgcgugcaucggguccauccggaacggcacguacgaccacgacgucuaccgcgacgaggcccucaacaaccgguuccagaucaagggcguggagcugaaguccggguacaaggacuggauccuguggaucuccuucgccaucagcugcuuccuccugugcgucgugcugcucggcuucaucaugugggccugccagaaggggaacauccgcugcaacaucugcaucuga

SEQ ID NO: 72607 - RNA, 1701 nt, Artificial Sequence
  derived and/or modified CDS sequence (opt1) from hemagglutinin__InfluenzaA__AFG99435
augaagaccaucaucgcccugagcuacaucuucugccucguguucgcccagaagcugcccggcaacgacaacuccaccgcgacgcugugccucgggcaccacgccgucccgaacggcacccuggugaagaccaucaccaacgaccagaucgaggugacgaacgccaccgagcugguccagaacagcuccaccgggcgcaucugcgacagcccccaccggauccucgacggcaagaacugcacccugaucgacgcccugcucggggacccccacugcgacggccugcagaacaaggagugggaccuguucguggagcgcuccaaggccuacagcaacugcuaccccuacgacgugccggacuacgcgucccuccggagccuggucgccuccagcggcacgcuggaguucaccaaggaggacuucaacuggaccgggguggcccaguccggcgggagcuacgccugcaagcgcggcuccgugaacagcuucuucucccggcucaacuggcugcacgagagcgaguacaaguaccccgcgcugaacgucaccaugcccaacaacgggaaguucgacaagcucuacaucuggggcgugcaccaccccuccacggaccgcgagcagaccaaccuguacgugcgggccagcggccgcgucaccguguccaccaagcggagccagcagacggugaucccgaacaucgggagccgccccuggguccggggccuguccagccgcaucuccaucuacuggaccaucgugaagcccggggacauccuccugaucaacagcaccggcaaccugaucgcgccccggggcuacuucaagauccgcaccgggaaguccagcaucaugcgguccgacgccccgaucggcacgugcagcuccgagugcaucacccccaacgggagcauccccaacgacaagcccuuccagaacgugaaccgcaucaccuacggcgccugcccgcgguacgucaagcagaacacccucaagcuggccacggggaugcgcaacgugcccgagaagcagacccggggcaucuucggcgccaucgccggguucaucgagaacggcugggaggggaugguggacggcugguacggguuccgccaccagaacuccgagggcaccggccaggccgccgaccucaagagcacccaggcggccaucgaccagaucaacgggaagcugaaccggcugaucgagaagacgaacgagaaguuccaccagaucgagaaggaguucuccgaggucgagggccgcauccaggaccuggagaaguacguggaggacaccaagaucgaccucuggagcuacaacgccgagcugcugguggcccucgagaaccagcacaccaucgaccugaccgacuccgagaugaacaagcuguucgagaagacgcgcaagcagcuccgggagaacgccgaggacauggggaacggcugcuucaagaucuaccacaagugcgacaacgcgugcaucgggagcauccgcaacggcaccuacgaccacgacgucuaccgggacgaggcccugaacaaccgcuuccagaucaagggcguggagcugaaguccggguacaaggacuggauccucuggaucagcuucgccaucuccugcuuccugcugugcgucgugcuccugggcuucaucaugugggccugccagaaggggaacauccggugcaacaucugcaucuga

SEQ ID NO: 72608 - RNA, 1701 nt, Artificial Sequence; identical to SEQ ID NO: 72607
  derived and/or modified CDS sequence (opt1) from hemagglutinin__InfluenzaA__AFG99446

SEQ ID NO: 72609 - RNA, 1701 nt, Artificial Sequence
  derived and/or modified CDS sequence (opt1) from hemagglutinin__InfluenzaA__AFG99457
augaagaccaucaucgcccugagcuacauccucugccugguguucgcccagaagcugcccggcaacgacaacuccaccgcgacgcucugccuggggcaccacgccgucccgaacggcacccuggugaagaccaucaccaacgaccagaucgaggugacgaacgccaccgagcucguccagagcuccagcaccgggcgcaucugcgacagcccccaccggauccuggacggcgagaacugcacccugaucgacgcccuccugggggacccccacugcgacggcuuccagaacaaggagugggaccuguucguggagcgcagcaaggccuacuccaacugcuaccccuacgacgugccggacuacgcgagccuccggucccuggucgccagcuccggcacgcuggaguucaucaacgaggacuucaacuggaccgggguggcccagagcggcggguccuacgccugcaagcgcggcagcgugaacuccuucuucagccggcucaacuggcugcacaaguccgaguacaaguaccccgcgcugaacgucaccaugcccaacaacgggaaguucgacaagcucuacaucuggggcgugcaccaccccagcaccgaccgcgaccagacgucccuguacgugcgggccagcggccgcgucaccgugagcaccaagcggucccagcagaccgugaucccgaacaucgggagccgccccuggguccggggccaguccagccgcaucuccaucuacuggacgaucgugaagcccggggacauccugcucaucaacagcaccggcaaccugaucgcgccccggggcuacuucaagauccgcaacgggaaguccagcaucaugcgguccgacgccccgaucgggaccugcagcuccgagugcaucacccccaacggcagcauccccaacgacaagcccuuccagaacgugaaccgcaucacguacggcgccugcccgcgguacgucaagcagaacacccugaagcucgccaccgggaugcgcaacgugcccgagaagcagacccggggcaucuucggcgccaucgccggguucaucgagaacggcugggaggggaugguggacggcugguacggguuccgccaccagaacuccgagggcacgggccaggccgccgaccugaaguccacccaggcggccaucgaccagaucaacgggaagcugaaccggcucaucgagaagaccaacgagaaguuccaccagaucgagaaggaguucuccgaggucgagggccgcauccaggaccuggagaaguacguggaggacaccaagaucgaccuguggagcuacaacgccgagcuccugguggcccuggagaaccagcacacgaucgaccucaccgacuccgagaugaacaagcuguucgagaagacccgcaagcagcugcgggagaacgccgaggacauggggaacggcugcuucaagaucuaccacaagugcgacaacgcgugcaucgggagcauccgcaacggcaccuacgaccacgacgucuaccgggacgaggcccucaacaaccgcuuccagaucaagggcguggagcugaaguccggguacaaggacuggauccuguggaucagcuucgccaucagcugcuuccuccugugcgucgugcugcucggcuucaucaugugggccugccagaaggggaacauccggugcaacaucugcaucuga

SEQ ID NO: 72610 - RNA, 1701 nt, Artificial Sequence
  derived and/or modified CDS sequence (opt1) from hemagglutinin__InfluenzaA__AFG99468
augaagaccaucaucgcccugagcuacaucuucugccucguguucgcccagaagcugcccggcaacgacaacuccaccgcgacgcugugccucgggcaccacgccgucccgaacggcacccuggugaagaccaucaccaacgaccagaucgaggugacgaacgccaccgagcugguccagagcuccagcaccgggcgcaucugcgacagcccccaccggauccucgacggcaagaacugcacccugaucgacgcccugcucggggacccccacugcgacggcuuccagaacaaggagugggaccuguucguggagcgcagcaaggccuacuccaacugcuaccccuacgacgugccggacuacgcgagccugcggucccucgucgccagcuccggcacgcuggaguucaucaacgaggacuucaacuggaccgggguggcccagagcggcggguccuacgccugcaagcgcggcagcgugaacuccuucuucagccggcugaacuggcuccacgaguccgaguacaaguaccccgcgcugaacgucaccaugcccaacaacgggaaguucgacaagcuguacaucuggggcgugcaccaccccagcaccgaccgcgagcagacgaaccucuacgugcgggccuccggccgcgucaccgugagcaccaagcggagccagcagaccgugaucccgaacaucgggucccgccccuggguccggggccugagcucccgcaucagcaucuacuggacgaucgugaagcccggggacauccugcucaucaacuccaccggcaaccugaucgcgccccggggcuacuucaagauccgcaccggcaagagcuccaucaugcggagcgacgccccgaucgggaccugcuccagcgagugcaucacgcccaacggguccauccccaacgacaagcccuuccagaacgugaaccgcaucaccuacggcgccugcccgcgguacgucaagcagaacacccugaagcucgccaccgggaugcgcaacgugcccgagaagcagacgcggggcaucuucggcgccaucgccggguucaucgagaacggcugggaggggaugguggacggcugguacggguuccgccaccagaacagcgagggcaccggccaggccgccgaccugaaguccacccaggcggccaucgaccagaucaacgggaagcugaaccggcucaucgagaagaccaacgagaaguuccaccagaucgagaaggaguucagcgaggucgagggccgcauccaggaccuggagaaguacguggaggacacgaagaucgaccugugguccuacaacgccgagcuccugguggcccuggagaaccagcacaccaucgaccucaccgacagcgagauggacaagcuguucgagaagacccgcaagcagcugcgggagaacgccgaggacauggggaacggcugcuucaagaucuaccacaagugcgacaacgcgugcaucggguccauccgcaacggcacguacgaccacgacgucuaccgggacgaggcccucaacaaccgcuuccagaucaagggcguggagcugaaguccggguacaaggacuggauccuguggaucuccuucgccaucagcugcuuccuccugugcgucgugcugcucggcuucaucaugugggccugccagaaggggaacauccggugcaacaucugcaucuga

SEQ ID NO: 72611 - RNA, 1701 nt, Artificial Sequence
  derived and/or modified CDS sequence (opt1) from hemagglutinin__InfluenzaA__AFG99490
augaagaccaucaucgcccugagcuacauccucugccugguguucgcccagaagcugcccggcaacgacaacuccaccgcgacgcucugccuggggcaccacgccgucccgaacggcacccuggugaagaccaucaccaacgaccagaucgaggugacgaacgccaccgagcucguccagagcuccagcaccgggcgcaucugcgacagcccccaccggauccuggacggcaagaacugcacccugaucgacgcccuccugggggacccccacugcgacggcuuccagaacaaggagugggaccuguucaucgagcgcagcaaggccuacuccaacugcuaccccuacgacgugccggacuacgcgagccuccggucccugguggccagcuccggcacgcuggaguucaucaacgaggacuucaacuggaccggggucgcccagagcggcgaguccuacgccugcaagcgcgggagcgugaaguccuucuucagccggcucaacuggcugcacgaguccgaguacaaguaccccgcgcugaacgugaccaugcccaacaacggcaaguucgacaagcucuacaucuggggcguccaccaccccagcaccgaccgcgagcagacgucccuguacgugcgggccagcgggcgcgugaccgucagcaccaagcggucccagcagaccgugaucccgaacaucggcagccgccccugggugcgggggcuguccagccgcaucuccaucuacuggacgaucgucaagcccggcgacauccuccugaucaacagcaccgggaaccugaucgcgccccggggcuacuucaagauccgcaccggcaaguccagcaucaugcgguccgacgccccgaucgggaccugcagcuccgagugcaucacgcccaacggcagcauccccaacgacaagcccuuccagaacgugaaccgcaucaccuacggggccugcccgcgguacgugaagcagaacacccucaagcuggccaccggcaugcgcaacguccccgagaagcagacgcgggggaucuucggcgccaucgccggcuucaucgagaacgggugggagggcaugguggacgggugguacggcuuccgccaccagaacuccgaggggaccggccaggccgccgaccugaaguccacccaggcggccaucgaccagaucaacggcaagcucaaccggcugaucgagaagaccaacgagaaguuccaccagaucgagaaggaguucuccgagguggaggggcgcauccaggaccuggagaaguacgucgaggacacgaagaucgaccucuggagcuacaacgccgagcugcugguggcccucgagaaccagcacaccaucgaccugaccgacuccgagaugaacaagcuguucgagaagacccgcaagcagcuccgggagaacgccgaggacaugggcaacgggugcuucaagaucuaccacaagugcgacaacgcgugcaucggcagcauccgcaacgggacguacgaccacgacguguaccgggacgaggcccugaacaaccgcuuccagaucaagggcgucgagcugaaguccggcuacaaggacuggauccucuggaucagcuucgccaucagcugcuuccugcugugcgugguccuccugggguucaucaugugggccugccagaagggcaacauccggugcaacaucugcaucuga

SEQ ID NO: 72612 - RNA, 1701 nt, Artificial Sequence
  derived and/or modified CDS sequence (opt1) from hemagglutinin__InfluenzaA__AFG99501
augaagaccaucaucgcccugagcuacaucuucugccucguggucgcccagaagcugcccggcaacgacaacuccaccgcgacgcugugccucgggcaccacgccgugccgaacggcacccuggugaagaccaucaccaacgaccagaucgaggucacgaacgccaccgagcuggugcagagcuccagcaccgggcgcaucugcgacagcccccaccggauccucgacggcaagaacugcacccugaucgacgcccugcucggggacccccacugcgacggcuuccagaacaaggagugggaccuguucguggagcgcagcaaggccuacuccaacugcuaccccuacgacgucccggacuacgcgagccugcggucccucguggccagcuccggcacgcuggaguucaucaacgaggacuucaacuggaccgggguggcccagagcggcggguccuacacgugcaagcgcggcagcgucaacuccuucuucagccggcugaacuggcuccacgaguccgaguacaaguaccccgcccugaacgugaccaugcccaacaacgggaaguucgacaagcuguacaucuggggcgugcaccaccccagcaccgaccgcgagcagaccaaccucuacguccgggcguccggccgcgugaccgugagcaccaagcggagccagcagacggucaucccgaacaucgggucccgccccugggugcggggccugagcucccgcaucagcaucuacuggaccaucgugaagcccggggacauccugcucaucaacuccaccggcaaccugaucgcgccccggggcuacuucaagauccgcaccgggaaguccuccaucaugcggagcgacgccccgaucggcacgugcuccagcgagugcaucacccccaacggguccaucagcaacgacaagcccuuccagaacgucaaccgcaucaccuacggcgccugcccccgguacgugaagcagaacacccugaagcucgccacggggaugcgcaacgugccggagaagcagacccggggcaucuucggcgccaucgccggguucaucgagaacggcugggaggggauggucgacggcugguacggguuccgccaccagaacuccgagggcaccggccaggccgccgaccucaagagcacccaggccgcgaucgaccagaucaacgggaagcugaaccggcugaucgagaagacgaacgagaaguuccaccagaucgagaaggaguucuccgagguggagggccgcauccaggaccuggagaaguacguggaggacaccaagaucgaccuguggagcuacaacgccgagcuccuggucgcccuggagaaccagcacaccaucgaccucaccgacuccgagaugaacaagcuguucgagaagacgcgcaagcagcugcgggagaacgccgaggacauggggaacggcugcuucaagaucuaccacaagugcgacaacgccugcaucgggagcauccgcaacggcaccuacgaccacgacguguaccgggacgaggcgcucaacaaccgcuuccagaucaagggcgucgagcugaaguccggguacaaggacuggauccuguggaucagcuucgccaucagcugcuuccuccugugcguggugcugcucggcuucaucaugugggccugccagaaggggaacauccggugcaacaucugcaucuga

SEQ ID NO: 72613 - RNA, 1701 nt, Artificial Sequence
  derived and/or modified CDS sequence (opt1) from hemagglutinin__InfluenzaA__AFG99512
augaagaccaucaucgcccugagcuacauccucugccugguguucgcccagaagcugcccggcaacgacaacuccaccgcgacgcucugccuggggcaccacgccgucccgaacggcacccuggugaagaccaucaccaacgaccagaucgaggugacgaacgccaccgagcucguccagagcuccagcaccgggcgcaucugcgacagcccccaccggauccuggacggcaagaacugcacccugaucgacgcccuccugggggacccccacugcgacggcuuccagaacaaggagugggaccuguucguggagcgcagcaaggccuacuccaacugcuaccccuacgacgugccggacuacgcgagccuccggucccuggucgccagcuccggcacgcuggaguucaucaacgaggacuucaacuggaccgggguggcccagagcggcgacuccuacgccugcaagcgcgggagcgugaaguccuucuucagccggcucaacuggcugcacgaguccgaguacaaguaccccgcgcugaacgucaccaugcccaacaacgacaaguucgacaagcucuacaucuggggcgugcaccaccccagcaccgaccgcgagcagacgucccuguacauccgggccagcgggcgcgugaccgucagcaccaagcggucccagcagaccgugaucccgaacaucggcagccgccccugggugcggggccuguccagccgcaucuccaucuacuggacgaucgucaagcccggggacauccuccugaucaacagcaccggcaaccugaucgcgccccggggguacuucaagauccgcaccggcaaguccagcaucaugcgguccgacgccccgaucgggaccugcagcuccgagugcaucacgcccaacggcagcauccccaacgacaagcccuuccagaacgugaaccgcaucaccuacggcgccugcccgcgguacgugaagcagaacacccucaagcuggccaccgggaugcgcaacguccccgagaagcagacgcggggcaucuucggggccaucgccggcuucaucgagaacggcugggaggggaugguggacggcugguacggguuccgccaccagaacuccgagggcaccgggcaggccgccgaccugaaguccacccaggcggccaucgaccagaucaacggcaagcucaaccggcugaucgagaagaccaacgagaaguuccaccagaucgagaaggaguucuccgagguggagggccgcauccaggaccuggagaaguacgucgaggacacgaagaucgaccucuggagcuacaacgccgagcugcugguggcccucgagaaccagcacaccaucgaccugaccgacuccgagaugaacaagcuguucgagaagacccgcaagcagcuccgggagaacgccgaggacauggggaacggcugcuucaagaucuaccacaagugcgacaacgcgugcaucgggagcauccgcaacggcacguacgaccacgacguguaccgggacgaggcccugaacaaccgcuuccagaucaagggggucgagcugaaguccggcuacaaggacuggauccucuggaucagcuucgccaucagcugcuuccugcugugcgugguccuccugggcuucaucaugugggccugccagaaggggaacauccggugcaacaucugcaucuga

SEQ ID NO: 72614 - RNA, 1701 nt, Artificial Sequence
  derived and/or modified CDS sequence (opt1) from hemagglutinin__InfluenzaA__AFG99523
augaagaccaucaucgcccugagcuacaucuucugccucguguucgcccagaagcugcccggcaacgacaacuccaccgcgacgcugugccucgggcaccacgccgucccgaacggcacccuggugaagaccaucaccaacgaccagaucgaggugacgaacgccaccgagcugguccagagcuccagcaccgggcgcaucugcgacagcccccaccggauccucgacggcaagaacugcacccugaucgacgcccugcucggggacccccacugcgacggcuuccagaacaaggagugggaccuguucguggagcgcagcaaggccuacuccaacugcuaccccuacgacgugccggacuacgcgagccugcggucccucgucgccagcuccggcacgcuggaguucaucaacgaggacuucaacuggaccgggguggcccagagcggcggguccuacgccugcaagcgcggcagcgugaacuccuucuucagccggcugaacuggcuccacgagucccaguacaaguaccccgcgcugaacgucaccaugcccaacaacgggaaguucgacaagcuguacaucuggggcgugcaccaccccagcaccgaccgcgagcagacgaaccucuacgugcgggccuccggccgcgucaccgugagcaccaagcggagccagcagaccgugaucccgaacaucgggucccgccccuggguccggggccugagcucccgcaucagcaucuacuggacgaucgugaagcccggggacauccugcucaucaacuccaccggcaaccugaucgcgccccggggcuacuucaagauccgcaccggcaagagcuccaucaugcggagcgacgccccgaucgggaccugcuccagcgagugcaucacgcccaacggguccauccccaacgacaagcccuuccagaacgugaaccgcaucaccuacggcgccugcccgcgguacgucaagcagaacacccugaagcucgccaccgggaugcgcaacgugcccgagaagcagacgcggggcaucuucggcgccaucgccggguucaucgagaacggcugggaggggaugguggacggcugguacggguuccgccaccagaacagcgagggcaccggccaggccgccgaccugaaguccacccaggcggccaucgaccagaucaacgggaagcugaaccggcucaucgagaagaccaacgagaaguuccaccagaucgagaaggaguucagcgaggucgagggccgcauccaggaccuggagaaguacguggaggacacgaagaucgaccugugguccuacaacgccgagcuccugguggcccuggagaaccagcacaccaucgaccucaccgacagcgagaugaacaagcuguucgagaagacccgcaagcagcugcgggagaacgccgaggacauggggaacggcugcuucaagaucuaccacaagugcgacaacgcgugcaucggguccauccgcaacggcacguacgaccacgacgucuaccgggacgaggcccucaacaaccgcuuccagaucaagggcguggagcugaaguccggguacaaggacuggauccuguggaucuccuucgccaucagcugcuuccuccugugcgucgugcugcucggcuucaucaugugggccugccagaaggggaacauccggugcaacaucugcaucuga

SEQ ID NO: 72615 - RNA, 1701 nt, Artificial Sequence; identical to SEQ ID NO: 72511
  derived and/or modified CDS sequence (opt1) from hemagglutinin__InfluenzaA__AFG99534

SEQ ID NO: 72616 - RNA, 1701 nt, Artificial Sequence; identical to SEQ ID NO: 72511
  derived and/or modified CDS sequence (opt1) from hemagglutinin__InfluenzaA__AFG99545

SEQ ID NO: 72617 - RNA, 1701 nt, Artificial Sequence
  derived and/or modified CDS sequence (opt1) from hemagglutinin__InfluenzaA__AFG99556
augaagaccaucaucgcccugagcuacauccucugccugguguucgcccagaagcugcccggcaacgacaacuccaccgcgacgcucugccuggggcaccacgccgucccgaacggcacccuggugaagaccaucaccaacgaccagaucgaggugacgaacgccaccgagcucguccagagcuccagcaccgggcgcaucugcgacagcccccaccggauccuggacggcaagaacugcacccugaucgacgcccuccugggggacccccacugcgacggcuuccagaacaaggagugggaccuguucguggagcgcagcaaggccuacuccaacugcuaccccuacgacgugccggacuacgcgagccuccggucccuggucgccagcuccggcacgcuggaguucaccaacgaggacuucaacuggaccgggguggcccagagcggcgaguccuacgccugcaagcgcgggagcgugaaguccuucuucagccggcucaacuggcugcacgaguccgacuacaaguaccccgcgcugaacgucaccaugcccaacaacggcaaguucgacaagcucuacaucuggggcgugcaccaccccagcacggaccgcgagcagaccucccuguacgugcgggccagcgggcgcgucaccgugagcaccaagcggucccagcagacggugaucccgaacaucggcagccgccccuggguccgggggcuguccagccgcaucuccaucuacuggaccaucgugaagcccggcgacauccuccugaucaacagcaccgggaaccugaucgcgccccggggcuacuucaagauccgcaccggcaaguccagcaucaugcgguccgacgccccgaucgggacgugcagcuccgagugcaucacccccaacggcagcauccccaacgacaagcccuuccagaacgugaaccgcaucaccuacggggccugcccgcgguacgucaagcagaacacccucaagcuggccacgggcaugcgcaacgugcccgagaagcagacccgggggaucuucggcgccaucgccggcuucaucgagaacgggugggagggcaugguggacgggugguacggcuuccgccaccagaacuccgaggggaccggccaggccgccgaccggaaguccacccaggcggccaucgaccagaucaacggcaagcugaaccgccucaucgagaagacgaacgagaaguuccaccagaucgagaaggaguucuccgaggucgaggggcgcauccaggaccuggagaaguacguggaggacaccaagaucgaccuguggagcuacaacgccgagcuccugguggcccuggagaaccagcacaccaucgaccucaccgacuccgagaugaacaagcuguucgagaagacgcggaagcagcugcgcgagaacgccgaggacaugggcaacgggugcuucaagaucuaccacaagugcgacaacgcgugcaucggcagcauccggaacgggaccuacgaccacgacgucuaccgcgacgaggcccucaacaaccgguuccagaucaagggcguggagcugaaguccggcuacaaggacuggauccuguggaucagcuucgccaucagcugcuuccuccugugcgucgugcugcucggguucaucaugugggccugccagaagggcaacauccgcugcaacaucugcaucuga

SEQ ID NO: 72618 - RNA, 1701 nt, Artificial Sequence; identical to SEQ ID NO: 72511
  derived and/or modified CDS sequence (opt1) from hemagglutinin__InfluenzaA__AFG99567

SEQ ID NO: 72619 - RNA, 1701 nt, Artificial Sequence; identical to SEQ ID NO: 72511
  derived and/or modified CDS sequence (opt1) from hemagglutinin__InfluenzaA__AFG99578

SEQ ID NO: 72620 - RNA, 1701 nt, Artificial Sequence; identical to SEQ ID NO: 72511
  derived and/or modified CDS sequence (opt1) from hemagglutinin__InfluenzaA__AFG99589

SEQ ID NO: 72621 - RNA, 1701 nt, Artificial Sequence
  derived and/or modified CDS sequence (opt1) from hemagglutinin__InfluenzaA__AFG99600
augaagaccaucaucgcccugagcuacauccucugccugguguucgcccagaagcugcccggcaacgacaacuccaccgcgacgcucugccuggggcaccacgccgucccgaacggcacccuggugaagaccaucaccaacgaccagaucgaggugacgaacgccaccgagcucguccagagcuccagcaccgggcgcaucugcgacagcccccaccgggugcuggacggcaagaacugcacccugaucgacgcccuccugggggacccccacugcgacggcuuccagaacaaggagugggaccuguucguggagcgcagcaaggccuacuccaacugcuaccccuacgacgucccggacuacgcgagccuccggucccugguggccagcuccggcacgcuggaguucaccaacgaggacuucaacuggaccgggguggcccagagcggcgaguccuacgccugcaagcgcgggagcgucaaguccuucuucagccggcucaacuggcugcacgaguccgacuacaaguaccccgcgcugaacgugaccaugcccaacaacggcaaguucgacaagcucuacaucuggggcgugcaccaccccagcacggaccgcgagcagaccucccuguacguccgggccagcgggcgcgugaccgugagcaccaagcggucccagcagacggucaucccgaacaucggcagccgccccugggugcgggggcuguccagccgcaucuccaucuacuggaccaucgugaagcccggcgacauccuccugaucaacagcaccgggaaccugaucgcgccccggggcuacuucaagauccgcaucggcaaguccagcaucaugcgguccgacgccccgaucgggaccugcagcuccgagugcaucacgcccaacggcagcauccccaacgacaagcccuuccagaacgucaaccgcaucaccuacggggccugcccgcgguacgugaagcagaacacccucaagcuggccaccggcaugcgcaacgugcccgagaagcagacgcgggggaucuucggcgccaucgccggcuucaucgagaacgggugggagggcauggucgacgggugguacggcuuccgccaccagaacuccgaggggaccggccaggccgccgaccugaaguccacccaggcggccaucgaccagaucaacggcaagcucaaccggcugaucgagaagaccaacgagaaguuccaccagaucgagaaggaguucuccgagguggaggggcgcauccaggaccuggagaaguacguggaggacacgaagaucgaccucuggagcuacaacgccgagcugcuggucgcccucgagaaccagcacaccaucgaccugaccgacuccgagaugaacaagcuguucgagaagacccgcaagcagcuccgggagaacgccgaggacaugggcaacgggugcuucaagaucuaccacaagugcgacaacgcgugcaucggcagcauccgcaacgggacguacgaccacgacguguaccgggacgaggcccugaacaaccgcuuccagaucaagggcgucgagcugaaguccggcuacaaggacuggauccucuggaucagcuucgccaucagcugcuuccugcugugcguggugcuccugggguucaucaugugggccugccagaagggcaacauccggugcaacaucugcaucuga

SEQ ID NO: 72622 - RNA, 1701 nt, Artificial Sequence; identical to SEQ ID NO: 72511
  derived and/or modified CDS sequence (opt1) from hemagglutinin__InfluenzaA__AFG99611

SEQ ID NO: 72623 - RNA, 1701 nt, Artificial Sequence; identical to SEQ ID NO: 72511
  derived and/or modified CDS sequence (opt1) from hemagglutinin__InfluenzaA__AFG99622

SEQ ID NO: 72624 - RNA, 1701 nt, Artificial Sequence; identical to SEQ ID NO: 72511
  derived and/or modified CDS sequence (opt1) from hemagglutinin__InfluenzaA__AFG99633

SEQ ID NO: 72625 - RNA, 1701 nt, Artificial Sequence
  derived and/or modified CDS sequence (opt1) from hemagglutinin__InfluenzaA__AFG99644
augaagaccaucaucgcccugagcuacauccucugccugguguucgcccagaagcugcccggcaacgacaacuccaccgcgacgcucugccuggggcaccacgccgucccgaacggcacccuggugaagaccaucaccaacgaccagaucgaggugacgaacgccaccgagcucguccagaacagcuccaccgggcgcaucugcgacagcccccaccggauccuggacggcaagaacugcacccugaucgacgcccuccugggggacccccacugcgacgacuuccagaacaaggagugggaccuguucguggagcgcuccaaggccuacagcaacugcuaccccuacgacgugccggacuacgcgucccuccggagccuggucgccgccuccggcacgcuggaguucaucaacgaggacuucaacuggaccggcguggcccagagcggggaguccuacgcgugcaagcgcggcagcgugaaguccuucuucagccggcucaacuggcugcacgaguccgaguacaaguaccccgcccugaacgucaccaugcccaacaacgggaaguucgacaagcucuacaucuggggcgugcaccaccccagcaccgaccgcgagcagacgucccuguacgugcgggccagcgggcgcgucaccguguccaccaagcggagccagcagaccgugaucccgaacaucggcagccgccccuggguccggggccuguccagccgcaucuccaucuacuggacgaucgugaagcccggggacauccuccugaucaacagcaccggcaaccugaucgcgccccggggguacuucaagauccgcaccggcaaguccagcaucaugcgguccgacgccccgaucgggaccugcagcuccgagugcaucacgcccaacggcagcauccccaacgacaagcccuuccagaacgugaaccgcaucaccuacggcgccugcccgcgguacgucaagcagaacacccucaagcuggccaccgggaugcgcaacgugcccgagaagcagacgcggggcaucuucggggccaucgccggcuucaucgagaacggcugggaggggaugguggacggcugguacggguuccgccaccagaacuccgagggcaccgggcaggccgcggaccucaagagcacccaggccgccaucgaccagaucaacggcaagcugaaccggcugaucgagaagaccaacgagaaguuccaccagaucgagaaggaguucuccgagaucgagggccgcauccagaaccuggagaaguacgucgaggacacgaagaucgaccucuggagcuacaacgccgagcugcugguggcccucgagaaccagcacaccaucgaccugaccgacuccgagaugaacaagcuguucgagaagacccgcaagcagcuccgggagaacgcggaggacauggggaacggcugcuucaagaucuaccacaagugcgacaacgccugcaucgggagcauccgcaacggcacguacgaccacgacguguaccgggacgaggcccugaacaaccgcuuccagaucaagggggucgagcugaaguccggcuacaaggacuggauccucuggaucagcuucgccaucuccugcuuccugcugugcgugguccuccugggcuucaucaugugggccugccagaaggggaacauccggugcaacaucugcaucuga

SEQ ID NO: 72626 - RNA, 1701 nt, Artificial Sequence
  derived and/or modified CDS sequence (opt1) from hemagglutinin__InfluenzaA__AFG99655
augaagaccaucaucgcccugagcuacauccucugccugguguucgcccagaagcugcccggcaacgacaacuccaccgcgacgcucugccuggggcaccacgccgucccgaacggcacccuggugaagaccaucaccaacgaccagaucgaggugacgaacgccaccgagcucguccagaacagcuccaccgggcgcaucugcgacagcccccaccggauccuggacggcaagaacugcacccugaucgacgcccuccugggggacccccacugcgacgacuuccagaacaaggagugggaccuguucguggagcgcuccaaggccuacagcaacugcuaccccuacgacgugccggacuacgcgucccuccggagccuggucgccuccagcggcacgcuggaguucaucaacgaggacuucaacuggaccggcguggcccaguccggggagagcuacgccugcaagcgcggcuccgucaagagcuucuucucccggcucaacuggcugcacgagagcgaguacaaguaccccgcgcugaacgugaccaugcccaacaacgggaaguucgacaagcucuacaucuggggcgugcaccaccccuccaccgaccgcgagcagacgagccuguacgugcgggccuccgggcgcgucaccgugagcaccaagcggagccagcagaccgugaucccgaacaucggcucccgccccuggguccggggccugagcucccgcaucagcaucuacuggacgaucgugaagcccggggacauccuccugaucaacuccaccggcaaccugaucgcgccccggggguacuucaagauccgcaccggcaagagcuccaucaugcggagcgacgccccgaucgggaccugcuccagcgagugcaucacgcccaacggcuccauccccaacgacaagcccuuccagaacgugaaccgcaucaccuacggcgccugcccgcgguacgucaagcagaacacccucaagcuggccaccgggaugcgcaacgugcccgagaagcagacgcggggcaucuucggggccaucgccggcuucaucgagaacggcugggaggggaugguggacggcugguacggguuccgccaccagaacagcgagggcaccgggcaggccgccgaccugaaguccacccaggcggccaucgaccagaucaacggcaagcucaaccggcugaucgagaagaccaacgagaaguuccaccagaucgagaaggaguucagcgagaucgagggccgcauccaggaccuggagaaguacgucgaggacacgaagaucgaccucugguccuacaacgccgagcugcugguggcccucgagaaccagcacaccaucgaccugaccgacagcgagaugaacaagcuguucgagaagacccgcaagcagcuccgggagaacgccgaggacauggggaacggcugcuucaagaucuaccacaagugcgacaacgcgugcaucggguccauccgcaacggcacguacgaccacgacguguaccgggacgaggcccugaacaaccgcuuccagaucaagggggucgagcucaagagcggcuacaaggacuggauccuguggaucuccuucgccaucagcugcuuccugcugugcgugguccuccugggcuucaucaugugggccugccagaaggggaacauccggugcaacaucugcaucuga

SEQ ID NO: 72627 - RNA, 1701 nt, Artificial Sequence; identical to SEQ ID NO: 72626
  derived and/or modified CDS sequence (opt1) from hemagglutinin__InfluenzaA__AFG99666

SEQ ID NO: 72628 - RNA, 1701 nt, Artificial Sequence; identical to SEQ ID NO: 66362
  derived and/or modified CDS sequence (opt1) from hemagglutinin__InfluenzaA__AFG99677

SEQ ID NO: 72629 - RNA, 1701 nt, Artificial Sequence; identical to SEQ ID NO: 72511
  derived and/or modified CDS sequence (opt1) from hemagglutinin__InfluenzaA__AFG99688

SEQ ID NO: 72630 - RNA, 1701 nt, Artificial Sequence
  derived and/or modified CDS sequence (opt1) from hemagglutinin__InfluenzaA__AFG99701
augaagaccaucaucgcccugagcuacauccucugccugguguucgcccagaagcugcccggcaacgacaacuccaccgcgacgcucugccuggggcaccacgccgucccgaacggcacccuggugaagaccaucaccaacgaccagaucgaggugacgaacgccaccgagcucguccagagcuccagcaccgggcgcaucugcgacagcccccaccggauccuggacggcaagaacugcacccugaucgacgcccuccugggggacccccacugcgacggcuuccagaacaaggagugggaccuguucguggagcgcagcaacgccuacuccaacugcuaccccuacgacgugccggacuacgcgagccuccggucccuggucgccagcuccggcacgcuggaguucaccaacgaggacuucaacuggaccgggguggcccagagcggcgaguccuacgccugcaagcgcgggagcgugaaguccuucuucagccggcucaacuggcugcacgaguccgacuacaaguaccccgcgcugaacgucaccaugcccaacaacggcaaguucgacaagcucuacaucuggggcgugcaccaccccagcacggaccgcgagcagaccucccuguacgugcgggccagcgggcgcgucaccgugagcaccaagcggucccagcagacggugaucccgaacaucggcagccgccccuggguccgggggcuguccagccgcaucuccaucuacuggaccaucgugaagcccggcgacauccuccugaucaacagcaccgggaaccugaucgcgccccggggcuacuucaagauccgcaccggcaaguccagcaucaugcgguccgacgccccgaucgggacgugcagcuccgagugcaucacccccaacggcagcauccccaacgacaagcccuuccagaacgugaaccgcaucaccuacggggccugcccgcgguacgucaagcagaacacccucaagcuggccacgggcaugcgcaacgugcccgagaagcagacccgggggaucuucggcgccaucgccggcuucaucgagaacgggugggagggcaugguggacgggugguacggcuuccgccaccagaacuccgaggggaccggccaggccgccgaccugaaguccacccaggcggccaucgaccagaucaacggcaagcucaaccggcugaucgagaagacgaacgagaaguuccaccagaucgagaaggaguucuccgaggucgaggggcgcauccaggaccuggagaaguacguggaggacaccaagaucgaccucuggagcuacaacgccgagcugcugguggcccucgagaaccagcacaccaucgaccugaccgacuccgagaugaacaagcuguucgagaagacgcgcaagcagcuccgggagaacgccgaggacaugggcaacgggugcuucaagaucuaccacaagugcgacaacgcgugcaucggcagcauccgcaacgggaccuacgaccacgacgucuaccgggacgaggcccugaacaaccgcuuccagaucaagggcgccgagcugaaguccggcuacaaggacuggauccucuggaucagcuucgccaucagcugcuuccugcugugcgugguccuccugggguucaucaugugggccugccagaagggcaacauccggugcaacaucugcaucuga

SEQ ID NO: 72631 - RNA, 1701 nt, Artificial Sequence
  derived and/or modified CDS sequence (opt1) from hemagglutinin__InfluenzaA__AFG99712
augaagaccaucaucgcccugagcuacauccucugccugguguucgcccagaagcugcccggcaacgacaacuccaccgcgacgcucugccuggggcaccacgccgucccgaacggcacccuggugaagaccaucaccaacgaccagaucgaggugacgaacgccaccgagcucguccagagcuccagcaccgggcgcaucugcgacagcccccaccggauccuggacggcaagaacugcacccugaucgacgcccuccugggggacccccacugcgacggcuuccagaacaaggagugggaccuguucguggagcgcagcaaggccuacuccaacugcuaccccuacgaggugccggacuacgcgagccuccggucccuggucgccagcuccggcacgcuggaguucaccaacgaggacuucaacuggaccgggguggcccagagcggcgaguccuacgccugcaagcgcgggagcgugaaguccuucuucagccggcucaacuggcugcacgaguccgacuacaaguaccccgcgcugaacgucaccaugcccaacaacggcaaguucgacaagcucuacaucuggggcgugcaccaccccagcacggaccgcgagcagaccucccuguacgugcgggccagcgggcgcgucaccgugagcaccaagcggucccagcagacggugaucccgaacaucggcagccgccccuggguccgggggcuguccagccgcaucuccaucuacuggaccaucgugaagcccggcgacauccuccugaucaacagcaccgggaaccugaucgcgccccggggcuacuucaagauccgcaccggcaaguccagcaucaugcgguccgacgccccgaucgggacgugcagcuccgagugcaucacccccaacggcagcauccccaacgacaagcccuuccagaacgugaaccgcaucaccuacggggccugcccgcgguacgucaagcagaacacccucaagcuggccacgggcaugcgcaacgugcccgagaagcagacccgggggaucuucggcgccaucgccggcuucaucgagaacgggugggagggcaugguggacgggugguacggcuuccgccaccagaacuccgaggggaccggccaggccgccgaccugaaguccacccaggcggccaucgaccagaucaacggcaagcucaaccggcugaucgagaagacgaacgagaaguuccaccagaucgagaaggaguucuccgaggucgaggggcgcauccaggaccuggagaaguacguggaggacaccaagaucgaccucuggagcuacaacgccgagcugcugguggcccucgagaaccagcacaccaucgaccugaccgacuccgagaugaacaagcuguucgagaagacgcgcaagcagcuccgggagaacgccgaggacaugggcaacgggugcuucaagaucuaccacaagugcgacaacgcgugcaucggcagcauccgcaacgggaccuacgaccacgacgucuaccgggacgaggcccugaacaaccgcuuccagaucaagggcguggagcugaaguccggcuacaaggacuggauccucuggaucagcuucgccaucagcugcuuccugcugugcgucgugcuccugggguucaucaugugggccugccagaagggcaacauccggugcaacaucugcaucuga

SEQ ID NO: 72632 - RNA, 1701 nt, Artificial Sequence; identical to SEQ ID NO: 72511
  derived and/or modified CDS sequence (opt1) from hemagglutinin__InfluenzaA__AFG99723

SEQ ID NO: 72633 - RNA, 1701 nt, Artificial Sequence; identical to SEQ ID NO: 72626
  derived and/or modified CDS sequence (opt1) from hemagglutinin__InfluenzaA__AFG99734

SEQ ID NO: 72634 - RNA, 1701 nt, Artificial Sequence
  derived and/or modified CDS sequence (opt1) from hemagglutinin__InfluenzaA__AFG99745
augaagaccaucaucgcccugagcuacauccucugccugguguucgcccagaagcugcccggcaacgacaacuccaccgcgacgcucugccuggggcaccacgccgucccgaacggcacccuggugaagaccaucaccaacgaccagaucgaggugacgaacgccaccgagcucguccagagcuccagcaccgggcgcaucugcgacagcccccaccggauccuggacggcaagaacugcacccugaucgacgcccuccugggggacccccacugcgacggcuuccagaacaaggagugggaccuguucguggagcgcagcaaggccuacuccaacugcuaccccuacgacgugccggacuacgcgagccuccggucccuggucgccagcuccggcacgcuggaguucaucaacgaggacuucaacuggaccgggguggcccagagcggcgacuccuacgccugcaagcgcgggagcgugaaguccuucuucagccggcucaacuggcugcacgaguccgaguacaaguaccccgcgcugaacgucaccaugcccaacaacgacaaguucgacaagcucuacaucuggggcgugcaccaccccagcaccgagcgcgagcagacgucccuguacauccgggccagcgggcgcgugaccgucagcaccaagcggucccagcagaccgugaucccgaacaucggcagcaagcccugggugcgcggccuguccagccggaucuccaucuacuggacgaucgucaagcccggggacauccuccugaucaacagcaccggcaaccugaucgcgccccgcggguacuucaagauccggaccggcaaguccagcaucaugcgcuccgacgccccgaucgggaccugcagcuccgagugcaucacgcccaacggcagcauccccaacgacaagcccuuccagaacgugaaccggaucaccuacggcgccugcccgcgcuacgugaagcagaacacccucaagcuggccaccgggaugcggaacguccccgagaagcagacgcgcggcaucuucggggccaucgccggcuucaucgagaacggcugggaggggaugguggacggcugguacggguuccggcaccagaacuccgagggcaccgggcaggccgccgaccugaaguccacccaggcggccaucgaccagaucaacggcaagcucaaccgccugaucgagaagaccaacgagaaguuccaccagaucgagaaggaguucuccgagguggagggccggauccaggaccuggagaaguacgucgaggacacgaagaucgaccucuggagcuacaacgccgagcugcugguggcccucgagaaccagcacaccaucgaccugaccgacuccgagaugaacaagcuguucgagaagacccgcaagcagcuccgcgagaacgccgaggacauggggaacggcugcuucaagaucuaccacaagugcgacaacgcgugcauggggagcauccggaacggcacguacgaccacgacguguaccgcgacgaggcccugaacaaccgguuccagaucaagggggucgagcugaaguccggcuacaaggacuggauccucuggaucagcuucgccaucagcugcuuccugcugugcgugguccuccugggcuucaucaugugggccugccagaaggggaacauccgcugcaacaucugcaucuga

SEQ ID NO: 72635 - RNA, 1701 nt, Artificial Sequence; identical to SEQ ID NO: 72511
  derived and/or modified CDS sequence (opt1) from hemagglutinin__InfluenzaA__AFG99756

SEQ ID NO: 72636 - RNA, 1701 nt, Artificial Sequence
  derived and/or modified CDS sequence (opt1) from hemagglutinin__InfluenzaA__AFG99767
augaagaccaucaucgcccugagcuacauccucugccugguguucgcccagaagcugcccggcaacgacaacuccaccgcgacgcucugccuggggcaccacgccgucccgaacggcacccuggugaagaccaucaccaacgaccagaucgaggugacgaacgccaccgagcucguccagagcuccagcaccgggcgcaucugcgacagcccccaccggauccuggacggcaagaacugcacccugaucgacgcccuccugggggacccccacugcgacgacuuccagaacaaggagugggaccuguucguggagcgcagcaaggccuacuccaacugcuaccccuacgacgugccggacuacgcgagccuccggucccuggucgccagcuccggcacgcuggaguucaucaacgaggacuucaacuggaccggcguggcccagagcggggaguccuacgccugcaagcgcggcagcgugaaguccuucuucagccggcucaacuggcugcacgaguccgaguacaaguaccccgcgcugaacgucaccaugcccaacaacgacaaguucgacaagcucuacaucuggggcgugcaccaccccagcaccgaccgcgagcagacgucccuguacauccgggccagcggccgcgugaccgucagcaccaagcggucccagcagaccgugaucccgaacaucgggagccgccccugggugcggggccuguccagccgcaucuccaucuacuggacgaucgucaagcccggcgacauccuccugaucaacagcaccgggaaccugaucgcgccccggggcuacuucaagauccgcaccgggaaguccagcaucaugcgguccgacgccccgaucgggaccugcagcuccgagugcaucacgcccaacggcagcauccccaacgacaagcccuuccagaacgugaaccgcaucaccuacggggccugcccgcgguacgugaagcagaacacccucaagcuggccaccggcaugcgcaacguccccgagaagcagacgcgggggaucuucggcgccaucgccggguucaucgagaacggcugggagggcaugguggacgggugguacggcuuccgccaccagaacuccgaggggaccggccaggccgccgaccugaaguccacccaggcggccaucgaccagaucaacgggaagcucaaccggcugaucgagaagaccaacgagaaguuccaccagaucgagaaggaguucuccgagguggagggccgcauccaggaccuggagaaguacgucgaggacacgaagaucgaccucuggagcuacaacgccgagcugcugguggcccucgagaaccagcacaccaucgaccugaccgacuccgagaugaacaagcuguucgagaagacccgcaagcagcuccgggagaacgccgaggacaugggcaacgggugcuucaagaucuaccacaagugcgacaacgcgugcaucggcagcauccgcaacgggacguacgaccacgacguguaccgggacgaggcccugaacaaccgcuuccagaucaagggcgucgagcugaaguccggguacaaggacuggauccucuggaucagcuucgccaucagcugcuuccugcugugcgugguccuccugggcuucaucaugugggccugccagaagggcaacauccggugcaacaucugcaucuga

SEQ ID NO: 72637 - RNA, 1701 nt, Artificial Sequence
  derived and/or modified CDS sequence (opt1) from hemagglutinin__InfluenzaA__AFG99778
augaagaccaucaucgcccugagcuacauccucugccugguguucgcccagaagcugcccggcaacgacaacuccaccgcgacgcucugccuggggcaccacgccgucccgaacggcacccuggugaagacccucaccaacgaccagaucgaggugacgaacgccaccgagcugguccagagcuccagcaccgggaagaucugcgacagcccccaccgcauccuggacggcaagaacugcacccucaucgacgcccugcugggggacccccacugcgacggccuccagaacaaggagugggaccuguucguggagcgguccaaggccuacuccaacugcuaccccuacgacgugccggacuacgcgagccugcgcucccucgucgccagcuccggcacgcuggaguucaucaacgaggacuucaacuggaccgggguggcccaggacggcgggagcuacgccugcaagcggggcuccgugaacagcuucuucucccgccugaacuggcuccacaagagcgaguacaaguaccccgcgcugaacgucaccaugcccaacaacgggaagguggacaagcuguacaucuggggcgugcaccaccccuccaccgaccgggaccagacgagccucuacguccgcgccuccggccgggugaccgugagcaccaagcgcagccagcagaccgucaucccgaacaucgggucccggcccugggugcgcggccagagcucccggaucagcaucuacuggacgaucgugaagcccggggacauccugcugaucaacuccaccggcaaccucaucgcgccccgcggcuacuucaagauccggaacggcaagagcuccaucaugcgcagcgacgccccgaucgggaccugcuccagcgagugcaucacccccaacggguccauccccaacgacaagcccuuccagaacgucaaccggaucacguacggcgccugcccgcgcuacgugaagcagaacacccugaagcuggccaccgggaugcggaacgugcccgagaagcagacccgcggcaucuucggcgccaucgccggguucaucgagaacggcugggaggggauggucgacggcugguacggguuccggcaccagaacagcgagggcacgggccaggccgccgaccucaaguccacccaggcggccaucgaccagaucaacgggaagcugaaccgccugaucgagaagaccaacgagaaguuccaccagaucgagaaggaguucagcgagguggagggccggauccaggaccucgagaaguacguggaggacaccaagaucgaccugugguccuacaacgccgagcugcucgucgcccuggagaaccagcacacgaucgaccugaccgacagcgagaugaacaagcuguucgagaagacccgcaagcagcuccgcgagaacgccgaggacauggggaacggcugcuucaagaucuaccacaagugcgacaacgcgugcaucggguccauccggaacggcaccuacgaccacgacguguaccgcgacgaggcccugaacaaccgguuccagaucaagggcgucgagcucaagagcggguacaaggacuggauccuguggaucuccuucgccaucagcugcuuccugcucugcguggugcugcugggcuucaucaugugggccugccagaaggggaacauccgcugcaacaucugcaucuga

SEQ ID NO: 72638 - RNA, 1701 nt, Artificial Sequence; identical to SEQ ID NO: 72511
  derived and/or modified CDS sequence (opt1) from hemagglutinin__InfluenzaA__AFG99789

SEQ ID NO: 72639 - RNA, 1701 nt, Artificial Sequence; identical to SEQ ID NO: 72626
  derived and/or modified CDS sequence (opt1) from hemagglutinin__InfluenzaA__AFG99800

SEQ ID NO: 72640 - RNA, 1701 nt, Artificial Sequence
  derived and/or modified CDS sequence (opt1) from hemagglutinin__InfluenzaA__AFG99811
augaagaccaucaucgcccugagcuacauccucugccugguguucucccagaagcugcccggcaacgacaacagcaccgccacgcucugccuggggcaccacgcggucccgaacggcacccuggugaagaccaucaccaacgaccagaucgaggugacgaacgccaccgagcucguccagaacuccagcaccgggcgcaucugcgacagcccccaccggauccuggacggcaagaacugcacccugaucgacgcccuccugggggacccccacugcgacgacuuccagaacaaggagugggaccuguucguggagcgcagcaaggccuacuccaacugcuaccccuacgacgugccggacuacgccagccuccggucccuggucgcgagcuccggcacgcuggaguucaucaacgaggacuucaacuggaccggcguggcccagagcggggaguccuacgccugcaagcgcggcagcgugaaguccuucuucagccggcucaacuggcugcacgaguccgaguacaaguaccccgcccugaacgucaccaugcccaacaacgggaaguucgacaagcucuacaucuggggcgugcaccaccccagcaccgaccgcgagcagacgucccuguacgugcgggcgagcgggcgcgucaccgugagcaccaagcggucccagcagaccgugaucccgaacaucggcagccgccccuggguccggggccuguccagccgcaucuccaucuacuggacgaucgugaagcccggggacauccuccugaucaacagcaccggcaaccugaucgcgccccggggguacuucaagauccgcaccggcaaguccagcaucaugcgguccgacgccccgaucgggaccugcagcuccgagugcaucacgcccaacggcagcauccccaacgacaagcccuuccagaacgugaaccgcaucaccuacggcgccugcccgcgguacgucaagcagaacacccucaagcuggccaccgggaugcgcaacgugcccgagaagcagacgcggggcaucuucggggccaucgccggcuucaucgagaacggcugggaggggaugguggacggcugguacggguuccgccaccagaacuccgagggcaccgggcaggccgccgaccugaaguccacccaggccgcgaucgaccagaucaacggcaagcucaaccggcugaucgagaagaccaacgagaaguuccaccagaucgagaaggaguucuccgagaucgagggccgcauccaggaccuggagaaguacgucgaggacacgaagaucgaccucuggagcuacaacgccgagcugcugguggcccucgagaaccagcacaccaucgaccugaccgacuccgagaugaacaagcuguucgagaagacccgcaagcagcuccgggagaacgccgaggacauggggaacggcugcuucaagaucuaccacaagugcgacaacgccugcaucgggagcauccgcaacggcacguacgaccacgacguguaccgggacgaggcgcugaacaaccgcuuccagaucaagggggucgagcugaaguccggcuacaaggacuggauccucuggaucagcuucgccaucagcugcuuccugcugugcgugguccuccugggcuucaucaugugggccugccagaaggggaacauccggugcaacaucugcaucuga

SEQ ID NO: 72641 - RNA, 1701 nt, Artificial Sequence; identical to SEQ ID NO: 72511
  derived and/or modified CDS sequence (opt1) from hemagglutinin__InfluenzaA__AFG99822

SEQ ID NO: 72642 - RNA, 1701 nt, Artificial Sequence; identical to SEQ ID NO: 72511
  derived and/or modified CDS sequence (opt1) from hemagglutinin__InfluenzaA__AFG99833

SEQ ID NO: 72643 - RNA, 1701 nt, Artificial Sequence; identical to SEQ ID NO: 72511
  derived and/or modified CDS sequence (opt1) from hemagglutinin__InfluenzaA__AFG99844

SEQ ID NO: 72644 - RNA, 1701 nt, Artificial Sequence
  derived and/or modified CDS sequence (opt1) from hemagglutinin__InfluenzaA__AFG99855
augaagaccaucaucgcccugagcuacauccucugccugguguucgcccagaagcugcccggcaacgacaacuccaccgcgacgcucugccuggggcaccacgccgucccgaacggcacccuggugaagaccaucaccaacgaccagaucgaggugacgaacgccaccgagcucguccagagcuccagcaccgggcgcaucugcgacagcccccaccggauccuggacggcaagaacugcacccugaucgacgcccuccugggggacccccacugcgacggcuuccagaacaaggagugggaccuguucguggagcgcagcaaggccuacuccaacugcuaccccuacgacgugccggacuacgcgagccuccggucccuggucgccagcuccggcacgcuggaguucaccaacgaggacuucaacuggaccgggguggcccagagcggcgaguccuacgccugcaagcgcgggagcgugaaguccuucuucagccggcucaacuggcugcacgaguccgacuacaaguaccccgcgcugaacgucaccaugcccaacaacggcaaguucgacaagcucuacaucuggggcgugcaccaccccagcacggaccgcgagcagaccucccuguacgugcgggccagcgggcgcgucaccgugagcaccaagcggucccagcagacggugaucccgaacaucggcagccgccccuggguccgggggcuguccagccgcaucuccaucuacuggaccaucgugaagcccggcgacauccuccugaucaacagcaccgggaaccugaucgcgccccggggcuacuucaagauccgcaccggcaaguccagcaucaugcgguccgacgccccgaucgggacgugcagcuccgagugcaucacccccaacggcagcauccccaacgacaagcccuuccagaacgugaaccgcaucaccuacggggccugcccgcgguacgucaagcagaacacccucaagcuggccacgggcaugcgcaacgugcccgggaagcagacccggggcaucuucggcgccaucgccggguucaucgagaacggcugggaggggaugguggacggcugguacggguuccgccaccagaacuccgagggcaccggccaggccgccgaccugaaguccacccaggcggccaucgaccagaucaacgggaagcucaaccggcugaucgagaagacgaacgagaaguuccaccagaucgagaaggaguucuccgaggucgagggccgcauccaggaccuggagaaguacguggaggacaccaagaucgaccucuggagcuacaacgccgagcugcugguggcccucgagaaccagcacaccaucgaccugaccgacuccgagaugaacaagcuguucgagaagacgcgcaagcagcuccgggagaacgccgaggacauggggaacggcugcuucaagaucuaccacaagugcgacaacgcgugcaucgggagcauccgcaacggcaccuacgaccacgacgucuaccgggacgaggcccugaacaaccgcuuccagaucaagggcguggagcugaaguccggguacaaggacuggauccucuggaucagcuucgccaucagcugcuuccugcugugcgucgugcuccugggcuucaucaugugggccugccagaaggggaacauccggugcaacaucugcaucuga

SEQ ID NO: 72645 - RNA, 1701 nt, Artificial Sequence; identical to SEQ ID NO: 72511
  derived and/or modified CDS sequence (opt1) from hemagglutinin__InfluenzaA__AFG99866

SEQ ID NO: 72646 - RNA, 1701 nt, Artificial Sequence; identical to SEQ ID NO: 72511
  derived and/or modified CDS sequence (opt1) from hemagglutinin__InfluenzaA__AFG99877

SEQ ID NO: 72647 - RNA, 1701 nt, Artificial Sequence
  derived and/or modified CDS sequence (opt1) from hemagglutinin__InfluenzaA__AFG99888
augaagaccaucaucgcccugagcuacauccucugccugguguucgcccagaagcugcccggcaacgacaacuccaccgcgacgcucugccuggggcaccacgccgucccgaacggcacccuggugaagaccaucaccaacgaccagaucgaggugacgaacgccaccgagcucguccagagcuccagcaccgggcgcaucugcgacagcccccaccggauccuggacggcaagaacugcacccugaucgacgcccuccugggggacccccacugcgacggcuuccagaacaaggagugggaccuguucguggagcgcagcaaggccuacuccaacugcuaccccuacgacgugccggacuacgcgagccuccggucccuggucgccagcuccggcacgcuggaguucaucaacgaggacuucaacuggaccgggguggcccagagcggcgaguccuacgccugcaagcgcgggagcgugaaguccuucuucagccggcucaacuggcugcacgaguccgaguacaaguaccccgcgcugaacgucaccaugcccaacaacgacaaguucgacaagcucuacaucuggggcgugcaccaccccagcaccgaccgcgagcagacgucccuguacauccgggccagcgggcgcgugaccgucagcaccaagcggucccagcagaccgugaucccgaacaucggcagccgccccugggugcggggccuguccagccgcaucuccaucuacuggacgaucgucaagcccggggacauccuccugaucaacagcaccggcaaccugaucgcgccccggggguacuucaagauccgcaccggcaaguccagcaucaugcgguccgacgccccgaucgggaccugcaacagcgagugcaucacgcccaacggcuccauccccaacgacaagcccuuccagaacgugaaccgcaucaccuacggcgccugcccgcgguacgugaagcagaacacccucaagcuggccaccgggaugcgcaacguccccgagaagcagacgcggggcaucuucggggccaucgccggcuucaucgagaacggcugggaggggaugguggacggcugguacggguuccgccaccagaacagcgagggcaccgggcaggccgccgaccugaaguccacccaggcggccaucgaccagaucaacggcaagcucaaccggcugaucgagaagaccaacgagaaguuccaccagaucgagaaggaguucagcgagguggagggccgcauccaggaccuggagaaguacgucgaggacacgaagaucgaccucugguccuacaacgccgagcugcugguggcccucgagaaccagcacaccaucgaccugaccgacagcgagaugaacaagcuguucgagaagacccgcaagcagcuccgggagaacgccgaggacauggggaacggcugcuucaagaucuaccacaagugcgacaacgcgugcaucggguccauccgcaacggcacguacaaccacgacguguaccgggacgaggcccugaacaaccgcuuccagaucaagggggucgagcugaaguccggcuacaaggacuggauccucuggaucuccuucgccaucagcugcuuccugcugugcgugguccuccugggcuucaucaugugggccugccagaaggggaacauccggugcaacaucugcaucuga

SEQ ID NO: 72648 - RNA, 1701 nt, Artificial Sequence; identical to SEQ ID NO: 72511
  derived and/or modified CDS sequence (opt1) from hemagglutinin__InfluenzaA__AFG99899

SEQ ID NO: 72649 - RNA, 1701 nt, Artificial Sequence; identical to SEQ ID NO: 72511
  derived and/or modified CDS sequence (opt1) from hemagglutinin__InfluenzaA__AFG99910

SEQ ID NO: 72650 - RNA, 1701 nt, Artificial Sequence; identical to SEQ ID NO: 72511
  derived and/or modified CDS sequence (opt1) from hemagglutinin__InfluenzaA__AFG99921

SEQ ID NO: 72651 - RNA, 1701 nt, Artificial Sequence
  derived and/or modified CDS sequence (opt1) from hemagglutinin__InfluenzaA__AFG99932
augaagaccaucaucgcccugagcuacauccucugccugguguucgcccagaagcugcccggcaacgacaacuccaccgcgacgcucugccuggggcaccacgccgucccgaacggcacccuggugaagaccaucaccaacgaccagaucgaggugacgaacgccaccgagcucguccagagcuccagcaccgggcgcaucugcgacagcccccaccggauccuggacggcaagaacugcacccugaucgacgcccuccugggggacccccacugcgacggcuuccagaacaaggagugggaccuguucguggagcgcagcaaggccuacuccaacugcuaccccuacgacgugccggacuacgcgagccuccggucccuggucgccagcuccggcacgcuggaguucaucaacgaggacuucaacuggaccgggguggcccagagcggcgaguccuacgccugcaagcgcgggagcgugaaguccuucuucagccggcucaacuggcugcacgaguccgaguacaaguaccccgcgcugaacgucaccaugcccaacaacgacaaguucgacaagcucuacaucuggggcgugcaccaccccagcaccgaccgcgagcagacgucccuguacauccgggccagcgggcgcgugaccgucagcaccaagcggucccagcagaccgugaucccgaacaucggcagccgccccugggugcggggccuguccagccgcaucuccaucuacuggacgaucgucaagcccggggacauccuccugaucaacagcaccggcaaccugaucgcgccccggggguacuucaagauccgcaccggcaaguccagcaucaugcgguccgacgccccgaucgggaccugcagcuccgagugcaucacgcccaacggcagcauccccaacgacaagcccuuccagaacgugaaccgcaucaccuacggcgccugcccgcgguacgugaagcagaacacccucaagcuggccaccgggaugcgcaacguccccgagaagcagacgcggggcaucuucggggccaucgccggcuucaucgagaacggcugggaggggaugguggacggcugguacggguuccgccaccagaacuccgagggcaccgggcaggccgccgaccugaaguccacccaggcggccaucgaccagaucaacggcaagcucaaccggcugaucgagaagaccaacgagaaguuccaccagaucgagaaggaguucuccgagguggagggccgcauccaggaccuggagaaguacgucgaggacacgaagaucgaccucuggagcuacaacgccgagcugcugguggcccucgagaaccagcacaccaucgaccugaccgacuccgagaugaacaagcuguucgagaagacccgcaagcagcuccgggagaacgccgaggacauggggaacggcugcuucaagaucuaccacaagugcgacaacgcgugcaucgggagcauccgcaacggcacguacgaccacgacguguaccgggacgaggcccugaacaaccgcuuccagaucaagggggucgagcugaaguccggcuacaaggacuggauccucuggaucagcuucgccaucagcugcuuccugcugugcgugguccuccugggcuucaucaugugggccugccagaaggggaacauccggugcaacaucugcaucuga

SEQ ID NO: 72652 - RNA, 1701 nt, Artificial Sequence; identical to SEQ ID NO: 72511
  derived and/or modified CDS sequence (opt1) from hemagglutinin__InfluenzaA__AFG99943

SEQ ID NO: 72653 - RNA, 1701 nt, Artificial Sequence
  derived and/or modified CDS sequence (opt1) from hemagglutinin__InfluenzaA__AFG99954
augaagaccaucaucgcccugagcuacauccucugccugguguucgcccagaagcugcccggcaacgacaacuccaccgcgacgcucugccuggggcaccacgccgucccgaacggcacccuggugaagaccaucaccaacgaccagaucgaggugacgaacgccaccgagcucguccagagcuccagcaccgggcgcaucugcgacagcccccaccggauccuggacggcaagaacugcacccugaucgacgcccuccugggggacccccacugcgacggcuuccagaacaaggagugggaccuguucguggagcgcagcaaggccuacuccaacugcuaccccuacgacgugccggacuacgcgagccuccggucccuggucgccagcuccggcacgcuggaguucaucaacgaggacuucaacuggaccgggguggcccagagcggcgacuccuacgccugcaagcgcgggagcgugaaguccuucuucagccggcucaacuggcugcacgaguccgaguacaaguaccccgcgcugaacgucaccaugcccaacaacgacaaguucgacaagcucuacaucuggggcgugcaccaccccagcaccgagcgcgagcagacgucccuguacauccgggccagcgggcgcgugaccgucagcaccaagcggucccagcagaccgugaucccgaacaucggcuucaagcccugggugcgcggccugagcucccggaucagcaucuacuggacgaucgucaagcccggggacauccuccugaucaacuccaccggcaaccugaucgcgccccgcggguacuucaagauccggaccggcaagagcuccaucaugcgcagcgacgccccgaucgggaccugcuccagcgagugcaucacgcccaacggcuccauccccaacgacaagcccuuccagaacgugaaccggaucaccuacggcgccugcccgcgcuacgugaagcagaacacccucaagcuggccaccgggaugcggaacguccccgagaagcagacgcgcggcaucuucggggccaucgccggcuucaucgagaacggcugggaggggaugguggacggcugguacggguuccggcaccagaacagcgagggcaccgggcaggccgccgaccugaaguccacccaggcggccaucgaccagaucaacggcaagcucaaccgccugaucgagaagaccaacgagaaguuccaccagaucgagaaggaguucagcgagguggagggccggauccaggaccuggagaaguacgucgaggacacgaagaucgaccucugguccuacaacgccgagcugcugguggcccucgagaaccagcacaccaucgaccugaccgacagcgagaugaacaagcuguucgagaagacccgcaagcagcuccgcgagaacgccgaggacauggggaacggcugcuucaagaucuaccacaagugcgacaacgcgugcaucggguccauccggaacggcacguacgaccacgacguguaccgcgacgaggcccugaacaaccgguuccagaucaagggggucgagcugaaguccggcuacaaggacuggauccucuggaucuccuucgccaucagcugcuuccugcugugcgugguccuccugggcuucaucaugugggccugccagaaggggaacauccgcugcaacaucugcaucuga

SEQ ID NO: 72654 - RNA, 1701 nt, Artificial Sequence
  derived and/or modified CDS sequence (opt1) from hemagglutinin__InfluenzaA__AFG99965
augaagaccaucaucgcccugagcuacauccucugccuggccuucgcgcagaagcugcccggcaacgacaacuccaccgccacgcucugccuggggcaccacgccgugccgaacggcacccuggucaagaccaucaccaacgaccagaucgaggugacgaacgccaccgagcucgugcagagcuccagcaccgggcgcaucugcgacagcccccaccggauccuggacggcaagaacugcacccugaucgacgcccuccugggggacccccacugcgacggcuuccagaacaaggagugggaccuguucgucgagcgcagcaaggcguacuccaacugcuaccccuacgacgugccggacuacgccagccuccggucccugguggccagcuccggcacgcuggaguucaccaacgaggacuucaacuggaccggggucgcccagagcggcgaguccuacgcgugcaagcgcgggagcgugaaguccuucuucagccggcucaacuggcugcacgaguccgacuacaaguaccccgcccugaacgugaccaugcccaacaacggcaaguucgacaagcucuacaucuggggcguccaccaccccagcacggaccgcgagcagaccucccuguacgugcgggccagcgggcgcgugaccgucagcaccaagcggucccagcagacggugaucccgaacaucggcagccgccccugggugcgggggcuguccagccgcaucuccaucuacuggaccaucgucaagcccggcgacauccuccugaucaacagcaccgggaaccugaucgcgccccggggcuacuucaagauccgcaccggcaaguccagcaucaugcgguccgacgccccgaucgggacgugcagcuccgagugcaucacccccaacggcagcauccccaacgacaagcccuuccagaacgugaaccgcaucaccuacggggccugcccgcgguacgugaagcagaacacccucaagcuggccacgggcaugcgcaacguccccgagaagcagacccgggggaucuucggcgccaucgccggcuucaucgagaacgggugggagggcaugguggacgggugguacggcuuccgccaccagaacuccgaggggaccggccaggccgcggaccugaaguccacccaggccgccaucgaccagaucaacggcaagcucaaccggcugaucgagaagacgaacgagaaguuccaccagaucgagaaggaguucuccgagguggaggggcgcauccaggaccuggagaaguacgucgaggacaccaagaucgaccucuggagcuacaacgccgagcugcugguggcccucgagaaccagcacaccaucgaccugaccgacuccgagaugaacaagcuguucgagaagacgcgcaagcagcuccgggagaacgcggaggacaugggcaacgggugcuucaagaucuaccacaagugcgacaacgccugcaucggcagcauccgcaacgggaccuacgaccacgacguguaccgggacgaggcccugaacaaccgcuuccagaucaagggcgucgagcugaaguccggcuacaaggacuggauccucuggaucagcuucgccaucagcugcuuccugcugugcgugguccuccugggguucaucaugugggccugccagaagggcaacauccggugcaacaucugcaucuga

SEQ ID NO: 72655 - RNA, 1701 nt, Artificial Sequence; identical to SEQ ID NO: 72511
  derived and/or modified CDS sequence (opt1) from hemagglutinin__InfluenzaA__AFG99976

SEQ ID NO: 72656 - RNA, 1701 nt, Artificial Sequence
  derived and/or modified CDS sequence (opt1) from hemagglutinin__InfluenzaA__AFG99987
augaagaccaucaucgcccugagcuacauccucugccugguguucgcccagaagcugcccggcaacgacaacuccaccgcgacgcucugccuggggcaccacgccgucccgaacggcacccuggugaagaccaucaccaacgaccagaucgaggugacgaacgccaccgagcucguccagagcuccagcaccgggcgcaucugcgacagcccccaccggauccuggacggcaagaacugcacccugaucgacgcccuccugggggacccccacugcgacggcuuccagaacaaggagugggaccuguucguggagcgcagcaaggccuacuccaacugcuaccccuacgacgugccggacuacgcgagccuccggucccuggucgccagcuccggcacgcuggaguucaucaacgaggacuucaacuggaccgggguggcccagaacggcgacagcuacgccugcaagcgcggguccgugaaguccuucuucucccggcucaacuggcugcacgagagcgaguacaaguaccccgcgcugaacgucaccaugcccaacaacgacaaguucgacaagcucuacaucuggggcgugcaccaccccuccaccgaccgcgagcagacgagccuguacauccgggccuccgggcgcgugaccgucagcaccaagcggagccagcagaccgugaucccgaacaucggcucccgccccugggugcggggccugagcucccgcaucagcaucuacuggacgaucgucaagcccggggacauccuccugaucaacuccaccggcaaccugaucgcgccccggggguacuucaagauccgcaccggcaagagcuccaucaugcggagcgacgccccgaucgggaccugcuccagcgagugcaucacgcccaacggcuccauccccaacgacaagcccuuccagaacgugaaccgcaucaccuacggcgccugcccgcgguacgugaagcagaacacccucaagcuggccaccgggaugcgcaacguccccgagaagcagacgcggggcaucuucggggccaucgccggcuucaucgagaacggcugggaggggaugguggacggcugguacggguuccgccaccagaacagcgagggcaccgggcaggccgccgaccugaaguccacccaggcggccaucgaccagaucaacggcaagcucaaccggcugaucgagaagaccaacgagaaguuccaccagaucgagaaggaguucagcgagguggagggccgcauccaggaccuggagaaguacgucgaggacacgaagaucgaccucugguccuacaacgccgagcugcugguggcccucgagaaccagcacaccaucgaccugaccgacagcgagaugaacaagcuguucgagaagacccgcaagcagcuccgggagaacgccgaggacauggggaacggcugcuucaagaucuaccacaagugcgacaacgcgugcaucggguccauccgcaacggcacguacgaccacgacguguaccgggacgaggcccugaacaaccgcuuccagaucaagggggucgagcucaagagcggcuacaaggacuggauccuguggaucuccuucgccaucagcugcuuccugcugugcgugguccuccugggcuucaucaugugggccugccagaaggggaacauccggugcaacaucugcaucuga

SEQ ID NO: 72657 - RNA, 1701 nt, Artificial Sequence
  derived and/or modified CDS sequence (opt1) from hemagglutinin__InfluenzaA__AFG99998
augaagaccaucaucgcccugagcuacauccucugccugguguucgcccagaagcugcccggcaacgacaacuccaccgcgacgcucugccuggggcaccacgccgucccgaacggcacccuggugaagaccaucaccaacgaccagaucgaggugacgaacgccaccgagcucguccagagcuccagcaccgggcgcaucugcgacagcccccaccggauccuggacggcaagaacugcacccugaucgacgcccuccugggggacccccacugcgacggcuuccagaacaaggagugggaccuguucguggagcgcagcaaggccuacuccaacugcuaccccuacgacgugccggacuacgcgagccuccggucccuggucgccagcuccggcacgcuggaguucaucaacgaggacuucaacuggaccgggguggcccaggacggcgggagcuacgccugcaagcgcggcuccgugaacagcuucuucucccggcucaacuggcugcacaagcuggaguacaaguaccccgcgcucaacgucaccaugcccaacaacgggaaguucgacaagcuguacaucuggggcgugcaccaccccagcaccgacuccgaccagacgagccuguacgugcgcgccuccggccgggucaccgugagcaccaagcgcagccagcagaccgugacgccgaacaucgggucccggcccuggguccgcggccucagcucccggaucagcaucuacuggaccaucgugaagcccggggacauccugcugaucaacuccaccggcaaccucaucgcgccccgcggcuacuucaagauccggaacgggaaguccuccaucaugcgcagcgacgccccgaucggcaacugcuccagcgagugcaucacccccaacggguccauccccaacgacaagcccuuccagaacgugaaccggaucacguacggcgccugcccgcgcuacgucaagcagaacacccugaagcuggccaccgggaugcggaacgugcccgagaagcagacccgcggcaucuucggcgccaucgccggguucaucgagaacggcugggaggggaugguggacggcugguacggguuccggcaccagaacagcgagggcacgggccaggccgccgaccucaaguccacccaggcggccaucgaccagaucaacgggaagcugaaccgccugaucgagaagaccaacgagaaguuccaccagaucgagaaggaguucagcgaggucgagggccggauccaggaccucgagaaguacguggaggacaccaagaucgaccugugguccuacaacgccgagcugcucguggcccuggagaaccagcacacgaucgaccugaccgacagcgagaugaacaagcuguucgagaagacccgcaagcagcuccgcgagaacgccgaggacauggggaacggcugcuucaagaucuaccacaagugcgacaacgcgugcaucggguccauccggaacggcaccuacgaccacgacgucuaccgcgacgaggcccugaacaaccgguuccagaucaagggcguggagcucaagagcggguacaaggacuggauccuguggaucuccuucgccaucagcugcuuccugcucugcgucgugcugcugggcuucaucaugugggccugccagaaggggaacauccgcugcaacaucugcaucuga

SEQ ID NO: 72658 - RNA, 1701 nt, Artificial Sequence; identical to SEQ ID NO: 72626
  derived and/or modified CDS sequence (opt1) from hemagglutinin__InfluenzaA__AFH00021

SEQ ID NO: 72659 - RNA, 1701 nt, Artificial Sequence
  derived and/or modified CDS sequence (opt1) from hemagglutinin__InfluenzaA__AFH00032
augaagaccaucaucgcccugagcuacauccucugccugguguucgcccagaagcugcccggcaacgacaacuccaccgcgacgcucugccuggggcaccacgccgucccgaacggcacccuggugaagaccaucaccaacgaccagaucgaggugacgaacgccaccgagcucguccagagcuccagcaccgggaagaucugcgacagcccccaccgcauccuggacggcaagaacugcacccugaucgacgcccuccugggggacccccacugcgacgacuuccagaacaaggagugggaccuguucguggagcggagcaaggccuacuccaacugcuaccccuacgacgugccggacuacgcgagccuccgcucccuggucgccagcuccggcacgcuggaguucaucaacgaggacuucaacuggaccggcguggcccagagcggggacuccuacgccugcaagcggggcagcgugaaguccuucuucagccgccucaacuggcugcacgaguccgaguacaaguaccccgcgcugaacgucaccaugcccaacaacgacaaguucgacaagcucuacaucuggggcgugcaccaccccagcaccgaccgggagcagacgucccuguacauccgcgccagcggccgggugaccgucagcaccaagcgcucccagcagaccgugaucccgaacaucgggagccggcccugggugcgcggccuguccagccggaucuccaucuacuggacgaucgucaagcccggcgacauccuccugaucaacagcaccgggaaccugaucgcgccccgcggcuacuucaagauccggaccgggaaguccagcaucaugcgcuccgacgccccgaucgggaccugcagcuccgagugcaucacgcccaacggcagcauccccaacgacaagcccuuccagaacgugaaccggaucaccuacggggccugcccgcgcuacgugaagcagaacacccucaagcuggccaccggcaugcggaacguccccgagaagcagacgcgcgggaucuucggcgccaucgccggguucaucgagaacggcugggagggcaugguggacgggugguacggcuuccggcaccagaacuccgaggggaccggccaggccgccgaccugaaguccacccaggcggccaucgaccagaucaacgggaagcucaacaagcugaucgagaagaccaacgagaaguuccaccagaucgagaaggaguucuccgagguggagggccgcauccaggaccuggagaaguacgucgaggacacgaagaucgaccucuggagcuacaacgccgagcugcugguggcccucgagaaccagcacaccaucgaccugaccgacuccgagaugaacaagcuguucgagaagacccggaagcagcuccgcgagaacgccgaggacaugggcaacgggugcuucaagaucuaccacaagugcgacaacgcgugcaucggcagcauccgcaacgggacguacgaccacgacguguaccgggacgaggcccugaacaaccgcuuccagaucaagggcgucgagcugaaguccggguacaaggacuggauccucuggaucagcuucgccaucagcugcuuccugcugugcgugguccuccugggcuucaucaugugggccugccagaagggcaacauccggugcaacaucugcaucuga

SEQ ID NO: 72660 - RNA, 1701 nt, Artificial Sequence
  derived and/or modified CDS sequence (opt1) from hemagglutinin__InfluenzaA__AFH00043
augaagaccaucaucgcccugagcuacauccucugccugguguucgcccagaagcugcccggcaacgacaacuccaccgcgacgcucugccuggggcaccacgccgucccgaacggcacccuggugaagaccaucaccaacgaccagaucgaggugacgaacgccaccgagcucguccagagcuccagcaccgggaagaucugcgacagcccccaccgcauccuggacggcaagaacugcacccugaucgacgcccuccugggggacccccacugcgacgacuuccagaacaaggagugggaccuguucguggagcggagcaaggccuacuccaacugcuaccccuacgacgugccggacuacgcgagccuccgcucccuggucgccagcuccggcacgcuggaguucaucaacgaggacuucaacuggaccggcguggcccagagcggggacuccuacgccugcaagcggggcagcgugaaguccuucuucagccgccucaacuggcugcacgaguccgaguacaaguaccccgcgcugaacgucaccaugcccaacaacgacaaguucgacaagcucuacaucuggggcgugcaccaccccagcaccgaccgggagcagacgucccuguacauccgcgccagcgggcgggugaccgucagcaccaagcgcucccagcagaccgugaucccgaacaucgggagccggcccugggugcgcggccuguccagccggaucuccaucuacuggacgaucgucaagcccggcgacauccuccugaucaacagcaccgggaaccugaucgcgccccgcggcuacuucaagauccggaccgggaaguccagcaucaugcgcuccgacgccaccaucggcacgugcagcuccgagugcaucaccccgaacggcagcauccccaacgacaagcccuuccagaacgugaaccggaucaccuacggggccugcccccgcuacgugaagcagaacacccucaagcuggccacgggcaugcggaacgucccggagaagcagacccgcgggaucuucggcgccaucgccggguucaucgagaacggcugggagggcaugguggacgggugguacggcuuccggcaccagaacuccgaggggaccggccaggccgccgaccugaaguccacccaggcggccaucgaccagaucaacgggaagcucaacaagcugaucgagaagacgaacgagaaguuccaccagaucgagaaggaguucuccgagguggagggccgcauccaggaccuggagaaguacgucgaggacaccaagaucgaccucuggagcuacaacgccgagcugcugguggcccucgagaaccagcacaccaucgaccugaccgacuccgagaugaacaagcuguucgagaagacgcggaagcagcuccgcgagaacgccgaggacaugggcaacgggugcuucaagaucuaccacaagugcgacaacgcgugcaucggcagcauccgcaacgggaccuacgaccacgacguguaccgggacgaggcccugaacaaccgcuuccagaucaagggcgucgagcugaaguccggguacaaggacuggauccucuggaucagcuucgccaucagcugcuuccugcugugcgugguccuccugggcuucaucaugugggccugccagaagggcaacauccggugcaacaucugcaucuga

SEQ ID NO: 72661 - RNA, 1701 nt, Artificial Sequence
  derived and/or modified CDS sequence (opt1) from hemagglutinin__InfluenzaA__AFH00054
augaagaccaucaucgcccugagcuacauccucugccugguguucgcccagaagcugcccggcaacgacaacuccaccgcgacgcucugccuggggcaccacgccgucccgaacggcacccuggugaagaccaucaccaacgaccagaucgaggugacgaacgccaccgagcucguccagagcuccagcaccgggcgcaucugcgacagcccccaccggauccuggacggcaagaacugcacccugaucgacgcccuccugggggacccccacugcgacggcuuccagaacaaggagugggaccuguucguggagcgcagcaaggccuacuccaacugcuaccccuacgacgugccggacuacgcgagccuccggucccuggucgccagcuccggcacgcuggaguucaucaacgaggacuucaacuggaccgggguggcccagaacggcgacagcuacgccugcaagcgcggguccgugaaguccuucuucucccggcucaacuggcugcacgagagcgaguacaaguaccccgcgcugaacgucaccaugcccaacaacgacaaguucgacaagcucuacaucuggggcgugcaccaccccuccaccgaccgcgagcagacgagccuguacauccgggccuccgggcgcgugaccgucagcaccaagcggagccagcagaccgugaucccgaacaucggcucccgccccugggugcggggccugagcucccgcaucagcaucuacuggacgaucgucaagcccggggacauccuccugaucaacuccaccggcaaccugaucgcgccccggggguacuucaagauccgcaccggcaagagcuccaucaugcggagcgacgccccgaucgggaccugcuccagcgagugcaucacgcccaacggcuccauccccaacgacaagcccuuccagaacgugaaccgcaucaccuacggcgccugcccgcgguacgugaagcagaacacccucaagcuggccaccgggaugcgcaacguccccgagaagcagacgcggggcaucuucggggccaucgccggcuucaucgagaacggcugggaggggaugguggacggcugguacggguuccgccaccagaacagcgagggcaccgggcaggccgccgaccugaaguccacccaggcggccaucgaccagaucaacggcaagcucaaccggcugaucgagaagaccaacgagaaguuccaccagaucgagaaggaguucagcgagguggagggccgcauccaggaccuggagaaguacgucgaggacacgaagaucgaccucugguccuacaacgccgagcugcugguggcccucgagaaccagcacaccaucgaccugaccgacagcgagaugaacaagcuguucgagaagacccgcaagcagcuccgggagaacgccgaggacauggggaacggcugcuucaagaucuaccacaagugcgacaacgcgugcaucggguccauccgcaacggcacguacgaccacgacguguaccgggacgaggcccugaacaaccgcuuccacaucaagggggucgagcucaagagcggcuacaaggacuggauccuguggaucuccuucgccaucagcugcuuccugcugugcgugguccuccugggcuucaucaugugggccugccagaaggggaacauccggugcaacaucugcaucuga

SEQ ID NO: 72662 - RNA, 1701 nt, Artificial Sequence
  derived and/or modified CDS sequence (opt1) from hemagglutinin__InfluenzaA__AFH00065
augaagaccaucaucgcccugagcuacauccucugccugguguucgcccagaagcugcccggcaacgacaacuccaccgcgacgcucugccuggggcaccacgccgucccgaacggcacccuggugaagaccaucaccaacgaccagaucgaggugacgaacgccaccgagcucguccagagcuccagcaccgggcgcaucugcgacagcccccaccggauccuggacggcaagaacugcacccugaucgacgcccuccugggggacccccacugcgacggcuuccagaacaaggagugggaccuguucguggagcgcagcaaggccuacuccaacugcuaccccuacgacgugccggacuacgcgagccuccggucccuggucgccagcuccggcacgcuggaguucaucaacgaggacuucaacuggaccgggguggcccaggacggcgggagcuacgccugcaagcgcggcuccgugaacagcuucuucucccggcucaacuggcugcacaagcuggaguacaaguaccccgcgcucaacgucaccaugcccaacaacgggaaguucgacaagcuguacaucuggggcgugcaccaccccagcaccgacuccgaccagacgagccuguacgugcgcgccuccggccgggucaccgugagcaccaagcgcagccagcagaccgugaucccgaacaucgggucccggcccuggguccgcggccagcccagccggaucuccaucuacuggacgaucgugaagcccggggacauccuccugaucaacagcaccggcaaccugaucgccccgcgcggcuacuucaagauccggaacgggaaguccagcaucaugcgcuccgacgcccccaucggcaacugcagcuccgagugcaucacccccaacgggagcauccccaacgacaagccguuccagaacgugaaccggaucaccuacggcgccugcccccgcuacgucaagcagaacacgcucaagcuggcgaccgggaugcggaacgugcccgagaagcagacccgcggcaucuucggcgccaucgccggguucaucgagaacggcugggaggggaugguggacggcugguacggguuccggcaccagaacuccgagggcaccggccaggccgccgaccugaaguccacgcaggcggccaucgaccagaucaacgggaagcucaaccgccugaucgagaagaccaacgagaaguuccaccagaucgagaaggaguucuccgaggucgagggccggauccaggaccuggagaaguacguggaggacaccaagaucgaccucuggagcuacaacgccgagcugcugguggcccucgagaaccagcacaccaucgaccugacggacuccgagaugaacaagcuguucgagcgcacccgcaagcagcuccgggagaacgccgaggacauggggaacggcugcuucaagaucuaccacaagugcgacaacgcgugcaucgggagcauccgcaacggcaccuacgaccacgacgucuaccgggacgaggcccugaacaaccgcuuccagaucaagggcguggagcugaaguccggguacaaggacuggauccucuggaucagcuucgccaucuccugcuuccugcugugcgucgugcuccugggcuucaucaugugggccugccagaaggggaacauccggugcaacaucugcaucuga

SEQ ID NO: 72663 - RNA, 1701 nt, Artificial Sequence
  derived and/or modified CDS sequence (opt1) from hemagglutinin__InfluenzaA__AFH00076
augaagaccaucaucgcccugagcuacauccucugccugguguucgcccagaagcugcccggcaacgacaacuccaccgcgacgcucugccuggggcaccacgccgucccgaacggcacccuggugaagaccaucaccaacgaccagaucgaggugacgaacgccaccgagcucguccagagcuccagcaccgggaagaucugcgacagcccccaccgcauccuggacggcaagaacugcacccugaucgacgcccuccugggggacccccacugcgacgacuuccagaacaaggagugggaccuguucguggagcggagcaaggccuacuccaacugcuaccccuacgacgugccggacuacgcgagccuccgcucccuggucgccagcuccggcacgcuggaguucaucaacgaggacuucaacuggaccggcguggcccagagcggggacuccuacgccugcaagcggggcagcgugaaguccuucuucagccgccucaacuggcugcacgaguccgaguacaaguaccccgcgcugaacgucaccaugcccaacaacgacaaguucgacaagcucuacaucuggggcgugcaccaccccagcaccgaccgggagcagacgucccuguacauccgcgccagcggccgggugaccgucagcaccaagcgcucccagcagaccgugaucccgaacaucgggagccggcccugggugcgcggccuguccagccggaucuccaucuacuggacgaucgucaagcccggcgacauccuccugaucaacagcaccgggaaccugaucgcgccccgcggcuacuucaagauccggaccgggaaguccagcaucaugcgcuccgacgccccgaucgggaccugcaacagcgagugcaucacgcccaacggcuccauccccaacgacaagcccuuccagaacgugaaccggaucaccuacggggccugcccgcgcuacgugaagcagaacacccucaagcuggccaccggcaugcggaacguccccgagaagcagacgcgcgggaucuucggcgccaucgccggguucaucgagaacggcugggagggcaugguggacgggugguacggcuuccggcaccagaacagcgaggggaccggccaggccgccgaccugaaguccacccaggcggccaucgaccagaucaacgggaagcucaaccgccugaucgagaagaccaacgagaaguuccaccagaucgagaaggaguucagcgagguggagggccggauccaggaccuggagaaguacgucgaggacacgaagaucgaccucugguccuacaacgccgagcugcugguggcccucgagaaccagcacaccaucgaccugaccgacagcgagaugaacaagcuguucgagaagacccgcaagcagcuccgcgagaacgccgaggacaugggcaacgggugcuucaagaucuaccacaagugcgacaacgcgugcaucggcuccauccggaacgggacguacgaccacgacguguaccgcgacgaggcccugaacaaccgguuccagaucaagggcgucgagcugaaguccggguacaaggacuggauccucuggaucuccuucgccaucagcugcuuccugcugugcgugguccuccugggcuucaucaugugggccugccagaagggcaacauccgcugcaacaucugcaucuga

SEQ ID NO: 72664 - RNA, 1701 nt, Artificial Sequence
  derived and/or modified CDS sequence (opt1) from hemagglutinin__InfluenzaA__AFH00087
augaagaccaucaucgcccugagcuacauccucugccugguguucgcccagaagcugcccggcaacgacaacuccaccgcgacgcucugccuggggcaccacgccgucccgaacggcacccuggugaagaccaucaccaacgaccagaucgaggugacgaacgccaccgagcucguccagagcuccagcaccgggcgcaucugcgacagcccccaccggauccuggacggcaagaacugcacccugaucgacgcccuccugggggacccccacugcgacggcuuccagaacaaggagugggaccuguucguggagcgcagcgaggccuacuccagcugcuaccccuacgacgugccggacuacgcgucccuccggagccuggucgccuccagcggcacgcuggaguucaucaacgaggacuucaacuggaccgggguggcccaggacggcaaguccuacgccugcaagcgcgggagcgugaacuccuucuucagccggcucaacuggcugcacaagcuggaguacaaguaccccgcgcucaacgucaccaugcccaacaacggcaaguucgacaagcuguacaucuggggcgugcaccaccccuccaccgacagcgaccagacgucccuguacgugcgcgccagcgggcgggucaccgugagcaccaagcgcucccagcagaccgugaucccgaacaucggcagccggcccuggguccgcgggcaguccagccggaucggcaucuacuggacgaucgugaagcccggggacauccuccugaucaacuccaccggcaaccugaucgcgccccgcggcuacuucaagauccggaacgggaaguccuccaucaugcgcagcgacgccccgaucggcaacugcuccagcgagugcaucacccccaacggguccauccccaacgacaagcccuuccagaacgugaacaagaucaccuacggcgccugcccgcgguacgucaagcagaacacgcucaagcuggccaccgggaugcgcaacgugcccgagaagcagacccggggcaucuucggcgccaucgccggguucaucgagaacggcugggaggggaugguggacggcugguacggguuccgccaccagaacagcgagggcaccggccaggccgccgaccugaaguccacgcaggcggccaucgaccagaucaacgggaagcucaaccggcugaucgagaagaccaacgagaaguuccaccagaucgagaaggaguucagcgaggucgagggccgcauccaggaccuggagaaguacguggaggacaccaagaucgaccucugguccuacaacgccgagcugcugguggcccucgagaaccagcacaccaucgaccugacggacagcgagaugaacaagcuguucgagcggacccgcaagcagcuccgcgagaacgccgaggacauggggaacggcugcuucaagaucuaccacaagugcgacaacgcgugcaucggguccauccggaacggcaccuacgaccacgacgucuaccgcgacgaggcccugaacaaccgguuccagaucaagggcguggagcucaagagcggguacaaggacuggauccuguggaucuccuucgccaucagcugcuuccugcugugcgucgugcuccugggcuucaucaugugggccugccagaaggggaacauccgcugcaacaucugcaucuga

SEQ ID NO: 72665 - RNA, 1701 nt, Artificial Sequence
  derived and/or modified CDS sequence (opt1) from hemagglutinin__InfluenzaA__AFH00098
augaagaccaucaucgcccugagcuacauccucugccugguguucgcccagaagcugcccggcaacgacaacuccaccgcgacgcucugccuggggcaccacgccgucccgaacggcacccuggugaagaccaucaccaacgaccagaucgaggugacgaacgccaccgagcucguccagagcuccagcaccgggcgcaucugcgacagcccccaccggauccuggacggcaagaacugcacccugaucgacgcccuccugggggacccccacugcgacggcuuccagaacaaggagugggaccuguucguggagcgcuccaaggccuacuccaacugcuaccccuacgacgugccggacuacgcgagccuccggucccuggucgccagcuccggcacgcuggaguucaucaacgaggacuucaacuggaccgggguggcccaggacggcgggagcuacgccugcaagcgcggcuccgugaacagcuucuucucccggcucaacuggcugcacaagcuggaguacaaguaccccgcgcucaacgucaccaugcccaacaacgggaaguucgacaagcuguacaucuggggcgugcaccaccccagcaccgacuccgaccagacgagccuguacgugcgcgccuccggccgggucaccgugagcaccaagcgcagccagcagaccgugaucccgaacaucgggucccggcccuggguccgcggccuccccagccggaucuccaucuacuggacgaucgugaagcccggggacauccugcugaucaacagcaccggcaaccucaucgccccgcgcggcuacuucaagauccggaacgggaaguccagcaucaugcgcuccgacgcccccaucggcaacugcagcuccgagugcaucacccccaacgggagcauccccaacgacaagccguuccagaacgugaaccggaucaccuacggcgccugcccccgcuacgucaagcagaacacgcugaagcuggcgaccgggaugcggaacgugcccgagaagcagacccgcggcaucuucggcgccaucgccggguucaucgagaacggcugggaggggaugguggacggcugguacggguuccggcaccagaacuccgagggcaccggccaggccgccgaccucaagagcacgcaggcggccaucgaccagaucaacgggaagcugaaccgccugaucgagaagaccaacgagaaguuccaccagaucgagaaggaguucuccgaggucgagggccggauccaggaccucgagaaguacguggaggacaccaagaucgaccuguggagcuacaacgccgagcugcucguggcccuggagaaccagcacaccaucgaccugacggacuccgagaugaacaagcuguucgagcgcacccgcaagcagcuccgggagaacgccgaggacauggggaacggcugcuucaagaucuaccacaagugcgacaacgcgugcaucgggagcauccgcaacggcaccuacgaccacgacgucuaccgggacgaggcccugaacaaccgcuuccagaucaagggcguggagcucaaguccggguacaaggacuggauccuguggaucagcuucgccaucuccugcuuccugcucugcgucgugcugcugggcuucaucaugugggccugccagaaggggaacauccggugcaacaucugcaucuga

SEQ ID NO: 72666 - RNA, 1701 nt, Artificial Sequence
  derived and/or modified CDS sequence (opt1) from hemagglutinin__InfluenzaA__AFH00109
augaagaccaucaucgcccugagcuacauccucugccugguguucgcccagaagcugcccggcaacgacaacuccaccgcgacgcucugccuggggcaccacgccgucccgaacggcacccuggugaagaccaucaccaacgaccagaucgaggugacgaacgccaccgagcucguccagagcuccagcaccgggcgcaucugcgacagcccccaccggauccuggacggcaagaacugcacccugaucgacgcccuccugggggacccccacugcgacggcuuccagaacaaggagugggaccuguucguggagcgcuccaaggccuacuccaacugcuaccccuacgacgugccggacuacgcgagccuccggucccuggucgccagcuccggcacgcuggaguucaucaacgaggacuucaacuggaccgggguggcccaggacggcaagagcuacacgugcaagcgcggguccgugaacagcuucuucucccggcucaacuggcugcacaagcuggaguacaaguaccccgcccucaacgucaccaugcccaacaacggcaaguucgacaagcuguacaucuggggcgugcaccaccccagcaccgacuccgaccagaccagccuguacgugcgcgcguccgggcgggucaccgugagcaccaagcgcagccagcagacggugaucccgaacaucggcuuccggcccuggguccgcgggcucuccagccggaucuccaucuacuggaccaucgugaagcccggcgacauccugcugaucaacagcaccgggaaccucaucgcgccccgcggcuacuucaagauccggaacggcaaguccagcaucaugcgcuccgacgccccgaucgggaacugcagcuccgagugcaucacccccaacggcagcauccccaacgacaagcccuuccagaacgugaaccggaucacguacggggccugcccgcgcuacgucaagcagaacacccugaagcuggccaccggcaugcggaacgugcccgagaagcagacccgcgggaucuucggcgccaucgccggcuucaucgagaacgggugggagggcaugguggacgggugguacggcuuccggcaccagaacuccgaggggacgggccaggccgccgaccucaagagcacccaggccgcgaucgaccagaucaacggcaagcugaaccgccugaucgagaagaccaacgagaaguuccaccagaucgagaaggaguucuccgaggucgaggggcggauccaggaccucgagaaguacguggaggacaccaagaucgaccuguggagcuacaacgccggccugcucguggcccuggagaaccagcacacgaucgaccugaccgacuccgagaugaacaagcuguucgagcgcacccgcaagcagcuccgggagaacgccgaggacauggggaacggcugcuucaagaucuaccacaagugcgacaacgccugcaucgggagcauccgcaacggcaccuacgaccacgacgucuaccgggacgaggcgcugaacaaccgcuuccagaucaagggcguggagcucaaguccggguacaaggacuggauccuguggaucagcuucgccaucuccugcuuccugcucugcgucgugcugcugggcuucaucaugugggccugccagaaggggaacauccggugcaacaucugcaucuga

SEQ ID NO: 72667 - RNA, 1701 nt, Artificial Sequence
  derived and/or modified CDS sequence (opt1) from hemagglutinin__InfluenzaA__AFH00120
augaagaccaucaucgcccugagcuacauccucugccugguguucgcccagaagcugcccggcaacgacaacuccaccgcgacgcucugccuggggcaccacgccgucccgaacggcacccuggugaagaccaucaccaacgaccagaucgaggugacgaacgccaccgagcucguccagagcuccagcaccgggcgcaucugcgacagcccccaccggauccuggacggcaagaacugcacccugaucgacgcccuccugggggacccccacugcgacggcuuccagaacaaggagugggaccuguucguggagcgcuccaaggccuacuccaacugcuaccccuacgacgugccggacuacgcgagccuccggucccuggucgccagcuccggcacgcuggaguucaucaacgaggacuucaacuggaccgggguggcccaggacggcaagagcuacgccugcaagcgcggguccgugaacagcuucuucucccggcucaacuggcugcacaagcuggaguacaaguaccccgcgcucaacgucaccaugcccaacaacggcaaguucgacaagcuguacaucuggggcgugcaccaccccagcaccgacuccgaccagacgagccuguacgugcgcgccuccgggcgggucaccgugagcaccaagcgcagccagcagaccgugaucccgaacaucggcuuccggcccuggguccgcgggcucuccagccggaucuccaucuacuggacgaucgugaagcccggcgacauccugcugaucaacagcaccgggaaccucaucgcgccccgcggcuacuucaagauccggaacggcaaguccagcaucaugcgcuccgacgccccgaucgggaacugcagcuccgagugcaucacccccaacggcagcauccccaacgacaagcccuuccagaacgugaaccggaucaccuacggggccugcccgcgcuacgucaagcagaacacgcugaagcuggccaccggcaugcggaacgugcccgagaagcagacccgcgggaucuucggcgccaucgccggcuucaucgagaacgggugggagggcaugguggacgggugguacggcuuccggcaccagaacuccgaggggaccggccaggccgccgaccucaagagcacgcaggcggccaucgaccagaucaacggcaagcugaaccgccugaucgagaagaccaacgagaaguuccaccagaucgagaaggaguucuccgaggucgaggggcggauccaggaccucgagaaguacguggaggacaccaagaucgaccuguggagcuacaacgccggccugcucguggcccuggagaaccagcacaccaucgaccugacggacuccgagaugaacaagcuguucgagcgcacccgcaagcagcuccgggagaacgccgaggacauggggaacggcugcuucaagaucuaccacaagugcgacaacgcgugcaucgggagcauccgcaacggcaccuacgaccacgacgucuaccgggacgaggcccugaacaaccgcuuccagaucaagggcguggagcucaaguccggguacaaggacuggauccuguggaucagcuucgccaucuccugcuuccugcucugcgucgugcugcugggcuucaccaugugggccugccagaaggggaacauccggugcaacaucugcaucuga

SEQ ID NO: 72668 - RNA, 1701 nt, Artificial Sequence; identical to SEQ ID NO: 72522
  derived and/or modified CDS sequence (opt1) from hemagglutinin__InfluenzaA__AFH00131

SEQ ID NO: 72669 - RNA, 1701 nt, Artificial Sequence
  derived and/or modified CDS sequence (opt1) from hemagglutinin__InfluenzaA__AFH00153
augaagaccaucaucgcccugagcuacauccucugccugguguucgcccagaagcugcccggcaacgacaacuccaccgcgacgcucugccuggggcaccacgccgucccgaacggcacccuggugaagaccaucaccaacgaccagaucgaggugacgaacgccaccgagcucguccagagcuccagcaccgggcgcaucugcgacagcccccaccggauccuggacggcaagaacugcacccugaucgacgcccuccugggggacccccacugcgacggcuuccagaacaaggagugggaccuguucguggagcgcuccaaggccuacuccaacugcuaccccuacgacgugccggacuacgcgagccuccggucccuggucgccagcuccggcacgcuggaguucaucaacgaggacuucaacuggaccgggguggcccaggacggcaagagcuacgccugcaagcgcggguccgugaacagcuucuucucccggcucaacuggcugcacaagcuggaguacaaguaccccgcgcucaacgucaccaugcccaacaacggcaaguucgacaagcuguacaucuggggcgugcaccaccccagcaccgacuccgaccagacgagccuguacauccgcgccuccgggcgggugaccgucagcaccaagcgcagccagcagaccgugaucccgaacaucggcucccggcccugggugcgcgggcucagcucccggaucagcaucuacuggacgaucgucaagcccggcgacauccugcugaucaacuccaccgggaaccucaucgcgccccgcggcuacuucaagauccggaacggcaagagcuccaucaugcgcagcgacgccccgaucgggaacugcuccagcgagugcaucacccccaacggcuccauccccaacgacaagcccuuccagaacgugaaccggaucaccuacggggccugcccgcgcuacgugaagcagaacacgcugaagcuggccaccggcaugcggaacguccccgagaagcagacccgcgggaucuucggcgccaucgccggcuucaucgagaacgggugggagggcaugguggacgggugguacggcuuccggcaccagaacagcgaggggaccggccaggccgccgaccucaaguccacgcaggcggccaucgaccagaucaacggcaagcugaaccgccugaucgagaagaccaacgagaaguuccaccagaucgagaaggaguucagcgagguggaggggcggauccaggaccucgagaaguacgucgaggacaccaagaucgaccugugguccuacaacgccgagcugcucguggcccuggagaaccagcacaccaucgaccugacggacagcgagaugaacaagcuguucgagcgcacccgcaagcagcuccgggagaacgccgaggacaugggcaacgggugcuucaagaucuaccacaagugcgacaacgcgugcaucggcuccauccgcaacgggaccuacgaccacgacguguaccgggacgaggcccugaacaaccgcuuccagaucaagggcgucgagcucaagagcggcuacaaggacuggauccuguggaucuccuucgccaucagcugcuuccugcucugcgugguccugcugggguucaucaugugggccugccagaagggcaacauccggugcaacaucugcaucuga

SEQ ID NO: 72670 - RNA, 1701 nt, Artificial Sequence
  derived and/or modified CDS sequence (opt1) from hemagglutinin__InfluenzaA__AFH00164
augaagaccaucaucgcccugagcuacauccucugccugguguucgcccagaagcugcccggcaacgacaacuccaccgcgacgcucugccuggggcaccacgccgucccgaacggcacccuggugaagaccaucaccaacgaccagaucgaggugacgaacgccaccgagcucguccagagcuccagcaccgggcgcaucugcgacagcccccaccggauccuggacggcaagaacugcacccugauggacgcccuccugggggacccccacugcgacggcuuccagaacaaggagugggaccuguucguggagcgcagcaaggccuacuccaacugcuaccccuacgacgugccggacuacgcgagccuccggucccuggucgccagcuccggcacgcuggaguucaucaacgaggacuucaacuggaccgggguggcccagaacggcgacagcuacgccugcaagcgcggguccgugaaguccuucuucucccggcucaacuggcugcacgagagcgaguacaaguaccccgcgcugaacgucaccaugcccaacaacgacaaguucgacaagcucuacaucuggggcgugcaccaccccuccaccgaccgcgagcagacgagccuguacauccgggccuccgggcgcgugaccgucagcaccaagcggagccagcagaccgugaucccgaacaucggcucccgccccugggugcggggccugagcucccgcaucagcaucuacuggacgaucgucaagcccggggacauccuccugaucaacuccaccggcaaccugaucgcgccccggggguacuucaagauccgcaccggcaagagcuccaucaugcggagcgacgccccgaucgggaccugcuccagcgagugcaucacgcccaacggcuccauccccaacgacaagcccuuccagaacgugaaccgcaucaccuacggcgccugcccgcgguacgugaagcagaacacccucaagcuggccaccgggaugcgcaacguccccgagaagcagacgcggggcaucuucggggccaucgccggcuucaucgagaacggcugggaggggaugguggacggcugguacggguuccgccaccagaacagcgagggcaccgggcaggccgccgaccugaaguccacccaggcggccaucgaccagaucaacggcaagcucaaccggcugaucgagaagaccaacgagaaguuccaccagaucgagaaggaguucagcgagguggagggccgcauccaggaccuggagaaguacgucgaggacacgaagaucgaccucugguccuacaacgccgagcugcugguggcccucgagaaccagcacaccaucgaccugaccgacagcgagaugaacaagcuguucgagaagacccgcaagcagcuccgggagaacgccgaggacauggggaacggcugcuucaagaucuaccacaagugcgacaacgcgugcaucggguccauccgcaacggcacguacgaccacgacguguaccgggacgaggcccugaacaaccgcuuccagaucaagggggucgagcucaagagcggcuacaaggacuggauccuguggaucuccuucgccaucagcugcuuccugcugugcgugguccuccugggcuucaucaugugggccugccagaaggggaacauccggugcaacaucugcaucuga

SEQ ID NO: 72671 - RNA, 1701 nt, Artificial Sequence
  derived and/or modified CDS sequence (opt1) from hemagglutinin__InfluenzaA__AFH00175
augaagaccaucaucgcccugagcuacauccucugccugguguucgcccagaagcugcccggcaacgacaacuccaccgcgacgcucugccuggggcaccacgccgucccgaacggcacccuggugaagaccaucaccaacgaccagaucgaggugacgaacgccaccgagcucguccagagcuccagcaccgggcgcaucugcgacagcccccaccggauccuggacggcaagaacugcacccugaucgacgcccuccugggggacccccacugcgacggcuuccagaacaaggagugggaccuguucguggagcgcagcaaggccuacuccaacugcuaccccuacgacgugccggacuacgcgagccuccggucccuggucgccagcuccggcacgcuggaguucaucaacgaggacuucaacuggaccgggguggcccaggacggcaagagcuacgccugcaagcgcggguccgucaagagcuucuucucccggcucaacuggcugcacaagcuggaguacaaguaccccgcgcucaacgugaccaugcccaacaacggcaaguucgacaagcuguacaucuggggcgugcaccaccccagcaccgacuccgaccagacgagccuguacgugcgcgccuccgggcgggucaccgugagcaccaagaagucccagcagaccgugaucccgaacaucggcucccgccccuggguccgggggcagagcucccgcaucagcaucuacuggacgaucgugaagcccggcgacauccuccugaucaacuccaccgggaaccugaucgcgccccggggcuacuucaagauccgcaacggcaagagcuccaucaugcggagcgacgccccgaucgggaacugcuccagcgagugcaucacccccaacggcuccauccccaacgacaagcccuuccagaacgugaaccgcaucaccuacggggccugcccgcgguacgucaagcagaacacgcucaagcuggccaccggcaugcgcaacgugcccgagaagcagacccgggggaucuucggcgccaucgccggcuucaucgagaacgggugggagggcaugguggacgggugguacggcuuccgccaccagaacagcgaggggaccggccaggccgccgaccugaaguccacgcaggcggccaucgaccagaucaacggcaagcucaaccggcugaucgagaagaccaacgagaaguuccaccagaucgagaaggaguucagcgaggucgaggggcgcauccaggaccuggagaaguacguggaggacaccaagaucgaccucugguccuacaacgccgagcugcugguggcccucgagaaccagcacaccaucgaccugacggacagcgagaugaacaagcuguucgagcggacccgcaagcagcuccgcgagaacgccgaggacaugggcaacgggugcuucaagaucuaccacaagugcgacaacgcgugcaucggcuccauccggaacgggaccuacgaccacgacgucuaccgcgacgaggcccugaacaaccgguuccagaucaagggcguggagcucaagagcggcuacaaggacuggauccuguggaucuccuucgccaucagcugcuuccugcugugcgucgugcuccugggguucaucaugugggccugccagaagggcaacauccgcugcaacaucugcaucuga

SEQ ID NO: 72672 - RNA, 1701 nt, Artificial Sequence
  derived and/or modified CDS sequence (opt1) from hemagglutinin__InfluenzaA__AFH00186
augaagaccaucaucgcccugagccacauccucugccugguguucgcccagaagcugcccggcaacgacaacuccaccgcgacgcucugccuggggcaccacgccgucccgaacggcacccuggugaagaccaucaccaacgaccagaucgaggugacgaacgccaccgagcucguccagagcuccagcaccgggcgcaucugcgacagcccccaccggauccuggacggcaagaacugcacccugaucgacgcccuccugggggacccccacugcgacggcuuccagaacaaggagugggaccuguucguggagcgcagcaaggccuacuccaacugcuaccccuacgacgugccggacuacgcgagccuccggucccuggucgccagcuccggcacgcuggaguucaucaacgaggacuucaacuggaccgggguggcccaggacggcgggagcuacgccugcaagcgcggcuccgugaacagcuucuucucccggcucaacuggcugcacaagcuggaguacaaguaccccgcgcucaacgucaccaugcccaacaacgggaaguucgacaagcuguacaucuggggcgugcaccaccccagcaccgacuccgaccagacgagccuguacgugcgcgccuccggccgggucaccgugagcaccaagcgcagccagcagaccgugacgccgaacaucgggucccggcccuggguccgcggccagagcucccggaucagcaucuacuggaccaucgugaagcccggggacauccuccugaucuccagcaccggcaaccugaucgcgccccgcggcuacuucaagauccggaacgggaaguccagcaucaugcgcuccgacgugccgaucggcaacugcagcuccgagugcaucacccccaacgggagcauccccaacgacaagcccuuccagaacgucaaccggaucacguacggcgccugcccgcgcuacgugaagcagaacacccucaagcuggccaccgggaugcggaacgugcccgagaagcagacccgcggcaucuucggcgccaucgccggguucaucgagaacggcugggaggggauggucgacggcugguacggguuccggcaccagaacuccgagggcacgggccaggccgccgaccugaaguccacccaggccgcgaucgaccagaucaacgggaagcucaaccgccugaucgagaagaccaacgagaaguuccaccagaucgagaaggaguucuccgagguggagggccggauccaggaccuggagaaguacguggaggacaccaagaucgaccucuggagcuacaacgccgagcugaucgucgcccuggagaaccagcacacgaucgaccucaccgacuccgagaugaacaagcuguucgagaagacccgcaagcagcugcgcgagaacgccgaggacauggggaacggcugcuucaagaucuaccacaagugcgacaacgccugcaucgggagcauccggaacggcaccuacgaccacgacguguaccgcgacgaggcgcucaacaaccgguuccagaucaagggcgucgagcugaaguccggguacaaggacuggauccuguggaucagcuucgccaucagcugcuuccuccugugcguggugcugcucggcuucaucaugugggccugccagaaggggaacauccgcugcaacaucugcaucuga

SEQ ID NO: 72673 - RNA, 1701 nt, Artificial Sequence
  derived and/or modified CDS sequence (opt1) from hemagglutinin__InfluenzaA__AFH00197
augaagaccaucaucgcccugagcuacauccucugccugguguucgcccagaagcugcccggcaacgacaacuccaccgcgacgcucugccuggggcaccacgccgucccgaacggcacccuggugaagaccaucaccaacgaccagaucgaggugacgaacgccaccgagcucguccagagcuccagcaccgggcgcaucugcgacagcccccaccggauccuggacggcaagaacugcacccugaucgacgcccuccugggggacccccacugcgacggcuuccagaacaaggagugggaccuguucguggagcgcagcaaggccuacuccaacugcuaccccuacgacgugccggacuacgcgagccuccggucccuggucgccagcuccggcacgcuggaguucaucaacgaggacuucaacuggaccgggguggcccaggacggcgggagcuacacgugcaagcgcggcuccgugaacagcuucuucucccggcucaacuggcugcacaagcuggaguacaaguaccccgcccucaacgucaccaugcccaacaacgggaaguucgacaagcuguacaucuggggcgugcaccaccccagcaccgacuccgaccagaccagccuguacgugcgcgcguccggccgggucaccgugagcaccaagaucagccagcagacggugaucccgaacaucgggucccgccccuggguccggggccucagcucccgcaucagcaucuacuggaccaucgugaagcccggggacauccugcugaucaacuccaccggcaaccucaucgcgccccggggcuacuucaagauccgcaacgggaaguccuccaucaugcggagcgacgccccgaucggcaacugcuccagcgagugcaucacccccaacggguccauccccaacgacaagcccuuccagaacgugaaccgcaucacguacggcgccugcccgcgguacgucaagcagaacacccugaagcuggccaccgggaugcgcaacgugcccgagaagcagacccggggcaucuucggcgccaucgccggguucaucgagaacggcugggaggggaugguggacggcugguacggguuccgccaccagaacagcgagggcacgggccaggccgccgaccucaaguccacccaggccgcgaucgaccagaucaacgggaagcugaaccggcugaucgagaagaccaacgagaaguuccaccagaucgagaaggaguucagcgaggucgagggccgcauccaggaccucgagaaguacguggaggacaccaagaucgaccugugguccuacaacgccgagcugcucguggcccuggagaaccagcacacgaucgaccugaccgacagcgagaugaacaagcuguucgagcggacccgcaagcagcuccgcgagaacgccgaggacauggggaacggcugcuucaagaucuaccacaagugcgacaacgccugcaucggguccauccggaacggcaccuacgaccacgacgucuaccgcgacgaggcgcugaacaaccgguuccagaucaagggcguggagcucaagagcggguacaaggacuggauccuguggaucuccuucgccaucagcugcuuccugcucugcgucgugcugcugggcuucaucaugugggccugccagaaggggaacauccgcugcaacaucugcaucuga

SEQ ID NO: 72674 - RNA, 1701 nt, Artificial Sequence
  derived and/or modified CDS sequence (opt1) from hemagglutinin__InfluenzaA__AFH00208
augaagaccaucaucgcccugagcuacauccucugccugguguucgcccagaagcugcccggcaacgacaacuccaccgcgacgcucugccuggggcaccacgccgucccgaacggcacccuggugaagaccaucaccaacgaccagaucgaggugacgaacgccaccgagcucguccagagcuccagcaccgggcgcaucugcgacagcccccaccggauccuggacggcaagaacugcacccugaucgacgcccuccugggggacccccacugcgacggcuuccagaacaaggagugggaccuguucguggagcgcagcaaggccuacuccaacugcuaccccuacgacgugccggacuacgcgagccuccggucccuggucgccagcuccggcacgcuggaguucaucaacgaggacuucaacuggaccgggguggcccagaacggcgacagcuacgccugcaagcgcggguccgugaaguccuucuucucccggcucaacuggcugcacgagagcgaguacaaguaccccgcgcugaacgucaccaugcccaacaacgacaaguucgacaagcucuacaucuggggcgugcaccaccccuccaccgaccgcgagcagacgagccuguacauccgggccuccgggcgcgugaccgucagcaccaagcggagccagcagaccgugaucccgaacaucggcucccgccccugggugcggggccugagcucccgcaucagcaucuacuggacgaucgucaagcccggggacauccuccugaucaacuccaccggcaaccugaucgcgccccggggguacuucaagauccgcaccggcaagagcuccgugaugcggagcgacgccccgaucgggaccugcuccagcgagugcaucacgcccaacggcuccauccccaacgacaagcccuuccagaacgugaaccgcaucaccuacggcgccugcccgcgguacgucaagcagaacacccucaagcuggccaccgggaugcgcaacgugcccgagaagcagacgcggggcaucuucggggccaucgccggcuucaucgagaacggcugggaggggaugguggacggcugguacggguuccgccaccagaacagcgagggcaccgggcaggccgccgaccugaaguccacccaggcggccaucgaccagaucaacggcaagcucagccggcugaucgagaagaccaacgagaaguuccaccagaucgagaaggaguucuccgaggucgagggccgcauccaggaccuggagaaguacguggaggacacgaagaucgaccucuggagcuacaacgccgagcugcugguggcccucgagaaccagcacaccaucgaccugaccgacuccgagaugaacaagcuguucgagaagacccgcaagcagcuccgggagaacgccgaggacauggggaacggcugcuucaagaucuaccacaagugcgacaacgcgugcaucgggagcauccgcaacggcacguacgaccacgacgucuaccgggacgaggcccugaacaaccgcuuccagaucaaggggguggagcugaaguccggcuacaaggacuggauccucuggaucagcuucgccaucagcugcuuccugcugugcgucgugcuccugggcuucaucaugugggccugccagaaggggaacauccggugcaacaucugcaucuga

SEQ ID NO: 72675 - RNA, 1701 nt, Artificial Sequence
  derived and/or modified CDS sequence (opt1) from hemagglutinin__InfluenzaA__AFH00219
augaagaccaucaucgcccugagcuacauccucugccugguguucgcccagaagcugcccggcaacgacaacuccaccgcgacgcucugccuggggcaccacgccgucccgaacggcacccuggugaagaccaucaccaacgaccagaucgaggugacgaacgccaccgagcucguccagagcuccagcaccgggcgcaucugcgacagcccccaccggauccuggacggcaagaacugcacccugaucgacgcccuccugggggaccccaacugcgacggcuuccagaacaaggagugggaccuguucguggagcgcagcaaggccuacuccaacugcuaccccuacgacgugccggacuacgcgagccuccggucccuggucgccagcuccggcacgcuggaguucaccaacgaggacuucaacuggaccgggguggcccaggacggcgggagcuacgccugcaagcgcggcuccgugaacagcuucuucucccggcucaacuggcugcacaagcuggaguacaaguaccccgcgcucaacgucaccaugcccaacaacgggaaguucgacaagcuguacaucuggggcgugcaccaccccagcacggacuccgaccagaccagccuguacgugcgcgccuccggccgggucaccgugagcaccaagcgcagccagcagacggugaccccgaacaucgggucccggcccuggguccgcggccucagcucccggaucagcaucuacuggaccaucgugaagcccggggacauccugcugaucaacuccaccggcaaccucaucgcgccccgcggcuacuucaagauccggaacgggaaguccuccaucaugcgcagcgacgccccgaucggcacgugcuccagcgagugcaucacccccaacggguccauccccaacgacaagcccuuccagaacgugaaccggaucaccuacggcgccugcccgcgcuacgucaagcagaacacccugaagcuggccacggggaugcggaacgugcccgagaagcagacccgcggcaucuucggcgccaucgccggguucaucgagaacggcugggaggggaugguggacggcugguacggguuccggcaccagaacagcgagggcaccggccaggccgccgaccucaaguccacccaggcggccaucgaccagaucaacgggaagcugaaccgccugaucgacaagacgaacgagaaguuccaccagaucgagaaggaguucagcgaggucgagggccggauccaggaccucgagaaguacguggaggacaccaagaucgaccugugguccuacaacgccgagcugcucguggcccuggagaaccagcacaccaucgaccugaccgacagcgagaugaacaagcuguucgagaagacgcgcaagcagcuccgcgagaacgccgaggacauggggaacggcugcuucaagaucuaccacaagugcgacaacgcgugcaucggguccauccggaacggcaccuacgaccacgacgucuaccgcgacgaggcccugaacaaccgguuccagaucaagggcguggagcucaagagcggguacaaggacuggauccuguggaucuccuucgccaucagcugcuuccugcucugcgucgugcugcugggcuucaucaugugggccugccagaaggggaacauccgcugcaacaucugcaucuga

SEQ ID NO: 72676 - RNA, 1701 nt, Artificial Sequence
  derived and/or modified CDS sequence (opt1) from hemagglutinin__InfluenzaA__AFH00230
augaagaccaucaucgcccugagcuacauccucugccugguguucgcccagaagcugcccggcaacgacaacuccaccgcgacgcucugccuggggcaccacgccgucccgaacggcacccuggugaagaccaucaccaacgaccagaucgaggugacgaacgccaccgagcucguccagagcuccagcaccgggcgcaucugcgacagcccccaccggauccuggacggcaagaacugcacccugaucgacgcccuccugggggacccccacugcgacggcuuccagaacaaggagugggaccuguucguggagcgcagcaaggccuacuccaacugcuaccccuacgacgugccggacuacgcgagccuccggucccuggucgccagcuccggcacgcuggaguucaucaacgaggacuucaacuggaccgggguggcccaggacggcaagagcuacgccugcaagcgcggguccgugaaguccuucuucucccggcucaacuggcugcacaagcuggaguacaaguaccccgcgcucaacgucaccaugcccaacaacggcaaguucgacaagcuguacaucuggggcgugcaccaccccagcaccaacuccgaccagacgagccuguacgugcgcgccuccgggcgggucaccgugagcaccaagcgcagccagcagaccgugaucccgaacaucggcuuccggcccuggguccgcgggcucuccagccggaucuccaucuacuggacgaucgugaagcccggcgacauccugcugaucaacagcaccgggaaccucaucgcgccccgcggcuacuucaagauccggaacggcaaguccagcaucaugcgcuccgacgccccgaucgggaacugcagcuccgagugcaucacccccaacggcagcauccccaacgacaagcccuuccagaacgugaaccggaucaccuacggggccugcccgcgcuacgucaagcagaacacgcugaagcuggccaccggcaugcggaacgugcccgagaagcagacccgcgggaucuucggcgccaucgccggcuucaucgagaacgggugggagggcaugguggacgggugguacggcuuccggcaccagaacuccgaggggaccggccaggccgccgaccucaagagcacgcaggcggccaucgaccagaucaacggcaagcugaaccgccugaucgagaagaccaacgagaaguuccaccagaucgagaaggaguucuccgaggucgaggggcggauccaggaccucgagaaguacguggaggacaccaagaucgaccuguggagcuacaacgccggccugcucguggcccuggagaaccagcacaccaucgaccugacggacuccgagaugaacaagcuguucgagcgcacccgcaagcagcuccgggagaacgccgaggacauggggaacggcugcuucaagaucuaccacaagugcgacaacgcgugcaucgggagcauccgcaacggcaccuacgaccacgacgucuaccgggacgaggcccugaacaaccgcuuccagaucaagggcguggagcucaaguccggguacaaggacuggauccuguggaucagcuucgccaucuccugcuuccugcucugcgucgugcugcugggcuucaucaugugggccugccagaaggggaacauccggugcaacaucugcaucuga

SEQ ID NO: 72677 - RNA, 1701 nt, Artificial Sequence; identical to SEQ ID NO: 65048
  derived and/or modified CDS sequence (opt1) from hemagglutinin__InfluenzaA__AFH00241

SEQ ID NO: 72678 - RNA, 1701 nt, Artificial Sequence
  derived and/or modified CDS sequence (opt1) from hemagglutinin__InfluenzaA__AFH00252
augaagaccaucaucgcccugagcuacauccucugccugguguucgcccagaagcugcccggcaacgacaacuccaccgcgacgcucugccuggggcaccacgccgucccgaacggcacccuggugaagaccaucaccaacgaccagaucgaggugacgaacgccaccgagcucguccagagcuccagcaccgggcgcaucugcgacagcccccaccggauccuggacggcaagaacugcacccugaucgacgcccuccugggggacccccacugcgacgacuuccagaacaaggagugggaccuguucguggagcgcagcaaggccuacuccaacugcuaccccuacgacgugccggacuacgcgagccuccggucccuggucgccagcuccggcacgcuggaguucaucaacgaggacuucaacuggaccggcguggcccagagcggggacuccuacgccugcaagcgcggcagcgugaaguccuucuucagccggcucaacuggcugcacgaguccgaguacaaguaccccgcgcugaacgucaccaugcccaacaacgacaaguucgacaagcucuacaucuggggcgugcaccaccccagcaccgaccgcgagcagacgucccuguacauccgggccagcggccgcgugaccgucagcaccaagcggucccagcagaccgugaucccgaacaucgggagccgccccugggugcggggccuguccagccgcaucuccaucuacuggacgaucgucaagcccggcgacauccuccugaucaacagcaccgggaaccugaucgcgccccggggcuacuucaagauccgcaccgggaaguccagcaucaugcgguccgacgccccgaucgggaccugcagcuccgagugcaucacgcccaacggcagcauccccaacgacaagcccuuccagaacgugaaccgcaucaccuacggggccugcccgcgguacgugaagcagaacacccucaagcuggccaccggcaugcgcaacguccccgagaagcagacgcgggggaucuucggcgccaucgccggguucaucgagaacggcugggagggcaugguggacgggugguacggcuuccgccaccagaacuccgaggggaccggccaggccgccgaccugaaguccacccaggcggccaucgaccagaucaacgggaagcucaaccggcugaucgagaagaccaacgagaaguuccaccagaucgagaaggaguucuccgagguggagggccgcauccaggaccuggagaaguacgucgaggacacgaagaucgaccucuggagcuacaacgccgagcugcugguggcccucgagaaccagcacaccaucgaccugaccgacuccgagaugaacaagcuguucgagaagacccgcaagcagcuccgggagaacgccgaggacaugggcaacgggugcuucaagaucuaccacaagugcgacaacgcgugcaucggcagcauccgcaacgggacguacgaccacgacguguaccgggacgaggcccugaacaaccgcuuccagaucaagggcgucgagcugaaguccggguacaaggacuggauccucuggaucagcuucgccaucagcugcuuccugcugugcgugguccuccugggcuucaucaugugggccugccagaagggcaacauccggugcaacaucugcaucuga

SEQ ID NO: 72679 - RNA, 1701 nt, Artificial Sequence
  derived and/or modified CDS sequence (opt1) from hemagglutinin__InfluenzaA__AFH00263
augaagaccaucaucgcccugagcuacauccuccaccugguguucgcccagaagcugcccggcaacgacaacuccaccgcgacgcucugccuggggcaccacgccgucccgaacggcacccuggugaagaccaucaccaacgaccagaucgaggugacgaacgccaccgagcucguccagagcuccagcaccgggcgcaucugcgacagcccccaccggauccuggacggcaagaacugcacccugaucgacgcccuccugggggaccccaacugcgacggcuuccagaacaaggagugggaccuguucguggagcgcagcaaggccuacuccaacugcuaccccuacgacgugccggacuacgcgagccuccggucccuggucgccagcuccggcacgcuggaguucaccaacgaggacuucaacuggaccgggguggcccaggacggcgggagcuacgccugcaagcgcggcuccgugaacagcuucuucucccggcucaacuggcugcacaagcuggaguacaaguaccccgcgcucaacgucaccaugcccaacaacgggaaguucgacaagcuguacaucuggggcgugcaccaccccagcacggacuccgugcagaccagccuguacguccgcgccuccggcaaggugaccgugagcaccaagcggagccagcagacggucaccccgaacaucggguccaagcccugggugcgcggccucagcucccggaucagcaucuacuggaccaucgugaagcccggggacauccugcugaucaacuccaccggcaaccucaucgcgccccgcggcuacuucaagauccggaacgggaaguccuccaucaugcgcagcgacgccccgaucggcacgugcuccagcgagugcaucacccccaacggguccauccccaacgacaagcccuuccagaacgucaaccggaucaccuacggcgccugcccgcgcuacgugaagcagaacacccugaagcuggccacggggaugcggaacgugcccgagaagcagacccgcggcaucuucggcgccaucgccggguucaucgagaacggcugggaggggauggucgacggcugguacggguuccggcaccagaacagcgagggcaccggccaggccgccgaccucaaguccacccaggcggccaucgaccagaucaacgggaagcugaaccgccugaucgagaagacgaacgagaaguuccaccagaucgagaaggaguucagcgagguggagggccggauccaggaccucgagaaguacguggaggacaccaagaucgaccugugguccuacaacgccgagcugcucgucgcccuggagaaccagcacaccaucgaccugaccgacagcgagaugaacaagcuguucgagaagacgcgcaagcagcuccgggagaacgccgaggacauggggaacggcugcuucaagaucuaccacaagugcgacaacgcgugcaucggguccauccgcaacggcaccuacgaccacgacguguaccgcgacgaggcccugaacaaccgguuccagaucaagggcgucgagcucaagagcggguacaaggacuggauccuguggaucuccuucgccaucagcugcuuccugcucugcguggugcugcugggcuucaucaugugggccugccagaaggggaacauccgcugcaacaucugcaucuga

SEQ ID NO: 72680 - RNA, 1701 nt, Artificial Sequence
  derived and/or modified CDS sequence (opt1) from hemagglutinin__InfluenzaA__AFH00274
augaagaccaucaucgcccugagcuacauccucugccugguguucgcccagaagcugcccggcaacgacaacuccaccgcgacgcucugccuggggcaccacgccgucccgaacggcacccuggugaagaccaucaccaacgaccagaucgaggugacgaacgccaccgagcucguccagagcuccagcaccgggcgcaucugcgacagcccccaccggauccuggacggcaagaacugcacccugaucgacgcccuccugggggacccccacugcgacggcuuccagaacaaggagugggaccuguucguggagcgcuccaaggccuacuccaacugcuaccccuacgacgugccggacuacgcgagccuccggucccuggucgccagcuccggcacgcuggaguucaucaacgaggacuucaacuggaccgggguggcccaggacggcaagagcuacgccugcaagcgcggguccgugaacagcuucuucucccggcucaacuggcugcacaagcuggaguacaaguaccccgcgcucaacgucaccaugcccaacaacggcaaguucgacaagcuguacaucuggggcgugcaccaccccagcaccgacuccgaccagacgagccuguacgugcgcgccuccgggcgggucaccgugagcaccaagcgcagccagcagaccgugaucccgaacaucggcuuccggcccuggguccgcgggcucuccagcggcaucuccaucuacuggacgaucgugaagcccggggacauccugcugaucaacagcaccggcaaccucaucgcgccccggggcuacuucaagauccgcaacgggaaguccagcaucaugcgguccgacgccccgaucggcaacugcagcuccgagugcaucacccccaacgggagcauccccaacgacaagcccuuccagaacgugaaccgcaucaccuacggcgccugcccgcgguacgucaagcagaacacgcugaagcuggccaccgggaugcgcaacgugcccgagaagcagacccggggcaucuucggcgccaucgccggguucaucgagaacggcugggaggggaugguggacggcugguacggguuccgccaccagaacuccgagggcaccggccaggccgccgaccucaagagcacgcaggcggccaucgaccagaucaacgggaagcugaaccggcugaucgagaagaccaacgagaaguuccaccagaucgagaaggaguucuccgaggucgagggccgcauccaggaccucgagaaguacguggaggacaccaagaucgaccuguggagcuacaacgccgggcugcucguggcccuggagaaccagcacaccaucgaccugacggacuccgagaugaacaagcuguucgagcggacccgcaagcagcuccgcgagaacgccgaggacaugggcaacgggugcuucaagaucuaccacaagugcgacaacgcgugcaucggcagcauccggaacggcaccuacgaccacgacgucuaccgcgacgaggcccugaacaaccgguuccagaucaaggggguggagcucaaguccggcuacaaggacuggauccuguggaucagcuucgccaucuccugcuuccugcucugcgucgugcugcugggguucaucaugugggccugccagaagggcaacauccgcugcaacaucugcaucuga

SEQ ID NO: 72681 - RNA, 1701 nt, Artificial Sequence
  derived and/or modified CDS sequence (opt1) from hemagglutinin__InfluenzaA__AFH00285
augaagaccaucaucgcccugagcuacauccucugccugguguucgcccagaagcugcccggcaacgacaacuccaccgcgacgcucugccuggggcaccacgccgucccgaacggcacccuggugaagaccaucaccaacgaccagaucgaggugacgaacgccaccgagcucguccagagcuccagcaccgggcgcaucugcggcagcccccaccggauccuggacgggaagaacugcacccugaucgacgcccuccugggcgacccccacugcgacggcuuccagaacaaggagugggaccuguucguggagcgcagcaaggccuacuccaacugcuaccccuacgacgugccggacuacgcgagccuccggucccuggucgccagcuccgggacgcuggaguucaucaacgaggacuucaacuggaccggcguggcccaggacgggggcagcuacgccugcaagcgcggguccgugaacagcuucuucucccggcucaacuggcugcacaagcuggaguacaaguaccccgcgcucaacgucaccaugcccaacaacggcaaguucgacaagcuguacaucuggggcgugcaccaccccagcaccgacuccgaccagacgagccuguacgugcgcgccuccgggcgggucaccgugagcaccaagcgcagccagcagaccgugacgccgaacaucggcucccggcccuggguccgcgggcagagcucccggaucagcaucuacuggaccaucgugaagcccggcgacauccuccugaucaacuccaccggcaaccugaucgcgccccgcggguacuucaagauccggaacggcaagagcuccaucaugcgcagcgacgccccgaucgggaacugcuccagcgagugcaucacccccaacggcuccauccccaacgacaagcccuuccagaacgugaaccggaucacguacggggccugcccgcgcuacgucaagcagaacacccucaagcuggccaccggcaugcggaacgugcccgagaagcagacccgcggcaucuucggggccaucgccggcuucaucgagaacgggugggagggcaugguggacgggugguacggcuuccggcaccagaacagcgagggcacggggcaggccgccgaccugaaguccacccaggcggccaucgaccagaucaacggcaagcucaaccgccugaucgagaagaccaacgagaaguuccaccagaucgagaaggaguucagcgaggucgaggggcggauccaggaccuggagaaguacguggaggacaccaagaucgaccucugguccuacaacgccgagcugcugguggcccucgagaaccagcacacgaucgaccugaccgacagcgagaugaacaagcuguucgagaagacccgcaagcagcuccgcgagaacgccgaggacaugggcaacgggugcuucaagaucuaccacaagugcgacaacgcgugcaucggcuccauccggaacggcaccuacgaccacgacgucuaccgcgacgaggcccugaacaaccgguuccagaucaaggggguggagcugaaguccggcuacaaggacuggauccucuggaucuccuucgccaucagcugcuuccugcugugcgucgugcuccugggguucaucaugugggccugccagaagggcaacauccgcugcaacaucugcaucuga

SEQ ID NO: 72682 - RNA, 1701 nt, Artificial Sequence
  derived and/or modified CDS sequence (opt1) from hemagglutinin__InfluenzaA__AFH00296
augaagaccaucaucgcccugagcuacaucuucugccucguguucgcccagaagcugcccggcaacgacaacuccaccgcgacgcugugccucgggcaccacgccgucccgaacggcacccuggugaagaccaucaccaacgaccagaucgaggugacgaacgccaccgagcugguccagagcuccagcaccgggcgcaucugcgacagcccccaccggauccucgacggcaagaacugcacccugaucgacgcccugcucggggacccccacugcgacggcuuccagaacaaggagugggaccuguucguggagcgcagcaaggccuacuccaacugcuaccccuacgacgugccggacuacgcgagccugcggucccucgucgccagcuccggcacgcuggaguucaucaacgaggacuucaacuggaccgggguggcccagagcggcggguccuacgccugcaagcgcggcagcgugaacuccuucuucagccggcugaacuggcuccacgaguccgaguacaaguaccccgcgcugaacgucaccaugcccaacaacgggaaguucgacaagcuguacaucuggggcgugcaccaccccagcaccgaccgcgagcagacgaaccucuacgugcgggccuccggccgcgucaccgugagcaccaagcggagccagcagaccgugaucccgaacaucgggucccgccccuggguccggggccugagcucccgcaucagcaucuacuggacgaucgugaagcccggggacauccugcucaucaacuccaccggcaaccugaucgcgccccggggcuacuucaagauccgcaccggcaagagcuccaucaugcggagcgacgccccgaucgggaccugcuccagcgagugcaucacgcccaacggguccauccccaacgacaagcccuuccagaacgugaaccgcaucaccuacggcgccugcccgcgguacgucaagcagaacacccugaagcucgccaccgggaugcgcaacgugcccgagaagcagacgcggggcaucuucggcgccaucgccggguucaucgagaacggcugggaggggaugguggacggcugguacggguuccgccaccagaacagcgagggcaccggccaggccgccgaccugaaguccacccaggcggccaucgaccagaucaacgggaagcugaaccggcucaucgagaagaccaacgagaaguuccaccagaucgagaaggaguucagcgaggucgagggccgcauccaggaccuggagaaguacguggaggacacgaagaucgaccugugguccuacaacgccgagcuccugguggcccuggagaaccagcacaccaucgaccucaccgacagcgagaugaacaagcuguucgagaagacccgcaagcagcugcgggagaacgccgaggacauggggaacggcugcuucaagaucuaccacaagugcgacaacgcgugcaucggguccauccgcaacggcacguacgaccacgacgucuaccgggacgaggcccucaacaaccgcuuccagaucaagggcguggagcugaaguccggguacaaggacuggauccuguggaucuccuucgccaccagcugcuuccuccugugcgucgugcugcucggcuucaucaugugggccugccagaaggggaacauccggugcaacaucugcaucuga

SEQ ID NO: 72683 - RNA, 1701 nt, Artificial Sequence
  derived and/or modified CDS sequence (opt1) from hemagglutinin__InfluenzaA__AFH00307
augaagaccaucaucgcccugagcuacauccucugccugguguucgcccagaagcugcccggcaacgacaacuccaccgcgacgcucugccuggggcaccacgccgucccgaacggcacccuggugaagaccaucaccaacgaccagaucgaggugacgaacgccaccgagcucguccagagcuccagcaccgggcgcaucugcgacagcccccaccggauccuggacggcaagaacugcacccugaucgacgcccuccugggggacccccacugcgacggcuuccagaacaaggagugggaccuguucguggagcgcagcaaggccuacuccaacugcuaccccuacgacgugccggacuacgcgagccuccggucccuggucgccagcuccggcacgcuggaguucaucaacgaggacuucaacuggaccgggguggcccaggacggcgggagcuacgccugcaagcgcggcuccgugaacagcuucuucucccggcucaacuggcugcacaagcuggaguacaaguaccccgcgcucaacgucaccaugcccaacaacgggaaguucgacaagcuguacaucuggggcgugcaccaccccagcaccgacuccgaccagacgagccuguacgugcgcgccuccggccgggucaccgugagcaccaagcgcagccagcagaccgugacgccgaacaucgggucccggcccuggguccgcggccagagcucccggaucagcaucuacuggaccaucgugaagcccggggacauccuccugaucaacuccaccggcaaccugaucgcgccccgcggcuacuucaagauccggaacgggaaguccuccaucaugcgcagcgacgccccgaucggcaacugcuccagcgagugcaucacccccaacggguccauccccaacgacaagcccuuccagaacgugaaccggaucacguacggcgccugcccgcgcuacgucaagcagaacacccucaagcuggccaccgggaugcggaacgugcccgagaagcagacccgcggcaucuucggcgccaucgccggguucaucgagaacggcugggaggggaugguggacggcugguacggguuccggcaccagaacagcgagggcacgggccaggccgccgaccugaaguccacccaggcggccaucgaccagaucaacgggaagcucaaccgccugaucgagaagaccaacgagaaguuccaccagaucgagaaggaguucagcgaggucgagggccggauccaggaccuggagaaguacguggaggacaccaagaucgaccucugguccuacaacgccgagcugcugguggcccucgagaaccagcacacgaucgaccugaccgacagcgagaugaacaagcuguucgagaagacccgcaagcagcuccgcgagaacgccgaggacauggggaacggcugcuucaagaucuaccacaagugcgacaacgcgugcaucggguccauccggaacggcaccuacgaccacgacgucuaccgcgacgaggcccugaacaaccgguuccagaucaagggcguggagcucaagagcggguacaaggacuggauccuguggaucuccuucgccaucagcugcuuccugcugugcgucgugcuccugggcuucaucaugugggccugccagaaggggaacauccgcugcaacaucugcaucuga

SEQ ID NO: 72684 - RNA, 1701 nt, Artificial Sequence; identical to SEQ ID NO: 72683
  derived and/or modified CDS sequence (opt1) from hemagglutinin__InfluenzaA__AFH00318

SEQ ID NO: 72685 - RNA, 1701 nt, Artificial Sequence
  derived and/or modified CDS sequence (opt1) from hemagglutinin__InfluenzaA__AFH00329
augaagaccaucaucgcccugagcuacauccucugccugguguucgcccagaagcugcccggcaacgacaacuccaccgcgacgcucugccuggggcaccacgccgucccgaacggcacccuggugaagaccaucaccaacgaccagaucgaggugacgaacgccaccgagcucguccagagcuccagcaccgggcgcaucugcgacucccaccaccggauccuggacggcaagaacugcacccugaucgacgcccuccugggggacccccacugcgacggcuuccagaacaaggagugggaccuguucguggagcgcagcaaggccuacuccaacugcuaccccuacgacgugcccgacuacgcgagccuccggucccuggucgccagcuccggcacgcuggaguucaucaacgaggacuucaacuggaccgggguggcccaggacggcaagagcuacgccugcaagcgcggguccgugaacagcuucuucucccggcucaacuggcugcacaagcuggaguacaaguacccggcgcucaacgucaccaugcccaacaacggcaaguucgacaagcuguacaucuggggcgugcaccaccccagcaccgacuccgaccagacgagcaucuacgugcgcgccuccgggcgggucaccgugagcaccaagcgcagccagcagaccgugauccccaacaucggcucccggccguggguccgcgggaucagcucccggaucagcaucuacuggacgaucgugaagcccggcgacauccugcucaucaacuccaccgggaaccugaucgcgccccgcggcuacuucaagauccggaacggcaagagcuccaucaugcgcagcgacgcccccaucgggaacugcaacuccgagugcaucaccccgaacggcagcauccccaacgacaagcccuuccagaacgugaaccggaucaccuacggggccugcccccgcuacgucaagcagaacacgcugaagcucgccaccggcaugcggaacgugccggagaagcagacccgcgggaucuucggcgccaucgccggcuucaucgagaacgggugggagggcaugguggacgggugguacggcuuccggcaccagaacuccgaggggaccggccaggccgccgaccucaagagcacgcaggcggccaucgaccagaucaacggcaagcugaaccgccugaucgagaagaccaacgagaaguuccaccagaucgagaaggaguucuccgaggucgaggggcggauccaggaccuggagaaguacguggaggacaccaagaucgaccuguggagcuacaacgccgagcuccugguggcccuggagaaccagcacaccaucgaccucacggacuccgagaugaacaagcuguucgagcgcacccgcaagcagcugcgggagaacgccgaggacaugggcaacgggugcuucaagaucuaccacaagugcgacaacgcgugcaucggcagcauccgcaacgggaccuacgaccacgacgucuaccgggacgaggcccucaacaaccgcuuccagaucaagggcguggagcugaaguccggcuacaaggacuggauccuguggaucagcuucgccaccuccugcuuccuccugugcgucgugcugcucggguucaucaugugggccugccagaagggcaacauccggugcaacaucugcaucuga

SEQ ID NO: 72686 - RNA, 1701 nt, Artificial Sequence
  derived and/or modified CDS sequence (opt1) from hemagglutinin__InfluenzaA__AFH00340
augaagaccaucaucgcccugagcuacauccucugccugguguucgcccagaagcugcccggcaacgacaacuccaccgcgacgcucugccuggggcaccacgccgucccgaacggcacccuggugaagaccaucaccaacgaccagaucgaggugacgaacgccaccgagcucguccagagcuccagcaccgggcgcaucugcgacagcccccaccggauccuggacggcaagaacugcacccugaucgacgcccuccugggggacccccacugcgacggcuuccagaacaaggagugggaccuguucguggagcgcuccaaggccuacuccaacugcuaccccuacgacgugccggacuacgcgagccuccggucccuggucgccagcuccggcacgcuggaguucaucaacgaggacuucaacuggaccgggguggcccaggacggcaagagcuacgccugcaagcgcggguccgugaacagcuucuucucccggcucaacuggcugcacaagcuggaguacaaguaccccgcgcucaacgucaccaugcccaacaacggcaaguucgacaagcuguacaucuggggcgugcaccaccccagcaccgacuccgaccagacgagccuguacgugcgcgccuccgggcgggucaccgugagcaccaagcgcagccagcagaccgugaucccgaacaucggcuuccggcccuggguccgcgggcucuccagccggaucuccaucuacuggacgaucgugaagcccggcgacauccugcugaucagcuccaccgggaaccucaucgcgccccgcggcuacuucaagauccggaacggcaagagcuccaucaugcgcagcgacgccccgaucgggaacugcuccagcgagugcaucacccccaacggcuccauccccaacgacaagcccuuccagaacgugaaccggaucaccuacggggccugcccgcgcuacgucaagcagaacacgcugaagcuggccaccggcaugcggaacauccccgagaagcagacccgcgggaucuucggcgccaucgccggcuucaucgagaacgggugggagggcaugguggacgggugguacggcuuccggcaccagaacagcgaggggaccggccaggccgccgaccucaaguccacgcaggcggccaucgaccagaucaacggcaagcugaaccgccugaucgagaagaccaacgagaaguuccaccagaucgagaaggaguucagcgagguggaggggcggauccaggaccucgagaaguacgucgaggacaccaagaucgaccugugguccuacaacgccggccugcucguggcccuggagaaccagcacaccaucgaccugacggacagcgagaugaacaagcuguucgagcgcacccgcaagcagcuccgggagaacgccgaggacauggggaacggcugcuucaagaucuaccacaagugcgacaacgcgugcaucggguccauccgcaacggcaccuacgaccacgacguguaccgggacgaggcccugaacaaccgcuuccagaucaagggcgucgagcucaagagcggguacaaggacuggauccuguggaucuccuucgccaucagcugcuuccugcucugcgugguccugcugggcuucaucaugugggccugccagaaggggaacauccggugcaacaucugcaucuga

SEQ ID NO: 72687 - RNA, 1701 nt, Artificial Sequence
  derived and/or modified CDS sequence (opt1) from hemagglutinin__InfluenzaA__AFH00351
augaagaccaucaucgcccugagcuacauccucugccugguguucgcccagaagcugcccggcaacgacaacuccaccgcgacgcucugccuggggcaccacgccgucccgaacggcacccuggugaagaccaucaccaacgaccagaucgaggugacgaacgccaccgagcucguccagagcuccagcaccgggcgcaucugcgacagcccccaccggauccuggacggcaagaacugcacccugaucgacgcccuccugggggacccccacugcgacggcuuccagaacaaggagugggaccuguucguggagcgcagcaaggccuacuccaacugcuaccccuacgacgugccggacuacgcgagccuccggucccuggucgccagcuccggcacgcuggaguucaccaaggagggguucaacuggaccggcguggcccaggacgggaaguccuacgccugcaagcgcggcuccgucaagagcuucuucucccggcucaacuggcugcacaagcuggaguacaaguaccccgcgcucaacgugaccaugcccaacaacgacaaguucgacaagcuguacaucuggggcgugcaccaccccagcacggacuccgaccagaccagccuguacgugcaggccuccgggcgcgucaccgugagcaccaagcggagccagcagacggugaucccgaacaucggcucccgccccuggguccgggggaucagcucccgcaucagcaucuacuggaccaucgugaagcccggcgacauccuccugaucaacuccaccgggaaccugaucgcgccccggggcuacuucaagauccgcaacggcaagagcuccaucaugcggagcgacgccccgaucgggaacugcaacuccgagugcaucacccccgacggcagcauccccaacgacaagcccuuccagaacgugaaccgcaucacguacggggccugcccgcgguacgucaagcagaacacccucaagcuggccaccggcaugcgcaacgugcccgagaagcagacccgggggaucuucggcgccaucgccggcuucaucgagaacgggugggagggcaugguggacgggugguacggcuuccgccaccagaacuccgaggggacgggccaggccgccgaccucaagagcacccaggcggccaucgaccagaucaacggcaagcugaaccggcugaucgagaagaccaacaagaaguuccaccagaucgagaaggaguucuccgaggucgaggggcgcauccaggaccuggagaaguacguggaggacaccaagaucgaccucuggagcuacaacgccgagcugcugguggcccucgagaaccagcacacgaucgaccugaccgacuccgagaugaacaagcuguucgagcggacccgcaagcagcuccgcgagaacgccgaggacaugggcaacgggugcuucaagaucuaccacaagugcgacaacgcgugcaucggcagcauccggaacgggaccuacgaccacgacgucuaccgcgacgaggcccugaacaaccgguuccagaucaagggcguggagcugaaguccggcuacaaggacuggauccucuggaucagcuucgccaucuccugcuuccugcugugcgucgugcuccugggguucaucaugugggccugccagaagggcaacauccgcugcaacaucugcaucuga

SEQ ID NO: 72688 - RNA, 1701 nt, Artificial Sequence
  derived and/or modified CDS sequence (opt1) from hemagglutinin__InfluenzaA__AFH00362
augaagaccaucaucgcccugagcuacauccucugccugguguucgcccagaagcugcccggcaacgacaacuccaccgcgacgcucugccuggggcaccacgccgucccgaacggcacccuggugaagaccaucaccaacgaccagaucgaggugacgaacgccaccgagcucguccagagcuccagcaccgggcgcaucugcgacagcccccaccggauccuggacggcaagaacugcacccugaucgacgcccuccugggggacccccacugcgacggcuuccagaacaaggagugggaccuguucguggagcgcagcaaggccuacuccaacugcuaccccuacgacgugccggacuacgcgagccuccggucccuggucgccagcuccggcacgcuggaguucaccaacgagggguucaacuggaccggcguggcccaggacgggaaguccuacgccugcaagcgcggcuccgucaagagcuucuucucccggcucaacuggcugcacaagcuggaguacaaguaccccgcgcucaacgugaccaugcccaacaacgacaaguucgacaagcuguacaucuggggcgugcaccaccccagcacggacuccgaccagaccagccuguacgugcaggccuccgggcgcgucaccgugagcaccaagcggagccagcagacggugaucccgaacaucggcucccgccccuggguccgggggaucagcucccgcaucagcaucuacuggaccaucgugaagcccggcgacauccuccugaucaacuccaccgggaaccugaucgcgccccggggcuacuucaagauccgcaacggcaagagcuccaucaugcggagcgacgccccgaucgacaacugcaacuccgagugcaucacccccaacgggagcauccccaacgacaagcccuuccagaacgugaaccgcaucacguacggcgccugcccgcgguacgucaagcagaacacccucaagcuggccaccgggaugcgcaacgugcccgagaagcagacccggggcaucuucggggccaucgccggcuucaucgagaacggcugggaggggaugguggacggcugguacggguuccgccaccagaacuccgagggcacggggcaggccgccgaccucaagagcacccaggcggccaucgaccagaucaacggcaagcugaaccggcugaucgagaagaccaacgagaaguuccaccagaucgagaaggaguucuccgaggucgagggccgcauccaggaccuggagaaguacguggaggacaccaagaucgaccucuggagcuacaacgccgagcugcugguggcccucgagaaccagcacacgaucgaccugaccgacuccgagaugaacaagcuguucgagcggacccgcaagcagcuccgcgagaacgccgaggacauggggaacggcugcuucaagaucuaccacaagugcgacaacgcgugcaucgggagcauccggaacggcaccuacgaccacgacgucuaccgcgacgaggcccugaacaaccgguuccagaucaaggggguggagcugaaguccggcuacaaggacuggauccucuggaucagcuucgccacguccugcuuccugcugugcgucgugcuccugggcuucaucaugugggccugccagaaggggaacauccgcugcaacaucugcaucuga

SEQ ID NO: 72689 - RNA, 1701 nt, Artificial Sequence
  derived and/or modified CDS sequence (opt1) from hemagglutinin__InfluenzaA__AFH00384
augaagaccaucaucgcccugagcuacauccucugccugguguucgcccagaagcugcccggcaacgacaacuccaccgcgacgcucugccuggggcaccacgccgucccgaacggcacccuggugaagaccaucaccaacgaccagaucgaggugacgaacgccaccgagcucguccagagcuccagcaccgggcgcaucugcgacagcccccaccggauccuggacggcaagaacugcacccugaucgacgcccuccugggggacccccacugcgacggcuuccagaacaaggagugggaccuguucguggagcgcagcaaggccuacuccaacugcuaccccuacgacgugccggacuacgcgagccuccggucccuggucgccagcuccggcacgcuggaguucaccaaggagggguucaacuggaccggcguggcccaggacgggaaguccuacgccugcaagcgcggcuccgugaacagcuucuucucccggcucaacuggcugcacaagcuggaguacaaguaccccgcgcucaacgucaccaugcccaacaacgacaaguucgacaagcuguacaucuggggcgugcaccaccccagcacggacuccgaccagaccagccuguacgugcaggccuccgggcgcgucaccgugagcaccaagcggagccagcagacggugaucccgaacaucggcucccgccccuggguccgggggaucagcucccgcaucagcaucuacuggaccaucgugaagcccggcgacauccuccugaucaacuccaucgggaaccugaucgcgccccggggcuacuucaagauccgcaacggcaagagcuccaucaugcggagcgacgccccgaucgggaacugcaacuccgagugcaucacccccaacggcagcauccccaacgacaagcccuuccagaacgugaaccgcaucaccuacggggccugcccgcgguacgucaagcagaacacgcucaagcuggccaccggcaugcgcaacgugcccgagaagcagacccgggggaucuucggcgccaucgccggcuucaucgagaacgggugggagggcaugguggacgggugguacggcuuccgccaccagaacuccgaggggaccggccaggccgccgaccucaagagcacgcaggcggccaucgaccagaucaacggcaagcugaaccggcugaucgagaagaccaacgagaaguuccaccagaucgagaaggaguucuccgaggucgaggggcgcauccaggaccuggagaaguacguggaggacaccaagaucgaccucuggagcuacaacgccggccugcugguggcccucgagaaccagcacaccaucgaccugacggacuccgagaugaacaagcuguucgagcggacccgcaagcagcuccgcgagaacgccgaggacauggggaacggcugcuucaagaucuaccacaagugcgacaacgcgugcaucgggagcauccggaacggcaccuacgaccacgacgucuaccgcgacgaggcccugaacaaccgguuccagaucaagggcguggagcugaaguccggguacaaggacuggauccucuggaucagcuucgccaucuccugcuuccugcugugcgucgugcuccugggcuucaucaugugggccugccagaaggggaacauccgcugcaacaucugcaucuga

SEQ ID NO: 72690 - RNA, 1701 nt, Artificial Sequence
  derived and/or modified CDS sequence (opt1) from hemagglutinin__InfluenzaA__AFH00395
augaaggccaucaucgcccugagcuacauccucugccugguguucgcgcagaagcugcccggcaacgacaacuccaccgccacccucugccuggggcaccacgccgucccgaacggcacgcuggugaagaccaucaccaacgaccagaucgaggugaccaacgccacggagcucguccagagcuccagcaccgggcgcaucugcgacagcccccaccggauccuggacggcaagaacugcacccugaucgacgcccuccugggggacccccacugcgacggcuuccagaacaaggagugggaccuguucguggagcgcagcaaggcguacuccaacugcuaccccuacgacgugccggacuacgccagccuccggucccuggucgccagcuccggcacccuggaguucacgaaggagggguucaacuggaccggcguggcccaggacgggaaguccuacgcgugcaagcgcggcuccgugaacggguucuucagccggcucaacuggcugcacaagcuggaguacaaguaccccgcccucaacgucaccaugcccaacaacgacaaguucgacaagcuguacaucuggggcgugcaccaccccuccaccgacagcgaccagacgucccuguacgugcaggccagcggccgcgucaccguguccaccaagcggagccagcagaccgugaucccgaacaucgggagccgccccuggguccggggcaucuccagccgcaucuccaucuacuggacgaucgugaagcccggggacauccuccugaucaagagcaccggcaaccugaucgcgccccggggcuacuucaagauccgcaacgggaaguccagcaucaugcgguccgacgccccgaucggcaacugcaacagcgagugcaucacccccaacggguccauccccaacgacaagcccuuccagaacgugaaccgcaucaccuacggcgccugcccgcgguacgucaagcagaacacgcucaagcuggccaccgggaugcgcaacgugcccgagaagcagacccggggcaucuucggcgccaucgccggguucaucgagaacggcugggaggggaugguggacggcugguacggguuccgccaccagaacagcgagggcaccggccaggccgcggaccugaaguccacgcaggccgccaucgaccagaucaacgggaagcucaaccggcugaucgagaagaccaacgagaaguuccaccagaucgagaaggaguucagcgaggucgagggccgcauccaggaccuggagaaguacguggaggacaccaagaucgaccucugguccuacaacgccgagcugcugguggcccucgagaaccagcacaccaucgaccugacggacagcgagaugaacaagcuguucgagcggacccgcaagcagcuccgcgagaacgcggaggacauggggaacggcugcuucaagaucuaccacaagugcgacaacgccugcaucggguccauccggaacggcaccuacgaccacgacgucuaccgcgacgaggcccugaacaaccgguuccagaucaagggcguggagcucaagagcggguacaaggacuggauccuguggaucuccuucgccaucagcugcuuccugcugugcgucgugcuccugggcuucaucaugugggccugccagaaggggaacauccgcugcaacaucugcaucuga

SEQ ID NO: 72691 - RNA, 1701 nt, Artificial Sequence
  derived and/or modified CDS sequence (opt1) from hemagglutinin__InfluenzaA__AFH00417
augaagaccaucaucgcccugagcuacauccucugccugguguucgcccagaagcugcccggcaacgacaacuccaccgcgacgcucugccuggggcaccacgccgucccgaacggcacccuggugaagaccaucaccaacgaccagaucgaggugacgaacgccaccgagcucguccagagcuccagcaccgggcgcaucugcgacagcccccaccggauccuggacggcaagaacugcacccugaucgacgcccuccugggggacccccacugcgacggcuuccagaacaaggagugggaccuguucguggagcgcagcaaggccuacuccaacugcuaccccuacgacgugccggacuacgcgagccuccggucccuggucgccagcuccggcacgcuggaguucaccaacgagggguucaacuggaccggcguggcccaggacgggaaguccuacgccugcaagcgcggcuccgucaagagcuucuucucccggcucaacuggcugcacaagcuggaguacaaguaccccgcgcucaacgugaccaugcccaacaacgacaaguucgacaagcuguacaucuggggcgugcaccaccccagcacggacuccgaccagaccagccuguacgugcaggccuccgggcgcgucaccgugagcaccaagcggagccagcagacggugaucccgaacaucggcucccgccccuggguccgggggaucagcucccgcaucagcaucuacuggaccaucgugaagcccggcgacauccuccugaucaacuccaccgggaaccugaucgcgccccggggcuacuucaagauccgcaacggcaagagcuccaucaugcggagcgacgccccgaucgacaacugcaacuccgagugcaucacccccaacgggagcauccccaacgacaagcccuuccagaacgugaaccgcaucacguacggcgccugcccgcgguacgucaagcagaacacccucaagcuggccaccgggaugcgcaacgugcccgagaagcagacccggggcaucuucggggccaucgccggcuucaucgagaacggcugggaggggaugguggacggcugguacggguuccgccaccagaacuccgagggcacggggcaggccgccgaccucaagagcacccaggcggccaucgaccagaucaacggcaagcugaaccggcugaucgagaagaccaacgagaaguuccaccagaucgagaaggaguucuccgaggucgagggccgcauccaggaccuggagaaguacguggaggacaccaagaucgaccucuggagcuacaacgccgagcugcugguggcccucgagaaccagcacacgaucgaccugaccgacuccgagaugaacaagcuguucgagcggacccgcaagcagcuccgcgagaacgccgaggacauggggaacggcugcuucaagaucuaccacaagugcgacaacgcgugcaucgggagcauccggaacggcaccuacgaccacgacgucuaccgcgacgaggcccugaacaaccgguuccagaucaaggggguggagcugaaguccggcuacaaggacuggauccucuggaucagcuucgccaucuccugcuuccugcugugcgucgugcuccugggcuucaucaugugggccugccagaaggggaacauccgcugcaacaucugcaucuga

SEQ ID NO: 72692 - RNA, 1701 nt, Artificial Sequence; identical to SEQ ID NO: 65012
  derived and/or modified CDS sequence (opt1) from hemagglutinin__InfluenzaA__AFH00428

SEQ ID NO: 72693 - RNA, 1701 nt, Artificial Sequence
  derived and/or modified CDS sequence (opt1) from hemagglutinin__InfluenzaA__AFH00439
augaagaccaucaucgcccugagcuacauccucugccugguguucgcccagaagcugcccggcaacgacaacuccaccgcgacgcucugccuggggcaccacgccgucccgaacggcacccuggugaagaccaucaccaacgaccagaucgaggugacgaacgccaccgagcucguccagagcuccagcaccgggcgcaucugcgacagcccccaccggauccuggacggcaagaacugcacccugaucgacgcccuccugggggacccccacugcgacggcuuccagaacaaggagugggaccuguucguggagcgcagcaaggccuacuccaacugcuaccccuacgacgugccggacuacgcgagccuccggucccuggucgccagcuccggcacgcuggaguucaccaacgagggguucaacuggaccggcguggcccaggacgggaccagcuacgccugcaagcgcggcuccgugaaguccuucuucucccggcucaacuggcugcacaagcuggaguacaaguaccccgcgcucaacgucacgaugcccaacaacgacaaguucgacaagcuguacaucuggggcgugcaccaccccagcaccgacuccgaccagaccagccuguacgugcaggccuccgggcgcgucaccgugagcacgaagcggagccagcagaccgugaucccgaacaucggcucccgccccuggguccgcggggugagcucccggaucagcaucuacuggaccaucgugaagcccggcgacauccuccugaucaacuccaccgggaaccugaucgcgccccggggcuacuucaagauccgcagcggcaaguccagcaucaugcgguccgacgccccgaucgggaacugcaacagcgagugcaucacgcccaacggcuccauccccaacgacaagcccuuccagaacgucaaccgcaucaccuacggggccugcccgcgguacgugaagcagaacacccucaagcuggccaccggcaugcgcaacgugcccgagaagcagacgcgggggaucuucggcgccaucgccggcuucaucgagaacgggugggagggcauggucgacgggugguacggcuuccgccaccagaacagcgaggggaccggccaggccgccgaccugaaguccacccaggcggccaucaaccagaucaacggcaagcucaaccggcugaucgagaagaccaacgagaaguuccaccagaucgagaaggaguucagcgagguggaggggcgcauccaggaccuggagaaguacguggaggacacgaagaucgaccucugguccuacaacgccgagcugcuggucgcccucgagaaccagcacaccaucgaccugaccgacagcgagauguccaagcuguucgagcggacccgcaagcagcuccgcgagaacgccgaggacaugggcaacgggugcuucaagaucuaccacaagugcgacaacgcgugcaucggcagcauccggaacgggacguacgaccacgacguguaccgcgacgaggcccugaacaaccgguuccagaucaagggcgucgagcugaaguccggcuacaaggacuggauccucuggaucagcuucgccaucagcugcuuccugcugugcguggugcuccugggguucaucaugugggccugccagaagggcaacauccgcugcaacaucugcaucuga

SEQ ID NO: 72694 - RNA, 1701 nt, Artificial Sequence
  derived and/or modified CDS sequence (opt1) from hemagglutinin__InfluenzaA__AFH00450
augaagaccaucaucgcccugagcuacauccucugccugguguucgcccagaagcugcccggcaacgacaacuccaccgcgacgcucugccuggggcaccacgccgucccgaacggcacccuggugaagaccaucaccaacgaccagaucgaggugacgaacgccaccgagcucguccagagcuccagcaccgggcgcaucugcgacggcccccaccggaucaucgacgggaagaacugcacccugaucgacgcccugcucggcgacccccacugcgacggcuuccagaacaaggagugggaccuguucguggagcgcuccaaggccuacagcaacugcuaccccuacgacgugccggacuacgcgucccugcggagccucgucgccuccagcgggacgcuggaguucaccaacgaguccuucaacuggaccggcguggcccagaacgggaccagcuacgccugcaagcgcggcuccgucaagagcuucuucucccggcugaacuggcuccacaagcuggaguacaaguaccccgcgcugaacgugacgaugcccaacaacgacaaguucgacaagcucuacaucuggggcgugcaccaccccagcaccgacuccgaccagaccagccuguacgugcaguccagcgggcgcgucaccgugagcacgaagcggucccagcagaccgugaucccgaacaucggcagccgccccuggguccgcgggguguccagccggaucuccaucuacuggaccaucgugaagcccggcgacauccugcucaucaacagcaccgggaaccugaucgcgccccggggcuacuucaagauccgcuccggcaagagcuccaucaugcggagcgacgccccgaucgacaacugcaacuccgagugcaucacgcccaacgggagcauccccaacgacaagcccuuccagaacgucaaccgcaucaccuacggcgccugcccgcgguacgugaagcagaacacccugaagcucgccaccgggaugcgcaacgugcccgagaagcagacgcggggcaucuucggggccaucgccggcuucaucgagaacggcugggaggggaugaucgacggcugguacggguuccgccaccagaacuccgagggcaccgggcaggccgccgaccucaagagcacccaggccgcgaucaaccagaucaacggcaagcugaaccggcugaucgagaagaccaacgagaaguuccaccagaucgagaaggaguucuccgaggucgagggccgcauccaggaccuggagaaguacguggaggacacgaagaucgaccuguggagcuacaacgccgagcuccugguggcccuggagaaccagcacaccaucgaccucaccgacuccgagaugaacaagcuguucgagcggacccgcaagcagcugcgcgagaacgccgaggacauggggaacggcugcuucaagaucuaccacaagugcgacaacgccugcaucgggagcauccggaacggcacguacgaccacgacgucuaccgcgacgaggcgcucaacaaccgguuccagaucaaggggguggagcugaaguccggcuacaaggacuggauccuguggaucagcuucgccaucagcugcuuccuccugugcgucgugcugcucggcuucaucaugugggccugccagaaggggaacauccgcugcaacaucugcaucuga

SEQ ID NO: 72695 - RNA, 1701 nt, Artificial Sequence
  derived and/or modified CDS sequence (opt1) from hemagglutinin__InfluenzaA__AFH00461
augaagaccaucaucgcccugagcuacauccucugccugguguucgcccagaagcugcccggcaacgacaacuccaccgcgacgcucugccuggggcaccacgccgucccgaacggcacccuggugaagaccaucaccaacgaccagaucgaggugacgaacgccaccgagcucguccagagcucccccaccgggcgcaucugcgacagcccccaccggauccuggacggcaagaacugcacccugaucgacgcccuccugggggacccccacugcgacggcuuccagaacaaggagugggaccuguucguggagcgcuccaaggccuacagcaacugcuacccguacgacgugcccgacuacgcgucccuccggagccuggucgccuccagcggcacgcuggaguucaucaacgagaacuucaacuggaccgggguggcccaggacggcaaguccuacgccugcaagcgcgggagcgugaacuccuucuucagccggcucaacuggcugcacaagcuggacuacaaguaccccgcgcucaacgucaccaugcccaacaacggcaaguucgacaagcuguacaucuggggcgugcaccacccguccaccgacagcgaccagaucucccuguacgugcgcagcuccgggcgggucacggugagcaccaagcgcagccagcagaccgugauccccgacaucggcuaccggcccuggguccgcgggcucuccagccggaucuccaucuacuggaccaucgugaagcccggcgacauccugcugaucaacagcacggggaaccucaucgccccgcgcggcuacuucaagcugcggaacggcaaguccagcaucaugcgcuccgacgcccccaucgggaacugcagcuccggcugcaucacccccaacgggagcauccccaacgacaagccguuccagaacgugaaccggaucaccuacggcgccugcccccgcuacgucaagcagaacacccugaagcucgccacggggaugcggaacgugcccgagaagcagacccgcggcaucuucggcgcgaucgccggguucaucgagaacggcugggaggggaugguggacggcugguacggguuccggcaccagaacuccgagggcaccggccaggccgccgaccucaagagcacccaggccgcgaucgaccagaucaacgggaagcugaaccgccuggucgagaagacgaacgagaaguuccaccagaucgagaaggaguucuccgagguggagggccggauccaggaccuggagaaguacguggaggacaccaagaucgaccuguggagcuacaacgccgagcuccuggucgcccuggagaaccagcacaccaucgaccucaccgacuccgagaugaacaagcuguucgagcgcacgcgcaagcagcugcgggagaacgccgaggacauggggaacggcugcuucaagaucuaccacaagugcgacaacgccugcaucgggagcauccgcaacggcaccuacgaccacgacguguaccgggacgaggcgcucaacaaccgcuuccagaucaagggcgucgagcugaaguccggguacaaggacuggauccuguggaucagcuucgccaucuccugcuuccuccugugcguggugcugcucggcuucaucaugugggccugccagaaggggaacauccggugcaacaucugcaucuga

SEQ ID NO: 72696 - RNA, 1701 nt, Artificial Sequence
  derived and/or modified CDS sequence (opt1) from hemagglutinin__InfluenzaA__AFH00472
augaagaccaucaucgcccugagcuacauccucugccugguguucgcccagaagcugcccggcaacgacaacuccaccgcgacgcucugccuggggcaccacgccgucccgaacggcacccuggugaagaccaucaccaacgaccagaucgaggugacgaacgccaccgagcucguccagagcuccagcaccgggcgcaucugcgacagcccccaccggauccuggacggcaagaacugcacccugaucgacgcccuccugggggacccccacugcgacggcuuccagaacaaggagugggaccuguucguggagcgcagcaaggccuacuccaacugcuaccccuacgacgugagcgacuacgcgucccuccggagccuggucgccuccagcggcacgcuggaguucaacaacgaguccuucaacuggaccgggguggcccagaacggcaccagcuacgccugcaagcgccgguccgugaaguccuucuucucccgccucaacuggcugcacaagcuggaguacaaguacccggcgcucaacgucaccaugcccaacaacgacaaguucgacaagcuguacaucuggggcgugcaccaccccagcacggacuccgaccagaccagccuguacgugcaggccagcgggcgggucaccguguccaccaagcgcagccagcagacggugauccccaacaucgggucccggccguggguccgcggcgugagcucccggaucagcaucuacuggaccaucgugaagcccggcgacauccuccugaucaacuccaccgggaaccugaucgcgccccgcggcuacuucaagauccggagcgggaaguccagcaucaugcgcuccgacgcccccaucggcaacugcaacagcgagugcaucaccccgaacggcuccauccccaacgacaagcccuuccagaacgucaaccggaucacguacggggccugcccccgcuacgugaagcagaacacccucaagcuggccaccggcaugcggaacgugccggagaagcagacccgcgggaucuucggcgccaucgccggguucaucgagaacggcugggagggcauggucgacgggugguacggcuuccggcaccagaacagcgaggggacgggccaggccgccgaccugaaguccacccaggcggccaucaaccagaucaacgggaagcucaaccgccugaucgagaagaccaacgagaaguuccaccagaucgagaaggaguucagcgagguggagggccggauccaggaccuggagaaguacguggaggacaccaagaucgaccucugguccuacaacgccgagcugcuggucgcccucgagaaccagcacacgaucgaccugaccgacagcgagaugaacaagcuguucgagcgcacccgcaagcagcuccgggagaacgccgaggacaugggcaacgggugcuucaagaucuaccacaagugcgacaacgcgugcaucggcuccauccgcaacgggaccuacgaccacgacguguaccgggacgaggcccugaacaaccgcuuccagaucaagggcgucgagcucaagagcggguacaaggacuggauccuguggaucagcuucgccaucuccugcuuccugcugugcguggugcuccugggcuucaucaugugggccugccagaagggcaacauccggugcaacaucugcaucuga

SEQ ID NO: 72697 - RNA, 1701 nt, Artificial Sequence
  derived and/or modified CDS sequence (opt1) from hemagglutinin__InfluenzaA__AFH00483
augaagaccaucaucgcccugagcuacauccucugcaugguguucgcccagaagcugcccggcaacgacaacuccaccgcgacgcugugccucgggcaccacgccgucccgaacggcacccuggugaagaccaucaccaacgaccagaucgaggugacgaacgccaccgagcugguccagagcuccagcaccgggaagaucugcgacagcccccaccgcauccucgacggcaagaacugcacccugaucgacgcccugcucggggacccccacugcgacggcuuccagaacaaggagugggaccuguucguggagcggagcaaggccuacuccaacugcuaccccuacgacgugccggacuacgcgagccugcgcucccucgucgccagcuccggcacgcuggaguucaacaacgagagcuucaacuggaccgggguggcccagaacggcaccuccuacgccugcaagcgggggagcgugaaguccuucuucagccgccugaacuggcuccacaagcuggaguacaaguaccccgcgcugaacgucaccaugcccaacaacgacaaguucgacaagcucuacaucuggggcgugcaccaccccuccacggacagcgaccagaccucccuguacgugcaggccagcgggcgggucaccgugagcaccaagcgcucccagcagacggugaucccgaacaucggcagccggcccuggguccgcggcguguccagccggaucuccaucuacuggaccaucgugaagcccggggacauccugcucaucaacagcaccggcaaccugaucgcgccccgcggguacuucaagauccgguccggcaagagcuccaucaugcgcagcgacgccccgaucggcaacugcaacuccgagugcaucacccccaacgggagcauccccaacgacaagcccuuccagaacgucaaccggaucacguacggcgccugcccgcgcuacgugaagcagaacacccugaagcucgccaccgggaugcggaacgugcccgagaagcagacccgcggcaucuucggggccaucgccggcuucaucgagaacggcugggaggggauggucgacggcugguacggguuccggcaccagaacuccgagggcacggggcaggccgccgaccugaaguccacccaggcggccaucaaccagaucaacggcaagcugaaccgccucaucgagaagaccaacgagaaguuccaccagaucgagaaggaguucuccgagguggagggccggauccaggaccuggagaaguacguggaggacaccaagaucgaccuguggagcuacaacgccgagcuccuggucgcccuggagaaccagcacacgaucgaccucaccgacuccgagaugaacaagcuguucgagcgcacccggaagcagcugcgcgagaacgccgaggacauggggaacggcugcuucaagaucuaccacaagugcgacaacgcgugcaucgggagcauccgcaacggcaccuacgaccacgacguguaccgggacgaggcccucaacaaccgcuuccagaucaagggggucgagcugaaguccggcuacaaggacuggauccuguggaucagcuucgccaucagcugcuuccuccugugcguggugcugcucggcuucaucaugugggccugccagaaggggaacauccggugcaacaucugcaucuga

SEQ ID NO: 72698 - RNA, 1701 nt, Artificial Sequence
  derived and/or modified CDS sequence (opt1) from hemagglutinin__InfluenzaA__AFH00494
augaagaccaucaucgcccugagcuacauccucugccugguguucgcccagaagcugcccggcaacgacaacuccaccgcgacgcucugccuggggcaccacgccgucccgaacggcacccuggugaagaccaucaccaacgaccagaucgaggugacgaacgccaccgagcucguccagagcucccccaccgggcgcaucugcgacagcccccaccggauccuggacggcaagaacugcacccugaucgacgcccuccugggggacccccacugcgacggcuuccagaacaaggagugggaccuguucguggagcgcuccaaggccuacagcaacugcuacccguacgacgugcccgacuacgcgucccuccggagccuggucgccuccagcggcacgcuggaguucaucaacgagaacuucaacuggaccgggguggcccaggacggcaaguccuacgccugcaagcgcgggagcgugaacuccuucuucagccggcucaacuggcugcacaagcuggaguacaaguaccccgcgcucaacgucaccaugcccaacaacggcaaguucgacaagcuguacaucuggggcgugcaccacccguccaccgacagcgaccagacgucccuguacgugcgcgccagcgggcgggucaccguguccaccaagcgcagccagcagaccgugauccccgacaucggcuaccggcccuggguccgcgggcagagcucccggaucggcaucuacuggacgaucgugaagcccggggacauccuccugaucaacagcaccggcaaccugaucgccccgcgcggcuacuucaagauccggaacgggaaguccagcaucaugcgcuccgacgcccccaucggcaacugcagcuccgagugcaucacccccaacgggagcauccccaacgacaagccguuccagaacgugaaccggaucaccuacggcgccugcccccgcuacgucaagcagaacacgcucaagcuggcgaccgggaugcggaacgugcccgagaagcagacccgcggcaucuucggcgccaucgccggguucaucgagaacggcugggaggggaugguggacggcugguacggguuccggcaccagaacuccgagggcaccggccaggccgccgaccucaagagcacgcaggcggccaucgaccagaucaacgggaagcugaaccgccuggucgagaagaccaacgagaaguuccaccagaucgagaaggaguucuccgagguggagggccggauccaggaccuggagaaguacguggaggacaccaagaucgaccucuggagcuacaacgccgagcugcuggucgcccucgagaaccagcacaccaucgaccugacggacuccgagaugaacaagcuguucgagcgcacccgcaagcagcuccgggagaacgccgaggacauggggaacggcugcuucaagaucuaccacaagugcgacaacgcgugcaucgggagcauccgcaacggcaccuacaaccacgacguguaccgggacgaggcccugaacaaccgcuuccagaucaagggcgucgagcugaaguccggguacaaggacuggauccucuggaucagcuucgccaucuccugcuuccugcugugcguggugcuccugggcuucaucaugugggccugccagaaggggaacauccggugcaacaucugcaucuga

SEQ ID NO: 72699 - RNA, 1701 nt, Artificial Sequence
  derived and/or modified CDS sequence (opt1) from hemagglutinin__InfluenzaA__AFH00505
augaagaccaucaucgcccugagcuacauccucugccugguguucgcccagaagcugcccggcaacgacaacuccaccgcgacgcucugccuggggcaccacgccgucccgaacggcacccuggugaagaccaucaccaacgaccagaucgaggugacgaacgccaccgagcucguccagagcuccagcaccgggcgcaucugcgacagcccccaccggauccuggacggcaagaacugcacccugaucgacgcccuccugggggacccccacugcgacggcuuccagaacaaggagugggaccuguucguggagcgcagcaaggccuacuccaacugcuaccccuacgacgugccggacuacgcgagccuccggucccuggucgccagcuccggcacgcuggaguucaccaacgagggguucaacuggaccggcguggcccaggacgggaccagcuacgccugcaagcgcggcuccgugaaguccuucuucucccggcucaacuggcugcacaagcuggaguacaaguaccccgcgcucaacgucacgaugcccaacaacgacaaguucgacaagcuguacaucuggggcgugcaccaccccagcaccgacuccgaccagaucagccuguacgugcaggccuccgggcgcgucaccgugagcaccaagcggagccagcagacggugaucccgaacaucggcucccgccccuggguccgcggggugagcuccaucaucagcaucuacuggaccaucgugaagcccggcgacauccuccugaucaacuccaccgggaaccugaucgcgccccggggcuacuucaagauccggagcggcaaguccagcaucaugcgcuccgacgccccgaucgacaacugcaacagcgagugcaucacccccaacggguccauccccaacgacaagcccuuccagaacgucaaccggaucacguacggcgccugcccgcgcuacgugaagcagaacacccucaagcuggccaccgggaugcggaacgugcccgagaagcagacccgcggcaucuucggggccaucgccggcuucaucgagaacggcugggaggggauggucgacggcugguacggguuccggcaccagaacagcgagggcacggggcaggccgccgaccugaaguccacccaggcggccaucaaccagaucaacggcaagcucaaccgccugaucgagaagaccaacgagaaguuccaccagaucgagaaggaguucagcgagguggagggccggauccaggaccuggagaaguacguggaggacaccaagaucgaccucugguccuacaacgccgagcugcuggucgcccucgagaaccagcacacgaucgaccugaccgacagcgagaugaacaagcuguucgagcgcacccggaagcagcuccgcgagaacgccgaggacauggggaacggcugcuucaagaucuaccacaagugcgacaacgcgugcaucggguccauccgcaacggcaccuacgaccacgacguguaccgggacgaggcccugaacaaccgcuuccagaucaagggggucgagcucaagagcggcuacaaggacuggauccuguggaucuccuucgccaucagcugcuuccugcugugcguggugcuccugggcuucaucaugugggccugccagaaggggaacauccggugcaacaucugcaucuga

SEQ ID NO: 72700 - RNA, 1701 nt, Artificial Sequence
  derived and/or modified CDS sequence (opt1) from hemagglutinin__InfluenzaA__AFH00516
augaagaccaucaucgcccugagcuacauccucugccagguguucgcccagaagcugcccggcaacgacaacuccaccgcgacgcugugccucgggcaccacgccgucccgaacggcacccuggugaagaccaucaccaacgaccagaucgaggugacgaacgccaccgagcugguccagagcuccagcaccgggcgcaucugcgacagcccccaccggauccucgacggcaagaacugcacccugaucgacgcccugcucggggacccccacugcgacggcuuccagaacaaggagugggaccuguucguggagcgcagcaaggccuacuccaacugcuaccccuacgacgugccggacuacgcgagccugcggucccucgucgccagcuccggcacgcuggaguucaccaacgagggguucaacuggaccggcguggcccaggacgggaaguccuacgccugcaagcgcggcuccgugaacagcuucuucucccggcugaacuggcuccacaagcuggaguacaaguaccccgcgcugaacgucaccaugcccaacaacgacaaguucgacaagcucuacaucuggggcgugcaccaccccagcacggacuccgaccagaccagccuguacgugcaggccuccgggcgcgucaccgugagcaccaagcggagccagcagacggugaucccgaacaucggcucccgccccuggguccgggggaucagcucccgcaucagcaucuacuggaccaucgugaagcccggcgacauccugcucaucaaguccaccgggaaccugaucgcgccccggggcuacuucaagauccgcaacggcaagagcuccaucaugcggagcgacgccccgaucgacaacugcaacuccgagugcaucacccccaacgggagcauccccaacgacaagcccuuccagaacgugaaccgcaucacguacggcgccugcccgcgguacgucaagcagaacacccugaagcucgccaccgggaugcgcaacgugcccgagaagcagacccggggcaucuucggggccaucgccggcuucaucgagaacggcugggaggggaugguggacggcugguacggguuccgccaccagaacuccgagggcacggggcaggccgccgaccucaagagcacccaggcggccaucgaccagaucaacggcaagcugaaccggcugaucgagaagaccaacgagaaguuccaccagaucgagaaggaguucuccgaggucgagggccgcauccaggaccuggagaaguacguggaggacaccaagaucgaccuguggagcuacaacgccgagcuccugguggcccuggagaaccagcacacgaucgaccucaccgacuccgagaugaacaagcuguucgagcggacccgcaagcagcugcgcgagaacgccgaggacauggggaacggcugcuucaagaucuaccacaagugcgacaacgcgugcaucgggagcauccggaacggcaccuacgaccacgacgucuaccgcgacgaggcccucaacaaccgguuccagaucaaggggguggagcugaaguccggcuacaaggacuggauccuguggaucagcuucgccaucuccugcuuccuccugugcgucgugcugcucggcuucaucaugugggccugccagaaggggaacauccgcugcaacaucugcaucuga

SEQ ID NO: 72701 - RNA, 1701 nt, Artificial Sequence
  derived and/or modified CDS sequence (opt1) from hemagglutinin__InfluenzaA__AFH00527
augaagaccaucaucgcccugagcuacauccucugccugguguucgcccagaagauccccggcaacgacaacuccaccgcgacgcugugccucgggcaccacgccgucccgaacggcacccuggugaagaccaucaccaacgaccagaucgaggugacgaacgccaccgagcugguccagagcuccagcaccgggcgcaucugcgacagcccccaccggauccucgacggcgagaacugcacccugaucgacgcccugcucggggacccccacugcgacggcuuccagaacaaggagugggaccuguucguggagcgcagcaaggccuacuccaacugcuaccccuacgacgugccggacuacgcgagccugcggucccucgucgccagcuccggcacgcuggaguucaacaacgagagcuucaacuggaccgggguggcccagaacggcaccuccuacgccugcaagcgccggagcaucaaguccuucuucagccgccugaacuggcuccaccagcugaaguacaaguaccccgcgcugaacgugaccaugcccaacaacgacaaguucgacaagcucuacaucuggggcguccaccaccccuccacggacagcgaccagaccucccuguacgcccaggccagcgggcgggugaccgugagcaccaagcgcucccagcagacggucaucccgaacaucgggagccggcccugggugcgcggcguguccagccggaucuccauccacuggaccaucgucaagcccggcgacauccugcucaucaacagcaccgggaaccugaucgcgccccgcggcuacuucaagauccgguccgggaaguccuccaucaugcgcagcgacgccccgaucggcaagugcaacuccgagugcaucacccccaacggcagcauccccaacgacaagcccuuccagaacgugaaccggaucacguacggggccugcccgcgcuacgugaagcagaacacccugaagcucgccaccggcaugcggaacguccccgagaagcagacccgcgggaucuucggcgccaucgccggguucaucgagaacggcugggagggcaugguggacgggugguacggcuuccggcaccagaacuccgaggggacgggccaggccgcggaccucaagagcacccaggccgccaucaaccagaucaacgggaagcugaaccgccugaucgagaagaccaacgagaaguuccaccagaucgagaaggaguucuccgagguggagggccggauccaggaccuggagaaguacgucgaggacaccaagaucgaccuguggagcuacaacgccgagcuccugguggcccuggagaaccagcacacgaucgaccucaccgacuccgagaugaacaagcuguucgagcgcacccgcaagcagcugcgggagaacgcggaggacaugggcaacgggugcuucaagaucuaccacaagugcgacaacgccugcaucggcagcauccgcaacgggaccuacgaccacgacguguaccgggacgaggcccucaacaaccgcuuccagaucaagggcgucgagcugaaguccggguacaaggacuggauccuguggaucagcuucgccaucagcugcuuccuccugugcgugguccugcucggcuucaucaugugggccugccagaagggcaacauccggugcaacaucugcaucuga

SEQ ID NO: 72702 - RNA, 1701 nt, Artificial Sequence
  derived and/or modified CDS sequence (opt1) from hemagglutinin__InfluenzaA__AFH00538
augaagaccaucaucgcccugagcuacauccucugccugguguucgcccagaagauccccggcaacgacaacuccaccgcgacgcugugccucgggcaccacgccgucccgaacggcacccuggugaagaccaucaccaacgaccagaucgaggugacgaacgccaccgagcugguccagcgcagcuccaccgggcggaucugcgacagcccccaccgcauccucgacggcgagaacugcacccugaucgacgcccugcucggggacccccacugcgacggcuuccagaacaaggagugggaccuguucguggagcgguccaaggccuacagcaacugcuaccccuacgacgugccggacuacgcgucccugcgcagccucgucgccuccagcggcacgcuggaguucaacaacgaguccuucaacuggaccgggguggcccagaacggcaccagcuacgccugcaagcggcgcuccaucaagagcuucuucucccggcugaacuggcuccaccagcugaaguacaaguaccccgcgcugaacgugaccaugcccaacaacgacaaguucgacaagcucuacaucuggggcguccaccaccccagcacggacuccgaccagaccagccuguacgcccaggccuccgggcgcgugaccgugagcaccaagcggagccagcagacggucaucccgaacaucgggucccgccccugggugcggggcgugagcucccgcaucagcaucuacuggaccaucgucaagcccggcgacauccugcucaucaacuccaccgggaaccugaucgcgccccggggcuacuucaagauccgcagcgggaaguccagcaucaugcgguccgacgccccgaucggcaagugcaacagcgagugcaucacccccaacggcuccauccccaacgacaagcccuuccagaacgugaaccgcaucacguacggggccugcccgcgguacgugaagcagaacacccugaagcucgccaccggcaugcgcaacguccccgagaagcagacccgggggaucuucggcgccaucgccggguucaucgagaacggcugggagggcaugguggacgggugguacggcuuccgccaccagaacagcgaggggacgggccaggccgcggaccugaaguccacccaggccgccaucaaccagaucaacgggaagcugaaccggcucaucgagaagaccaacgagaaguuccaccagaucgagaaggaguucagcgagguggagggccgcauccaggaccuggagaaguacgucgaggacaccaagaucgaccugugguccuacaacgccgagcuccugguggcccuggagaaccagcacacgaucgaccucaccgacagcgagaugaacaagcuguucgagcgcacccggaagcagcugcgcgagaacgcggaggacaugggcaacgggugcuucaagaucuaccacaagugcgacaacgccugcaucggcuccauccggaacgggaccuacgaccacgacguguaccgcgacgaggcccucaacaaccgguuccagaucaagggcgucgagcucaagagcggguacaaggacuggauccuguggaucuccuucgccaucagcugcuuccugcugugcgugguccugcucggcuucaucaugugggccugccagaagggcaacauccgcugcaacaucugcaucuga

SEQ ID NO: 72703 - RNA, 1701 nt, Artificial Sequence
  derived and/or modified CDS sequence (opt1) from hemagglutinin__InfluenzaA__AFH00549
augaagaccaucaucgcccugagcuacauccucugccugguguucgcccagaagcugcccggcaacgacaacuccaccgcgacgcucugccuggggcaccacgccgucccgaacggcacccuggugaagaccaucaccaacgaccagaucgaggugacgaacgccaccgagcucguccagagcuccagcaccgggcgcaucugcgacagcccccaccggauccuggacggcgagaacugcacccugaucgacgcccuccugggggacccccacugcgacggcuuccagaacaaggagugggaccuguucguggagcgcagcaaggccuacuccaacugcuaccccuacgacgugccggacuacgcgagccuccggucccuggucgccagcuccggcacgcuggaguucaacaacgagagcuucaacuggaccgggguggcccagaacggcaccuccagcgccugcaagcgccgguccaucaagagcuucuucucccgccucaacuggcugcaccagcugaaguacaaguaccccgcgcucaacgugaccaugcccaacaacgacaaguucgacaagcuguacaucuggggcguccaccaccccagcacggacuccgaccagaccagccuguacgcccaggccccggggcgggugaccgugagcacccgccggucccagcagacggucauccccaacaucgggagccgccccugggugcggggcguguccagcaucaucuccaucuacuggaccaucgucaagcccggcgacauccuccugaucaacagcaccgggaaccugaucgccccgcgcggcuacuucaagauccgguccgggaaguccuccaucaugcgcagcgacgcccccaucuccaagugcaacagcgagugcaucacccccaacggcuccauccccaacgacaagccguuccagaacgugaaccggaucacguacggcgcgugcccccgcuacgugaagcagaacacccucaagcuggccaccgggaugcggaacguccccgagaagcagacccgcggcaucuucggggccaucgccggcuucaucgagaacgggugggagggcaugguggacggcugguacggguuccggcaccagaacagcgagggcacggggcaggccgcggaccugaaguccacccaggccgccaucaaccagaucaacggcaagcucaaccgccugaucgagaagaccaacgagaaguuccaccagaucgagaaggaguucagcgagguggaggggcggauccaggaccuggagaaguacgucgaggacaccaagaucgaccucugguccuacaacgccgagcugcugguggcccucgagaaccagcacacgaucgaccugaccgacagcgagaugaacaagcuguucgagcgcacccgcaagcagcuccgggagaacgcggaggacaugggcaacggcugcuucaagaucuaccacaagugcgacaacgccugcaucggguccauccgcaacggcaccuacgaccacgacguguaccgggacgaggcccugaacaaccgcuuccagaucaagggggucgagcucaagagcggcuacaaggacuggauccuguggaucagcuucgccaucuccugcuuccugcugugcgugguccuccugggguucaucaugugggccugccagaagggcaacauccggugcaacaucugcaucuga

SEQ ID NO: 72704 - RNA, 1701 nt, Artificial Sequence
  derived and/or modified CDS sequence (opt1) from hemagglutinin__InfluenzaA__AFH00560
augaagaccaucaucgcccugagcuacauccucugccugguguucgcccagaagcugcccgucaacgacaacuccaccgcgacgcucugccugggccaccacgccgugccgaacgggacccuggugaagaccaucaccaacgaccacaucgaggucacgaacgccaccgagcucgugcagagcuccagcaccggccgcaucugcgacaucccccaccagauccuggacggggagaacugcacccugaucgacgcccuccugggcgacccccacugcgacggguuccagaacaaggagugggaccuguucguggagcgguccacggccuacagcaacugcuaccccuacgacgucccggacuacgcgucccuccgcagccugguggccuccagcggcacccuggaguucaacaacgaguccuucaacuggaccggcguggcccagaacgggaccagcuccgccugcaagcggcgcagcaucaaguccuucuucagccggcucaacuggcugcaccagcugaaguacaaguaccccgcgcucaacgucacgaugcccaacaacgagaaguucgacaagcuguacaucuggggcgugcaccaccccuccaccgacagcgaccagaucucccuguacgcccaggccccggggcgcgugaccgucagcaccaagcggagccagcagacggugauccccaacaucggcucccgccccugggugcgcggggucagcucccggaucagcaucuacuggaccaucgugaagcccggcgacauccuccugaucaacuccaccggcaaccugaucgccccgcggggguacuucaagauccgcagcggcaaguccagcaucaugcgguccgacgcccccaucgggaagugcaacagcgagugcaucacccccaacggcuccauccccaacgacaagccguuccagaacgugaaccgcaucacguacggcgcgugcccccgguacgucaagcagaacacccucaagcuggccaccgggaugcgcaacgugcccgagaagcagacccggggcaucuucggggccaucgccggcuucaucgagaacgggugggagggcaugguggacggcugguacggguuccgccaccagaacagcgagggcacggggcaggccgcggaccugaaguccacccaggccgccaucaaccagaucaacggcaagcucaaccggcugaucgagaagaccaacgagaaguuccaccagaucgagaaggaguucagcgaggccgaggggcgcauccaggaccuggagaaguacgucgaggacaccaagaucgaccucugguccuacaacgccgagcugcugguggcgcucgagaaccagcacacgaucgaccugaccgacagcgagaugaacaagcuguucgagcggacccgcaagcagcuccgcgagaacgccgaggacaugggcaacggcugcuucaagaucuaccacaagugcgacaacgccugcaucggguccauccggaacggcaccuacgaccacgacguguaccgcgacgaggcccugaacaaccgguuccagaucaagggggucgagcucaagagcggcuacaaggacuggauccuguggaucuccuucgccaucagcugcuuccugcugugcaucgugcuccugggguucaucaugugggcgugccagaagggcaacauccgcugcaacaucugcaucuga

SEQ ID NO: 72705 - RNA, 1701 nt, Artificial Sequence
  derived and/or modified CDS sequence (opt1) from hemagglutinin__InfluenzaA__AFH00571
augaagaccaucaucgcccugagcuacauccucugccugguguucgcccagaagcugcccgucaacgacaacuccaccgcgacgcucugccugggccaccacgccgugccgaacgggacccuggugaagaccaucaccaacgacaacaucgaggucacgaacgccaccgagcucgugcagagcuccagcaccggccgcaucugcgacagcccccaccagauccuggacggggagaacugcacccugaucgacgcccuccugggcgacccccacugcgacggguuccagaacaaggagugggaccuguucguggagcggagcacggccuacuccaacugcuaccccuacgacgucccggacuacgcgagccuccgcucccugguggccagcuccggcacccuggaguucaacaacgagagcuucaacuggaccggcguggaccagaacgggaccuccagcgccugcaagcggcgcuccaacaagagcuucuucucccggcucaacuggcugcaccagcugaaguacaaguaccccgcccucaacgucacgaugcccaacaacgagaaguucgacaagcuguacaucuggggcgugcaccaccccagcaccgacuccgaccagaucagccuguacgcgcaggccagcgggcgcgugaccgucuccaccaagcggagccagcagacggugaucccgaacaucggcucccgccccugggugcgcggggucagcucccggaucagcaucuacuggaccaucgugaagcccggcgacauccuccugaucaacuccaccggcaaccugaucgcgccccggggguacuucaagauccgcagcggcaaguccagcaucaugcgguccaacgccccgaucgggaagugcaacagcgagugcaucacccccaacggcuccauccccaacgacaagcccuuccagaacgugaaccgcaucacguacggcgccugcccgcgguacgucaagcagaacacccucaagcuggccaccgggaugcgcaacgugcccgagaagcagacccggggcaucuucggggccaucgccggcuucaucgagaacgggugggagggcaugguggacggcugguacggguuccgccaccagaacagcgagggcacggggcaggccgccgaccugaaguccacccaggcggccaucaaccagaucaacggcaagcucaaccggcugaucgagaagaccaacgagaaguuccaccagaucgagaaggaguucagcgaggucgaggggcgcauccaggaccuggagaaguacguggaggacaccaagaucgaccucugguccuacaacgccgagcugcugguggcccucgagaaccagcacacgaucgaccugaccgacagcgagaugaacaagcuguucgagcggacccgcaagcagcuccgcgagaacgccgaggacaugggcaacggcugcuucaagaucuaccacaagugcgacaacgcgugcaucggguccauccggaacggcaccuacgaccacgacgucuaccgcgacgaggcccugaacaaccgguuccagaucaaggggguggagcugaaguccggcuacaaggacuggauccucuggaucagcuucgccaucuccugcuuccugcugugcgucgugcuccugggguucaucaugugggccugccagaagggcaacauccgcugcaacaucugcaucuga

SEQ ID NO: 72706 - RNA, 1701 nt, Artificial Sequence
  derived and/or modified CDS sequence (opt1) from hemagglutinin__InfluenzaA__AFH00582
augaagaccaucaucgcccugagcuacauccucugccugguguucgcccagaagcugcccggcaacgacaacuccaccgcgacgcucugccuggggcaccacgccgucccgaacggcacccuggugaagaccaucaccaacgaccagaucgaggugacgaacgccaccgagcucguccagagcuccagcaccgggggcaucugcgacagcccccaccagauccuggacggggagaacugcacccugaucgacgcccuccugggcgacccccacugcgacggcuuccagaacaaggagugggaccuguucguggagcgcagcaaggccuacuccaacugcuaccccuacgacgugccggacuacgcgagccuccggucccuggucgccagcuccgggacgcuggaguucaacaacgagagcuucaacuggaccggcguggcccagaacgggaccuccagcgccugcaagcgccgguccaacaagagcuucuucucccgccucaacuggcugcaccagcugaaguacaaguaccccgcgcucaacgugaccaugcccaacaacgagaaguucgacaagcuguacaucuggggcguccaccaccccagcacggacuccgaccagaucagccuguacgcccaggccccggggcgggugaccgugagcaccaagcgcucccagcagaccgucauccccaacaucggcagccggcccugggugcgcggcguguccagccggaucuccaucuacuggacgaucgucaagcccggggacauccuccugaucaacugcaccggcaaccugaucgccccgcgcggguacuucaagauccggagcggcaaguccagcaucaugcgcuccgacgccagcaucggcaagugcaacuccgagugcaucacccccaacgggagcauccccaacgacaagcccuuccagaacgugaaccggaucaccuacggcgcgugcccgcgcuacgugaagcagaacacgcucaagcuggccaccgggaugcggaacguccccgagaagcagacccgcggcaucuucggggccaucgccggcuucaucgagaacggcugggaggggaugguggacggcugguacggguuccggcaccagaacuccgagggcaccgggcaggccgcggaccugaaguccacgcaggccgccaucaaccagaucaacggcaagcucaaccgccugaucgagaagaccaacgagaaguuccaccagaucgagaaggaguucuccgagguggagggccggauccaggaccuggagaaguacgucgaggacaccaagaucgaccucuggagcuacaacgccgagcugcugguggcccucgagaaccagcacaccaucgaccugacggacuccgagaugaacaagcuguucgagcgcaccaagaagcagcuccgggagaacgcggaggacauggggaacggcugcuucaagaucuaccacaagugcgacaacgccugcaucgggagcauccgcaacggcaccuacgaccacgacguguaccgcgacgaggcccugaacaaccgguuccagaucaagggggucgagcugaaguccggcuacaaggacuggauccucuggaucagcuucgccaccagcugcuuccugcugugcgugguccuccugggcuucaucaugugggccugccagaaggggaacauccgcugcaacaucugcaucuga

SEQ ID NO: 72707 - RNA, 1701 nt, Artificial Sequence; identical to SEQ ID NO: 65329
  derived and/or modified CDS sequence (opt1) from hemagglutinin__InfluenzaA__AFH00593

SEQ ID NO: 72708 - RNA, 1701 nt, Artificial Sequence; identical to SEQ ID NO: 65329
  derived and/or modified CDS sequence (opt1) from hemagglutinin__InfluenzaA__AFH00604

SEQ ID NO: 72709 - RNA, 1701 nt, Artificial Sequence
  derived and/or modified CDS sequence (opt1) from hemagglutinin__InfluenzaA__AFH00615
augaagaccaucaucgcccugagcuacauccucugccugguguucgcccagaagcugcccggcaacgacaacuccaccgcgacgcucugccuggggcaccacgccgucccgaacggcaccaucgugaagaccaucaccaacgaccagaucgaggugacgaacgccaccgagcugguccagagcuccagcaccgggggcaucugcaacagcccccaccagauccucgacggggagaacugcacccugaucgacgcccugcucggcgacccccagugcgacggcuuccagaacaagaagugggaccuguucguggagcgcuccaaggccuacuccaacugcuaccccuacgacgugccggacuacgcgagccugcggucccucgucgccagcuccgggacgcuggaguucaacaacgagagcuucaacuggaccggcgugacccagaacgggaccuccagcgccugcaagcgccgguccaacaagagcuucuucucccgccugaacuggcucacgcaccugaaguacaaguaccccgcccugaacgugaccaugcccaacaacgagaaguucgacaagcucuacaucuggggcguccaccaccccgggaccgacagcgaccagaucucccuguacgcgcaggccagcggccggaucaccgugagcacgaagcgcucccagcagaccgugaucccgaacaucggcagccggccccgcguccgggacaucuccagccgcaucuccaucuacuggaccaucgugaagcccggggacauccugcucaucaacagcaccggcaaccugaucgcgccccggggguacuucaagauccgcuccggcaagagcuccaucaugcggagcgacgccccgaucggcaagugcaacuccgagugcaucacgcccaacgggagcauccccaacgacaagcccuuccagaacgugaaccgcaucaccuacggcgccugcccgcgguacgucaagcagaacacccugaagcucgccaccgggaugcgcaacgugcccgagaagcagacgcggggcaucuucggggccaucgccggcuucaucgagaacggcugggaggggaugguggacggcugguacggguuccgccaccagaacuccgagggcaccgggcaggccgccgaccucaagagcacccaggcggccaucaaccagaucaacggcaagcugaaccggcucaucggcaagaccaacgagaaguuccaccagaucgagaaggaguucuccgaggucgaggggcgcauccaggacaucgagaaguacguggaggacacgaagaucgaccuguggagcuacaacgccgagcugcucguggcccuggagaaccagcacaccaucgaccugaccgacuccgagaugaacaagcuguucgagcggaccaagaagcagcugcgcgagaacgccgaggacaugggcaacgggugcuucaagaucuaccacaagugcgacaacgcgugcaucgagagcauccgcaacggcacguacgaccacgacgucuaccgggacgaggcccugaacaaccgcuuccagaucaaggggguggagcucaaguccggcuacaaggacuggauccuguggaucagcuucgccaucagcugcuuccugcucugcguggcccugcugggcuucaucaugugggccugccagaaggggaacauccggugcaacaucugcaucuga

SEQ ID NO: 72710 - RNA, 1701 nt, Artificial Sequence; identical to SEQ ID NO: 72301
  derived and/or modified CDS sequence (opt1) from hemagglutinin__InfluenzaA__AFH00626

SEQ ID NO: 72711 - RNA, 1701 nt, Artificial Sequence
  derived and/or modified CDS sequence (opt1) from hemagglutinin__InfluenzaA__AFH00637
augaagaccaucaucgcccugagcuacauccucugccugguguucgcccagaagcugcccggcaacgacaacuccaccgcgacgcucugccuggggcaccacgccgucccgaacggcaccaucgugaagaccaucaccaacgaccagaucgaggugacgaacgccaccgagcugguccagagcuccagcaccgggggcaucugcgacagcccccaccagauccucgacggggagaacugcacccugaucgacgcccugcucggcgacccccagugcgacggcuuccagaacaagaagugggaccuguucguggagcgcagcaaggccuacuccaacugcuaccccuacgacgugccggacuacgcgagccugcggucccucgucgccagcuccgggacgcuggaguucaacaacgagagcuucaacuggaccggcgugacccagaacgggaccuccagcuccugcaagcgccggagcaacaacuccuucuucagccgccugaacuggcucacgcaccugaaguucaaguaccccgcccugaacgugaccaugcccaacaacgagaaguucgacaagcucuacaucuggggcguccaccaccccgggaccaacaacgaccagaucucccuguacacccaggccagcggccggaucacggugagcaccaagcgcucccagcagaccgugaucccgaacaucggcagccggccccgcguccgggacauccccucccgcaucagcaucuacuggaccaucgugaagcccggggacauccugcucaucaacuccacgggcaaccugaucgcgccgcggggguacuucaagauccgcagcggcaaguccagcaucaugcgguccgacgcccccaucggcaagugcaacagcgagugcaucacccccaacggguccauccccaacgacaagccguuccagaacgugaaccgcaucaccuacggcgccugcccccgguacgucaagcagaacacccugaagcucgccacggggaugcgcaacgugcccgagaagcagacccggggcaucuucggggccaucgcgggcuucaucgagaacggcugggaggggaugguggacggcugguacggguuccgccaccagaacagcgagggcaucgggcaggccgccgaccugaaguccacccaggccgccaucaaccagaucaacggcaagcugaaccggcucaucggcaagaccaacgagaaguuccaccagaucgagaaggaguucagcgaggucgaggggcgcauccaggaccuggagaaguacguggaggacacgaagaucgaccugugguccuacaacgcggagcuccugguggcccuggagaaccagcacaccaucgaccucaccgacagcgagaugaacaagcuguucgagcggaccaagaagcagcugcgcgagaacgccgaggacaugggcaacgggugcuucaagaucuaccacaagugcgacaacgccugcaucggcuccauccgcaacgggacguacgaccacgacgucuaccgggacgaggcccucaacaaccgcuuccagaucaagggcguggagcugaaguccggcuacaaggacuggauccuguggaucuccuucgcgaucagcugcuuccuccugugcguggcccugcucggguucaucaugugggccugccagaagggcaacauccggugcaacaucugcaucuga

SEQ ID NO: 72712 - RNA, 1701 nt, Artificial Sequence
  derived and/or modified CDS sequence (opt1) from hemagglutinin__InfluenzaA__AFH00648
augaagaccaucaucgcccugagcuacauccucugccugguguucgcccagaagcugcccggcaacgacgacuccaccgcgacgcucugccuggggcaccacgccgucccgaacggcaccaucgugaagaccaucaccaacgaccagaucgaggugacgaacgccaccgagcugguccagagcuccagcaccgggggcaucugcgacagcccccaccagauccucgacggggagaacugcacccugaucgacgcccugcucggcgacccccagugcgacggcuuccagaacaagaagugggaccuguucguggagcgcagcaaggccuacuccaacugcuaccccuacgacgugccggacuacgcgagccugcggucccucgucgccagcuccgggacgcuggaguucaacgacgagagcuucaacuggaccggcgugacccagaacgggaccuccagcuccugcaagcgccggagcaacaacuccuucuucagccgccugaacuggcucacgcaccugaaguucaaguaccccgcccugaacgugaccaugcccaacaacgagaaguucgacaagcucuacaucuggggcguccaccaccccgugaccgacaacgaccagaucuuccuguacgcccaggcguccgggcggaucaccgugagcacgaagcgcagccagcagaccgucaucccgaacaucggcucccggccccgcauccggaacauccccagccgcaucuccaucuacuggaccaucgugaagcccggcgacauccugcucaucaacagcaccgggaaccugaucgccccgcggggcuacuucaagauccgcuccgggaaguccuccaucaugcggagcgacgcccccaucggcaagugcaacuccgagugcaucacgcccaacggcagcauccccaacgacaagccguuccagaacgugaaccgcaucaccuacggggccugcccccgguacgucaagcagaacacccugaagcucgccaccggcaugcgcaacgugcccgagaagcagacgcgggggaucuucggcgcgaucgccggguucaucgagaacggcugggagggcaugguggacgggugguacggcuuccgccaccagaacuccgaggggaucggccaggccgccgaccucaagagcacccaggccgcgaucaaccagaucaacgggaagcugaaccggcugaucggcaagaccaacgagaaguuccaccagaucgagaaggaguucuccgaggucgagggccgcauccaggaccuggagaaguacguggaggacaccaagaucgaccuguggagcuacaacgccgagcuccugguggcccuggagaaccagcacacgaucgaccucaccgacuccgagaugaacaagcuguucgagcggaccaagaagcagcugcgcgagaacgccgaggacauggggaacggcugcuucaagaucuaccacaagugcgacaacgccugcaucgggagcauccgcaacggcaccuacgaccacgacgucuaccgggacgaggcgcucaacaaccgcuuccagaucaaggggguggagcugaaguccggcuacaaggacuggauccuguggaucagcuucgccaucuccugcuuccuccugugcguggcccugcucggcuucaucaugugggccugccagaaggggaacauccggugcaacaucugcaucuga

SEQ ID NO: 72713 - RNA, 1701 nt, Artificial Sequence
  derived and/or modified CDS sequence (opt1) from hemagglutinin__InfluenzaA__AFH00659
augaagaccaucaucgcccugagcuacauccucugccugguguucacccagaagcugcccggcaacgacaacuccacggccacccucugccuggggcaccacgcggucccgaacggcaccauggugaagaccaucacgaacgaccagaucgaggugaccaacgccaccgagcugguccagagcuccagcaccggggagaucugcgacagcccccaccagauccucgacggcgagaacugcacgcugaucgacgcccugcucggggacccccagugcgacggcuuccagaacaagaagugggaccuguucguggagcgcagcaaggcccacuccaacugcuaccccuacgacgugccggacuacgccagccugcggucccucaucgcgagcuccggcacccuggaguucaacaacgagagcuucaacuggaccggggucacccagaacggcacguccagcgccugcaagcgccgguccgacaacagcuucuucucccgccugaacuggcucacccaccugaaguucaaguaccccgcccugaacgugaccaugcccaacaacgaggaguucgacaagcucuacaucuggggcgugcaccaccccgggaccgacaacgaccagaucagccuguacgcccaggcguccgggcggaucacggucagcaccaagcgcagccagcagaccgugaucccgaacaucggcucccggccccgcgugcgggacauccccagccgcaucuccaucuacuggaccaucgucaagcccggcgacauccugcucaucaacagcacggggaaccugaucgccccgcggggcuacuucaagauccgcuccgggaaguccuccaucaugcggagcgacgcccccaucggcaagugcaacuccggcugcaucacccccaacgggagcauccccaacgacaagccguuccagaacgugaaccgcaucaccuacggcgccugcccccgguacgugaagcagaacacccugaagcucgccacggggaugcgcaacguccccgagaagcagacccggggcaucuucggggcgaucgccggcuucaucgagaacggcugggaggggaugguggacggcugguacggguuccgccaccagaacuccgagggcaucgggcaggccgccgaccucaagagcacccaggccgcgaucgaccagaucaacggcaagcugaaccggcugaucggcaagaccaacgagaaguuccaccagaucgagaaggaguucuccgagguggaggggcgcauccaggaccuggagaaguacgucgaggacacgaagaucgaccuguggagcuacaacgccgagcuccugguggcccuggagaaccagcacaccaucgaccucaccgacuccgagaugaacaagcuguucgagcggaccaagaagcagcugcgcgagaacgccgaggacaugggcaacgggugcuucaagaucuaccacaagugcgacaacgccugcaucggcagcauccgcaacgggacguacgaccacgacguguaccgggacgaggcgcucaacaaccgcuuccagaucaagggcgucgagcugaaguccggcuacaaggacuggauccuguggaucagcuucgccaucuccugcuuccuccugugcguggcccugcucggguucaucaugugggccugccagaagggcaacauccggugcaacaucugcaucuga

SEQ ID NO: 72714 - RNA, 1701 nt, Artificial Sequence
  derived and/or modified CDS sequence (opt1) from hemagglutinin__InfluenzaA__AFH00670
augaagaccaucaucgcccugagcuacauccucugccugguguucgcccagaagcugcccggcaucgacaacuccaccgcgacgcucugccuggggcaccacgccgucccgaacggcaccaucgugaagaccaucaccaacgaccagaucgaggugacgaacgccaccgagcugguccagaacagcuccaccgggggcaucugcgacagcccccaccagauccucgacggggagaacugcacccugaucgacgcccugcucggcgacccccagugcgacggcuuccagaacaagaagugggaccuguucguggagcgcuccaaggccuacagcaacugcuaccccuacgacgugccggacuacgcgucccugcggagccucgucgccuccagcgggacgcuggaguucaacaacgaguccuucaacuggaccggcgugacccagaacgggaccagcuccgccugcaagcgcggcagcaacaacuccuucuucagccggcugaacuggcucacgcacuccaaguucaaguaccccgcccugaacgugaccaugcccaacaacgaggaguucgacaagcuguacaucuggggcguccuccaccccgggaccgacaacgaccagaucuuccuguacgcgcaggccagcggccgcaucaccguguccacgaagcggagccagcagaccgugaucccgaacaucgggagccgcccccggguccgcaacauccccucccggaucagcaucuacuggaccaucgugaagcccggcgacauccugcucaucaacuccaccgggaaccugaucgccccgcgcggcuacuucaagauccggagcggcaaguccagcaucaugcgcuccgacgcccccaucgggaagugcaacagcgagugcaucacgcccaacggcuccauccccaacgacaagccguuccagaacgugaaccggaucaccuacggggccugcccccgcuacgucaagcagaacacccugaagcucgcgaccggcaugcggaacgugcccgagaagcagacgcgcgggaucuucggcgccaucgccggcuucaucgagaacgggugggagggcaugguggacgggugguacggcuuccggcaccagaacagcgaggggaucggccaggccgccgaccugaaguccacccaggcggccaucgaccagaucaacggcaagcugaaccgccucaucgggaagaccaacgagaaguuccaccagaucgagaaggaguucagcgaggucgagggccggauccaggaccuggagaaguacguggaggacaccaagaucgaccugugguccuacaacgccgagcuccugguggcccuggagaaccagcacacgaucgaccucaccgacagcgagaugaacaagcuguucgagaagaccaagaagcagcugcgcgagaacgccgaggacauggggaacggcugcuucaagaucuaccacaagugcgacaacgcgugcaucggguccauccggaacggcaccuacgaccacgacgucuaccgcgacgaggcccucaacaaccgcuuccagaucaagggcguggagcucaagagcggguacaaggacuggauccuguggaucuccuucgccaucagcugcuuccugcugugcguggcccugcucggcuucaucaugugggccugccagaaggggaacauccggugcaacaucugcaucuga

SEQ ID NO: 72715 - RNA, 1701 nt, Artificial Sequence
  derived and/or modified CDS sequence (opt1) from hemagglutinin__InfluenzaA__AFH00681
augaagaccaucaucgcccugagcuacauccucugccugguguucgcccagaagcugcccggcaacgacaacuccaccgcgacgcucugccuggggcaccacgccgucccgaacggcaccaucgugaagaccaucaccaacgaccagaucgaggugacgaacgccaccgagcugguccagagcuccagcaccggggagaucugcgacagcccccaccagauccucgacggcgagaacugcacccugaucgacgcccugcucggggacccccagugcgacggcuuccagaacaagaagugggaccuguucaucgagcgcagcaaggccuacuccaacugcuaccccuacgacgugccggacuacgcgagccugcggucccucguggccagcuccggcacgcuggaguucaacaacgagagcuucaacuggaccggggucacccagaacggcaccuccagcgccugcauccgccgguccaacaacagcuucuucucccgccugaacuggcucacgcaccugaaguucaaguaccccgcccugaacgugaccaugcccaacaaggagaaguucgacaagcucuacaucuggggcgugcaccaccccgggaccgacaacgaccagaucuuccuguacgcgcaggccagcgggcggaucaccgucuccacgaagcgcagccagcagaccgugaucccgaacaucggcagccggccccgcgugcggaacauccccucccgcaucagcaucuacuggaccaucgucaagcccggcgacauccugcucaucaacuccaccgggaaccugaucgccccgcggggcuacuucaagauccgcagcgggaaguccagcaucaugcgguccgacgcccccaucggcaagugcaacagcgagugcaucacgcccaacggcuccauccccaacgacaagccguuccagaacgugaaccgcaucaccuacggggccugcccccgguacgugaagcagaacacccugaagcucgcgaccggcaugcgcaacguccccgagaagcagacgcgggggaucuucggcgccaucgccggguucaucgagaacggcugggagggcaugguggacgggugguacggcuuccgccaccagaacagcgaggggaucggccaggccgccgaccugaaguccacccaggcggccaucgaccagaucaacgggaagcugaaccggcucaucggcaagaccaacgagaaguuccaccagaucgagaaggaguucagcgagguggagggccgcauccaggaccuggagaaguacgucgaggacaccaagaucgaccugugguccuacaacgccgagcuccugguggcccuggagaaccagcacacgaucgaccucaccgacagcgagaugaacaagcuguucgagaagaccaagaagcagcugcgggagaacgccgaggacauggggaacggcugcuucaagaucuaccacaagugcgacaacgcgugcaucggguccauccgcaacggcaccuacgaccacgacguguaccgcgacgaggcccucaacaaccgguuccagaucaagggggucgagcugaaguccggcuacaaggacuggauccuguggaucuccuucgccaucagcugcuuccuccugugcguggcccugcucggcuucaucaugugggccugccagaaggggaacauccgcugcaacaucugcaucuga

SEQ ID NO: 72716 - RNA, 1701 nt, Artificial Sequence; identical to SEQ ID NO: 65952
  derived and/or modified CDS sequence (opt1) from hemagglutinin__InfluenzaA__AFH00692

SEQ ID NO: 72717 - RNA, 1701 nt, Artificial Sequence
  derived and/or modified CDS sequence (opt1) from hemagglutinin__InfluenzaA__AFH00703
augaagaccaucaucgcccugagcuacauccucugccugguguucgcccagaagcugcccggcaacgacaacuccaccgcgacgcucugccuggggcaccacgccgucccgaacggcaccaucgugaagaccaucaccaacgaccagaucgaggugacgaacgccaccgagcugguccagagcuccagcaccgggaagaucugcgacagcccccaccagauccucgacggcaagaacugcacccugaucgacgcccugcucggggacccccagugcgacggcuuccagaacaagaagugggaccuguucguggagcgcagcaaggccuacuccaacugcuaccccuacgacgugccggacuacgcgagccugcggucccucgucgccagcuccggcacgcuggaguucaacaacgagagcuucaacuggaccggggugacccagaacggcaccuccagcgccugcauccgccgguccaagaacagcuucuucucccgccugaacuggcucacgcaccugaacuucaaguacagcgcccugaacgugaccaugcccaacaacgagcaguucgacaagcucuacaucuggggcguccaccaccccgggaccgacaaggaccagaucuuccuguacgcgcaggccuccgggcggaucaccgugagcacgaagcgcagccagcagaccgugauccccaacaucggcucccggccgcgcguccggaacauccccagccgcaucuccaucuacuggaccaucgugaagcccggcgacauccugcucaucaacagcaccgggaaccugaucgcgccccggggcuacuucaagaugcaguccgggaaguccuccaucaugcgcagcgacgccccgaucggcaagugcaacuccgagugcaucacgcccaacggcagcauccccaacgacaagcccuuccagaacgugaaccggaucaccuacggggccugcccgcgcuacgucaagcagaacacccugaagcucgccaccggcaugcggaacgugcccgagaagcagacgcgcgggaucuucggcgccaucgccggguucaucgagaacggcugggagggcaugguggacgggugguacggcuuccggcaccagaacuccgaggggcgcggccaggccgccgaccucaagagcacccaggcggccaucgaccagaucaacgggaagcugaaccggcugaucggcaagaccaacgagaaguuccaccagaucgagaaggaguucuccgaggucgagggccgcauccaggaccuggagaaguacguggaggacaccaagaucgaccuguggagcuacaacgccgagcuccugguggcccuggagaaccagcacacgaucgaccucaccgacuccgagaugaacaagcuguucgagaagaccaagaagcagcugcgggagaacgccgaggacauggggaacggcugcuucaagaucuaccacaagugcgacaacgcgugcaucgggagcauccgcaacggcaccuacgaccacgacgucuaccgcgacgaggcccucaacaaccgguuccagaucaaggggguggagcugaaguccggcuacaaggacuggauccuguggaucagcuucgccaucuccugcuuccuccugugcguggcccugcucggcuucaucaugugggccugccagaaggggaacauccgcugcaacaucugcaucuga

SEQ ID NO: 72718 - RNA, 1701 nt, Artificial Sequence
  derived and/or modified CDS sequence (opt1) from hemagglutinin__InfluenzaA__AFH00714
augaagaccaucaucgcccugagcuacaucuucugccucguguucgcccagaaccugcccggcaacgacaacuccaccgcgacgcugugccucgggcaccacgccgucccgaacggcacccuggugaagaccaucaccaacgaccagaucgaggugacgaacgccaccgagcugguccagagcuccagcaccgggcgcaucugcgacagcccccaccggauccucgacggcaagaacugcacccugaucgacgcccugcucggggacccccacugcgacggcuuccagaacgagaagugggaccuguucguggagcgcuccaaggccuucuccaacugcuaccccuacgacgugccggacuacgcgagccugcggucccucgucgccagcuccggcacgcuggaguucaucaacgagggguucaacuggaccggcgugacccagagcgggggcuccuacgccugcaagcgcgggagcgacaaguccuucuucagccggcugaacuggcucuacgaguccgagagcaaguaccccgugcugaacgucaccaugcccaacaacggcaacuucgacaagcuguacaucuggggcgugcaccaccccuccacggacaaggagcagaccaaccucuacgugcgcgccagcgggcgggucaccgugagcaccaagcgcucccagcagacgaucaucccgaacaucggcagccggcccugggugcgcgggcuguccagcggcaucuccaucuacuggaccaucgucaagcccggcgacauccugcucaucaacagcaacgggaaccugaucgcgccccggggcuacuucaagauccgcaccgggaaguccagcaucaugcgguccgacgccccgaucgggaccugcagcuccgagugcaucacgcccaacggcagcauccccaacgacaagcccuuccagaacgugaacaagaucaccuacggcgccugcccgaaguacgugaagcagaacacccugaagcucgccaccggcaugcgcaacguccccgagaagcagacgcgggggaucuucggcgccaucgcgggguucaucgagaacggcugggaggggaugguggacggcugguacggcuuccgccaccagaacuccgaggggaccggccaggccgccgaccucaagagcacccaggccgccaucgaccagaucaacgggaagcugaaccgggugaucgagaagaccaacgagaaguuccaccagaucgagaaggaguucuccgaggucgagggccgcauccaggaccucgagaaguacguggaggacacgaagaucgaccuguggagcuacaacgcggagcugcucguggcccuggagaaccagcacaccaucgaccugaccgacuccgagaugaacaagcuguucgagaagacccggcgccagcugcgggagaacgccgaggacauggggaacggcugcuucaagaucuaccacaagugcgacaacgccugcaucggcagcauccgcaacgggacguacgaccacgacgucuaccgcgacgaggcccugaacaaccgguuccagaucaagggcguggagcucaaguccggguacaaggacuggauccuguggaucagcuucgcgaucagcugcuuccugcucugcgucgugcugcugggcuucaucaugugggccugccagaagggcaacauccgcugcaacaucugcaucuga

SEQ ID NO: 72719 - RNA, 1701 nt, Artificial Sequence
  derived and/or modified CDS sequence (opt1) from hemagglutinin__InfluenzaA__AFH00725
augaagaccaucaucgcccugagcuacaucuucugccucaucuucgcccagaaccugcccggcaacgacaacuccaccgcgacgcugugccucgggcaccacgccgugccgaacggcacccuggucaagaccaucaccaacgaccagaucgaggugacgaacgccaccgagcuggugcagagcuccagcaccgggcgcaucugcgacagcccccaccggauccucgacggcaagaacugcacccugaucgacgcccugcucggggacccccacugcgacggcuuccagaacgagaagugggaccuguucgucgagcgcuccaaggccuucuccaacugcuaccccuacgacgugccggacuacgcgagccugcggucccucguggccagcuccggcacgcuggaguucaucaacgagggguucaacuggaccggcgucacccagagcgggggcuccuacgccugcaagcgcgggagcgacaacuccuucuucagccggcugaacuggcucuacgaguccgagagcaaguaccccgugcugaacgugaccaugcccaacaacggcaaguucgacaagcuguacaucuggggcguccaccaccccuccacggacaaggagcagaccaagcucuacgugcgcgccagcgggcgggugaccgucagcaccaagcgcucccagcagacggugaucccgaacaucggcagccggcccugggugcgcgggcuguccagccggaucuccaucuacuggaccaucgucaagcccggcgacauccugcucaucaacagcaccggcaaccugaucgcgccccgcggguacuucaagauccggaccggcaaguccagcaucaugcgcuccgacgccccgaucgggacgugcagcuccgagugcaucacccccaacggcagcauccccaacgacaagcccuuccagaacgugaacaagaucaccuacggggccugcccgcgguacgugaagcagaacacccugaagcucgccacgggcaugcgcaacguccccgagaagcagacccggggcaucuucggggccaucgcgggcuucaucgagaacgggugggagggcaugguggacgggugguacggcuuccgccaccagaacuccgagggcaccgggcaggccgccgaccucaagagcacccaggccgccaucgaccagaucaacggcaagcugaaccgggugaucgagaagacgaacgagaaguuccaccagaucgagaaggaguucuccgaggucgaggggcgcauccaggaccucgagaaguacguggaggacaccaagaucgaccuguggagcuacaacgcggagcugcucguggcccuggagaaccagcacaccaucgaccugaccgacuccgagaugaacaagcuguucgagaagacgcggaagcagcugcgcgagaacgccgaggacaugggcaacgggugcuucaagaucuaccacaagugcgacaacgccugcaucggcagcauccgcaacggcaccuacgaccacgacgucuaccgggacgaggcccugaacaaccgcuuccagaucaaggggguggagcucaaguccggcuacaaggacuggauccuguggaucagcuucgcgaucagcugcuuccugcucugcgucgugcugcugggguucaucaugugggccugccagaagggcaacauccggugcaacaucugcaucuga

SEQ ID NO: 72720 - RNA, 1701 nt, Artificial Sequence; identical to SEQ ID NO: 71090
  derived and/or modified CDS sequence (opt1) from hemagglutinin__InfluenzaA__AFH00736

SEQ ID NO: 72721 - RNA, 1701 nt, Artificial Sequence
  derived and/or modified CDS sequence (opt1) from hemagglutinin__InfluenzaA__AFH00747
augaagaccaucaucgcccugagcuacaucuucugccucguguucgcccagaagcugcccggcaacgacaacuccaccgcgacgcugugccucgggcacuacgccgucccgaacggcacccuggugaagaccaucaccaacgaccagaucgaggugacgaacgccaccgagcugguccagagcuccagcaccgggcgcaucugcgacagcccccaccggauccucgacggcaagaacugcacccugaucgacgcccugcucggggacccccacugcgacggcuuccagaacgagaagugggaccuguucguggagcgcagcaaggccuacuccaacugcuaccccuacgacgugccggacuacgcgagccugcggucccucgucgccagcuccggcacgcuggaguucaucaacgaggacuucaacuggaccggggugacccagagcggcggguccuacgccugcaagcgcggcagcgugaaguccuucuucagccggcugaacuggcuccacgaguccgaguacaaguaccccgcccugaacgucaccaugcccaacaacgggaaguucgacaagcuguacaucuggggcgugcaccaccccagcacggaccgcgagcagaccaaccucuacgugcgggcguccggccgcgucaccgugagcaccaagcggagccagcagacggugaucccgaacaucgggucccgccccuggguccggggccugagcucccgcaucagcaucuacuggaccaucgugaagcccggggacauccugcucaucaacuccaccggcaaccugaucgcgccccggggcuacuucaagauccgcaccgggaaguccuccaucaugcggagcgacgccccgaucggcacgugcuccagcgagugcaucacccccaacggguccauccccaacgacaagcccuuccagaacgugaacaagaucaccuacggcgccugcccgcgcuacgucaagcagaacacccugaagcucgccacggggaugcggaacgugcccgagaagcagacccgcggcaucuucggcgccaucgccggguucaucgagaacggcugggaggggaugguggacggcugguacggguuccggcaccagaacagcgagggcaccggccaggccgccgaccugaaguccacccaggccgcgaucgaccagaucaacgggaagcugaaccgccucaucgagaagacgaacgagaaguuccaccagaucgagaaggaguucagcgaggucgagggccggauccaggaccuggagaaguacguggaggacaccaagaucgaccugugguccuacaacgccgagcuccugguggcccuggagaaccagcacaccaucgaccucaccgacagcgagaugaacaagcuguucgagaagacgcgcaagcagcugcgcgagaacgccgaggacauggggaacggcugcuucaagaucuaccacaagugcgacaacgccugcaucggguccauccggaacggcaccuacgaccacgacgucuaccgcgacgaggcgcucaacaaccgguuccagaucaagggcguggagcucaagagcggguacaaggacuggauccuguggaucuccuucgccaucagcugcuuccugcugugcgucgugcugcucggcuucaucaugugggccugccagaaggggaacauccgcugcaacaucugcaucuga

SEQ ID NO: 72722 - RNA, 1701 nt, Artificial Sequence
  derived and/or modified CDS sequence (opt1) from hemagglutinin__InfluenzaA__AFH00758
augaagaccaucaucgcccugagcuacauccucugccugguguucgcccagaagcugcccggcaacgacaacuccaccgcgacgcucugccuggggcaccacgccgucccgaacggcacccuggugaagaccaucaccaacgaccagaucgaggugacgaacgccaccgagcucguccagagcuccagcaccgggcgcaucugcgacagcccccaccggauccuggacggcaagaacugcacccugaucgacgcccuccugggggacccccacugcgacggcuuccagaacaaggagugggaccuguucguggagcgcagcaaggccuacuccaacugcuaccccuacgacgugccggacuacgcgagccuccggucccuggucgccagcuccggcacgcuggaguucaucaacgaggacuucaacuggaccgggguggcccagagcggcgaguccuacgccugcaagcgcgggagcgugaaguccuucuucagccggcucaacuggcugcacgaguccgaguacaaguaccccgcgcugaacgucaccaugcccaacaacggcaaguucgacaagcucuacaucuggggcgugcaccaccccagcaccgaccgcgagcagacgaagcuguacgugcgggccuccgggcgcgucaccgugagcaccaagcggagccagcagaccgugaucccgaacaucggcucccgccccuggguccgggggcugagcucccgcaucagcaucuacuggacgaucgugaagcccggcgacauccuccugaucaacuccaccgggaaccugaucgcgccccggggcuacuucaagauccgcaccggcaagagcuccaucaugcggagcgacgccccgaucgggaccugcuccagcgagugcaucacgcccaacggcuccauccccaacgacaagcccuuccagaacgugaaccgcaucaccuacggggccugcccgcgguacgucaagcagaacacccucaagcuggccaccggcaugcgcaacgugcccgagaagcagacgcgggggaucuucggcgccaucgccggcuucaucgagaacgggugggagggcaugguggacgggugguacggcuuccgccaccagaacagcgaggggaccggccaggccgccgaccugaaguccacccaggcggccaucgaccagaucaacggcaagcucaaccggcugaucgagaagaccaacgagaaguuccaccagaucgagaaggaguucagcgaggucgaggggcgcauccaggaccuggagaaguacguggaggacacgaagaucgaccucugguccuacaacgccgagcugcugguggcccucgagaaccagcacaccaucgaccugaccgacagcgagaugaacaagcuguucgagaagacccgcaagcagcuccgggagaacgccgaggacaugggcaacgggugcuucaagaucuaccacaagugcgacaacgcgugcaucggcuccauccgcaacgggacguacgaccacgacgucuaccgggacgaggcccugaacaaccgcuuccagaucaagggcguggagcugaaguccggcuacaaggacuggauccucuggaucuccuucgccaucagcugcuuccugcugugcgucgugcuccugggguucaucaugugggccugccagaagggcaacauccggugcaacaucugcaucuga

SEQ ID NO: 72723 - RNA, 1701 nt, Artificial Sequence
  derived and/or modified CDS sequence (opt1) from hemagglutinin__InfluenzaA__AFH00769
augaagaccaucaucgcccugagcuacauccucugccugguguucgcccagaagcugcccggcaacgacaacuccaccgcgacgcucugccuggggcaccacgccgucccgaacggcacccuggugaagaccaucaccaacgaccagaucgaggugacgaacgccaccgagcucguccagagcuccagcaccgggcgcaucugcgacagcccccaccggauccuggacggcaagaacugcacccugaucgacgcccuccugggggacccccacugcgacggcuuccagaacaaggagugggaccuguucguggagcgcagcaaggccuacuccaacugcuaccccuacgacgugccggacuacgcgagccuccggucccuggucgccagcuccggcacgcuggaguucaucaacgaggacuucaacuggaccgggguggcccagagcggcgaguccuacacgugcaagcgcgggagcgugaaguccuucuucagccggcucaacuggcugcacgaguccgaguacaaguaccccgcccugaacgucaccaugcccaacaacgacaaguucgacaagcucuacaucuggggcgugcaccaccccagcaccgaccgcgagcagaccucccuguacauccgggcgagcgggcgcgugaccgucagcaccaagcggucccagcagacggugaucccgaacaucggcagccgccccugggugcggggccuguccagccgcaucuccaucuacuggaccaucgucaagcccggggacauccuccugaucaacagcaccggcaaccugaucgcgccccggggguacuucaagauccgcaccggcaaguccagcaucaugcgguccgacgccccgaucggcacgugcagcuccgagugcaucacccccaacgggagcauccccaacgacaagcccuuccagaacgugaaccgcaucaccuacggcgccugcccgcgguacgugaagcagaacacccucaagcuggccacggggaugcgcaacguccccgagaagcagacccggggcaucuucggggccaucgccggcuucaucgagaacggcugggaggggaugguggacggcugguacggguuccgccaccagaacuccgagggcaccgggcaggccgccgaccugaaguccacccaggccgcgaucgaccagaucaacggcaagcucaaccggcugaucgagaagacgaacgagaaguuccaccagaucgagaaggaguucuccgagguggagggccgcauccaggaccuggagaaguacgucgaggacaccaagaucgaccucuggagcuacaacgccgagcugcugguggcccucgagaaccagcacaccaucgaccugaccgacuccgagaugaacaagcuguucgagaagacgcgcaagcagcuccgggagaacgccgaggacauggggaacggcugcuucaagaucuaccacaagugcgacaacgccugcaucgggagcauccgcaacggcaccuacgaccacgacguguaccgggacgaggcgcugaacaaccgcuuccagaucaagggggucgagcugaaguccggcuacaaggacuggauccucuggaucagcuucgccaucagcugcuuccugcugugcgugguccuccugggcuucaucaugugggccugccagaaggggaacauccggugcaacaucugcaucuga

SEQ ID NO: 72724 - RNA, 1701 nt, Artificial Sequence
  derived and/or modified CDS sequence (opt1) from hemagglutinin__InfluenzaA__AFH00780
augcgcgccaucaucgcccugagcuacauccucugccugguguucgcgcagaagcugcccggcaacgacaacuccaccgccacccucugccuggggcaccacgccgucccgaacggcacgcuggugaagaccaucaccaacgaccagaucgaggugaccaacgccacggagcucguccagagcuccagcaccgggcggaucugcgacagcccccaccgcauccuggacggcaagaacugcacccugaucgacgcccuccugggggacccccacugcgacggcuuccagaacaaggagugggaccuguucguggagcggagcaaggcguacuccgacugcuaccccuacgacgugccggacuacgccagccuccgcucccuggucgccagcuccggcacccuggaguucacgaacgagggguucaacuggaccggcguggcccaggacgggaccagcuacgcgugcaagcggggcuccgugaaguccuucuucucccgccucaacuggcugcacaagcuggaguacaaguaccccgcccucaacgucaccaugcccaacaacgacaaguucgacaagcuguacaucuggggcgugcaccaccccagcacggacuccgaccagaccagccuguacgugcaggccuccgggcgggucaccgugagcaccaagcgcagccagcagacggugaucccgaacaucggcucccggcccuggguccgcggggugagcucccggaucagcaucuacuggaccaucgugaagcccggcgacauccuccugaucaacuccaccgggaaccugaucgcgccccgcggcuacuucaagauccggagcggcaaguccagcaucaugcgcuccgacgccccgaucgggaacugcaacagcgagugcaucacccccaacggcuccauccccaacgacaagcccuuccagaacgucaaccggaucacguacggggccugcccgcgcuacgugaagcagaacacccucaagcuggccaccggcaugcggaacgugcccgagaagcagacccgcgggaucuucggcgccaucgccggcuucaucgagaacgggugggagggcauggucgacgggugguacggcuuccggcaccagaacagcgaggggacgggccaggccgcggaccugaaguccacccaggccgccaucaaccagaucaacggcaagcucaaccgccugaucgagaagaccaacgagaaguuccaccagaucgagaaggaguucagcgagguggaggggcggauccaggaccuggagaaguacguggaggacaccaagaucgaccucugguccuacaacgccgagcugcuggucgcccucgagaaccagcacacgaucgaccugaccgacagcgagaugaacaagcuguucgagcgcacccgcaagcagcuccgggagaacgcggaggacaugggcaacgggugcuucaagaucuaccacaagugcgacaacgccugcaucggcuccauccgcaacgggaccuacgaccacgacguguaccgggacgaggcccugaacaaccgcuuccagaucaagggcgucgagcucaagagcggcuacaaggacuggauccuguggaucuccuucgccaucagcugcuuccugcugugcguggugcuccugggguucaucaugugggccugccagaagggcaacauccggugcaacaucugcaucuga

SEQ ID NO: 72725 - RNA, 1701 nt, Artificial Sequence
  derived and/or modified CDS sequence (opt1) from hemagglutinin__InfluenzaA__AFH00791
augaagaccaucaucgcccugagcuacauccucugccugguguucgcccagaagcugcccggcaacgacaacuccaccgcgacgcucugccuggggcaccacgccgucccgaacggcacccuggugaagaccaucaccaacgaccagaucgaggugacgaacgccaccgagcucguccaggggagcuccaccggccgcaucugcgacagcccccaccagauccuggacgggaagaacugcacccugaucgacgcccuccugggcgacccccacugcgacggcuuccagaacaaggagugggaccuguucguggagcgguccacggccuacagcaacugcuaccccuacgacgugccggacuacgcgucccuccgcagccuggucgccuccagcgggacccuggaguucaccaaggagggcuucaacuggaccgggguggcccaggacggcacguccuacacgugcaagcgggggagcgugaaguccuucuucagccgccucaacuggcugcacaagcuggaguacaaguaccccgcccucaacgucaccaugcccaacaacgacaaguucgacaagcuguacaucuggggcgugcaccaccccuccaccgacagcgaccagaccucccuguacgugcaggcgagcggccgggucaccguguccaccaagcgcagccagcagaccgugaucccgaacaucgggagccggcccuggguccgcggcguguccagccggaucuccaucuacuggacgaucgugaagcccggggacauccuccugaucaacagcaccggcaaccugaucgcgccccgcggcuacuucaagauccgguccggcaagagcuccaucaugcgcagcgacgccccgaucgacaacugcaacuccgagugcaucacccccaacgggagcauccccaacgacaagcccuuccagaacgucaaccggaucaccuacggggccugcccgcgcuacgugaagcagaacacgcucaagcuggccaccggcaugcggaacgugcccgagaagcagacccgcgggaucuucggcgccaucgccggcuucaucgagaacgggugggagggcauggucgacgggugguacggcuuccggcaccagaacuccgaggggaccggccaggccgccgaccucaagagcacgcaggccgcgaucaaccagaucaacggcaagcugaaccgccugaucgagaagaccaacgagaaguuccaccagaucgagaaggaguucuccgagguggaggggcggauccaggaccuggagaaguacguggaggacaccaagaucgaccucuggagcuacaacgccgagcugcuggucgcccucgagaaccagcacaccaucgaccugacggacuccgagaugaacaagcuguucgagcgcacccggaagcagcuccgcgagaacgccgaggacaugggcaacgggugcuucaagaucuaccacaagugcgacaacgccugcaucggcagcauccgcaacgggaccuacgaccacgacguguaccgggacgaggcgcugaacaaccgcuuccagaucaagggcgucgagcugaaguccggcuacaaggacuggauccucuggaucagcuucgccaucuccugcuuccugcugugcguggugcuccugggguucaucaugugggccugccagaagggcaacauccggugcaacaucugcaucuga

SEQ ID NO: 72726 - RNA, 1701 nt, Artificial Sequence; identical to SEQ ID NO: 65366
  derived and/or modified CDS sequence (opt1) from hemagglutinin__InfluenzaA__AFH00802

SEQ ID NO: 72727 - RNA, 1701 nt, Artificial Sequence
  derived and/or modified CDS sequence (opt1) from hemagglutinin__InfluenzaA__AFH00813
augaagaccaucaucgcccugagcuacauccucugccugguguucgcccagaagcugcccggcaacgacaacuccaccgcgacgcucugccuggggcaccacgccgucccgaacggcaccaucgugaagaccaucaccaacgaccagaucgaggugacgaacgccaccgagcugguccagagcuccagcaccggggagaucugcaacagcccccaccagauccucgacggcgagaacugcacccugaucgacgcccugcucggggacccccagugcgacggcuuccagaacaagaagugggaccuguucguggagcgcagcaaggcccacuccaacugcuaccccuacgacgugccggacuacgcgagccugcggucccucgucgccagcuccggcacgcuggaguucaacaacgagagcuucaacuggaccggggugacccagaacggcaccuccagcgccugcauccgccgguccaacaacagcuucuucucccgccugaacuggcucacgcaccugaacuucaaguaccccgcccugaacgugaccaugcccaacaacgagcaguucgacaagcucuacaucuggggcguccaccaccccgggaccgacaaggaccagaucuuccuguacgcgcaggccagcgggcggaucaccguguccacgaagcgcagccagcaggccgugaucccgaacaucggcagccggccccgcguccgggacauccccucccgcgugagcaucuacuggaccaucgugaagcccggcgacauccugcucaucaacuccaccgggaaccugaucgccccgcggggcuacuucaagauccgcagcgggaaguccagcaucaugcgguccgacgcccccaucggcaagugcaacagcgcgugcaucacccccaacggcuccauccccaacgacaagccguuccagaacgucaaccgcaucacguacggggccugcccccgguacgugaagcagaacacccugaagcucgccaccggcaugcgcaacgugcccgagaagcagacccgggggaucuucggcgccaucgccggguucaucgagaacggcugggagggcauggucgacgggugguacggcuuccgccaccagaacagcgaggggcggggccaggcggccgaccugaaguccacgcaggccgccaucgaccagaucaacgggaagcugaaccgccucaucggcaagaccaacgagaaguuccaccagaucgagaaggaguucagcgagguggagggccggauccaggaccuggagaaguacguggaggacaccaagaucgaccugugguccuacaacgccgagcuccuggucgcgcuggagaaccagcacaccaucgaccucacggacagcgagaugaacaagcuguucgagaagaccaagaagcagcugcgcgagaacgccgaggacauggggaacggcugcuucaagaucuaccacaagugcgacaacgccugcaucggguccauccgcaacggcaccuacgaccacgacguguaccgggacgaggcccucaacaaccgcuuccagaucaaggggguggagcugaaguccggcuacaaggacuggauccuguggaucuccuucgccaucagcugcuuccuccugugcgucgcgcugcucggcuucaucaugugggccugccagaaggggaacauccggugcaacaucugcaucuga

SEQ ID NO: 72728 - RNA, 1701 nt, Artificial Sequence
  derived and/or modified CDS sequence (opt1) from hemagglutinin__InfluenzaA__AFH00824
augaagaccaucaucgcccugagcuacauccuccgccugguguucgcccagaagcugcccggcaacgacaacuccaccgcgacgcucugccuggggcaccacgccgucccgaacggcaccaucgugaagaccaucaccaacgaccagaucgaggugacgaacgccaccgagcugguccagaacagcuccaucggggagaucugcaacagcccccaccagauccucgacggcgagaacugcacccugaucgacgcccugcucggggacccccagugcgacggcuuccagaacaagaagugggaccuguucguggagcgguccaaggccuacagcaacugcuaccccuacgacgugccggacuacgcgucccugcgcagccucgucgccuccagcggcacccuggaguucaacaacgaguccuucaacuggacgggggugacccagaacggcaccagcuccgccugcauccggcgcagcaacaacuccuucuucagccggcugaacuggcucacccaccugaacuucaaguaccccgcccugaacgugacgaugcccaacaacgagcaguucgacaagcucuacaucuggggcguccaccaccccgggaccgacaaggaccagaucuuccuguacgcgcaguccagcgggcgcaucaccguguccaccaagcggagccagcaggccgugaucccgaacaucggcagccgcccccggauccgcgacauccccucccggaucagcaucuacuggacgaucgucaagcccggcgacauccugcucaucaacuccaccgggaaccugaucgccccgcgcggcuacuucaagauccggagcgggaaguccagcaucaugcgcuccgacgcccccaucggcaagugcaacagcgagugcaucacccccaacggcuccauccccaacgacaagccguuccagaacgugaaccggaucaccuacggggccugcccccgcuacgugaagcagagcacgcugaagcucgcgaccggcaugcggaacguccccgagaagcagacccgcgggaucuucggcgccaucgccggguucaucgagaacggcugggagggcaugguggacgggugguacggcuuccggcaccagaacuccgaggggcgcggccaggccgccgaccucaagagcacccaggcggccaucgaccagaucaacgggaagcugaaccggcugaucggcaagacgaacgagaaguuccaccagaucgagaaggaguucuccgagguggagggccgcauccaggaccuggagaaguacgucgaggacaccaagaucgaccuguggagcuacaacgccgagcuccugguggcccuggagaaccagcacaccaucgaccucaccgacuccgagaugaacaagcuguucgagaagacgaagaagcagcugcgcgagaacgccgaggacauggggaacggcugcuucaagaucuaccacaagugcgacaacgcgugcaucgggagcauccggaacggcaccuacgaccacgacguguaccgcgacgaggcccucaacaaccgguuccagaucaagggggucgagcugaaguccggcuacaaggacuggauccuguggaucagcuucgccaucuccugcuuccuccugugcguggcccugcucggcuucaucaugugggccugccagaaggggaacauccgcugcaacaucugcaucuga

SEQ ID NO: 72729 - RNA, 1701 nt, Artificial Sequence
  derived and/or modified CDS sequence (opt1) from hemagglutinin__InfluenzaA__AFH01407
augaagaccaucaucgcccugagcuacauccucugccugguguucgcccagaagcugcccggcaacgacaacuccaccgcgacgcucugccuggggcaccacgccgucccgaacggcaccaucgugaagaccaucaccaacgaccagaucgaggugacgaacgccaccgagcugguccagagcuccagcaccgggggcaucugcaacagcccccaccagauccucgacggggagaacugcacccugaucgacgcccugcucggcgacccccagugcgacggcuuccagaacaagaagugggaccuguucguggagcgcagcaaggccuacuccaacugcuaccccuacgacgugccggacuacgcgagccugcggucccucgucgccagcuccgggacgcuggaguucaacaacgagagcuucaacuggaccggcgugacccagaacgggaccuccagcgccugcaagcgccgguccaacaagagcuucuucucccgccugaacuggcucacgcaccugaaguacaaguaccccgcccugaacgugaccaugcccaacaacgagaaguucgacaagcucuacaucuggggcguccaccaccccgggaccgacagcgaccagaucucccuguacgcgcaggccagcggccggaucaccgugagcacgaagcgcucccagcagaccgugaucccgaacaucggcagccggccccgcguccgggacaucuccagccgcaucuccaucuacuggaccaucgugaagcccggggacauccugcucaucaacagcaccggcaaccugaucgcgccccggggguacuucaagauccgcuccggcaagagcuccaucaugcggagcgacgccccgaucggcaagugcaacuccgagugcaucacgcccaacgggagcauccccaacgacaagcccuuccagaacgugaaccgcaucaccuacggcgccugcccgcgguacgucaagcagaacacccugaagcucgccaccgggaugcgcaacgugcccgagaagcagacgcggggcaucuucggggccaucgccggcuucaucgagaacggcugggaggggaugguggacggcugguacggguuccgccaccagaacuccgagggcaccgggcaggccgccgaccugaaguccacccaggcggccaucaaccagaucaacggcaagcugaaccggcucaucggcaagaccaacgagaaguuccaccagaucgagaaggaguucuccgaggucgaggggcgcauccaggaccuggagaaguacguggaggacacgaagaucgaccuguggagcuacaacgccgagcuccugguggcccuggagaaccagcacaccaucgaccucaccgacuccgagaugaacaagcuguucgagcggaccaagaagcagcugcgcgagaacgccgaggacaugggcaacgggugcuucaagaucuaccacaagugcgacaacgcgugcaucgagagcauccgcaacggcacguacgaccacgacgucuaccgggacgaggcccucaacaaccgcuuccagaucaaggggguggagcugaaguccggcuacaaggacuggauccuguggaucagcuucgccaucagcugcuuccuccugugcguggcccugcucggcuucaucaugugggccugccagaaggggaacauccggugcaacaucugcaucuga

SEQ ID NO: 72730 - RNA, 1701 nt, Artificial Sequence
  derived and/or modified CDS sequence (opt1) from hemagglutinin__InfluenzaA__AFH34940
augaagaccaucaucgcccugagcuacauccucugccugguguucgcccagaagcugcccggcaacgacaacuccaccgcgacgcucugccuggggcaccacgccgucccgaacggcaccaucgugaagaccaucaccaacgaccagaucgaggugacgaacgccaccgagcugguccagagcuccagcaccggggagaucugcgacagcccccaccagauccucgacggcgagaacugcacccugaucgacgcccugcucggggacccccagugcgacggcuuccagaacaagaagugggaccuguucguggagcgcagcaaggccuacuccaacugcuaccccuacgacgugccggacuacgcgagccugcggucccucgucgccagcuccggcacgcuggaguucaacaacgagagcuucaacuggaccggggugacccagaacggcaccuccagcgccugcauccgccgguccaacagcuccuucuucagccgccugaacuggcucacgcaccugaacuucaaguaccccgcccugaacgugaccaugcccaacaacgagcaguucgacaagcucuacaucuggggcguccaccaccccgggaccgacaaggaccagaucuuccuguacgcgcaguccagcgggcggaucaccgugagcacgaagcgcucccagcaggccgugaucccgaacaucggcagccggccccgcauccggaacauccccucccgcaucagcaucuacuggaccaucgucaagcccggcgacauccugcucaucaacuccaccgggaaccugaucgccccgcggggcuacuucaagauccgcagcgggaaguccagcaucaugcgguccgacgcccccaucggcaagugcaacagcgagugcaucacccccaacggcuccauccccaacgacaagccguuccagaacgugaaccgcaucacguacggggccugcccccgguacgugaagcagagcacccugaagcucgcgaccggcaugcgcaacguccccgagaagcagacccgggggaucuucggcgccaucgccggguucaucgagaacggcugggagggcaugguggacgggugguacggcuuccgccaccagaacuccgaggggcggggccaggccgccgaccugaaguccacgcaggcggccaucgaccagaucaacgggaagcugaaccgccucaucggcaagaccaacgagaaguuccaccagaucgagaaggaguucuccgagguggagggccggauccaggaccuggagaaguacgucgaggacaccaagaucgaccuguggagcuacaacgccgagcuccugguggcccuggagaaccagcacaccaucgaccucacgggguccgagaugaacaagcuguucgagaagaccaagaagcagcugcgcgagaacgccgaggacaugggcaacgggugcuucaagaucuaccacaagugcgacaacgcgugcaucggcagcauccgcaacgggaccuacaaccacgacguguaccgggacgaggcccucaacaaccgcuuccagaucaagggcgucgagcugaaguccggcuacaaggacuggauccuguggaucagcuucgccaucagcugcuuccuccugugcguggcccugcucggguucaucaugugggccugccagaagggcaacauccggugcaacaucugcaucuga

SEQ ID NO: 72731 - RNA, 1701 nt, Artificial Sequence
  derived and/or modified CDS sequence (opt1) from hemagglutinin__InfluenzaA__AFH34961
augaagaccaucaucgcccugagcuacauccucugccugguguucgcccagaagcugcccggcaacgacaacuccaccgcgacgcucugccuggggcaccacgccgucccgaacggcaccaucgugaagaccaucaccaacgaccagaucgaggugacgaacgccaccgagcugguccagagcuccagcaccggggagaucugcgacagcccccaccagauccucgacggcgagaacugcacccugaucgacgcccugcucggggacccccagugcgacggcuuccagaacaagaagugggaccuguucguggagcgcagcaaggccuacuccaacugcuaccccuacgacgugccggacuacgcgagccugcggucccucgucgccgccagcggcacgcuggaguucaacaacgaguccuucaacuggaccggggugacccagaacggcaccagcuccgccugcauccgccggagcaacuccagcuucuucucccgccugaacuggcucacgcaccugaacuucaaguaccccgcgcugaacgugaccaugcccaacaacgagcaguucgacaagcucuacaucuggggcguccaccaccccgggaccgacaaggaccagaucuuccuguacgcccagagcuccgggcggaucaccgugagcacgaagcgcagccagcaggccgugaucccgaacaucggcucccggccccgcauccggaacauccccagccgcaucuccaucuacuggaccaucgucaagcccggcgacauccugcucaucaacagcaccgggaaccugaucgccccgcggggcuacuucaagauccgcuccgggaaguccuccaucaugcggagcgacgcccccaucggcaagugcaacuccgagugcaucacccccaacggcagcauccccaacgacaagccguuccagaacgugaaccgcaucacguacggggcgugcccccgguacgugaagcaguccacccugaagcucgccaccggcaugcgcaacguccccgagaagcagacccgggggaucuucggcgccaucgccggguucaucgagaacggcugggagggcaugguggacgggugguacggcuuccgccaccagaacagcgaggggcggggccaggccgcggaccugaaguccacgcaggccgccaucgaccagaucaacgggaagcugaaccgccucaucggcaagaccaacgagaaguuccaccagaucgagaaggaguucagcgagguggagggccggauccaggaccuggagaaguacgucgaggacaccaagaucgaccugugguccuacaacgccgagcuccugguggcccuggagaaccagcacaccaucgaccucacggacagcgagaugaacaagcuguucgagaagaccaagaagcagcugcgcgagaacgcggaggacauggggaacggcugcuucaagaucuaccacaagugcgacaacgccugcaucggguccauccgcaacggcaccuacaaccacgacguguaccgggacgaggcccucaacaaccgcuuccagaucaagggggucgagcucaagagcggcuacaaggacuggauccuguggaucuccuucgccaucagcugcuuccugcugugcguggcccugcucggcuucaucaugugggcgugccagaaggggaacauccggugcaacaucugcaucuga

SEQ ID NO: 72732 - RNA, 1701 nt, Artificial Sequence
  derived and/or modified CDS sequence (opt1) from hemagglutinin__InfluenzaA__AFH34968
augaagaccaucaucgcccugagcuacauccucugccugguguucgcccagaagcugcccggcaacgacaacuccaccgcgacgcucugccuggggcaccacgccgucccgaacggcaccaucgugaagaccaucaccaacgaccagaucgaggugacgaacgccaccgagcugguccagagcuccagcaccggggagaucugcgacagcccccaccagauccucgacggcgagaacugcacccugaucgacgcccugcucggggacccccagugcgacggcuuccagaacaagaagugggaccuguucguggagcgcagcaaggccuacuccaacugcuaccccuacgacgugccggacuacgcgagccugcggucccucgucgccgccagcggcacgcuggaguucaacaacgaguccuucaacuggaccggggugacccagaacggcaccagcuccgccugcauccgccggagcaacuccagcuucuucucccgccugaacuggcucacgcaccugaacuucaaguaccccgcgcugaacgugaccaugcccaacaacgagcaguucgacaagcucuacaucuggggcguccaccaccccgggaccgacaaggaccagaucuuccuguacgcccagagcuccgggcggaucaccgugagcacgaagcgcagccagcaggccgugaucccgaacaucggcucccggccccgcauccgggacauccccagccgcaucuccaucuacuggaccaucgucaagcccggcgacauccugcucaucaacagcaccgggaaccugaucgccccgcggggcuacuucaagauccgcuccgggaaguccuccaucaugcggagcgacgcccccaucggcaagugcaacuccgcgugcaucacccccaacggcagcauccccaacgacaagccguuccagaacgugaaccgcaucacguacggggccugcccccgguacgugaagcaguccacccugaagcucgccaccggcaugcgcaacguccccgagaagcagacccgggggaucuucggcgccaucgccggguucaucgagaacggcugggagggcaugguggacgggugguacggcuuccgccaccagaacagcgaggggcggggccaggcggccgaccugaaguccacgcaggccgccaucgaccagaucaacgggaagcugaaccgccucaucggcaagaccaacgagaaguuccaccagaucgagaaggaguucagcgagguggagggccggauccaggaccuggagaaguacgucgaggacaccaagaucgaccugugguccuacaacgccgagcuccugguggcgcuggagaaccagcacaccaucgaccucacggacagcgagaugaacaagcuguucgagaagaccaagaagcagcugcgcgagaacgccgaggacauggggaacggcugcuucaagaucuaccacaagugcgacaacgccugcaucggguccauccgcaacggcaccuacaaccacgacguguaccgggacgaggcccucaacaaccgcuuccagaucaagggggucgagcucaagagcggcuacaaggacuggauccuguggaucuccuucgccaucagcugcuuccugcugugcguggcgcugcucggcuucaucaugugggccugccagaaggggaacauccggugcaacaucugcaucuga

SEQ ID NO: 72733 - RNA, 1701 nt, Artificial Sequence
  derived and/or modified CDS sequence (opt1) from hemagglutinin__InfluenzaA__AFH34975
augaagaccaucaucgcccugagcuacauccucugccugguguucgcccagaagcugcccggcaacgacaacuccaccgcgacgcucugccuggggcaccacgccgucccgaacggcaccaucgugaagaccaucaccaacgaccgcaucgaggugacgaacgccaccgagcugguccagaacagcuccaucggggagaucugcgacagcccccaccagauccucgacggcgagaacugcacccugaucgacgcccugcucggggacccccagugcgacggcuuccagaacaagaagugggaccuguucguggagcgguccaaggccuacagcaacugcuaccccuacgacgugccggacuacgcgucccugcgcagccucgucgccuccagcggcacccuggaguucaacaacgaguccuucaacuggaacggggugacgcagaacggcaccagcuccgccugcauccggcgcagcaacaacuccuucuucagccggcugaacuggcucacccaccugaacuucaaguaccccgcccugaacgugaccaugcccaacaacgagcaguucgacaagcucuacaucuggggcguccaccaccccgggacggacaaggaccagaucuuccuguacgcgcagccguccgggcgcaucaccgugagcaccaagcggucccagcaggccgugauccccaacaucggcagccgcccccggauccgcaacauccccagccggaucuccaucuacuggaccaucgucaagccgggcgacauccugcucaucaacagcacggggaaccugaucgcgccccgcggcuacuucaagauccgguccggcaagagcuccaucaugcgcagcgacgcccccaucgggaagugcaaguccgagugcaucacccccaacggcagcaucccgaacgacaagcccuuccagaacgugaaccggaucaccuacggggccugcccccgcuacgugaagcaguccacccugaagcucgccacgggcaugcggaacguccccgagaagcagacccgcgggaucuucggcgccaucgccggguucaucgagaacggcugggagggcaugguggacgggugguacggcuuccggcaccagaacagcgaggggcgcggccaggccgccgaccugaaguccacccaggcggccaucgaccagaucaacgggaagcugaaccggcucaucggcaagaccaacgagaaguuccaccagaucgagaaggaguucagcgagguggagggccgcauccaggaccuggagaaguacgucgaggacacgaagaucgaccugugguccuacaacgccgagcuccugguggcccuggagaaccagcacaccaucgaccucaccgacagcgagaugaacaagcuguucgagaagaccaagaagcagcugcgcgagaacgccgaggacauggggaacggcugcuucaagaucuaccacaagugcgacaacgcgugcaucggguccauccggaacggcacguacgaccacgacguguaccgcgacgaggcccucaacaaccgguuccagaucaagggggucgagcucaagagcggcuacaaggacuggauccuguggaucuccuucgccaucagcugcuuccugcugugcguggcccugcucggcuucaucaugugggccugccagaaggggaacauccgcugcaacaucugcaucuga

SEQ ID NO: 72734 - RNA, 1701 nt, Artificial Sequence; identical to SEQ ID NO: 67435
  derived and/or modified CDS sequence (opt1) from hemagglutinin__InfluenzaA__AFH74464

SEQ ID NO: 72735 - RNA, 1701 nt, Artificial Sequence; identical to SEQ ID NO: 66693
  derived and/or modified CDS sequence (opt1) from hemagglutinin__InfluenzaA__AFH74465

SEQ ID NO: 72736 - RNA, 1701 nt, Artificial Sequence; identical to SEQ ID NO: 67454
  derived and/or modified CDS sequence (opt1) from hemagglutinin__InfluenzaA__AFH74477

SEQ ID NO: 72737 - RNA, 1701 nt, Artificial Sequence
  derived and/or modified CDS sequence (opt1) from hemagglutinin__InfluenzaA__AFH74488
augaagaccaucaucgcccugagcuacauccucugccugguguucgcccagaagcugcccggcaacgacaacuccaccgcgacgcucugccuggggcaccacgccgucccgaacggcaccaucgugaagaccaucaccaacgaccagaucgaggugacgaacgccaccgagcugguccagagcuccagcaccggggagaucugcgacaacccccaccagauccucgacggcaagaacugcacccugaucgacgcccugcucggggacccccagugcgacggcuuccagaacaagaagugggaccuguucguggagcgcuccaaggccuacagcaacugcuaccccuacgacgugccggacuacgcgucccugcggagccucgucgccuccagcggcacgcuggaguucaacaacgaguccuucaacuggaccggggugacccagaacggcaccagcuccgccugcauccgccggagcaagaacuccuucuucagccgccugaacuggcucacgcaccugaacuucaaguaccccgcccugaacgugaccaugcccaacaacgagcaguucgacaagcucuacaucuggggcguccaccaccccgggaccgacaaggaccagaucuuccuguacgcgcaggccuccgggcggaucaccgugagcacgaagcgcucccagcagaccgugaucccgaacaucggcagccggccccgcguccggaacauccccagccgcaucuccaucuacuggaccaucgugaagcccggcgacauccugcucaucaacagcaccgggaaccugaucgccccgcggggcuacuucaagauccgcuccggcaagagcuccaucaugcggagcgacgcccccaucgggaagugcaacuccgagugcaucacgcccaacggcagcauccccaacgacaagccguuccagaacgugaaccgcaucaccuacggggccugcccccgguacgucaagcagaacacccugaagcucgcgaccggcaugcgcaacgugcccgagaagcagacgcgggggaucuucggcgccaucgccggguucaucgagaacggcugggagggcaugguggacgggugguacggcuuccgccaccagaacuccgaggggcggggccaggccgccgaccucaagagcacccaggcggccaucgaccagaucaacgggaagcugaaccgccugaucggcaagaccaacgagaaguuccaccagaucgagaaggaguucuccgaggucgagggccggauccaggaccuggagaaguacguggaggacaccaagaucgaccuguggagcuacaacgccgagcuccugguggcccuggagaaccagcacacgaucgaccucaccgacuccgagaugaacaagcuguucgagcgcaccaagaagcagcugcgcgagaacgccgaggacauggggaacggcugcuucaagaucuaccacaagugcgacaacgcgugcaucgggagcauccggaacggcaccuacgaccacgacgucuaccgcgacgaggcccucaacaaccgguuccagaucaaggggguggagcugaaguccggcuacaaggacuggauccuguggaucagcuucgccaucuccugcuuccuccugugcguggcccugcucggcuucaucaugugggccugccagaaggggaacauccgcugcaacaucugcaucuga

SEQ ID NO: 72738 - RNA, 1701 nt, Artificial Sequence; identical to SEQ ID NO: 67435
  derived and/or modified CDS sequence (opt1) from hemagglutinin__InfluenzaA__AFH74499

SEQ ID NO: 72739 - RNA, 1701 nt, Artificial Sequence; identical to SEQ ID NO: 67637
  derived and/or modified CDS sequence (opt1) from hemagglutinin__InfluenzaA__AFH74510

SEQ ID NO: 72740 - RNA, 1701 nt, Artificial Sequence
  derived and/or modified CDS sequence (opt1) from hemagglutinin__InfluenzaA__AFH74521
augaagaccaucaucgcccugagcuacauccucugccugguguucgcccagaagauccccggcaacgacaacuccaccgcgacgcugugccucgggcaccacgccgucccgaacggcaccaucgugaagaccaucaccaacgaccagaucgaggugacgaacgccaccgagcugguccagagcuccagcaccggggagaucugcaacagcccccaccagauccuggacggcgagaacugcacccucaucgacgcccugcugggggacccccagugcgacggcuuccagaacaagaagugggaccucuucguggagcgcagcaaggccuacuccaacugcuaccccuacgacgugccggacuacgcgagccugcggucccuggucgccagcuccggcacgcucgaguucaacaacgagagcuucaacuggaccggggugacccagaacggcaccuccagcgccugcauccgccgguccaacaacagcuucuucucccgccugaacuggcugacgcacagcaaguccaaguaccccgcccucaacgugaccaugcccaacaacgagcaguucgacaagcuguacaucuggggcguccaccaccccgggaccgacaacgaccagaucuuccuguacgcgcaggccagcgggcggaucaccgugagcacgaagcgcucccagcagaccgugaucccgaacaucggcagccggccccgcauccgggacauccccucccgcaucagcaucuacuggaccaucgucaagcccggcgacauccuccugaucaacuccaccgggaaccugaucgccccgcggggcuacuucaagauccgcagcgggaaguccagcaucaugaaguccgacgcccccaucggcaagugcaacagcgagugcaucacgcccaacggcuccauccccaacgacaagccguuccagaacgugaaccggaucaccuacggggccugcccccgcuacgugaagcagaacacccucaagcuggcgaccggcaugcggaacguccccgagaagcagacgcgcgggaucuucggcgccaucgccggguucaucgagaacggcugggagggcaugguggacgggugguacggcuuccggcaccagaacagcgaggggcgcggccaggccgccgaccugaaguccacccaggcggccaucgaccagaucaacgggaagcucaaccggcugaucggcaagaccaacgagaaguuccaccagaucgagaaggaguucagcgagguggagggccgcauccaggaccuggagaaguacgucgaggacaccaagguggaccucugguccuacaacgccgagcugcugguggcccucgagaaccagcacacgaucgaccugaccgacagcgagaugaacaagcuguucgagaagaccaagaagcagcuccgggagaacgccgaggacauggggaacggcugcuucaagaucuaccacaagugcgacaacgcgugcaucggguccauccgcaacggcaccuacgaccacgacgucuaccgcgacgaggcccugaacaaccgguuccagaucaaggggguggagcugaaguccggcuacaaggacuggauccucuggaucuccuucgccaucagcugcuuccugcugugcguggcccuccugggcuucaucaugugggccugccagaaggggaacauccgcugcaacaucugcaucuga

SEQ ID NO: 72741 - RNA, 1701 nt, Artificial Sequence; identical to SEQ ID NO: 71012
  derived and/or modified CDS sequence (opt1) from hemagglutinin__InfluenzaA__AFH74532

SEQ ID NO: 72742 - RNA, 1701 nt, Artificial Sequence; identical to SEQ ID NO: 67637
  derived and/or modified CDS sequence (opt1) from hemagglutinin__InfluenzaA__AFH74543

SEQ ID NO: 72743 - RNA, 1701 nt, Artificial Sequence; identical to SEQ ID NO: 67637
  derived and/or modified CDS sequence (opt1) from hemagglutinin__InfluenzaA__AFH74554

SEQ ID NO: 72744 - RNA, 1701 nt, Artificial Sequence; identical to SEQ ID NO: 67637
  derived and/or modified CDS sequence (opt1) from hemagglutinin__InfluenzaA__AFH74565

SEQ ID NO: 72745 - RNA, 1701 nt, Artificial Sequence; identical to SEQ ID NO: 67637
  derived and/or modified CDS sequence (opt1) from hemagglutinin__InfluenzaA__AFH74576

SEQ ID NO: 72746 - RNA, 1701 nt, Artificial Sequence; identical to SEQ ID NO: 67637
  derived and/or modified CDS sequence (opt1) from hemagglutinin__InfluenzaA__AFH74587

SEQ ID NO: 72747 - RNA, 1701 nt, Artificial Sequence
  derived and/or modified CDS sequence (opt1) from hemagglutinin__InfluenzaA__AFH74598
augaagaccaucaucgcccugagcuacauccucugccugguguucgcccagaagcugcccgagaacgacaacuccaccgcgacgcucugccugggccaccacgccgucccgaacgggaccaucgugaagaccaucaccaacgaccagaucgaggugacgaacgccaccgagcugguccagagcuccagcaccggcgagaucugcgacagcccccaccagauccucgacgggaagaacugcacccugaucgacgcccugcucggcgacccccagugcgacggguuccagaacaagaagugggaccuguucguggagcgcagcaaggccuacuccaacugcuaccccuacgacgugccggacuacgcgagccugcggucccucgucgccagcuccggcacgcuggaguucaacaacgagagcuucaacuggaccggcgugacccagaacgggaccuccagcgccugcauccgccgguccaagaacagcuucuucucccgccugaacuggcucacgcaccugaacuucaaguaccccgcccugaacgugaccaugcccaacaacgagcaguucgacaagcucuacaucuggggcguccaccaccccgggaccgacaaggaccagaucuuccuguacgcgcaggccagcggccggaucaccguguccacgaagcgcagccagcagaccgccaucccgaacaucgggagccggccccgcgugcggaacauccccucccgcaucagcaucuacuggaccaucgucaagcccggcgacauccugcucaucaacuccaccggcaaccugaucgccccgcggggguacuucaagauccgcagcggcaaguccagcaucaugcgguccgacgcccccaucgggaagugcaacagcgagugcaucacgcccaacggcuccauccccaacgacaagccguuccagaacgugaaccgcaucaccuacggcgcgugcccccgguacgugaagcagaacacccugaagcucgccaccgggaugcgcaacguccccgagaagcagacgcggggcaucuucggggccaucgccggcuucaucgagaacgggugggagggcaugguggacggcugguacggguuccgccaccagaacagcgagggccgggggcaggccgcggaccugaaguccacccaggccgccaucgaccagaucaacggcaagcugaaccgccucaucgggaagaccaacgagaaguuccaccagaucgagaaggaguucagcgagguggagggccggauccaggaccuggagaaguacgucgaggacaccaagaucgaccugugguccuacaacgccgagcuccugguggcccuggagaaccagcacacgaucgaccucaccgacagcgagaugaacaagcuguucgagaagaccaagaagcagcugcgcgagaacgcggaggacaugggcaacgggugcuucaagaucuaccacaagugcgacaacgccugcaucggcuccauccgcaacgggaccuacgaccacgacguguaccgggacgaggcccucaacaaccgcuuccagaucaagggcgucgagcugaaguccggguacaaggacuggauccuguggaucuccuucgccaucagcugcuuccuccugugcguggcccugcucggcuucaucaugugggcgugccagaagggcaacauccggugcaacaucugcaucuga

SEQ ID NO: 72748 - RNA, 1701 nt, Artificial Sequence; identical to SEQ ID NO: 67435
  derived and/or modified CDS sequence (opt1) from hemagglutinin__InfluenzaA__AFH74609

SEQ ID NO: 72749 - RNA, 1701 nt, Artificial Sequence; identical to SEQ ID NO: 67637
  derived and/or modified CDS sequence (opt1) from hemagglutinin__InfluenzaA__AFH74620

SEQ ID NO: 72750 - RNA, 1701 nt, Artificial Sequence
  derived and/or modified CDS sequence (opt1) from hemagglutinin__InfluenzaA__AFH74631
augaagaccaucaucgcccugagcuacauccucugccugguguucgcccagaagcugcccggcaacgacaacuccaccgcgacgcucugccuggggcaccacgccgucccgaacggcaccaucgugaagaccaucaccaacgaccagaucgaggugacgaacgccaccgagcugguccagagcuccagcaccggggagaucugcgacagcccccaccagauccucgacggcaccaacugcacgcugaucgacgcccugcucggggacccccagugcgacggcuuccagaacaagaagugggaccuguucguggagcgcagcaaggccuacuccaacugcuaccccuacgacgugccggacuacgcgagccugcggucccucgucgccagcuccggcacccuggaguucaacaacgagagcuucaacuggaccggggugacccagaacggcacguccagcgccugcauccgccgguccaagaacagcuucuucucccgccugaacuggcucacccaccugaacuucaaguaccccgcccugaacgugaccaugcccaacaacgagcaguucgacaagcucuacaucuggggcguccaccaccccgggaccgacaaggaccagaucuuccuguacgcgcaggccagcgggcggaucacgguguccaccaagcgcagccagcagaccgccaucccgaacaucggcagccggccccgcgugcggaacauccccucccgcaucagcaucuacuggaccaucgucaagcccggcgacauccugcucaucaacuccacggggaaccugaucgccccgcggggcuacuucaagauccgcagcgggaaguccagcaucaugcgguccgacgcccccaucggcaagugcaacagcgagugcaucacccccaacggcuccauccccaacgacaagccguuccagaacgugaaccgcaucaccuacggggcgugcccccgguacgugaagcagaacacccugaagcucgccacgggcaugcgcaacguccccgagaagcagacccgggggaucuucggcgccaucgccggguucaucgagaacggcugggagggcaugguggacgggugguacggcuuccgccaccagaacagcgaggggcggggccaggccgcggaccugaaguccacccaggccgccaucgaccagaucaacgggaagcugaaccgccucaucggcaagaccaacgagaaguuccaccagaucgagaaggaguucagcgagguggagggccggauccaggaccuggagaaguacgucgaggacacgaagaucgaccugugguccuacaacgccgagcuccugguggcccuggagaaccagcacaccaucgaccucaccgacagcgagaugaacaagcuguucgagaagaccaagaagcagcugcgcgagaacgcggaggacauggggaacggcugcuucaagaucuaccacaagugcgacaacgccugcaucggguccauccgcaacggcacguacgaccacgacguguaccgggacgaggcccucaacaaccgcuuccagaucaagggggucgagcugaaguccggcuacaaggacuggauccuguggaucuccuucgccaucagcugcuuccuccugugcguggcccugcucggcuucaucaugugggcgugccagaaggggaacauccggugcaacaucugcaucuga

SEQ ID NO: 72751 - RNA, 1701 nt, Artificial Sequence; identical to SEQ ID NO: 67435
  derived and/or modified CDS sequence (opt1) from hemagglutinin__InfluenzaA__AFH74642

SEQ ID NO: 72752 - RNA, 1701 nt, Artificial Sequence; identical to SEQ ID NO: 67435
  derived and/or modified CDS sequence (opt1) from hemagglutinin__InfluenzaA__AFH74653

SEQ ID NO: 72753 - RNA, 1701 nt, Artificial Sequence; identical to SEQ ID NO: 67435
  derived and/or modified CDS sequence (opt1) from hemagglutinin__InfluenzaA__AFH74664

SEQ ID NO: 72754 - RNA, 1701 nt, Artificial Sequence; identical to SEQ ID NO: 67435
  derived and/or modified CDS sequence (opt1) from hemagglutinin__InfluenzaA__AFH74675

SEQ ID NO: 72755 - RNA, 1701 nt, Artificial Sequence; identical to SEQ ID NO: 72183
  derived and/or modified CDS sequence (opt1) from hemagglutinin__InfluenzaA__AFH74686

SEQ ID NO: 72756 - RNA, 1701 nt, Artificial Sequence; identical to SEQ ID NO: 72183
  derived and/or modified CDS sequence (opt1) from hemagglutinin__InfluenzaA__AFH74697

SEQ ID NO: 72757 - RNA, 1701 nt, Artificial Sequence; identical to SEQ ID NO: 67637
  derived and/or modified CDS sequence (opt1) from hemagglutinin__InfluenzaA__AFH74708

SEQ ID NO: 72758 - RNA, 1701 nt, Artificial Sequence; identical to SEQ ID NO: 67637
  derived and/or modified CDS sequence (opt1) from hemagglutinin__InfluenzaA__AFH74719

SEQ ID NO: 72759 - RNA, 1701 nt, Artificial Sequence; identical to SEQ ID NO: 67637
  derived and/or modified CDS sequence (opt1) from hemagglutinin__InfluenzaA__AFH74730

SEQ ID NO: 72760 - RNA, 1701 nt, Artificial Sequence
  derived and/or modified CDS sequence (opt1) from hemagglutinin__InfluenzaA__AFH74741
augaagaccaucaucgcccugagcuacauccucugccugguguucgcccagaagcugcccggcaacgacaacuccaccgcgacgcucugccuggggcaccacgccgucccgaacggcaccaucgugaagaccaucaccaacgaccagaucgaggugacgaacgccaccgagcugguccagaacagcuccaccggggagaucugcgacagcccccaccagauccucgacggcaagaacugcacccugaucgacgcccugcucggggacccccagugcgacggcuuccagaacaagaagugggaccuguucguggagcgcuccaaggccuacagcaacugcuaccccuacgacgugccggacuacgcgucccugcggagccucgucgccuccagcggcacgcuggaguucaacaacgaguccuucaacuggaccggggugacccagaacggcaccagcuccgccugcauccgccggagcaagaacuccuucuucagccgccugaacuggcucacgcaccugaacuucaaguaccccgcccugaacgugaccaugcccaacaacgagcaguucgacaagcucuacaucuggggcguccaccaccccgggaccgacaaggaccagaucuuccuguacgcgcaggccuccgggcggaucaccgugagcacgaagcgcucccagcagaccgccaucccgaacaucggcagccggccccgcgugcggaacauccccagccgcaucuccaucuacuggaccaucgucaagcccggcgacauccugcucaucaacagcaccgggaaccugaucgccccgcggggcuacuucaagauccgcuccggcaagagcuccaucaugcggagcgacgcccccaucgggaagugcaacuccgagugcaucacgcccaacggcagcauccccaacgacaagccguuccagaacgugaaccgcaucaccuacggggcgugcccccgguacgugaagcagaacacccugaagcucgccaccggcaugcgcaacguccccgagaagcagacgcgggggaucuucggcgccaucgccggguucaucgagaacggcugggagggcaugguggacgggugguacggcuuccgccaccagaacuccgaggggcggggccaggccgcggaccucaagagcacccaggccgccaucgaccagaucaacgggaagcugaaccgccugaucggcaagaccaacgagaaguuccaccagaucgagaaggaguucuccgagguggagggccggauccaggaccuggagaaguacgucgaggacaccaagaucgaccuguggagcuacaacgccgagcuccugguggcccuggagaaccagcacacgaucgaccucaccgacuccgagaugaacaagcuguucgagaagaccaagaagcagcugcgcgagaacgcggaggacauggggaacggcugcuucaagaucuaccacaagugcgacaacgccugcaucgggagcauccgcaacggcaccuacgaccacgacguguaccgggacgaggcccucaacaaccgcuuccagaucaagggggucgagcugaaguccggcuacaaggacuggauccuguggaucagcuucgccaucuccugcuuccuccugugcguggcccugcucggcuucaucaugugggcgugccagaaggggaacauccggugcaacaucugcaucuga

SEQ ID NO: 72761 - RNA, 1701 nt, Artificial Sequence; identical to SEQ ID NO: 67637
  derived and/or modified CDS sequence (opt1) from hemagglutinin__InfluenzaA__AFH74752

SEQ ID NO: 72762 - RNA, 1701 nt, Artificial Sequence; identical to SEQ ID NO: 67637
  derived and/or modified CDS sequence (opt1) from hemagglutinin__InfluenzaA__AFH74763

SEQ ID NO: 72763 - RNA, 1701 nt, Artificial Sequence; identical to SEQ ID NO: 67637
  derived and/or modified CDS sequence (opt1) from hemagglutinin__InfluenzaA__AFH74774

SEQ ID NO: 72764 - RNA, 1701 nt, Artificial Sequence; identical to SEQ ID NO: 71012
  derived and/or modified CDS sequence (opt1) from hemagglutinin__InfluenzaA__AFH74785

SEQ ID NO: 72765 - RNA, 1701 nt, Artificial Sequence; identical to SEQ ID NO: 67637
  derived and/or modified CDS sequence (opt1) from hemagglutinin__InfluenzaA__AFH74796

SEQ ID NO: 72766 - RNA, 1701 nt, Artificial Sequence; identical to SEQ ID NO: 72193
  derived and/or modified CDS sequence (opt1) from hemagglutinin__InfluenzaA__AFH74807

SEQ ID NO: 72767 - RNA, 1701 nt, Artificial Sequence; identical to SEQ ID NO: 72193
  derived and/or modified CDS sequence (opt1) from hemagglutinin__InfluenzaA__AFH74818

SEQ ID NO: 72768 - RNA, 1701 nt, Artificial Sequence; identical to SEQ ID NO: 72193
  derived and/or modified CDS sequence (opt1) from hemagglutinin__InfluenzaA__AFH74829

SEQ ID NO: 72769 - RNA, 1701 nt, Artificial Sequence; identical to SEQ ID NO: 72193
  derived and/or modified CDS sequence (opt1) from hemagglutinin__InfluenzaA__AFH74840

SEQ ID NO: 72770 - RNA, 1701 nt, Artificial Sequence
  derived and/or modified CDS sequence (opt1) from hemagglutinin__InfluenzaA__AFH74851
augaagaccaucaucgcccugagcuacauccucugccugguguucgcccagaagcugcccggcaacgacaacuccaccgcgacgcucugccuggggcaccacgccgucccgaacggcaccaucgugaagaccaucaccaacgaccagaucgaggugacgaacgccaccgagcugguccagagcuccagcaccggggagaucugcgacagcccccaccagauccucgacggcaagaacugcacccugaucgacgcccugcucggggacccccagugcgacggcuuccagaacaagaagugggaccuguucguggagcgcagcaaggccuacggcaacugcuaccccuacgacgugccggacuacgcgucccugcggagccucgucgccuccagcgggacgcuggaguucaacaacgaguccuucaacuggaccggcgugacccagaacgggaccagcuccgccugcauccgccggagcaagaacuccuucuucagccgccugaacuggcucacgcaccugaacuucaaguaccccgcccugaacgugaccaugcccaacaacgagcaguucgacaagcucuacaucuggggcguccaccaccccgggaccgacaaggaccagaucuuccuguacgcgcaggccuccggccggaucaccgugagcacgaagcgcucccagcagaccgccaucccgaacaucggcagccggccccgcgugcggaacauccccagccgcaucuccaucuacuggaccaucgucaagcccggggacauccugcucaucaacagcaccggcaaccugaucgccccgcggggguacuucaagauccgcuccggcaagagcuccaucaugcggagcgacgcccccaucggcaagugcaacuccgagugcaucacgcccaacgggagcauccccaacgacaagccguuccagaacgugaaccgcaucaccuacggcgcgugcccccgguacgugaagcagaacacccugcgccucgccaccgggaugcggaacguccccgagaagcagacgcgcggcaucuucggggccaucgccggcuucaucgagaacggcugggaggggaugguggacggcugguacggguuccggcaccagaacuccgagggccgcgggcaggccgcggaccugaaguccacccaggccgccaucgaccagaucaacggcaagcugaaccggcucaucggcaagaccaacgagaaguuccaccagaucgagaaggaguucuccgagguggaggggcgcauccaggaccuggagaaguacgucgaggacaccaagaucgaccuguggagcuacaacgccgagcuccugguggcccuggagaaccagcacacgaucgaccucaccgacuccgagaugaacaagcuguucgagaagaccaagaagcagcugcgcgagaacgcggaggacaugggcaacgggugcuucaagaucuaccacaagugcgacaacgccugcaucggcagcauccggaacgggaccuacgaccacgacguguaccgcgacgaggcccucaacaaccgguuccagaucaagggcgucgagcugaaguccggcuacaaggacuggauccuguggaucagcuucgccaucuccugcuuccuccugugcguggcccugcucggguucaucaugugggcgugccagaagggcaacauccgcugcaacaucugcaucuga

SEQ ID NO: 72771 - RNA, 1701 nt, Artificial Sequence; identical to SEQ ID NO: 72196
  derived and/or modified CDS sequence (opt1) from hemagglutinin__InfluenzaA__AFH74862

SEQ ID NO: 72772 - RNA, 1701 nt, Artificial Sequence; identical to SEQ ID NO: 72196
  derived and/or modified CDS sequence (opt1) from hemagglutinin__InfluenzaA__AFH74873

SEQ ID NO: 72773 - RNA, 1701 nt, Artificial Sequence; identical to SEQ ID NO: 67637
  derived and/or modified CDS sequence (opt1) from hemagglutinin__InfluenzaA__AFH74884

SEQ ID NO: 72774 - RNA, 1701 nt, Artificial Sequence; identical to SEQ ID NO: 67637
  derived and/or modified CDS sequence (opt1) from hemagglutinin__InfluenzaA__AFH74895

SEQ ID NO: 72775 - RNA, 1701 nt, Artificial Sequence; identical to SEQ ID NO: 67637
  derived and/or modified CDS sequence (opt1) from hemagglutinin__InfluenzaA__AFH74906

SEQ ID NO: 72776 - RNA, 1701 nt, Artificial Sequence; identical to SEQ ID NO: 67435
  derived and/or modified CDS sequence (opt1) from hemagglutinin__InfluenzaA__AFH74917

SEQ ID NO: 72777 - RNA, 1701 nt, Artificial Sequence; identical to SEQ ID NO: 67637
  derived and/or modified CDS sequence (opt1) from hemagglutinin__InfluenzaA__AFH74928

SEQ ID NO: 72778 - RNA, 1701 nt, Artificial Sequence; identical to SEQ ID NO: 67637
  derived and/or modified CDS sequence (opt1) from hemagglutinin__InfluenzaA__AFH74939

SEQ ID NO: 72779 - RNA, 1701 nt, Artificial Sequence
  derived and/or modified CDS sequence (opt1) from hemagglutinin__InfluenzaA__AFH74950
augaagaccaucaucgcccugagcuacauccucugccugguguucgcccagaagcugcccggcaacgacaacuccaccgcgacgcucugccuggggcaccacgccgucccgaacggcaccaucgugaagaccaucaccaacgaccagaucgaggugacgaacgccaccgagcugguccagagcuccagcaccggggagaucugcgacagcccccaccagauccucgacggcaagaacugcacccugaucgacgcccugcucggggacccccagugcgacggcuuccagaacaagaagugggaccuguucguggagcgcagcaaggccuacggcaacugcuaccccuacgacgugccggacuacgcgucccugcggagccucgucgccuccagcgggacgcuggaguucaacaacgaguccuucaacuggaccggcgugacccagaacgggaccagcuccgccugcauccgccggagcaagaacuccuucuucagccgccugaacuggcucacgcaccugaacuucaaguaccccgcccugaacgugaccaugcccaacaacgagcaguucgacaagcucuacaucuggggcguccaccaccccgggaccgacaaggaccagaucuuccuguacgcgcaggccuccggccggaucaccgugagcacgaagcgcucccagcagaccgccaucccgaacaucggcagccggccccgcgugcggaacauccccagccgcaucuccaucuacuggaccaucgucaagcccggggacauccugcucaucaacagcaccggcaaccugaucgccccgcggggguacuucaagauccgcuccggcaagagcuccaucaugcggagcgacgcccccaucggcaagugcaacuccgagugcaucacgcccaacgggagcauccccaacgacaagccguuccagaacgugaaccgcaucaccuacggcgcgugcccccgguacgugaagcagaacacccugaagcucgccaccgggaugcgcaacguccccgagaagcagacgcggggcaucuucggggccaucgccggcuucaucgagaacggcugggaggggaugguggacggcugguacggguuccgccaccagaacuccgagggccgggggcaggccgcggaccugaaguccacccaggccgccaucgaccagaucaacggcaagcugaaccgccucaucggcaagaccaacgagaaguuccaccagaucgagaaggaguucuccgagguggaggggcggauccaggaccuggagaaguacgucgaggacaccaagaucgaccuguggagcuacaacgccgagcuccugguggcccuggagaaccagcacacgaucgaccucaccgacuccgagaugaacaagcuguucgagaagaccaagaagcagcugcgcgagaacgcggaggacaugggcaacgggugcuucaagaucuaccacaagugcgacaacgccugcaucggcagcauccgcaacgggaccuacgaccacgacguguaccgggacgaggcccucaacaaccgcuuccagaucaagggcgucgagcugaaguccggcuacaaggacuggauccuguggaucagcuucgccaucuccugcuuccuccugugcguggcccugcucggguucaucaugugggcgugccagaagggcaacauccggugcaacaucugcaucuga

SEQ ID NO: 72780 - RNA, 1701 nt, Artificial Sequence; identical to SEQ ID NO: 72196
  derived and/or modified CDS sequence (opt1) from hemagglutinin__InfluenzaA__AFH74961

SEQ ID NO: 72781 - RNA, 1701 nt, Artificial Sequence; identical to SEQ ID NO: 67637
  derived and/or modified CDS sequence (opt1) from hemagglutinin__InfluenzaA__AFH75388

SEQ ID NO: 72782 - RNA, 1701 nt, Artificial Sequence
  derived and/or modified CDS sequence (opt1) from hemagglutinin__InfluenzaA__AFH97140
augaaggccauccuggugguccuccuguacaucuucgccaccgcgaacgccgacacccugugcaucggcuaccacgccaacaacagcacggacaccguggacaccgugcucgagaagaacgucaccgugacgcacuccgugaaccugcuggaggacaagcacaacgggaagcucugcaagcugcgcggcgucgcgccccugcaccucgggaagugcaacaucgccggcuggauccuggggaacccggagugcgagagccuguccaccgccagcuccuggagcuacaucguggagaccuccagcuccgacaacgggaccugcuaccccggcgacuucaucgacuacgaggagcuccgggagcagcugagcuccgugagcuccuucgagcgcuucgagaucuuccccaagacgagcuccuggcccaaccacgacagcaacaagggcgucaccgccgccugcccgcacgccggcgcgaaguccuucuacaagaaccugaucuggcucgugaagaaggggaacagcuaccccaagcuguccaagagcuacaucaacgacaagggcaaggaggugcugguccucugggggauccaccaccccagcaccuccgccgaccagcagagccuguaccagaacgccgacgccuacguguucgugggcaccucccgguacagcaagaaguucaagcccgagaucgccauccgcccgaagguccgggaccaggagggccgcaugaacuacuacuggacgcugguggagcccggggacaagaucaccuucgaggcgaccggcaaccucguggucccccgguacgccuucgccauggagcgcaacgccggguccggcaucaucaucagcgacacccccgugcacgacugcaacacgaccugccagaccccgaagggcgccaucaacaccucccugcccuuccagaacauccaccccaucacgaucgggaagugccccaaguacgucaagagcaccaagcugcggcucgcgaccggccugcgcaacgugccguccauccagagccgggggcuguucggcgccaucgccggguucaucgagggcggcuggaccgggaugguggacggcugguacggguaccaccaccagaacgagcagggcuccggguacgccgccgaccucaagagcacgcagaacgcgaucgacgagaucaccaacaaggugaacuccgucaucgagaagaugaacacccaguucaccgccgugggcaaggaguucaaccaccuggagaagcgcaucgagaaccugaacaagaaggucgacgacggcuuccucgacaucuggacguacaacgccgagcugcuggugcuccuggagaacgagcggacccuggacuaccacgacagcaacgugaagaaccucuacgagaagguccgcucccagcugaagaacaacgccaaggagaucgggaacggcugcuucgaguucuaccacaagugcgacaacacgugcauggagagcgugaagaacgggaccuacgacuaccccaaguacuccgaggaggccaagcugaaccgggaggagaucgacggcgugaagcucgagagcacccgcaucuaccagauccuggcgaucuacuccaccgucgccagcagccuggugcucguggucucccugggggccaucagcuucuggaugugcuccaacggcagccugcagugccggaucugcaucuga

SEQ ID NO: 72783 - RNA, 1701 nt, Artificial Sequence
  derived and/or modified CDS sequence (opt1) from hemagglutinin__InfluenzaA__AFJ05142
augaagaccaucaucgcccugagcuacauccucugccugguguucgcccagaagauccccggcaacgacaacuccaccgcgacgcugugccucgggcaccacgccgucccgaacggcaccaucgugaagaccaucaccaacgaccagaucgaggugacgaacgccaccgagcugguccagagcuccagcaccggggagaucugcgacagcccccaccagauccuggacggcgagaacugcacccucaucgacgcccugcugggggacccccagugcgacggcuuccagaacaagaagugggaccucuucguggagcgcagcaaggccuacuccaacugcuaccccuacgacgugccggacuacgcgagccugcggucccuggucgccagcuccggcacgcucgaguucaacaacgagugcuucaacuggaccggggugacccagaacggcaccagcuccgccugcauccgccggagcaacuccagcuucuucucccgccugaacuggcugacgcaccucaacuucaaguaccccgcccugaacgugaccaugcccaacaacgagcaguucgacaagcuguacaucuggggcguccaccaccccgggaccgacaaggaccagaucuuccucuacgcgcagagcuccgggcggaucaccgugagcacgaagcgcagccagcaggccgugaucccgaacaucggcucccggccccgcauccggaacauccccagccgcaucuccaucuacuggaccaucgucaagcccggcgacauccugcugaucaacagcaccgggaaccucaucgccccgcggggcuacuucaagauccgcuccgggaaguccuccaucaugcggagcgacgcccccaucggcaagugcaacuccggcugcaucacccccaacgggagcauccccaacgacaagccguuccagaacgugaaccgcaucacguacggcgccugcccccgguacgugaagcaguccacccugaagcuggcgaccgggaugcgcaacguccccgagaagcagacccggggcaucuucggggccaucgccggcuucaucgagaacggcugggaggggaugguggacggcugguacggguuccgccaccagaacagcgagggccgggggcaggccgccgaccucaaguccacgcaggcggccaucgaccagaucaacggcaagcugaaccgccugaucggcaagaccaacgagaaguuccaccagaucgagaaggaguucagcgagguggaggggcggauccaggaccucgagaaguacgucgaggacaccaagaucgaccugugguccuacaacgccgagcugcucguggcccuggagaaccagcacaccaucgaccugacggacagcgagaugaacaagcuguucgagaagaccaagaagcagcuccgcgagaacgccgaggacaugggcaacgggugcuucaagaucuaccacaagugcgacaacgcgugcaucggcuccauccgcaacgggaccuacaaccacgacguguaccgggacgaggcccugaacaaccgcuuccagaucaagggcgucgagcucaagagcggcuacaaggacuggauccuguggaucuccuucgccaucagcugcuuccugcucugcguggcccugcugggguucaucaugugggccugccagaagggcaacauccggugcaacaucugcaucuga

SEQ ID NO: 72784 - RNA, 1701 nt, Artificial Sequence
  derived and/or modified CDS sequence (opt1) from hemagglutinin__InfluenzaA__AFJ05144
augaagaccaucaucgcccugagcuacauccucugccugguguucgcccagaagcugcccggcaacgacaacuccaccgcgacgcucugccuggggcaccacgccgucccgaacggcaccaucgugaagaccaucaccaacgaccagaucgaggugacgaacgccaccgagcugguccagagcuccagcaccggggagaucugcgacagcccccaccagauccucgacggcgagaacugcacccugaucgacgcccugcucggggacccccagugcgacggcuuccagaacaagaagugggaccuguucguggagcgcagcaaggccuacuccaacugcuaccccuacgacgugccggacuacgcgagccugcggucccucgucgccagcuccggcacgcuggaguucaacaacgagagcuucaacuggaccggggugacccagaacggcaccuccagcgccugcauccgccgguccaacagcuccuucuucagccgccugaacuggcucacgcaccugaacuucaaguaccccgcccugaacgugaccaugcccaacaacgagcaguucgacaagcucuacaucuggggcguccaccaccccgggaccgacaaggaccagaucuuccuguacgcgcaguccagcgggcggaucaccgugagcacgaagcgcucccagcaggccgugaucccgaacaucggcagccggccccgcguccggaacauccccucccgcaucagcaucuacuggaccaucgugaagcccggcgacauccugcucaucaacuccaccgggaaccugaucgccccgcggggcuacuucaagauccgcagcgggaaguccagcaucaugcgguccgacgcccccaucggcaagugcaacagcgagugcaucacccccaacggcuccauccccaacgacaagccguuccagaacgugaaccgcaucacguacggggccugcccccgguacgucaagcagagcacccugaagcucgcgaccggcaugcgcaacgugcccgagaagcagacccgggggaucuucggcgccaucgccggguucaucgagaacggcugggagggcaugguggacgggugguacggcuuccgccaccagaacuccgaggggcggggccaggccgccgaccugaaguccacgcaggcggccaucgaccagaucaacgggaagcugaaccgccucaucggcaagaccaacgagaaguuccaccagaucgagaaggaguucuccgaggucgagggccggauccaggaccuggagaaguacguggaggacaccaagaucgaccuguggagcuacaacgccgagcuccugguggcccuggagaaccagcacaccaucgaccucacggacuccgagaugaacaagcuguucgagaagaccaagaagcagcugcgcgagaacgccgaggacauggggaacggcugcuucaagaucuaccacaagugcgacaacgcgugcaucgggagcauccgcaacggcaccuacaaccacgacgucuaccgggacgaggcccucaacaaccgcuuccagaucaaggggguggagcugaaguccggcuacaaggacuggauccuguggaucagcuucgccaucagcugcuuccuccugugcguggcccugcucggcuucaucaugugggccugccagaaggggaacauccggugcaacaucugcaucuga

SEQ ID NO: 72785 - RNA, 1701 nt, Artificial Sequence
  derived and/or modified CDS sequence (opt1) from hemagglutinin__InfluenzaA__AFJ11706
augaagaccaucaucgcccugagcuacauccucugccugguguucgcccagaagcugcccggcaacgacaacuccaccgcgacgcucugccuggggcaccacgccgucccgaacggcaccaucgugaagaccaucaccaacgaccagaucgaggugacgaacgccaccgagcugguccagagcuccagcaccggggagaucugcgacagcccccaccagauccucgacggcgagaacugcacccugaucgacgcccugcucggggacccccagugcgacggcuuccagaacaagaagugggaccuguucguggagcgcagcaaggccuacuccaacugcuaccccuacgacgugccggacuacgcgagccugcggucccucgucgccagcuccggcacgcuggaguucaacaacgagagcuucaacuggaccggggugacccagaacggcaccuccagcgccugcauccgcuccagcaacaacuccuucuucagccggcugaacuggcucacgcaccugaacuucaaguaccccgcccugaacgugaccaugcccaacaacgagcaguucgacaagcucuacaucuggggcguccaccaccccgggaccgacaaggaccagaucuuccuguacgcgcaggccuccgggcgcaucaccgugagcacgaagcggagccagcaggccgugaucccgaacaucggcucccgcccccggguccgcaacauccccagccggaucuccaucuacuggaccaucgugaagcccggcgacauccugcucaucaacagcaccgggaaccugaucgccccgcgcggcuacuucaagauccgguccgggaaguccuccaucaugcgcagcgacgcccccaucggcaagugcaacuccgagugcaucacccccaacggcagcauccccaacgacaagccguuccagaacgugaaccggaucacguacggggcgugcccccgcuacgucaagcaguccacccugaagcucgccaccggcaugcggaacgugcccgagaagcagacccgcgggaucuucggcgccaucgccggguucaucgagaacggcugggagggcaugguggacgggugguacggcuuccggcaccagaacagcgaggggcgcggccaggccgcggaccugaaguccacgcaggccgccaucgaccagaucaacgggaagcugaaccggcucaucggcaagaccaacgagaaguuccaccagaucgagaaggaguucagcgaggucgagggccgcauccaggaccuggagaaguacguggaggacaccaagaucgaccugugguccuacaacgccgagcuccugguggcccuggagaaccagcacaccaucgaccucacggacagcgagaugaacaagcuguucgagaagaccaagaagcagcugcgggagaacgcggaggacauggggaacggcugcuucaccaucuaccacaagugcgacaacgccugcaucggguccauccgcaacggcaccuacgaccacaacgucuaccgcgacgaggcccucaacaaccgguuccagaucaaggggguggagcucaagagcggcuacaaggacuggauccuguggaucuccuucgccaucagcugcuuccugcugugcguggcccugcucggcuucaucaugugggcgugccagaaggggaacauccgcugcaacaucugcaucuga

SEQ ID NO: 72786 - RNA, 1701 nt, Artificial Sequence; identical to SEQ ID NO: 71006
  derived and/or modified CDS sequence (opt1) from hemagglutinin__InfluenzaA__AFJ11728

SEQ ID NO: 72787 - RNA, 1701 nt, Artificial Sequence
  derived and/or modified CDS sequence (opt1) from hemagglutinin__InfluenzaA__AFJ19842
augaagaccaucaucgcccugagcuacauccucugccugguguucgcccagaagcugcccggcaacgacaacuccaccgcgacgcucugccuggggcaccacgccgucccgaacggcaccaucgugaagaccaucaccaacgaccagaucgaggugacgaacgccaccgagcugguccagagcuccagcgccggggagaucugcgacagcccccaccacauccucgacggcgagaacugcacccugaucgacgcccugcucggggacccccagugcgacggcuuccagaacaagaagugggaccuguucguggagcgcagccgggcguacuccaacugcuaccccuacgacgugccggacuacgccagccugcgcucccucgucgccagcuccggcacccuggaguucaacaacgagagcuucaacuggacgggggugacccagaacggcaccuccagcgccugcauccggcgcuccaacaacagcuucuucucccggcugaacuggcucacccaccugaacuucaaguaccccgcgcugaacgugacgaugcccaacaacgagcaguucgacaagcucuacaucuggggcguccaccaccccgggaccgacaaggaccagaucuuccuguacgcccaggccagcgggcgcaucaccguguccaccaagcggagccagcaggccgugaucccgaacaucggcagccgcccccggguccgcaacauccccucccggaucagcaucuacuggacgaucgugaagcccggcgacauccugcucaucaacuccaccgggaaccugaucgccccgcgcggcuacuucaagauccggagcgggaaguccagcaucaugcgcuccgacgcgcccaucggcaagugcaacagcgagugcaucacccccaacggcuccauccccaacgacaagccguuccagaacgugaaccggaucaccuacggggccugcccccgcuacgucaagcagagcacgcugaagcucgccaccggcaugcggaacgugcccgagaagcagacccgcgggaucuucggcgccaucgccggguucaucgagaacggcugggagggcaugauggacgggugguacggcuuccggcaccagaacuccgaggggcgcggccaggcggccgaccugaaguccacccaggccgccaucgaccagaucaacgggaagcugaaccggcucaucggcaagacgaacgagaaguuccaccagaucgagaaggaguucuccgagguggagggccgcauccaggaccuggagaaguacgucgaggacaccaagaucgaccuguggagcuacaacgccgagcuccugguggcgcuggagaaccagcacaccaucgaccucaccgacuccgagaugaacaagcuguucgagaagacgaagaagcagcugcgcgagaacgccgaggacauggggaacggcugcuucaagaucuaccacaagugcgacaacgccugcaucgggagcauccggaacggcaccuacgaccacgacguguaccgcgacgaggcccucaacaaccgguuccagaucaaggggaucgagcugaaguccggcuacaaggacuggauccuguggaucagcuucgccaucuccugcuuccuccugugcgucgcgcugcucggcuucaucaugugggccugccagaaggggaacauccgcugcaacaucugcaucuga

SEQ ID NO: 72788 - RNA, 1701 nt, Artificial Sequence; identical to SEQ ID NO: 72385
  derived and/or modified CDS sequence (opt1) from hemagglutinin__InfluenzaA__AFJ20171

SEQ ID NO: 72789 - RNA, 1701 nt, Artificial Sequence; identical to SEQ ID NO: 71006
  derived and/or modified CDS sequence (opt1) from hemagglutinin__InfluenzaA__AFJ20182

SEQ ID NO: 72790 - RNA, 1701 nt, Artificial Sequence
  derived and/or modified CDS sequence (opt1) from hemagglutinin__InfluenzaA__AFJ74386
augaaggccaagcugcucgugcugcugugcgccuucaccgcgaccuacgccgacacgaucugcaucggcuaccacgccaacaacagcaccgacaccgucgacaccgugcucgagaagaacgugacggucacccacuccgugaaccugcuggaggacagccacaacgggaagcucugccgccugaagggcaccgcgccccugcagcucgggaacugcuccguggccggcuggauccuggggaacccggagugcgagagccuguucuccaaggagagcugguccuacaucgccgagacccccaaccccgagaacggcacgugcuaccccggcuacuucgccgacuacgaggagcuccgggagcagcugagcuccgucagcuccuucgagcgcuucgagaucuucccgaaggagagcuccuggcccaaccacaccgugaccaagggggugaccgccagcugcucccacaacggcaagagcuccuucuacaagaaccugcucuggcugacggagaagaacgggcuguaccccaaccucagcaaguccuacgucaacaacaaggagaaggaggugcuggugcuguggggcguccaccaccccagcaacaucggggaccagcgggccaucuaccacaccgagaacgcguacgugagcgugauguccagccacuacucccgccgguucaccccggagaucgccaagcgccccaagguccgggaccaggagggccgcaucaacuacuacuggacccuccuggagcccggcgacacgaucaucuucgaggccaacgggaaccugaucgcccccugguacgccuucgcgcucagccggggcuucggguccggcaucaucaccagcaacgccuccaugggcgagugcgacgccaagugccagaccccgcagggggccaucaacagcucccugcccuuccagaacgugcaccccgugaccaucggcgagugccccaaguacguccgcagcacgaagcugcggauggugaccgggcuccgcaacaucccguccauccagagccggggccuguucggggccaucgcgggcuucaucgagggcggguggaccggcaugaucgacgggugguacggcuaccaccaccagaacgagcagggguccggcuacgccgccgaccagaaguccacccagaacgccaucgacggcaucacgaacaaggugaacagcgucaucgagaagaugaacacccaguucaccgccguggggaaggaguucaacaagcuggagcgccggauggagaaccucaacaagaagguggacgacggcuuccuggacaucuggaccuacaacgcggagcugcucguccugcuggagaacgagcgcacgcucgacuuccacgacagcaacgugaagaaccuguacgagaaggucaagaaccagcugaagaacaacgccaaggagaucgggaacggcugcuucgaguucuaccacaagugcaacaacgagugcauggaguccgugaagaacgggaccuacgacuaccccaaguacagcggcgaguccaagcucaaccgggagaagaucgacggcgugaagcuggagagcaugggggucuaccagauccuggccaucuacagcaccguggccuccagccucgugcugcuggucucccucggcgccaucagcuucuggaugugcuccaacgggagccugcagugccgcaucugcaucuga

SEQ ID NO: 72791 - RNA, 1701 nt, Artificial Sequence
  derived and/or modified CDS sequence (opt1) from hemagglutinin__InfluenzaA__AFJ74407
augaagaccaucaucgcccugagcuacauccucugccugguguucgcccagaagcugcccggcaacgacaacuccaccgcgacgcucugccuggggcaccacgccgucccgaacggcacccuggugaagaccaucaccaacgaccagaucgaggugacgaacgccaccgagcucguccagagcuccagcaccgggcgcaucugcgacagcccccaccggauccuggacggcaagaacugcacccugaucgacgcccuccugggggacccccacugcgacggcuuccagaacaaggagugggaccuguucguggagcgcagcaaggccuacuccaacugcuaccccuacgacgugccggacuacgcgagccuccggucccuggucgccagcuccggcacgcuggaguucaccaacgagggguucaacuggaccggcguggcccaggacgggaccagcuacgccugcaagcgcggcuccgugaaguccuucuucucccggcucaacuggcugcacaagcuggaguacaaguaccccgcgcucaacgucacgaugcccaacaacgacaaguucgacaagcuguacaucuggggcgugcaccaccccagcaccgacuccgaccagaccagccuguacgugcaggccuccgggcgcgucaccgugagcacgaagcggagccagcagaccgugaucccgaacaucggcucccgccccuggguccgcggggugagcucccggaucagcaucuacuggaccaucgugaagcccggcgacauccuccugaucaacuccaccgggaaccugaucgcgccccggggcuacuucaagauccgcagcggcaaguccagcaucaugcgguccgacgccccgaucgggaacugcagcuccgagugcaucacgcccaacggcagcauccccaacgacaagcccuuccagaacgucaaccgcaucaccuacggggccugcccgcgguacgugaagcagaacacccucaagcuggccaccggcaugcgcaacgugcccgagaagcagacgcgggggaucuucggcgccaucgccggcuucaucgagaacgggugggagggcauggucgacgggugguacggcuuccgccaccagaacuccgaggggaccggccaggccgccgaccucaagagcacccaggcggccaucaaccagaucaacggcaagcugaaccggcugaucgagaagaccaacgagaaguuccaccagaucgagaaggaguucuccgagguggaggggcgcauccaggaccuggagaaguacguggaggacacgaagaucgaccucuggagcuacaacgccgagcugcuggucgcccucgagaaccagcacaccaucgaccugaccgacuccgagaugaacaagcuguucgagcggacccgcaagcagcuccgcgagaacgccgaggacaugggcaacgggugcuucaagaucuaccacaagugcgacaacgcgugcaucggcagcauccggaacgggacguacgaccacgacguguaccgcgacgaggcccugaacaaccgguuccagaucaagggcgucgagcugaaguccggcuacaaggacuggauccucuggaucagcuucgccaucagcugcuuccugcugugcguggugcuccugggguucaucaugugggccugccagaagggcaacauccgcugcaacaucugcaucuga

SEQ ID NO: 72792 - RNA, 1701 nt, Artificial Sequence
  derived and/or modified CDS sequence (opt1) from hemagglutinin__InfluenzaA__AFJ74418
augaagaccaucaucgcccugagcuacauccucugccugguguucgcccagaagcugcccggcaacgacaacuccaccgcgacgcucugccuggggcaccacgccgucccgaacggcacccuggugaagaccaucaccaacgaccagaucgaggugacgaacgccaccgagcucguccagagcuccagcaccgggcgcaucugcgacagcccccaccagauccuggacggcgagaacugcacccugaucgacgcccuccugggggacccccacugcgacggcuuccagaacaaggagugggaccuguucguggagcggagcaaggccuacuccaacugcuaccccuacgacgugccggacuacgcgagccuccgcucccuggucgccagcuccggcacgcuggaguucaacaacgagagcuucaacuggaccgggguggcccagaacggcaccuccagcgccugcaagcggcgcuccaucaagagcuucuucucccggcucaacuggcugcaccagcugaaguacaaguaccccgcgcucaacgugaccaugcccaacaacgagaaguucgacaagcuguacaucuggggcguccaccaccccagcacggacuccgaccagaucagccuguacgcccaggccagcgggcgcgugaccguguccaccaagcggagccagcagaccgucaucccgaacaucgggucccgccccugggugcggggcgugagcucccgcaucagcaucuacuggacgaucgucaagcccggcgacauccuccugaucaacuccaccgggaaccugaucgcgccccggggcuacuucaagauccgcagcgggaaguccagcaucaugcgguccgacgccccgaucggcaagugcaacagcgagugcaucacccccaacggcuccauccccaacgacaagcccuuccagaacgugaaccgcaucaccuacggggccugcccgcgguacgugaagcagaacacgcucaagcuggccaccggcaugcgcaacguccccgagaagcagacccgggggaucuucggcgccaucgccggguucaucgagaacggcugggagggcaugguggacgggugguacggcuuccgccaccagaacagcgaggggaccggccaggccgcggaccugaaguccacgcaggccgccaucaaccagaucaacgggaagcucaaccggcugaucgagaagaccaacgagaaguuccaccagaucgagaaggaguucagcgagguggagggccgcauccaggaccuggagaaguacgucgaggacaccaagaucgaccucugguccuacaacgccgagcugcugguggcccucgagaaccagcacaccaucgaccugacggacagcgagaugaacaagcuguucgagcggaccaagaagcagcuccgcgagaacgcggaggacaugggcaacgggugcuucaagaucuaccacaagugcgacaacgccugcaucggcuccauccgcaacgggaccuacgaccacgacguguaccgggacgaggcccugaacaaccgcuuccagaucaagggcgucgagcugaaguccggguacaaggacuggauccucuggaucagcuucgccaucuccugcuuccugcugugcgugguccuccugggcuucaucaugugggccugccagaagggcaacauccggugcaacaucugcaucuga

SEQ ID NO: 72793 - RNA, 1701 nt, Artificial Sequence
  derived and/or modified CDS sequence (opt1) from hemagglutinin__InfluenzaA__AFJ74437
augaagaccaucaucgcccugagcuacauccucugcaagguguucgcccagaagcugcccggcaacgacaacuccaccgcgacgcugugccucgggcaccacgccgucccgaacggcacccuggugaagaccaucaccaacgaccagaucgaggugacgaacgccaccgagcugguccagagcuccagcaccgggcgcaucugcgacagcccccaccagauccucgacggcgagaacugcacccugaucgacgcccugcucggggacccccacugcgacggcuuccagaacaaggagugggaccuguucguggagcggagcaaggccuacuccaacugcuaccccuacgacgugccggacuacgcgagccugcgcucccucgucgccagcuccggcacgcuggaguucaacaacgagagcuucaacuggaccgggguggcccagaacggcaccuccagcgccugcaagcggcgcuccaucaagagcuucuucucccggcugaacuggcuccaccagcugaaguacaaguaccccgcgcugaacgugaccaugcccaacaacgagaaguucgacaagcucuacaucuggggcguccaccaccccagcacggacuccgaccagaucagccuguacgcccaggccagcgggcgcgugaccguguccaccaagcggagccagcagaccgucaucccgaacaucgggucccgccccugggugcggggcgugagcucccgcaucagcaucuacuggacgaucgucaagcccggcgacauccugcucaucaacuccaccgggaaccugaucgcgccccggggcuacuucaagauccgcagcgggaaguccagcaucaugcgguccgacgccccgaucggcaagugcaacagcgagugcaucacccccaacggcuccauccccaacgacaagcccuuccagaacgugaaccgcaucaccuacggggccugcccgcgguacgugaagcagaacacgcugaagcucgccaccggcaugcgcaacguccccgagaagcagacccgggggaucuucggcgccaucgccggguucaucgagaacggcugggagggcaugguggacgggugguacggcuuccgccaccagaacagcgaggggaccggccaggccgcggaccugaaguccacgcaggccgccaucaaccagaucaacgggaagcugaaccggcucaucgagaagaccaacgagaaguuccaccagaucgagaaggaguucagcgagguggagggccgcauccaggaccuggagaaguacgucgaggacaccaagaucgaccugugguccuacaacgccgagcuccugguggcccuggagaaccagcacaccaucgaccucacggacagcgagaugaacaagcuguucgagcggaccaagaagcagcugcgcgagaacgcggaggacaugggcaacgggugcuucaagaucuaccacaagugcgacaacgccugcaucggcuccauccgcaacgggaccuacgaccacgacguguaccgggacgaggcccucaacaaccgcuuccagaucaagggcgucgagcugaaguccggguacaaggacuggauccuguggaucagcuucgccaucuccugcuuccuccugugcgugguccugcucggcuucaucaugugggccugccagaagggcaacauccggugcaacaucugcaucuga

SEQ ID NO: 72794 - RNA, 1701 nt, Artificial Sequence
  derived and/or modified CDS sequence (opt1) from hemagglutinin__InfluenzaA__AFJ74448
augaagaccaucaucgcccugagcuacauccucugccugguguucgcccagaagcugcccggcaacgacaacuccaccgcgacgcucugccuggggcaccacgccgucccgaacggcacccuggugaagaccaucaccaacgaccagaucgaggugacgaacgccaccgagcucguccagagcuccagcaccgggcgcaucugcgacagcccccaccagauccuggacggcgagaacugcacccugaucgacgcccuccucgggggcccccacugcgacggcuuccagaacaaggagugggaccuguucguggagcggagcaaggccuacuccaacugcuaccccuacgacgugccggacuacgcgagccugcgcucccuggucgccagcuccgggacgcuggaguucaacaacgagagcuucaacuggaccggcguggcccagaacgggaccuccagcgccugcaagcggcgcuccaacaagagcuucuucucccggcucaacuggcugcaccagcugaaguacaaguaccccgcgcucaacgugaccaugcccaacaacgagaaguucgacaagcuguacaucuggggcguccaccaccccagcacggacuccgaccagaucagccuguacgcccaggccagcgggcgcgugaccguguccaccaagcggagccagcagaccgucaucccgaacaucggcucccgccccugggugcggggcgugagcucccgcaucagcaucuacuggacgaucgucaagcccggggacauccuccugaucaacuccaccggcaaccugaucgcgccccggggguacuucaagauccgcagcggcaaguccagcaucaugcgguccgacgccccgaucggcaagugcaacagcgagugcaucacccccaacggguccauccccaacgacaagcccuuccagaacgugaaccgcaucaccuacggcgccugcccgcgguacgugaagcagaacacgcucaagcuggccaccgggaugcgcaacguccccgagaagcagacccggggcaucuucggggccaucgccggcuucaucgagaacggcugggaggggaugguggacggcugguacggguuccgccaccagaacagcgagggcaccgggcaggccgcggaccugaaguccacgcaggccgccaucaaccagaucaacggcaagcucaaccggcugaucgagaagaccaacgagaaguuccaccagaucgagaaggaguucagcgagguggagggccgcauccaggaccuggagaaguacgucgaggacaccaagaucgaccucugguccuacaacgccgagcugcugguggcccucgagaaccagcacaccaucgaccugacggacagcgagaugaacaagcuguucgagcggaccaagaagcagcuccgcgagaacgcggaggacauggggaacggcugcuucaagaucuaccacaagugcgacaacgccugcaucggguccauccgcaacggcaccuacgaccacgacguguaccgggacgaggcccugaacaaccgcuuccagaucaagggggucgagcugaaguccggcuacaaggacuggauccucuggaucagcuucgccaucuccugcuuccugcugugcgugguccuccugggcuucaucaugugggccugccagaaggggaacauccggugcaacaucugcaucuga

SEQ ID NO: 72795 - RNA, 1701 nt, Artificial Sequence
  derived and/or modified CDS sequence (opt1) from hemagglutinin__InfluenzaA__AFJ74459
auggaggccaagcugcucgugcugcugugcgccuucaccgcgaccuacgccgacacgaucugcaucggcuaccacgccaacaacagcaccgacaccgucgacaccgugcucgagaagaacgugacggucacccacuccgugaaccugcuggaggacagccacaacgggaagcucugccgccugaagggcaccgcgccccugcagcucgggaacugcuccaucgccggcuggauccuggggaacccggagugcgagagccuguucuccaaggagagcugguccuacaucgccgagacccccaaccccgagaacggcacgugcuaccccggcuacuucgccgacuacgaggagcuccgggagcagcugagcuccgugagcuccuucgagcgcuucgagaucuucccgaaggagagcuccuggcccaaccacaccgucaccaagggggugaccgccagcugcucccacaacggcaagagcuccuucuacaagaaccugcucuggcugacggagaagaacgggcuguaccccaaccucagcaaguccuacgugaacaacaaggagaaggagguccuggugcuguggggcgugcaccaccccagcaacaucggggaccagcgggccaucuaccacaccgagaacgcguacgucagcgugguguccagccacuacucccgccgguucaccccggagaucgccaagcgccccaagguccggaaccaggagggccgcaucaacuacuacuggacccuccuggagcccggcgacacgaucaucuucgaggccaacgggaaccugaucgcccccugguacgccuucgcgcucagccggggcuucggguccggcaucaucaccagcaacgccuccaugggcgagugcgacgccaagugccagaccccgcagggggccaucaacagcucccugcccuuccagaacgugcaccccgugaccaucggcgagugccccaaguacguccgcagcacgaagcugcggauggugaccgggcuccgcaacaucccguccauccagagccggggccuguucggggccaucgcgggcuucaucgagggcggguggaccggcaugaucgacgggugguacggcuaccaccaccagaacgagcagggguccggcuacgccgccgaccagaaguccacccagaacgccaucaacggcaucacgaacaaggugaacagcaucaucgagaagaugaacacccaguucaccgccgucgggaaggaguucaacaagcuggagcgccggauggagaaccucaacaagaagguggacgacggcuuccuggacaucuggaccuacaacgcggagcugcucgugcugcuggagaacgagcgcacgcucgacuuccacgacagcaacgucaagaaccuguacgagaaggugaagaaccagcugaagaacaacgccaaggagaucgggaacggcugcuucgaguucuaccacaagugcaacaacgagugcauggaguccgucaagaacgggaccuacgacuaccccaaguacagcaaggaguccaagcucaaccgggagaagaucgacggcgugaagcuggagagcaugggcguguaccagauccuggccaucuacagcaccgucgccuccagccucgugcugcuggugucccucggggccaucagcuucuggaugugcuccaacggcagccugcagugccgcaucugcaucuga

SEQ ID NO: 72796 - RNA, 1701 nt, Artificial Sequence
  derived and/or modified CDS sequence (opt1) from hemagglutinin__InfluenzaA__AFJ74470
augaagaccaucaucgcccugagcuacauccucugccugguguucgcccagaagcugcccggcaacgacaacuccaccgcgacgcucugccuggggcaccacgccgucccgaacggcacccuggugaagaccaucaccaacgaccagaucgaggugacgaacgccaccgagcucguccagagcuccagcaccgggcgcaucugcgacagcccccaccggauccuggacggcaagaacugcacccugaucgacgcccuccugggggacccccacugcgacggcuuccagaacaaggagugggaccuguucguggagcgcagcaaggccuacuccaacugcuaccccuacgacgugccggacuacgcgagccuccggucccuggucgccagcuccggcacgcuggaguucaacaacgagagcuucaacuggaccgggguggcccagaacggcaccuccuacgccugcaagcgccggagcgugaaguccuucuucagccgccucaacuggcugcacaagcuggaguacaaguaccccgcgcucaacgucaccaugcccaacaacgacaaguucgacaagcuguacaucuggggcgugcaccaccccuccacggacagcgaccagaucucccuguacgcccagaccagcgggcgggugaccgucagcaccaagcgcucccagcagacggugaucccgaacaucgggagccggcccugggugcgcggcgucuccagccggaucuccaucuacuggaccaucgugaagcccggcgacauccuccugaucaacagcaccgggaaccugaucgcgccccgcggcuacuucaagauccgguccgggaaguccuccaucaugcgcagcgacgccccgaucggcaacugcuccagcgagugcaucacccccaacggcuccauccccaacgacaagcccuuccagaacgugaaccggaucacguacggggccugcccgcgcuacgucaagcagaacacccucaagcuggccaccggcaugcggaacgugcccgagaagcagacccgcgggaucuucggcgccaucgccggguucaucgagaacggcugggagggcaugguggacgggugguacggcuuccggcaccagaacagcgaggggacgggccaggccgccgaccugaaguccacccaggcggccaucaaccagaucaacgggaagcucaaccgccugaucgagaagaccaacgagaaguuccaccagaucgagaaggaguucagcgaggucgagggccggauccaggaccuggagaaguacguggaggacaccaagaucgaccucugguccuacaacgccgagcugcugguggcccucgagaaccagcacacgaucgaccugaccgacagcgagaugaacaagcuguucgagcgcacccgcaagcagcuccgggagaacgccgaggacaugggcaacgggugcuucaagaucuaccacaagugcgacaacgcgugcaucggcuccauccgcaacgggaccuacaaccacgacgucuaccgggacgaggcccugaacaaccgcuuccagaucaagggcguggagcucaagagcggguacaaggacuggauccuguggaucagcuucgccaucuccugcuuccugcugugcgucgugcuccugggcuucaucaugugggccugccagaagggcaacauccggugcaacaucugcaucuga

SEQ ID NO: 72797 - RNA, 1701 nt, Artificial Sequence
  derived and/or modified CDS sequence (opt1) from hemagglutinin__InfluenzaA__AFJ74492
augaagaccaucaucgcccugagcuacauccucugccugguguucgcccagaagcugcccggcaacgacaacuccaccgcgacgcucugccuggggcaccacgccgucccgaacggcacccuggugaagaccaucaccaacgaccagaucgaggugacgaacgccaccgagcucguccagagcuccagcaccgggcgcaucugcgacagcccccaccagauccuggacggcgagaacugcacccugaucgacgcccuccugggggacccccacugcgacggcuuccagaacaaggagugggaccuguucguggagcggagcaaggccuacuccaacugcuaccccuacgacgugccggacuacgcgagccuccgcucccuggucgccagcuccggcacgcuggaguucaacaacgagagcuucaacuggaccgggguggcccagaacggcaccuccagcgccugcaagcggcgcuccaacaagagcuucuucucccggcucaacuggcugcaccagcugaaguacaaguaccccgcgcucaacgugaccaugcccaacaacaagaaguucgacaagcuguacaucuggggcguccaccaccccagcacggacuccgaccagaucagccuguacgcccaggccagcgggcgcgugaccguguccaccaagcggagccagcagaccgucaucccgaacaucgggucccgccccugggugcggggcgugagcuccaucaucagcaucuacuggacgaucgucaagcccggcgacauccuccugaucaacuccaccgggaaccugaucgcgccccgcggcuacuucaagauccggaacgggaaguccuccaucaugcgcagcgacgccccgaucggcaagugcaacuccgagugcaucacccccaacggcagcauccccaacgacaagcccuuccagaacgugaaccggaucaccuacggggccugcccgcgcuacgugaagcagaacacgcucaagcuggccaccggcaugcggaacguccccgagaagcagacccgcgggaucuucggcgccaucgccggguucaucgagaacggcugggagggcaugguggacgggugguacggcuuccggcaccagaacuccgaggggaccggccaggccgcggaccucaagagcacgcaggccgccaucaaccagaucaacgggaagcugaaccgccugaucggcaagaccaacgagaaguuccaccagaucgagaaggaguucuccgagguggagggccggauccaggaccuggagaaguacgucgaggacaccaagaucgaccucuggagcuacaacgccgagcugcugguggcccucgagaaccagcacaccaucgaccugacggacuccgagaugaacaagcuguucgagcgcaccaagaagcagcuccgggagaacgcggaggacauggggaacggcugcuucaagaucuaccacaagugcgacaacgccugcaucgggagcauccgcaacggcaccuacgaccacgacguguaccgcgacgaggcccugaacaaccgguucaagaucaagggggucgagcugaaguccggcuacaaggacuggauccucuggaucagcuucgccaucagcugcuuccugcugugcgugguccuccugggcuucaucaugugggccugccagaaggggaacauccgcugcaacaucugcaucuga

SEQ ID NO: 72798 - RNA, 1701 nt, Artificial Sequence
  derived and/or modified CDS sequence (opt1) from hemagglutinin__InfluenzaA__AFJ74525
augaagaccaucaucgcccugagcuacauccucugccugguguucgcccagaagcugcccggcaacgacaacuccaccgcgacgcucugccuggggcaccacgccgucccgaacggcacccuggugaagaccaucaccaacgaccagaucgaggugacgaacgccaccgagcucguccagagcuccagcaccgggcgcaucugcgacagcccccaccggauccuggacggcgagaacugcacccugaucgacgcccuccugggggacccccacugcgacggcuuccagaacaaggagugggaccuguucguggagcgcagcaaggccuacuccaacugcuaccccuacgacgugccggacuacgcgagccuccggucccuggucgccagcuccggcacgcuggaguucaacaacgagagcuucaacuggaccgggguggcccaggacggcaccuccagcgccugcaagcgccgguccaucaagagcuucuucucccgccucaacuggcugcaccagcugaaguacaaguaccccgcgcucaacgugaccaugcccaacaacgacaaguucgacaagcuguacaucuggggcguccaccaccccagcacggacuccgaccagaccagccuguacgcccaggccagcgggcgggugaccguguccaccaagcgcagccagcagacggucaucccgaacaucgggucccggcccugggugcgcggcgugagcuccaucaucagcaucuacuggaccaucgucaagcccggcgacauccuccugaucaacuccaccgggaaccugaucgcgccccggggcuacuucaagauccgcagcgggaaguccagcaucaugcgguccgacgccccgaucggcaagugcaacagcgagugcaucacccccaacggcuccauccccaacgacaagcccuuccagaacgugaaccgcaucacguacgggaccugcccgcgguacgugaagcagaacacccucaagcuggccaccggcaugcgcaacguccccgagaagcagacgcgggggaucuucggcgccaucgccggguucaucgagaacggcugggagggcaugguggacgggugguacggcuuccgccaccagaacagcgaggggaccggccaggccgccgaccugaaguccacccaggcggccaucaaccagaucaacgggaagcucaaccggcugaucgagaagaccaacgagaaguuccaccagaucgagaaggaguucagcgagguggagggccgcauccaggaccuggagaaguacgucgaggacacgaagaucgaccucugguccuacaacgccgagcugcugguggcccucgagaaccagcacaccaucgaccugaccgacagcgagaugaacaagcuguucgagcggacccgcaagcagcuccgcgagaacgccgaggacaugggcaacgggugcuucaagaucuaccacaagugcgacaacgcgugcaucggcuccauccggaacgggacguacgaccacgacguguaccgcgacgaggcccugaacaaccgguuccagaucaagggcgucgagcugaaguccggguacaaggacuggauccucuggaucagcuucgccaucuccugcuuccugcugugcgugguccuccugggcuucaucaugugggccugccagaagggcaacauccgcugcaacaucugcaucuga

SEQ ID NO: 72799 - RNA, 1701 nt, Artificial Sequence; identical to SEQ ID NO: 72797
  derived and/or modified CDS sequence (opt1) from hemagglutinin__InfluenzaA__AFJ74535

SEQ ID NO: 72800 - RNA, 1701 nt, Artificial Sequence
  derived and/or modified CDS sequence (opt1) from hemagglutinin__InfluenzaA__AFJ74560
augaagaccaucaucgcccugagcuacauccucugccugguguucgcccagaagcugcccggcaacgacaacuccaccgcgacgcucugccuggggcaccacgccgucccgaacggcacccuggugaagaccaucaccaacgaccagaucgaggugacgaacgccaccgagcucguccagagcuccagcaccgggcgcaucugcgacagcccccaccagauccuggacggcgagaacugcacccugaucgacgcccuccugggggacccccacugcgacggcuuccagaacaaggagugggaccuguucguggagcggagcaaggccuacuccaacugcuaccccuacgacgugccggacuacgucagccuccgcucccugguggcgagcuccggcacgcuggaguucaacaacgagagcuucaacuggaccgggguggcccagaacggcaccuccagcgccugcaagcggcgcuccgacaagagcuucuucucccggcucaacuggcugcaccagcugaaguacaaguaccccgcccucaacgucaccaugcccaacaacgagaaguucgacaagcuguacaucuggggcgugcaccaccccgggacggacagcgaccagaucucccuguacgcgcagaccagcgggcgcgugaccgucagcaccaagcggucccagcagacggugaucccgaacaucggcagcggccccugggugcgcggggucuccagccggaucuccaucuacuggaccaucgugaagcccggcgacauccuccugaucaacagcaccgggaaccugaucgcgccccgcggcuacuucaagauccgguccggcaagagcuccaucaugcgcagcgacgccccgaucgggaagugcaacuccgagugcaucacccccaacggcagcauccccaacgacaagcccuuccagaacgugaaccggaucacguacgggccgugcccccgcuacgucaagcagaacacccucaagcuggccaccggcaugcggaacgugcccgagaagcagacccgcgggaucuucggcgccaucgccggcuucaucgagaacgggugggagggcaugauggacgggugguacggcuuccggcaccagaacuccgaggggacgggccaggccgccgaccugaaguccacccaggccgccaucaaccagaucaacggcaagcucaaccgccugguggagaagaccaacgagaaguuccaccagaucgagaaggaguucuccgaggucgaggggcggauccaggaccuggagaaguacguggaggacaccaagaucgaccucuggagcuacaacgcggagcugcugguggcccucgagaaccagcacacgaucgaccugaccgacuccgagaugaacaagcuguucgagcgcaccaagaagcagcuccgggagaacgccgaggacaugggcaacgggugcuucaagaucuaccacaagugcgacaacgccugcaucggcagcauccgcaacgggaccuacgaccacgacgucuaccgcgacgaggcccugaacaaccgguuccagaucaagggcguggagcugaaguccggcuacaaggacuggauccucuggaucagcuucgcgaucagcugcuuccugcugugcaucguccuccugggguucaucaugugggccugccagaagggcaacauccgcugcaacaucugcaucuga

SEQ ID NO: 72801 - RNA, 1701 nt, Artificial Sequence
  derived and/or modified CDS sequence (opt1) from hemagglutinin__InfluenzaA__AFJ74634
augaagaccaucaucgcccugagcuacauccucugccugguguucgcccagaagcugcccggcaacgacaacuccaccgcgacgcucugccuggggcaccacgccgucccgaacggcaccaucgugaagaccaucaccaacgaccagaucgaggugacgaacgccaccgagcugguccagagcuccagcaccgggggcaucugcgacagcccccaccagauccucgacggggagaacugcacccugaucgacgcccugcucggcgacccccagugcgacggcuuccagaacaagaagugggaccuguucguggagcgcagcaaggccuacuccaacugcuaccccuacgacgugccggacuacgcgagccugcggucccucgucgccagcuccgggacgcuggaguucaacaacgagagcuucaacuggaccggcgugacccagaacgggaccuccagcgccugcaagcgccgguccaacaagagcuucuucucccgccugaacuggcucacgcagcugaaguacaaguaccccgcccugaacgugaccaugcccaacaacgagaaguucgacaagcucuacaucuggggcguccaccaccccgggaccgacagcgaccagaucucccuguacgcgcaggccagcggccggaucaccgugagcacgaagcgcucccagcagaccgugaucccgaacaucggcagccggccccgcguccgggacguguccagccgcaucuccaucuacuggaccaucgugaagcccggggacauccugcucaucaacagcaccggcaaccugaucgcgccccggggguacuucaagauccgcuccggcaagagcuccaucaugcggagcgacgccccgaucggcaagugcaacuccgagugcaucacgcccaacgggagcauccccaacgacaagcccuuccagaacgucaaccgcaucaccuacggcgccugcccgcgguacgugaagcagaacacccugaagcucgccaccgggaugcgcaacgugcccgagaagcagacgcggggcaucuucggggccaucgccggcuucaucgagaacggcugggaggggauggucgacggcugguacggguuccgccaccagaacuccgagggcaccgggcaggccgccgaccugaaguccacccaggcggccaucaaccagaucaacggcaagcugaaccggcucaucggcaagaccaacgagaaguuccaccagaucgagaaggaguucuccgagguggaggggcgcauccaggaccuggagaaguacguggaggacacgaagaucgaccuguggagcuacaacgccgagcuccuggucgcccuggagaaccagcacaccaucgaccucaccgacuccgagaugaacaagcuguucgagcggaccaagaagcagcugcgcgagaacgccgaggacaugggcaacgggugcuucaagaucuaccacaagugcgacaacgcgugcaucggcagcauccgcaacgggacguacgaccacgacguguaccgggacgaggcccucaacaaccgcuuccagaucaagggcguggagcugaaguccggcuacaaggacuggauccuguggaucagcuucgccaucagcugcuuccuccugugcgucgcccugcucggguucaucaugugggccugccagaagggcaacauccggugcaacaucugcaucuga

SEQ ID NO: 72802 - RNA, 1698 nt, Artificial Sequence
  derived and/or modified CDS sequence (opt1) from hemagglutinin__InfluenzaA__AFJ74653
augaaggugaagcugcucguccugcugugcaccuucaccgccacguacgccgacaccaucugcaucggcuaccacgcgaacaacagcaccgacaccguggacacggugcucgagaagaacgucaccgugacccacuccgugaaccugcuggaggacagccacaacgggaagcucugccugcugaagggcaucgcgccccuccagcuggggaacugcuccgucgccggcuggauccuggggaacccggagugcgagcuccugaucagcaaggaguccuggagcuacaucguggagaagcccaaccccgagaacgggaccugcuaccccggcuacuucgccgacuacgaggagcugcgcgagcagcucuccagcguguccagcuucgagcgguucgagaucuucccgaaggaguccagcuggcccaaccacacggucaccgggguguccgccagcugcucccacaacggcaagagcuccuucuacaagaaccugcuguggcucaccgggaagaacggccuguaccccaaccugagcaaguccuacgccaacaacaaggagaaggaggugcucguccuguggggcgugcaccacccgcccaacaucggcgaccagcgcgcccuguaccacaccgacaacgccuacgugagcgucgugagcucccacuacagccggaaguucacgcccgagaucgccaagcgccccaaggugcgggaccaggagggccgcaucaacuacuacuggacccuccuggagcccggggacaccaucaucuucgaggcgaacggcaaccugaucgccccgcgguacgccuucgcccucucccgcggguucggcagcggcaucaucaacuccaacgcccccauggacgagugcgacgcgaagugccagacgccccagggggccaucaacagcucccugcccuuccagaacguccacccggugaccaucggcgagugccccaaguacgugcggagcgccaagcugcgcauggucaccgggcuccggaacauccccuccauccagagccgcggccuguucggggccaucgccggcuucaucgagggcggguggaccggcaugguggacgggugguacggcuaccaccaccagaacgagcagggguccggcuacgcggccgaccagaaguccacccagaacgccaucaacggcaucacgaacaaggugaacagcgucaucgagaagaugaacacccaguucaccgccguggggaaggaguucaacaagcuggagcggcgcauggagaaccucaacaagaaggucgacgacggcuucaucgacaucuggaccuacaacgccgagcugcuggugcuccuggagaacgagcggacgcuggacuuccacgacagcaacgugaagaaccucuacgagaaggucaagucccagcugaagaacaacgcgaaggagaucgggaacggcugcuucgaguucuaccacaagugcaacgacgagugcauggagagcgugaagaacgggaccuacgacuaccccaaguacuccgaggagagcaagcugaaccgcgagaagaucgacggcgugaagcucgaguccaugggcgucuaccagauccuggccaucuacagcaccguggccagcucccuggugcuccuggucagccugggggccaucuccuucuggaugugcagcaacggcucccuccagugccggaucugcaucuga

SEQ ID NO: 72803 - RNA, 1698 nt, Artificial Sequence
  derived and/or modified CDS sequence (opt1) from hemagglutinin__InfluenzaA__AFJ74673
augaaggugaagcugcucguccugcugugcaccuucaccgccacguacgccgacaccaucugcaucggcuaccacgcgaacaacagcaccgacaccguggacacggugcucgagaagaacgucaccgugacccacuccgugaaccugcuggaggacagccacaacgggaagcucugccugcugaagggcaucgcgccccuccagcuggggaacugcuccgucgccggcuggauccuggggaacccggagugcgagcuccugaucagcaaggaguccuggagcuacaucguggagaagcccaaccccgagaacgggaccugcuaccccggcuacuucgccgacuacgaggagcugcgcgagcagcucuccagcguguccagcuucgagcgguucgagaucuucccgaaggaguccagcuggcccaaccacacggucaccgggguguccgccagcugcucccacaacggcaagagcuccuucuacaagaaccugcuguggcucaccgggaagaacggccuguaccccaaccugcgcaagagcuacgccaacaacaaggagaaggaggugcucguccuguggggcgugcaccacccgcccaacaucggcgaccagcgggcccuguaccacaccgacaacgccuacguguccgucgugagcagccacuacucccgcaaguucacgcccgagaucgccaagcggcccaaggugcgcgaccaggagggccggaucaacuacuacuggacccuccuggagcccggggacaccaucaucuucgaggcgaacggcaaccugaucgccccgcgcuacgccuucgcccucagccggggguucggcuccggcaucaucaacagcaacgcccccauggacgagugcgacgcgaagugccagacgccccagggggccaucaacuccagccugcccuuccagaacguccacccggugaccaucggcgagugccccaaguacgugcgcuccgccaagcugcggauggucaccgggcuccgcaacauccccagcauccagucccggggccuguucggggccaucgccggcuucaucgagggcggguggaccggcaugguggacgggugguacggcuaccaccaccagaacgagcaggggagcggcuacgcggccgaccagaaguccacccagaacgccaucaacggcaucacgaacaaggugaacagcgucaucgagaagaugaacacccaguucaccgccguggggaaggaguucaacaagcuggagcgccggauggagaaccucaacaagaaggucgacgacggcuucaucgacaucuggaccuacaacgccgagcugcuggugcuccuggagaacgagcgcacgcuggacuuccacgacuccaacgugaagaaccucuacgagaaggucaagagccagcugaagaacaacgcgaaggagaucgggaacggcugcuucgaguucuaccacaagugcaacgacgagugcauggaguccgugaagaacgggaccuacgacuaccccaaguacagcgaggaguccaagcugaaccgggagaagaucgacggcgugaagcucgagagcaugggcgucuaccagauccuggccaucuacuccaccguggccagcagccuggugcuccuggucucccugggggccaucagcuucuggaugugcuccaacggcagccuccagugccgcaucugcaucuga

SEQ ID NO: 72804 - RNA, 1701 nt, Artificial Sequence
  derived and/or modified CDS sequence (opt1) from hemagglutinin__InfluenzaA__AFJ74674
augaagaccaucaucgcccugagcuacauccucugccugguguucgcccagaagcugcccggcaacgacaacuccaccgcgacgcucugccuggggcaccacgccgucccgaacggcacccuggugaagaccaucaccaacgaccagaucgaggugacgaacgccaccgagcucguccagagcuccagcaccgggggcaucugcgacagcccccaccagauccuggacggggagaacugcacccugaucgacgcccuccugggcgacccccacugcgacggcuuccagaacaagaagugggaccuguucguggagcgcagcaaggccuacuccaacugcuaccccuacgacgugccggacuacgcgagccuccggucccuggucgccagcuccgggacgcuggaguucaacaacgagagcuucaacuggaccggcguggcccagaacgggaccuccagcgccugcaagcgccgguccaacaagagcuucuucucccgccucaacuggcugcaccagcugaaguacaaguaccccgcgcucaacgugaccaugcccaacaacgagaaguucgacaagcuguacaucuggggcguccaccaccccgggacggacagcgaccagaucucccuguacgcccaggccagcggccggaucaccgugagcaccaagcgcucccagcagaccgugaucccgaacaucggcagccggccccgcguccgggacguguccagccgcaucuccaucuacuggacgaucgugaagcccggggacauccuccugaucaacagcaccggcaaccugaucgcgccccggggguacuucaagauccgcuccggccggagcuccaucaugcgcagcgacgccccgaucggcaagugcaacuccgagugcaucacccccaacgggagcauccccaacgacaagcccuuccagaacgucaaccggaucaccuacggcgccugcccgcgcuacgugaagcagaacacgcucaagcuggccaccgggaugcggaacgugcccgagaagcagccccgcggcaucuucggggccaucgccggcuucaucgagaacggcugggaggggauggucgacggcugguacggguuccggcaccagaacuccgagggcaccgggcaggccgcggaccugaaguccacccaggccgccaucaaccagaucaacggcaagcucaaccgccugaucggcaagacgaacgagaaguuccaccagaucgagaaggaguucuccgagguggaggggcggauccaggaccuggagaaguacguggaggacaccaagaucgaccucuggagcuacaacgccgagcugcuggucgcccucgagaaccagcacaccaucgaccugaccgacuccgagaugaacaagcuguucgagcgcacgaagaagcagcuccgcgagaacgcggaggacaugggcaacgggugcuucaagaucuaccacaagugcgacaacgccugcaucggcagcauccggaacgggaccuacgaccacgacguguaccgcgacgaggcccugaacaaccgguuccagaucaagggcguggagcugaaguccggcuacaaggacuggauccucuggaucagcuucgccaucagcugcuuccugcugugcgucgcccuccugggguucaucaugugggcgugccagaagggcaacauccgcugcaacaucugcaucuga

SEQ ID NO: 72805 - RNA, 1698 nt, Artificial Sequence; identical to SEQ ID NO: 72802
  derived and/or modified CDS sequence (opt1) from hemagglutinin__InfluenzaA__AFJ74694

SEQ ID NO: 72806 - RNA, 1701 nt, Artificial Sequence
  derived and/or modified CDS sequence (opt1) from hemagglutinin__InfluenzaA__AFJ74695
augaagaccaucaucgcccugagcuacauccucugccugguguucgcccagaagcugcccggcaacgacaacuccaccgcgacgcucugccuggggcaccacgccgucccgaacggcacccuggugaagaccaucaccaacgaccagaucgaggugacgaacgccaccgagcucguccagaacagcuccaccgggcgcaucugcgacagcccccaccagauccuggacggcgagaacugcacccugaucgacgcccuccugggggacccccacugcgacggcuuccagaacaaggagugggaccuguucguggagcgguccaaggccuacagcaacugcuaccccuacgacgugccggacuacgucucccuccgcagccugguggcguccagcggcacgcuggaguucaacaacgaguccuucaacuggaccgggguggcccaggacggcaccagcuccgccugcaagcggcgcagcgacaaguccuucuucagccggcucaacuggcugcaccagcugaaguacaaguaccccgcccucaacgucaccaugcccaacaacgagaaguucgacaagcuguacaucuggggcgugcaccaccccgggacggacuccgaccagaucagccuguacgcgcgcgccuccgggcgggugaccgucagcaccaagcgcagccagcagaccgugaucccgaacaucggcucccggcccugggugcgcggcgucagcuccaagaucagcaucuacuggacgaucgugaagcccggggacauccuccugaucaacuccaccggcaaccugaucgcgccccggggguacuucaagauccgcagcggcaaguccagcaucaugcgguccgacgccccgaucggcaagugcaacagcgagugcaucacccccaacggguccauccccaacgacaagcccuuccagaacgugaaccgcaucaccuacggcccgugcccccgguacgucaagcagaacacgcucaagcuggccaccgggaugcgcaacgugcccgagaagcagacccggggcaucuucggggccaucgccggcuucaucgagaacggcugggaggggaugguggacggcugguacggguuccgccaccagaacagcgagggcaccgggcaggccgccgaccugaaguccacgcaggccgcgaucaaccagaucaacggcaagcucaaccggcugaucgagaagaccaacgagaaguuccaccagaucgagaaggaguucagcgaggucgagggccgcauccaggaccuggagaaguacguggaggacaccaagaucgaccucugguccuacaacgccgagcugcugguggcccucgagaaccagcacaccaucgaccugacggacagcgagaugaacaagcuguucgagcggaccaagaagcagcuccgcgagaacgccgaggacauggggaacggcugcuucaagaucuaccacaagugcgacaacgccugcaucggguccauccgcaacggcaccuacgaccacgacgucuaccgggacgaggcgcugaacaaccgcuuccagaucaaggggguggagcucaagagcggcuacaaggacuggauccuguggaucuccuucgccaucagcugcuuccugcugugcaucguccuccugggcuucaucaugugggccugccagaaggggaacauccggugcaacaucugcaucuga

SEQ ID NO: 72807 - RNA, 1701 nt, Artificial Sequence
  derived and/or modified CDS sequence (opt1) from hemagglutinin__InfluenzaA__AFJ74727
augaagaccaucaucgcccugagcuacauccucugccugguguucgcccagaagcugcccggcaacgacaacuccaccgcgacgcucugccuggggcaccacgccgucccgaacggcaccaucgugaagaccaucaccaacgaccagaucgaggugacgaacgccaccgagcugguccagagcuccagcaccgggggcaucugcgacagcccccaccagauccucgacggggagaacugcacccugaucgacgcccugcucggcgacccccagugcgacggcuuccagaacaagaagugggaccuguucguggagcgcagcaaggccuacuccaacugcuaccccuacgacgugccggacuacgcgagccugcggucccucgucgccagcuccgggacgcuggaguucaacaacgagagcuucaacuggaccggcgugacccagaacgggaccuccagcgccugcaagcgccgguccaacaagagcuucuucucccgccugaacuggcucacgcagcugaaguacaaguaccccgcccugaacgugaccaugcccaacaacgagaaguucgacaagcucuacaucuggggcguccaccaccccgggaccgacagcgaccagaucucccuguacgcgcaggccagcggccggaucaccgugagcacgaagcgcucccagcagaccgugaucccgaacaucggcagccggccccgcguccgggacaucuccagccgcaucuccaucuacuggaccaucgugaagcccggggacauccugcucaucaacagcaccggcaaccugaucgcgccccggggguacuucaagauccgcuccggcaagagcuccaucaugcggagcgacgccccgaucggcaagugcaacuccgagugcaucacgcccaacgggagcauccccaacgacaagcccuuccagaacgugaaccgcaucaccuacggcgccugcccgcgguacgucaagcagaacacccugaagcucgccaccgggaugcgcaacgugcccgagaagcagacgcggggcaucuucggggccaucgccggcuucaucgagaacggcugggaggggaugguggacggcugguacggguuccgccaccagaacuccgagggcaccgggcaggccgccgaccugaaguccacccaggcggccaucaaccagaucaacggcaagcugaaccggcucaucggcaagaccaacgagaaguuccaccagaucgagaaggaguucuccgaggucgaggggcgcauccaggaccuggagaaguacguggaggacacgaagaucgaccuguggagcuacaacgccgagcuccugguggcccuggagaaccagcacaccaucgaccucaccgacuccgagaugaacaagcuguucgagcggaccaagaagcagcugcgcgagaacgccgaggacaugggcaacgggugcuucaagaucuaccacaagugcgacaacgcgugcaucggcagcauccgcuccgggacguacgaccacgacgucuaccgggacgaggcccucaacaaccgcuuccagaucaagggcguggagcucaagagcggcuacaaggacuggauccuguggaucagcuucgccaucuccugcuuccugcugugcguggcccugcucggguucaucaugugggccugccagaagggcaacauccggugcaacaucugcaucuga

SEQ ID NO: 72808 - RNA, 1698 nt, Artificial Sequence; identical to SEQ ID NO: 72802
  derived and/or modified CDS sequence (opt1) from hemagglutinin__InfluenzaA__AFJ74743

SEQ ID NO: 72809 - RNA, 1701 nt, Artificial Sequence; identical to SEQ ID NO: 72801
  derived and/or modified CDS sequence (opt1) from hemagglutinin__InfluenzaA__AFJ74744

SEQ ID NO: 72810 - RNA, 1698 nt, Artificial Sequence; identical to SEQ ID NO: 72802
  derived and/or modified CDS sequence (opt1) from hemagglutinin__InfluenzaA__AFJ74760

SEQ ID NO: 72811 - RNA, 1701 nt, Artificial Sequence
  derived and/or modified CDS sequence (opt1) from hemagglutinin__InfluenzaA__AFJ74761
augaagaccaucaucgcccugagcuacauccucugccugguguucgcccagaagcugcccggcaacgacaacuccaccgcgacgcucugccuggggcaccacgccgucccgaacggcaccaucgugaagaccaucaccaacgaccagaucgaggugacgaacgccaccgagcugguccagagcuccagcaccgggggcaucugcgacagcccccaccagauccucgacggggagaacugcacccugaucgacgcccugcucggcgacccccagugcgacggcuuccagaacaagaagugggaccuguucguggagcgcagcaaggccuacuccaacugcuaccccuacgacgugccggacuacgcgagccugcggucccucgucgccagcuccgggacgcuggaguucaacaacgagagcuucaacuggaccggcgugacccagaacgggaccuccagcgccugcaagcgccgguccaacaagagcuucuucucccgccugaacuggcucacgcagcugaaguacaaguaccccgcccugaacgugaccaugcccaacaacgagaaguucgacaagcucuacaucuggggcguccaccaccccgggaccgacagcgaccagaucucccuguacgcgcaggccagcggccggaucaccgugagcacgaagcgcucccagcagaccgugaucccgaacaucggcagccggccccgcguccgggacaucuccagccgcaucuccaucuacuggaccaucgugaagcccggggacauccugcucaucaacagcaccggcaaccugaucgcgccccggggguacuucaagauccgcuccggcaagagcuccaucaugcggagcgacgccccgaucggcaagugcaacuccgagugcaucacgcccaacgggagcauccccaacgacaagcccuuccagaacgugaaccgcaucaccuacggcgccugcccgcgguacgucaagcagaacacccugaagcucgccaccgggaugcgcaacgugcccgagaagcagacgcggggcaucuucggggccaucgccggcuucaucgagaacggcugggaggggaugguggacggcugguacggguuccgccaccagaacuccgagggcaccgggcaggccgccgaccugaaguccacccaggcggccaucaaccagaucaacggcaagcugaaccggcucaucggcaagaccaacgagaaguuccaccagaucgagaaggaguucuccgaggucgaggggcgcauccaggaccuggagaaguacguggaggacacgaagaucgaccuguggagcuacaacgccgagcuccugguggcccuggagaaccagcacaccaucgaccucaccgacuccgagaugaacaagcuguucgagcggaccaagaagcagcugcgcgagaacgccgaggacaugggcaacgggugcuucaagaucuaccacaagugcgacaacgcgugcaucggcagcauccgcaacgggacguacgaccacgacgucuaccgggacgaggcccucaacaaccgcuuccagaucaagggcguggagcugaaguccggcuacaaggacuggauccuguggaucagcuucgccaucagcugcuuccuccugugcguggcccugcucggguucaucaugugggccugccagaagggcaacauccggugcaacaucugcaucuga

SEQ ID NO: 72812 - RNA, 1698 nt, Artificial Sequence; identical to SEQ ID NO: 72802
  derived and/or modified CDS sequence (opt1) from hemagglutinin__InfluenzaA__AFJ74779

SEQ ID NO: 72813 - RNA, 1701 nt, Artificial Sequence; identical to SEQ ID NO: 72801
  derived and/or modified CDS sequence (opt1) from hemagglutinin__InfluenzaA__AFJ74780

SEQ ID NO: 72814 - RNA, 1701 nt, Artificial Sequence
  derived and/or modified CDS sequence (opt1) from hemagglutinin__InfluenzaA__AFJ74804
augaagaccaucaucgcccugagcuacauccucugccugguguucgcccagaagcugcccggcaacgacaacuccaccgcgacgcucugccuggggcaccacgccgucccgaacggcaccaucgugaagaccaucaccaacgaccagaucgaggugacgaacgccaccgagcugguccagagcuccagcaccgggggcaucugcgacagcccccaccagauccucgacggggagaacugcacccugaucgacgcccugcucggcgacccccagugcgacggcuuccagaaccgcaagugggaccuguucguggagcggagcaaggccuacuccaacugcuaccccuacgacgugccggacuacgcgagccugcgcucccucgucgccagcuccgggacgcuggaguucaacaacgagagcuucgacuggaccggcgugacccagaacgggaccuccagcgccugcaagcggcgcuccaacaagagcuucuucucccggcugaacuggcucacgcaccugaaguacaaguaccccgcccugaacgugaccaugcccaacaacgagaaguucgacaagcucuacaucuggggcguccaccaccccgggaccgacagcgaccagaucucccuguacgcgcaggccagcggccgcaucaccgugagcacgaagcggucccagcagaccgugaucccgaacaucggcagccgcccccggguccgcgacguguccagccggaucuccaucuacuggaccaucgugaagcccggggacauccugcucaucaacagcaccggcaaccugaucgcgccccgcggguacuucaagauccgguccggcaagagcuccaucaugcgcagcgacgccccgaucggcaagugcaacuccgagugcaucacgcccaacgggagcauccccaacgacaagcccuuccagaacgucaaccggaucaccuacggcgccugcccgcgcuacgugaagcagaacacccugaagcucgccaccgggaugcggaacgugcccgagaagcagacgcgcggcaucuucggggccaucgccggcuucaucgagaacggcugggaggggauggucgacggcugguacggguuccggcaccagaacuccgagggcaccgggcaggccgccgaccugaaguccacccaggcggccaucaaccagaucaacggcaagcugaaccgccucaucggcaagaccaacgagaaguuccaccagaucgagaaggaguucuccgagguggaggggcggauccaggaccuggagaaguacguggaggacacgaagaucgaccuguggagcuacaacgccgagcuccuggucgcccuggagaaccagcacaccaucgaccucaccgacuccgagaugaacaagcuguucgagcgcaccaagaagcagcugcgcgagaacgccgaggacaugggcaacgggugcuucaagaucuaccacaagugcgacaacgcgugcaucggcagcauccggaacgggacguacgaccacgacguguaccgcgacgaggcccucaacaaccgguuccagaucaagggcguggagcugaaguccggcuacaaggacuggauccuguggaucagcuucgccaucagcugcuuccuccugugcgucgcccugcucggguucaucaugugggccugccagaagggcaacauccgcugcaacaucugcaucuga

SEQ ID NO: 72815 - RNA, 1701 nt, Artificial Sequence
  derived and/or modified CDS sequence (opt1) from hemagglutinin__InfluenzaA__AFJ74819
augaagaccaucaucgcccugagcuacauccucugccugguguucgcccagaagcugcccggcaacgacaacuccaccgcgacgcucugccuggggcaccacgccgucccgaacggcaccaucgugaagaccaucaccaacgaccagaucgaggugacgaacgccaccgagcugguccagagcuccagcaccgggggcaucugcgacagcccccaccagauccucgacggggagaacugcacccugaucgacgcccugcucggcgacccccagugcgacggcuuccagaacaagaagugggaccuguucguggagcgcagcaaggccuacuccaacugcuaccccuacgacgugccggacuacgcgagccugcggucccucgucgccagcuccgggacgcuggaguucaacaacgagagcuucgacuggaccggcgugacccagaacgggaccuccagcgccugcaagcgccgguccaacaagagcuucuucucccgccugaacuggcucacgcaccugaaguacaaguaccccgcccugaacgugaccaugcccaacaacgagaaguucgacaagcucuacaucuggggcguccaccaccccgggaccgacagcgaccagaucaaccuguacgcgcaggccuccggccggaucaccgugagcacgaagcgcagccagcagaccgugaucccgaacaucggcucccggccccgcguccgggacgugagcucccgcaucagcaucuacuggaccaucgugaagcccggggacauccugcucaucaacuccaccggcaaccugaucgcgccccggggguacuucaagauccgcagcggcaaguccagcaucaugcgguccgacgccccgaucggcaagugcaacagcgagugcaucacgcccaacggguccauccccaacgacaagcccuuccagaacgucaaccgcaucaccuacggcgccugcccgcgguacgugaagcagaacacccugaagcucgccaccgggaugcgcaacgugcccgagaagcagacgcggggcaucuucggggccaucgccggcuucaucgagaacggcugggaggggauggucgacggcugguacggguuccgccaccagaacagcgagggcaccgggcaggccgccgaccugaaguccacccaggcggccaucaaccagaucaacggcaagcugaaccggcucaucggcaagaccaacgagaaguuccaccagaucgagaaggaguucagcgagguggaggggcgcauccaggaccuggagaaguacguggaggacacgaagaucgaccugugguccuacaacgccgagcuccuggucgcccuggagaaccagcacaccaucgaccucaccgacagcgagaugaacaagcuguucgagcggaccaagaagcagcugcgcgagaacgccgaggacaugggcaacgggugcuucaagaucuaccacaagugcgacaacgcgugcaucggcuccauccgcaacgggacguacgaccacgacguguaccgggacgaggcccucaacaaccgcuuccagaucaagggcguggagcugaaguccggcuacaaggacuggauccuguggaucuccuucgccaucagcugcuuccuccugugcgucgcccugcucggguucaucaugugggccugccagaagggcaacauccggugcaacaucugcaucuga

SEQ ID NO: 72816 - RNA, 1701 nt, Artificial Sequence; identical to SEQ ID NO: 66669
  derived and/or modified CDS sequence (opt1) from hemagglutinin__InfluenzaA__AFJ74842

SEQ ID NO: 72817 - RNA, 1698 nt, Artificial Sequence
  derived and/or modified CDS sequence (opt1) from hemagglutinin__InfluenzaA__AFJ75036
augaaggugaagcugcucguccugcugugcaccuucaccgccacguacgccgacaccaucugcaucggcuaccacgcgaacaacagcaccgacaccguggacacggugcucgagaagaacgucaccgugacccacuccgugaaccugcuggaggacagccacaacgggaagcucugccugcugaagggcaucgcgccccuccagcuggggaacugcuccgucgccggcuggauccuggggaacccggagugcgagcuccugaucagccgcgaguccuggagcuacaucguggagaagcccaaccccgagaacgggaccugcuaccccggccacuucgccgacuacgaggagcugcgggagcagcucuccagcguguccagcuucgagcgcuucgagaucuucccgaaggagaacuccuggcccaaccacacggucaccggggugagcgccuccugcagccacaacggcaaguccagcuucuacaagaaccugcuguggcucaccgggaagaacggccuguaccccaaccuguccaagagcuacgccaacaacaaggagaaggaggugcucguccuguggggcgugcaccacccgcccaacaucggcgaccagcgggcccuguaccacaccgagaacgccuacguguccgucgugagcagccacuacucccgcaaguucacgcccgagaucgccaagcggcccaaggugcgcgaccaggagggccggaucaacuacuacuggacccuccuggagcccggggacaccaucaucuucgaggcgaacggcaaccugaucgccccgcgcuacgccuucgcccucagccggggguucggcuccggcaucaucaacagcaacgcccccauggacgagugcgacgcgaagugccagacgccccagggggccaucaacuccagccugcccuuccagaacguccacccggugaccaucggcgagugccccaaguacgugcgcuccgccaagcugcggauggucaccgggcuccgcaacauccccagcauccagucccggggccuguucggggccaucgccggcuucaucgagggcggguggaccggcaugguggacgggugguacggcuaccaccaccagaacgagcaggggagcggcuacgcggccgaccagaaguccacccagaacgccaucaacggcaucacgaacaaggugaacagcgucaucgagaagaugaacacccaguucaccgccguggggaaggaguucaacaagcuggagcgccggauggagaaccucaacaagaaggucgacgacggcuucaucgacaucuggaccuacaacgccgagcugcuggugcuccuggagaacgagcgcacgcuggacuuccacgacuccaacgugaagaaccucuacgagaaggucaagagccagcugaagaacaacgcgaaggagaucgggaacggcugcuucgaguucuaccacaagugcaacgacgagugcauggaguccgugaagaacgggaccuacgacuaccccaaguacagcgaggaguccaagcugaaccgggagaagaucgacggcgugaagcucgagagcaugggcgucuaccagauccuggccaucuacuccaccguggccagcagccuggugcuccuggucucccugggggccaucagcuucuggaugugcuccaacggcagccuccagugccgcaucugcaucuga

SEQ ID NO: 72818 - RNA, 1701 nt, Artificial Sequence; identical to SEQ ID NO: 64654
  derived and/or modified CDS sequence (opt1) from hemagglutinin__InfluenzaA__AFJ75047

SEQ ID NO: 72819 - RNA, 1698 nt, Artificial Sequence
  derived and/or modified CDS sequence (opt1) from hemagglutinin__InfluenzaA__AFJ75058
augaaggugaagcugcucguccugcugugcaccuucaccgccacguacgccgacaccaucugcaucggcuaccacgcgaacaacagcaccgacaccguggacacggugcucgagaagaacgucaccgugacccacuccgugaaccugcuggaggacagccacaacgggaagcucugccugcugaagggcaucgcgccccuccagcuggggaacugcuccgucgccggcuggauccuggggaacccggagugcgagcuccugaucagccgcgaguccuggagcuacaucguggagaagcccaaccccgagaacgggaccugcuaccccggccacuucgccgacuacgaggagcugcgggagcagcucuccagcguguccagcuucgagcgcuucgagaucuucccgaaggaguccagcuggcccaaccacacggucaccgggguguccgccagcugcucccacaacggcaagagcuccuucuacaagaaccugcuguggcucaccgggaagaacggccuguaccccaaccugagcaaguccuacgccaacaacaaggagaaggaggugcucguccuguggggcgugcaccacccgcccaacaucggcgaccagcgggcccuguaccacaccgagaacgccuacgugagcgucgugagcucccacuacagccgcaaguucacgcccgagaucgccaagcggcccaaggugcgcgaccaggagggccggaucaacuacuacuggacccuccuggagcccggggacaccaucaucuucgaggcgaacggcaaccugaucgccccgcgcuacgccuucgcccucucccggggguucggcagcggcaucaucaacuccaacgcccccauggacgagugcgacgcgaagugccagacgccccagggggccaucaacagcucccugcccuuccagaacguccacccggugaccaucggcgagugccccaaguacgugcgcagcgccaagcugcggauggucaccgggcuccgcaacauccccuccauccagagccggggccuguucggggccaucgccggcuucaucgagggcggguggaccggcaugguggacgggugguacggcuaccaccaccagaacgagcagggguccggcuacgcggccgaccagaaguccacccagaacgccaucaacggcaucacgaacaaggugaacagcgucaucgagaagaugaacacccaguucaccgccguggggaaggaguucaacaagcuggagcgccggauggagaaccucaacaagaaggucgacgacggcuucaucgacaucuggaccuacaacgccgagcugcuggugcuccuggagaacgagcgcacgcuggacuuccacgacagcaacgugaagaaccucuacgagaaggucaagucccagcugaagaacaacgcgaaggagaucgggaacggcugcuucgaguucuaccacaagugcaacgacgagugcauggagagcgugaagaacgggaccuacgacuaccccaaguacuccgaggagagcaagcugaaccgggagaagaucgacggcgugaagcucgaguccaugggcgucuaccagauccuggccaucuacagcaccguggccagcucccuggugcuccuggucagccugggggccaucuccuucuggaugugcagcaacggcucccuccagugccgcaucugcaucuga

SEQ ID NO: 72820 - RNA, 1698 nt, Artificial Sequence
  derived and/or modified CDS sequence (opt1) from hemagglutinin__InfluenzaA__AFJ75069
augaaggugaagcugcucguccugcugugcaccuucaccgccacguacgccgacaccaucugcaucggcuaccacgcgaacaacagcaccgacaccguggacacggugcucgagaagaacgucaccgugacccacuccgugaaccugcuggaggacagccacaacgggaagcucugccugcugaagggcaucgcgccccuccagcuggggaacugcuccgucgccggcuggauccuggggaacccggagugcgagcuccugaucagccgcgaguccuggagcuacaucguggagaaguccaaccccgagaacgggaccugcuaccccggccacuucgccgacuacgaggagcugcgggagcagcucagcuccgugagcuccuucgagcgcuucgagaucuuccccaaggagagcuccuggccgaaccacacgaccaccggggucagcgccuccugcagccacaacggcgaguccagcuucuacaagaaccugcuguggcucaccgggaagaacggccuguaccccaaccuguccaagagcuacgccaacaacaaggagaaggaggugcucgugcuguggggcguccaccacccgcccaacaucggcgaccagcgggcccuguaccacacggagaacgccuacgugagcguggucuccagccacuacucccgcaaguucacccccgagaucgccaagcggcccaaggugcgcgaccaggagggccggaucaacuacuacuggacccuccuggagcccggggacaccaucaucuucgaggcgaacggcaaccugaucgcgccccgcuacgccuucgcccucagccggggguucggcuccggcaucaucaacagcaacgccccgauggacgagugcgacgccaagugccagacgccccagggggccaucaacuccagccugcccuuccagaacgugcaccccgucaccaucggcgagugcccgaaguacgugcgcuccgccaagcugcggauggugaccgggcuccgcaacauccccagcauccagucccggggccuguucggggccaucgccggcuucaucgagggcggguggaccggcauggucgacgggugguacggcuaccaccaccagaacgagcaggggagcggcuacgcggccgaccagaaguccacgcagaacgccaucaacggcaucaccaacaaggugaacagcgugaucgagaagaugaacacccaguucaccgccgucgggaaggaguucaacaagcuggagcgccggauggagaaccucaacaagaagguggacgacggcuucaucgacaucuggacguacaacgccgagcugcugguccuccuggagaacgagcgcacccuggacuuccacgacuccaacgugaagaaccucuacgagaaggucaagagccagcugaagaacaacgcgaaggagaucgggaacggcugcuucgaguucuaccacaagugcaacgacgagugcauggaguccgugaagaacgggaccuacgacuaccccaaguacagcgaggaguccaagcugaaccgggagaagaucgacggcgugaagcucgagagcaugggcguguaccagauccuggccaucuacagcaccgucgccuccagccuggugcuccuggugucccugggggccaucagcuucuggaugugcuccaacggcagccuccagugccgcaucugcaucuga

SEQ ID NO: 72821 - RNA, 1701 nt, Artificial Sequence
  derived and/or modified CDS sequence (opt1) from hemagglutinin__InfluenzaA__AFJ75091
augaagaccaucaucgcccugagcuacauccucugccugguguucgcccagaagcugcccggcaacgacaacuccaccgcgacgcucugccuggggcaccacgccgucccgaacggcaccaucgugaagaccaucaccaacgaccagaucgaggugacgaacgccaccgagcugguccagagcuccagcaccgggggcaucugcgacagcccccaccagauccucgacggggagaacugcacccugaucgacgcccugcucggcgacccccagugcgacggcuuccagaacaagaagugggaccuguucguggagcgcagcaaggccuacuccaacugcuaccccuacgacgugccggacuacgcgagccugcggucccucgucgccagcuccgggacgcuggaguucaacaacgagagcuucaacuggaccggcgugacccagaacgggaccuccagcgccugcaagcgccgguccaacaacagcuucuucucccgccugaacuggcucacgcaccugaaguucaaguaccccgcccugaacgugaccaugcccaacaacgagaaguucgacaagcucuacaucuggggcguccaccaccccgggaccgacaacgaccagaucuuccuguacgcgcaggccagcggccggaucaccguguccacgaagaucagccagcagaccgugaucccgaacaucggcagccgcccccggguccgcaacauccccucccggaucagcaucuacuggaccaucgugaagcccggggacauccugcucaucaacuccaccggcaaccugaucgccccgcgcggguacuucaagauccggagcggcaaguccagcaucaugcgcuccgacgcccccaucggcaagugcaacagcgagugcaucacgcccaacggguccauccccaacgacaagccguuccagaacgugaaccggaucaccuacggcgccugcccccgcuacgucaagcagaacacccugaagcucgcgaccgggaugcggaacgugcccgagaagcagacgcgcggcaucuucggggccaucgccggcuucaucgagaacggcugggaggggaugguggacggcugguacggguuccggcaccagaacagcgagggcaucgggcaggccgccgaccugaaguccacccaggcggccaucgaccagaucaacggcaagcugaaccgccucaucggcaagaccaacgagaaguuccaccagaucgagaaggaguucagcgaggucgaggggcggauccaggaccuggagaaguacguggaggacaccaagaucgaccugugguccuacaacgccgaccuccugguggcccuggagaaccagcacacgaucgaccucaccgacagcgagaugaacaagcuguucgagaagaccaagaagcagcugcgcgagaacgccgaggacaugggcaacgggugcuucaagaucuaccacaagugcgacaacgcgugcaucggcuccauccggaacgggaccuacgaccacgacgucuaccgcgacgaggcccucaacaaccgcuuccagaucaagggcguggagcugaaguccggcuacaaggacuggauccuguggaucuccuucgccaucagcugcuuccuccugugcguggcccugcucggguucaucaugugggccugccagaagggcaacauccggugcaacaucugcaucuga

SEQ ID NO: 72822 - RNA, 1701 nt, Artificial Sequence
  derived and/or modified CDS sequence (opt1) from hemagglutinin__InfluenzaA__AFJ75449
augaagaccaucaucgcccugagcuacauccucugccugguguucgcccagaagcugcccggcaacgacaacuccaccgcgacgcucugccuggggcaccacgccgucccgaacggcaccaucgugaagaccaucaccaacgaccagaucgaggugacgaacgccaccgagcugguccagagcuccagcaccggggagaucugcgacagcccccaccagauccucgacggcgagaacugcacccugaucgacgcccugcucggggacccccagugcgacggcuuccagaacaagaagugggaccuguucguggagcgcagcaaggccuacuccaacugcuaccccuacgacgugccggacuacgcgagccugcggucccucgucgccagcuccggcacgcuggaguucaacaacgagagcuucaacuggaccggggugacccagaacggcaccuccagcgccugcauccgccgguccaacaacagcuucuucucccgccugaacuggcucacgcaccugaaguucaaguaccccgcccugaacgugaccaugcccaacaacgagaaguucgacaagcucuacaucuggggcguccaccaccccgggaccgacaacgaccagaucuuccuguacgcgcaggccagcgggaagaucaccguguccacgaagcggagccagcagaccgugaucccgaacaucggcagccgcccccggguccgcaacauccccucccggaucagcaucuacuggaccaucgugaagcccggcgacauccugcucaucaacuccaccgggaaccugaucgccccgcgcggcuacuucaagauccggagcgggaaguccagcaucaugcgcuccgacgcccccaucggcaagugcaacagcgagugcaucacgcccaacggcuccauccccaacgacaagccguuccagaacgugaaccggaucaccuacggggccugcccccgcuacgucaagcagaacacccugaagcucgcgaccggcaugcggaacgugcccgagaagcagacgcgcgggaucuucggcgccaucgccggguucaucgagaacggcugggagggcaugguggacgggugguacggcuuccggcaccagaacagcgaggggaccggccaggccgccgaccugaaguccacccaggcggccaucgaccagaucaacgggaagcugaaccgccucaucggcaagaccaacgagaaguuccaccagaucgagaaggaguucagcgaggucgagggccggauccaggaccuggagaaguacguggaggacacgaagaucgaccugugguccuacaacgccgagcuccugguggcccuggagaaccagcacaccaucgaccucaccgacagcgagaugaacaagcuguucgagaagaccaagaagcagcugcgcgagaacgccgaggacauggggaacggcugcuucaagaucuaccacaagugcgacaacgcgugcaucggguccauccggaacggcacguacgaccacgacgucuaccgcgacgaggcccucaacaaccgcuuccagaucaaggggguggagcugaaguccggcuacaaggacuggauccuguggaucuccuucgccaucagcugcuuccuccugugcguggcccugcucggcuucaucaugugggccugccagaaggggaacauccggugcaacaucugcaucuga

SEQ ID NO: 72823 - RNA, 1701 nt, Artificial Sequence
  derived and/or modified CDS sequence (opt1) from hemagglutinin__InfluenzaA__AFJ75460
augaagaccaucaucgcccugagcuacauccucugccugguguucacccagaagcugcccggcaacgacaacuccacggccacccucugccuggggcaccacgcggucccgaacggcaccaucgugaagaccaucacgaacgaccagaucgaggugaccaacgccaccgagcugguccagagcuccagcaccggggagaucugcgacagcccccaccagauccucgacggcgagaacugcacgcugaucgacgcccugcucggggacccccagugcgacggcuuccagaacaagaagugggaccuguucguggagcgcagcaaggccuacuccaacugcuaccccuacgacgugccggacuacgccagccugcggucccucgucgcgagcuccggcacccuggaguucaacaacgagagcuucaacuggaccggggugacccagaacggcacguccagcgccugcauccgccgguccaacaacagcuucuucucccgccugaacuggcucacccaccugaaguucaaguaccccgcccugaacgugaccaugcccaacaacgagaacuucgacaagcucuacaucuggggcguccaccaccccgggaccgacaacgaccagaucuuccuguacgcccaggcgagcgggcggaucacgguguccaccaagcgcagccagcagaccgugaucccgaacaucggcagccggccccgcguccggaacauccccucccgcaucagcaucuacuggaccaucgugaagcccggcgacauccugcucaucaacuccacggggaaccugaucgccccgcggggcuacuucaagauccgcagcgggaaguccagcaucaugcgguccgacgcccccaucggcaagugcaacagcgagugcaucacccccaacggcuccauccccaacgacaagccguuccagaacgugaaccgcaucaccuacggggccugcccccgguacgucaagcagaacacccugaagcucgccacgggcaugcgcaacgugcccgagaagcagacccgggggaucuucggcgcgaucgccggguucaucgagaacggcugggagggcaugguggacgggugguacggcuuccgccaccagaacagcgaggggaucggccaggccgccgaccugaaguccacccaggccgcggucgaccagaucaacgggaagcugaaccggcucaucggcaagaccaacgagaaguuccaccagaucgagaaggaguucagcgagguggagggccgcauccaggaccuggagaaguacguggaggacacgaagaucgaccugugguccuacaacgccgagcuccuggucgcccuggagaaccagcacaccaucgaccucaccgacagcgagaugaacaagcuguucgagaagaccaagaagcagcugcgggagaacgccgaggacauggggaacggcugcuucaagaucuaccacaagugcgacaacgccugcaucggguccauccgcaacggcacguacgaccacgacguguaccgcgacgaggcgcucaacaaccgguuccagaucaaggggguggagcugaaguccggcuacaaggacuggauccuguggaucuccuucgccaucagcugcuuccuccugugcgucgcccugcucggcuucaucaugugggccugccagaaggggaacauccgcugcaacaucugcaucuga

SEQ ID NO: 72824 - RNA, 1698 nt, Artificial Sequence
  derived and/or modified CDS sequence (opt1) from hemagglutinin__InfluenzaA__AFJ75517
augaaggugaagcugcucguccugcugugcaccuucaccgccacguacgccgacaccaucugcaucggcuaccacgcgaacaacagcaccgacaccguggacacggugcucgagaagaacgucaccgugaccuacuccgugaaccugcuggaggacaaccacaacgggaagcucugccugcugaagggcaucgcgccccuccagcuggggaacugcagcgucgccggcuggauccuggggaacccggagugcgagcuccugaucuccaaggagagcugguccuacaucguggagcgccccaaccccgagaacgggaccugcuaccccggccacuucgccgacuacgaggagcugcgggagcagcucagcuccgugagcuccuucgagcgcuucgagaucuucccgaaggagagcuccuggcccaaccacacggucaccggggugagcgccuccugcagccacaacggcgaguccagcuucuacaagaaccugcuguggcucaccgggaagaacggccuguaccccaaccuguccaagagcuacgccaacaacaaggagaaggaggugcucguccuguggggcgugcaccacccgcccaacaucggcgaccagaugacccuguaccacaagaagaacgccuacguguccgucgugagcagccacuacucccggaaguucacgcccgagaucgccaagcgccccaaggugcgggaccaggagggccgcaucaacuacuacuggacccuccuggagcccggggacaccaucaucuucgaggccaacggcaaccugaucgcgccgcgguacgccuucgcccucaaccgcggguucggcagcggcaucaucaacuccaacgcccccauggacgagugcgacgccaagugccagacgccccagggggcgaucaacagcucccugcccuuccagaacguccacccggugaccaucggcgagugccccaaguacgugcggagcgccaagcugcgcauggucaccgggcuccggaacauccccuccauccagagccgcggccuguucggggccaucgccggcuucaucgagggcggguggaccggcaugguggacgggugguacggcuaccaccaccagaacgagcagggguccggcuacgccgcggaccagaaguccacccagaacgccaucaacggcaucacgaacaaggugaacagcgucaucgagaagaugaacacccaguucaccgccguggggaaggaguucaacaagcuggagcggcgcauggagaaccucaacaagaaggucgacgacggcuucaucgacguguggaccuacaacgccgagcugcuggugcuccuggagaacgagcggacgcuggacuuccacgacagcaacgucaagaaccucuacgagaaggugaagacccagcugaagaacaacgccaaggagaucgggaacggcugcuucgaguucuaccacaagugcaacgacgagugcauggaguccgugaagaacgggaccuacgacuaccccaaguacagcgaggaguccaagcugagccgcgagaagaucgacggcgucaagcucgaguccaugggcguguaccagauccuggcgaucuacagcaccguggccuccagccugguccuccuggugagccugggggccaucuccuucuggaugugcagcaacggcucccuccagugccggaucugcaucuga

SEQ ID NO: 72825 - RNA, 1698 nt, Artificial Sequence
  derived and/or modified CDS sequence (opt1) from hemagglutinin__InfluenzaA__AFJ75560
augaaggugaagcugcucguccugcugugcaccuucaccgccacguacgccgacaccaucugcaucggcuaccacgcgaacaacagcaccgacaccguggacacggugcucgagaagaacgucaccgugacccacuccgugaaccugcuggaggacaaccacaacgggaagcucugccugcugaagggcaucgcgccccuccagcuggggaacugcagcgucgccggcuggauccuggggaacccggagugcgagcuccugaucuccaaggagagcugguccuacaucguggagcgccccaaccccgagaacgggaccugcuaccccggccacuucgccgacuacgaggagcugcgggagcagcucagcuccgugagcuccuucgagcgcuucgagaucuucccgaaggagagcuccuggcccaaccacacggucaccggggugagcgccuccugcagccacaacggcgaguccagcuucuacaagaaccugcuguggcucaccgggaagaacggccuguaccccaaccuguccaagagcuacgccaacaacaaggagaaggaggugcucguccuguggggcgugcaccacccgcccaacaucggcgaccagaugacccuguaccacaaggagaacgccuacguguccgucgugagcagccacuacucccggaaguucacgcccgagaucgccaagcgccccaaggugcgggaccaggagggccgcaucaacuacuacuggacccuccuggagcccggggacaccaucaucuucgaggccaacggcaaccugaucgcgccgcgguacgccuucgcccucagccgcggguucggcuccggcaucaucaacagcaacgcccccauggacgagugcgacgccaagugccagacgccccagggggcgaucaacuccagccugcccuuccagaacguccacccggugaccaucggcgagugccccaaguucgugcgguccgccaagcugcgcauggucaccgggcuccggaacauccccagcauccagucccgcggccuguucggggccaucgccggcuucaucgagggcggguggaccggcaugguggacgggugguacggcuaccaccaccagaacgagcaggggagcggcuacgccgcggaccagaaguccacccagaacgccaucaacggcaucacgaacaaggugaacagcgucaucgagaagaugaacacccaguucaccgccguggggaaggaguucaacaagcuggagcggcgcauggagaaccucaacaagaaggucgacgacggcuucaucgacguguggaccuacaacgccgagcugcuggugcuccuggagaacgagcggacgcuggacuuccacgacuccaacgucaagaaccucuacgagaaggugaagaaccagcugcgcaacaacgccaaggagaucgggaacggcugcuucgaguucuaccacaagugcaacgacgagugcauggagagcgugaagaacgggaccuacgacuaccccaaguacuccgaggagagcaagcugucccgggagaagaucgacggcgucaagcucgagagcaugggcguguaccagauccuggcgaucuacuccaccguggccagcagccugguccuccuggugucccugggggccaucagcuucuggaugugcuccaacggcagccuccagugccgcaucugcaucuga

SEQ ID NO: 72826 - RNA, 1698 nt, Artificial Sequence
  derived and/or modified CDS sequence (opt1) from hemagglutinin__InfluenzaA__AFJ75571
augaaggugaagcugcucguccugcugugcaccuucaccgccacguacgccgacaccaucugcaucggcuaccacgcgaacaacagcaccgacaccguggacacggugcucgagaagaacgucaccgugacccacuccgugaaccugcuggaggacaaccacaacgggaagcucugccugcugaagggcaucgcgccccuccagcuggggaacugcagcgucgccggcuggauccuggggaacccggagugcgagcuccugaucuccaaggagagcugguccuacaucguggagcgccccaaccccgagaacgggaccugcuaccccggccacuucgccgacuacgaggagcugcgggagcagcucagcuccgugagcuccuucgagcgcuucgagaucuucccgaaggagagcuccuggcccaaccacacggucaccggggugagcgccuccugcagccacaacggcgagaacuccuucuacaagaaccugcuguggcucaccgggaagaacggccuguaccccaaccugagcaaguccuacgccaacaacaaggagaaggaggugcucguccuguggggcgugcaccacccgcccaacaucggcgaccagaugacccuguaccacaaggagaacgccuacgugagcgucguguccagccacuacagccggaaguucacgcccgagaucgccaagcgccccaaggugcgggaccaggagggccgcaucaacuacuacuggacccuccuggagcccggggacaccaucaucuucgaggccaacggcaaccugaucgcgccgcgguacgccuucgcccucucccgcggguucggcagcggcaucaucaacuccaacgcccccauggacgagugcgacgccaagugccagacgccccagggggcgaucaacagcucccugcccuuccagaacguccacccggugaccaucggcgagugccccaaguacgugcggagcgccaagcugcgcauggucaccgggcuccggaacauccccuccauccagagccgcggccuguucggggccaucgccggcuucaucgagggcggguggaccggcaugguggacgggugguacggcuaccaccaccagaacgagcagggguccggcuacgccgcggaccagaaguccacccagaacgccaucaacggcaucacgaacaaggugaacagcgucaucgagaagaugaacacccaguucaccgccguggggaaggaguucaacaagcuggagcggcgcauggagaaccucaacaagaaggucgacgacggcuucaucgacguguggaccuacaacgccgagcugcuggugcuccuggagaacgagcggacgcuggacuuccacgacagcaacgucaagaaccucuacgagaaggugaagaaccagcugaagaacaacgccaaggagaucgggaacggcugcuucgaguucuaccacaagugcaacgacgagugcauggaguccgugaagaacgggaccuacgacuaccccaaguacagcgaggaguccaagcugagccgcgagcggaucgacggcgucaagcucgaguccaugggcguguaccagauccuggcgaucuacagcaccguggccuccagccugguccuccuggugagccugggggccaucuccuucuggaugugcagcaacggcucccuccagugccgcaucugcaucuga

SEQ ID NO: 72827 - RNA, 1701 nt, Artificial Sequence
  derived and/or modified CDS sequence (opt1) from hemagglutinin__InfluenzaA__AFJ75593
augaagaccaucaucgcccugagcuacauccucugccugguguucgcccagaagcugcccggcaacgacuccagcaccgcgacgcucugccuggggcaccacgccgucccgaacggcaccaucgugaagaccaucaccaacgaccagaucgaggugacgaacgccaccgagcugguccaguccagcuccaccggggagaucugcaacagcccccaccagauccucgacggcgagaacugcacccugaucgacgcccugcucggggacccccagugcgacggcuuccagaacaagaagugggaccuguucguggagcgcuccaaggccuacagcaacugcuaccccuacgacgugccggacuacgcgucccugcggagccucgucgccuccagcggcacgcuggaguucaacaacgaguccuucaacuggaccggggugacccagaacggcaccagcuccgccugcauccgccggagcaacaacuccuucuucagccgccugaacuggcucacgcaccugaaguucaaguaccccgcccugaacgugaccaugcccaacaacgagaaguucgacaagcucuacaucuggggcguccaccaccccgggaccgacaacgaccagaucuuccuguacgcgcaggccuccgggcggaucaccgugagcacgaagcgcagccagcagaccgugaucccgaacaucggcucccggccccgcguccggaacauccccagccgcaucuccaucuacuggaccaucgugaagcccggcgacauccugcucaucaacagcaccgggaaccugaucgccccgcggggcuacuucaagauccgcuccggcaagagcuccaucaugcggagcgacgcccccaucgggaagugcaacuccgagugcaucacgcccaacggcagcauccccaacgacaagccguuccagaacgugaaccgcaucaccuacggggccugcccccgguacgucaagcagaacacccugaagcucgcgaccggcaugcgcaacgugcccgagaagcagacgcgggggaucuucggcgccaucgccggguucaucgagaacggcugggagggcaugguggacgggugguacggcuuccgccaccagaacuccgaggggaucggccaggccgccgaccucaagagcacccaggcggccaucgaccagaucaacgggaagcugaaccggcugaucggcaagaccaacgagaaguuccaccagaucgagaaggaguucuccgaggucgagggccgcauccaggaccuggagaaguacguggaggacaccaagguggaccuguggagcuacaacgccgagcuccuggucgcccuggagaaccagcacacgaucgaccucaccgacuccgagaugaacaagcuguucgagaagaccaagaagcagcugcgggagaacgccgaggacauggggaacggcugcuucaagaucuaccacaagugcgacaacgcgugcaucgggagcauccgcaacggcaccuacgaccacgacguguaccgcgacgaggcccucaacaaccgguuccagaucaaggggguggagcugaaguccggcuacaaggacuggauccuguggaucagcuucgccaucuccugcuuccuccugugcgucgcccugcucggcuucaucaugugggccugccagaaggggaacauccgcugcaacaucugcaucuga

SEQ ID NO: 72828 - RNA, 1698 nt, Artificial Sequence
  derived and/or modified CDS sequence (opt1) from hemagglutinin__InfluenzaA__AFJ75615
augaaggugaagcugcucguccugcugugcaccuucaccgccacguacgccgacaccaucugcgugggcuaccacgcgaacaacagcaccgacaccguggacacgguccucgagaagaacgugaccgugacccacuccgucaaccugcuggagaacagccacaacgggaagcucugccugcugaagggcaucgcgccccuccagcuggggaacugcuccguggccggcuggauccuggggaacccggagugcgagcuccugaucagcaaggaguccuggagcuacaucguggagaagcccaaccccgagaacgggaccugcuaccccggccacuucgccgacuacgaggagcugcgcgagcagcucuccagcgucuccagcuucgagcgguucgagaucuucccgaaggaguccagcuggcccaaccacacggugaccgggguguccgccagcugcucccacaacggcgagagcuccuucuaccgcaaccugcuguggcucaccgggaagaacggccuguaccccaaccugagcaaguccuacgccaacaacaaggagaaggagguccucgugcuguggggcgugcaccacccgcccaacaucggcgaccagaaggcccuguaccacaccgagaacgccuacgucagcguggugagcucccacuacagccggaaguucacgcccgagaucgccaagcgccccaagguccgggaccaggagggccgcaucaacuacuacuggacccuccuggagcccggggacaccaucaucuucgaggcgaacggcaaccugaucgccccgcgguacgccuucgcccucucccgcggguucggcagcggcaucaucaacuccaacgcccccauggacaagugcgacgcgaagugccagacgccccagggggccaucaacagcucccugcccuuccagaacgugcacccggugaccaucggcgagugccccaaguacguccggagcgccaagcugcgcauggugaccgggcuccggaacauccccuccauccagagccgcggccuguucggggccaucgccggcuucaucgagggcggguggaccggcaugguggacgggugguacggcuaccaccaccagaacgagcagggguccggcuacgcggccgaccagaaguccacccagaacgccaucaacggcaucacgaacaaggucaacagcgugaucgagaagaugaacacccaguucaccgaggucgggaaggaguucaacaagcuggagcggcgcauggagaaccucaacaagaagguggacgacggcuucaucgacaucuggaccuacaacgccgagcugcuggugcuccuggagaacgagcggacgcuggacuuccacgacagcaacgucaagaaccucuacgagaaggugaagucccagcugaagaacaacgccaaggagaucgggaacggcugcuucgaguucuaccacaagugcaacgacgagugcauggagagcgugaagaacgggaccuacgacuaccccaaguacuccgaggagagcaagcugaaccgcgagaagaucgacggcgucaagcucgaguccaugggcguguaccagauccuggcgaucuacagcaccguggccagcucccugguccuccuggugagccugggggccaucuccuucuggaugugcagcaacggcucccuccagugccggaucugcaucuga

SEQ ID NO: 72829 - RNA, 1701 nt, Artificial Sequence; identical to SEQ ID NO: 69376
  derived and/or modified CDS sequence (opt1) from hemagglutinin__InfluenzaA__AFJ75630

SEQ ID NO: 72830 - RNA, 1701 nt, Artificial Sequence; identical to SEQ ID NO: 69376
  derived and/or modified CDS sequence (opt1) from hemagglutinin__InfluenzaA__AFJ75641

SEQ ID NO: 72831 - RNA, 1698 nt, Artificial Sequence
  derived and/or modified CDS sequence (opt1) from hemagglutinin__InfluenzaA__AFJ75651
augaaggugaagcugcucguccugcugugcaccuucaccgccacguacgccgacaccaucugcaucggcuaccacgcgaacaacagcaccgacaccguggacacggugcucgagaagaacgucaccgugacccacuccgugaaccugcuggagaacagccacaacgggaagcucugccugcugaagggcaucgcgccccuccagcuggggaacugcuccgucgccggcuggauccuggggaacccggagugcgagcuccugaucagcaaggaguccuggagcuacaucguggagaagcccaaccccgagaacgggaccugcuaccccggccacuucgccgacuacgaggagcugcgcgagcagcucuccagcguguccagcuucgagcgguucgagaucuucccgaaggaguccagcuggcccaaccacacggucaccgggguguccgccagcugcucccacaacggcgagagcuccuucuaccgcaaccugcuguggcucaccgggaagaacggccuguaccccaaccugagcaaguccuacgccaacaacaaggagaaggaggugcucguccuguggggcgugcaccacccgcccaacaucggcgaccagaaggcccuguaccggaccgagaacgccuacgugagcgucgugagcucccacuacagccgcaaguucacgcccgagaucgccaagcggcccaaggugcgcgaccaggagggccggaucaacuacuacuggacccuccuggagcccggggacaccaucaucuucgaggcgaacggcaaccugaucgccccgcgcuacgccuucgcccucucccggggguucggcagcggcaucaucaacuccgacgcccccauggacaagugcgacgcgaagugccagacgccccagggggccaucaacagcucccugcccuuccagaacguccacccggugaccaucggcgagugccccaaguacgugcgcagcgccaagcugcggauggucaccgggcuccgcaacauccccuccauccagagccggggccuguucggggccaucgccggcuucaucgagggcggguggaccggcaugguggacgggugguacggcuaccaccaccagaacgagcagggguccggcuacgcggccgaccagaaguccacccagaacgccaucaacggcaucacgaacaaggugaacagcgucaucgagaagaugaacacccaguucaccgccguggggaaggaguucaacaagcuggagcgccggauggagaaccucaacaagaaggucgacgacggcuucaucgacaucuggaccuacaacgccgagcugcuggugcuccuggagaacgagcgcacgcuggacuuccacgacagcaacgugaagaaccucuacgagaaggucaagucccagcugaagaacaacgcgaaggagaucgggaacggcugcuucgaguucuaccacaagugcaacgacgagugcauggagagcgugaagaacgggaccuacgacuaccccaaguacuccgaggagagcaagcugaaccgggagaagaucgacggcgugaagcucgaguccaugggcgucuaccagauccuggccaucuacagcaccguggccagcucccuggugcuccuggucagccugggggccaucuccuucuggaugugcagcaacggcucccuccagugccgcaucugcaucuga

SEQ ID NO: 72832 - RNA, 1701 nt, Artificial Sequence
  derived and/or modified CDS sequence (opt1) from hemagglutinin__InfluenzaA__AFJ75662
augaagaccaucaucgcccugagcuacauccucugccugguguucgcccagaagcugcccggcaacgacaacuccaccgcgacgcucugccuggggcaccacgccgucccgaacggcaccaucgugaagaccaucaccaacgaccagaucgaggugacgaacgccaccgagcugguccagagcuccagcaccggggagaucugcgacagcccccaccagauccucgacggcgagaacugcacccugaucgacgcccugcucggggacccccagugcgacggcuuccagaacaagaagugggaccuguucguggagcgcagcaaggccuacuccaacugcuaccccuacgacgugccggacuacgcgagccugcggucccucgucgccagcuccggcacgcuggaguucaacaacgagagcuucaacuggaccggggugacccagaacggcaccuccagcgccugcauccgccgguccaacaacagcuucuucucccgccugaacuggcucacgcaccugaaguucaaguaccccgcccugaacgugaccaugcccaacaacgaggaguucgacaagcucuacaucuggggcguccaccaccccgggaccgacaacgaccagaucuuccuguacgcgcaggccagcgggcggaucaccguguccacgaagcgcagccagcagaccgugaucccgaacaucggcagccggccccgcguccggaacauccccucccgcaucagcaucuacuggaccaucgugaagcccggcgacauccugcucaucaacuccaccgggaaccugaucgccccgcggggcuacuucaagauccgcagcgggaaguccagcaucaugcgguccgacgcccccaucggcaagugcaacagcgagugcaucacgcccaacggcuccauccccaacgacaagccguuccagaacgugaaccgcaucaccuacggggccugcccccgguacgucaagcagaacacccugaagcucgcgaccggcaugcgcaacgugcccgagaagcagacgcgggggaucuucggcgccaucgccggguucaucgagaacggcugggagggcaugguggacgggugguacggcuuccgccaccagaacagcgaggggaccggccaggccgccgaccugaaguccacccaggcggccaucgaccagaucaacgggaagcugaaccggcucaucggcaagaccaacgagaaguuccaccagaucgagaaggaguucagcgaggucgagggccgcauccaggaccuggagaaguacguggaggacacgaagaucgaccugugguccuacaacgccgagcuccugguggcccuggagaaccagcacaccaucgaccucaccgacagcgagaugaacaagcuguucgagaagaccaagaagcagcugcgggagaacgccgaggacauggggaacggcugcuucaagaucuaccacaagugcgacaacgcgugcaucggguccauccgcaacggcacguacgaccacgacgucuaccgcgacgaggcccucaacaaccgguuccagaucaaggggguggagcugaaguccggcuacaaggacuggauccuguggaucuccuucgccaucagcugcuuccuccugugcguggcccugcucggcuucaucaugugggccugccagaaggggaacauccgcugcaacaucugcaucuga

SEQ ID NO: 72833 - RNA, 1698 nt, Artificial Sequence
  derived and/or modified CDS sequence (opt1) from hemagglutinin__InfluenzaA__AFJ75673
augaaggugaagcugcucguccugcugugcaccuucaccgccacguacgccgacaccaucugcaucggcuaccacgcgaacaacagcaccgacaccguggacacggugcucgagaagaacgucaccgugaccuacuccgugaaccugcuggaggacaaccacaacgggaagcucugccugcugaagggcaucgcgccccuccagcuggggaacugcagcgucgccggcuggauccuggggaacccggagugcgagcuccugaucuccaaggagagcugguccuacaucguggagcgccccaaccccgagaacgggaccugcuaccccggccacuucgccgacuacgaggagcugcgggagcagcucagcuccgugagcuccuucgagcgcuucgagaucuucccgaaggagagcuccuggcccaaccacacggucaccggggugagcgccuccugcagccacaacggcgaguccagcuucuacaagaaccugcuguggcucaccgggaagaacggccuguaccccaaccuguccaagagcuacgccaacaacaaggagaaggaggugcucguccuguggggcgugcaccacccgcccaacaucggcaaccagaugacccuguaccacaaggagaacgccuacguguccgucgugagcagccacuacucccggaaguucacgcccgagaucgccaagcgccccaaggugcgggaccaggagggccgcaucaacuacuacuggacccuccuggagcccggggacaccaucaucuucgaggccaacggcaaccugaucgcgccgcgguacgccuucgcccucaaccgcggguucggcagcggcaucaucaacuccaacgcccccauggacgagugcgacgccaagugccagacgccccagggggcgaucaacagcucccugcccuuccagaacguccacccggugaccaucggcgagugccccaaguacgugcggagcgccaagcugcgcauggucaccgggcuccggaacauccccuccauccagagccgcggccuguucggggccaucgccggcuucaucgagggcggguggaccggcaugguggacgggugguacggcuaccaccaccagaacgagcagggguccggcuacgccgcggaccagaaguccacccagaacgccaucaacggcaucacgaacaaggugaacagcgucaucgagaagaugaacacccaguucaccgccguggggaaggaguucaacaagcuggagcggcgcauggagaaccucaacaagaaggucgacgacggcuucaucgacguguggaccuacaacgccgagcugcuggugcuccuggagaacgagcggacgcuggacuuccacgacagcaacgucaagaaccucuacgagaaggugaagacccagcugaagaacaacgccaaggagaucgggaacggcugcuucgaguucuaccacaagugcaacgacgagugcauggaguccgugaagaacgggaccuacgacuaccccaaguacagcgaggaguccaagcugagccgcgagaagaucgacggcgucaagcucgaguccaugggcguguaccagauccuggcgaucuacagcaccguggccuccagccugguccuccuggugagccugggggccaucuccuucuggaugugcagcaacggcucccuccagugccggaucugcaucuga

SEQ ID NO: 72834 - RNA, 1701 nt, Artificial Sequence; identical to SEQ ID NO: 66693
  derived and/or modified CDS sequence (opt1) from hemagglutinin__InfluenzaA__AFJ76119

SEQ ID NO: 72835 - RNA, 1701 nt, Artificial Sequence; identical to SEQ ID NO: 67046
  derived and/or modified CDS sequence (opt1) from hemagglutinin__InfluenzaA__AFJ76131

SEQ ID NO: 72836 - RNA, 1701 nt, Artificial Sequence
  derived and/or modified CDS sequence (opt1) from hemagglutinin__InfluenzaA__AFJ76155
augaaggccauccuggugguccuccuguacaccuucgccaccgcgaacgccgacacgcugugcaucggcuaccacgccaacaacagcaccgacaccguggacaccgugcucgagaagaacgucacggugacccacuccgugaaccugcuggaggacaagcacaacgggaagcucugcaagcugcgcggcaucgcgccccugcaccucgggaagugcaacaucgccggcuggauccuggggaacccggagugcgagagccuguccaccgccagcuccuggagcuacaucgucgagaccuccagcuccgacaacggcacgugcuaccccggcgacuucaucgacuacgaggagcuccgggagcagcugagcuccgugagcuccuucgagcgcuucgagaucuuccccaagaccagcuccuggcccaaccacgacagcaacaagggggugaccgccgccugcccgcacgccggcgcgaaguccuucuacaagaaccugaucuggcucgucaagaaggggaacagcuaccccaagcuguccaagagcuacaucaacgacaagggcaaggaggugcuggugcucugggggauccaccaccccagcaccuccgccgaccagcagagccuguaccagaacgccgacgccuacgucuucgugggcacgucccgguacagcaagaaguucaagcccgagaucgccauccgcccgaaggugcgggagcaggagggccgcaugaacuacuacuggacccuggucgagcccggggacaagaucaccuucgaggcgaccggcaaccucguggugccccgguacgccuucgccauggagcgcaaggccggguccggcaucaucaucagcgacacgcccguccacgacugcaacacgaccugccagaccccgaagggcgccaucaacaccucccugcccuuccagaacauccacagcaucaccaucgggaagugccccaaguacgugaaguccaccaagcugcggcucgcgaccggccugcgcaacgugcccagcauccagucccgggggcuguucggcgccaucgccggguucaucgagggcggcuggacggggauggucgacggcugguacggguaccaccaccagaacgagcagggcagcggguacgccgccgaccucaaguccacccagaacgcgaucgacgagaucaccaacaaggugaacagcgugaucgagaagaugaacacccaguucacggccgucggcaaggaguucaaccaccuggagaagcgcaucgagaaccugaacaagaagguggacgacggcuuccucgacaucuggaccuacaacgccgagcugcugguccuccuggagaacgagcggacccuggacuaccacgacuccaacgugaagaaccucuacgagaaggugcgcagccagcugaagaacaacgccaaggagaucgggaacggcugcuucgaguucuaccacaagugcgacaacacgugcauggaguccgucaagaacgggaccuacgacuacccgaaguacagcgaggaggccaagcugaaccgggaggagaucgacggcgugaagcucgaguccacccgcaucuaccagauccuggcgaucuacagcaccguggccagcucccugguccucguggugagccugggggccaucuccuucuggaugugcagcaacggcucccugcagugccggaucugcaucuga

SEQ ID NO: 72837 - RNA, 1698 nt, Artificial Sequence
  derived and/or modified CDS sequence (opt1) from hemagglutinin__InfluenzaA__AFJ76186
augaaggugaagcugcucguccugcugugcaccuucaccgccacguacgccgacaccaucugcaucggcuaccacgcgaacaacagcaccgacaccguggacacggugcucgagaagaacgucaccgugacccacuccgugaaccugcuggagaacagccacaacgggaagcucugccugcugaagggcaucgcgccccuccagcuggggaacugcuccgucgccggcuggauccuggggaacccggagugcgagcuccugaucagcaaggaguccuggagcuacaucguggagaagcccaaccccgagaacgggaccugcuaccccggccacuucgccgacuacgaggagcugcgcgagcagcucuccagcguguccagcuucgagcgguucgagaucuucccgaaggaguccagcuggcccaaccacacggucaccgggguguccgccagcugcucccacaacggcgagagcuccuucuaccgcaaccugcuguggcucaccgggaagaacggccuguaccccaaccugagcaaguccuacgccaacaacaaggagaaggaggugcucguccuguggggcgugcaccacccgcccaacaucggcgaccagaaggcccuguaccacaccgagaacgccuacgugagcgucgugagcucccacuacagccggaaguucacgcccgagaucaccaagcgccccaaggugcgggaccaggagggccgcaucaacuacuacuggacccuccuggagcccggggacaccaucaucuucgaggccaacggcaaccugaucgcgccgcgguacgccuucgcccucucccgcggguucggcagcggcaucaucaacuccgacgcccccauggacaagugcgacgccaagugccagacgccccagggggcgaucaacagcucccugcccuuccagaacguccacccggugaccaucggcgagugccccaaguacgugcggagcgccaagcugcgcauggucaccgggcuccggaacauccccuccauccagagccgcggccuguucggggccaucgccggcuucaucgagggcggguggaccggcaugguggacgggugguacggcuaccaccaccagaacgagcagggguccggcuacgccgcggaccagaaguccacgcagaacgccaucaacggcaucaccaacaaggugaacagcgucaucgagaagaugaacacccaguucaccgccguggggaaggaguucaacaagcuggagcggcgcauggagaaccucaacaagaaggucgacgacggcuucaucgacaucuggacguacaacgccgagcugcuggugcuccuggagaacgagcggacccuggacuuccacgacagcaacgugaagaaccucuacgagaaggucaagucccagcugaagaacaacgccaaggagaucgggaacggcugcuucgaguucuaccacaagugcaacgacgagugcauggagagcgugaagaacgggaccuacgacuaccccaaguacuccgaggagagcaagcugaaccgcgagaagaucgacggcgugaagcucgaguccaugggcgucuaccagauccuggcgaucuacagcaccguggccagcucccuggugcuccuggucagccugggggccaucuccuucuggaugugcagcaacggcucccuccagugccggaucugcaucuga

SEQ ID NO: 72838 - RNA, 1701 nt, Artificial Sequence; identical to SEQ ID NO: 66693
  derived and/or modified CDS sequence (opt1) from hemagglutinin__InfluenzaA__AFJ76203

SEQ ID NO: 72839 - RNA, 1701 nt, Artificial Sequence
  derived and/or modified CDS sequence (opt1) from hemagglutinin__InfluenzaA__AFJ76213
augaagaccaucaucgcccugagcuacauccucugccugguguucgcccagaagcugcccggcaacgacaacuccaccgcgacgcucugccuggggcaccacgccgucccgaacggcaccaucgugaagaccaucaccaacgaccagaucgaggugacgaacgccaccgagcugguccagagcuccagcaccgggggcaucugcgacagcccccaccagauccucgacggggagaacugcacccugaucgacgcccugcucggcgacccccagugcgacggcuuccagaacaagaagugggaccuguucguggagcgcuccaaggccuacuccaacugcuaccccuacgacgugccggacuacgcgagccugcggucccucgucgccagcuccgggacgcuggaguucaacaacgagagcuucgacuggaccggcgugacccagaacgggaccuccagcgccugcaagcgccgguccaacaagagcuucuucucccgccugaacuggcucacgcacagcaaguacaaguaccccgcccugaacgugaccaugcccaacaacgagaaguucgacaagcuguacaucuggggcguccaccaccccgggaccgacuccgaccagaucagccucuacgcgcaggccagcggccggaucaccguguccacgaagcgcagccagcagaccgugaucccgaacaucggcucccggccccgcguccgggacgugagcucccgcaucagcaucuacuggaccaucgugaagcccggggacauccugcugaucaacuccaccggcaaccucaucgcgccccggggguacuucaagauccgcagcggcaaguccagcaucaugcgguccgacgccccgaucggcaagugcaacagcgagugcaucacgcccaacggguccauccccaacgacaagcccuuccagaacgucaaccgcaucaccuacggcgccugcccgcgguacgugaagcagaacacccugaagcuggccaccgggaugcgcaacgugcccgagaagcagacgcggggcaucuucggggccaucgccggcuucaucgagaacggcugggaggggauggucgacggcugguacggguuccgccaccagaacagcgagggcaccgggcaggccgccgaccucaaguccacccaggcggccaucaaccagaucaacggcaagcugaaccggcugaucggcaagaccaacgagaaguuccaccagaucgagaaggaguucagcgagguggaggggcgcauccaggaccucgagaaguacguggaggacacgaagaucgaccugugguccuacaacgccgagcugcucgucgcccuggagaaccagcacaccaucgaccugaccgacagcgagaugaacaagcuguucgagcggaccaagaagcagcuccgcgagaacgccgaggacaugggcaacgggugcuucaagaucuaccacaagugcgacaacgcgugcaucggcuccauccgcaacgggacguacgaccacgacguguaccgggacgaggcccugaacaaccgcuuccagaucaagggcguggagcucaagagcggcuacaaggacuggauccuguggaucagcuucgccaucuccugcuuccugcucugcgucgcccugcugggguucaucaugugggccugccagaagggcaacauccggugcaacaucugcaucuga

SEQ ID NO: 72840 - RNA, 1701 nt, Artificial Sequence
  derived and/or modified CDS sequence (opt1) from hemagglutinin__InfluenzaA__AFJ77408
augaagaccaucaucgcccugagcuacauccucugccugaucuucgcccagaagcugcccggcaacgacaacuccaccgcgacgcucugccuggggcaccacgccgugccgaacggcacccuggucaagaccaucaccaacgaccagaucgaggugacgaacgccaccgagcucgugcagagcuccagcaccgggcgcaucugcaacagcccccaccggauccuggacggcgagaacugcacccugaucgacgcccuccugggggacccccacugcgacggcuuccagaacaaggagugggaccuguucgucgagcgcagcaaggccuacuccaacugcuaccccuacgacgugccggacuacgcgagccuccggucccugguggccagcuccggcacgcuggaguucaccaaggagggguucaacuggaccggcgucgcccaggacgggaaguccuacuccugcaagcgcggcagcgugaacuccuucuucagccggcucaacuggcugcacaagcuggaguacaaguaccccgcccucaacgugaccaugcccaacaacgacaaguucgacaagcuguacaucuggggcguccaccaccccuccacggacagcgaccagaccucccuguacgugcaggcgagcgggcgcgugaccgucagcaccaagcggucccagcagacggugaucccgaacaucggcagccgccccugggugcgggggaucuccagccgcaucuccaucuacuggaccaucgucaagcccggcgacauccuccugaucaacagcaccgggaaccugaucgcgccccggggcuacuucaagauccgcaacggcaaguccagcaucaugcgguccgacgccccgaucgggaacugcaacagcgagugcaucacccccaacggcuccauccccaacgacaagcccuuccagaacgugaaccgcaucacguacggggccugcccgcgguacgugaagcagaacacccucaagcuggccaccggcaugcgcaacguccccgagaagcagacccgggggaucuucggcgccaucgccggcuucaucgagaacgggugggagggcaugguggacgggugguacggcuuccgccaccagaacagcgaggggacgggccaggccgccgaccugaaguccacccaggccgcgaucaaccagaucaacggcaagcucaaccggcugaucgagaagaccaacgagaaguuccaccagaucgagaaggaguucagcgagguggaggggcgcauccaggaccuggagaaguacgucgaggacaccaagaucgaccucugguccuacaacgccgagcugcugguggcccucgagaaccagcacacgaucgaccugaccgacagcgagaugaacaagcuguucgagcggacccgcaagcagcuccgcgagaacgccgaggacaugggcaacgggugcuucaagaucuaccacaagugcgacaacgccugcaucggcuccauccggaacgggaccuacgaccacgacguguaccgcgacgaggcgcugaacaaccgguuccagaucaagggcgucgagcucaagagcggcuacaaggacuggauccuguggaucuccuucgccaucagcugcuuccugcugugcgugguccuccugggguucaucaugugggccugccagaagggcaacauccgcugcaacaucugcaucuga

SEQ ID NO: 72841 - RNA, 1701 nt, Artificial Sequence
  derived and/or modified CDS sequence (opt1) from hemagglutinin__InfluenzaA__AFJ77430
augaagaccaucaucgcccugagcuacauccucugccugaucuucgcccagaagcugcccggcaacgacaacuccaccgcgacgcucugccuggggcaccacgccgugccgaacggcacccuggucaagaccaucaccaacgaccagaucgaggugacgaacgccaccgagcucgugcagagcuccagcaccgggcgcaucugcgacagcccccaccggauccuggacggcgagaacugcacccugaucgacgcccuccugggggaccccaacugcgacggcuuccagaacaaggagugggaccuguucgucgagcgcagcaaggccuacuccaacugcuaccccuacgacgugccggacuacgcgagccuccggucccugguggccagcuccggcacgcuggaguucaccaaggagggguucaacuggaccggcgucgcccaggacgggaaguccuacuccugcaagcgcggcagcgugaacuccuucuucagccggcucaacuggcugcacaagcuggaguacaaguaccccgcccucaacgugaccaugcccaacaacgacaaguucgacaagcuguacaucuggggcguccaccaccccuccacggacagcgaccagaucucccuguacgcgcaggccagcgggcgcgugaccgugagcaccaagcggucccagcagaccgucaucccgaacaucggcagccgccccugggugcgggggaucuccagccgcaucuccaucuacuggacgaucgugaagcccggcgacauccuccugaucaacagcaccgggaaccugaucgcgccccggggcuacuucaagauccgcaacggcaaguccagcaucaugcgguccgacgccccgaucgggaacugcaacagcgagugcaucacccccaacggcuccauccccaacgacaagcccuuccagaacgucaaccgcaucaccuacggggccugcccgcgguacgugaagcagaacacgcucaagcuggccaccggcaugcgcaacgugcccgagaagcagacccgggggaucuucggcgccaucgccggcuucaucgagaacgggugggagggcauggucgacgggugguacggcuuccgccaccagaacagcgaggggaccggccaggccgccgaccugaaguccacgcaggcggccaucaaccagaucaacggcaagcucaaccggcugaucgagaagaccaacgagaaguuccaccagaucgagaaggaguucagcgagguggaggggcgcauccaggaccuggagaaguacguggaggacaccaagaucgaccucugguccuacaacgccgagcugcuggucgcccucgagaaccagcacaccaucgaccugacggacagcgagaugaacaagcuguucgagcggacccgccgccagcuccgggagaacgccgaggacaugggcaacgggugcuucaagaucuaccacaagugcgacaacgcgugcaucggcuccauccgcaacgggaccuacgaccacgacguguaccgggacgaggcccugaacaaccgcuuccagaucaagggcguggagcucaagagcggcuacaaggacuggauccuguggaucuccuucgccaucagcugcuuccugcugugcgucgugcuccugggguucaucaugugggccugccagaagggcaacauccggugcaacaucugcaucuga

SEQ ID NO: 72842 - RNA, 1701 nt, Artificial Sequence
  derived and/or modified CDS sequence (opt1) from hemagglutinin__InfluenzaA__AFJ77440
augaagaccaucaucgcccugagcuacauccucugccugguguucgcccagaagcugcccggcaacgacaacuccaccgcgacgcucugccuggggcaccacgccgucccgaacggcacccuggugaagaccaucaccaacgaccagaucgaggugacgaacgccaccgagcucguccagagcuccagcaccgggcgcaucugcgacagcccccaccggauccuggacggcaagaacugcacccugaucgacgcccuccugggggacccccacugcgacggcuuccagaacaaggagugggaccuguucguggagcgcagcaaggccuacuccaacugcuaccccuacgacgugccggacuacgcgagccuccggucccuggucgccagcuccggcacgcuggaguucaccagcgagggguucaacuggaccggcguggcccaggacgggaccuccuacgccugcaagcgcggcagcgugaaguccuucuucagccggcucaacuggcugcacaagcuggaguacaaguaccccgcgcucaacgucacgaugcccaacaacgacaaguucgacaagcuguacaucuggggcgugcaccaccccuccaccgacagcgaccagaccucccuguacgugcaggccagcgggcgcgucaccgugagcacgaagcggucccagcagaccgugaucccgaacaucggcagccgccccuggguccgcgggguguccagccggaucuccaucuacuggaccaucgugaagcccggcgacauccuccugaucaacagcaccgggaaccugaucgcgccccggggcuacuucaagauccgcuccggcaagagcuccaucaugcggagcgacgccccgaucgggaacugcaacuccgagugcaucacgcccaacggcagcauccccaacgacaagcccuuccagaacgucaaccgcaucaccuacggggccugcccgcgguacgugaagcagaacacccucaagcuggccaccggcaugcgcaacgugcccgagaagcagacgcgggggaucuucggcgccaucgccggcuucaucgagaacgggugggagggcauggucgacgggugguacggcuuccgccaccagaacuccgaggggaccggccaggccgccgaccugaaguccacccaggcggccaucaaccagaucaacggcaagcucaaccggcugaucgagaagaccaacgagaaguuccaccagaucgagaaggaguucuccgagguggaggggcgcauccaggaccuggagaaguacguggaggacacgaagaucgaccucuggagcuacaacgccgagcugcuggucgcccucgagaaccagcacaccaucgaccugaccgacuccgagaugaacaagcuguucgagcggacccgcaagcagcuccgcgagaacgccgaggacaugggcaacgggugcuucaagaucuaccacaagugcgacaacgcgugcaucggcagcauccggaacgggacguacgaccacgacguguaccgcgacgaggcccugaacaaccgguuccagaucaagggcgucgagcugaaguccggcuacaaggacuggauccucuggaucagcuucgccaucagcugcuuccugcugugcguggugcuccugggguucaucaugugggccugccagaagggcaacauccgcugcaacaucugcaucuga

SEQ ID NO: 72843 - RNA, 1701 nt, Artificial Sequence
  derived and/or modified CDS sequence (opt1) from hemagglutinin__InfluenzaA__AFJ77451
augaagaccaucaucgcccugagcuacauccucugccugguguucgcccagaagcugcccggcaacgacaacuccaccgcgacgcucugccuggggcaccacgccgucccgaacggcacccuggugaagaccaucaccaacgaccagaucgaggugacgaacgccaccgagcucguccagagcuccagcaccgggcgcaucugcgacagcccccaccggauccuggacggcaagaacugcacccugaucgacgcccuccugggggacccccacugcgacggcuuccagaacaaggagugggaccuguucguggagcgcagcaaggccuacuccaacugcuaccccuacgacgugccggacuacgcgagccuccggucccuggucgccagcuccggcacgcuggaguucaacaacgagagcuucaacuggaccgggguggcccagaacggcaccuccuacgccugcaagcgccggagcgugaaguccuucuucagccgccucaacuggcugcacaagcuggaguacaaguaccccgcgcucaacgucaccaugcccaacaacgacaaguucgacaagcuguacaucuggggcgugcaccaccccuccacggacagcgaccagaccucccuguacgugcaggccagcgggcgggucaccgugagcaccaagcgcucccagcagacggugaucccgaacaucgggagccggcccuggguccgcggcguguccagccggaucuccaucuacuggaccaucgugaagcccggcgacauccuccugaucaacagcaccgggaaccugaucgcgccccgcggcuacuucaagauccgguccgggaaguccuccaucaugcgcagcgacgccccgaucggcaacugcaacuccgagugcaucacccccaacggcagcauccccaacgacaagcccuuccagaacgucaaccggaucacguacggggccugcccgcgcuacgugaagcagaacacccucaagcuggccaccggcaugcggaacgugcccgagaagcagacccgcgggaucuucggcgccaucgccggguucaucgagaacggcugggagggcauggucgacgggugguacggcuuccggcaccagaacuccgaggggacgggccaggccgccgaccucaagagcacccaggcggccaucaaccagaucaacgggaagcugaaccgccugaucgagaagaccaacggcaaguuccaccagaucgagaaggaguucuccgagguggagggccggauccaggaccuggagaaguacguggaggacaccaagaucgaccucuggagcuacaacgccgagcugcuggucgcccucgagaaccagcacacgaucgaccugaccgacuccgagaugaacaagcuguucgagcgcacccgcaagcagcuccgggagaacgccgaggacauggggaacggcugcuucaagaucuaccacaagugcgacaacgcgugcaucgggagcauccgcaacggcaccuacgaccacgacguguaccgggacgaggcccugaacaaccgcuuccagaucaagggggucgagcugaaguccggcuacaaggacuggauccucuggaucagcuucgccaucagcugcuuccugcugugcguggugcuccugggcuucaucaugugggccugccagaaggggaacauccggugcaacaucugcaucuga

SEQ ID NO: 72844 - RNA, 1701 nt, Artificial Sequence
  derived and/or modified CDS sequence (opt1) from hemagglutinin__InfluenzaA__AFJ77462
augaagaccaucaucgcccugagcuacauccucugccugguguucgcccagaagcugcccggcaacgacaacuccaccgcgacgcucugccuggggcaccacgccgucccgaacggcacccuggugaagaccaucaccaacgaccagaucgaggugacgaacgccaccgagcucguccagagcuccagcaccgggcgcaucugcgacagcccccaccggauccuggacggcaagaacugcacccugaucgacgcccuccugggggacccccacugcgacggcuuccagaacaaggagugggaccuguucguggagcgcagcaaggccuacuccaacugcuaccccuacgacgugccggacuacgcgagccuccggucccuggucgccagcuccggcacgcuggaguucaccaacgagggguucaacuggaccggcguggcccaggacgggaccagcuacgccugcaagcgcggcuccgugaaguccuucuucucccggcucaacuggcugcacaagcuggaguacaaguaccccgcgcucaacgucacgaugcccaacaacgacaaguucgacaagcuguacaucuggggcgugcaccaccccagcaccgacuccgaccagaccagccuguacgugcaggccuccgggcgcgucaccgugagcacgaagcggagccagcagaccgugaucccgaacaucggcucccgccccuggguccgcggggugagcucccggaucagcaucuacuggaccaucgugaagcccggcgacauccuccugaucaacuccaccgggaaccugaucgcgccccggggcuacuucaagauccgcagcggcaaguccagcaucaugcgguccgacgccccgaucgggaacugcaacagcgagugcaucacgcccaacggcuccauccccaacgacaagcccuuccagaacgucaaccgcaucaccuacggggccugcccgcgguacgugaagcagaacacccucaagcuggccaccggcaugcgcaacgugcccgagaagcagacgcgggggaucuucggcgccaucgccggcuucaucgagaacgggugggagggcauggucgacgggugguacggcuuccgccaccagaacagcgaggggaccggccaggccgccgaccugaaguccacccaggcggccaucaaccagaucaacggcaagcucaaccggcugaucgagaagaccaacgagaaguuccaccagaucgagaaggaguucagcgagguggaggggcgcauccaggaccuggagaaguacguggaggacacgaagaucgaccucugguccuacaacgccgagcugcuggucgcccucgagaaccagcacaccaucgaccugaccgacagcgagaugaacaagcuguucgagcggacccgcaagcagcuccgcgagaacgccgaggacaugggcaacgggugcuucaagaucuaccacaagugcgacaacgcgugcaucggcuccauccggaacgggacguacgaccacgacguguaccgcgacgaggcccugaacaaccgguuccagaucaagggcgucgagcucaagagcggcuacaaggacuggauccuguggaucuccuucgccaucagcugcuuccugcugugcguggugcuccugggguucaucaugugggccugccagaagggcaacauccgcugcaacaucugcaucuga

SEQ ID NO: 72845 - RNA, 1701 nt, Artificial Sequence
  derived and/or modified CDS sequence (opt1) from hemagglutinin__InfluenzaA__AFJ77473
augaagaccaucaucgcccugagcuacauccucugccagguguucgcccagaagcugcccggcaacgacaacuccaccgcgacgcugugccucgggcaccacgccgucccgaacggcacccuggugaagaccaucaccaacgaccagaucgaggugacgaacgccaccgagcugguccagagcuccagcaccgggcgcaucugcgacagcccccaccagauccucgacggcgagaacugcacccugaucgacgcccugcucggggacccccacugcgacggcuuccagaacaaggagugggaccuguucguggagcggagcaaggccuacuccaacugcuaccccuacgacgugccggacuacgcgagccugcgcucccucgucgccagcuccggcacgcuggaguucaacaacgagagcuucaacuggaccgggguggcccagaacggcaccuccagcgccugcaagcggcgcuccaucaagagcuucuucucccggcugaacuggcuccaccagcugaaguacaaguaccccgcgcugaacgugaccaugcccaacaacgagaaguucgacaagcucuacaucuggggcguccaccaccccagcacggacuccgaccagaucagccuguacgcccaggccagcgggcgcgugaccguguccaccaagcggagccagcagaccgucaucccgaacaucgggucccgccccugggugcggggcgugagcucccgcaucagcaucuacuggacgaucgucaagcccggcgacauccugcucaucaacuccaccgggaaccugaucgcgccccggggcuacuucaagauccgcagcgggaaguccagcaucaugcgguccgacgccccgaucggcaagugcaacagcgagugcaucacccccaacggcuccauccccaacgacaagcccuuccagaacgugaaccgcaucaccuacggggccugcccgcgguacgugaagcagaacacgcugaagcucgccaccggcaugcgcaacguccccgagaagcagacccgggggaucuucggcgccaucgccggguucaucgagaacggcugggagggcaugguggacgggugguacggcuuccgccaccagaacagcgaggggaccggccaggccgcggaccugaaguccacgcaggccgccaucaaccagaucaacgggaagcugaaccggcucaucgagaagaccaacgagaaguuccaccagaucgagaaggaguucagcgagguggagggccgcauccaggaccuggagaaguacgucgaggacaccaagaucgaccugugguccuacaacgccgagcuccugguggcccuggagaaccagcacaccaucgaccucacggacagcgagaugaacaagcuguucgagcggaccaagaagcagcugcgcgagaacgcggaggacaugggcaacgggugcuucaagaucuaccacaagugcgacaacgccugcaucggcuccauccgcaacgggaccuacgaccacgacguguaccgggacgaggcccucaacaaccgcuuccagaucaagggcgucgagcugaaguccggguacaaggacuggauccuguggaucagcuucgccaucuccugcuuccuccugugcgugguccugcucggcuucaucaugugggccugccagaagggcaacauccggugcaacaucugcaucuga

SEQ ID NO: 72846 - RNA, 1701 nt, Artificial Sequence; identical to SEQ ID NO: 64210
  derived and/or modified CDS sequence (opt1) from hemagglutinin__InfluenzaA__AFJ77484

SEQ ID NO: 72847 - RNA, 1701 nt, Artificial Sequence; identical to SEQ ID NO: 64212
  derived and/or modified CDS sequence (opt1) from hemagglutinin__InfluenzaA__AFJ77495

SEQ ID NO: 72848 - RNA, 1701 nt, Artificial Sequence; identical to SEQ ID NO: 64210
  derived and/or modified CDS sequence (opt1) from hemagglutinin__InfluenzaA__AFJ77506

SEQ ID NO: 72849 - RNA, 1701 nt, Artificial Sequence
  derived and/or modified CDS sequence (opt1) from hemagglutinin__InfluenzaA__AFJ77517
augaagaccaucaucgcccugagcuacauccucugccugguguucgcccagaagauccccggcaacgacaacuccaccgcgacgcugugccucgggcaccacgccgucccgaacggcacccuggugaagaccaucaccaacgaccagaucgaggugacgaacgccaccgagcugguccagagcuccagcaccgggcgcaucugcgacagcccccaccggauccucgacggcgagaacugcacccugaucgacgcccugcucggggacccccacugcgacggcuuccagaacaaggagugggaccuguucguggagcgcagcaaggccuacuccaacugcuaccccuacgacgugccggacuacgcgagccugcggucccucgucgccagcuccggcacgcuggaguucaacaacgagagcuucaacuggaccgggguggcccagaacggcaccuccaacgccugcaagcgccggagcaugaaguccuucuucagccgccugaacuggcuccaccagcugaaguacaaguaccccgcgcugaacgugaccaugcccaacaacgacaaguucgacaagcucuacaucuggggcguccaccaccccuccacggacagcgaccagaccucccuguacgcccaggccagcgggcgggugaccgugagcacccagcgcucccagcagacggucaucccgaacaucgggagccggcccugggugcgcggcguguccagccggaucuccaucuacuggaccaucgucaagcccggcgacauccugcucaucaacagcaccgggaaccugaucgcgccccgcggcuacuucaagauccgguccgggaaguccuccaucauccgcagcgacgccccgaucggcaagugcaacuccgagugcaucacccccaacggcagcauccccaacgacaagcccuuccagaacgugaaccggaucacguacggggccugcccgcgcuacgugaagcagaacacccugaagcucgccaccggcaugcggaacguccccgagaagcagacccgcgggaucuucggcgccaucgccggguucaucgagaacggcugggagggcaugguggacgggugguacggcuuccggcaccagaacuccgaggggacgggccaggccgcggaccucaagagcacccaggccgccaucaaccagaucaacgggaagcugaaccgccugaucgagaagaccaacgagaaguuccaccagaucgagaaggaguucuccgagguggagggccggauccaggaccuggagaaguacgucgaggacaccaagaucgaccuguggagcuacaacgccgagcuccugguggcccuggagaaccagcacacgaucgaccucaccgacuccgagaugaacaagcuguucgagcgcacccgcaagcagcugcgggagaacgcggaggacaugggcaacgggugcuucaagaucuaccacaagugcgacaacgccugcaucggcagcauccgcaacgggaccuacgaccacgacguguaccgggacgaggcccucaacaaccgcuuccagaucaagggcgucgagcugaaguccggguacaaggacuggauccuguggaucagcuucgccaugagcugcuuccuccugugcgugguccugcucggcuucaucaugugggccugccagaagggcaacauccggugcaacaucugcaucuga

SEQ ID NO: 72850 - RNA, 1701 nt, Artificial Sequence; identical to SEQ ID NO: 64047
  derived and/or modified CDS sequence (opt1) from hemagglutinin__InfluenzaA__AFJ77528

SEQ ID NO: 72851 - RNA, 1698 nt, Artificial Sequence
  derived and/or modified CDS sequence (opt1) from hemagglutinin__InfluenzaA__AFJ77550
augaagaccaucaucgcccugagcuacauccucugccagguguucgcccagaagcugcccggcaacgacaacuccaccgcgacgcugugccucgggcaccacgccgucccgaacggcacccuggugaagaccaucaccaacgaccagaucgaggugacgaacgccaccgagcugguccagagcuccagcaccgggcgcaucugcgacagcccccaccagauccucgacggcgagaacugcacccugaucgacgcccugcucggggacccccacugcgacggcuuccagaacaaggagugggaccuguucguggagcggagcaaggccuacuccaacugcuaccccuacgacgugccggacuacgcgagccugcgcucccucgucgccagcuccggcacgcuggaguucaacaacgagagcuucaacuggaccgggguggcccagaacggcaccuccagcgccugcaagcggcgcuccaucaagagcuucuucucccggcugaacuggcuccaccagcugaaguacaaguaccccgcgcugaacgugaccaugcccaacaacgagaaguucgacaagcucuacaucuggggcguccaccaccccagcacggacuccgaccagaucagccuguacgcccaggccagcgggcgcgugaccguguccaccaagcggagccagcagaccgucaucccgaacaucgggucccgccccugggugcggggcgugagcucccgcaucagcaucuacuggacgaucgucaagcccggcgacauccugcucaucaacuccaccgggaaccugaucgcgccccggggcuacuucaagauccgcagcgggaaguccagcaucaugcgguccgacgccccgaucggcaagugcaacagcgagugcaucacccccaacggcuccauccccaacgacaagcccuuccagaacgugaaccgcaucaccuacggggccugcccgcgguacgugaagcagaacacgcugaagcucgccaccggcaugcgcaacguccccgagaagacccgggggaucuucggcgccaucgccggguucaucgagaacggcugggagggcaugguggacgggugguacggcuuccgccaccagaacagcgaggggaccggccaggccgcggaccugaaguccacgcaggccgccaucaaccagaucaacgggaagcugaaccggcucaucgagaagaccaacgagaaguuccaccagaucgagaaggaguucagcgagguggagggccgcauccaggaccuggagaaguacgucgaggacaccaagaucgaccugugguccuacaacgccgagcuccugguggcccuggagaaccagcacaccaucgaccucacggacagcgagaugaacaagcuguucgagcggaccaagaagcagcugcgcgagaacgcggaggacaugggcaacgggugcuucaagaucuaccacaagugcgacaacgccugcaucggcuccauccgcaacgggaccuacgaccacgacguguaccgggacgaggcccucaacaaccgcuuccagaucaagggcgucgagcugaaguccggguacaaggacuggauccuguggaucagcuucgccaucuccugcuuccuccugugcgugguccugcucggcuucaucaugugggccugccagaagggcaacauccggugcagcaucugcaucuga

SEQ ID NO: 72852 - RNA, 1701 nt, Artificial Sequence
  derived and/or modified CDS sequence (opt1) from hemagglutinin__InfluenzaA__AFJ77561
augaagaccaucaucgcccugagcuacauccucugccugguguucgcccagaagcugcccggcaacgacaacuccaccgcgacgcucugccuggggcaccacgccgucccgaacggcacccuggugaagaccaucaccaacgaccagaucgaggugacgaacgccaccgagcucguccagagcuccagcaccgggcgcaucugcgacagcccccaccggauccuggacggcaagaacugcacccugaucgacgcccuccugggggacccccacugcgacggcuuccagaacaaggagugggaccuguucguggagcgcagcaaggccuacuccaacugcuaccccuacgacgugccggacuacgcgagccuccggucccuggucgccagcuccggcacgcuggaguucaacaacgagagcuucaacuggaccgggguggcccagaacggcaccuccuacgccugcaagcgccggagcgugaaguccuucuucagccgccucaacuggcugcacaagcuggaguacaaguaccccgcgcucaacgucaccaugcccaacaacgacaaguucgacaagcuguacaucuggggcgugcaccaccccuccacggacagcgaccagaccucccuguacgcccaggccagcgggcgggugaccgucagcaccaagcgcucccagcagacggugaucccgaacaucgggagccggcccugggugcgcggcgucuccagccggaucuccaucuacuggaccaucgugaagcccggcgacauccuccugaucuacagcaccgggaaccugaucgcgccccgcggcuacuucaagauccgguccgggaaguccuccaucaugcgcagcgacgccccgaucggcaacugcuccagcgagugcaucacccccaacggcuccauccccaacgacaagcccuuccagaacgugaaccggaucacguacggggccugcccgcgcuacgucaagcagaacacccucaagcuggccaccggcaugcggaacgugcccgagaagcagacccgcgggaucuucggcgccaucgccggguucaucgagaacggcugggagggcaugguggacgggugguacggcuuccggcaccagaacagcgaggggacgggccaggccgcggaccugaaguccacccaggccgccaucaaccagaucaacgggaagcucaaccgccugaucgagaagaccaacgagaaguuccaccagaucgagaaggaguucagcgaggucgagggccggauccaggaccuggagaaguacguggaggacaccaagaucgaccucugguccuacaacgccgagcugcugguggcccucgagaaccagcacacgaucgaccugaccgacagcgagaugaacaagcuguucgagcgcacccgcaagcagcuccgggagaacgcggaggacaugggcaacgggugcuucaagaucuaccacaagugcgacaacgccugcaucggcuccauccgcaacgggaccuacgaccacgacgucuaccgggacgaggcccugaacaaccgcuuccagaucaagggcguggagcucaagagcggguacaaggacuggauccuguggaucagcuucgccaucuccugcuuccugcugugcgucgugcuccugggcuucaucaugugggccugccagaagggcaacauccggugcaacaucugcaucuga

SEQ ID NO: 72853 - RNA, 1698 nt, Artificial Sequence
  derived and/or modified CDS sequence (opt1) from hemagglutinin__InfluenzaA__AFJ77572
augaagaccaucaucgcccugagcuacauccucugccagguguucgcccagaagcugcccggcaacgacaacuccaccgcgacgcugugccucgggcaccacgccgucccgaacggcacccuggugaagaccaucaccaacgaccagaucgaggugacgaacgccaccgagcugguccagagcuccagcaccgggcgcaucugcgacagcccccaccagauccucgacggcgagaacugcacccugaucgacgcccugcucggggacccccacugcgacggcuuccagaacaaggagugggaccuguucguggagcggagcaaggccuacuccaacugcuaccccuacgacgugccggacuacgcgagccugcgcucccucgucgccagcuccggcacgcuggaguucaacaacgagagcuucaacuggaccgggguggcccagaacggcaccuccagcgccugcaagcggcgcuccaucaagagcuucuucucccggcugaacuggcuccaccagcugaaguacaaguaccccgcgcugaacgugaccaugcccaacaacgagaaguucgacaagcucuacaucuggggcguccaccaccccagcacggacuccgaccagaucagccuguacgcccaggccagcgggcgcgugaccguguccaccaagcggagccagcagaccgucaucccgaacaucggguccggccccugggugcgcggcgugagcucccggaucagcaucuacuggacgaucgucaagcccggggacauccugcucaucaacuccaccggcaaccugaucgcgccccgcggguacuucaagauccggagcggcaaguccagcaucaugcgcuccgacgccccgaucggcaagugcaacagcgagugcaucacccccaacggguccauccccaacgacaagcccuuccagaacgugaaccggaucaccuacggcgccugcccgcgcuacgugaagcagaacacgcugaagcucgccaccgggaugcggaacguccccgagaagacccgcggcaucuucggggccaucgccggcuucaucgagaacggcugggaggggaugguggacggcugguacggguuccggcaccagaacagcgagggcaccgggcaggccgcggaccugaaguccacgcaggccgccaucaaccagaucaacggcaagcugaaccgccucaucgagaagaccaacgagaaguuccaccagaucgagaaggaguucagcgagguggagggccggauccaggaccuggagaaguacgucgaggacaccaagaucgaccugugguccuacaacgccgagcuccugguggcccuggagaaccagcacaccaucgaccucacggacagcgagaugaacaagcuguucgagcgcaccaagaagcagcugcgggagaacgcggaggacauggggaacggcugcuucaagaucuaccacaagugcgacaacgccugcaucggguccauccgcaacggcaccuacgaccacgacguguaccgcgacgaggcccucaacaaccgguuccagaucaagggggucgagcugaaguccggcuacaaggacuggauccuguggaucagcuucgccaucuccugcuuccuccugugcgugguccugcucggcuucaucaugugggccugccagaaggggaacauccgcugcagcaucugcaucuga

SEQ ID NO: 72854 - RNA, 1701 nt, Artificial Sequence
  derived and/or modified CDS sequence (opt1) from hemagglutinin__InfluenzaA__AFJ77583
augaagaccaucaucacccugagcuacauccucugccugguguucgcccagaagcugcccgucaaggacaacuccacggccacccucugccugggccaccacgcggugccgaacgggacccuggugaagaccaucacgaacgaccacaucgaggucaccaacgccaccgagcucgugcagagcuccagcaccggccgcaucugcgacagcccccaccagauccuggacggggagaacugcacgcugaucgacgcccuccugggcgacccccacugcgacggguuccagaacaaggagugggaccuguucguggagcggagcaccgccuacuccaacugcuaccccuacgacgucccggacuacgccagccuccgcucccugguggcgagcuccggcacccuggaguucaacaacgagagcuucaacuggaccggcguggcccagaacgggacguccagcgccugcaagcggcgcuccaucaagagcuucuucucccggcucaacuggcugcaccagcugaaguacaaguaccccgcccucaacgucaccaugcccaacaacgagaaguucgacaagcuguacaucuggggcgugcaccaccccagcaccgacuccgaccagaucagccuguacgcgcaggccagcgggcgcgugaccgucuccacgaagcggagccagcagaccgugaucccgaacaucggcucccgccccugggugcgcggggucagcucccggaucagcaucuacuggaccaucgugaagcccggcgacauccuccugaucaacuccaccggcaaccugaucgcgccccggggguacuucaagauccgcagcggcaaguccagcaucaugcgguccaacgccccgaucgggaagugcaacagcgagugcaucacgcccaacggcuccauccccaacgacaagcccuuccagaacgugaaccgcaucaccuacggcgccugcccgcgguacgucaagcagaacacccucaagcuggccaccgggaugcgcaacgugcccgagaagcagacgcggggcaucuucggggccaucgccggcuucaucgagaacgggugggagggcaugguggacggcugguacggguuccgccaccagaacagcgagggcaccgggcaggccgccgaccugaaguccacccaggcggccaucaaccagaucaacggcaagcucaaccggcugaucgagaagaccaacgagaaguuccaccagaucgagaaggaguucagcgaggucgaggggcgcauccaggaccuggagaaguacguggaggacacgaagaucgaccucugguccuacaacgccgagcugcugguggcccucgagaaccagcacaccaucgaccugaccgacagcgagaugaacaagcuguucgagcggacccgcaagcagcuccgcgagaacgccgaggacaugggcaacggcugcuucaagaucuaccacaagugcgacaacgcgugcaucggguccauccggaacggcacguacgaccacgacgucuaccgcgacgaggcccugaacaaccgguuccagaucaaggggguggagcugaaguccggcuacaaggacuggauccucuggaucagcuucgccaucuccugcuuccugcugugcgucgugcuccugggguucaucaugugggccugccagaagggcaacauccgcugcaacaucugcaucuga

SEQ ID NO: 72855 - RNA, 1701 nt, Artificial Sequence
  derived and/or modified CDS sequence (opt1) from hemagglutinin__InfluenzaA__AFJ77594
augaagaccaucaucgcccugagcuacauccucugccugguguucgcccagaagcugcccgucaaggacaacuccaccgcgacgcucugccugggccaccacgccgugccgaacgggacccuggugaagaccaucaccaacgaccacaucgaggucacgaacgccaccgagcucgugcagagcuccagcaccggccgcaucugcgacagcccccaccagauccuggacggggagaacugcacccugaucgacgcccuccugggcgacccccacugcgacggguuccagaacaaggagugggaccuguucguggagcggagcacggccuacuccaacugcuaccccuacgacgucccggacuacgcgagccuccgcucccugguggccagcuccggcacccuggaguucaacaacgagagcuucaacuggaccggcguggcccagaacgggaccuccagcgccugcaagcggcgcuccaucaagagcuucuucucccggcucaacuggcugcaccagcugaaguacaaguaccccgcgcucaacgucacgaugcccaacaacgagaaguucgacaagcuguacaucuggggcgugcaccaccccagcaccgacuccgaccagaucagccuguacgcccaggccagcgggcgcgugaccgucuccaccaagcggagccagcagacggugaucccgaacaucggcucccgccccugggugcgcggggucagcucccggaucagcaucuacuggaccaucgugaagcccggcgacauccuccugaucaacuccaccggcaaccugaucgcgccccggggguacuucaagauccgcagcggcaaguccagcaucaugcgguccaacgccccgaucgggaagugcaacagcgagugcaucacccccaacggcuccauccccaacgacaagcccuuccagaacgugaaccgcaucacguacggcgccugcccgcgguacgucaagcagaacacccucaagcuggccaccgggaugcgcaacgugcccgagaagcagacccggggcaucuucggggccaucgccggcuucaucgagaacgggugggagggcaugguggacggcugguacggguuccgccaccagaacagcgagggcacggggcaggccgcggaccugaaguccacccaggccgccaucaaccagaucaacggcaagcucaaccggcugaucgagaagaccaacgagaaguuccaccagaucgagaaggaguucagcgaggucgaggggcgcauccaggaccuggagaaguacguggaggacaccaagaucgaccucugguccuacaacgccgagcugcugguggcccucgagaaccagcacacgaucgaccugaccgacagcgagaugaacaagcuguucgagcggacccgcaagcagcuccgcgagaacgcggaggacaugggcaacggcugcuucaagaucuaccacaagugcgacaacgccugcaucggguccauccggaacggcaccuacgaccacgacgucuaccgcgacgaggcccugaacaaccgguuccagaucaaggggguggagcugaaguccggcuacaaggacuggauccucuggaucagcuucgccaucuccugcuuccugcugugcgucgugcuccugggguucaucaugugggccugccagaagggcaacauccgcugcaacaucugcaucuga

SEQ ID NO: 72856 - RNA, 1701 nt, Artificial Sequence
  derived and/or modified CDS sequence (opt1) from hemagglutinin__InfluenzaA__AFJ77605
augaagaccaucaucgcccugagcuacauccucugccugaucuucgcccagaagcugcccggcaacgacaacuccaccgcgacgcucugccuggggcaccacgccgugccgaacggcacccuggucaagaccaucaccaacgaccagaucgaggugacgaacgccaccgagcucgugcagagcuccagcaccgggaagaucugcgacagcccccaccagauccuggacggcgagaacugcacccugaucgacgcccuccugggggacccccacugcgacggcuuccagaacaaggagugggaccuguucgucgagcgcagcaaggccuacuccaacugcuaccccuacgacgugccggacuacgcgagccuccggucccugguggccagcuccggcacgcuggaguucaacaacgagagcuucaacuggaccggggucgcccagaacggcaccuccagcgccugcaagcgccgguccaacaagagcuucuucucccgccucaacuggcugcaccagcugaaguacaaguaccccgcgcucaacgugaccaugcccaacaacgagaaguucgacaagcuguacaucuggggcgugcaccaccccagcacggacuccgaccagaucagccuguacgcccaggccagcgggcgggucaccguguccaccaagcgcagccagcagaccgugaucccgaacaucgggucccggcccuggguccgcggcgugagcucccggaucagcaucuacuggacgaucgugaagcccggcgacauccuccugaucaacuccaccgggaaccugaucgcgccccgcggcuacuucaagauccggagcgggaaguccagcaucaugcgcuccgacgccccgaucggcaagugcaacagcgagugcaucacccccaacggcuccauccccaacgacaagcccuuccagaacgucaaccggaucaccuacggggccugcccgcgcuacgugaagcagaacacgcucaagcuggccaccggcaugcggaacgugcccgagaagcagacccgcgggaucuucggcgccaucgccggguucaucgagaacggcugggagggcauggucgacgggugguacggcuuccggcaccagaacagcgaggggaccggccaggccgcggaccugaaguccacgcaggccgccaucaaccagaucaacgggaagcucaaccgccugaucgagaagaccaacgagaaguuccaccagaucgagaaggaguucagcgagguggagggccggauccaggaccuggagaaguacguggaggacaccaagaucgaccucugguccuacaacgccgagcugcuggucgcccucgagaaccagcacaccaucgaccugacggacagcgagaugaacaagcuguucgagcgcaccaagaagcagcuccgggagaacgcggaggacaugggcaacgggugcuucaagaucuaccacaagugcgacaacgccugcaucggcuccauccgcaacgggaccuacgaccacgacguguaccgcgacgaggccgugaacaaccgguuccagaucaagggcgucgagcugaaguccggguacaaggacuggauccuguggaucagcuucgccaucuccugcuuccuccugugcgugguccugcucggcuucaucaugugggccugccagaagggcaacauccgcugcaacaucugcaucuga

SEQ ID NO: 72857 - RNA, 1701 nt, Artificial Sequence
  derived and/or modified CDS sequence (opt1) from hemagglutinin__InfluenzaA__AFJ77616
augaagaccaucaucgcccugagcuacauccucugcauggugcuggcccagaagcugcccgucaaggacaacuccaccgcgacgcucugccugggccaccacgccgugccgaacgggacccuggugaagaccaucaccaacgaccacaucgaggucacgaacgccaccgagcucgugcagagcuccagcaccggccgcaucugcgacagcccccaccagauccuggacggggagaacugcacccugaucgacgcccuccugggcgacccccacugcgacggguuccagaacaaggagugggaccuguucguggagcggagcacggccuacuccaacugcuaccccuacgacgucccggacuacgcgagccuccgcucccugguggccagcuccggcacccuggaguucaacaacgagagcuucaacuggaccggcguggcccagaacgggaccuccagcgccugcaagcggcgcuccaucaagagcuucuucucccggcucaacuggcugcaccagcugaaguacaaguaccccgcgcucaacgucacgaugcccaacaacgagaaguucgacaagcuguacaucuggggcgugcaccaccccagcaccgacuccgaccagaucagccuguacgcccaggccagcgggcgcgugaccgucuccaccaagcggagccagcagacggugaucccgaacaucggcucccgccccugggugcgcggggucagcucccggaucagcaucuacuggaccaucgugaagcccggcgacauccuccugaucaacuccaccggcaaccugaucgcgccccggggguacuucaagauccgcagcggcaaguccagcaucaugcgguccaacgccagcaucgggaagugcaacuccgagugcaucaccccgaacggcagcauccccaacgacaagcccuuccagaacgugaaccgcaucacguacggcgccugcccccgguacgucaagcagaacacccucaagcuggccaccgggaugcgcaacgugccggagaagcagacccggggcaucuucggggccaucgccggcuucaucgagaacgggugggagggcaugguggacggcugguacggguuccgccaccagaacuccgagggcacggggcaggccgcggaccugaaguccacccaggccgccaucaaccagaucaacggcaagcucaaccggcugaucgagaagaccaacgagaaguuccaccagaucgagaaggaguucuccgaggucgaggggcgcauccaggaccuggagaaguacguggaggacaccaagaucgaccucuggagcuacaacgccgagcugcugguggcccucgagaaccagcacacgaucgaccugaccgacuccgagaugaacaagcuguucgagcggacccgcaagcagcuccgcgagaacgcggaggacaugggcaacggcugcuucaagaucuaccacaagugcgacaacgccugcaucgggagcauccggaacggcaccuacgaccacgacgucuaccgcgacgaggcccugaacaaccgguuccagaucaaggggguggagcucaagagcggcuacaaggacuggauccuguggaucuccuucgccaucagcugcuuccugcugugcgucgugcuccugggguucaucaugugggccugccagaagggcaacauccgcugcaacaucugcaucuga

SEQ ID NO: 72858 - RNA, 1701 nt, Artificial Sequence
  derived and/or modified CDS sequence (opt1) from hemagglutinin__InfluenzaA__AFJ77627
augaagaccaucaucgcccugagcuacauccucugccuggugcuggcccagaagcuccccgucaaggacaacuccaccgcgacgcugugccugggccaccacgccgugccgaacgggacccucgugaagaccaucaccaacgaccacaucgaggucacgaacgccaccgagcuggugcagagcuccagcaccggccgcaucugcgacagcccccaccagauccuggacggggagaacugcacccucaucgacgcccugcugggcgacccccacugcgacggguuccagaacaaggagugggaccucuucguggagcgguccacggccuacuccaacugcuaccccuacgacgucccggacuacgcgagccugcgcucccugguggccagcuccggcacccucgaguucaacaacgagagcuucaacuggaccggcguggcccagaacgggaccuccagcgccugcaagcggcgcuccaucaagagcuucuucucccggcugaacuggcugcaccagcucaaguacaaguaccccgcgcugaacgucacgaugcccaacaacgagaaguucgacaagcuguacaucuggggcgugcaccaccccagcaccgacuccgaccagaucagccucuacgcccaggccagcgggcgcgugaccgucuccaccaagcggagccagcagacggugaucccgaacaucggcucccgccccugggugcgcggggucagcucccggaucagcaucuacuggaccaucgugaagcccggcgacauccugcugaucaacuccaccggcaaccucaucgcgccccggggguacuucaagauccgcagcggcaaguccagcaucaugcgguccaacgccagcaucgggaagugcaacuccgagugcaucaccccgaacggcagcauccccaacgacaagcccuuccagaacgugaaccgcaucacguacggcgccugcccccgguacgucaagcagaacacccugaagcuggccaccgggaugcgcaacgugccggagaagcagacccggggcaucuucggggccaucgccggcuucaucgagaacgggugggagggcaugguggacggcugguacggguuccgccaccagaacuccgagggcacggggcaggccgcggaccucaagagcacccaggccgccaucaaccagaucaacggcaagcugaaccggcugaucgagaagaccaacgagaaguuccaccagaucgagaaggaguucuccgaggucgaggggcgcauccaggaccucgagaaguacguggaggacaccaagaucgaccuguggagcuacaacgccgagcugcucguggcccuggagaaccagcacacgaucgaccugaccgacuccgagaugaacaagcuguucgagcggacccgcaagcagcuccgcgagaacgcggaggacaugggcaacggcugcuucaagaucuaccacaagugcgacaacgccugcaucgggagcauccggaacggcaccuacgaccacgacgucuaccgcgacgaggcccugaacaaccgguuccagaucaaggggguggagcucaagagcggcuacaaggacuggauccuguggaucuccuucgccaucagcugcuuccugcucugcgucgugcugcugggguucaucaugugggccugccagaagggcaacauccgcugcaacaucugcaucuga

SEQ ID NO: 72859 - RNA, 1701 nt, Artificial Sequence
  derived and/or modified CDS sequence (opt1) from hemagglutinin__InfluenzaA__AFJ77638
augaagaccaucaucgcccugagcuacauccucugccugguguucgcccagaagcugcccggcaacgacaacuccaccgcgacgcucugccuggggcaccacgccgucccgaacggcacccuggugaagaccaucaccaacgaccagaucgaggugacgaacgccaccgagcucguccagagcuccagcaccgggcgcaucugcgacagcccccaccagauccuggacggcgagaacugcacccugaucgacgcccuccugggggacccccacugcgacggcuuccagaacaaggagugggaccuguucguggagcggagcaaggccuacuccaacugcuaccccuacgacgugccggacuacgcgagccuccgcucccuggucgccagcuccggcacgcuggaguucaacaacgagagcuucaacuggaccgggguggcccagaacggcaccuccagcgccugcaagcggcgcuccaacaagagcuucuucucccggcucaacuggcugcaccagcugaaguacaaguaccccgcgcucaacgugaccaugcccaacaacgagaaguucgacaagcuguacaucuggggcguccaccaccccagcacggacuccgaccagaucagccuguacgcccaggccagcgggcgcgugaccguguccaccaagcggagccagcagaccgucaucccgaacaucgggucccgccccugggugcggggcgugagcucccgcaucagcaucuacuggacgaucgucaagcccggcgacauccuccugaucaacuccaccgggaaccugaucgcgccccggggcuacuucaagauccgcagcgggaaguccagcaucaugcgguccgacgccccgaucggcaagugcaacagcgagugcaccacccccaacggcuccauccccaacgacaagcccuuccagaacgugaaccgcaucacguacggggccugcccgcgguacgugaagcagaacacccucaagcuggccaccggcaugcgcaacguccccgagaagcagacccgggggaucuucggcgccaucgccggguucaucgagaacggcugggagggcaugguggacgggugguacggcuuccgccaccagaacagcgaggggacgggccaggccgcggaccugaaguccacccaggccgccaucaaccagaucaacgggaagcucaaccggcugaucggcaagaccaacgagaaguuccaccagaucgagaaggaguucagcgagguggagggccgcauccaggaccuggagaaguacgucgaggacaccaagaucgaccucugguccuacaacgccgagcugcugguggcccucgagaaccagcacacgaucgaccugaccgacagcgagaugaacaagcuguucgagcggaccaagaagcagcuccgcgagaacgcggaggacauggggaacggcugcuucaagaucuaccacaagugcgacaacgccugcaucggguccauccgcaacggcaccuacgaccacgacguguaccgggacgaggcccugaacaaccgcuuccagaucaagggggucgagcugaaguccggcuacaaggacuggauccucuggaucagcuucgccaucuccugcuuccugcugugcgugguccuccugggcuucaucaugugggccugccagaaggggaacauccggugcaacaucugcaucuga

SEQ ID NO: 72860 - RNA, 1701 nt, Artificial Sequence
  derived and/or modified CDS sequence (opt1) from hemagglutinin__InfluenzaA__AFJ77649
augaagaccaucaucgcccugagcuacauccucugccugguguucgcccagaagcugcccggcaacgacaacuccaccgcgacgcucugccuggggcaccacgccgucccgaacggcacccuggugaagaccaucaccaacgaccagaucgaggugacgaacgccaccgagcucguccagagcuccagcaccgggcgcaucugcgacagcccccaccagauccuggacggcgagaacugcacccugaucgacgcccuccugggggacccccacugcgacggcuuccagaacaaggagugggaccuguucguggagcggagcaaggccuacuccaacugcuaccccuacgacgugccggacuacgcgagccuccgcucccuggucgccagcuccggcacgcuggaguucaacaacgagagcuucaacuggaccgggguggcccagaacggcaccuccagcgccugcaagcggcgcuccaacaagagcuucuucucccggcucaacuggcugcaccagcugaaguacaaguaccccgcgcucaacgugaccaugcccaacaacgagaaguucgacaagcuguacaucuggggcguccaccaccccagcacggacuccgaccagaucagccuguacgcccaggccagcgggcgcgugaccguguccaccaagcggagccagcagaccgucaucccgaacaucgggucccgccccugggugcggggcgugagcucccgcaucagcaucuacuggacgaucgucaagcccggcgacauccuccugaucaacaacaccgggaaccugaucgcgccccggggcuacuucaagauccgcaacgggaaguccagcaucaugcgguccgacgccccgaucggcaagugcaacagcgagugcaucacccccaacggcuccauccccaacgacaagcccuuccagaacgugaaccgcaucaccuacggggccugcccgcgguacgugaagcagaacacgcucaagcuggccaccggcaugcgcaacguccccgagaagcagacccgggggaucuucggcgccaucgccggguucaucgagaacggcugggagggcaugguggacgggugguacggcuuccgccaccagaacagcgaggggaccggccaggccgcggaccugaaguccacgcaggccgccaucaaccagaucaacgggaagcucaaccggcugaucggcaagaccaacgagaaguuccaccagaucgagaaggaguucagcgagguggagggccgcauccaggaccuggagaaguacgucgaggacaccaagaucgaccucugguccuacaacgccgagcugcugguggcccucgagaaccagcacaccaucgaccugacggacagcgagaugaacaagcuguucgagcggaccaagaagcagcuccgcgagaacgcggaggacauggggaacggcugcuucaagaucuaccacaagugcgacaacgccugcaucggguccauccgcaacggcaccuacgaccacgacguguaccgggacgaggcccugaacaaccgcuucaagaucaagggggucgagcugaaguccggcuacaaggacuggauccucuggaucuccuucgccaucagcugcuuccugcugugcgugguccuccugggcuucaucaugugggccugccagaaggggaacauccggugcaacaucugcaucuga

SEQ ID NO: 72861 - RNA, 1701 nt, Artificial Sequence; identical to SEQ ID NO: 64227
  derived and/or modified CDS sequence (opt1) from hemagglutinin__InfluenzaA__AFJ77660

SEQ ID NO: 72862 - RNA, 1701 nt, Artificial Sequence; identical to SEQ ID NO: 64227
  derived and/or modified CDS sequence (opt1) from hemagglutinin__InfluenzaA__AFJ77671

SEQ ID NO: 72863 - RNA, 1701 nt, Artificial Sequence; identical to SEQ ID NO: 64227
  derived and/or modified CDS sequence (opt1) from hemagglutinin__InfluenzaA__AFJ77682

SEQ ID NO: 72864 - RNA, 1701 nt, Artificial Sequence
  derived and/or modified CDS sequence (opt1) from hemagglutinin__InfluenzaA__AFJ77693
augaagaccaucaucgcccugagcuacauccucugccugguguucgcccagaagcugcccgucaacgacaacuccaccgcgacgcucugccugggccaccacaccgugccgaacgggacccuggugaagaccaucacgaacgacaacaucgaggucaccaacgccaccgagcucgugcagagcuccagcaccggccgcaucugcgacagcccccaccagauccuggacggggagaacugcacgcugaucgacgcccuccugggcgacccccacugcgacggguuccagaacaaggagugggaccuguucguggagcggagcaccgccuacuccaacugcuaccccuacgacgucccggacuacgccagccuccgcucccugguggcgagcuccggcacccuggaguucaacaacgagagcuucaacuggaccggcguggaccagaacgggacguccagcgccugcaagcggcgcuccaacaagagcuucuucucccggcucaacuggcugcaccagcugaaguacaaguaccccgcccucaacgucaccaugcccaacaacgagaaguucgacaagcuguacaucuggggcgugcaccaccccagcaccgacuccgaccagaucagccuguacgcccaggcgagcgggcgcgugaccgucuccacgaagcggagccagcagaccgugaucccgaacaucggcucccgccccugggugcgcggggucagcucccggaucagcaucuacuggaccaucgugaagcccggcgacauccuccugaucaacuccaccggcaaccugaucgcgccccggggguacuucaagauccgcagcggcaaguccagcaucaugcgguccaacgccccgaucgggaagugcaacagcgagugcaucacgcccaacggcuccauccccaacgacaagcccuuccagaacgugaaccgcaucaccuacggcgccugcccgcgguacgucaagcagaacacccucaagcuggccaccgggaugcgcaacgugcccgagaagcagacgcggggcaucuucggggccaucgccggcuucaucgagaacgggugggagggcaugguggacggcugguacggguuccgccaccagaacuucgagggcaccgggcaggccgccgaccugaaguccacccaggccgcgaucaaccagaucaacggcaagcucaaccggcugaucgagaagaccaacgagaaguuccaccagaucgagaaggaguucuccgaggucgaggggcgcauccaggaccuggagaaguacguggaggacacgaagaucgaccucuggagcuacaacgccgagcugcugguggcccucgagaaccagcacaccaucgaccugaccgacuccgagaugaacaagcuguucgagcggacccgcaagcagcuccgcgagaacgccgaggacaugggcaacggcugcuucaagaucuaccacaagugcgacaacgccugcaucgggagcauccggaacggcacguacgaccacgacgucuaccgcgacgaggcgcugaacaaccgguuccagaucaaggggguggagcugaaguccggcuacaaggacuggauccucuggaucagcuucgccaucagcugcuuccugcugugcgucgugcuccugggguucaucaugugggccugccagaagggcaacauccgcugcaacaucugcaucuga

SEQ ID NO: 72865 - RNA, 1701 nt, Artificial Sequence; identical to SEQ ID NO: 64227
  derived and/or modified CDS sequence (opt1) from hemagglutinin__InfluenzaA__AFJ77704

SEQ ID NO: 72866 - RNA, 1701 nt, Artificial Sequence; identical to SEQ ID NO: 72705
  derived and/or modified CDS sequence (opt1) from hemagglutinin__InfluenzaA__AFJ77715

SEQ ID NO: 72867 - RNA, 1701 nt, Artificial Sequence; identical to SEQ ID NO: 72705
  derived and/or modified CDS sequence (opt1) from hemagglutinin__InfluenzaA__AFJ77726

SEQ ID NO: 72868 - RNA, 1701 nt, Artificial Sequence; identical to SEQ ID NO: 72801
  derived and/or modified CDS sequence (opt1) from hemagglutinin__InfluenzaA__AFJ77737

SEQ ID NO: 72869 - RNA, 1701 nt, Artificial Sequence; identical to SEQ ID NO: 64056
  derived and/or modified CDS sequence (opt1) from hemagglutinin__InfluenzaA__AFJ77748

SEQ ID NO: 72870 - RNA, 1701 nt, Artificial Sequence; identical to SEQ ID NO: 64056
  derived and/or modified CDS sequence (opt1) from hemagglutinin__InfluenzaA__AFJ77759

SEQ ID NO: 72871 - RNA, 1701 nt, Artificial Sequence
  derived and/or modified CDS sequence (opt1) from hemagglutinin__InfluenzaA__AFJ77781
augaagaccaucaucgcccugagcuacauccucugccugguguucgcccagaagcugcccggcaacgacaacuccaccgcgacgcucugccuggggcaccacgccgucccgaacggcaccaucgugaagaccaucaccaacgaccagaucgaggugacgaacgccaccgagcugguccagagcuccagcaccgggggcaucugcgacagcccccaccagauccucgacggggagaacugcacccugaucgacgcccugcucggcgacccccagugcgacggcuuccagaacaagaagugggaccuguucguggagcgcagcaaggccuacuccaacugcuaccccuacgacgugccggacuacgcgagccugcggucccucgucgccagcuccgggacgcuggaguucaacagcgaguccuucgacuggaccggcgugacccagaacgggaccagcuccgccugcaagcgccggagcaacaaguccuucuucagccgccugaacuggcucacgcaccugaaguacaaguaccccgcccugaacgugaccaugcccaacaacgagaaguucgacaagcucuacaucuggggcguccaccaccccgggaccgacuccgaccagaucagccuguacgcgcaggccagcggccggaucaccguguccacgaagcgcagccagcagaccgugaucccgaacaucggcucccggccccgcguccgggacgugagcucccgcaucagcaucuacuggaccaucgugaagcccggggacauccugcucaucaacuccaccggcaaccugaucgcgccccggggguacuucaagauccgcagcggcaaguccagcaucaugcgguccgacgccccgaucggcaagugcaacagcgagugcaucacgcccaacggguccauccccaacgacaagcccuuccagaacgucaaccgcaucaccuacggcgccugcccgcgguacgugaagcagaacacccugaagcucgccaccgggaugcgcaacgugcccgagaagcagacgcggggcaucuucggggccaucgccggcuucaucgagaacggcugggaggggauggucgacggcugguacggguuccgccaccagaacagcgagggcaccgggcaggccgccgaccugaaguccacccaggcggccaucaaccagaucaacggcaagcugaaccggcucaucggcaagaccaacgagaaguuccaccagaucgagaaggaguucagcgagguggaggggcgcauccaggaccuggagaaguacguggaggacacgaagaucgaccugugguccuacaacgccgagcuccuggucgcccuggagaaccagcacaccaucgaccucaccgacagcgagaugaacaagcuguucgagcggaccaagaagcagcugcgcgagaacgccgaggacaugggcaacgggugcuucaagaucuaccacaagugcgacaacgcgugcaucggcuccauccgcaacgggacguacgaccacgacguguaccgggacgaggcccucaacaaccgcuuccagaucaagggcguggagcugaaguccggcuacaaggacuggauccuguggaucagcuucgccaucuccugcuuccuccugugcgucgcccugcucggguucaucaugugggccugccagaagggcaacauccggugcaacaucugcaucuga

SEQ ID NO: 72872 - RNA, 1701 nt, Artificial Sequence; identical to SEQ ID NO: 65819
  derived and/or modified CDS sequence (opt1) from hemagglutinin__InfluenzaA__AFJ77792

SEQ ID NO: 72873 - RNA, 1701 nt, Artificial Sequence; identical to SEQ ID NO: 65819
  derived and/or modified CDS sequence (opt1) from hemagglutinin__InfluenzaA__AFJ77803

SEQ ID NO: 72874 - RNA, 1701 nt, Artificial Sequence; identical to SEQ ID NO: 65819
  derived and/or modified CDS sequence (opt1) from hemagglutinin__InfluenzaA__AFJ77814

SEQ ID NO: 72875 - RNA, 1701 nt, Artificial Sequence; identical to SEQ ID NO: 65819
  derived and/or modified CDS sequence (opt1) from hemagglutinin__InfluenzaA__AFJ77825

SEQ ID NO: 72876 - RNA, 1701 nt, Artificial Sequence; identical to SEQ ID NO: 65819
  derived and/or modified CDS sequence (opt1) from hemagglutinin__InfluenzaA__AFJ77836

SEQ ID NO: 72877 - RNA, 1701 nt, Artificial Sequence; identical to SEQ ID NO: 65819
  derived and/or modified CDS sequence (opt1) from hemagglutinin__InfluenzaA__AFJ77847

SEQ ID NO: 72878 - RNA, 1701 nt, Artificial Sequence
  derived and/or modified CDS sequence (opt1) from hemagglutinin__InfluenzaA__AFJ77858
augaagaccaucaucgcccugagcuacauccucugccugguguucgcccagaagcugcccggcaacgacaacuccaccgcgacgcucugccuggggcaccacgccgucccgaacggcaccaucgugaagaccaucaccaacgaccagaucgaggugacgaacgccaccgagcugguccagagcuccagcaccgggggcaucugcgacagcccccaccagauccucgacggggagaacugcacccugaucgacgcccugcucggcgacccccagugcgacggcuuccagaacaagaagugggaccuguucguggagcgcagcaaggccuacuccaacugcuaccccuacgacgugccggacuacgcgagccugcggucccucgucgccagcuccgggacgcuggaguucaacaacgagagcuucaacuggaccggcgugacccagaacgggaccuccagcgccugcaagcgccgguccaacaacagcuucuucucccgccugaacuggcucacgcaccugaaguucaaguaccccgcccugaacgugaccaugcccaacaacgagaaguucgacaagcucuacaucuggggcguccaccaccccgggaccgacaacgaccagaucagccuguacgcgcaggccuccggccggaucaccgugagcacgcagcgcagccagcagaccgugaucccgaacaucggcucccggccccgcguccgggacauccccagccgcaucuccaucuacuggaccaucgugaagcccggggacaugcugcucaucaacagcaccggcaaccugaucgccccgcggggguacuucaagauccgcuccggcaagagcuccaucaugcggagcgacgcccccaucggcaagugcaacuccgagugcaucacgcccaacgggagcauccccaacgacaagccguuccagaacgugaaccgcaucaccuacggcgccugcccccgguacgucaagcagaacacccugaagcucgcgaccgggaugcgcaacgugcccgagaagcagacgcggggcaucuucggggccaucgccggcuucaucgagaacggcugggaggggaugguggacggcugguacggguuccgccaccagaacuccgagggcaccgggcaggccgccgaccugaaguccacccaggcggccaucaaccagaucaacggcaagcugaacaagcucaucggcaagaccaacgagaaguuccaccagaucgagaaggaguucuccgaggucgaggggcggauccaggaccuggagaaguacguggaggacacgaagaucgaccuguggagcuacaacgccgagcuccugguggcccuggagaaccagcacaccaucgaccucaccgacuccgagaugaacaagcuguucgagcgcaccaagaagcagcugcgggagaacgccgaggacaugggcaacgggugcuucaagaucuaccacaagugcgacaacgcgugcaucggcagcauccgcaacgggacguacgaccacgacgucuaccgcgacgaggcccucaacaaccgguuccagaucaagggcguggagcugaaguccggcuacaaggacuggauccuguggaucagcuucgccaucuccugcuuccucuucugcguggcccugcugggguucaucaugugggccugccagaagggcaacauccgcugcaacaucugcaucuga

SEQ ID NO: 72879 - RNA, 1701 nt, Artificial Sequence
  derived and/or modified CDS sequence (opt1) from hemagglutinin__InfluenzaA__AFJ77869
augaagaccaucaucgccuucagcuacauccugugccucguguucgcccagaagcugcccggcaacgacaacuccaccgcgacgcugugccucgggcaccacgccgucccgaacggcaccaucgugaagaccaucaccaacgaccagaucgaggugacgaacgccaccgagcugguccagagcuccagcaccgggggcaucugcgacagcccccaccagauccuggacggggagaacugcacccucaucgacgcccugcugggcgacccccagugcgacggcuuccagaacaagaagugggaccucuucguggagcgcuccaaggccuacuccaacugcuaccccuacgacgugccggacuacgcgagccugcggucccuggucgccagcuccgggacgcucgaguucaacaacgagagcuucaacuggaccggcgugacccagaacgggaccuccagcgccugcaagcgccgguccaacaacagcuucuucucccgccugaacuggcugacgcaccucaaguucaaguaccccgcccugaacgugaccaugcccaacaacgagaaguucgacaagcuguacaucuggggcguccaccaccccgggaccgacaacgaccagaucagccucuacgcgcaggccuccggccggaucaccgugagcacgaagcgcagccagcagaccgugaucccgaacaucggcucccggccccgcguccgggacauccccagccgcaucuccaucuacuggaccaucgugaagcccggggacauccugcugaucaacagcaccggcaaccucaucgccccgcggggguacuucaagauccgcuccggcaagagcuccaucaugcggagcgacgcccccaucggcaagugcaacuccgagugcaucacgcccaacgggagcauccccaacgacaagccguuccagaacgugaaccgcaucaccuacggcgccugcccccgguacgucaagcagaacacccugaagcuggcgaccgggaugcgcaacgugcccgagaagcagacgcggggcaucuucggggccaucgccggcuucaucgagaacggcugggaggggaugguggacggcugguacggguuccgccaccagaacuccgagggcaccgggcaggccgccgaccucaagagcacccaggcggccaucaaccagaucaacggcaagcugaaccggcugaucggcaagaccaacgagaaguuccaccagaucgagaaggaguucuccgaggucgaggggcgcauccaggaccucgagaaguacguggaggacacgaagaucgaccuguggagcuacaacgccgagcugcucguggcccuggagaaccagcacaccaucgaccugaccgacuccgagaugaacaagcuguucgagcggaccaagaagcagcuccgcgagaacgccgaggacaugggcaacgggugcuucaagaucuaccacaagugcgacaacgcgugcaucggcagcauccgcaacgggacguacgaccacgacgucuaccgggacgaggcccugaacaaccgcuuccagaucaagggcguggagcucaaguccggcuacaaggacuggauccuguggaucagcuucgccaucuccugcuuccugcucugcguggcccugcugggguucaucaugugggccugccagaagggcaacauccggugcaacaucugcaucuga

SEQ ID NO: 72880 - RNA, 1701 nt, Artificial Sequence
  derived and/or modified CDS sequence (opt1) from hemagglutinin__InfluenzaA__AFJ77880
augaagaccaucaucgcccugagcuacauccucugccugguguucgcccagaagcugcccggcaacgacaacuccaccgcgacgcucugccuggggcaccacgccgucccgaacggcaccaucgugaagaccaucaccaacgaccagaucgaggugacgaacgccaccgagcugguccagagcuccagcaccgggggcaucugcaacagcccccaccagauccucgacggggagaacugcacccugaucgacgcccugcucggcgacccccagugcgacggcuuccagaacaagaagugggaccuguucguggagcgcagcaaggccuacuccaacugcuaccccuacgacgugccggacuacgcgagccugcggucccucgucgccagcuccgggacgcuggaguucaacaacgagagcuucaacuggaccggcgugacccagaacgggaccuccagcgccugcaagcgccgguccaacaagagcuucuucucccgccugaacuggcucacgcaccugaaguucaaguaccccgcccugaacgugaccaugcccaacaacgagaaguucgacaagcucuacaucuggggcguccaccaccccgggaccgacaacgaccagaucagccuguacgcgcaggccuccggccggaucaccgugagcacgaagcgcagccagcagaccgugaucccgaacaucggcucccggccccgcguccgggacgugcccagccgcaucuccaucuacuggaccaucgugaagcccggggacauccugcucaucaacagcaccggcaaccugaucgccccgcggggguacuucaagauccgcuccggcaagagcuccaucaugcggagcgacgcccccaucggcaagugcaacuccgagugcaucacgcccaacgggagcauccccaacgacaagccguuccagaacgucaaccgcaucaccuacggcgccugcccccgguacgugaagcagaacacccugaagcucgcgaccgggaugcgcaacgugcccgagaagcagacgcggggcaucuucggggccaucgccggcuucaucgagaacggcugggaggggauggucgacggcugguacggguuccgccaccagaacuccgagggcaccgggcaggccgccgaccugaaguccacccaggcggccaucaaccagaucaacggcaagcugaaccggcucaucggcaagaccaacgagaaguuccaccagaucgagaaggaguucuccgagguggaggggcgcauccaggaccuggagaaguacguggaggacacgaagaucgaccuguggagcuacaacgccgagcuccuggucgcccuggagaaccagcacaccaucgaccucaccgacuccgagaugaacaagcuguucgagcggaccaagaagcagcugcgcgagaacgccgaggacaugggcaacgggugcuucaagaucuaccacaagugcgacaacgcgugcaucggcagcauccgcaacgggacguacgaccacgacguguaccgggacgaggcccucaacaaccgcuuccagaucaagggcguggagcugaaguccggcuacaaggacuggauccuguggaucagcuucgccaucuccugcuuccuccugugcgucgcccugcucggguucaucaugugggccugccagaagggcaacauccggugcaacaucugcaucuga

SEQ ID NO: 72881 - RNA, 1701 nt, Artificial Sequence
  derived and/or modified CDS sequence (opt1) from hemagglutinin__InfluenzaA__AFJ77902
augaagaccaucaucgcccugagcuacauccucugccugguguucgcccagaagcugcccggcaacgacaacuccaccgcgacgcucugccuggggcaccacgccgucccgaacggcaccaucgugaagaccaucaccaacgaccagaucgaggugacgaacgccaccgagcugguccagagcuccagcaccgggggcaucugcgacagcccccaccagauccucgacggggagaacugcacccugaucgacgcccugcucggcgacccccagugcgacggcuuccagaacaagaagugggaccuguucguggagcgcagcaaggccuacuccaacugcuaccccuacgacgugccggacuacgcgagccugcggucccucgucgccagcuccgggacgcuggaguucaacaacgagagcuucaacuggaccggcgugacccagaacgggaccuccagcgccugcaagcgccgguccaacaacagcuucuucucccgccugaacuggcucacgcaccugaaguucaaguaccccgcccugaacgugaccaugcccaacaacgagaaguucgacaagcucuacaucuggggcguccaccaccccgggaccgacaacgaccagaucggccuguacgcgcaggccagcggccggaucaccguguccacgaagcgcagccagcagaccgugaucccgaacaucgggagccggccccgcguccgggacauccccucccgcaucagcaucuacuggaccaucgugaagcccggcgacaugcugcucaucaacuccaccgggaaccugaucgccccgcggggcuacuucaagauccgcagcggcaaguccagcaucaugcgguccgacgcccccaucgggaagugcaacagcgagugcaucacgcccaacggcuccauccccaacgacaagccguuccagaacgugaaccgcaucaccuacggggccugcccccgguacgucaagcagaacacccugaagcucgcgaccggcaugcgcaacgugcccgagaagcagacgcgggggaucuucggcgccaucgccggcuucaucgagaacgggugggagggcaugguggacgggugguacggcuuccgccaccagaacagcgaggggaccggccaggccgccgaccugaaguccacccaggcggccaucaaccagaucaacggcaagcugaaccggcucaucgggaagaccaacgagaaguuccaccagaucgagaaggaguucagcgaggucgagggccgcauccaggaccuggagaaguacguggaggacacgaagaucgaccugugguccuacaacgccgagcuccugguggcccuggagaaccagcacaccaucgaccucaccgacagcgagaugaacaagcuguucgagcggaccaagaagcagcugcgcgagaacgccgaggacauggggaacggcugcuucaagaucuaccacaagugcgacaacgcgugcaucggguccauccgcaacggcacguacgaccacgacgucuaccgggacgaggcccucaacaaccgcuuccagaucaagggcguggagcugaaguccggguacaaggacuggauccuguggaucuccuucgccaucagcugcuuccuccugugcguggcccugcucggcuucaucaugugggccugccagaaggggaacauccggugcaacaucugcaucuga

SEQ ID NO: 72882 - RNA, 1701 nt, Artificial Sequence
  derived and/or modified CDS sequence (opt1) from hemagglutinin__InfluenzaA__AFJ77913
augaagaccaucaucgcccugagcuacauccucugccugguguucgcccagaagcugcccggcaacgacaacuccaccgcgacgcucugccuggggcaccacgccgucccgaacggcaccaucgugaagaccaucaccaacgaccagaucgaggugacgaacgccaccgagcugguccagagcuccagcaccgggggcaucugcgacagcccccaccagauccucgacggggagaacugcacccugaucgacgcccugcucggcgacccccagugcgacggcuuccagaacaagaagugggaccuguucguggagcgcagcaaggccuacuccaacugcuaccccuacgacgugcaggacuacgcgagccugcggucccucgucgccagcuccgggacgcuggaguucaacaacgagagcuucaacuggaccggcgugacccagaacgggaccuccagcgccugcaagcgccgguccaacaacagcuucuucucccgccugaacuggcucacgcaccugaaguucaaguacccggcccugaacgugaccaugcccaacaacgagaaguucgacaagcucuacaucuggggcguccaccaccccgggaccgacaacgaccagaucagccuguacgcgcaggccuccggccggaucaccgugagcacgaagcgcagccagcagaccgugauccccaacaucggcucccggccgcgcguccgggacauccccagccgcaucuccaucuacuggaccaucgugaagcccggggacaugcugcucaucaacagcaccggcaaccugaucgcgccccggggguacuucaagauccgcuccggcaagagcuccaucaugcggagcgacgccccgaucggcaagugcaacuccgagugcaucacgcccaacgggagcauccccaacgacaagcccuuccagaacgugaaccgcaucaccuacggcgccugcccgcgguacgucaagcagaacacccugaagcucgccaccgggaugcgcaacgugcccgagaagcagacgcggggcaucuucggggccaucgccggcuucaucgagaacggcugggaggggaugguggacggcugguacggguuccgccaccagaacuccgagggcaccgggcaggccgccgaccugaaguccacccaggcggccaucaaccagaucaacggcaagcugaaccggcucaucggcaagaccaacgagaaguuccaccagaucgagaaggaguucuccgaggucgaggggcgcauccaggaccuggagaaguacguggaggacacgaagaucgaccuguggagcuacaacgccgagcuccugguggcccuggagaaccagcacaccaucgaccucaccgacuccgagaugaacaagcuguucgagcggaccaagaagcagcugcgcgagaacgccgaggacaugggcaacgggugcuucaagaucuaccacaagugcgacaacgcgugcaucggcagcauccgcaacgggacguacgaccacgacgucuaccgggacgaggcccucaacaaccgcuuccagaucaagggcguggagcugaaguccggcuacaaggacuggauccuguggaucagcuucgccaucuccugcuuccuccugugcguggcccugcucggguucaucaugugggccugccagaagggcaacauccggugcaacaucugcaucuga

SEQ ID NO: 72883 - RNA, 1701 nt, Artificial Sequence; identical to SEQ ID NO: 65137
  derived and/or modified CDS sequence (opt1) from hemagglutinin__InfluenzaA__AFJ77924

SEQ ID NO: 72884 - RNA, 1701 nt, Artificial Sequence
  derived and/or modified CDS sequence (opt1) from hemagglutinin__InfluenzaA__AFJ77935
augaagaccaucaucgcccugagcuacauccucugccugguguucgcccagaagcugcccggcaacgacaacuccaccgcgacgcucugccuggggcaccacgccgucccgaacggcaccguggugaagaccaucaccaacgaccagaucgaggucacgaacgccaccgagcuggugcagagcuccagcaccgggggcaucugcgacagcccccaccagauccucgacggggagaacugcacccugauggacgcccugcucggcgacccccagugcgacggcuuccagaacaagaagugggaccuguucguggagcgcagcaaggccuacuccaacugcuaccccuacgacgucccggaccacgcgagccugcggucccucguggccagcuccgggacgcuggaguucaacaacgagagcuucaacuggaccggcgugacccagaacgggaccuccagcgccugcaagcgccgguccaacaacagcuucuucucccgccugaacuggcucacgcaccugaaguucaaguaccccgcccugaacgucaccaugcccaacaacgagaccuucgacaagcucuacaucuggggcgugcaccaccccgggaccgacaacgaccagaucagccuguacgcgcaggccuccggccggaucacggugagcaccaagcgcagccagcagaccgucaucccgaacaucggcucccggccccgcgugcgggacauccccagccgcaucuccaucuacuggaccaucgugaagcccggggacauccugcucaucaacagcacgggcaaccugaucgccccgcggggguacuucaagauccgcuccggcaagagcuccaucaugcggagcgacgcccccaucggcaagugcaacuccgagugcaucacccccaacgggagcauccccaacgacaagccguuccagaacgucaaccgcaucaccuacggcgccugcccccgguacgugaagcagaacacccugaagcucgcgacggggaugcgcaacgugcccgagaagcagacccggggcaucuucggggccaucgccggcuucaucgagaacggcugggaggggauggucgacggcugguacggguuccgccaccagaacuccgagggcaccgggcaggccgccgaccugaaguccacccaggcggccaucaaccagaucaacggcaagcugaaccggcucaucggcaagacgaacgagaaguuccaccagaucgagaaggaguucuccgagguggaggggcgcauccaggaccuggagaaguacguggaggacaccaagaucgaccuguggagcuacaacgccgagcuccuggucgcccuggagaaccagcacaccaucgaccucaccgacuccgagaugaacaagcuguucgagcggacgaagaagcagcugcgcgagaacgccgaggacaugggcaacgggugcuucaagaucuaccacaagugcgacaacgcgugcaucggcagcauccgcaacgggaccuacgaccacgacguguaccgggacgaggcccucaacaaccgcuuccagaucaagggcguggagcugaaguccggcuacaaggacuggauccuguggaucagcuucgccaucuccugcuuccuccugugcgucgcccugcucggguucaucaugugggccugccagaagggcaacauccggugcaacaucugcaucuga

SEQ ID NO: 72885 - RNA, 1701 nt, Artificial Sequence
  derived and/or modified CDS sequence (opt1) from hemagglutinin__InfluenzaA__AFJ77946
augaagaccaucaucgcccugagcuacauccucugccugguguucgcccagaagcugcccggcaacgacaacuccaccgcgacgcucugccuggggcaccacgccgucccgaacggcaccaucgugaagaccaucaccaacgaccagaucgaggugacgaacgccaccgagcugguccagagcuccagcaccgggggcaucugcgacagcccccaccagauccucgacggggagaacugcacccugaucgacgcccugcucggcgacccccagugcgacggcuuccagaacaagaagugggaccuguucguggagcgcagcaaggccuacuccaacugcuaccccuacgacgugccggacuacgcgagccugcggucccucgucgccagcuccgggacgcuggaguucaacaacgagagcuucaacuggaccggcgugacccagaacgggaccuccagcgccugcaagcgccgguccaacaacagcuucuucucccgccugaacuggcucacgcaccugaaguucaaguaccccgcccugaacgugaccaugcccaacaacgagaaguucgacaagcucuacaucuggggcguccaccaccccgggaccgacaacgaccagaucagccuguacgcgcaggccuccggccggaucaccgugagcacgaagcgcagccagcagaccgugaucccgaacaucggcucccggccccgcguccgggacauccccagccgcaucuccaucuacuggaccaucgugaagcccggggacaugcugcucaucaacagcaccggcaaccugaucgccccgcggggguacuucaagauccgcuccggcaagagcuccaucaugcggagcgacgcccccaucggcaagugcaacuccgagugcaucacgcccaacgggagcauccccaacgacaagccguuccagaacgugaaccgcaucaccuacggcgccugcccccgguacaucaagcagaacacccugaagcucgcgaccgggaugcgcaacguccccgagaagcagacgcggggcaucuucggggccaucgccggcuucaucgagaacggcugggaggggaugguggacggcugguacggguuccgccaccagaacuccgagggcaccgggcaggccgccgaccugaaguccacccaggcggccaucaaccagaucaacggcaagcugaaccggcucaucggcaagaccaacgagaaguuccaccagaucgagaaggaguucuccgagguggaggggcgcauccaggaccuggagaaguacgucgaggacacgaagaucgaccuguggagcuacaacgccgagcuccugguggcccuggagaaccagcacaccaucgaccucaccgacuccgagaugaacaagcuguucgagcggaccaagaagcagcugcgcgagaacgccgaggacaugggcaacgggugcuucaagaucuaccacaagugcgacaacgcgugcaucggcagcauccgcaacgggacguacgaccacgacguguaccgggacgaggcccucaacaaccgcuuccagaucaagggcgucgagcugaaguccggcuacaaggacuggaucaucuggaucagcuucgccaucuccugcuuccugcucugcguggcccugcugggguucaucaugugggccugccagaagggcaacauccggugcaacaucugcaucuga

SEQ ID NO: 72886 - RNA, 1701 nt, Artificial Sequence; identical to SEQ ID NO: 65777
  derived and/or modified CDS sequence (opt1) from hemagglutinin__InfluenzaA__AFJ77957

SEQ ID NO: 72887 - RNA, 1701 nt, Artificial Sequence; identical to SEQ ID NO: 64654
  derived and/or modified CDS sequence (opt1) from hemagglutinin__InfluenzaA__AFJ77968

SEQ ID NO: 72888 - RNA, 1701 nt, Artificial Sequence
  derived and/or modified CDS sequence (opt1) from hemagglutinin__InfluenzaA__AFJ77979
augaagaccaucaucgcccugagcuacauccucugccugguguucgcccagaagcugcccggcaacgacaacuccaccgcgacgcucugccuggggcaccacgccgucccgaacggcaccaucgugaagaccaucaccaacgaccagaucgaggugacgaacgccaccgagcugguccagagcuccagcaccgggggcaucugcgacagcccccaccagauccucgacggggagaacugcacccugaucgacgcccugcucggcgacccccagugcgacggcuuccagaacaagaagugggaccuguucguggagcgcuccaaggccuacuccaacugcuaccccuacgacgugccggacuacgcgagccugcggucccucgucgccagcuccgggacgcuggaguucaacaacgagagcuucaacuggaccggcgugacccagaacgggaccuccagcgccugcaagcgccgguccaacaacagcuucuucucccgccugaacuggcucacgcaccugaaguucaaguaccccgcccugaacgugaccaugcccaacaacgagaaguucgacaagcucuacaucuggggcguccaccaccccgggaccgacaacgaccagaucuuccuguacgcgcaggccagcggccggaucaccguguccacgaagcgcagccagcagaccgugaucccgaacaucggcagccggccccgcguccggaacauccccucccgcaucagcaucuacuggaccaucgugaagcccggggacauccugcucaucaacuccaccggcaaccugaucgccccgcggggguacuucaagauccgcagcggcaaguccagcaucaugcgguccgacgcccccaucggcaagugcaacagcgagugcaucacgcccaacggguccauccccaacgacaagccguuccagaacgugaaccgcaucaccuacggcgccugcccccgguacgucaagcagaacacccugaagcucgcgaccgggaugcgcaacgugcccgagaagcagacgcggggcaucuucggggccaucgccggcuucaucgagaacggcugggaggggaugguggacggcugguacggguuccgccaccagaacagcgagggcaucgggcaggccgccgaccugaaguccacccaggcggccaucaaccagaucaacggcaagcugaaccggcucaucggcaagaccaacgagaaguuccaccagaucgagaaggaguucagcgaggucgaggggcgcauccaggaccuggagaaguacguggaggacaccaagaucgaccugugguccuacaacgccgagcuccugguggcccuggagaaccagcacacgaucgaccucaccgacagcgagaugaacaagcuguucgagcggaccaagaagcagcugcgcgagaacgccgaggacaugggcaacgggugcuucaagaucuaccacaagugcgacaacgcgugcaucggcuccauccgcaacgggaccuacgaccacgacgucuaccgggacgaggcccucaacaaccgcuuccagaucaagggcguggagcugcggagcggcuacaaggacuggauccuguggaucuccuucgccaucagcugcuuccuccugugcguggcccugcucggguucaucaugugggccugccagaagggcaacauccgcugcaacaucugcaucuga

SEQ ID NO: 72889 - RNA, 1701 nt, Artificial Sequence
  derived and/or modified CDS sequence (opt1) from hemagglutinin__InfluenzaA__AFJ77990
augaagaccaucaucgcccugagcuacauccucugccugguguucgcccagaagcugcccggcaacgacaacuccaccgcgacgcucugccuggggcaccacgccgucccgaacggcaccaucgugaagaccaucaccaacgaccagaucgaggugacgaacgccaccgagcugguccagagcuccagcaccgggggcaucugcgacagcccccaccagauccucgacggggagaacugcacccugaucgacgcccugcucggcgacccccagugcgacggcuuccagaacaagaagugggaccuguucguggagcgcagcaaggccuacuccaacugcuaccccuacgacgugccggacuacgcgagccugcggucccucgucgccagcuccgggacgcuggaguucaacaacgagagcuucaacuggaccggcgugacccagaacgggaccuccagcgccugcaagcgccgguccaacaacagcuucuucucccgccugaacuggcucacgcaccugaaguucaaguaccccgcccugaacgugaccaugcccaacaacgagaaguucgacaagcucuacaucuggggcguccaccaccccgggaccgacaacgaccagaucuuccuguacgcgcaggccagcggccggaucaccguguccacgaagcgcagccagcagaccgugaucccgaacaucggcagccggccccgcguccggaacauccccucccgcaucagcaucuacuggaccaucgugaagcccggggacauccugcucaucaacuccaccggcaaccugaucgccccgcggggguacuucaagauccgcagcggcaaguccagcaucaugcgguccgacgcccccaucggcaagugcaacagcgagugcaucacgcccaacggguccauccccaacgacaagccguuccagaacgugaaccgcaucaccuacggcgccugcccccgguacgucaagcagaacacccugaagcucgcgaccgggaugcgcaacgugcccgagaagcagacgcggggcaucuucggggccaucgccggcuucaucgagaacggcugggaggggaugguggacggcugguacggguuccgccaccagaacagcgagggcaucgggcaggccgccgaccugaaguccacccaggcggccaucaaccagaucaacggcaagcugaaccggcucaucggcaagaccaacgagaaguuccaccagaucgagaaggaguucagcgaggucgaggggcgcauccaggaccuggagaaguacguggaggacaccaagaucgaccugugguccuacaacgccgagcuccugguggcccuggagaaccagcacacgaucgaccucaccgacagcgagaugaacaagcuguucgagcggaccaagaagcagcugcgcgagaacgccgaggacaugggcaacgggugcuucaagaucuaccacaagugcgacaacgcgugcaucggcuccauccgcaacgggaccuacgaccacgacgaguaccgggacgaggcccucaacaaccgcuuccagaucaagggcgucgagcugaaguccggcuacaaggacuggauccuguggaucuccuucgccaucagcugcuuccuccugugcgugacgcugcucggguucaucaugugggccugccagaagggcaacauccggugcaacaucugcaucuga

SEQ ID NO: 72890 - RNA, 1701 nt, Artificial Sequence
  derived and/or modified CDS sequence (opt1) from hemagglutinin__InfluenzaA__AFJ78001
augaagaccaucaucgcccugagcuacauccucugccugguguucgcccagaagcugcccggcaacgacaacuccaccgcgacgcucugccuggggcaccacgccgucccgaacggcaccaucgugaagaccaucaccaacgaccagaucgaggugacgaacgccaccgagcugguccagagcuccagcaccgggggcaucugcgacagcccccaccagauccucgacgggaagaacugcacccugaucgacgcccugcucggcgacccccagugcgacgacuuccagaacaagaagugggaccuguucguggagcgcagcaaggccuacuccaacugcuaccccuacgacgugccggacuacgcgagccugcggucccucgucgccagcuccggcacgcuggaguucaacaacgagagcuucaacuggaccggggugacccagaacggcaccuccagcgccugcaagcgccgguccaacaacagcuucuucucccgccugaacuggcucacgcaccugaaguucaaguaccccgcccugaacgugaccaugcccaacaacgagaaguucgacaagcucuacaucuggggcguccaccaccccgggaccgacaacgaccagaucuuccuguacgcgcaggccagcgggcggaucaccguguccacgaagcgcagccagcagaccgugaucccgaacaucggcagccggccccgcguccggaacauccccucccgcaucagcaucuacuggaccaucgugaagcccggcgacauccugcucaucaacuccaccgggaaccugaucgccccgcggggcuacuucaagauccgcagcgggaaguccagcaucaugcgguccgacgcccccaucggcaagugcaacagcgagugcaucacgcccaacggcuccauccccaacgacaagccguuccagaacgugaaccgcaucaccuacggggccugcccccgguacgucaagcagaacacccugaagcucgcgaccggcaugcgcaacgugcccgagaagcagacgcgggggaucuucggcgccaucgccggguucaucgagaacggcugggagggcaugguggacgggugguacggcuuccgccaccagaacagcgaggggaucggccaggccgccgaccugaaguccacccaggcggccaucaaccagaucaacgggaagcugaaccggcucaucggcaagaccaacgagaaguuccaccagaucgagaaggaguucagcgaggucgagggccgcauccaggaccuggagaaguacguggaggacaccaagaucgaccugugguccuacaacgccgagcuccugguggcccuggagaaccagcacacgaucgaccucaccgacagcgagaugaacaagcuguucgagcggaccaagaagcagcugcgcgagaacgccgaggacauggggaacggcugcuucaagaucuaccacaagugcgacaacgcgugcaucggguccauccgcaacggcaccuacgaccacgacgucuaccgggacgaggcccucaacaaccgcuuccagaucaaggggguggagcugaaguccggcuacaaggacuggauccuguggaucuccuucgccaucagcugcuuccuccugugcgugacgcugcucggcuucaucaugugggccugccagaaggggaacauccggugcaacaucugcaucuga

SEQ ID NO: 72891 - RNA, 1701 nt, Artificial Sequence
  derived and/or modified CDS sequence (opt1) from hemagglutinin__InfluenzaA__AFJ78012
augaagaccaucaucgcccugagcuacauccucugccugguguucgcccagaagcugcccggcaacgacaacuccaccgcgacgcucugccuggggcaccacgccgucccgaacggcaccaucgugaagaccaucaccaacgaccagaucgaggugacgaacgccaccgagcugguccagagcuccagcaccgggggcaucugcgacagcccccaccagauccucgacggggagaacugcacccugaucgacgcccugcucggcgacccccagugcgacggcuuccagaacaagaagugggaccuguucguggagcgcagcaaggcccacuccaacugcuaccccuacgacgugccggacuacgcgagccugcggucccucgucgccagcuccgggacgcuggaguucaacaacgagagcuucaacuggaccggcgugacccagaacgggaccuccagcgccugcaagcgccgguccaacaacagcuucuucucccgccugaacuggcucacgcaccugaaguucaaguaccccgcccugaacgugaccaugcccaacaacgagaaguucgacaagcucuacaucuggggcguccaccaccccgggaccgacaacgaccagaucuuccuguacgcgcaggccagcggccggaucaccguguccacgaagcgcagccagcagaccgugaucccgaacaucggcagccggccccgcguccggaacauccccucccgcaucagcaucuacuggaccaucgugaagcccggggacauccugcucaucaacuccaccggcaaccugaucgccccgcggggguacuucaagauccgcagcggcaaguccagcaucaugcgguccgacgcccccaucggcaagugcaacagcgagugcaucacgcccaacggguccauccccaacgacaagccguuccagaacgugaaccgcaucaccuacggcgccugcccccgguacgucaagcagaacacccugaagcucgcgaccgggaugcgcaacgugcccgagaagcagacgcggggcaucuucggggccaucgccggcuucaucgagaacggcugggaggggaugguggacggcugguacggguuccgccaccagaacagcgagggcaucgggcaggccgccgaccugaaguccacccaggcggccaucgaccagaucaacggcaagcugaaccggcucaucggcaagaccaacgagaaguuccaccagaucgagaaggaguucagcgaggucgaggggcgcauccaggaccuggagaaguacguggaggacaccaagaucgaccugugguccuacaacgccgagcuccugguggcccuggagaaccagcacacgaucgaccucaccgacagcgagaugaacaagcuguucgagcggaccaagaagcagcugcgcgagaacgccgaggacaugggcaacgggugcuucaagaucuaccacaagugcgacaacgcgugcaucggcuccauccgcaacgggaccuacgaccacgacgucuaccgggacgaggcccucaacaaccgcuuccagaucaagggcguggagcugaaguccggcuacaaggacuggauccuguggaucuccuucgccaucagcugcuuccuccugugcguggcccugcucggguucaucaugugggccugccagaagggcaacauccggugcaacaucugcaucuga

SEQ ID NO: 72892 - RNA, 1701 nt, Artificial Sequence
  derived and/or modified CDS sequence (opt1) from hemagglutinin__InfluenzaA__AFJ78023
augaagaccaucaucgcccugagcuacauccucugccugguguucgcccagaagcugcccggcaacgacaacuccaccgcgacgcucugccuggggcaccacgccgucccgaacggcaccaucgugaagaccaucaccaacgaccagaucgaggugacgaacgccaccgagcugguccagagcuccagcaccgggggcaucugcgacagcccccaccagauccucgacggggagaacugcacccugaucgacgcccugcucggcgacccccagugcgacggcuuccagaacaagaagugggaccuguucguggagcgcagcaaggccuacuccaacugcuaccccuacgacgugccggacuacgcgagccugcggucccucgucgccagcuccgggacgcuggaguucaacaacgagagcuucaacuggaccggcgugacccagaacgggaccuccagcgccugcaagcgcaaguccaacaacagcuucuucucccggcugaacuggcucacgcaccugaaguucaaguaccccgcccugaacgugaccaugcccaacaacgagaaguucgacaagcucuacaucuggggcguccaccaccccgggaccgacaacgaccagaucuuccuguacgcgcaggccagcggccgcaucaccguguccacgaagcggagccagcagaccgugaucccgaacaucggcagccgcccccggguccgcaacauccccucccggaucagcaucuacuggaccaucgugaagcccggggacauccugcucaucaacuccaccggcaaccugaucgccccgcgcggguacuucaagauccggagcggcaaguccagcaucaugcgcuccgacgcccccaucggcaagugcaacagcgagugcaucacgcccaacggguccauccccaacgacaagccguuccagaacgugaaccggaucaccuacggcgccugcccccgcuacgucaagcagaacacccugaagcucgcgaccgggaugcggaacgugcccgagaagcagacgcgcggcaucuucggggccaucgccggcuucaucgagaacggcugggaggggaugguggacggcugguacggguuccggcaccagaacagcgagggcaucgggcaggccgccgaccugaaguccacccaggcggccaucaaccagaucaacggcaagcugaaccgccucaucggcaagaccaacgagaaguuccaccagaucgagaaggaguucagcgaggucgaggggcggauccaggaccuggagaaguacguggaggacaccaagaucgaccugugguccuacaacgccgagcuccugguggcccuggagaaccagcacacgaucgaccucaccgacagcgagaugaacaagcuguucgagcgcaccaagaagcagcugcgggagaacgccgaggacaugggcaacgggugcuucaagaucuaccacaagugcgacaacgcgugcaucggcuccauccgcaacgggaccuacgaccacgacgucuaccgcgacgaggcccucaacaaccgguuccagaucaagggcguggagcugaaguccggcuacaaggacuggauccuguggaucuccuucgccaucagcugcuuccuccugugcguggcccugcucggguucaucaugugggccugccagaagggcaacauccgcugcaacaucugcaucuga

SEQ ID NO: 72893 - RNA, 1701 nt, Artificial Sequence; identical to SEQ ID NO: 64654
  derived and/or modified CDS sequence (opt1) from hemagglutinin__InfluenzaA__AFJ78034

SEQ ID NO: 72894 - RNA, 1701 nt, Artificial Sequence
  derived and/or modified CDS sequence (opt1) from hemagglutinin__InfluenzaA__AFJ78045
augaagaccaucaucgcccugagcuacauccucugccugguguucgcccagaagcugcccggcaacgacaacuccaccgcgacgcucugccuggggcaccacgccgucccgaacggcaccaucgugaagaccaucaccaacgaccagaucgaggugacgaacgccaccgagcugguccagagcuccagcaccgggggcaucugcgacagcccccaccagauccucgacggggagaacugcacccugaucgacgcccugcucggcgacccccagugcgacggcuuccagaacaagaagugggaccuguucguggagcgcagccgggccuacuccaacugcuaccccuacgacgugccggacuacgcgagccugcgcucccucgucgccagcuccgggacgcuggaguucaacaacgagagcuucaacuggaccggcgugacccagaacgggaccuccagcgccugcaagcggcgcuccaacaacagcuucuucucccggcugaacuggcucacgcaccugaaguucaaguaccccgcccugaacgugaccaugcccaacaacgagaaguucgacaagcucuacaucuggggcguccaccaccccgggaccgacaacgaccagaucuuccuguacgcgcaggccagcggccgcaucaccguguccacgaagcggagccagcagaccgugaucccgaacaucggcagccgcccccggguccgcaacauccccucccggaucagcaucuacuggaccaucgugaagcccggggacauccugcucaucaacuccaccggcaaccugaucgccccgcgcggguacuucaagauccggagcggcaaguccagcaucaugcgcuccgacgcccccaucggcaagugcaacagcgagugcaucacgcccaacggguccauccccaacgacaagccguuccagaacgugaaccggaucaccuacggcgccugcccccgcuacgucaagcagaacacccugaagcucgcgaccgggaugcggaacgugcccgagaagcagacgcgcggcaucuucggggccaucgccggcuucaucgagaacggcugggaggggaugguggacggcugguacggguuccggcaccagaacagcgagggcauggggcaggccgccgaccugaaguccacccaggcggccaucaaccagaucaacggcaagcugaaccgccucaucggcaagaccaacgagaaguuccaccagaucgagaaggaguucagcgaggucgaggggcggauccaggaccuggagaaguacguggaggacaccaagaucgaccugugguccuacaacgccgagcuccugguggcccuggagaaccagcacacgaucgaccucaccgacagcgagaugaacaagcuguucgagcgcaccaagaagcagcugcgcgagaacgccgaggacaugggcaacgggugcuucaagaucuaccacaagugcgacaacgcgugcaucggcuccauccggaacgggaccuacgaccacgacgucuaccgcgacgaggcccucaacaaccgguuccagaucaagggcguggagcugaaguccggcuacaaggacuggauccuguggaucuccuucgccaucagcugcuuccuccugugcguggcccugcucggguucaucaugugggccugccagaagggcaacaucaagugcaacaucugcaucuga

SEQ ID NO: 72895 - RNA, 1701 nt, Artificial Sequence; identical to SEQ ID NO: 64654
  derived and/or modified CDS sequence (opt1) from hemagglutinin__InfluenzaA__AFJ78056

SEQ ID NO: 72896 - RNA, 1701 nt, Artificial Sequence
  derived and/or modified CDS sequence (opt1) from hemagglutinin__InfluenzaA__AFJ78067
augaagaccaucaucgcccugagcuacauccucugccugguguucgcccagaagcugcccggcaacgacaacuccaccgcgacgcucugccuggggcaccacgccgucccgaacggcaccaucgugaagaccaucaccaacgaccagaucgaggugacgaacgccaccgagcugguccagagcuccagcaccgggggcaucugcgacagcccccaccagauccucgacggggagaacugcacccugaucgacgcccugcucggcgacccccagugcgacggcuuccagaacaagaagugggaccuguucguggagcgcagcaaggccuacuccaacugcuaccccuacgacgugccggacuacgcgagccugcggucccucgucgccagcuccgggacgcuggaguucaacaacgagagcuucaacuggaccggcgugacccagaacgggaccuccagcgccugcaagcgccgguccaacaacagcuucuucucccgccugaacuggcucacgcaccugaaguucaaguaccccgcccugaacgugaccaugcccaacaacgagaaguucgacaagcucuacaucuggggcguccaccaccccgggaccgacaacgaccagaucuuccuguacgcgcaggccagcggccggaucaccguguccacgaagcgcagccagcagaccgugaucccgaacaucggcagccggccccgcguccggaacauccccucccgcaucagcaucuacuggaccaucgugaagcccggggacauccugcucaucaacuccaccggcaaccugaucgccccgcggggguacuucaagauccgcagcggccgguccagcaucaugcgcuccgacgcccccaucggcaagugcaacagcgagugcaucacgcccaacggguccauccccaacgacaagccguuccagaacgugaaccggaucaccuacggcgccugcccccgcuacgucaagcagaacacccugaagcucgcgaccgggaugcggaacgugcccgagaagcagacgcgcggcaucuucggggccaucgccggcuucaucgagaacggcugggaggggaugguggacggcugguacggguuccggcaccagaacagcgagggcaucgggcaggccgccgaccugaaguccacccaggcggccaucaaccagaucaacggcaagcugaaccgccucaucggcaagaccaacgagaaguuccaccagaucgagaaggaguucagcgaggucgaggggcggauccaggaccuggagaaguacguggaggacaccaagaucgaccugugguccuacaacgccgagcuccugguggcccuggagaaccagcacacgaucgaccucaccgacagcgagaugaacaagcuguucgagcgcaccaagaagcagcugcgcgagaacgccgaggacaugggcaacgggugcuucaagaucuaccacaagugcgacaacgcgugcaucggcuccauccggaacgggaccuacgaccacgacgucuaccgcgacgaggcccucaacaaccgguuccagaucaagggcguggagcugaaguccggcuacaaggacuggauccuguggaucuccuucgccaucagcugcuuccuccugugcguggcccugcucggguucaucaugugggccugccagaagggcaacauccgcugcaacaucugcaucuga

SEQ ID NO: 72897 - RNA, 1701 nt, Artificial Sequence
  derived and/or modified CDS sequence (opt1) from hemagglutinin__InfluenzaA__AFJ78078
augaagaccaucaucgcccugagcuacauccucugccugguguucgcccagaagcugcccggcaacgacaacuccaccgcgacgcucugccuggggcaccacgccgucccgaacggcaccaucgugaagaccaucaccaacgaccagaucgaggugacgaacgccaccgagcugguccagagcuccagcaccgggggcaucugcgacagcccccaccagauccucgacggggagaacugcacccugaucgacgcccugcucggcgacccccagugcgacggcuuccagaacaagaagugggaccuguucguggagcgcagcaaggccuacuccaacugcuaccccuacgacgugccggacuacgcgagccugcggucccucgucgccagcuccgggacgcuggaguucaacaacgagagcuucaacuggaccggcgugacccagaacgggaccuccagcgccugcaagcgccgguccaacaacagcuucuucucccgccugaacuggcucacgcaccugaaguucaaguaccccgcccugaacgugaccaugcccaacaacgagaaguucgacaagcucuacaucuggggcguccaccaccccgggaccgacaacgaccagaucuuccuguacgcgcaggccagcggccggaucaccguguccacgaagcgcagccagcagaccgugaucccgaacaucggcagccggccccgcguccggaacauccccucccgcaucagcaucuacuggaccaucgugaagcccggggacauccugcucaucaacuccaccggcaaccugaucgccccgcggggguacuucaagauccgcagcggcaaguccagcaucaugcgguccgacgcccccaucgacaagugcaacagcgagugcaucacgcccaacggcuccauccccaacgacaagccguuccagaacgugaaccgcaucaccuacggggccugcccccgguacgucaagcagaacacccugaagcucgcgaccggcaugcgcaacgugcccgagaagcagacgcgggggaucuucggcgccaucgccggguucaucgagaacggcugggagggcaugguggacgggugguacggcuuccgccaccagaacagcgaggggaucggccaggccgccgaccugaaguccacccaggcggccaucgaccagaucaacgggaagcugaaccggcucaucggcaagaccaacgagaaguuccaccagaucgagaaggaguucagcgaggucgagggccgcauccaggaccuggagaaguacguggaggacaccaagaucgaccugugguccuacaacgccgagcuccugguggcccuggagaaccagcacacgaucgaccucaccgacagcgagaugaacaagcuguucgagaagaccaagaagcagcugcgggagaacgccgaggacauggggaacggcugcuucaagaucuaccacaagugcgacaacgcgugcaucggguccauccgcaacggcaccuacgaccacgacgucuaccgcgacgaggcccucaacaaccgguuccagaucaaggggguggagcugaaguccggcuacaaggacuggauccuguggaucuccuucgccaucagcugcuuccuccugugcguggcccugcucggcuucaucaugugggccugccagaaggggaacauccgcugcaacaucugcaucuga

SEQ ID NO: 72898 - RNA, 1701 nt, Artificial Sequence; identical to SEQ ID NO: 72821
  derived and/or modified CDS sequence (opt1) from hemagglutinin__InfluenzaA__AFJ78089

SEQ ID NO: 72899 - RNA, 1701 nt, Artificial Sequence; identical to SEQ ID NO: 65852
  derived and/or modified CDS sequence (opt1) from hemagglutinin__InfluenzaA__AFJ78100

SEQ ID NO: 72900 - RNA, 1701 nt, Artificial Sequence
  derived and/or modified CDS sequence (opt1) from hemagglutinin__InfluenzaA__AFJ78111
augaagaccaucaucgcccugagcuacauccucugccugguguucgcccagaagcugcccggcaacgacaacuccaccgcgacgcucugccuggggcaccacgccgucccgaacggcaccaucgugaagaccaucaccaacgaccagaucgaggugacgaacgccaccgagcugguccagagcuccagcaccgggggcaucugcgacagcccccaccagauccucgacggggagaacugcacccugaucgacgcccugcucggcgacccccagugcgacggcuuccagaacaagaagugggaccuguucguggagcgcagcaaggccuacuccaacugcuaccccuacgacgugccggacuacgcgagccugcggucccucgucgccagcuccgggacgcuggaguucaacaacgagagcuucaacuggaccggcgugacccagaacgggaccuccagcgccugcaagcgccgguccaacaacagcuucuucucccgccugaacuggcucacgcaccugaaguucaaguaccccgcccugaacgugaccaugcccaacaacgagaacuucgacaagcucuacaucuggggcguccaccaccccgggaccgacaacgaccagaucuuccuguacgcgcaggccagcggccggaucaccguguccacgaagcgcagccagcagaccgugaucccgaacaucggcagccggccccgcguccggaacauccccucccgcaucagcaucuacuggaccaucgugaagcccggggacauccugcucaucaacuccaccggcaaccugaucgccccgcggggguacuucaagauccgcagcggcaaguccagcaucaugcgguccgacgcccccaucggcaagugcaacagcgagugcaucacgcccaacggguccauccccaacgacaagccguuccagaacgugaaccgcaucaccuacggcgccugcccccgguacgucaagcagaacacccugaagcucgcgaccgggaugcgcaacgugcccgagaagcagacgcggggcaucuucggggccaucgccggcuucaucgagaacggcugggaggggaugguggacggcugguacggguuccgccaccagaacagcgagggcaucgggcaggccgccgaccugaaguccacccaggcggccaucgaccagaucaacggcaagcugaaccggcucaucggcaagaccaacgagaaguuccaccagaucgagaaggaguucagcgaggucgaggggcgcauccaggaccuggagaaguacguggaggacaccaagaucgaccugugguccuacaacgccgagcuccugguggcccuggagaaccagcacacgaucgaccucaccgacagcgagaugaacaagcuguucgagaagaccaagaagcagcugcgggagaacgccgaggacaugggcaacgggugcuucaagaucuaccacaagugcgacaacgcgugcaucggcuccauccgcaacgggaccuacgaccacgacgucuaccgcgacgaggcccucaacaaccgguuccagaucaagggcguggagcugaaguccggcuacaaggacuggauccuguggaucuccuucgccaucagcugcuuccuccugugcguggcccugcucggguucaucaugugggccugccagaagggcaacauccgcugcaacaucugcaucuga

SEQ ID NO: 72901 - RNA, 1701 nt, Artificial Sequence
  derived and/or modified CDS sequence (opt1) from hemagglutinin__InfluenzaA__AFJ78122
augaagaccaucaucgcccugagcuacauccucugccugaucuucgcccagaagcugcccggcaacgacaacuccaccgcgacgcucugccuggggcaccacgccgugccgaacggcaccaucgucaagaccaucaccaacgaccagaucgaggugacgaacgccaccgagcuggugcagagcuccagcaccgggggcaucugcgacagcccccaccagauccucgacggggagaacugcacccugaucgacgcccugcucggcgacccccagugcgacggcuuccagaacaagaagugggaccuguucgucgagcgcagcaaggccuacuccaacugcuaccccuacgacgugccggacuacgcgagccugcggucccucguggccagcuccgggacgcuggaguucaacaacgagagcuucaacuggaccggcgucacccagaacgggaccuccagcgccugcaagcgccgguccaacaacagcuucuucucccgccugaacuggcucacgcaccugaaguucaaguaccccgcccugaacgugaccaugcccaacaacgagaaguucgacaagcucuacaucuggggcgugcaccaccccgggaccgacaacgaccagaucuuccuguacgcgcaggccagcggccggaucaccgucuccacgaagcgcagccagcagaccgugaucccgaacaucggcagccggccccgcgugcggaacauccccucccgcaucagcaucuacuggaccaucgucaagcccggggacauccugcucaucaacuccaccggcaaccugaucgccccgcggggguacuucaagauccgcagcggccgguccagcaucaugcgcuccgacgcccccaucgacaagugcaacagcgagugcaucacgcccaacggcuccauccccaacgacaagccguuccagaacgugaaccggaucaccuacggggccugcccccgcuacgugaagcagaacacccugaagcucgcgaccggcaugcggaacguccccgagaagcagacgcgcgggaucuucggcgccaucgccggguucaucgagaacggcugggagggcaugguggacgggugguacggcuuccggcaccagaacagcgaggggaucggccaggccgccgaccugaaguccacccaggcggccaucgaccagaucaacgggaagcugaaccgccucauccggaagaccaacgagaaguuccaccagaucgagaaggaguucagcgagguggagggccgcauccaggaccuggagaaguacgucgaggacaccaagaucgaccugugguccuacaacgccgagcuccugguggcccuggagaaccagcacacgaucgaccucaccgacagcgagaugaacaagcuguucgagaagaccaagaagcagcugcgcgagaacgccgaggacaugggcaacgggugcuucaagaucuaccacaagugcgacaacgcgugcaucggcuccauccggaacgggaccuacgaccacgacguguaccgcgacgaggcccucaacaaccgguuccagaucaagggcgucgagcugaaguccggguacaaggacuggauccuguggaucuccuucgccaucagcugcuuccuccugugcguggcccugcucggcuucaucaugugggccugccagaagggcaacauccgcugcaacaucugcaucuga

SEQ ID NO: 72902 - RNA, 1701 nt, Artificial Sequence
  derived and/or modified CDS sequence (opt1) from hemagglutinin__InfluenzaA__AFJ78144
augaagaccaucaucgcccugagcuacauccucugccugguguucgcccagaagcugcccggcaacgacaacuccaccgcgacgcucugccuggggcaccacgccgucccgaacggcaccaucgugaagaccaucaccaacgaccagaucgaggugacgaacgccaccgagcugguccagagcuccagcaccggggagaucugcgacagcccccaccagauccucgacggcgagaacugcacccugaucgacgcccugcucggggacccccagugcgacggcuuccagaacaagaagugggaccuguucguggagcgcagcaaggccuacuccaacugcuaccccuacgacgugccggacuacgcgagccugcggucccucgucgccagcuccggcacgcuggaguucaacaacgagagcuucaacuggaccggggugacccagaacggcaccuccagcuccugcauccgccggagcaacaacuccuucuucagccgccugaacuggcucacgcaccugaaguucaaguaccccgcccugaacgugaccaugcccaacaacgagaaguucgacaagcucuacaucuggggcguccaccaccccgggaccgacaacgaccagaucuuccuguacgcccaggcguccgggcggaucaccgugagcacgaagcgcagccagcagaccgugaucccgaacaucggcucccggccccgcguccggaacauccccagccgcaucuccaucuacuggaccaucgugaagcccggcgacauccugcucaucaacagcaccgggaaccugaucgccccgcggggcuacuucaagauccgcuccgggaaguccuccaucaugcggagcgacgcccccaucggcaagugcaacuccgagugcaucacgcccaacggcagcauccccaacgacaagccguuccagaacgugaaccgcaucaccuacggggccugcccccgguacgucaagcagaacacccugaagcucgccaccggcaugcgcaacgugcccgagaagcagacgcgggggaucuucggcgcgaucgccggguucaucgagaacggcugggagggcaugguggacgggugguacggcuuccgccaccagaacuccgaggggaucggccaggccgccgaccucaagagcacccaggccgcgaucgaccagaucaacgggaagcugaaccggcugaucggcaagaccaacgagaaguuccaccagaucgagaaggaguucuccgaggucgagggccgcauccaggaccuggagaaguacguggaggacaccaagguggaccuguggagcuacaacgccgagcuccuggucgcccuggagaaccagcacacgaucgaccucaccgacuccgagaugaacaagcuguucgagaagaccaagaagcagcugcgggagaacgccgaggacauggggaacggcugcuucaagaucuaccacaagugcgacaacgccugcaucgggagcauccgcaacggcaccuacgaccacgacguguaccgcgacgaggcgcucaacaaccgguuccagaucaaggggguggagcugaaguccggcuacaaggacuggauccuguggaucagcuucgccaucuccugcuuccuccugugcgucgcccugcucggcuucaucaugugggccugccagaaggggaacauccgcugcaacaucugcaucuga

SEQ ID NO: 72903 - RNA, 1701 nt, Artificial Sequence; identical to SEQ ID NO: 72902
  derived and/or modified CDS sequence (opt1) from hemagglutinin__InfluenzaA__AFJ78155

SEQ ID NO: 72904 - RNA, 1701 nt, Artificial Sequence
  derived and/or modified CDS sequence (opt1) from hemagglutinin__InfluenzaA__AFJ78166
augaagaccaucaucgcccugagcuacauccucugccugguguucgcccagaagcugcccggcaacgacaacuccaccgcgacgcucugccuggggcaccacgccgucccgaacggcaccaucgugaagaccaucaccaacgaccagaucgaggugacgaacgccaccgagcugguccagagcuccagcaccggggagaucugcgacagcccccaccagauccucgacggcgagaacugcacccugaucgacgcccugcucggggacccccagugcgacggcuuccagaacaagaagugggaccuguucguggagcgcagcaaggccuacuccaacugcuaccccuacgacgugccggacuacgcgagccugcggucccucgucgccagcuccggcacgcuggaguucaacaacgagagcuucaacuggaccggggugacccagaacggcaccuccagcgccugcauccgccgguccaacaacagcuucuucucccgccugaacuggcucacgcaccugaaguucaaguaccccgcccugaacgugaccaugcccaacaacgaggaguucgacaagcucuacaucuggggcguccaccaccccgggaccgacaacgaccagaucuuccuguacgcgcaggccagcgggcggaucaccguguccacgaagcgcagccagcagaccgugaucccgaacaucggcagccggccccgcguccggaacauccccucccgcaucagcaucuacuggaccaucgugaagcccggcgacauccugcucaucaacuccaccgggaaccugaucgccccgcggggcuacuucaagauccgcagcgggaaguccagcaucaugcgguccgacgcccccaucggcaagugcaacagcgagugcaucacgcccaacggcuccauccccaacgacaagccguuccagaacgugaaccgcaucaccuacggggccugcccccgguacgucaagcagaacacccugaagcucgcgaccggcaugcgcaacgugcccgagaagcagacgcgggggaucuucggcgccaucgccggguucaucgagaacggcugggagggcaugguggacgggugguacggcuuccgccaccagaacagcgaggggaucggccaggccgccgaccugaaguccacccaggcggccaucgaccagaucaacgggaagcugaaccggcucaucggcaagaccaacgagaaguuccaccagaucgagaaggaguucagcgaggucgagggccgcauccaggaccuggagaaguacguggaggacaccaagaucgaccugugguccuacaacgccgagcuccugguggcccuggagaaccagcacacgaucgaccucaccgacagcgagaugaacaagcuguucgagaagaccaagcggcagcugcgcgagaacgccgaggacauggggaacggcugcuucaagaucuaccacaagugcgacaacgcgugcaucggguccauccgcaacggcaccuacgaccacgacgucuaccgggacgaggcccucaacaaccgcuuccagaucaaggggguggagcugaaguccggcuacaaggacuggauccuguggaucuccuucgccaucagcugcuuccuccugugcguggcccugcucggcuucaucaugugggccugccagaaggggaacauccggugcaacaucugcaucuga

SEQ ID NO: 72905 - RNA, 1701 nt, Artificial Sequence; identical to SEQ ID NO: 65753
  derived and/or modified CDS sequence (opt1) from hemagglutinin__InfluenzaA__AFJ78177

SEQ ID NO: 72906 - RNA, 1701 nt, Artificial Sequence
  derived and/or modified CDS sequence (opt1) from hemagglutinin__InfluenzaA__AFJ78188
augaagaccaucaucgcccugagcuacauccucugccugguguucgcccagaagcugcccggcaacgacaacuccaccgcgacgcucugccuggggcaccacgccgucccgaacggcaccaucgugaagaccaucaccaacgaccagaucgaggugacgaacgccaccgagcugguccagagcuccagcaccggggagaucugcgacagcccccaccagauccucgacggcgagaacugcacccugaucgacgcccugcucggggacccccagugcgacggcuuccagaacaagaagugggaccuguucguggagcgcagcaaggccuacuccaacugcuaccccuacgacgugccggacuacgcgagccugcggucccucgucgccagcuccggcacgcuggaguucaacaacgagagcuucaacuggaccggggugacccagaacggcaccuccagcgccugcauccgccgguccaacaacagcuucuucucccgccugaacuggcucacgcaccugaaguucaaguaccccgcccugaacgugaccaugcccaacaacgagaaguucgacaagcucuacaucuggggcguccaccaccccgggaccgacaacgaccagaucuuccuguacgcgcaggccagcgggcggaucaccguguccacgaagcgcagccagcagaccgugaucccgaacaucggcagccggccccgcauccggaacauccccucccgcaucagcaucuacuggaccaucgucaagcccggcgacauccugcucaucaacuccaccgggaaccugaucgccccgcggggcuacuucaagauccgcagcgggaaguccagcaucaugcgguccgacgcccccaucggcaagugcaacagcgagugcaucacgcccaacggcuccauccccaacgacaagccguuccagaacgugaaccgcaucaccuacggggccugcccccgguacgugaagcagaacacccugaagcucgcgaccggcaugcgcaacguccccgagaagcagacgcgggggaucuucggcgccaucgccggguucaucgagaacggcugggagggcaugguggacgggugguacggcuuccgccaccagaacagcgaggggaccggccaggccgccgaccugaaguccacccaggcggccaucgaccagaucaacgggaagcugaaccggcucaucggcaagaccaacgagaaguuccaccagaucgagaaggaguucagcgagguggagggccgcauccaggaccuggagaaguacgucgaggacacgaagaucgaccugugguccuacaacgccgagcuccugguggcccuggagaaccagcacaccaucgaccucaccgacagcgagaugaacaagcuguucgagaagaccaagaagcagcugcgggagaacgccgaggacauggggaacggcugcuucaagaucuaccacaagugcgacaacgcgugcaucggguccauccgcaacggcacguacgaccacgacguguaccgcgacgaggcccucaacaaccgguuccagaucaagggggucgagcugaaguccggcuacaaggacuggauccuguggaucuccuucgccaucagcugcuuccuccugugcguggcccugcucggcuucaucaugugggccugccagaaggggaacauccgcugcaacaucugcaucuga

SEQ ID NO: 72907 - RNA, 1701 nt, Artificial Sequence
  derived and/or modified CDS sequence (opt1) from hemagglutinin__InfluenzaA__AFJ78210
augaagaccaucaucgcccugagcuacauccucugccugguguucgcccagaagcugcccggcaacgacaacuccaccgcgacgcucugccuggggcaccacgccgucccgaacggcaccaucgugaagaccaucaccaacgaccagaucgaggugacgaacgccaccgagcugguccagagcuccagcaccggggagaucugcgacagcccccaccagauccucgacggcgagaacugcacccugaucgacgcccugcucggggacccccagugcgacggcuuccagaacaagaagugggaccuguucguggagcgcagcaaggccuacuccaacugcuaccccuacgacgugccggacuacgcgagccugcggucccucgucgccagcuccggcacgcuggaguucaacaacgagagcuucaacuggaccggggugacccagaacggcaccuccagcgccugcauccgccgguccaacaacagcuucuucucccgccugaacuggcucacgcaccugaaguucaaguaccccgcccugaacgugaccaugcccaacaacgagaaguucgacaagcucuacaucuggggcguccaccaccccgggaccgacaacgaccagaucuuccuguacgcgcaggccagcgggcggaucaccguguccacgaagcgcagccagcagaccgugaucccgaacaucggcagccggccccgcguccggaacauccccucccgcaucagcaucuacuggaccaucgugaagcccggcgacauccugcucaucaacuccaccgggaaccugaucgccccgcggggcuacuucaagauccgcagcgggaaguccagcaucaugcgguccgacgcccccaucggcaagugcaacagcgagugcaucacgcccaacggcuccauccccaacgacaagccguuccagaacgugaaccgcaucaccuacggggccugcccccgguacgucaagcagaacacccugaagcucgcgaccggcaugcgcaacgugcccgagaagcagacgcgggggaucuucggcgccaucgccggguucaucgagaacggcugggagggcaugguggacgggugguacggcuuccgccaccagaacagcgaggggaccggccaggccgccgaccugaaguccacccaggcggccaucgaccagaucaacgggaagcugaaccggcucaucggcaagaccaacgagaaguuccaccagaucgagaaggaguucagcgaggucgagggccgcauccaggaccuggagaaguacguggaggacacgaagaucgaccugugguccuacaacgccgagcuccugguggcccuggagaaccagcacaccaucgaccucaccgacagcgagaugaacaagcuguucgagaagaccaagaagcagcugcgggagaacgccgaggacauggggaacggcugcuucaagaucuaccacaagugcgacaacgcgugcaucggguccauccgcaacggcacguacgaccacgacgucuaccgcgacgaggcccucaacaaccgguuccagaucaaggggaucgagcugaaguccggcuacaaggacuggauccuguggaucuccuucgccaucagcugcuuccuccugugcguggcccugcucggcuucaucaugugggccugccagaaggggaacauccgcugcaacaucugcaucuga

SEQ ID NO: 72908 - RNA, 1701 nt, Artificial Sequence; identical to SEQ ID NO: 72832
  derived and/or modified CDS sequence (opt1) from hemagglutinin__InfluenzaA__AFJ78221

SEQ ID NO: 72909 - RNA, 1701 nt, Artificial Sequence
  derived and/or modified CDS sequence (opt1) from hemagglutinin__InfluenzaA__AFJ78232
augaagaccaucaucgcccugagcuacauccucugccugguguucgcccagaagcugcccggcaacgacaacuccaccgcgacgcucugccuggggcaccacgccgucccgaacggcaccaucgugaagaccaucaccaacgaccagaucgaggugacgaacgccaccgagcugguccagagcuccagcaccgggaagaucugcgacagcccccaccagauccucgacggcgagaacugcacccugaucgacgcccugcucggggacccccagugcgacggcuuccagaacaagaagugggaccuguucguggagcgcagcaaggccuacuccaacugcuaccccuacgacgugccggacuacgcgagccugcggucccucgucgccagcuccggcacgcuggaguucaacaacgagagcuucaacuggaccggggugacccagaacggcaccuccagcgccugcauccgccgguccaacaacagcuucuucucccgccugaacuggcucacgcaccugaaguucaaguaccccgcccugaacgugaccaugcccaacaacgaggaguucgacaagcucuacaucuggggcguccaccaccccgggaccgacaacgaccagaucuuccuguacgcgcaggccagcgggcggaucaccguguccacgaagcgcagccagcagaccgugaucccgaacaucggcagccggccccgcguccggaacauccccucccgcaucagcaucuacuggaccaucgugaagcccggcgacauccugcucaucaacuccaccgggaaccugaucgccccgcggggcuacuucaagauccgcagcgggaaguccagcaucaugcgguccgacgcccccaucggcaagugcaacagcgagugcaucacgcccaacggcuccauccccaacgacaagccguuccagaacgugaaccgcaucaccuacggggccugcccccgguacgucaagcagaacacccugaagcucgcgaccggcaugcgcaacgugcccgagaagcagacgcgggggaucuucggcgccaucgccggguucaucgagaacggcugggagggcaugguggacgggugguacggcuuccgccaccagaacagcgaggggaccggccaggccgccgaccugaaguccacccaggcggccaucgaccagaucaacgggaagcugaaccggcucaucggcaagaccaacgagaaguuccaccagaucgagaacgaguucagcgaggucgagggccgcauccaggaccuggagaaguacguggaggacacgaagaucgaccugugguccuacaacgccgagcuccugguggcccuggagaaccagcacaccaucgaccucaccgacagcgagaugaacaagcuguucgagaagaccaagaagcagcugcgggagaacgccgaggacauggggaacggcugcuucaagaucuaccacaagugcgacaacgcgugcaucggguccauccgcaacggcacguacgaccacgacgucuaccgcgacgaggcccucaacaaccgguuccagaucaaggggguggagcugaaguccggcuacaaggacuggauccuguggaucuccuucgccaucagcugcuuccuccugugcguggcccugcucggcuucaucaugugggccugccagaaggggaacauccgcugcaacaucugcaucuga

SEQ ID NO: 72910 - RNA, 1701 nt, Artificial Sequence
  derived and/or modified CDS sequence (opt1) from hemagglutinin__InfluenzaA__AFJ78243
augaagaccaucaucgcccugagcuacauccucugccugguguucgcccagaagcugcccggcaacgacaacuccaccgcgacgcucugccuggggcaccacgccgucccgaacggcaccaucgugaagaccaucaccaacgaccagaucgaggugacgaacgccaccgagcugguccagagcuccagcaccggggagaucugcgacagcccccaccagauccucgacggcgagaacugcacccugaucgacgcccugcucggggacccccagugcgacggcuuccagaacaagaagugggaccuguucguggagcgcagcaaggccuacuccaacugcuaccccuacgacgugccggacuacgcgagccugcggucccucgucgccagcuccggcacgcuggaguucaacaacgagagcuucaacuggaccggggugacccagaacggcaccuccagcgccugcauccgccgguccaacaacagcuucuucucccgccugaacuggcucacgcaccugaaguucaaguaccccgcccugaacgugaccaugcccaacaacgaggaguucgacaagcucuacaucuggggcguccaccaccccgggaccgacaacgaccagaucuuccuguacgcgaaggccagcgggcggaucaccguguccacgaagcgcagccagcagaccgugaucccgaacaucggcagccggccccgcguccggaacauccccucccgcaucagcaucuacuggaccaucgugaagcccggcgacauccugcucaucaacuccaccgggaaccugaucgccccgcggggcuacuucaagauccgcagcgggaaguccagcaucaugcgguccgacgcccccgugggcaagugcaacagcgagugcaucacgcccaacggcuccauccccaacgacaagccguuccagaacgucaaccgcaucaccuacggggccugcccccgguacgugaagcagaacacccugaagcucgcgaccggcaugcgcaacgugcccgagaagcagacgcgggggaucuucggcgccaucgccggguucaucgagaacggcugggagggcauggucgacgggugguacggcuuccgccacaagaacagcgaggggaccggccaggccgccgaccugaaguccacccaggcggccaucgaccagaucaacgggaagcugaaccggcucaucggcaagaccaacgagaaguuccaccagaucgagaaggaguucagcgagguggagggccgcauccaggaccuggagaaguacguggaggacacgaagaucgaccugugguccuacaacgccgagcuccuggucgcccuggagaaccagcacaccaucgaccucaccgacagcgagaugaacaagcuguucgagaagaccaagaagcagcugcgggagaacgccgaggacauggggaacggcugcuucaagaucuaccacaagugcgacaacgcgugcaucggguccauccgcaacggcacguacgaccacgacguguaccgcgacgaggcccucaacaaccgguuccagaucaaggggguggagcugaaguccggcuacaaggacuggauccuguggaucuccuucgccaucagcugcuuccuccugugcgucgcccugcucggcuucaucaugugggccugccagaaggggaacauccgcugcaacaucugcaucuga

SEQ ID NO: 72911 - RNA, 1701 nt, Artificial Sequence
  derived and/or modified CDS sequence (opt1) from hemagglutinin__InfluenzaA__AFJ78254
augaagaccaucaucgcccugagcuacauccucugccugguguucgcccagaagcugcccggcaacgacaacuccaccgcgacgcucugccuggggcaccacgccgucccgaacggcaccaucgugaagaccaucaccaacgaccagaucgaggugacgaacgccaccgagcugguccagagcuccagcaccggggagaucugcgacagcccccaccagauccucgacggcgagaacugcacccugaucgacgcccugcucggggacccccagugcgacggcuuccagaacaagaagugggaccuguucguggagcgcagcaaggccuacuccaacugcuaccccuacgacgugccggacuacgcgagccugcggucccucgucgccagcuccggcacgcuggaguucaacaacgagagcuucaacuggaccggggugacccagaacggcaccuccagcgccugcauccgccgguccaacaacagcuucuucucccgccugaacuggcucacgcaccugaaguucaaguaccccgcccugaacgugaccaugcccaacaacgaggaguucgacaagcucuacaucuggggcguccaccaccccgggaccgacaacgaccagaucuuccuguacgcgcaggccagcgggcggaucaccguguccacgaagcgcagccagcagaccgugaucccgaacaucggcagccggccccgcguccggaacauccccucccgcaucagcaucuacuggaccaucgugaagcccggcgacauccugcucaucaacuccaccgggaaccugaucgccccgcggggcuacuucaagauccgcagcgggaaguccagcaucaugcgguccgacgcccccaucggcaagugcaacagcgagugcaucacgcccaacggcuccauccccaacgacaagccguuccagaacgugaaccgcaucaccuacggggccugcccccgguacgucaagcagaacacccugaagcucgcgaccggcaugcgcaacgugcccgagaagcagacgcgggggaucuucggcgccaucgccggguucaucgagaacggcugggagggcaugguggacgggugguacggcuuccgccaccagaacagcgaggggaucggccaggccgccgaccugaaguccacccaggcggccaucgaccagaucaacgggaagcugaaccggcucaucggcaagaccaacgagaaguuccaccagaucgagaaggaguucagcgaggucgagggccgcauccaggaccuggagaaguacguggaggacaccaagguggaccugugguccuacaacgccgagcuccuggucgcccuggagaaccagcacacgaucgaccucaccgacagcgagaugaacaagcuguucgagaagaccaagaagcagcugcgggagaacgccgaggacauggggaacggcugcuucaagaucuaccacaagugcgacaacgcgugcaucggguccauccgcaacggcaccuacgaccacgacguguaccgcgacgaggcccucaacaaccgguuccagaucaaggggguggagcugaaguccggcuacaaggacuggauccuguggaucuccuucgccaucagcugcuuccuccugugcgucgcccugcucggcuucaucaugugggccugccagaaggggaacauccgcugcaacaucugcaucuga

SEQ ID NO: 72912 - RNA, 1701 nt, Artificial Sequence; identical to SEQ ID NO: 72911
  derived and/or modified CDS sequence (opt1) from hemagglutinin__InfluenzaA__AFJ78265

SEQ ID NO: 72913 - RNA, 1701 nt, Artificial Sequence
  derived and/or modified CDS sequence (opt1) from hemagglutinin__InfluenzaA__AFJ78276
augaagaccaucaucgcccugagcuacauccucugccugguguucgcccagaagcugcccggcaacgacaacuccaccgcgacgcucugccuggggcaccacgccgucccgaacggcaccaucgugaagaccaucaccaacgaccagaucgaggugacgaacgccaccgagcugguccagagcuccagcaccggggagaucugcgacagcccccaccagauccucgacggcgagaacugcacccugaucgacgcccugcucggggacccccagugcgacggcuuccagaacaagaagugggaccuguucguggagcgcagcaaggccuacuccaacugcuaccccuacgacgugccggacuacgcgagccugcggucccucgucgccagcuccggcacgcuggaguucaacaacgagagcuucaacuggaccggggugacccagaacggcaccuccagcgccugcauccgccgguccaacaacagcuucuucucccgccugaacuggcucacgcaccugaaguucaaguaccccgcccugaacgugaccaugcccaacaacgagaaguucgacaagcucuacaucuggggcguccaccaccccgggaccgacaacgaccagaucuuccuguacgcgcaggccagcgggcggaucaccguguccacgaagcgcagccagcagaccgugaucccgaacaucggcagccggccccgcguccggaacauccccucccgcaucagcaucuacuggaccaucgugaagcccggcgacauccugcucaucaacuccaccgggaaccugaucgccccgcggggcuacuucaagauccgcagcgggaaguccagcaucaugcgguccgacgcccccaucggcaagugcaacagcgagugcaucacgcccaacggcuccauccccaacgacaagccguuccagaacgugaaccgcaucaccuacggggccugcccccgguacgucaagcagaacacccugaagcucgcgaccggcaugcgcaacgugcccgagaagcagacgcgggggaucuucggcgccaucgccggguucaucgagaacggcugggagggcaugguggacgggugguacggcuuccgccaccagaacagcgaggggaucggccaggccgccgaccugaaguccacccaggcggccaucgaccagaucaacgggaagcugaaccggcucaucggcaagaccaacgagaaguuccaccagaucgagaaggaguucagcgaggucgagggccgcauccaggaccuggagaaguacguggaggacaccaagguggaccugugguccuacaacgccgagcuccuggucgcccuggagaaccagcacacgaucgaccucaccgacagcgagaugaacaagcuguucgagaagaccaagaagcagcugcgggagaacgccgaggacauggggaacggcugcuucaagaucuaccacaagugcgacaacgcgugcaucggguccauccgcaacggcaccuacgaccacgacguguaccgcgacgaggcccucaacaaccgguuccagaucaaggggguggagcugaaguccggcuacaaggacuggauccuguggaucuccuucgccaucagcugcuuccuccugugcgucgcccugcucggcuucaucaugugggccugccagaaggggaacauccgcugcaacaucugcaucuga

SEQ ID NO: 72914 - RNA, 1701 nt, Artificial Sequence
  derived and/or modified CDS sequence (opt1) from hemagglutinin__InfluenzaA__AFJ78287
augaagaccaucaucgcccugagcuacauccucugccugguguucgcccagaagcugcccggcaacgacaacuccaccgcgacgcucugccuggggcaccacgccgucccgaacggcaccaucgugaagaccaucaccaacgaccagaucgaggugacgaacgccaccgagcugguccagagcuccagcaccggggagaucugcgacagcccccaccagauccucgacggcaagaacugcacccugauggacgcccugcucggggacccccagugcgacggcuuccagaacaagaagugggaccuguucguggagcgcuccaaggccuacuccaacugcuaccccuacgacgugccggacuacgcgagccugcggucccucgucgccagcuccggcacgcuggaguucaacaacgagagcuucaacuggaccggggugacccagaacggcaccuccagcgccugcauccgccgguccaagaacagcuucuucucccgccugaacuggcucacgcaccugaacuucaaguaccccgcccugaacgugaccaugcccaacaacgagcaguucgacaagcucuacaucuggggcguccaccaccccgggaccgacaaggaccagaucuucccguacgcgcaggccagcgggcggaucaccguguccacgaagcgcagccagcagaccgugauccccaacaucggcagccggccccgcguccggaacauccccucccgcaucagcaucuacuggaccaucgugaagccgggcgacauccugcugaucaacuccaccgggaaccucaucgcgccccggggcuacuucaagauccgcagcgggaaguccagcaucaugcgguccgacgcccccaucggcaagugcaacagcgagugcaucacgcccaacggcuccaucccgaacgacaagcccuuccagaacgugaaccgcaucaccuacggggccugcccccgguacgucaagcagaacacccugaagcuggccaccggcaugcgcaacgugcccgagaagcagacgcgggggaucuucggcgccaucgccggguucaucgagaacggcugggagggcaugguggacgggugguacggcuuccgccaccagaacagcgaggggcggggccaggccgccgaccucaaguccacccaggcggccaucgaccagaucaacgggaagcugaaccgccugaucggcaagaccaacgagaaguuccaccagaucgagaaggaguucagcgaggucgagggccggauccaggaccucgagaaguacguggaggacaccaagaucgaccugugguccuacaacgccgagcugcucguggcccuggagaaccagcacacgaucgaccugaccgacagcgagaugaacaagcuguucgagaagaccaagaagcagcuccgcgagaacgccgaggacauggggaacggcugcuucaagaucuaccacaagugcgacaacgcgugcaucggguccauccgcaacggcaccuacgaccacgacgucuaccgggacgaggcccugaacaaccgcuuccagaucaaggggguggagcucaagagcggcuacaaggacuggauccuguggaucuccuucgccaucagcugcuuccugcucugcguggcccugcugggcuucaucaugugggccugccagaaggggaacauccggugcaacaucugcaucuga

SEQ ID NO: 72915 - RNA, 1698 nt, Artificial Sequence
  derived and/or modified CDS sequence (opt1) from hemagglutinin__InfluenzaA__AFJ78309
augaaggccaagcugcucgugcugcugugcaccuucaccgccacguacgcggacaccaucugcaucggcuaccacgccaacaacagcaccgacaccgucgacacggugcucgagaagaacgugaccgucacccacuccgugaaccugcuggaggacagccacaacgggaagcucugccugcugaagggcaucgcgccccuccagcuggggaacugcuccguggccggcuggauccuggggaacccggagugcgagagccucaucuccaaggagagcugguccuacaucgucgagacccccaaccccgagaacggcacgugcuaccccggcuacuucgccgacuacgaggagcugcgcgagcagcugagcuccgugagcuccuucgagcgguucgagaucuucccgaaggagagcuccuggcccaaccacaccgugaccggggucagcgccuccugcagccacaacggcaaguccagcuucuaccgcaaccuccuguggcugaccgagaagaacgggcucuaccccaaccuguccaagagcuacgugaacaacaaggagaaggaggugcugguccucuggggcgugcaccaccccagcaacaucggggaccagcgggccaucuaccacacggagaacgccuacguguccgucgugagcucccacuacagccgccgguucaccccggagaucgccaagcgccccaaggugcgggaccaggagggccgcaucaacuacuacuggacccugcuggagcccggcgacaccaucaucuucgaggcgaacgggaaccucaucgcccccugguacgccuucgcccugucccggggcuucgggagcggcaucaucacguccaacgccccgauggacgagugcgacgcgaagugccagacgccccagggcgccaucaacagcucccugcccuuccagaacguccaccccaucaccaucggggagugcccgaaguacgugcgcagcgccaagcuccggauggugaccggccugcgcaacauccccuccauccagagccgggggcuguucggcgccaucgccggguucaucgagggcggcuggaccgggaugaucgacggcugguacggguaccaccaccagaacgagcagggcuccggguacgcggccgaccagaaguccacccagaacgccaucaacggcaucaccaacaaggucaacagcgugaucgagaagaugaacacccaguucacggccgugggcaaggaguucaacaagcucgagcgccggauggagaaccugaacaagaaggucgacgacggguuccuggacaucuggaccuacaacgccgagcuccuggugcugcucgagaacgagcgcacccuggacuuccacgacagcaacgucaagaaccuguacgagaaggugaagucccagcucaagaacaacgcgaaggagaucggcaacgggugcuucgaguucuaccacaagugcaacaacgagugcauggagagcgugaagaacggcaccuacgacuaccccaaguacuccgaggagagcaagcugaaccgggagaagaucgacggggucaagcuggagagcaugggcguguaccagauccucgccaucuacuccacgguggccagcucccugguccugcucgugagccugggcgccaucuccuucuggaugugcagcaacgggucccugcagugccgcaucugcaucuga

SEQ ID NO: 72916 - RNA, 1701 nt, Artificial Sequence
  derived and/or modified CDS sequence (opt1) from hemagglutinin__InfluenzaA__AFJ78320
augaagaccaucaucgcccugagcuacauccucugccugguguucgcccagaagcugcccggcaacgacaacuccaccgcgacgcucugccuggggcaccacgccgucccgaacggcacccuggugaagaccaucaccaacgaccagaucgaggugacgaacgccaccgagcucguccagagcuccagcaccgggcgcaucugcgacagcccccaccagauccuggacggcgagaacugcacccugaucgacgcccuccugggggacccccacugcgacggcuuccagaacaaggagugggaccuguucguggagcggagcaaggccuacuccaacugcuaccccuacgacgugccggacuacgcgagccuccgcucccuggucgccagcuccggcacgcuggaguucaacaacgagagcuucaacuggaccgggguggcccagaacggcaccuccagcgccugcaagcggcgcuccaacaagagcuucuucucccggcucaacuggcugcaccagcugaaguacaaguaccccgcgcucaacgugaccaugcccaacaacgagaaguucgacaagcuguacaucuggggcguccaccaccccagcacggacuccgaccagaucagccuguacgcccaggccagcgggcgcgugaccguguccaccaagcggagccagcagaccgucaucccgaacaucgggucccgccccugggugcggggcgugagcucccgcaucagcaucuacuggacgaucgucaagcccggcgacauccuccugaucaacuccaccgggaaccugaucgcgccccggggcuacuucaagauccgcagcgggaaguccagcaucaugcgguccgacgccccgaucggcaagugcaacagcgagugcaucacccccaacggcuccauccccaacgacaagcccuuccagaacgugaaccgcaucaccuacggggccugcccgcgguacgugaagcagaacacgcucaagcuggccaccggcaugcgcaacguccccgagaagcagacccgggggaucuucggcgccaucgccggguucaucgagaacggcugggagggcaugguggacgggugguacggcuuccgccaccagaacagcgaggggaccggccaggccgcggaccugaaguccacgcaggccgccaucaaccagaucaacgggaagcucaaccggcugaucggcaagaccaacgagaaguuccaccagaucgagaaggaguucagcgagguggagggccgcauccaggaccuggagaaguacgucgaggacaccaagaucgaccucugguccuacaacgccgagcugcugguggcccucgagaaccagcacaccaucgaccugacggacagcgagaugaacaagcuguucgagcggaccaagaagcagcuccgcgagaacgcggaggacauggggaacggcugcuucaagaucuaccacaagugcgacaacgccugcaucggguccauccgcaacggcaccuacgaccacgacguguaccgggacgaggcccugaacaaccgcuuccagaucaagggggucgagcugaaguccggcuacaaggacuggauccucuggaucagcuucgccaucuccugcuuccugcugugcgugguccuccugggcuucaucaugugggccugccagaaggggaacauccggugcaacaucugcaucuga

SEQ ID NO: 72917 - RNA, 1698 nt, Artificial Sequence
  derived and/or modified CDS sequence (opt1) from hemagglutinin__InfluenzaA__AFJ78331
augaaggccaagcugcucgugcugcugugcaccuucaccgccacguacgcggacaccaucugcaucggcuaccacgccaacaacagcaccgacaccgucgacacggugcucgagaagaacgugaccgucacccacuccgugaaccugcuggaggacagccacaacgggaagcucugccugcugaagggcaucgcgccccuccagcuggggaacugcuccguggccggcuggauccuggggaacccggagugcgagcuccugaucagcaaggaguccuggagcuacaucgucgagacccccaaccccgagaacggcacgugcuaccccggcuacuucgccgacuacgaggagcugcgcgagcagcucuccagcguguccagcuucgagcgguucgagaucuucccgaaggaguccagcuggcccaaccacaccgugaccggggucuccgccagcugcucccacaacggcaagagcuccuucuaccgcaaccugcuguggcucaccgggaagaacggccuguaccccaaccugagcaaguccuacgugaacaacaaggagaaggaggugcucguccuguggggcgugcaccacccgcccaacaucggggaccagcgggcccuguaccacacggagaacgccuacgugagcgucgugagcucccacuacagccgccgguucacccccgagaucgccaagcgccccaaggugcgggaccaggagggccgcaucaacuacuacuggacccuccuggagcccggggacaccaucaucuucgaggcgaacggcaaccugaucgccccgugguacgccuucgcccucucccggggguucggcagcggcaucaucacguccaacgcccccauggacgagugcgacgcgaagugccagacgccccagggggccaucaacagcucccugcccuuccagaacguccacccggugaccaucggcgagugccccaaguacgugcgcagcgccaagcugcggauggucaccgggcuccgcaacauccccuccauccagagccggggccuguucggggccaucgccggcuucaucgagggcggguggaccggcaugguggacgggugguacggcuaccaccaccagaacgagcagggguccggcuacgcggccgaccagaaguccacccagaacgccaucaacggcaucaccaacaaggugaacagcgucaucgagaagaugaacacccaguucacggccguggggaaggaguucaacaagcuggagcgccggauggagaaccucaacaagaaggucgacgacggcuuccuggacaucuggaccuacaacgccgagcugcucgugcugcuggagaacgagcgcacccucgacuuccacgacagcaacgugaagaaccuguacgagaaggucaagucccagcugaagaacaacgcgaaggagaucgggaacggcugcuucgaguucuaccacaagugcaacaacgagugcauggagagcgugaagaacgggaccuacgacuaccccaaguacuccgaggagagcaagcucaaccgggagaagaucgacggcgugaagcuggaguccaugggcgucuaccagauccuggccaucuacagcacgguggccagcucccucgugcugcuggucagccucggggccaucuccuucuggaugugcagcaacggcucccugcagugccgcaucugcaucuga

SEQ ID NO: 72918 - RNA, 1698 nt, Artificial Sequence; identical to SEQ ID NO: 72917
  derived and/or modified CDS sequence (opt1) from hemagglutinin__InfluenzaA__AFJ78342

SEQ ID NO: 72919 - RNA, 1698 nt, Artificial Sequence; identical to SEQ ID NO: 72917
  derived and/or modified CDS sequence (opt1) from hemagglutinin__InfluenzaA__AFJ78353

SEQ ID NO: 72920 - RNA, 1698 nt, Artificial Sequence
  derived and/or modified CDS sequence (opt1) from hemagglutinin__InfluenzaA__AFJ78364
augaaggccaagcugcucgugcugcugugcaccuucaccgccacguacgcggacaccaucugcaucggcuaccacgccaacaacagcaccgacaccgucgacacggugcucgagaagaacgugaccgucacccacuccgugaaccugcuggaggacagccacaacgggaagcucugccugcugaagggcaucgcgccccuccagcuggggaacugcuccguggccggcuggauccuggggaacccggagugcgagagccucaucuccaaggagagcugguccuacaucgucgagacccccaaccccgagaacggcacgugcuaccccggcuacuucgccgacuacgaggagcugcgcgagcagcugagcuccgugagcuccuucgagcgguucgagaucuucccgaaggagagcuccuggcccaaccacaccgugaccggggucagcgccuccugcagccacaacggcaaguccagcuucuaccgcaaccuccuguggcugaccgagaagaacgggcucuaccccaaccuguccaagagcuacgugaacaacaaggagaaggaggugcugguccucuggggcgugcaccaccccagcaacaucggggaccagcgggccaucuaccacacggagaacgccuacguguccgucgugagcucccacuacaaccgccgguucaccccggagaucgccaagcgccccaaggugcggaaccaggagggccgcaucaacuacuacuggacccugcuggagcccggcgacaccaucaucuucgaggcgaacgggaaccucaucgcccccugguacgccuucgcccugagccggggcuucggguccggcaucaucacgagcaacgccccgauggacgagugcgacgcgaagugccagacgccccagggcgccaucaacuccagccugcccuuccagaacguccaccccaucaccaucggggagugcccgaaguacgugcgcuccgccaagcuccggauggugaccggccugcgcaacauccccagcauccagucccgggggcuguucggcgccaucgccggguucaucgagggcggcuggaccgggaugaucgacggcugguacggguaccaccaccagaacgagcagggcagcggguacgcggccgaccagaaguccacccagaacgccaucaacggcaucaccaacaaggucaacagcgugaucgagaagaugaacacccaguucacggccgugggcaaggaguucaacaagcucgagcgccggauggagaaccugaacaagaaggucgacgacggguuccuggacaucuggaccuacaacgccgagcuccuggugcugcucgagaacgagcgcacccuggacuuccacgacuccaacgucaagaaccuguacgagaaggucaagagccagcucaagaacaacgcgaaggagaucggcaacgggugcuucgaguucuaccacaagugcaacaacgagugcauggaguccgugaagaacggcaccuacgacuaccccaaguacagcgaggaguccaagcugaaccgggagaagaucgacggggugaagcuggagagcaugggcguguaccagauccucgccaucuacagcacgguggccuccagccugguccugcucgugucccugggcgccaucagcuucuggaugugcuccaacgggagccugcagugccgcaucugcaucuga

SEQ ID NO: 72921 - RNA, 1698 nt, Artificial Sequence
  derived and/or modified CDS sequence (opt1) from hemagglutinin__InfluenzaA__AFJ78375
augaaggccaagcugcucgugcugcugugcaccuucaccgccacguacgcggacaccaucugcaucggcuaccacgccaacaacagcaccgacaccgucgacacggugcucgagaagaacgugaccgucacccacuccaucaaccugcuggagaacagccacaacgggaagcucugccugcugaagggcaucgcgccccuccagcuggggaacugcuccguggccggcuggauccuggggaacccggagugcgagcuccugaucagcaaggaguccuggagcuacaucguggagacccccaaccccgagaacggcacgugcuaccccggccacuucgccgacuacgaggagcugcgcgagcagcucuccagcgucuccagcuucgagcgguucgagaucuucccgaaggaguccagcuggcccaaccacaccgugaccgggguguccgccagcugcucccacaacggcaagagcuccuucuaccgcaaccugcuguggcucaccgagaagaacgggcuguaccccaaccugagcaaguccuacgucaacaacaaggagaaggaggugcucgugcuguggggcguccaccaccccagcaacaucggggaccagcgggccaucuaccacacggagaacgccuacgugagcguggucuccagccacuacucccgccgguucaccccggagaucgugaagcgccccaaggugcgggaccaggagggccgcaucaacuacuacuggacccugcucgagcccggcgacaccaucaucuucgaggccaacgggaaccugaucgcgcccugguacgccuucgcccugagccggggcuucggguccggcaucaucacgagcaacgccccgauggacgagugcgacgccaagugccagacgccccagggcgcgaucaacuccagccuccccuuccagaacguccaccccgugaccaucggggagugcccgaaguacgugcgcuccgccaagcugcggauggucaccggccugcgcaacauccccagcauccagucccggggccucuucggggccaucgccggguucaucgagggcggcuggaccgggaugaucgacggcugguacggguaccaccaccagaacgagcagggcagcggguacgccgcggaccagaaguccacccagaacgccaucaacggcaucaccaacaaggugaacagcaucaucgagaagaugaacacccaguucacggccgugggcaaggaguucaacaagcuggagcgccggauggagaaccugaacaagaaggucgacgacggguuccucgacaucuggaccuacaacgccgagcugcuggugcuccuggagaacgagcgcacccuggacuuccacgacuccaacgucaagaaccucuacgagaaggucaagagccagcugaagaacaacgccaaggagaucggcaacgggugcuucgaguucuaccacaagugcaacaacgagugcauggaguccgugaagaacggcaccuacgacuaccccaaguacagcgaggaguccaagcugaaccgggagaagaucgacggggugaagcucgagagcaugggcguguaccagauccuggcgaucuacagcacgguggccuccagccugguccuccuggugucccugggcgccaucagcuucuggaugugcuccaacgggagccuccagugccgcaucugcaucuga

SEQ ID NO: 72922 - RNA, 1698 nt, Artificial Sequence; identical to SEQ ID NO: 65409
  derived and/or modified CDS sequence (opt1) from hemagglutinin__InfluenzaA__AFJ78386

SEQ ID NO: 72923 - RNA, 1698 nt, Artificial Sequence; identical to SEQ ID NO: 65409
  derived and/or modified CDS sequence (opt1) from hemagglutinin__InfluenzaA__AFJ78397

SEQ ID NO: 72924 - RNA, 1698 nt, Artificial Sequence; identical to SEQ ID NO: 72101
  derived and/or modified CDS sequence (opt1) from hemagglutinin__InfluenzaA__AFJ78408

SEQ ID NO: 72925 - RNA, 1698 nt, Artificial Sequence
  derived and/or modified CDS sequence (opt1) from hemagglutinin__InfluenzaA__AFJ78419
augaaggugaagcugcucguccugcugugcaccuucaccgccacguacgccgacaccaucugcaucggcuaccacgcgaacaacagcaccgacaccguggacacggugcucgagaagaacgucaccgugacccacuccgugaaccugcuggaggacagccacaacgggaagcucugccugcugaagggcaucgcgccccuccagcuggggaacugcuccgucgccggcuggauccuggggaacccggagugcgagcuccugaucagcaaggaguccuggagcuacaucguggagaagcccaaccccgagaacgggaccugcuaccccggcuacuucgccgacuacgaggagcugcgcgagcagcucuccagcguguccagcuucgagcgguucgagaucuucccgaaggaguccagcuggcccaaccacacggucaccgggguguccgccagcugcucccacaacggcaagagcuccuucuacaagaaccugcuguggcucaccgggaagaacggccuguaccccaaccugagcaaguccuacgccaacaacaaggagaaggaggugcucguccuguggggcgugcaccacccgcccaacaucggcgaccagcgcgcccuguaccacaccgagaacgccuacgugagcgucgugagcucccacuacagccggaaguucacgcccgagaucgccaagcgccccaaggugcgggaccaggagggccgcaucaacuacuacuggacccuccuggagcccggggacaccgucaucuucgaggcgaacggcaaccugaucgccccgcgguacgccuucgcccucucccgcggguucggcagcggcaucaucaacuccaacgcccccauggacgagugcgacgcgaagugccagacgccccagggggccaucaacagcucccugcccuuccagaacgugcacccggugaccaucggcgagugccccaaguacguccggagcgccaagcugcgcauggugaccgggcuccggaacauccccuccauccagagccgcggccuguucggggccaucgccggcuucaucgagggcggguggaccggcaugguggacgggugguacggcuaccaccaccagaacgagcagggguccggcuacgcggccgaccagaaguccacccagaacgccaucaacggcaucacgaacaaggucaacagcgugaucgagaagaugaacacccaguucaccgccgucgggaaggaguucaacaagcuggagcggcgcauggagaaccucaacaagaagguggacgacggcuucaucgacaucuggaccuacaacgccgagcugcuggugcuccuggagaacgagcggacgcuggacuuccacgacagcaacgucaagaaccucuacgagaaggugaagucccagcugaagaacaacgcgaaggagaucgggaacggcugcuucgaguucuaccacaagugcaacgacgagugcauggagagcgugaagaacgggaccuacgacuaccccaaguacuccgaggagagcaagcugaaccgcgagaagaucgacggcgucaagcucgaguccaugggcguguaccagauccuggccaucuacagcaccguggccagcucccugguccuccuggugagccugggggccaucuccuucuggaugugcagcaacggcucccuccagugccggaucugcaucuga

SEQ ID NO: 72926 - RNA, 1698 nt, Artificial Sequence
  derived and/or modified CDS sequence (opt1) from hemagglutinin__InfluenzaA__AFJ78430
augaaggugaagcugcucguccugcugugcaccuucaccgccacguacgccgacaccaucugcaucggcuaccacgcgaacaacagcaccgacaccguggacacggugcucgagaagaacgucaccgugacccacuccgugaaccugcuggaggacagccacaacgggaagcucugccugcugaagggcaucgcgccccuccagcuggggaacugcuccgucgccggcuggauccuggggaacccggagugcgagcuccugaucagccgcgaguccuggagcuacaucguggagaaccccaaccccgagaacgggaccugcuaccccggccacuucgccgacuacgaggagcugcgggagcagcucuccagcguguccagcuucgagcgcuucgagaucuucccgaaggaguccagcuggcccaaccacacggucaccgggguguccgccagcugcucccacaacggcaagagcuccuucuacaagaaccugcuguggcucaccgggaagaacggccuguaccccaaccugagcaaguccuacgccaacaacaaggagaaggaggugcucguccuguggggcgugcaccacccgcccaacaucggcgaccagcgggcccuguaccacaccgagaacgccuacgugagcgucgugagcucccacuacagccgcaaguucacgcccgagaucgccaagcggcccaaggugcgcgaccaggagggccggaucaacuacuacuggacccuccuggggcccggcgacaccaucaucuucgaggcgaacgggaaccugaucgccccgcgcuacgccuucgcccucucccggggcuucggcagcgggaucaucaacuccaacgcccccauggacgagugcgacgcgaagugccagacgccccagggcgccaucaacagcucccugcccuuccagaacguccacccggugaccaucggggagugccccaaguacgugcgcagcgccaagcugcggauggucaccggccuccgcaacauccccuccauccagagccgggggcuguucggcgccaucgccggcuucaucgagggcggguggaccgggaugguggacggcugguacggguaccaccaccagaacgagcagggcuccggcuacgcggccgaccagaaguccacccagaacgccaucaacgggaucacgaacaaggugaacagcgucaucgagaagaugaacacccaguucaccgccgugggcaaggaguucaacaagcuggagcgccggauggagaaccucaacaagaaggucgacgacggguucaucgacaucuggaccuacaacgccgagcugcuggugcuccuggagaacgagcgcacgcuggacuuccacgacagcaacgugaagaaccucuacgagaaggucaagucccagcugaagaacaacgcgaaggagaucggcaacgggugcuucgaguucuaccacaagugcaacgacgagugcauggagagcgugaagaacggcaccuacgacuaccccaaguacuccgaggagagcaagcugaaccgggagaagaucgacggcgugaagcucgaguccaugggggucuaccagauccuggccaucuacagcaccguggccagcucccuggugcuccuggucagccugggcgccaucuccuucuggaugugcagcaacgggucccuccagugccgcaucugcaucuga

SEQ ID NO: 72927 - RNA, 1698 nt, Artificial Sequence
  derived and/or modified CDS sequence (opt1) from hemagglutinin__InfluenzaA__AFJ78441
augaaggugaagcugaugguccuccugugcaccuucaccgccacguacgccgacaccaucugcaucggcuaccacgcgaacaacagcaccgacaccguggacacggugcuggagaagaacgucaccgugacccacuccgugaaccuccuggaggacagccacaacgggaagcugugccuccugaagggcaucgcgccccugcagcucgggaacugcuccgucgccggcuggauccuggggaacccggagugcgagcugcucaucagccgcgaguccuggagcuacaucguggagaagcccaaccccgagaacgggaccugcuaccccggccacuucgccgacuacgaggagcugcgggagcagcuguccagcguguccagcuucgagcgcuucgagaucuucccgaaggaguccagcuggcccaaccacacggucaccgggguguccgccagcugcucccacaacggcaagagcuccuucuacaagaaccuccuguggcugaccgggaagaacggccucuaccccaaccugagcaaguccuacgccaacaacaaggagaaggaggugcugguccucuggggcgugcaccacccgcccaacaucggcgaccagaaggcccuguaccacaccgagaacgccuacgugagcgucgugagcucccacuacagccggaaguucacgcccgagaucgccaagcgccccaaggugcgggaccaggagggccgcaucaacuacuacuggacccugcucgagcccggggacaccaucaucuucgaggcgaacggcaaccugaucgccccgcgguacgccuucgcccugucccgcggguucggcagcggcaucaucaacuccaacgcccccauggacgagugcgacgcgaagugccagacgccccagggggccaucaacagcucccuccccuuccagaacguccacccggugaccaucggcgagugccccaaguacgugcggagcgccaagcugcgcauggucaccgggcugcggaacauccccuccauccagagccgcggccucuucggggccaucgccggcuucaucgagggcggguggaccggcaugguggacgggugguacggcuaccaccaccagaacgagcagggguccggcuacgcggccgaccagaaguccacccagaacgccaucaacggcaucacgaacaaggugaacagcgucaucgagaagaugaacacccaguucaccgccguggacaaggaguucaacaagcuggagcggcgcauggagaaccugaacaagaaggucgacgacggguucaucgacaucuggaccuacaacgccgagcuccuggugcugcucgagaacgagcggacgcuggacuuccacgacagcaacgugaagaaccuguacgagaaggucaagucccagcucaagaacaacgcgaaggagaucggcaacgggugcuucgaguucuaccacaagugcaacgacgagugcauggagagcgugaagaacggcaccuacgacuaccccaaguacuccgaggagagcaagcugaaccgcgagaagaucgacggggugaagcuggaguccaugggcgucuaccagauccucgccaucuacagcaccguggccagcucccuggugcugcucgucagccugggcgccaucuccuucuggaugugcagcaacgggucccugcagugccggaucugcaucuga

SEQ ID NO: 72928 - RNA, 1698 nt, Artificial Sequence
  derived and/or modified CDS sequence (opt1) from hemagglutinin__InfluenzaA__AFJ78452
augaaggugaagcugcucguccugcugugcaccuucaccgccacguacgccgacaccaucugcaucggcuaccacgcgaacaacagcaccgacaccguggacacggugcucgagaagaacgucaccgugacccacuccgugaaccugcuggaggacagccacaacgggaagcucugccugcugaagggcaucgcgccccuccagcuggggaacugcuccgucgccggcuggauccuggggaacccggagugcgagcuccugaucagcaaggaguccuggagcuacaucguggagaagcccaaccccgagaacgggaccugcuaccccggccacuucgccgacuacgaggagcugcgcgagcagcucuccagcguguccagcuucgagcgguucgagaucuucccgaaggaguccagcuggcccaaccacacggucaccgggguguccgccagcugcucccacaacggcaagagcuccuucuacaagaaccugcuguggcucaccgggaagaacggccuguaccccaaccugagcaaguccuacgccaacaacaaggagaaggaggugcucguccuguggggcgugcaccacccgcccaacaucggcgaccagaaggcccuguaccacaccgagaacgccuacgugagcgucgugagcucccacuacagccgcaaguucauccccgagaucgccaagcggcccaaggugcgcgaccaggagggccggaucaacuacuacuggacgcuccuggagcccggggacaccaucaucuucgaggcgaacggcaaccugaucgccccgcgcuacgccuucgcccucucccggggguucggcagcggcaucaucaacuccaacgcccccauggacgagugcgacgcgaagugccagacgccccagggggccaucaacagcucccugcccuuccagaacguccacccggugaccaucggcgagugccccaaguacgugcgcagcgccaagcugcggauggucaccgggcuccgcaacauccccuccauccagagccggggccuguucggggccaucgccggcuucaucgagggcggguggaccggcaugguggacgggugguacggcuaccaccaccagaacgagcagggguccggcuacgcggccgaccagaaguccacccagaacgccaucaacggcaucaccaacaaggugaacagcgucaucgagaagaugaacacgcaguucaccgccguggggaaggaguucaacaagcuggagcgccggauggagaaccucaacaagaaggucgacgacggcuucaucgacaucuggaccuacaacgccgagcugcuggugcuccuggagaacgagcgcacccuggacuuccacgacagcaacgugaagaaccucuacgagaaggucaagucccagcugaagaacaacgcgaaggagaucgggaacggcugcuucgaguucuaccacaagugcaacgacgagugcauggagagcgugaagaacgggacguacgacuaccccaaguacuccgaggagagcaagcugaaccgggagaagaucgacggcgugaagcucgaguccaugggcgucuaccagauccuggccaucuacagcaccguggccagcucccuggugcuccuggucagccugggggccaucuccuucuggaugugcagcaacggcucccuccagugccgcaucugcaucuga

SEQ ID NO: 72929 - RNA, 1698 nt, Artificial Sequence
  derived and/or modified CDS sequence (opt1) from hemagglutinin__InfluenzaA__AFJ78463
augaaggugaagcugcucguccugcugugcaccuucaccgccacguacgccgacaccaucugcaucggcuaccacgcgaacaacagcaccgacaccguggacacggugcucgagaagaacgucaccgugacccacuccgugaaccugcuggaggacagccacaacgggaagcucugccugcugaagggcaucgcgccccuccagcuggggaacugcuccgucgccggcuggauccuggggaacccggagugcgagcuccugaucagcaaggaguccuggagcuacaucguggagaagcccaaccccgagaacgggaccugcuaccccggccacuucgccgacuacgaggagcugcgcgagcagcucuccagcguguccagcuucgagcgguucgagaucuucccgaaggaguccagcuggcccaaccacacggucaccgggguguccgccagcugcucccacaacggcaagagcuccuucuacaagaaccugcuguggcucaccgggaagaacggccuguaccccaaccugggcaagagcuacgccaacaacaaggagaaggaggugcucguccuguggggcgugcaccacccgcccaacaucggcgaccagaaggcccuguaccacaccgagaacgccuacguguccgucgugagcagccacuacucccgcaaguucauccccgagaucgccaagcggcccaaggugcgcgaccaggaggggcggaucaacuacuacuggacgcuccuggagcccggcgacaccaucaucuucgaggcgaacgggaaccugaucgccccgcgcuacgccuucgcccucagccggggcuucggcuccgggaucaucaacagcaacgcccccauggacgagugcgacgcgaagugccagacgccccagggcgccaucaacuccagccugcccuuccagaacguccacccggugaccaucggggagugccccaaguacgugcgcuccgccaagcugcggauggucaccggccuccgcaacauccccagcauccagucccgggggcuguucggcgccaucgccggcuucaucgagggcggguggaccgggaugguggacggcugguacggguaccaccaccagaacgagcagggcagcggcuacgcggccgaccagaaguccacccagaacgccaucaacgggaucaccaacaaggugaacagcgucaucgagaagaugaacacgcaguucaccgccgugggcaaggaguucaacaagcuggagcgccggauggagaaccucaacaagaaggucgacgacggguucaucgacaucuggaccuacaacgccgagcugcuggugcuccuggagaacgagcgcacccuggacuuccacgacuccaacgugaagaaccucuacgagaaggucaagagccagcugaagaacaacgcgaaggagaucggcaacgggugcuucgaguucuaccacaagugcaacgacgagugcauggaguccgugaagaacggcacguacgacuaccccaaguacagcgaggaguccaagcugaaccgggagaagaucgacggcgugaagcucgagagcaugggggucuaccagauccuggccaucuacuccaccguggccagcagccuggugcuccuggucucccugggcgccaucagcuucuggaugugcuccaacgggagccuccagugccgcaucugcaucuga

SEQ ID NO: 72930 - RNA, 1698 nt, Artificial Sequence
  derived and/or modified CDS sequence (opt1) from hemagglutinin__InfluenzaA__AFJ78474
augaaggugaagcugcucguccugcugugcaccuucaccgccacguacgccgacaccaucugcaucggcuaccacgcgaacaacagcaccgacaccguggacacggugcucgagaagaacgucaccgugacccacuccgugaaccugcuggaggacagccacaacgggaagcucugccugcugaagggcaucgcgccccuccagcuggggaacugcuccgucgccggcuggauccuggggaacccggagugcgagcuccugaucagccgcgaguccuggagcuacaucguggagaagcccaaccccgagaacgggaccugcuaccccggccacuucgccgacuacgaggagcugcgggagcagcucuccagcguguccagcuucgagcgcuucgagaucuucccgaaggaguccagcuggcccaaccacacggucaccgggguguccgccagcugcuccuacaacggcaagagcuccuucuacaagaaccugcuguggcucaccgggaagaacggccuguaccccaaccugagcaaguccuacgccaacaacaaggagaaggaggugcucguccuguggggcgugcaccacccgcccaacaucggcgaccagcgggcccuguaccacaccgagaacgccuacgugagcgucgugagcucccacuacagccgcaaguucacgcccgagaucgccaagcggcccaaggugcgcgaccaggagggccggaucaacuacuacuggacccuccuggagcccggggacaccaucaucuucgaggcgaacggcaaccugaucgccccgcgcuacgccuucgcccucucccggggguucggcagcggcaucaucaacuccaacgcccccauggacgagugcgacgcgaagugccagacgccccagggggccaucaacagcucccugcccuuccagaacguccacccggugaccaucggcgagugccccaaguacgugcgcagcgccaagcugcggauggucaccgggcuccgcaacauccccuccauccagagccggggccuguucggggccaucgccggcuucaucgagggcggguggaccggcaugguggacgggugguacggcuaccaccaccagaacgagcagggguccggcuacgcggccgaccagaaguccacccagaacgccaucaacggcaucacgaacaaggugaacagcgucaucgagaagaugaacacccaguucaccgccguggggaaggaguucaacaagcuggagcgccggauggagaaccucaacaagaaggucgacgacggcuucaucgacaucuggaccuacaacgccgagcugcuggugcuccuggagaacgagcgcacgcuggacuuccacgacagcaacgugaagaaccucuacgagaaggucaagucccagcugaagaacaacgcgaaggagaucgggaacggcugcuucgaguucuaccacaagugcaacgacgagugcauggagagcgugaagaacgggaccuacgacuaccccaaguacuccgaggagagcaagcugaaccgggagaagaucgacggcgugaagcucgaguccaugggcgucuaccagauccuggccaucuacagcaccguggccagcucccuggugcuccuggucagccugggggccaucuccuucuggaugugcagcaacggcucccuccagugccgcaucugcaucuga

SEQ ID NO: 72931 - RNA, 1698 nt, Artificial Sequence
  derived and/or modified CDS sequence (opt1) from hemagglutinin__InfluenzaA__AFJ78485
augaaggugaagcugcucguccugcugugcaccuucaccgccacguacgccgacaccaucugcaucggcuaccacgcgaacaacagcaccgacaccguggacacggugcucgagaagaacgucaccgugacccacuccgugaaccugcuggaggacagccacaacgggaagcucugccugcugaagggcaucgcgccccuccagcuggggaacugcuccgucgccggcuggauccuggggaacccggagugcgagcuccugaucagccgcgaguccuggagcuacaucguggagaagcccaaccccgagaacgggaccugcuaccccggccacuucgccgacuacgaggagcugcgggagcagcucuccagcguguccagcuucgagcgcuucgagaucuucccgaaggaguccagcuggcccaaccacacgaccaccggggucuccgccagcugcucccacaacggcgagagcuccuucuacaagaaccugcuguggcucaccgggaagaacggccuguaccccaaccugagcaaguccuacgccaacaacaaggagaaggaggugcucgugcuguggggcguccaccacccgcccaacaucggcgaccagcgggcccuguaccacacggagaacgccuacgugagcguggucagcucccacuacagccgcaaguucacccccgagaucgccaagcggcccaaggugcgcgaccaggagggccggaucaacuacuacuggacccuccuggagcccggggacaccaucaucuucgaggcgaacggcaaccugaucgccccgcgcuacgccuucgcccucucccggggguucggcagcggcaucaucaacuccaacgcccccauggacgagugcgacgcgaagugccagacgccccagggggccaucaacagcucccugcccuuccagaacgugcacccggucaccaucggcgagugccccaaguacgugcgcagcgccaagcugcggauggugaccgggcuccgcaacauccccuccauccagagccggggccuguucggggccaucgccggcuucaucgagggcggguggaccggcauggucgacgggugguacggcuaccaccaccagaacgagcagggguccggcuacgcggccgaccagaaguccacgcagaacgccaucaacggcaucaccaacaaggugaacagcgugaucgagaagaugaacacccaguucaccgccgucgggaaggaguucaacaagcuggagcgccggauggagaaccucaacaagaagguggaggacggcuucaucgacaucuggacguacaacgccgagcugcugguccuccuggagaacgagcgcacccuggacuuccacgacagcaacgugaagaaccucuacgagaaggugaagucccagcugaagaacaacgcgaaggagaucgggaacggcugcuucgaguucuaccacaagugcaacgacgagugcauggagagcgucaagaacgggaccuacgacuaccccaaguacuccgaggagagcaagcugaaccgggagaagaucgacggcgugaagcucgaguccaugggcguguaccagauccuggccaucuacagcaccgucgccagcucccuggugcuccuggugagccugggggccaucuccuucuggaugugcagcaacggcucccuccagugccgcaucugcaucuga

SEQ ID NO: 72932 - RNA, 1698 nt, Artificial Sequence
  derived and/or modified CDS sequence (opt1) from hemagglutinin__InfluenzaA__AFJ78496
augaaggugaagcugcucguccugcugugcaccuucaccgccacguacgccgacaccaucugcaucggcuaccacgcgaacaacagcaccgacaccguggacacggugcucgagaagaacgucaccgugacccacuccgugaaccugcuggaggacagccacaacgggaagcucugccugcugaagggcaucgcgccccuccagcuggggaacugcuccgucgccggcuggauccuggggaacccggagugcgagcuccugaucagccgcgaguccuggagcuacaucguggagaagcccaaccccgagaacgggaccugcuaccccggccacuucgccgacuacgaggagcugcgggagcagcucuccagcguguccagcuucgagcgcuucgagaucuucccgaaggaguccagcuggcccaaccacacgaccaccggggucuccgccagcugcucccacaacggcgagagcuccuucuacaagaaccugcuguggcucaccgggaagaacggccuguaccccaaccugagcaaguccuacgccaacaacaaggagaaggaggugcucgugcuguggggcguccaccacccgcccaacaucggcggccagcgggcccuguaccacacggagaacgccuacgugagcguggucagcucccacuacagccgcaaguucacccccgagaucgccaagcggcccaaggugcgcgaccaggaggggcggaucaacuacuacuggacccuccuggagcccggcgacaccaucaucuucgaggcgaacgggaaccugaucgccccgcgcuacgccuucgcccucucccggggcuucggcagcgggaucaucaacuccaacgcccccauggacgagugcgacgcgaagugccagacgccccagggcgccaucaacagcucccugcccuuccagaacgugcacccggucaccaucggggagugccccaaguacgugcgcagcgccaagcugcggauggugaccggccuccgcaacauccccuccauccagagccgggggcuguucggcgccaucgccggcuucaucgagggcggguggaccgggauggucgacggcugguacggguaccaccaccagaacgagcagggcuccggcuacgcggccgaccagaaguccacgcagaacgccaucaacgggaucaccaacaaggugaacagcgugaucgagaagaugaacacccaguucaccgccgucggcaaggaguucaacaagcuggagcgccggauggagaaccucaacaagaagguggacgacggguucaucgacaucuggacguacaacgccgagcugcugguccuccuggagaacgagcgcacccuggacuuccacgacagcaacgugaagaaccucuacgagaaggugaagucccagcugaagaacaacgcgaaggagaucggcaacgggugcuucgaguucuaccacaagugcaacgacgagugcauggagagcgucaagaacggcaccuacgacuaccccaaguacuccgaggagagcaagcugaaccgggagaagaucgacggcgugaagcucgaguccauggggguguaccagauccuggccaucuacagcaccgucgccagcucccuggugcuccuggugagccugggcgccaucuccuucuggaugugcagcaacgggucccuccagugccgcaucugcaucuga

SEQ ID NO: 72933 - RNA, 1698 nt, Artificial Sequence
  derived and/or modified CDS sequence (opt1) from hemagglutinin__InfluenzaA__AFJ78518
augaaggugaagcugcucguccugcugugcaccuucaccgccacguacgccgacaccaucugcaucggcuaccacgcgaacaacagcaccgacaccguggacacggugcucgagaagaacgucaccgugacccacuccgugaaccugcuggaggacagccacaacgggaagcucugccugcugaagggcaucgcgccccuccagcuggggaacugcuccgucgccggcuggauccuggggaacccggagugcgagcuccugaucagccgcgaguccuggagcuacaucguggagaagcccaaccccgagaacgggaccugcuaccccggccacuucgccgacuacgaggagcugcgggagcagcucuccagcguguccagcuucgagcgcuucgagaucuucccgaaggaguccagcuggcccaaccacacgaccaccggggucuccgccagcugcucccacaacggcgagagcuccuucuacaagaaccugcuguggcucaccgggaagaacggccuguaccccaaccugagcaaguccuacgccaacaacaaggagaaggaggugcucgugcuguggggcguccaccacccgcccaacaucggcgaccagcgggcccuguaccacacggagaacgccuacgugagcguggucagcucccacuacagccgcaaguucacccccgagaucgccaagcggcccaaggugcgcgaccaggagggccggaucaacuacuacuggacccuccuggagcccggggacaccaucaucuucgaggcgaacggcaaccugaucgccccgcgcuacgccuucgcccucucccggggguucggcagcggcaucaucaacuccaacgcccccauggacgagugcgacgcgaagugccagacgccccagggggccaucaacagcucccugcccuuccagaacgugcacccggucaccaucggcgagugccccaaguacgugcgcagcgccaagcugcggauggugaccgggcuccgcaacauccccuccauccagagccggggccuguucggggccaucgccggcuucaucgagggcggguggaccggcauggucgacgggugguacggcuaccaccaccagaacgagcagggguccggcuacgcggccgaccagaaguccacgcagaacgccaucaacggcaucaccaacaaggugaacagcgugaucgagaagaugaacacccaguucaccgccgucgggaaggaguucaacaagcuggagcgccggauggagaaccucaacaagaagguggacgacggcuucaucgacaucuggacguacaacgccgagcugcugguccuccuggagaacgagcgcacccuggacuuccacgacagcaacgugaagaaccucuacgagaaggugaagucccagcugaagaacaacgcgaaggagaucgggaacggcugcuucgaguucuaccacaagugcaacgacgagugcauggagagcgucaagaacgggaccuacgacuaccccaaguacuccgaggagagcaagcugaaccgggagaagaucgacggcgugaagcucgaguccaugggcguguaccagauccuggccaucuacagcaccgucgccagcucccuggugcuccuggugagccugggggccaucuccuucuggaugugcagcaacggcucccuccagugccgcaucugcaucuga

SEQ ID NO: 72934 - RNA, 1698 nt, Artificial Sequence
  derived and/or modified CDS sequence (opt1) from hemagglutinin__InfluenzaA__AFJ78529
augaaggugaagcugcucguccugcugugcaccuucaccgccacguacgccgacaccaucugcaucggcuaccacgcgaacaacagcaccgacaccguggacacggugcucgagaagaacgucaccgugacccacuccgugaaccugcuggaggacaaccacaacgggaagcucugccugcugaagggcaucgcgccccuccagcuggggaacugcagcgucgccggcuggauccuggggaacccggagugcgagcuccugaucuccaaggagagcugguccuacaucguggagcgccccaaccccgagaacgggaccugcuaccccggccacuucgccgacuacgaggagcugcgggagcagcucagcuccgugagcuccuucgagcgcuucgagaucuucccgaaggagagcuccuggcccaaccacacggucaccggggugagcgccuccugcagccacaacggcgaguccagcuucuacaagaaccugcuguggcucaccgggaagaacggccuguaccccaaccuguccaagagcuacgccaacaacaaggagaaggaggugcucguccuguggggcgugcaccacccgcccaacaucggcgaccagaugacccuguaccacaaggagaacgccuacguguccgucgugagcagccacuacucccggaaguucacgcccgagaucgccaagcgccccaaggugcgggaccaggagggccgcaucaacuacuacuggacccuccuggagcccggggacaccaucaucuucgaggccaacggcaaccugaucgcgccgcgguacgccuucgcccucagccgcggguucggcuccggcaucaucaacagcaacgcccccauggacgagugcgacgccaagugccagacgccccagggggcgaucaacuccagccugcccuuccagaacguccacccggugaccaucggcgagugccccaaguacgugcgguccgccaagcugcgcauggucaccgggcuccggaacauccccagcauccagucccgcggccuguucggggccaucgccggcuucaucgagggcggguggaccggcaugguggacgggugguacggcuaccaccaccagaacgagcaggggagcggcuacgccgcggaccagaaguccacccagaacgccaucaacggcaucacgaacaaggugaacagcgucaucgagaagaugaacacccaguucaccgccguggggaaggaguucaacaagcuggagcggcgcauggagaaccucaacaagaaggucgacgacggcuucaucgacguguggaccuacaacgccgagcugcuggugcuccuggagaacgagcggacgcuggacuuccacgacuccaacgucaagaaccucuacgagaaggugaagaaccagcugaagaacaacgccaaggagaucgggaacggcugcuucgaguucuaccacaagugcaacgacgagugcauggagagcgugaagaacgggaccuacgacuaccccaaguacuccgaggagagcaagcugucccgcgagaagaucgacggcgucaagcucgagagcaugggcguguaccagauccuggcgaucuacuccaccguggccagcagccugguccuccuggugucccugggggccaucagcuucuggaugugcuccaacggcagccuccagugccggaucugcaucuga

SEQ ID NO: 72935 - RNA, 1698 nt, Artificial Sequence; identical to SEQ ID NO: 72934
  derived and/or modified CDS sequence (opt1) from hemagglutinin__InfluenzaA__AFJ78540

SEQ ID NO: 72936 - RNA, 1698 nt, Artificial Sequence; identical to SEQ ID NO: 72934
  derived and/or modified CDS sequence (opt1) from hemagglutinin__InfluenzaA__AFJ78551

SEQ ID NO: 72937 - RNA, 1698 nt, Artificial Sequence
  derived and/or modified CDS sequence (opt1) from hemagglutinin__InfluenzaA__AFJ78562
augaaggugaagcugcucguccugcugugcaccuucaccgccacguacgccgacaccaucugcaucggcuaccacgcgaacaacagcaccgacaccguggacacggugcucgagaagaacgucaccgugacccacuccgugaaccugcuggaggacaaccacaacgggaagcucugccugcugaagggcaucgcgccccuccagcuggggaacugcagcgucgccggcuggauccuggggaacccggagugcgagcuccugaucuccaaggagagcugguccuacaucguggagcgccccaaccccgagaacgggaccugcuaccccggccacuucgccgacuacgaggagcugcgggagcagcucagcuccgugagcuccuucgagcgcuucgagaucuucccgaaggagagcuccuggcccaaccacacggucaccggggugagcgccuccugcagccacaacggcgaguccagcuucuacaagaaccugcuguggcucaccgggaagaacggccuguaccccacccuguccaagagcuacgccaacaacaaggagaaggaggugcucguccuguggggcgugcaccacccgcccaacaucggcgaccagaugacgcuguaccacaaggagaacgccuacguguccgucgugagcagccacuacucccggaaguucacccccgagaucgccaagcgccucaaggugcgggaccaggagggccgcaucaacuacuacuggacccugcuggagcccggggacaccaucaucuucgaggccaacggcaaccucaucgcgccccgguacgccuucgcccugagccgcgggcugggcuccggcaucaucaacagcaacgccccgauggacgagugcgacgccaagugccagacgccccagggggcgaucaacuccagccuccccuuccagaacguccaccccgugaccaucggcgagugcccgaaguacgugcgguccgccaagcugcgcauggucaccgggcugcggaacauccccagcauccagucccgcggccucuucggggccaucgccggcuucaucgagggcggguggaccggcaugguggacgggugguacggcuaccaccaccagaacgagcaggggagcggcuacgccgcggaccagaaguccacgcagaacgccaucaacggcaucaccaacaaggugaacagcgucaucgagaagaugaacacccaguucaccgccguggggaaggaguucaacaagcuggagcggcgcauggagaaccugaacaagaaggucgacgacggcuucaucgacguguggacguacaacgccgagcuccuggugcugcucgagaacgagcggacccuggacuuccacgacuccaacgucaagaaccuguacgagaaggugaagaaccagcucaagaacaacgccaaggagaucgggaacggcugcuucgaguucuaccacaagugcaacgacgagugcauggagagcgugaagaacgggaccuacgacuaccccaaguacuccgaggagagcaagcugucccgcgagaagaucgacggcgucaagcuggagagcaugggcguguaccagauccucgcgaucuacuccaccguggccagcagccugguccugcucgugucccugggggccaucagcuucuggaugugcuccaacggcagccugcagugccggaucugcaucuga

SEQ ID NO: 72938 - RNA, 1698 nt, Artificial Sequence
  derived and/or modified CDS sequence (opt1) from hemagglutinin__InfluenzaA__AFJ78573
augaaggugaagcugcucguccugcugugcaccuucaccgccacguacgccgacaccaucugcaucggcuaccacgcgaacaacagcaccgacaccguggacacggugcucgagaagaacgucaccgugacccacuccgugaaccugcuggaggacaaccacaacgggaagcucugccugcugaagggcaucgcgccccuccagcuggggaacugcagcgucgccggcuggauccuggggaacccggagugcgagcuccugaucuccaaggagagcugguccuacaucguggagcgccccaaccccgagaacgggaccugcuaccccggccacuucgccgacuacgaggagcugcgggagcagcucagcuccgugagcuccuucgagcgcuucgagaucuucccgaaggagagcuccuggcccaaccacacggucaccggggugagcgccuccugcagccacaacggcgaguccagcuucuacaagaaccugcuguggcucaccgggaagaacggccuguaccccaaccuguccaagagcuacgccaacaacaaggagaaggaggugcucguccuguggggcgugcaccacccgcccaacaucggcgaccagaugacccuguaccacaaggagaacgccuacguguccgucgugagcagccacuacucccggaaguucacgcccgagaucgccaagcgccccaaggugcgggaccaggagggccgcaucaacuacuacuggacccuccuggagcccggggacaccaucaucuucgaggccaacggcaaccugaucgcgccgcgguacgccuucgcccucagccgcggguucggcuccggcaucaucaacagcaacgccuccauggacgagugcgacgccaagugccagacgccccagggggcgaucaacagcucccugcccuuccagaacguccaccccgugaccaucggcgagugcccgaaguacgugcggagcgccaagcugcgcauggucaccgggcuccggaacauccccuccauccagagccgcggccuguucggggccaucgccggcuucaucgagggcggguggaccggcaugguggacgggugguacggcuaccaccaccagaacgagcagggguccggcuacgccgcggaccagaaguccacccagaacgccaucaacggcaucacgaacaaggugaacagcgucaucgagaagaugaacacccaguucaccgccguggggaaggaguucaacaagcuggagcggcgcauggagaaccucaacaagaaggucgacgacggcuucaucgacguguggaccuacaacgccgagcugcuggugcuccuggagaacgagcggacgcuggacuuccacgacagcaacgucaagaaccucuacgagaaggugaagaaccagcugaagaacaacgccaaggagaucgggaacggcugcuucgaguucuaccacaagugcaacgacgagugcauggaguccgugaagaacgggaccuacgacuaccccaaguacagcgaggaggcgaagcugucccgcgagaagaucgacggcgucaagcucgagagcaugggcguguaccagauccuggccaucuacuccaccguggccagcagccugguccuccuggugucccugggggccaucagcuucuggaugugcuccaacggcagccuccagugccggaucugcaucuga

SEQ ID NO: 72939 - RNA, 1698 nt, Artificial Sequence
  derived and/or modified CDS sequence (opt1) from hemagglutinin__InfluenzaA__AFJ78584
augaaggugaagcugcucguccugcugugcaccuucaccgccacguacgccgacaccaucugcaucggcuaccacgcgaacaacagcaccgacaccguggacacggugcucgagaagaacgucaccgugacccacuccgugaaccugcuggagaacagccacaacgggaagcucugccugcugaagggcaucgcgccccuccagcuggggaacugcuccgucgccggcuggauccuggggaacccggagugcgagcuccugaucagcaaggaguccuggagcuacaucguggagaagcccaaccccgagaacgggaccugcuaccccggccacuucgccgacuacgaggagcugcgcgagcagcucuccagcguguccagcuucgagcgguucgagaucuucccgaaggaguccagcuggcccaaccacacggucaccggcguguccgccagcugcucccacaacggcgagaacagcuucuaccgcaaccugcuguggcucacccggaagaacgggcuguaccccaaccuguccaagagcuacgccaacaacaaggagaaggaggugcucguccuguggggcgugcaccacccgcccaacaucggggaccagaaggcccuguaccacaccgagaacgccuacguguccgucgugagcagccacuacucccgcaaguucacgcccgagaucgccaagcggcccaaggugcgcgaccaggagggccggaucaacuacuacuggacccuccuggagcccggcgacaccaucaucuucgaggcgaacgggaaccugaucgccccgcgcuacgccuucgcccucagccggggcuucggguccggcaucaucaacagcaacgcccccauggacaagugcgacgcgaagugccagacgccccagggcgccaucaacuccagccugcccuuccagaacguccacccgguggccaucggggagugccccaaguacgugcgcuccgccaagcugcggauggucaccggccuccgcaacauccccagcauccagucccgggggcuguucggcgccaucgcgggguucaucgagggcggcuggaccgggaugguggacggcugguacggguaccaccaccagaacgagcagggcagcggguacgccgccgaccagaaguccacccagaacgccaucaacggcaucaccaacaaggugaacagcgucaucgagaagaugaacacgcaguucaccgccgugggcaaggaguucaacaagcuggagcgccggauggagaaccucaacaagaaggucgacgacggguucaucgacaucuggaccuacaacgcggagcugcuggugcuccuggagaacgagcgcacccuggacuuccacgacuccaacgugaagaaccucuacgagaaggucaagagccagcugaagaacaacgccaaggagaucggcaacgggugcuucgaguucuaccacaagugcaacgacgagugcauggaguccgugaagaacggcacguacgacuaccccaaguacagcgaggaguccaagcugaaccgggagaagaucgacggggugaagcucgagagcaugggcgucuaccagauccuggccaucuacuccaccguggccagcagccuggugcuccuggucucccugggcgccaucagcuucuggaugugcuccaacgggagccuccagugccgcaucugcaucuga

SEQ ID NO: 72940 - RNA, 1698 nt, Artificial Sequence
  derived and/or modified CDS sequence (opt1) from hemagglutinin__InfluenzaA__AFJ78595
augaaggugaagcugcucguccugcugugcaccuucaccgccacguacgccgacaccaucugcaucggcuaccacgcgaacaacagcaccgacaccguggacacggugcucgagaagaacgucaccgugacccacuccgugaaccugcuggagaacagccacaacgggaagcucugccugcugaagggcaucgcgccccuccagcuggggaacugcuccgucgccggcuggauccuggggaacccggagugcgagcuccugaucagcaaggaguccuggagcuacaucguggagaagcccaaccccgagaacgggaccugcuaccccggccacuucgccgacuacgaggagcugcgcgagcagcucuccagcguguccagcuucgagcgguucgagaucuucccgaaggaguccagcuggcccaaccacacggucaccgggguguccgccagcugcucccacaacggcgagagcuccuucuaccgcaaccugcuguggcucaccgggaagaacggccuguaccccaaccugagcaaguccuacgccaacaaccgggagaaggaggugcucguccuguggggcgugcaccacccgcccaacaucggcgaccagaaggcccuguaccacaccgagaacgccuacgugagcgucgugagcucccacuacagccgcaaguucacgcccgagaucgccaagcggcccaaggugcgcgaccaggagggccggaucaacuacuacuggacccuccuggagcccggggacaccaucaucuucgaggcgaacggcaaccugaucgccccgcgcuacgccuucgcccucucccggggguucggcagcggcaucaucaacuccaacgcccccauggacaagugcgacgcgaagugccagacgccccagggggccaucaacagcucccugcccuuccagaacguccacccggugaccaucggcgagugccccaaguacgugcgcagcgccaagcugcggauggucaccgggcuccgcaacauccccuccauccagagccggggccuguucggggccaucgccggcuucaucgagggcggguggaccggcaugguggacgggugguacggcuaccaccaccagaacgagcagggguccggcuacgcggccgaccagaaguccacccagaacgccaucaacggcaucacgaacaaggugaacagcgucaucgagaagaugaacacccaguucaccgccguggggaaggaguucaacaagcuggagcgccggauggagaaccucaacaagaaggucgacgacggcuucaucgacaucuggaccuacaacgccgagcugcuggugcuccuggagaacgagcgcacgcuggacuuccacgacagcaacgugaagaaccucuacgagaaggucaagucccagcugaagaacaacgcgaaggagaucgggaacggcugcuucgaguucuaccacaagugcaacgacgagugcauggagagcgugaagaacgggaccuacgacuaccccaaguacuccgaggagagcaagcugaaccgggagaagaucgacggcgugaagcucgaguccaugggcgucuaccagauccuggccaucuacagcaccguggccagcucccuggugcuccuggucagccugggggccaucuccuucuggaugugcagcaacggcucccuccagugccgcaucugcaucuga

SEQ ID NO: 72941 - RNA, 1698 nt, Artificial Sequence
  derived and/or modified CDS sequence (opt1) from hemagglutinin__InfluenzaA__AFJ78617
augaaggugaagcugcucguccugcugugcaccuucaccgccacguacgccgacaccaucugcaucggcuaccacgcgaacaacagcaccgacaccguggacacggugcucgagaagaacgucaccgugacccacuccgugaaccugcuggagaacagccacaacgggaagcucugccugcugaagggcaucgcgccccuccagcuggggaacugcuccgucgccggcuggauccuggggaacccggagugcgagcuccugaucagcaaggaguccuggagcuacaucguggagaagcccaaccccgagaacgggaccugcuaccccggccacuucgccgacuacgaggagcugcgcgagcagcucuccagcguguccagcuucgagcgguucgagaucuucccgaaggaguccagcuggcccaaccacacggucaccgggguguccgccagcugcucccacgacggcgagagcuccuucuaccgcaaccugcuguggcucaccgggaagaacggccuguaccccaaccugagcaaguccuacgccaacaacaaggagaaggaggugcucguccuguggggcgugcaccacccgcccagcaucagcgaccagaagacccuguaccacacggagaacgcccacguguccgucgugagcucccacuacagccggaaguucacccccgagaucgccaagcgccccaaggugcgggaccaggagggccgcaucaacuacuacuggacccuccuggagcccggcgacaccaucaucuucgaggccaacgggaaccugaucgcgccgcgguacgccuucgcccucucccgcggcuucgggagcggcaucaucaacuccaacgcccccauggacaagugcgacgccaagugccagacgccccagggcgcgaucaacagcucccugcccuuccagaacguccacccggugaccaucggggagugccccaaguacgugcggagcgccaagcugcgcauggucaccggccuccggaacauccccuccauccagagccgcgggcuguucggcgccaucgccggguucaucgagggcggcuggaccgggaugguggacggcugguacggguaccaccaccagaacgagcagggcuccggguacgccgcggaccagaaguccacgcagaacgccaucaacggcaucaccaacaaggugaacagcgucaucgagaagaugaacacccaguucaccgccgugagcaaggaguucaacaagcuggagcggcgcauggagaaccucaacaagaaggucgacgacggcuucaucgacaucuggacguacaacgccgagcugcuggugcuccuggagaacgagcggacccuggacuuccacgacuccaacgugaagaaccucuacgagaaggucaagagccagcugaagaacaacgccaaggagaucgggaacggcugcuucgaguucuaccacaagugcaacgacgagugcauggaguccgugaagaacgggaccuacgacuaccccaaguacagcgaggagagcaagcugaaccgcgagaagaucgacggcgugaagcucgaguccaugggggucuaccagauccuggcgaucuacagcaccguggccuccagccuggugcuccuggucucccugggcgccaucagcuucuggaugugcuccaacggcagccuccagugccggaucugcaucuga

SEQ ID NO: 72942 - RNA, 1698 nt, Artificial Sequence
  derived and/or modified CDS sequence (opt1) from hemagglutinin__InfluenzaA__AFJ78628
augaaggugaagcugcucguccugcugugcaccuucaccgccacguacgccgacaccaucugcaucggcuaccacgcgaacaacagcaccgacaccguggacacggugcucgagaagaacgucaccgugacccacuccgugaaccugcuggaggacaaccacaacgggaagcucugccugcugaagggcaucgcgccccuccagcuggggaacugcagcgucgccggcuggauccuggggaacccggagugcgagcuccugaucuccaaggagagcugguccuacaucguggagcgccccaaccccgagaacgggaccugcuaccccggccacuucgccgacuacgaggagcugcgggagcagcucagcuccgugagcuccuucgagcgcuucgagaucuucccgaaggagagcuccuggcccaaccacacggucaccggggugagcgccuccugcagccacaacggcgaguccagcuucuacaagaaccugcuguggcucaccgggaagaacggccuguaccccaaccuguccaagagcuacgccaacaacaaggagaaggaggugcucguccuguggggcgugcaccacccgcccaacaucggcaaccagaugacccuguaccacaaggagaacgccuacguguccgucgugagcagccacuacucccggaaguucacgcccgagaucgccaagcgccccaaggugcgggaccaggagggccgcaucaacuacuacuggacccuccuggagcccggggacaccaucaucuucgaggccaacggcaaccugaucgcgccgcgguacgccuucgcccucagccgcggguucggcuccggcaucaucaacagcaacgcccccauggacgagugcgacgccaagugccagacgccccagggggcgaucaacuccagccugcccuuccagaacguccacccggugaccaucggcgagugccccaaguacgugcgguccgccaagcugcgcauggucaccgggcuccggaacauccccagcauccagucccgcggccuguucggggccaucgccggcuucaucgagggcggguggaccggcaugguggacgggugguacggcuaccaccaccagaacgagcaggggagcggcuacgccgcggaccagaaguccacccagaacgccaucaacggcaucacgaacaaggugaacagcgucaucgagaagaugaacacccaguucaccgccguggggaaggaguucaacaagcuggagcggcgcauggagaaccucaacaagaaggucgacgacggcuucaucgacguguggaccuacaacgccgagcugcuggugcuccuggagaacgagcggacgcuggacuuccacgacuccaacgucaagaaccucuacgagaaggugaagaaccagcugaagaacaacgccaaggagaucgggaacggcugcuucgaguucuaccacaagugcaacgacgagugcauggagagcgugaagaacgggaccuacgacuaccccaaguacuccgaggagagcaagcugucccgcgagaagaucgacggcgucaagcucgagagcaugggcguguaccagauccuggcgaucuacuccaccguggccagcagccugguccuccuggugucccugggggccaucagcuucuggaugugcuccaacggcagccuccagugccggaucugcaucuga

SEQ ID NO: 72943 - RNA, 1698 nt, Artificial Sequence
  derived and/or modified CDS sequence (opt1) from hemagglutinin__InfluenzaA__AFJ78639
augaaggugaagcugcucguccugcugugcaccuucaccgccacguacgccgacaccaucugcaucggcuaccacgcgaacaacagcaccgacaccguggacacggugcucgagaagaacgucaccgugacccacuccgugaaccugcuggagaacagccacaacgggaagcucugccugcugaagggcaucgcgccccuccagcuggggaacugcuccgucgccggcuggauccuggggaacccggagugcgagcuccugaucagcaaggaguccuggagcuacaucguggagaagcccaaccccgagaacgggaccugcuaccccggccacuucgccgacuacgaggagcugcgcgagcagcucuccagcguguccagcuucgagcgguucgagaucuucccgaaggaguccagcuggcccaaccacacggucaccgggguguccgccagcugcucccacaacggcgagagcuccuucuaccgcaaccugcuguggcucaccgggaagaacggccuguaccccaaccugagcaaguccuacgccaacaacaaggagaaggaggugcucguccuguggggcgugcaccacccgcccagcaucagcaaccagaagacccuguaccacacggagaacgccuacguguccgucgugagcucccacuacagccggaaguucacccccgagaucgccaagcgccccaaggugcgggaccaggagggccgcaucaacuacuacuggacccuccuggagcccggcgacaccaucaucuucgaggccaacgggaaccugaucgcgccgcgguacgccuucgcccucucccgcggcuucgggagcggcaucaucaacuccaacgcccccauggacaagugcgacgccaagugccagacgccccagggcgcgaucaacagcucccugcccuuccagaacguccacccggugaccaucggggagugccccaaguacgugcggagcgccaagcugcgcauggucaccggccuccggaacauccccuccauccagagccgcgggcuguucggcgccaucgccggguucaucgagggcggcuggaccgggaugguggacggcugguacggguaccaccaccagaacgagcagggcuccggguacgccgcggaccagaaguccacgcagaacgccaucaacggcaucaccaacaaggugaacagcgucaucgagaagaugaacacccaguucaccgccgugggcaaggaguucaacaagcuggagcggcgcauggagaaccucaacaagaaggucgacgacggguucaucgacaucuggacguacaacgccgagcugcuggugcuccuggagaacgagcggacccuggacuuccacgacagcaacgugaagaaccucuacgagaaggucaagucccagcugaagaacaacgccaaggagaucggcaacgggugcuucgaguucuaccacaagugcaacgacgagugcauggagagcgugaagaacggcaccuacgacuaccccaaguacuccgaggagagcaagcugaaccgcgagaagaucgacggggugaagcucgagagcaugggcgucuaccagauccuggcgaucuacuccaccguggccagcucccuggugcuccuggucagccugggcgccaucuccuucuggaugugcagcaacgggucccuccagugccggaucugcaucuga

SEQ ID NO: 72944 - RNA, 1698 nt, Artificial Sequence; identical to SEQ ID NO: 72943
  derived and/or modified CDS sequence (opt1) from hemagglutinin__InfluenzaA__AFJ78650

SEQ ID NO: 72945 - RNA, 1701 nt, Artificial Sequence; identical to SEQ ID NO: 66693
  derived and/or modified CDS sequence (opt1) from hemagglutinin__InfluenzaA__AFJ78661

SEQ ID NO: 72946 - RNA, 1701 nt, Artificial Sequence
  derived and/or modified CDS sequence (opt1) from hemagglutinin__InfluenzaA__AFJ78681
augaaggccauccuggugguccuccuguacaccuucgccaccgugaacgcggacacgcugugcaucggcuaccacgccaacaacagcaccgacaccguggacaccguccucgagaagaacgugacggugacccacuccgucaaccugcuggaggacaagcacaacgggaagcucugcaagcugcgcggcguggcgccccugcaccucgggaagugcaacaucgccggcuggauccuggggaacccggagugcgagagccuguccaccgccagcuccuggagcuacaucguggagaccuccagcuccgacaacggcacgugcuaccccggcgacuucaucgacuacgaggagcuccgggagcagcugagcuccgucagcuccuucgagcgcuucgagaucuuccccaagaccagcuccuggcccaaccacgacagcaacaagggggugaccgccgccugcccgcacgccggcgccaaguccuucuacaagaaccugaucuggcucgugaagaaggggaacagcuaccccaagcuguccaagagcuacaucaacgacaagggcaaggagguccuggugcucugggggauccaccaccccagcaccuccgcggaccagcagagccuguaccagaacgccgacgccuacguguucgucggcacgucccgguacagcaagaaguucaagcccgagaucgccauccgcccgaaggugcgggaccaggagggccgcaugaacuacuacuggacccugguggagcccggggacaagaucaccuucgaggccaccggcaaccucgucgugccccgguacgcguucgccauggagcgcaacgccggguccggcaucaucaucagcgacacgcccgugcacgacugcaacacgaccugccagaccccgaagggcgccaucaacaccucccugcccuuccagaacauccaccccaucaccaucgggaagugccccaaguacgucaagagcaccaagcugcggcucgccaccggccugcgcaacgugccguccauccagagccgggggcuguucggcgcgaucgccggguucaucgagggcggcuggacggggaugguggacggcugguacggguaccaccaccagaacgagcagggcuccggguacgccgccgaccucaagagcacccagaacgccaucgacgagaucaccaacaaggucaacuccgugaucgagaagaugaacacccaguucacggcggucggcaaggaguucaaccaccuggagaagcgcaucgagaaccugaacaagaagguggacgacggcuuccucgacaucuggaccuacaacgccgagcugcuggugcuccuggagaacgagcggacccuggacuaccacgacagcaacgucaagaaccucuacgagaaggugcgcucccagcugaagaacaacgccaaggagaucgggaacggcugcuucgaguucuaccacaagugcgacaacacgugcauggagagcgugaagaacgggaccuacgacuaccccaaguacuccgaggaggccaagcugaaccgggaggagaucgacggcgucaagcucgagagcacccgcaucuaccagauccuggccaucuacuccaccguggcgagcagccuggugcucgucgugucccugggggccaucagcuucuggaugugcuccaacggcagccugcagugccggaucugcaucuga

SEQ ID NO: 72947 - RNA, 1701 nt, Artificial Sequence; identical to SEQ ID NO: 66693
  derived and/or modified CDS sequence (opt1) from hemagglutinin__InfluenzaA__AFJ78691

SEQ ID NO: 72948 - RNA, 1701 nt, Artificial Sequence; identical to SEQ ID NO: 66693
  derived and/or modified CDS sequence (opt1) from hemagglutinin__InfluenzaA__AFJ78701

SEQ ID NO: 72949 - RNA, 1701 nt, Artificial Sequence; identical to SEQ ID NO: 71221
  derived and/or modified CDS sequence (opt1) from hemagglutinin__InfluenzaA__AFJ78711

SEQ ID NO: 72950 - RNA, 1701 nt, Artificial Sequence; identical to SEQ ID NO: 66693
  derived and/or modified CDS sequence (opt1) from hemagglutinin__InfluenzaA__AFJ78721

SEQ ID NO: 72951 - RNA, 1701 nt, Artificial Sequence
  derived and/or modified CDS sequence (opt1) from hemagglutinin__InfluenzaA__AFJ78731
augaaggccauccuggugguccuccuguacaccuucgccaccgcgaacgccgacacgcugugcaucggcuaccacgccaacaacagcaccgacaccguggacaccgugcucgagaagaacgucacggugacccacuccgugaaccugcuggaggacaagcacaacgggaagcucugcaagcugcgcggcgucgcgccccugcaccucgggaagugcaacaucgccggcuggauccuggggaacccggagugcgagagccuguccaccgccagcuccuggagcuacaucguggagaccuccagcuccgacaacggcacgugcuaccccggcgacuucaucgacuacgaggagcuccgggagcagcugagcuccgugagcuccuucgagcgcuucgagaucuuccccaagaccagcuccuggcccaaccacgacagcaacaagggggucaccgccgccugcccgcacgccggcgcgaaguccuucuacaagaaccugaucuggcucgugaagaaggggaacagcuaccccaagcuguccaagagcuacaucaacgacaagggcaaggaggugcugguccucugggggauccaccaccccagcaccuccgccgaccagcagagccuguaccagaacgccgacgccuacguguucgugggcacgucccgguacagcaagaaguucaagcccgagaucgccauccgcccgaagguccgggaccaggagggccgcaugaacuacuacuggacccugguggagcccggggacaagaucaccuucgaggcgaccggcaaccucguggucccccgguacgccuucgccauggagcgcaacgccggguccggcaucaucaucagcgacacgcccgugcacgacugcaacacgaccugccagaccccgaagggcuccaucaacaccagccugcccuuccagaacauccaccccaucaccaucgggaagugccccaaguacgugaaguccaccaagcugcggcucgccaccggccugcgcaacgucccgagcauccagucccgggggcuguucggcgcgaucgccggguucaucgagggcggcuggacggggaugguggacggcugguacggguaccaccaccagaacgagcagggcagcggguacgccgccgaccucaaguccacccagaacgccaucgacgagaucaccaacaaggugaacagcgucaucgagaagaugaacacccaguucacggcggugggcaaggaguucaaccaccuggagaagcgcaucgagaaccugaacaagaaggucgacgacggcuuccucgacaucuggaccuacaacgccgagcugcuggugcuccuggagaacgagcggacccuggacuaccacgacuccaacgugaagaaccucuacgagaagguccgcagccagcugaagaacaacgccaaggagaucgggaacggcugcuucgaguucuaccacaagugcgacaacacgugcauggaguccgugaagaacgggaccuacgacuaccccaaguacagcgaggaggccaagcugaaccgggaggagaucgacggcgugaagcucgaguccacccgcaucuaccagauccuggccaucuacagcaccgucgcgagcucccuggugcucguggucagccugggggccaucuccuucuggaugugcagcaacggcucccugcagugccggaucugcaucuga

SEQ ID NO: 72952 - RNA, 1701 nt, Artificial Sequence; identical to SEQ ID NO: 67857
  derived and/or modified CDS sequence (opt1) from hemagglutinin__InfluenzaA__AFJ78741

SEQ ID NO: 72953 - RNA, 1701 nt, Artificial Sequence; identical to SEQ ID NO: 66693
  derived and/or modified CDS sequence (opt1) from hemagglutinin__InfluenzaA__AFJ78751

SEQ ID NO: 72954 - RNA, 1701 nt, Artificial Sequence; identical to SEQ ID NO: 66693
  derived and/or modified CDS sequence (opt1) from hemagglutinin__InfluenzaA__AFJ78761

SEQ ID NO: 72955 - RNA, 1701 nt, Artificial Sequence; identical to SEQ ID NO: 66693
  derived and/or modified CDS sequence (opt1) from hemagglutinin__InfluenzaA__AFJ78771

SEQ ID NO: 72956 - RNA, 1701 nt, Artificial Sequence; identical to SEQ ID NO: 66693
  derived and/or modified CDS sequence (opt1) from hemagglutinin__InfluenzaA__AFJ78781

SEQ ID NO: 72957 - RNA, 1701 nt, Artificial Sequence; identical to SEQ ID NO: 66693
  derived and/or modified CDS sequence (opt1) from hemagglutinin__InfluenzaA__AFJ78791

SEQ ID NO: 72958 - RNA, 1701 nt, Artificial Sequence; identical to SEQ ID NO: 66693
  derived and/or modified CDS sequence (opt1) from hemagglutinin__InfluenzaA__AFJ78801

SEQ ID NO: 72959 - RNA, 1701 nt, Artificial Sequence; identical to SEQ ID NO: 67554
  derived and/or modified CDS sequence (opt1) from hemagglutinin__InfluenzaA__AFJ78811

SEQ ID NO: 72960 - RNA, 1701 nt, Artificial Sequence; identical to SEQ ID NO: 66693
  derived and/or modified CDS sequence (opt1) from hemagglutinin__InfluenzaA__AFJ78821

SEQ ID NO: 72961 - RNA, 1701 nt, Artificial Sequence; identical to SEQ ID NO: 66693
  derived and/or modified CDS sequence (opt1) from hemagglutinin__InfluenzaA__AFJ78831

SEQ ID NO: 72962 - RNA, 1701 nt, Artificial Sequence; identical to SEQ ID NO: 67891
  derived and/or modified CDS sequence (opt1) from hemagglutinin__InfluenzaA__AFJ78841

SEQ ID NO: 72963 - RNA, 1701 nt, Artificial Sequence; identical to SEQ ID NO: 66693
  derived and/or modified CDS sequence (opt1) from hemagglutinin__InfluenzaA__AFJ78851

SEQ ID NO: 72964 - RNA, 1701 nt, Artificial Sequence
  derived and/or modified CDS sequence (opt1) from hemagglutinin__InfluenzaA__AFJ78861
augaaggccauccuggugguccuccuguacaccuucgccaccgcgaacgccgacacgcugugcaucggcuaccacgccaacaacagcaccgacaccguggacaccgugcucgagaagaacgucacggugacccacuccgugaaccugcuggaggacaagcacaacgggaagcucugccgccugcggggcgucgcgccccugcaccucgggaagugcaacaucgccggcuggauccuggggaacccggagugcgagagccuguccaccgccagcuccuggagcuacaucguggagaccuccagcuccgacaacggcacgugcuaccccggcgacuucaucgacuacgaggagcuccgcgagcagcugagcuccgugagcuccuucgagcgguucgagaucuuccccaagaccagcuccuggcccaaccacgacagcaacaagggggucaccgccgccugcccgcacgccggcgcgaaguccuucuacaagaaccugaucuggcucgugaagaaggggaacagcuaccccaagcuguccaagagcuacaucaacgacaagggcaaggaggugcugguccucugggggauccaccaccccagcaccuccgccgaccagcagagccuguaccagaacgccgacgccuacguguucgugggcacgucccgcuacagcaagaaguucaagcccgagaucgccauccggccgaagguccgcgaccaggagggccggaugaacuacuacuggacccugguggagcccggggacaagaucaccuucgaggcgaccggcaaccucguggucccccgcuacgccuucgccauggagcggaacgccggguccggcaucaucaucagcgacacgcccgugcacgacugcaacacgaccugccagaccccgaagggcgccaucaacaccucccugcccuuccagaacauccaccccaucaccaucgggaagugccccaaguacgucaagagcaccaagcugcgccucgcgaccggccugcggaacgugccguccauccagagccgcgggcuguucggcgccaucgccggguucaucgagggcggcuggacggggaugguggacggcugguacggguaccaccaccagaacgagcagggcuccggguacgccgccgaccucaagagcacccagaacgcgaucgacgagaucaccaacaaggugaacuccgucaucgagaagaugaacacccaguucacggccgugggcaaggaguucaaccaccuggagaagcggaucgagaaccugaacaagaaggucgacgacggcuuccucgacaucuggaccuacaacgccgagcugcuggugcuccuggagaacgagcgcacccuggacuaccacgacagcaacgugaagaaccucuacgagaagguccggucccagcugaagaacaacgccaaggagaucgggaacggcugcuucgaguucuaccacaagugcgacaacacgugcauggagagcgugaagaacgggaccuacgacuaccccaaguacuccgaggaggccaagcugaaccgcgaggagaucgacggcgugaagcucgagagcacccggaucuaccagauccuggcgaucuacuccaccgucgccagcagccuggugcucguggucucccugggggccaucagcuucuggaugugcuccaacggcagccugcagugccgcaucugcaucuga

SEQ ID NO: 72965 - RNA, 1701 nt, Artificial Sequence
  derived and/or modified CDS sequence (opt1) from hemagglutinin__InfluenzaA__AFJ78881
augaaggccauccuggugguccuccuguacaccuucgccaccgcgaacgccgacacgcugugcaucggcuaccacgccaacaacagcaccgacaccguggacaccgugcucgagaagaacgucacggugacccacuccgugaaccugcuggaggacaagcacaacgggaagcucugcaagcugcgcggcgucgcgccccugcaccucgggaagugcaacaucgccggcuggauccuggggaacccggagugcgagagccuguccaccagcuccagcugguccuacaucguggagaccagcuccagcgacaacggcacgugcuaccccggcgacuucaucgacuacgaggagcuccgggagcagcuguccagcguguccagcuucgagcgcuucgagaucuuccccaagaccuccagcuggcccaaccacgacuccaacaagggggucaccgccgccugcccgcacgccggcgccaagagcuucuacaagaaccugaucuggcucgugaagaaggggaacuccuaccccaagcugagcaagagcuacaucaacgacaagggcaaggaggugcugguccucugggggauccaccaccccuccaccagcgcggaccagcagucccuguaccagaacgccgacgccuacguguucgugggcacgagccgguacuccaagaaguucaagcccgagaucgccauccgcccgaagguccgggaccaggagggccgcaugaacuacuacuggacccugguggagcccggggacaagaucaccuucgaggccaccggcaaccucguggucccccgguacgcguucgccauggagcgcaacgccgggagcggcaucaucaucuccgacacgcccgugcacgacugcaacacgaccugccagaccccgaagggcgccaucaacaccagccugcccuuccagaacauccaccccaucaccaucgggaagugccccaaguacgugaaguccaccaagcugcggcucgccaccggccugcgcaacgucccgagcauccagucccgggggcuguucggcgcgaucgccggguucaucgagggcggcuggacggggaugguggacggcugguacggguaccaccaccagaacgagcagggcagcggguacgccgccgaccucaaguccacccagaacgccaucgacgagaucaccaacaaggugaacagcgucaucgagaagaugaacacccaguucacggcggugggcaaggaguucaaccaccuggagaagcgcaucgagaaccugaacaagaaggucgacgacggcuuccucgacaucuggaccuacaacgccgagcugcuggugcuccuggagaacgagcggacccuggacuaccacgacuccaacgugaagaaccucuacgagaagguccgcagccagcugaagaacaacgccaaggagaucgggaacggcugcuucgaguucuaccacaagugcgacaacacgugcauggaguccgugaagaacgggaccuacgacuaccccaaguacagcgaggaggccaagcugaaccgggaggagaucaacggcgugaagcucgaguccacccgcaucuaccagauccuggccaucuacagcaccgcggccagcucccugguccucguggugagccugggggccaucuccuucuggaugugcagcaacggcucccugcagugccggaucugcaucuga

SEQ ID NO: 72966 - RNA, 1701 nt, Artificial Sequence; identical to SEQ ID NO: 66693
  derived and/or modified CDS sequence (opt1) from hemagglutinin__InfluenzaA__AFJ78891

SEQ ID NO: 72967 - RNA, 1701 nt, Artificial Sequence; identical to SEQ ID NO: 66693
  derived and/or modified CDS sequence (opt1) from hemagglutinin__InfluenzaA__AFJ78901

SEQ ID NO: 72968 - RNA, 1701 nt, Artificial Sequence; identical to SEQ ID NO: 66693
  derived and/or modified CDS sequence (opt1) from hemagglutinin__InfluenzaA__AFJ78911

SEQ ID NO: 72969 - RNA, 1701 nt, Artificial Sequence; identical to SEQ ID NO: 66693
  derived and/or modified CDS sequence (opt1) from hemagglutinin__InfluenzaA__AFJ78921

SEQ ID NO: 72970 - RNA, 1701 nt, Artificial Sequence
  derived and/or modified CDS sequence (opt1) from hemagglutinin__InfluenzaA__AFJ97567
augaaggccauccuggugguccuccuguacaccuucgccaccgcgaacgccgacacgcugugcaucggcuaccacgccaacaacagcaccgacaccguggacaccgugcucgagaagaacgucacggugacccacuccguggaccugcuggaggacaagcacaacgggaagcucugcaagcugcgcggcgucgcgccccugcaccucgggaagugcaacaucgccggcuggauccuggggaacccggagugcgagagccuguccaccgccagcuccuggagcuacaucguggagaccuccagcuccgacaacggcacgugcuaccccggcgacuucaucgacuacgaggagcuccgggagcagcugagcuccgugagcuccuucgagcgcuucgagaucuuccccaagaccagcuccuggcccaaccacgacagcaacaagggggucaccgccgccugcccgcacgccggcgcgaaguccuucuacaagaaccugaucuggcucgugaagaaggggaacagcuaccccaagcugaacaaguccuacaucaacgacaagggcaaggaggugcugguccucugggggauccaccaccccagcaccagcacggaccagcagucccuguaccagaacgccgacgccuacguguucgugggcaccagccgguacuccaagaaguucaagcccgagaucgccauccgcccgaagguccgggaccaggagggccgcaugaacuacuacuggacccugguggagcccggggacaagaucaccuucgaggccacgggcaaccucguggucccccgguacgcguucaccauggagcgcaacgccgggagcggcaucaucaucuccgacacccccgugcacgacugcaacaccacgugccagaccccgaagggcgccaucaacaccagcuuccccuuccagaacauccaccccaucaccaucgggaagugccccaaguacgugaaguccacgaagcugcggcuggccaccggccuccgcaacgucccgagcauccagucccgggggcuguucggcgccaucgcgggguucaucgagggcggcuggaccgggaugguggacggcugguacggguaccaccaccagaacgagcagggcagcggguacgccgccgaccugaaguccacccagaacgccaucgacgagaucacgaacaaggugaacagcgucaucgagaagaugaacacccaguucaccgccgugggcaaggaguucaaccaccucgagaagcgcaucgagaaccugaacaagaaggucgacgacggcuuccuggacaucuggaccuacaacgcggagcuccuggugcugcucgagaacgagcggacgcuggacuaccacgacuccaacgugaagaaccuguacgagaagguccgcagccagcucaagaacaacgccaaggagaucgggaacggcugcuucgaguucuaccacaagugcgacaacacgugcauggaguccgugaagaacgggaccuacgacuaccccaaguacagcgaggaggccaagcugaaccgggaggagaucgacggcgugaagcuggaguccacccgcaucuaccagauccucgccaucuacagcaccgucgccuccagccuggugcugguggucagccucggggcgaucuccuucuggaugugcagcaacggcucccugcagugccggaucugcaucuga

SEQ ID NO: 72971 - RNA, 1701 nt, Artificial Sequence; identical to SEQ ID NO: 66693
  derived and/or modified CDS sequence (opt1) from hemagglutinin__InfluenzaA__AFK14115

SEQ ID NO: 72972 - RNA, 1701 nt, Artificial Sequence; identical to SEQ ID NO: 66693
  derived and/or modified CDS sequence (opt1) from hemagglutinin__InfluenzaA__AFK14131

SEQ ID NO: 72973 - RNA, 1701 nt, Artificial Sequence; identical to SEQ ID NO: 68375
  derived and/or modified CDS sequence (opt1) from hemagglutinin__InfluenzaA__AFK14139

SEQ ID NO: 72974 - RNA, 1701 nt, Artificial Sequence
  derived and/or modified CDS sequence (opt1) from hemagglutinin__InfluenzaA__AFK14148
augaaggccauccuggugguccuccuguacaccuucgccaccgcgaacgccgacacgcugugcaucggcuaccacgccaacaacagcaccgacaccguggacaccgugcucgagaagaacgucacggugacccacuccgugaaccugcuggaggacaagcacaacgggaagcucugcaagcugcgcggcgucgcgccccugcaccucgggaagugcaacaucgccggcuggauccuggggaacccggagugcgagagccuguccaccgccagcuccuggagcuacaucguggagaccuccagcuccgacaacggcacgugcuaccccggcgacuucaucgacuacgaggagcuccgggagcagcugagcuccgugagcuccuucgagcgcuucgagaucuuccccaagaccagcuccuggcccaaccacgacagcaacaagggggucaccgccgccugcccgcacgccggcgcgaaguccuucuacaagaaccugaucuggcucgugaagaaggggaacagcuaccccaagcuguccaagagcuacaucaacgacaagggcaaggaggugcugguccucugggggauccaccaccccagcaccuccgccgaccagcagagccuguaccagaacgccgacgccuacguguucgugggcacgucccgguacagcaagaaguucaagcccgagaucgccauccgcccgaagguccgggaccaggagggccgcaugaacuacuacuggacccugguggagcccggggacaagaucaccuucgaggcgaccggcaaccucguggucccccgguacgccuucgccauggagcgcaacgccggguccggcaucaucaucagcgacacgcccgugcacgacugcaacacgaccugccagaccccgaagggcgccaucaacaccucccugcccuuccagaacauccaccccaucaccaucgggaagugccccaaguacgucaagagcaccaagcugcggcucgcgaccggccugcgcaacgugccguccauccagagccgggggcuguucggcgccaucgccggguucaucgagggcggcuggacggggaugguggacggcugguacggguaccaccaccagaacgagcagggcuccggguacgccgccgaccucaagagcacccagaacgcgaucgacaagaucaccaacaaggugaacuccgucaucgagaagaugaacacccaguucacggccgugggcaaggaguucaaccaccuggagaagcgcaucgagaaccugaacaagaaggucgacgacggcuuccucgacaucuggaccuacaacgccgagcugcuggugcuccuggagaacgagcggacccuggacuaccacgacagcaacgugaagaaccucuacgagaagguccgcaaccagcugaagaacaacgccaaggagaucgggaacggcugcuucgaguucuaccacaagugcgacaacacgugcauggaguccgugaagaacgggaccuacgacuaccccaaguacagcgaggaggccaagcugaaccgggaggagaucgacggcgugaagcucgaguccacccgcaucuaccagauccuggcgaucuacagcaccgucgccuccagccuggugcucguggucagccugggggccaucuccuucuggaugugcagcaacggcucccugcagugccggaucugcaucuga

SEQ ID NO: 72975 - RNA, 1701 nt, Artificial Sequence; identical to SEQ ID NO: 68320
  derived and/or modified CDS sequence (opt1) from hemagglutinin__InfluenzaA__AFK14157

SEQ ID NO: 72976 - RNA, 1701 nt, Artificial Sequence; identical to SEQ ID NO: 66693
  derived and/or modified CDS sequence (opt1) from hemagglutinin__InfluenzaA__AFK14166

SEQ ID NO: 72977 - RNA, 1701 nt, Artificial Sequence; identical to SEQ ID NO: 68021
  derived and/or modified CDS sequence (opt1) from hemagglutinin__InfluenzaA__AFK14175

SEQ ID NO: 72978 - RNA, 1701 nt, Artificial Sequence; identical to SEQ ID NO: 69598
  derived and/or modified CDS sequence (opt1) from hemagglutinin__InfluenzaA__AFK14184

SEQ ID NO: 72979 - RNA, 1701 nt, Artificial Sequence; identical to SEQ ID NO: 67046
  derived and/or modified CDS sequence (opt1) from hemagglutinin__InfluenzaA__AFK14193

SEQ ID NO: 72980 - RNA, 1701 nt, Artificial Sequence; identical to SEQ ID NO: 68290
  derived and/or modified CDS sequence (opt1) from hemagglutinin__InfluenzaA__AFK14202

SEQ ID NO: 72981 - RNA, 1701 nt, Artificial Sequence; identical to SEQ ID NO: 67046
  derived and/or modified CDS sequence (opt1) from hemagglutinin__InfluenzaA__AFK14211

SEQ ID NO: 72982 - RNA, 1701 nt, Artificial Sequence
  derived and/or modified CDS sequence (opt1) from hemagglutinin__InfluenzaA__AFK14220
augaaggccauccuggugguccuccuguacaccuucgccaccgcgaacgccgacacgcugugcaucggcuaccacgccaacaacagcaccgacaccguggacaccgugcucgagaagaacgucacggugacccacuccgugaaccugcuggaggacaagcacaacgggaagcucugcaagcugcgcggcgucgcgccccugcaccucgggaagugcaacaucgccggcuggauccuggggaacccggagugcgagagccuguccaccgccagcuccuggagcuacaucguggagaccuccagcuccgacaacggcacgugcuaccccggcgacuucaucgacuacgaggagcuccgggagcagcugagcuccgccagcuccuucgagcgcuacgagaucuuccccaagaccagcuccuggcccaaccacgacagcaacaagggggugaccgccgccugcccgcacgcgggcgccaaguccuucuacaagaaccugaucuggcucgucaagaaggggaacagcuaccccaagcuguccaagagcuacaucaacgacaagggcaaggaggugcuggugcucugggggauccaccaccccagcaccuccgccgaccagcagagccuguaccagaacgccgacgccuacgucuucgugggcacgucccgguacagcaagaaguucaagcccgagaucgcgauccgcccgaaggugcgggaccaggagggccgcaugaacuacuacuggacccuggucgagcccggggacaagaucaccuucgaggccaccggcaaccucguggugccccgguacgccuucgccauggagcgcaacgccggguccggcaucaucaucagcgacacgcccguccacgacugcaacacgaccugccagaccccgaagggcgcgaucaacaccucccugcccuuccagaacauccaccccaucaccaucgggaagugccccaaguacgucaagagcaccaagcugcggcucgccaccggccugcgcaacgugccguccauccagagccgggggcuguucggcgccaucgccggguucaucgagggcggcuggacggggaugguggacggcugguacggguaccaccaccagaacgagcagggcuccggguacgccgcggaccucaagagcacccagaacgccaucgacaagaucaccaacaaggugaacuccgugaucgagaagaugaacacccaguucacggccgucggcaaggaguucaaccaccuggagaagcgcaucgagaaccugaacaagaagguggacgacggcuuccucgacaucuggaccuacaacgccgagcugcugguccuccuggagaacgagcggacccuggacuaccacgacagcaacgugaagaaccucuacgagaaggugcgcaaccagcugaagaacaacgccaaggagaucgggaacggcugcuucgaguucuaccacaagugcgacaacacgugcauggaguccgucaagaacgggaccuacgacuaccccaaguacagcgaggaggcgaagcugaaccgggaggagaucgacggcgugaagcucgaguccacccgcaucuaccagauccuggccaucuacagcaccguggccuccagccugguccucguggugagccugggggccaucuccuucuggaugugcagcaacggcucccugcagugccggaucugcaucuga

SEQ ID NO: 72983 - RNA, 1701 nt, Artificial Sequence; identical to SEQ ID NO: 68320
  derived and/or modified CDS sequence (opt1) from hemagglutinin__InfluenzaA__AFK14229

SEQ ID NO: 72984 - RNA, 1701 nt, Artificial Sequence; identical to SEQ ID NO: 71458
  derived and/or modified CDS sequence (opt1) from hemagglutinin__InfluenzaA__AFK14238

SEQ ID NO: 72985 - RNA, 1701 nt, Artificial Sequence
  derived and/or modified CDS sequence (opt1) from hemagglutinin__InfluenzaA__AFK14247
augaaggccauccuggugguccuccuguacaccuucgccaccgcgaacgccgacacgcugugcaucggcuaccacgccaacaacagcaccgacaccguggacaccgugcucgagaagaacgucacggugacccacuccgugaaccugcuggaggacaagcacaacgggaagcucugcaagcugcgcggcgucgcgccccugcaccucgggaagugcaacaucgccggcuggauccuggggaacccggagugcgagagccuguccaccgccagcuccuggagcuacaucguggagaccuccagcuccgacaacggcacgugcuaccccggcgacuucaucgacuacgaggagcuccgggagcagcugagcuccgugagcuccuucgagcgcuucgagaucuuccccaagaccagcuccuggcccaaccacgacagcaacaagggggucaccgccgccugcccgcacgccggcgcgaaguccuucuacaagaaccugaucuggcucgugaagaaggggaacagcuaccccaagcuguccaagagcuacaucaacgacaagggcaaggaggugcugguccucugggggauccaccaccccagcaccuccgccgaccagcagagccuguaccagaacgccgacgccuacguguucgugggcacgucccgguacagcaagaaguucaagcccgagaucgccauccgcccgaagguccgggaccaggagggccgcaugaacuacuacuggacccugguggagcccggggacaagaucaccuucgaggcgaccggcaaccucguggucccccgguacgccuucgccauggagcgcaacgccggguccggcaucaucaucagcgacacgcccgugcacgacugcaacacgaccugccagaccccgaagggcgccaugaacaccucccugcccuuccagaacauccaccccaucaccaucgggaagugccccaaguacgucaagagcaccaagcugcggauggcgaccggccuccgcaacgugccguccauccagagccgggggcuguucggcgccaucgccggguucaucgagggcggcuggacggggaugguggacggcugguacggguaccaccaccagaacgagcagggcuccggguacgccgccgaccucaagagcacccagaacgcgaucgacgagaucaccaacaaggugaacuccgucaucgagaagaugaacacccaguucacggccgugggcaaggaguucaaccaccuggagaagcgcaucgagaaccugaacaagaaggucgacgacggcuuccuggacaucuggaccuacaacgccgagcuccuggugcugcucgagaacgagcggacccuggacuaccacgacagcaacgugaagaaccuguacgagaagguccgcucccagcucaagaacaacgccaaggagaucgggaacggcugcuucgaguucuaccacaagugcgacaacacgugcauggagagcgugaagaacgggaccuacgacuaccccaaguacuccgaggaggccaagcugaaccgggaggagaucgacggcgugaagcuggagagcacccgcaucuaccagauccucgcgaucuacuccaccgucgccagcagccuggugcugguggucucccucggggccaucagcuucuggaugugcuccaacggcagccugcagugccggaucugcaucuga

SEQ ID NO: 72986 - RNA, 1701 nt, Artificial Sequence
  derived and/or modified CDS sequence (opt1) from hemagglutinin__InfluenzaA__AFK14272
augaaggccauccugaucgugcuccuguacaccuucgccaccgcgaacgccgacacgcugugcaucggcuaccacgccaacaacagcaccgacaccgucgacaccgugcucgagaagaacgugacggucacccacuccgugaaccugcuggaggacaagcacaacgggaagcucugcaagcugaccggcguggcgccccugcaccucgggaagugcgacaucgccggcuggauccuggggaacccggagugcgagagccuguccaccgccagcuccuggagcuacaucgucgagacguccagcuccgacaacgggaccugcuaccccggcgacuucaucgacuacgaggagcuccgcgagcagcugagcuccgugagcuccuucgagcgguucgagaucuuccccaagaccagcuccuggcccaaccacgacagcaacaagggcgugaccgccgccugcccgcacgccggcgcgaaguccuucuacaagaaccugaucuggcucgucaagaaggggaacagcuaccccaagcuguccaagagcuacaucaacgacaagggcaaggaggugcuggugcucugggggauccaccaccccagcacguccgccgaccagcagagccuguaccagaacgccgacgccuacgucuucgugggcaccucccgcuacagcaagaaguucaagcccgagaucgccauccggccgaaggugcgcgaccaggagggccggaugaacuacuacuggacccuggucgagcccggggacaagaucaccuucgaggcgacgggcaaccucguggugccccgcuacgccuucgccauggagcggaacgccggguccggcaucaucaucagcgacacccccguccacgacugcaacacgaccugccagaccccgaagggcgccaucaacaccucccugcccuuccagaacauccaccccaucaccaucgggaagugccccaaguacgucaagagcaccaagcugcgccucgcgacgggccugcggaacgugccguccauccagagccgcgggcuguucggcgccaucgccggguucaucgagggcggcuggaccgggaugguggacggcugguacggguaccaccaccagaacgagcagggcuccggguacgccgccgaccucaagagcacccagcacgcgaucgacgagaucaccaacaaggugaacuccgugaucgagaagaugaacacgcaguucaccgccgucggcaaggaguucaaccaccuggagaagcggaucgagaaccugaacaagaagguggacgacggcuuccucgacaucuggaccuacaacgccgagcugcugguccuccuggagaacgagcgcacccuggacuaccacgacagcaacgugaagaaccucuacgagaaggugcggucccagcugaagaacaacgccaaggagaucgggaacggcugcuucgaguucuaccacaagugcgacaacacgugcauggagagcgucaagaacgggaccuacgacuaccccaaguacuccgaggaggccaagcugaaccgcgaggagaucgacggcgugaagcucgagagcacccggaucuaccagauccuggcgaucuacuccaccguggccagcagccugguccucguggugucccugggggccaucagcuucuggaugugcuccaacggcagccugcagugccgcaucugcaucuga

SEQ ID NO: 72987 - RNA, 1701 nt, Artificial Sequence; identical to SEQ ID NO: 67046
  derived and/or modified CDS sequence (opt1) from hemagglutinin__InfluenzaA__AFK14314

SEQ ID NO: 72988 - RNA, 1701 nt, Artificial Sequence
  derived and/or modified CDS sequence (opt1) from hemagglutinin__InfluenzaA__AFK14323
augaaggccauccuggugguccuccuguacaccuucgccaccgcgaacgccgacacgcugugcaucggcuaccacgccaacaacagcaccgacaccguggacaccgugcucgagaagaacgucacggugacccacuccgugaaccugcuggaggacaagcacaacgggaagcucugcaagcugcgcggcgucgcgccccugcaccucgggaagugcaacaucgccggcuggauccuggggaacccggagugcgagagccuguccaccgcgagcuccuggagcuacaucguggagaccuccaacagcgacaacggcacgugcuaccccggcgacuucaucaacuacgaggagcuccgggagcagcuguccagcguguccagcuucgagcgcuucgagaucuuccccaagaccuccagcuggcccaaccacgacuccaacaagggggucaccgccgccugcccgcacgccggcgccaagagcuucuacaagaaccugaucuggcucgugaagaaggggaacuccuaccccaagcugagcaaguccuacaucaacgacaagggcaaggaggugcugguccucugggggauccaccaccccagcaccagcgccgaccagcagucccuguaccagaacgccgacgccuacguguucgugggcacgagccgguacuccaagaaguucaagcccgagaucgccauccgcccgaagguccgggaccaggagggccgcaugaacuacuacuggacccugguggagcccggggacaagaucaccuucgaggcgaccggcaaccucguggucccccgguacgccuucgccauggagcgcaacgccgggagcggcaucaucaucuccgacacgcccgugcacgacugcaacacgaccugccagaccccgaagggcgccaucaacaccagccugcccuuccagaacauccaccccaucaccaucgggaagugccccaaguacgugaaguccaccaagcugcggcucgcgaccggccugcgcaacgucccgagcauccagucccgggggcuguucggcgccaucgccggguucaucgagggcggcuggacggggaugguggacggcugguacggguaccaccaccagaacgagcagggcagcggguacgccgccgaccucaaguccacccagaacgcgaucgacaagaucaccaacaaggugaacagcgucaucgagaagaugaacacccaguucacggccgugggcaaggaguucaaccaccuggagaagcgcaucgagaaccugaacaagaaggucgacgacggcuuccucgacaucuggaccuacaacgccgagcugcuggugcuccuggagaacgagcggacccuggacuaccacgacuccaacgugaagaaccucuacgagaagguccgcagccagcugaagaacaacgccaaggagaucgggaacggcugcuucgaguucuaccacaagugcgacaacacgugcauggaguccgugaagaacgggaccuacgacuaccccaaguacagcgaggaggccaagcugaaccgggaggagaucgacggcgugaagcucgaguccacccgcaucuaccagauccuggcgaucuacagcaccgucgccuccagccuggugcucguggucagccugggggccaucuccuucuggaugugcagcaacggcucccugcagugccggaucugcaucuga

SEQ ID NO: 72989 - RNA, 1701 nt, Artificial Sequence; identical to SEQ ID NO: 71458
  derived and/or modified CDS sequence (opt1) from hemagglutinin__InfluenzaA__AFK14332

SEQ ID NO: 72990 - RNA, 1701 nt, Artificial Sequence
  derived and/or modified CDS sequence (opt1) from hemagglutinin__InfluenzaA__AFK14341
augaaggccauccuggugguccuccuguacaccuucgccaccgcgaacgccgacacgcugugcaucggcuaccacgccaacaacagcaccgacaccguggacaccgugcucgagaagaacgucacggugacccacuccgugaaccugcuggaggacaagcacaacgggaagcucugcaagcugcgcggcgucgcgccccugcaccucgggaagugcaacaucgccggcuggauccuggggaacccggagugcgagagccuguccaccgccagcuccuggagcuacaucguggagaccuccagcuccgacaacggcacgugcuaccccggcgacuucaucgacuacgaggagcuccgggagcagcugagcuccgugagcuccuucgagcgcuucgagaucuuccccaagaccagcuccuggcccaaccacgacagcaacaagggggucaccgccgccugcccgcacgccggcgcgaaguccuucuacaagaaccugaucuggcucgugaagaaggggaacagcuaccccaagcuguccaagagcuacaucaacgacaagggcaaggaggugcugguccucugggggauccaccaccccagcaccuccgccgaccagcagagccuguaccagaacgccgacgccuacguguucgugggcacgucccgguacagcaagaaguucaagcccgagaucgccauccgcccgaagguccgggagcaggagggccgcaugaacuacuacuggacccugguggagcccggggacaagaucaccuucgaggcgaccggcaaccucguggucccccgguacgccuucgccauggagcgcaacgccggguccggcaucaucaucagcgacacgcccgugcacgacugcaacacgaccugccagaccccgaagggcgccaucaacaccucccugcccuuccagaacauccaccccaucaccaucgggaagugccccaaguacgucaagagcaccaagcugcggcucgcgaccggccugcgcaacgugccguccauccagagccgggggcuguucggcgccaucgccggguucaucgagggcggcuggacggggaugguggacggcugguacggguaccaccaccagaacgagcagggcuccggguacgccgccgaccucaagagcacccagaacgcgaucgacgagaucaccaacaaggugaacuccgucaucgagaagaugaacacccaguucacggccgugggcaaggaguucaaccaccuggagaagcgcaucgagaaccugaacaagaaggucgacgacggcuuccucgacaucuggaccuacaacgccgagcugcuggugcuccuggagaacgagaagacccuggacuaccacgacagcaacgugaagaaccucuacgagaagguccggucccagcugaagaacaacgccaaggagaucgggaacggcugcuucgaguucuaccacaagugcgacaacacgugcauggagagcgugaagaacgggaccuacgacuaccccaaguacuccgaggaggccaagcugaaccgcgaggagaucgacggcgugaagcucgagagcacccggaucuaccagauccuggcgaucuacuccaccgucgccagcagccuggugcucguggucucccugggggccaucagcuucuggaugugcuccaacggcagccugcagugccgcaucugcaucuga

SEQ ID NO: 72991 - RNA, 1701 nt, Artificial Sequence; identical to SEQ ID NO: 68113
  derived and/or modified CDS sequence (opt1) from hemagglutinin__InfluenzaA__AFK14350

SEQ ID NO: 72992 - RNA, 1701 nt, Artificial Sequence
  derived and/or modified CDS sequence (opt1) from hemagglutinin__InfluenzaA__AFK14358
augaaggccauccuggugguccuccuguacaccuucgccaccgcgaacgccgacacgcugugcaucggcuaccacgccaacaacagcaccgacaccguggacaccgugcucgagaagaacgucacggugacccacuccgugaaccugcuggaggacaagcacaacgggaagcucugcaagcugcgcggcgucgcgccccugcaccucgggaagugcaacaucgccggcuggauccuggggaacccggagugcgagagccuguccaccgccagcuccuggagcuacaucguggagaccuccagcuccgacaacggcgccugcuaccccggcgacuucaucgacuacgaggagcuccgggagcagcugagcuccgugagcuccuucgagcgcuucgagaucuuccccaagacgagcuccuggcccaaccacgacagcaacaagggggucaccgccgccugcccgcacgcgggcgccaaguccuucuacaagaaccugaucuggcucgugaagaaggggaacagcuaccccaagcuguccaagagcuacaucaacgacaagggcaaggaggugcugguccucugggggauccaccaccccagcaccuccgccgaccagcagagccuguaccagaacgccgacgccuacguguucgugggcaccucccgguacagcaagaaguucaagcccgagaucgcgauccgcccgaagguccgggagcaggagggccgcaugaacuacuacuggacgcugguggagcccggggacaagaucaccuucgaggccaccggcaaccucguggucccccgguacgccuucgccauggagcgcaacgccggguccggcaucaucaucagcgacacccccgugcacgacugcaacacgaccugccagaccccgaagggcgcgaucaacaccucccugcccuuccagaacauccaccccaucacgaucgggaagugccccaaguacgucaagagcaccaagcugcggcucgccaccggccugcgcaacgugccguccauccagagccgggggcuguucggcgccaucgccggguucaucgagggcggcuggaccgggaugguggacggcugguacggguaccaccaccagaacgagcagggcuccggguacgccgcggaccucaagagcacgcagaacgccaucgacgagaucaccaacaaggugaacuccgucaucgagaagaugaacacccaguucaccgccgugggcaaggaguucaaccaccuggagaagcgcaucgagaaccugaacaagaaggucgacgacggcuuccucgacaucuggacguacaacgccgagcugcuggugcuccuggagaacgagaagacccuggacuaccacgacagcaacgugaagaaccucuacgagaagguccggucccagcugaagaacaacgccaaggagaucgggaacggcugcuucgaguucuaccacaagugcgacaacacgugcauggagagcgugaagaacgggaccuacgacuaccccaaguacuccgaggaggcgaagcugaaccgcgaggagaucgacggcgugaagcucgagagcacccggaucuaccagauccuggccaucuacuccaccgucgccagcagccuggugcucguggucucccugggggccaucagcuucuggaugugcuccaacggcagccugcagugccgcaucugcaucuga

SEQ ID NO: 72993 - RNA, 1701 nt, Artificial Sequence
  derived and/or modified CDS sequence (opt1) from hemagglutinin__InfluenzaA__AFK14395
augaaggccauccuggugguccuccuguacaccuucgccaccgcgaacgccgacacgcugugcaucggcuaccacgccaacaacagcaccgacaccguggacaccgugcucgagaagaacgucacggugacccacuccgugaacauccuggaggacaagcacaacgggaagcugugcaagcuccgcggcgucgcgccccugcaccuggggaagugcaacaucgccggcuggauccucgggaacccggagugcgagagccuguccaccgccagcuccuggagcuacaucguggagaccuccagcuccgagaacggcaugugcugcccccgggacuucaucgacuacgaggagcugcgcgagcagcucagcuccgugagcuccuucgagcgguucgagaucuuccccaagacgagcuccuggcccaaccacgacagcaacaagggcgucaccgccgccugcccgcacgccggggcgaaguccuucuacaagaaccugaucuggcuggugaagaagggcaacagcuaccccaagcucuccaagagcuacaucaacgacaaggggaaggaggugcugguccuguggggcauccaccaccccagcaccuccgccgaccagcagagccucuaccagaacgccgacgccuacguguucgugggguccagccgcuacuccaagaaguucaagcccgagaucgccauccggccgaagguccgcgaccaggagggccggaugaacuacuacuggacccugguggagcccggcgacaagaucacguucgaggcgaccgggaaccugguggucccccgcuacgccuucgccauggagcggaacgccggcagcgggaucaucaucuccgacacccccgugcacgacugcaacaccacgugccagaccccgaagggcgccaucaacaccagccuccccuuccagaacauccaccccaucaccaucggcaagugccccaaguacgugaaguccacgaagcugcgccuggcgaccgggcuccggaacgucccgagcauccagucccgcggccuguucggggccaucgccggcuucaucgagggcggguggaccggcaugguggacgggugguacggcuaccaccaccagaacgagcaggggagcggcuacgccgccgaccugaaguccacccagaacgcgaucgacgagaucacgaacaaggugaacagcgucaucgagaagaugaacacccaguucaccgccguggggaaggaguucaaccaccucgagaagcggaucgagaaccugaacaagaaggucgacgacggcuuccuggacaucuggaccuacaacgccgagcuccuggugcugcucgagaacgagcgcacgcuggacuaccacgacuccaacgugaagaaccuguacgagaagguccggagccagcucaagaacaacgccaaggaggugggcaacgggugcuucgaguucuaccacaagugcgacaacacgugcauggaguccgugaagaacggcaccuacgacuaccccaaguacagcgaggaggccaagcugaaccgcgaggagaucgacggggucaagcuggaguccacccggaucuaccagauccucgcgaucuacagcaccgccgccagcucccuggugcugguggucagccucggcgccaucuccuucuggaugugcagcaacgggucccugcagugccgcaucugcaucuga

SEQ ID NO: 72994 - RNA, 1701 nt, Artificial Sequence
  derived and/or modified CDS sequence (opt1) from hemagglutinin__InfluenzaA__AFK14431
augaaggccauccuggugguccuccuguacaccuucgccaccgcgaacgccgacacgcugugcaucggcuaccacgccaacaacagcaccgacaccguggacaccgugcucgagaagaacgucacggugacccacuccgugaaccugcuggaggacaagcacaacgggaagcucugcaagcugcgcggcgucgcgccccugcaccucgggaagugcaacaucgccggcuggauccuggggaacccggagugcgagagccuguccaccgcgagcuccuggagcuacaucguggagaccuccaacagcgacaacggcacgugcuaccccggcgacuuccucgacuacgaggagcugcggaagcagcuguccagcguguccagcuucgagcgcgucgagaucuuccccaagaccuccagcuggcccaaccacgacuccaacaagggggugaccgccgccugcccgcacgccggcgccaagagcuucuacaagaaccucaucuggcuggugaagaaggggaacuccuaccccaagcugagcaaguccuacaucaacgacaagggcaaggagguccucgugcugugggggauccaccaccccagcaccagcgccgaccagcagucccuguaccagaacgccgacgccuacguguucgucggcacgagccgguacuccaagaaguucaagcccgagaucgccauccgcccgaaggugcgggaccaggagggccgcaugaacuacuacuggacccucguggagcccggggacaagaucaccuucgaggcgaccggcaaccuggucgugccccgguacgccuucgccauggagcgcaacgccgggagcggcaucaucaucuccgacacgcccgugcacgacugcaacacgaccugccagaccccgaagggcgccaucaacaccagccugcccuuccagaacauccaccccaucaccaucgggaagugccccaaguacgucaaguccaccaagcuccggcuggcgaccggccugcgcaacgugccgagcauccagucccggggccucuucggggccaucgccggguucaucgagggcggcuggacggggaugguggacggcugguacggguaccaccaccagaacgagcagggcagcggguacgccgccgaccugaaguccacccagaacgcgaucgacaagaucaccaacaaggucaacagcgugaucgagaagaugaacacccaguucacggccgucggcaaggaguucaaccaccuggagaagcgcaucgagaaccucaacaagaagguggacgacggcuuccuggacaucuggaccuacaacgccgagcugcucgugcugcuggagaacgagcggacccucgacuaccacgacuccaacgucaagaaccuguacgagaaggugcgcagccagcugaagaacaacgccaaggagaucgggaacggcugcuucgaguucuaccacaagugcgacaacacgugcauggaguccgugaagaacgggaccuacgacuaccccaaguacagcgaggaggccaagcucaaccgggaggagaucgacggcgucaagcuggaguccacccgcaucuaccagauccuggcgaucuacagcaccguggccuccagccucgugcuggucgugagccugggggccaucuccuucuggaugugcagcaacggcucccuccagugccggaucugcaucuga

SEQ ID NO: 72995 - RNA, 1701 nt, Artificial Sequence; identical to SEQ ID NO: 66693
  derived and/or modified CDS sequence (opt1) from hemagglutinin__InfluenzaA__AFK14456

SEQ ID NO: 72996 - RNA, 1701 nt, Artificial Sequence; identical to SEQ ID NO: 66693
  derived and/or modified CDS sequence (opt1) from hemagglutinin__InfluenzaA__AFK14465

SEQ ID NO: 72997 - RNA, 1701 nt, Artificial Sequence
  derived and/or modified CDS sequence (opt1) from hemagglutinin__InfluenzaA__AFK14536
augaaggccauccuggugguccuccuguacaccuucgccaccgcgaacgccgacacgcugugcaucggcuaccacgccaacaacagcaccgacaccguggacaccgugcucgagaagaacgucacggugacccacuccgugaaccugcuggaggacaagcacaacgggaagcucugcaagcugcgcggcgucgcgccccugcaccucgggaagugcaacaucgccggcuggauccuggggaacccggagugcgagagccuguccaccgcgagcuccuggagcuacaucguggagaccuacuccagcgacaacggcacgugcuaccccggcgacuucaucgacuacgaggagcuccgggagcagcuguccagcguguccagcuucgagcgcuucgagaucuuccccaagaccuccagcuggcccaaccacgacuccaacaagggggucaccgccgccugcccgcacgccggcgccaagagcuucuacaagaaccugaucuggcucgugaagaaggggaacuccuaccccaagcugagcaaguccuacaucaacgacaagggcaaggaggugcugguccucugggggauccaccaccccagcaccagcgccgaccagcagucccuguaccagaacgccgacgccuacguguucgugggcacgagccgguacuccaagaaguucaagcccgagaucgccauccgcccgaagguccgggaccaggagggccgcaugaacuacuacuggacccugguggagcccggggacaagaucaccuucgaggcgaccggcaaccucguggucccccgguacgccuucgccauggagcgcaacgccgggagcggcaucaucaucuccgacacgcccgugcacgacugcaacacgaccugccagaccccgaagggcgccaucaacaccagccugcccuuccagaacauccaccccaucaccaucgggaagugccccaaguacgugaaguccaccaagcugcggcucgcgaccggccugcgcaacgucccgagcauccagucccgggggcuguucggcgccaucgccggguucaucgagggcggcuggacggggaugguggacggcugguacggguaccaccaccagaacgagcagggcagcggguacgccgccgaccucaaguccacccagcacgcgaucgacgagaucaccaacaaggugaacagcgucaucgagaagaugaacacccaguucacggccgugggcaaggaguucaaccaccuggagaagcgcaucgagaaccugaacaagaaggucgacgacggcuuccucgacaucuggaccuacaacgccgagcugcuggugcuccuggagaacgagcggacccuggacuaccacgacuccaacgugaagaaccucuacgagaagguccgcagccagcugaagaacaacgccaaggagaucgggaacggcugcuucgaguucuaccacaagugcgacaacacgugcauggaguccgugaagaacgggaccuacgacuaccccaaguacagcgaggaggccaagcugaaccgggaggagaucgacggcgugaagcucgaguccacccgcaucuaccagauccuggcgaucuacagcaccgucgccuccagccuggugcucguggucagccugggggccaucuccuucuggaugugcagcaacggcucccugcagugccggaucugcaucuga

SEQ ID NO: 72998 - RNA, 1701 nt, Artificial Sequence; identical to SEQ ID NO: 66693
  derived and/or modified CDS sequence (opt1) from hemagglutinin__InfluenzaA__AFK14571

SEQ ID NO: 72999 - RNA, 1701 nt, Artificial Sequence; identical to SEQ ID NO: 71202
  derived and/or modified CDS sequence (opt1) from hemagglutinin__InfluenzaA__AFK14586

SEQ ID NO: 73000 - RNA, 1701 nt, Artificial Sequence
  derived and/or modified CDS sequence (opt1) from hemagglutinin__InfluenzaA__AFK14595
augaaggccauccuggugguccuccuguacaccuucgccaccgcgaacgccgacacgcugugcaucggcuaccacgccaacaacagcaccgacaccguggacaccgugcucgagaagaacgucacggugacccacuccgugaaccugcuggaggacaagcacaacgggaagcucugcaagcugaagggcgucgcgccccugcaccucgggaagugcaacaucgccggcuggauccuggggaacccgaagugcgagagccuguccaccgccagcuccuggagcuacaucggcgagaccuccagcuccaacaacggcacgugcuaccccgggaacuucaucgacuucgaggagcucaagaagcagcugagcuccgugagcuccuucgagcgcuucgagaucuuccccaagaccagcuccuggcccaaccacgacagcaacaagggcgugaccgccgccugcccgcacgccggggcgaaguccuucuacaagaaccugaucuggcucgucaagaagggcaacagcuaccccaagcuguccaagagcuacaucaacgacaaggggaaggaggugcuggugcucuggggcauccaccaccccagcaccuccgccgaccagcagagccuguaccagaacgccgacgccuacgucuucgugggcacgucccgguacagcaagaaguucaagcccgagaucgccauccgcccgaaggugcgggaccaggaggggcgcaugaacuacuacuggacccuggucgagcccggcgacaagaucaccuucgaggcgaccgggaaccucguggugccccgguacgccuucgccauggagcgcaacgccggcuccggcaucaucaucagcgacacgcccguccacgacugcaacacgaccugccagaccccgaagggggccaucaacaccucccugcccuuccagaacauccaccccaucaccaucggcaagugccccaaguacgucaagagcaccaagcugcggcucgcgaccgggcugcgcaacgugccguccauccagagccggggccuguucggggccaucgccggcuucaucgagggcggguggacgggcaugguggacgggugguacggcuaccaccaccagaacgagcagggguccggcuacgccgccgaccucaagagcacccagaacgcgaucgacgagaucaccaacaaggugaacuccgugaucgagaagaugaacacccaguucacggccgucggcaaggaguucaaccaccuggagaagcgcaucgagaaccugaacaagaagguggacgacggguuccucgacaucuggaccuacaacgccgagcugcugguccuccuggagaacgagcggacccuggacuaccacgacagcaacgugaagaaccucuacgagaaggugcgcucccagcugaagaacaacgccaaggagaucggcaacgggugcuucgaguucuaccacaagugcgacaacacgugcauggagagcgucaagaacggcaccuacgacuaccccaaguacuccgaggaggccaagcugaaccgggaggagaucgacggggugaagcucgagagcacccgcaucuaccagauccuggcgaucuacuccaccguggccagcagccugguccucguggugucccugggcgccaucagcuucuggaugugcuccaacggcagccugcagugccggaucugcaucuga

SEQ ID NO: 73001 - RNA, 1701 nt, Artificial Sequence; identical to SEQ ID NO: 71202
  derived and/or modified CDS sequence (opt1) from hemagglutinin__InfluenzaA__AFK14612

SEQ ID NO: 73002 - RNA, 1701 nt, Artificial Sequence; identical to SEQ ID NO: 66693
  derived and/or modified CDS sequence (opt1) from hemagglutinin__InfluenzaA__AFK14621

SEQ ID NO: 73003 - RNA, 1701 nt, Artificial Sequence
  derived and/or modified CDS sequence (opt1) from hemagglutinin__InfluenzaA__AFK14630
augaaggccauccuggugguccuccuguacaccuucgccaccgcgaacgccgacacgcugugcaucggcuaccacgccaacaacagcaccgacaccguggacaccgugcucgagaagaacgucacggugacccacuccgugaaccugcuggaggacaagcacaacgggaagcucugcaagcugcgcggcgucgcgccccugcaccucgggaagugcaacaucgccggcuggauccuggggaacccggagugcgagagccuguccaccgccagcuccuggagcuacaucguggagaccuccagcuccgacaacggcacgugcuaccccggcgacuucaucgacuacgaggagcuccgggagcagcugagcuccgugagcuccuucgagcgcuucgagaucuuccccaagaccagcuccuggcccaaccacgacagcaacaagggggucaccgccgccugcccgcacgccggcgcgaaguccuucuacaagaaccugaucuggcucgugaagaaggggaacagcuaccccaagcuguccaagagcuacaucaacgacaagggcaaggaggugcugguccucugggggauccaccaccccagcacccgggccgaccugcaguccaucaaccagaacgccgacgccuacguguucgugggcacgagccgcuacuccaagaaguucaagcccgagaucgccauccggccgaagguccgcgaccaggagggccggaugaacuacuacuggacccugguggagcccggggacaagaucaccuucgaggcgaccggcaaccucguggucccccgcuacgccuucgccauggagcggaacgccgggagcggcaucaucaucuccgacacgcccgugcacgacugcaacacgaccugccagaccccgaagggcgccaucaacaccagccugcccuuccagaacauccaccccaucaccaucgggaagugccccaaguacgugaaguccaccaagcugcgccucgcgaccggccugcggaacgucccgagcauccagucccgcgggcuguucggcgccaucgccggguucaucgagggcggcuggacggggaugguggacggcugguacggguaccaccaccagaacgagcagggcagcggguacgccgccgaccucaaguccacccagaacgcgaucgacgagaucaccaacaaggugaacagcgucaucgagaagaugaacacccaguucacggccgugggcaaggaguucaaccaccuggagaagcggaucgagaaccugaacaagaaggucgacgacggcuuccucgacaucuggaccuacaacgccgagcugcuggugcuccuggagaacgagcgcacccuggacuaccacgacuccaacgugaagaaccucuacgagaagguccggagccagcugaagaacaacgccaaggagaucgggaacggcugcuucgaguucuaccacaagugcgacaacacgugcauggaguccgugaagaacgggaccuacgacuaccccaaguacagcgaggaggccaagcugaaccgcgaggagaucgacggcgugaagcucgaguccacccggaucuaccagauccuggcgaucuacagcaccgucgccuccagccuggugcucguggucagccugggggccaucuccuucuggaugugcagcaacggcucccugcagugccgcaucugcaucuga

SEQ ID NO: 73004 - RNA, 1701 nt, Artificial Sequence
  derived and/or modified CDS sequence (opt1) from hemagglutinin__InfluenzaA__AFK14639
augaaggccauccuggugguccuccuguacaccuucgccaccgcgaacgccgacacgcugugcaucggcuaccacgccaacaacagcaccgacaccguggacaccgugcucgagaagaacgucacggugacccacuccgugaacauccuggaggacaagcacaacgggaagcugugcaagcuccgcggcgucgcgccccugcaccuggggaagugcaacaucgccggcuggauccucgggaacccggagugcgagagccuguccaccgccagcuccuggagcuacaucguggagaccuccagcuccgacaacggcacgugcuaccccggcgacuucaucgacuacgaggagcugcgggagcagcucagcuccgugagcuccuucgagcgcuucgagaucuuccccaagaccagcuccuggcccaaccacgacagcaacaagggggucaccgccgccugcccgcacgccggcgcgaaguccuucuacaagaaccugaucuggcuggugaagaaggggaacagcuaccccaagcucuccaagagcuacaucaacgacaagggcaaggaggugcugguccugugggggauccaccaccccagcaccuccgccgaccagcagagccucuaccagaacgccgacgccuacguguucgugggcuccagccgguacuccaagaaguucaagcccgagaucgccauccgcccgaagguccgggaccaggagggccgcaugaacuacuacuggacgcugguggagcccggggacaagaucaccuucgaggcgaccggcaaccugguggucccccgguacgccuucgccauggagcgcaacgccgggagcggcaucaucaucuccgacacccccgugcacgacugcaacacgaccugccagaccccgaagggcgccaucaacaccagccuccccuuccagaacauccaccccaucacgaucgggaagugccccaaguacgugaaguccaccaagcugcggcuggcgaccggccuccgcaacgucccgagcauccagucccgggggcuguucggcgccaucgccggguucaucgagggcggcuggaccgggaugguggacggcugguacggguaccaccaccagaacgagcagggcagcggguacgccgccgaccugaaguccacgcagaacgcgaucgacgagaucaccaacaaggugaacagcgucaucgagaagaugaacacccaguucaccgccgugggcaaggaguucaaccaccucgagaagcgcaucgagaaccugaacaagaaggucgacgacggcuuccuggacaucuggacguacaacgccgagcuccuggugcugcucgagaacgagcggacccuggacuaccacgacuccaacgugaagaaccuguacgagaagguccgcgggcagcucaagaacaacgccaaggagaucggcaacgggugcuucgaguucuaccacaagugcgacaacacgugcauggagagcgugaagaacggcaccuacgacuaccccaaguacuccgaggaggccaagcugaaccgggaggagaucgacggggugaagcuggagagcacccgcaucuaccagauccucgcgaucuacuccaccgucgccagcagccuggugcugguggucucccucggcgccaucagcuucuggaugugcuccaacggcagccugcagugccggaucugcaucuga

SEQ ID NO: 73005 - RNA, 1701 nt, Artificial Sequence; identical to SEQ ID NO: 66693
  derived and/or modified CDS sequence (opt1) from hemagglutinin__InfluenzaA__AFK14661

SEQ ID NO: 73006 - RNA, 1701 nt, Artificial Sequence; identical to SEQ ID NO: 71202
  derived and/or modified CDS sequence (opt1) from hemagglutinin__InfluenzaA__AFK14670

SEQ ID NO: 73007 - RNA, 1701 nt, Artificial Sequence; identical to SEQ ID NO: 71202
  derived and/or modified CDS sequence (opt1) from hemagglutinin__InfluenzaA__AFK14678

SEQ ID NO: 73008 - RNA, 1701 nt, Artificial Sequence
  derived and/or modified CDS sequence (opt1) from hemagglutinin__InfluenzaA__AFK14688
augaaggccauccuggugguccuccuguacaccuucgccaccgcgaacgccgacacgcugugcaucggcuaccacgccaacaacagcaccgacaccguggacaccgugcucgagaagaacgucacggugacccacuccgugaaccugcuggaggacaagcacaacgggaagcucugcaagcugcgcggcgucgcgccccugcaccucgggaagugcaacaucgccggcuggauccuggggaacccggagugcgagagccuguccaccgccagcuccuggagcuacaucguggagaccuccagcuccgacaacggcacgugcuaccccggcgacuucauccacgacgaggagcuccggaagcagcugagcuccgugagcuccuucgagcgcuucgagaucuuccccaagaccagcuccuggcccaaccacgacagcaacaagggggucaccgccgccugcccgcacgccggcgcgaaguccuucuacaagaaccugaucuggcucgugaagaaggggaacagcuaccccaagcuguccaagagcuacaucaacgacaagggcaaggaggugcugguccucugggggauccaccaccccagcaccuccgccgaccagcagagccuguaccagaacgccgacgccuacguguucgugggcacgucccgguacagcaagaaguucaagcccgagaucgccauccgcccgaagguccgggaccaggagggccgcaugaacuacuacuggacccugguggagcccggggacaagaucaccuucgaggcgaccggcaaccucguggucccccgguacgccuucgccauggagcgcaaggccggguccggcaucaucauccuggacacgcccgugcacgacuggaacacgaccugcgagaccccgaagggcgccgugaacaccagccugcccuuccagaacauccaccccaucaccaucgggaagugccccaaguacgucaaguccaccaagcuccggcuggcgaccggccugcgcaacgugccgagcauccagucccggggccucuucggggccaucgccggguucaucgagggcggcuggacggggaugguggacggcugguacggguaccaccaccagaacgagcagggcagcggguacgccgccgaccugaaguccacccagaacgcgaucgacgagaucaccaacaaggucaacagcgugaucgagaagaugaacacccaguucacggccgucggcaaggaguucaaccaccuggagaagcgcaucgagaaccucaacaagaagguggacgacggcuuccuggacaucuggaccuacaacgccgagcugcucgugcugcuggagaacgagcggacccucgacuaccacgacuccaacgucaagaaccuguacgagaaggugcgcagccagcugaagaacaacgccaaggagaucgggaacggcugcuucgaguucuaccacaagugcgacaacacgugcauggaguccgugaagaacgggaccuacgacuaccccaaguacagcgaggaggccaagcucaaccgggaggagaucgacggcgucaagcuggaguccacccgcaucuaccagauccuggcgaucuacagcaccguggccuccagccucgugcuggucgugagccugggggccaucuccuucuggaugugcagcaacggcucccuccagugccggaucugcaucuga

SEQ ID NO: 73009 - RNA, 1701 nt, Artificial Sequence; identical to SEQ ID NO: 71202
  derived and/or modified CDS sequence (opt1) from hemagglutinin__InfluenzaA__AFK14697

SEQ ID NO: 73010 - RNA, 1701 nt, Artificial Sequence; identical to SEQ ID NO: 71202
  derived and/or modified CDS sequence (opt1) from hemagglutinin__InfluenzaA__AFK14713

SEQ ID NO: 73011 - RNA, 1701 nt, Artificial Sequence; identical to SEQ ID NO: 71202
  derived and/or modified CDS sequence (opt1) from hemagglutinin__InfluenzaA__AFK14722

SEQ ID NO: 73012 - RNA, 1701 nt, Artificial Sequence
  derived and/or modified CDS sequence (opt1) from hemagglutinin__InfluenzaA__AFK14731
augaaggccauccuggugguccuccuguacaccuucgccaccgcgaacgccgacacgcugugcaucggcuaccacgccaacaacagcaccgacaccguggacaccgugcucgagaagaacgucacggugacccacuccgugaaccugcuggaggacaagcacaacgggaagcucugcaagcugcgcggcgucgcgccccugcaccucgggaagugcaacaucgccggcuggauccuggggaacccggagugcgagagccuguccaccgccagcuccuggagcuacaucguggagaccuccagcuccgacaacggcacgugcuaccccggcgacuucaucgacuacgaggagcuccggaagcagcugagcuccgugagcuccuucgagcgcgucgagaucuuccccaagaccagcuccuggcccaaccacgacagcaacaagggggugaccgccgccugcccgcacgccggcgcgaaguccuucuacaagaaccugaucuggcucgugaagaaggggaacagcuaccccaagcuguccaagagcuacaucaacgacaagggcaaggagguccuggugcucugggggauccaccaccccagcaccuccgccgaccagcagagccuguaccagaacgccgacgccuacguguucgucggcacgucccgguacagcaagaaguucaagcccgagaucgccauccgcccgaaggugcgggaccaggagggccgcaugaacuacuacuggacccugguggagcccggggacaagaucaccuucgaggcgaccggcaaccucgucgugccccgguacgccuucgccauggagcgcaacgccggguccggcaucaucaucagcgacacgcccgugcacgacugcaacacgaccugccagaccccgaagggcgccgucaacaccucccugcccuuccagaacauccaccccaucaccaucgggaagugccccaaguacgucaagagcaccaagcugcggcucgcgaccggccugcgcaacgugccguccauccagagccgggggcuguucggcgccaucgccggguucaucgagggcggcuggacggggaugguggacggcugguacggguaccaccaccagaacgagcagggcuccggguacgccgccgaccucaagagcacccagaacgcgaucgacgagaucaccaacaaggugaacuccgucaucgagaagaugaacacccaguucacggccgugggcaaggaguucaaccaccuggagaagcgcaucgagaaccugaacaagaagguggacgacggcuuccucgacaucuggaccuacaacgccgagcugcugguccuccuggagaacgagcggacccuggacuaccacgacagcaacgugaagaaccucuacgagaaggugcgcucccagcugaagaacaacgccaaggagaucgggaacggcugcuucgaguucuaccacaagugcgacaacacgugcauggagagcgucaagaacgggaccuacgacuaccccaaguacuccgaggaggccaagcugaaccgggaggagaucgacggcgugaagcucgagagcacccgcaucuaccagauccuggcgaucuacuccaccguggccagcagccugguccucguggugucccugggggccaucagcuucuggaugugcuccaacggcagccugcagugccggaucugcaucuga

SEQ ID NO: 73013 - RNA, 1701 nt, Artificial Sequence; identical to SEQ ID NO: 71202
  derived and/or modified CDS sequence (opt1) from hemagglutinin__InfluenzaA__AFK14740

SEQ ID NO: 73014 - RNA, 1701 nt, Artificial Sequence; identical to SEQ ID NO: 71202
  derived and/or modified CDS sequence (opt1) from hemagglutinin__InfluenzaA__AFK14749

SEQ ID NO: 73015 - RNA, 1701 nt, Artificial Sequence; identical to SEQ ID NO: 71202
  derived and/or modified CDS sequence (opt1) from hemagglutinin__InfluenzaA__AFK14756

SEQ ID NO: 73016 - RNA, 1701 nt, Artificial Sequence; identical to SEQ ID NO: 71202
  derived and/or modified CDS sequence (opt1) from hemagglutinin__InfluenzaA__AFK14764

SEQ ID NO: 73017 - RNA, 1701 nt, Artificial Sequence
  derived and/or modified CDS sequence (opt1) from hemagglutinin__InfluenzaA__AFK14779
augaaggccauccuggugguccuccuguacaccuucgccaccgcgaacgccgacacgcugugcaucggcuaccacgccaacaacagcaccgacaccguggacaccgugcucgagaagaacgucacggugacccacuccgugaaccugcuggaggacaagcacaacgggaagcucugcaagcugggcggggucgcgccccugcaccucggcaagugcaacaucgccggguggauccugggcaacccggagugcgagagccuguccaccgccagcuccuggagcuacaucguggagaccuccagcuccgacaacggcacgugcuaccccgggaacuucaucgacuacgaggagcuccgcgagcagcugagcuccgugagcuccuucgagcgguucgagaucuuccccaagaccagcuccuggcccaaccacgacagcaacaagggcgucaccgccgccugcccgcacgccggggcgaaguccuucuacaagaaccugaucuggcucgugaagaagggcaacagcuaccccaagcuguccaagagcuacaucaacgacaaggggaaggaggugcugguccucuggggcauccaccaccccagcaccuccgccgaccagcagagccuguaccagaacgccgacgccuacguguucgugggcacgucccgcuacagcaagaaguucaagcccgagaucgccauccggccgaagguccgcgaccaggaggggcggaugaacuacuacuggacccugguggagcccggcgacaagaucaccuucgaggcgaccgggaaccucguggucccccgcuacgccuucgccauggagcggaacgccggcuccggcaucaucaucagcgacacgcccgugcacgacugcaacacgaccugccagaccccgaagggggccaucaacaccucccugcccuuccagaacauccaccccaucaccaucggcaagugccccaaguacgucaagagcaccaagcugcgccucgcgaccgggcugcggaacgugccguccauccagagccgcggccuguucggggccaucgccggcuucaucgagggcggguggacgggcaugguggacgggugguacggcuaccaccaccagaacgagcagggguccggcuacgccgccgaccucaagagcacccagaacgcgaucgacgagaucaccaacaaggugaacuccgucaucgagaagaugaacacccaguucacggccgugggcaaggaguucaaccaccuggagaagcggaucgagaaccugaacaagaaggucgacgacggguuccucgacaucuggaccuacaacgccgagcugcuggugcuccuggagaacgagcgcacccuggacuaccacgacagcaacgugaagaaccucuacgagaagguccggucccagcugaagaacaacgccaaggagaucggcaacgggugcuucgaguucuaccacaagugcgacaacacgugcauggagagcgugaagaacggcaccuacgacuaccccaaguacuccgaggaggccaagcugaaccgcgaggagaucgacggggugaagcucgagagcacccggaucuaccagauccuggcgaucuacuccaccgucgccagcagccuggugcucguggucucccugggcgccaucagcuucuggaugugcuccaacggcagccugcagugccgcaucugcaucuga

SEQ ID NO: 73018 - RNA, 1701 nt, Artificial Sequence
  derived and/or modified CDS sequence (opt1) from hemagglutinin__InfluenzaA__AFK14788
augaaggccauccuggugguccuccuguacaccuucgccaccgcgaacgccgacacgcugugcaucggcuaccacgccaacaacagcaccgacaccguggacaccgugcucgagaagaacgucacggugacccacuccgugaacauccuggaggacaagcacaacgggaagcugugcaagcuccgcggcgucgcgccccugcaccuggggaagugcaacaucgccggcuggauccucgggaacccggagugcgagagccuguccaccgccagcuccuggagcuacaucguggagaccuccagcuccgacaacggcacgugcuaccccggcgacuucaucgacuacgaggagcugcgggagcagcucagcuccgugagcuccuucgagcgcuucgagaucuuccccaagaccagcuccuggcccaaccacgacagcaacaagggggucaccgccgccugcccgcacgccggcgcgaaguccuucuacaagaaccugaucuggcuggugaagaaggggaacagcuaccccaagcuccggaaguccuacaucaacgacaagggcaaggaggugcugguccugugggggauccaccaccccagcaccagcgccgaccagcagucccucuaccagaacgccgacgccuacguguucgugggcagcucccgcuacagcaagaaguucaagcccgagaucgccauccggccgaagguccgcgaccaggagggccggaugaacuacuacuggacgcugguggagcccggggacaagaucaccuucgaggcgaccggcaaccugguggucccccgcuacgccuucgccauggagcggaacgccggguccggcaucaucaucagcgacacccccgugcacgacugcaacacgaccugccagaccccgaagggcgccaucaacaccucccuccccuuccagaacauccaccccaucacgaucgggaagugccccaaguacgucaagagcaccaagcugcgccuggcgaccggccuccggaacgugccguccauccagagccgcgggcuguucggcgccaucgccggguucaucgagggcggcuggaccgggaugguggacggcugguacggguaccaccaccagaacgagcagggcuccggguacgccgccgaccucaagagcacgcagaacgcgaucgacgagaucaccaacaaggugaacuccgucaucgagaagaugaacacccaguucaccgccgugggcaaggaguucaaccaccuggagaagcggaucgagaaccugaacaagaaggucgacgacggcuuccuggacaucuggacguacaacgccgagcuccuggugcugcucgagaacgagcgcacccuggacuaccacgacagcaacgugaagaaccuguacgagaagguccggucccagcucaagaacaacgccaaggagguggggaacggcugcuucgaguucuaccacaagugcgacaacacgugcauggagagcgugaagaacgggaccuacgacuaccccaaguacuccgaggaggccaagcugaaccgcgaggagaucgacggcgucaagcuggagagcacccggaucuaccagauccucgcgaucuacuccaccgccgccagcagccuggugcugguggucucccucggggccaucagcuucuggaugugcuccaacggcagccugcagugccgcaucugcaucuga

SEQ ID NO: 73019 - RNA, 1701 nt, Artificial Sequence
  derived and/or modified CDS sequence (opt1) from hemagglutinin__InfluenzaA__AFK14798
augaaggccauccuggugguccuccuguacaccuucgccaccgcgaacgccgacacgcugugcaucggcuaccacgccaacaacagcaccgacaccguggacaccgugcucgagaagaacgucacggugacccacuccgugaaccugcuggaggacaagcacaacgggaagcucugcaagcugcgcggcgucgcgccccugcaccucgggaagugcaacaucgccggcuggauccuggggaacccggagugcgagagccuguccaccgccagcuccuggagcuacaucguggagaccuccagcuccgacaacggcacgugcuaccccggcgacuucaucaacuacgaggagcuccggaagcagcugagcuccgugagcuccuucgagcgcgucgagaucuuccccaagaccagcuccuggcccaaccacgacagcaacaagggggugaccgccgccugcccgcacgccggcgcgaaguccuucuacaagaaccugaucuggcucgugaagaaggggaacagcuaccccaagcuguccaagagcuacaucaacgacaagggcaaggagguccuggugcucugggggauccaccaccccagcaccuccgccgaccagcagagccuguaccagaacgccgacgccuacguguucgucggcacgucccgguacagcaagaaguucaagcccgagaucgccauccgcccgaaggugcgggaccaggagggccgcaugaacuacuacuggacccugguggagcccggggacaagaucaccuucgaggcgaccggcaaccucgucgugccccgguacgccuucgccauggagcgcaacgccggguccggcaucaucaucagcgacacgcccgugcacgacugcaacacgaccugccagaccccgaacggcgccaucaacaccucccugcccuuccagaacauccaccccaucaccaucgggaagugccccaaguacgucaagagcaccaagcugcggcucgcgaccggccugcgcaacgugccguccauccagagccgggggcuguucggcgccaucgccggguucaucgagggcggcuggacggggaugguggacggcugguacggguaccaccaccagaacgagcagggcuccggguacgccgccgaccucaagagcacccagaacgcgaucgacaagaucaccaacaaggucaacuccgugaucgagaagaugaacacccaguucacggccgucggcaaggaguucaaccaccuggagaagcgcaucgagaaccugaacaagaagguggacgacggcuuccucgacaucuggaccuacaacgccgagcugcuggugcuccuggagaacgagcggacccuggacuaccacgacagcaacgucaagaaccucuacgagaaggugcgcucccagcugaagaacaacgccaaggagaucgggaacggcugcuucgaguucuaccacaagugcgacaacacgugcauggagagcgugaagaacgggaccuacgacuaccccaaguacuccgaggaggccaagcugaaccgggaggagaucgacggcgucaagcucgagagcacccgcaucuaccagauccuggcgaucuacuccaccguggccagcagccuggugcucgucgugucccugggggccaucagcuucuggaugugcuccaacggcagccugcagugccggaucugcaucuga

SEQ ID NO: 73020 - RNA, 1701 nt, Artificial Sequence
  derived and/or modified CDS sequence (opt1) from hemagglutinin__InfluenzaA__AFK14814
augaaggccauccuggugguccuccuguacaccuucgccaccgcgaacgccgacacgcugugcaucggcuaccacgccaacaacagcaccgacaccguggacaccgugcucgagaagaacgucacggugacccacuccgugaaccugcuggaggacaagcacaacgggaagcucugcaagcugcgcggcgucgcgccccugcaccucgggaagugcaacaucgccggcuggauccuggggaacccggagugcgagagccuguccaccgccagcuccuggagcuacaucguggagaccuccagcuccgacaacggcacgugcuaccccggcgacuucaucgacuacgaggagcuccgggagcagcugagcuccgugagcuccuacgagcgcuacgagaucuuccccaagaccagcuccuggcccaaccacgacagcaacaagggggucaccgccgccugcccgcacgccggcgcgaaguccuucuacaagaaccugaucuggcucgugaagaaggggaacagcuaccccaagcuguccaagagcuacaucaacgacaagggcaaggaggugcugguccucugggggauccaccaccccagcaccuccgccgaccagcagagccuguaccagaacgccgacgccuacguguucgugggcacgucccgguacagcaagaaguucaagcccgagaucgccauccgcccgaagguccgggagcaggagggccgcaugaacuacuacuggacccugguggagcccggggacaagaucaccuucgaggcgaccggcaaccucguggucccccgguacgccuucgccauggagcgcaacgccggguccggcaucaucaucagcgacacgcccgugcacgacugcaacacgaccugccagaccccgaagggcgccaucaacaccucccugcccuuccagaacauccaccccaucaccaucgggaagugccccaaguacgucaagagcaccaagcugcggcucgcgaccggccugcgcaacgugccguccauccagagccgggggcuguucggcgccaucgccggguucaucgagggcggcuggacggggaugguggacggcugguacggguaccaccaccagaacgagcagggcuccggguacgccgccgaccucaagagcacccagaacgcgaucgacgagaucaccaacaaggugaacuccgucaucgagaagaugaacacccaguucacggccgugggcaaggaguucaaccaccuggagaagcgcaucgagaaccugaacaagaaggucgacgacggcuuccucgacaucuggaccuacaacgccgagcugcuggugcuccuggagaacgagcggacccuggacuaccacgacagcaacgugaagaaccucuacgagaagguccgcucccagcugaagaacaacgccaaggagaucgggaacggcugcuucgaguucuaccacaagugcgacaacacgugcauggagagcgugaagaacgggaccuacgacuaccccaaguacuccgaggaggccaagcugaaccgggaggagaucgacggcgugaagcucgagagcacccgcaucuaccagauccuggcgaucuacuccaccgucgccagcagccuggugcucguggucucccugggggccaucagcuucuggaugugcuccaacggcagccugcagugccggaucugcaucuga

SEQ ID NO: 73021 - RNA, 1701 nt, Artificial Sequence
  derived and/or modified CDS sequence (opt1) from hemagglutinin__InfluenzaA__AFK14831
augaaggccauccuggugguccuccuguacaccuucgccaccgcgaacgccgacacgcugugcaucggcuaccacgccaacaacagcaccgacaccguggacaccgugcucgagaagaacgucacggugacccacuccgugaaccugcuggaggacaagcacaacgggaagcucugcaagcugcgcggcgucgcgccccugcaccucgggaagugcaacaucgccggcuggauccuggggaacccggagugcgagagccuguccaccgcgagcuccuggagcuacaucguggagaccuccagcuccgacaacggcacgugcuaccccggcgacuucagcgacuacgaggagcuccgggagcagcuguccagcguguccagcuucgagcgcuucgagaucuuccccaagaccuccagcuggcccaaccacgacuccaacaagggggucaccgccgccugcccgcacgccggcgccaagagcuucuacaagaaccugaucuggcucgugaagaaggggaacuccuaccccaagcugagcaagagcuacaucaacgacaagggcaaggaggugcugguccucugggggauccaccaccccuccaccagcgccgaccagcagucccuguaccagaacgccgacgccuacguguucgugggcacgagccgguacuccaagaaguucaagcccgagaucgccauccgcccgaagguccgggaccaggagggccgcaugaacuacuacuggacccugguggagcccggggacaagaucaccuucgaggcgaccggcaaccucguggucccccgguacgccuucgccauggagcgcaacgccgggagcggcaucaucaucuccgacacgcccgugcacgacugcaacacgaccugccagaccccgaagggcgccaucaacaccagccugcccuuccagaacauccaccccaucaccaucgggaagugccccaaguacgugaaguccaccaagcugcggcucgcgaccggccugcgcaacgucccgagcauccagucccgggggcuguucggcgccaucgccggguucaucgagggcggcuggacggggaugguggacggcugguacggguaccaccaccagaacgagcagggcagcggguacgccgccgaccucaaguccacccagaacgcgaucgacgagaucaccaacaaggugaacagcgucaucgagaagaugaacacccaguucacggccgugggcaaggaguucaaccaccuggagaagcgcaucgagaaccugaacaagaaggucgacgacggcuuccucgacaucuggaccuacaacgccgagcugcuggugcuccuggagaacgagcggacccuggacuaccacgacuccaacgugaagaaccucuacgagaagguccgcagccagcugaagaacaacgccaaggagaucgggaacggcugcuucgaguucuaccacaagugcgacaacacgugcauggaguccgugaagaacgggaccuacgacuaccccaaguacagcgaggaggccaagcugaaccgggaggagaucgacggcgugaagcucgaguccacccgcaucuaccagauccuggcgaucuacagcaccgucgccagcucccuggugcucguggucagccugggggccaucuccuucuggaugugcagcaacggcucccugcagugccggaucugcaucuga

SEQ ID NO: 73022 - RNA, 1701 nt, Artificial Sequence; identical to SEQ ID NO: 66693
  derived and/or modified CDS sequence (opt1) from hemagglutinin__InfluenzaA__AFK14839

SEQ ID NO: 73023 - RNA, 1701 nt, Artificial Sequence
  derived and/or modified CDS sequence (opt1) from hemagglutinin__InfluenzaA__AFK14847
augaaggccauccuggugguccuccuguacaccuucgccaccgcgaacgccgacacgcugugcaucggcuaccacgccaacaacagcaccgacaccguggacaccgugcucgagaagaacgucacggugacccacuccgugaaccugcuggaggacaagcacaacgggaagcucugcaagcugcgcggcgucgcgccccugcaccucgggaagugcaacaucgccggcuggauccuggggaacccggagugcgagagccuguccaccgccagcuccuggagcuacaucguggagaccuccagcuccgacaacggcacgugcuaccccggcgacuucaucgacuacgaggagcuccgggagcagcugagcuccgccagcuccuucgagcgcuacgagaucuuccccaagaccagcuccuggcccaaccacgacagcaacaagggggugaccgccgccugcccgcacgcgggcgccaaguccuucuacaagaaccugaucuggcucgucaagaaggggaacagcuaccccaagcuguccaagagcuacaucaacgacaagggcaaggaggugcuggugcucugggggauccaccaccccagcaccuccgccgaccagcagagccuguaccagaacgccgacgccuacgucuucgugggcacgucccgguacagcaagaaguucaagcccgagaucgcgauccgcccgaaggugcgggaccaggagggccgcaugaacuacuacuggacccuggucgagcccggggacaagaucaccuucgaggccaccggcaaccucguggugccccgguacgccuucgccauggagcgcaacgccggguccggcaucaucaucagcgacacgcccguccacgacugcaacacgaccugccagaccccgaagggcgcgaucaacaccucccugcccuuccagaacauccaccccaucaccaucgggaagugccccaaguacgucaagagcaccaagcugcggcucgccaccggccugcgcaacgugccguccauccagagccgggggcuguucggcgccaucgccggguucaucgagggcggcuggacggggaugguggacggcugguacggguaccaccaccagaacgagcagggcuccggguacgccgcggaccucaagagcacccagaacgccaucgacgagaucaccaacaaggugaacuccgugaucgagaagaugaacacccaguucacggccgucggcaaggaguucaaccaccuggagaagcgcaucgagaaccugaacaagaagguggacgacggcuuccucgacaucuggaccuacaacgccgagcugcugguccuccuggagaacgagcggacccuggacuaccacgacagcaacgugaagaaccucuacgagaaggugcgcucccagcugaagaacaacgccaaggagaucgggaacggcugcuucgaguucuaccacaagugcgacaacacgugcauggagagcgucaagaacgggaccuacgacuaccccaaguacuccgaggaggcgaagcugaaccgggaggagaucgacggcgugaagcucgagagcacccgcaucuaccagauccuggccaucuacuccaccguggccagcagccugguccucguggugucccugggggccaucagcuucuggaugugcuccaacggcagccugcagugccggaucugcaucuga

SEQ ID NO: 73024 - RNA, 1701 nt, Artificial Sequence; identical to SEQ ID NO: 71202
  derived and/or modified CDS sequence (opt1) from hemagglutinin__InfluenzaA__AFK14868

SEQ ID NO: 73025 - RNA, 1701 nt, Artificial Sequence; identical to SEQ ID NO: 67857
  derived and/or modified CDS sequence (opt1) from hemagglutinin__InfluenzaA__AFK14884

SEQ ID NO: 73026 - RNA, 1701 nt, Artificial Sequence; identical to SEQ ID NO: 67857
  derived and/or modified CDS sequence (opt1) from hemagglutinin__InfluenzaA__AFK14892

SEQ ID NO: 73027 - RNA, 1701 nt, Artificial Sequence; identical to SEQ ID NO: 67857
  derived and/or modified CDS sequence (opt1) from hemagglutinin__InfluenzaA__AFK14901

SEQ ID NO: 73028 - RNA, 1701 nt, Artificial Sequence; identical to SEQ ID NO: 67857
  derived and/or modified CDS sequence (opt1) from hemagglutinin__InfluenzaA__AFK14910

SEQ ID NO: 73029 - RNA, 1701 nt, Artificial Sequence; identical to SEQ ID NO: 66693
  derived and/or modified CDS sequence (opt1) from hemagglutinin__InfluenzaA__AFK14919

SEQ ID NO: 73030 - RNA, 1701 nt, Artificial Sequence; identical to SEQ ID NO: 66693
  derived and/or modified CDS sequence (opt1) from hemagglutinin__InfluenzaA__AFK14929

SEQ ID NO: 73031 - RNA, 1701 nt, Artificial Sequence; identical to SEQ ID NO: 72210
  derived and/or modified CDS sequence (opt1) from hemagglutinin__InfluenzaA__AFK25599

SEQ ID NO: 73032 - RNA, 1701 nt, Artificial Sequence
  derived and/or modified CDS sequence (opt1) from hemagglutinin__InfluenzaA__AFK25601
augaaggccauccuggugguccuccuguacaccuucgccaccgcgaacgccgacacgcugugcaucggcuaccacgccaacaacagcaccgacaccguggacaccgugcucgagaagaacgucacggugacccacuccgugaaccugcuggaggacaagcacaacgggaagcucugcaagcugcgcggcgucgcgccccugcaccucgggaagugcaacaucgccggcuggauccuggggaacccggagugcgugacccugagcaccgccuccagcugguccuacaucguggagacgagcuccagcgacaacgggaccugcuaccccggcgacuucaucgacuacgaggagcuccgggagcagcuguccagcgucuccagcuucgagcgcuucgagaucuuccccaagaccuccagcuggcccaaccacgacuccaacaagggcgugaccgccgccugcccgcacgccggcgcgaagggguucuacaagaaccugaucuggcucgugaagaagggcaacagcuaccccaagcuguccaagagcuacaucaacgacaaggggaaggagguccuggugcucuggggcauccaccaccccuccacgaccgccgaccagcagagccuguaccagaacgccgacaccuacguguucgucggcaccagccgguacuccaagaaguucaagcccgagaucgccauccgcccgaaggugcgggaccaggaggggcgcaugaacuacuacuggacgcugguggagcccggcgacaagaucaccuucgaggccaccgggaaccucgucgugccccgguacgcguucgccauggagcgcgacgccggcagcggcaucaucaucuccgacacccccgugcacgacugcaacacgaccugccagaccccgaagggggccaucaacaccagccugcccuuccagaacauccaccccaucacgaucggcaagugccccaaguacgucaaguccaccaagcugcggcucgccaccgggcugcgcaacgugccgagcauccagucccggggccuguucggggcgaucgccggcuucaucgagggcggguggaccggcaugguggacgggugguacggcuaccaccaccagaacgagcaggggagcggcuacgccgccgaccucaaguccacgcagaacgccaucgacaagaucaccaacaaggucaacagcgugaucgagaagaugaacacccaguucaccgcggucggcaaggaguucaaccaccuggagaagcgcaucgagaaccugaacaagaagguggacgacggguuccucgacaucuggacguacaacgccgagcugcuggugcuccuggagaacgagcggacccuggacuaccacgacuccaacgucaagaaccucuacgagaaggugcgcaaccagcugaagaacaacgccaaggagaucggcaacgggugcuucgaguucuaccacaagugcgacaacacgugcauggagagcgugaagaacggcaccuacgacuaccccaaguacuccgaggaggccaagcugaaccgggaggagaucgacggggucaagcucgagagcacccgcaucuaccagauccuggccaucuacuccaccgcggccagcucccuggugcucguggucagccugggcgccaucuccuucuggaugugcagcaacggcagccugcagugccggaucugcaucuga

SEQ ID NO: 73033 - RNA, 1701 nt, Artificial Sequence; identical to SEQ ID NO: 72210
  derived and/or modified CDS sequence (opt1) from hemagglutinin__InfluenzaA__AFK25603

SEQ ID NO: 73034 - RNA, 1701 nt, Artificial Sequence
  derived and/or modified CDS sequence (opt1) from hemagglutinin__InfluenzaA__AFK25605
augaaggccauccuggugguccuccuguacaccuucgccaccgcgaacgccgacacgcugugcaucggcuaccacgccaacaacagcaccgacaccguggacaccgugcucgagaagaacgucacggugacccacuccgugaaccugcuggaggacaagcacaacgggaagcucugcaagcugcgcggcgucgcgccccugcaccucgggaagugcaacaucgccggcuggauccuggggaacccggagugcgagacccugagcaccgccuccagcugguccuacaucguggagacgagcuccagcgacaacgggaccugcuaccccggcgacuucaucgacuacgaggagcuccgggagcagcuguccagcguguccagcuucgagcgcuucgagaucuuccccaagaccuccagcuggcccaaccacgacuccaacaagggcgucaccgccgccugcccgcacgccggcgcgaagggguucuacaagaaccugaucuggcucgugaagaagggcaacagcuaccccaagcuguccaagagcuacaucaacgacaaggggaaggaggugcugguccucuggggcauccaccaccccuccacgaccgccgaccagcagagccuguaccagaacgccgacaccuacguguucgugggcaccagccgguacuccaagaaguucaagcccgagaucgccauccgcccgaagguccgggaccaggaggggcgcaugaacuacuacuggacgcugguggagcccggcgacaagaucaccuucgaggccaccgggaaccucguggucccccgguacgcguucgccauggagcgcgacgccggcagcggcaucaucaucuccgacacccccgugcacgacugcaacacgaccugccagaccccgaagggggccaucaacaccagccugcccuuccagaacauccaccccaucacgaucggcaagugccccaaguacgugcgguccaccaagcugcgccucgccaccgggcugcggaacgucccgagcauccagucccgcggccuguucggggcgaucgccggcuucaucgagggcggguggaccggcaugguggacgggugguacggcuaccaccaccagaacgagcaggggagcggcuacgccgccgaccucaaguccacgcagaacgccaucgacaagaucaccaacaaggugaacagcgucaucgagaagaugaacacccaguucaccgcggugggcaaggaguucaaccaccuggagaagcggaucgagaaccugaacaagaaggucgacgacggguuccucgacaucuggacguacaacgccgagcugcuggugcuccuggagaacgagcgcacccuggacuaccacgacuccaacgugaagaaccucuacgagaagguccggaaccagcugaagaacaacgccaaggagaucggcaacgggugcuucgaguucuaccacaagugcgacaacacgugcauggagagcgugaagaacggcaccuacgacuaccccaaguacuccgaggaggccaagcugaaccgcgaggagaucgacggggugaagcucgagagcacccggaucuaccagauccuggccaucuacuccaccgcggccagcucccugguccucguggugagccugggcgccaucuccuucuggaugugcagcaacggcagccugcagugccgcaucugcaucuga

SEQ ID NO: 73035 - RNA, 1701 nt, Artificial Sequence; identical to SEQ ID NO: 72438
  derived and/or modified CDS sequence (opt1) from hemagglutinin__InfluenzaA__AFK74526

SEQ ID NO: 73036 - RNA, 1701 nt, Artificial Sequence; identical to SEQ ID NO: 66693
  derived and/or modified CDS sequence (opt1) from hemagglutinin__InfluenzaA__AFK74534

SEQ ID NO: 73037 - RNA, 1701 nt, Artificial Sequence; identical to SEQ ID NO: 66693
  derived and/or modified CDS sequence (opt1) from hemagglutinin__InfluenzaA__AFK74544

SEQ ID NO: 73038 - RNA, 1701 nt, Artificial Sequence; identical to SEQ ID NO: 66693
  derived and/or modified CDS sequence (opt1) from hemagglutinin__InfluenzaA__AFK74554

SEQ ID NO: 73039 - RNA, 1701 nt, Artificial Sequence; identical to SEQ ID NO: 66935
  derived and/or modified CDS sequence (opt1) from hemagglutinin__InfluenzaA__AFK74564

SEQ ID NO: 73040 - RNA, 1701 nt, Artificial Sequence; identical to SEQ ID NO: 69248
  derived and/or modified CDS sequence (opt1) from hemagglutinin__InfluenzaA__AFK74575

SEQ ID NO: 73041 - RNA, 1701 nt, Artificial Sequence; identical to SEQ ID NO: 66680
  derived and/or modified CDS sequence (opt1) from hemagglutinin__InfluenzaA__AFK74585

SEQ ID NO: 73042 - RNA, 1701 nt, Artificial Sequence
  derived and/or modified CDS sequence (opt1) from hemagglutinin__InfluenzaA__AFK74595
augaaggccauccuggugguccuccuguacaccuucgccaccgcgaacgccgacacgcugugcaucggcuaccacgccaacaacagcaccgacaccguggacaccgugcucgagaagaacgucacggugacccacuccgugaaccugcuggaggacaagcacaacgggaagcucugcaagcugcgcggcgucgcgccccugcaccucgggaagugcaacaucgccggcuggauccuggggaacccggagugcgagagccuguccaccgcgagcuccuggagcuacaucguggagaccuccagcuccgacaacggcacgugcuaccccggcgacuucaucgacuacgaggagcuccgggagcagcugagcuccgugagcuccuucgagcgcuucgagaucuuccccaagaccagcuccuggcccaaccacgaccugaacaagggggucaccgccgccugcccgcacgccggcgccaagagcuucuacaagaaccucaucuggcuggugaagaaggggaacuccuaccccaagcugagcaaguccuacaucaacgacaagggcaaggaggugcucguccugugggggauccaccaccccagcaccagcgccgaccagcagucccuguaccagaacgccgacgccuacguguucgugggcacgagccgguacuccaagaaguucaagcccgagaucgccauccgcccgaagguccgggaccaggagggccgcaugaacuacuacuggacccucguggagcccggggacaagaucaccuucgaggcgaccggcaaccugguggucccccgguacgccuucgccauggagcgcaacgccgggagcggcaucaucaucuccgacacgcccgugcacgacugcaacacgaccugccagaccccgaagggcgccaucaacaccagccugcccuuccagaacauccaccccaucaccaucgggaagugccccaaguacgugaaguccaccaagcuccggcuggcgaccggccugcgcaacgucccgagcauccagucccggggccucuucggggccaucgccggguucaucgagggcggcuggacggggaugguggacggcugguacggguaccaccaccagaacgagcagggcagcggguacgccgccgaccugaaguccacccagaacgcgaucgacgagaucaccaacaaggugaacagcgucaucgagaagaugaacacccaguucacggccgugggcaaggaguucaaccaccuggagaagcgcaucgagaaccucaacaagaaggucgacgacggcuuccuggacaucuggaccuacaacgccgagcugcucgugcugcuggagaacgagcggacccucgacuaccacgacuccaacgugaagaaccuguacgagaagguccgcagccagcugaagaacaacgccaaggagaucgggaacggcugcuucgaguucuaccacaagugcgacaacacgugcauggaguccgugaagaacgggaccuacgacuaccccaaguacagcgaggaggccaagcucaaccgggaggagaucgacggcgugaagcuggaguccacccgcaucuaccagauccuggcgaucuacagcaccgucgccuccagccucgugcugguggucagccugggggccaucuccuucuggaugugcagcaacggcucccuccagugccggaucugcaucuga

SEQ ID NO: 73043 - RNA, 1701 nt, Artificial Sequence; identical to SEQ ID NO: 66693
  derived and/or modified CDS sequence (opt1) from hemagglutinin__InfluenzaA__AFK74605

SEQ ID NO: 73044 - RNA, 1701 nt, Artificial Sequence; identical to SEQ ID NO: 66935
  derived and/or modified CDS sequence (opt1) from hemagglutinin__InfluenzaA__AFK74615

SEQ ID NO: 73045 - RNA, 1701 nt, Artificial Sequence; identical to SEQ ID NO: 66935
  derived and/or modified CDS sequence (opt1) from hemagglutinin__InfluenzaA__AFK74625

SEQ ID NO: 73046 - RNA, 1701 nt, Artificial Sequence; identical to SEQ ID NO: 67795
  derived and/or modified CDS sequence (opt1) from hemagglutinin__InfluenzaA__AFK74635

SEQ ID NO: 73047 - RNA, 1701 nt, Artificial Sequence; identical to SEQ ID NO: 67795
  derived and/or modified CDS sequence (opt1) from hemagglutinin__InfluenzaA__AFK74645

SEQ ID NO: 73048 - RNA, 1701 nt, Artificial Sequence; identical to SEQ ID NO: 66693
  derived and/or modified CDS sequence (opt1) from hemagglutinin__InfluenzaA__AFK74655

SEQ ID NO: 73049 - RNA, 1701 nt, Artificial Sequence; identical to SEQ ID NO: 66693
  derived and/or modified CDS sequence (opt1) from hemagglutinin__InfluenzaA__AFK74665

SEQ ID NO: 73050 - RNA, 1701 nt, Artificial Sequence; identical to SEQ ID NO: 66693
  derived and/or modified CDS sequence (opt1) from hemagglutinin__InfluenzaA__AFK74675

SEQ ID NO: 73051 - RNA, 1701 nt, Artificial Sequence; identical to SEQ ID NO: 66693
  derived and/or modified CDS sequence (opt1) from hemagglutinin__InfluenzaA__AFK74685

SEQ ID NO: 73052 - RNA, 1701 nt, Artificial Sequence; identical to SEQ ID NO: 69248
  derived and/or modified CDS sequence (opt1) from hemagglutinin__InfluenzaA__AFK74695

SEQ ID NO: 73053 - RNA, 1701 nt, Artificial Sequence; identical to SEQ ID NO: 66693
  derived and/or modified CDS sequence (opt1) from hemagglutinin__InfluenzaA__AFK74705

SEQ ID NO: 73054 - RNA, 1701 nt, Artificial Sequence; identical to SEQ ID NO: 66693
  derived and/or modified CDS sequence (opt1) from hemagglutinin__InfluenzaA__AFK74715

SEQ ID NO: 73055 - RNA, 1701 nt, Artificial Sequence; identical to SEQ ID NO: 66693
  derived and/or modified CDS sequence (opt1) from hemagglutinin__InfluenzaA__AFK74725

SEQ ID NO: 73056 - RNA, 1701 nt, Artificial Sequence; identical to SEQ ID NO: 66693
  derived and/or modified CDS sequence (opt1) from hemagglutinin__InfluenzaA__AFK74735

SEQ ID NO: 73057 - RNA, 1701 nt, Artificial Sequence; identical to SEQ ID NO: 66693
  derived and/or modified CDS sequence (opt1) from hemagglutinin__InfluenzaA__AFK74745

SEQ ID NO: 73058 - RNA, 1701 nt, Artificial Sequence; identical to SEQ ID NO: 66693
  derived and/or modified CDS sequence (opt1) from hemagglutinin__InfluenzaA__AFK74755

SEQ ID NO: 73059 - RNA, 1701 nt, Artificial Sequence; identical to SEQ ID NO: 69248
  derived and/or modified CDS sequence (opt1) from hemagglutinin__InfluenzaA__AFK74765

SEQ ID NO: 73060 - RNA, 1701 nt, Artificial Sequence; identical to SEQ ID NO: 66693
  derived and/or modified CDS sequence (opt1) from hemagglutinin__InfluenzaA__AFK74775

SEQ ID NO: 73061 - RNA, 1701 nt, Artificial Sequence; identical to SEQ ID NO: 66693
  derived and/or modified CDS sequence (opt1) from hemagglutinin__InfluenzaA__AFK74785

SEQ ID NO: 73062 - RNA, 1701 nt, Artificial Sequence; identical to SEQ ID NO: 66693
  derived and/or modified CDS sequence (opt1) from hemagglutinin__InfluenzaA__AFK74795

SEQ ID NO: 73063 - RNA, 1701 nt, Artificial Sequence; identical to SEQ ID NO: 66693
  derived and/or modified CDS sequence (opt1) from hemagglutinin__InfluenzaA__AFK74805

SEQ ID NO: 73064 - RNA, 1701 nt, Artificial Sequence; identical to SEQ ID NO: 66693
  derived and/or modified CDS sequence (opt1) from hemagglutinin__InfluenzaA__AFK74815

SEQ ID NO: 73065 - RNA, 1701 nt, Artificial Sequence; identical to SEQ ID NO: 66693
  derived and/or modified CDS sequence (opt1) from hemagglutinin__InfluenzaA__AFK74825

SEQ ID NO: 73066 - RNA, 1701 nt, Artificial Sequence; identical to SEQ ID NO: 66693
  derived and/or modified CDS sequence (opt1) from hemagglutinin__InfluenzaA__AFK74835

SEQ ID NO: 73067 - RNA, 1701 nt, Artificial Sequence; identical to SEQ ID NO: 66693
  derived and/or modified CDS sequence (opt1) from hemagglutinin__InfluenzaA__AFK74845

SEQ ID NO: 73068 - RNA, 1701 nt, Artificial Sequence; identical to SEQ ID NO: 66693
  derived and/or modified CDS sequence (opt1) from hemagglutinin__InfluenzaA__AFK74895

SEQ ID NO: 73069 - RNA, 1701 nt, Artificial Sequence; identical to SEQ ID NO: 66693
  derived and/or modified CDS sequence (opt1) from hemagglutinin__InfluenzaA__AFK74905

SEQ ID NO: 73070 - RNA, 1701 nt, Artificial Sequence; identical to SEQ ID NO: 66693
  derived and/or modified CDS sequence (opt1) from hemagglutinin__InfluenzaA__AFK74915

SEQ ID NO: 73071 - RNA, 1701 nt, Artificial Sequence
  derived and/or modified CDS sequence (opt1) from hemagglutinin__InfluenzaA__AFK74925
augaaggccauccuggugguccuccuguacaccuucgccaccgcgaacgccgacacgcugugcaucggcuaccacgccaacaacagcaccgacaccguggacaccgugcucgagaagaacgucacggugacccacuccgugaaccugcuggaggacaagcacaacgggaagcucugcaagcugcgcggcgucgugccccugcaccucgggaagugcaacaucgccggcuggauccuggggaacccggagugcgagagccuguccaccgccagcuccuggagcuacaucguggagaccuccagcuccgacaacggcacgugcuaccccggcgacuucaucgacuacgaggagcuccgggagcagcugagcuccgucagcuccuucgagcgcuucgagaucuuccccaagaccagcuccuggcccaaccacgacagcaacaagggggugaccgcggccugcccgcacgccggcgccaaguccuucuacaagaaccugaucuggcucgugaagaaggggaacagcuaccccaagcuguccaagagcuacaucaacgacaagggcaaggagguccuggugcucugggggauccaccaccccagcaccuccgcggaccagcagagccuguaccagaacgccgacgccuacguguucgucggcacgucccgguacagcaagaaguucaagcccgagaucgccauccgcccgaaggugcgggaccaggagggccgcaugaacuacuacuggacccugguggagcccggggacaagaucaccuucgaggccaccggcaaccucgucgugccccgguacgcguucacgauggagcgcaacgccggguccggcaucaucaucagcgacacccccgugcacgacugcaacacgaccugccagaccccgaagggcgccaucaacaccucccugcccuuccagaacauccaccccaucaccaucgggaagugccccaaguacgucaagagcaccaagcugcggcucgccacgggccugcgcaacgugccguccauccagagccgggggcuguucggcgccaucgcgggguucaucgagggcggcuggaccgggaugguggacggcugguacggguaccaccaccagaacgagcagggcuccggguacgccgccgaccucaagagcacccagaacgccaucgacggcaucaccaacaaggucaacuccgugaucgagaagaugaacacgcaguucaccgccgucggcaaggaguucaaccaccuggagaagcgcaucgagaaccugaacaagaagaucgacgacggguuccucgacaucuggaccuacaacgcggagcugcuggugcuccuggagaacgagcggacccuggacuaccacgacagcaacgugaagaaccucuacgagaagguccgcucccagcugaagaacaacgccaaggagaucggcaacgggugcuucgaguucuaccacaagugcgacaacacgugcauggagagcgugaagaacggcaccuacgacuaccccaaguacuccgaggaggccaagcugaaccgggaggagaucgacggggugaagcucgagagcacccgcaucuaccagauccuggccaucuacuccaccgucgccagcagccuggugcucguggucucccugggcgcgaucagcuucuggaugugcuccaacggcagccugcagugccggaucugcaucuga

SEQ ID NO: 73072 - RNA, 1701 nt, Artificial Sequence; identical to SEQ ID NO: 67795
  derived and/or modified CDS sequence (opt1) from hemagglutinin__InfluenzaA__AFK74935

SEQ ID NO: 73073 - RNA, 1701 nt, Artificial Sequence; identical to SEQ ID NO: 66693
  derived and/or modified CDS sequence (opt1) from hemagglutinin__InfluenzaA__AFK74945

SEQ ID NO: 73074 - RNA, 1701 nt, Artificial Sequence; identical to SEQ ID NO: 66693
  derived and/or modified CDS sequence (opt1) from hemagglutinin__InfluenzaA__AFK74955

SEQ ID NO: 73075 - RNA, 1701 nt, Artificial Sequence; identical to SEQ ID NO: 66693
  derived and/or modified CDS sequence (opt1) from hemagglutinin__InfluenzaA__AFK74965

SEQ ID NO: 73076 - RNA, 1701 nt, Artificial Sequence; identical to SEQ ID NO: 66784
  derived and/or modified CDS sequence (opt1) from hemagglutinin__InfluenzaA__AFK74975

SEQ ID NO: 73077 - RNA, 1701 nt, Artificial Sequence; identical to SEQ ID NO: 66693
  derived and/or modified CDS sequence (opt1) from hemagglutinin__InfluenzaA__AFK74985

SEQ ID NO: 73078 - RNA, 1701 nt, Artificial Sequence; identical to SEQ ID NO: 69248
  derived and/or modified CDS sequence (opt1) from hemagglutinin__InfluenzaA__AFK74995

SEQ ID NO: 73079 - RNA, 1701 nt, Artificial Sequence; identical to SEQ ID NO: 66693
  derived and/or modified CDS sequence (opt1) from hemagglutinin__InfluenzaA__AFK75005

SEQ ID NO: 73080 - RNA, 1701 nt, Artificial Sequence
  derived and/or modified CDS sequence (opt1) from hemagglutinin__InfluenzaA__AFK75015
augaaggccauccuggugguccuccuguacaccuucgccaccgcgaacgccgacacgcugugcaucggcuaccacgccaacaacagcaccgacaccguggacaccgugcucgagaagaacgucacggugacccacuccgugaaccugcuggaggacaagcacaacgggaagcucugcaagcugcgcggcgucgcgccccugcaccucgggaagugcaacaucgccggcuggauccuggggaacccggagugcgagagccuguccaccgccagcuccuggagcuacaucguggagaccuccagcuccgacaacggcacgugcuaccccggcgacuucaucgacuacgaggagcuccgggagcagcugagcuccgugagcuccuucgagcgcuucgagaucuuccccaagaccagcuccuggcccaaccacgacagcaacaagggggucaccgccgccugcccgcacgccggcgcgaaguccuucuacaagaaccugaucuggcucgugaagaaggggaacagcuaccccaagcuguccaagagcuacaucaacgacaagggcaaggaggugcugguccucugggggauccaccaccccagcaccuccgccgaccagcagagccuguaccagaacgccgacgccuacguguucgugggcacgucccgguacagcaagaaguucaagcccgagaucgccauccgcccgaagguccgggaccaggagggccgcaugaacuacuacuggacccugguggagcccggggacaagaucaccuucgaggcgaccggcaaccucguggucccccgguacgccuucgccauggagcgcaacgccggguccggcaucaucaucagcgacacgcccgugcacgacugcaacacgaccugccagaccccgaagggcgccaucaacaccucccugcccuuccagaacauccaccccaucaccaucgggaagugccccaaguacgucaagagcaccaagcugcggcucgcgaccggccugcgcaacgugccguccauccagagccgggggcuguucggcgccaucgccggguucaucgagggcggcuggacggggaugguggacggcugguacggguaccaccaccagaacgagcagggcuccggguacgccgccgaccucaagagcacccagaacgcgaucgacgagaucaccaacaaggugaacuccgucaucgagaagaugaacacccaguucacggccgugggcaaggaguucaaccaccuggagaagcgcaucgagaaccugaacaagaaggucgacgacggcuuccucgacaucuggaccuacaacgccgagcugcuggugcuccuggagaacgagcggacccuggacuaccacgacagcaacgugaagaaccucuacgagaagguccgcucccagcugaagaacaacgccaaggagaucgggaacggcugcuucgaguucuaccacaagugcgacaacacgugcauggagagcgugaagaacgggaccuacgacuaccccaaguacuccgaggaggccaagcugaaccgggaggagaucgacggcgugaagcucgagagcacccgcaucuaccagauccuggcgaucuacuccaccgucgccagcagccuggugcucguggucucccugggggccaucagcuucuggaugugcuccaacggcagccugcagugccggaucugcguguga

SEQ ID NO: 73081 - RNA, 1701 nt, Artificial Sequence; identical to SEQ ID NO: 66935
  derived and/or modified CDS sequence (opt1) from hemagglutinin__InfluenzaA__AFK75025

SEQ ID NO: 73082 - RNA, 1701 nt, Artificial Sequence; identical to SEQ ID NO: 66935
  derived and/or modified CDS sequence (opt1) from hemagglutinin__InfluenzaA__AFK75035

SEQ ID NO: 73083 - RNA, 1701 nt, Artificial Sequence; identical to SEQ ID NO: 66935
  derived and/or modified CDS sequence (opt1) from hemagglutinin__InfluenzaA__AFK75045

SEQ ID NO: 73084 - RNA, 1701 nt, Artificial Sequence; identical to SEQ ID NO: 66935
  derived and/or modified CDS sequence (opt1) from hemagglutinin__InfluenzaA__AFK75055

SEQ ID NO: 73085 - RNA, 1701 nt, Artificial Sequence; identical to SEQ ID NO: 66693
  derived and/or modified CDS sequence (opt1) from hemagglutinin__InfluenzaA__AFK75065

SEQ ID NO: 73086 - RNA, 1701 nt, Artificial Sequence; identical to SEQ ID NO: 66693
  derived and/or modified CDS sequence (opt1) from hemagglutinin__InfluenzaA__AFK75075

SEQ ID NO: 73087 - RNA, 1701 nt, Artificial Sequence; identical to SEQ ID NO: 67857
  derived and/or modified CDS sequence (opt1) from hemagglutinin__InfluenzaA__AFK75085

SEQ ID NO: 73088 - RNA, 1701 nt, Artificial Sequence; identical to SEQ ID NO: 67857
  derived and/or modified CDS sequence (opt1) from hemagglutinin__InfluenzaA__AFK75095

SEQ ID NO: 73089 - RNA, 1701 nt, Artificial Sequence; identical to SEQ ID NO: 66693
  derived and/or modified CDS sequence (opt1) from hemagglutinin__InfluenzaA__AFK75105

SEQ ID NO: 73090 - RNA, 1701 nt, Artificial Sequence; identical to SEQ ID NO: 66935
  derived and/or modified CDS sequence (opt1) from hemagglutinin__InfluenzaA__AFK77857

SEQ ID NO: 73091 - RNA, 1701 nt, Artificial Sequence; identical to SEQ ID NO: 66935
  derived and/or modified CDS sequence (opt1) from hemagglutinin__InfluenzaA__AFK77867

SEQ ID NO: 73092 - RNA, 1701 nt, Artificial Sequence; identical to SEQ ID NO: 72221
  derived and/or modified CDS sequence (opt1) from hemagglutinin__InfluenzaA__AFK77877

SEQ ID NO: 73093 - RNA, 1701 nt, Artificial Sequence; identical to SEQ ID NO: 66693
  derived and/or modified CDS sequence (opt1) from hemagglutinin__InfluenzaA__AFK77887

SEQ ID NO: 73094 - RNA, 1701 nt, Artificial Sequence
  derived and/or modified CDS sequence (opt1) from hemagglutinin__InfluenzaA__AFK77897
augaaggccauccuggugguccuccuguacaccuucgccaccgcgaacgccgacacgcugugcaucggcuaccacgccaacaacagcaccgacaccguggacaccgugcucgagaagaacgucacggugacccacuccaucaaccugcuggaggacaagcacaacgggaagcucugcaagcugcgcggcguggcgccccugcaccucgggaagugcaacaucgccggcuggauccuggggaacccggagugcgagagccuguccaccgccagcuccuggagcuacaucgucgagaccuccagcuccgacaacggcacgugcuaccccggcgacuucaucaacuacgaggagcuccgggagcagcugagcuccgugagcuccuucgagcgcuucgagaucuuccccaagaccagcuccuggcccaaccacgacagcaacaagggggugaccgccgccugcccgcacgccggcgcgaaguccuucuacaagaaccugaucuggcucgucaagaaggggaacagcuaccccaagcuguccaagagcuacaucaacgacaagggcaaggaggugcuggugcucugggggauccaccaccccagcaccuccgccgaccagcagagccuguaccagaacgccgacgccuacgucuucgugggcacguccaaguacagcaagaaguucaagcccgagaucgccgugcggccgaagguccgcgaccaggagggccggaugaacuacuacuggacccugguggagcccggggacaagaucaccuucgaggcgaccggcaaccuccuggugccccgcuacgccuucgccauggagcggaacgccggguccggcaucaucaucagcgacacgcccguccacgacugcaacacgaccugccagaccccgaagggcgccaucaacaccucccugcccuuccagaacauccaccccaucaccaucgggaagugccccaaguacgucaagagcaccaagcuccgccuggcgaccggccugcggaacgugccguccauccagagccgcgggcuguucggcgccaucgccggguucaucgagggcggcuggacggggaugguggacggcugguacggguaccaccaccagaacgagcagggcuccggguacgccgccgaccucaagagcacccagaacgcgaucgacaagaucaccaacaaggugaacuccgugaucgagaagaugaacacccaguucacggccgucggcaaggaguucaaccaccuggagaagcggaucgagaaccucaacaagaagguggacgacggcuuccuggacaucuggaccuacaacgccgagcugcucguccugcuggagaacgagcgcacccucgacuaccacgacagcaacgugaagaaccuguacgagaaggugcggucccagcugaagaacaacgccaaggagaucgggaacggcugcuucgaguucuaccacaagugcgacaacacgugcauggagagcgucaagaacgggaccuacgacuaccccaaguacuccgaggaggccaagcucaaccgcgaggagaucgacggcgugaagcuggagagcacccggaucuaccagauccuggcgaucuacuccaccguggccagcagccucguccugguggugucccugggggccaucagcuucuggaugugcuccaacggcagccuccagugccgcaucugcaucuga

SEQ ID NO: 73095 - RNA, 1701 nt, Artificial Sequence; identical to SEQ ID NO: 71074
  derived and/or modified CDS sequence (opt1) from hemagglutinin__InfluenzaA__AFK78028

SEQ ID NO: 73096 - RNA, 1701 nt, Artificial Sequence; identical to SEQ ID NO: 66935
  derived and/or modified CDS sequence (opt1) from hemagglutinin__InfluenzaA__AFK78187

SEQ ID NO: 73097 - RNA, 1701 nt, Artificial Sequence; identical to SEQ ID NO: 70879
  derived and/or modified CDS sequence (opt1) from hemagglutinin__InfluenzaA__AFM45476

SEQ ID NO: 73098 - RNA, 1701 nt, Artificial Sequence
  derived and/or modified CDS sequence (opt1) from hemagglutinin__InfluenzaA__AFM45487
augaagaccaucaucgcccugagcuacauccucugccugguguucgcccagaagcugcccggcaacgacaacuccaccgcgacgcucugccuggggcaccacgccgucccgaacggcaccaucgugaagaccaucaccaacgaccagaucgaggugacgaacgccaccgagcugguccagagcuccagcaccggggagaucugcgacagcccccaccagauccucgacggcgagaacugcacccugaucgacgcccugcucggggacccccagugcgacggcuuccagaacaagaagugggaccuguucguggagcgcagcaaggccuacuccaacugcuaccccuacgacgugccggacuacgcgagccugcggucccucgucgccagcuccggcacgcuggaguucaacaacgagagcuucaacuggaccggggugacccagaacggcaccuccagcgccugcauccgccgguccaacagcuccuucuucagccgccugaacuggcucacgcaccugaacuucaaguaccccgcccugaacgugaccaugcccaacaacgagcaguucgacaagcucuacaucuggggcguccaccaccccgggaccgacaaggaccagaucuuccuguacgcgcaguccagcgggcggaucaccgugagcacgaagcgcucccagcaggccgugaucccgaacaucggcagccggccccgcauccggaacauccccucccgcaucagcaucuacuggaccaucgucaagcccggcgacauccugcucaucaacuccaccgggaaccugaucgccccgcggggcuacuucaagauccgcagcgggaaguccagcaucaugcgguccgacgcccccaucggcaagugcaacagcgagugcaucacccccaacggcuccauccccaacgacaagccguuccagaacgugaaccgcaucacguacggggccugcccccgguacgugaagcagagcacccugaagcucgcgaccggcaugcgcaacguccccgagaagcagacccgggggaucuucggcgccaucgccggguucaucgagaacggcugggagggcaugguggacgggugguacggcuuccgccaccagaacuccgaggggcggggccaggccgccgaccugaaguccacgcaggcggccaucgaccagaucaacgggaagcugaaccgccucaucggcaagaccaacgagaaguuccaccagaucgagaaggaguucuccgagguggagggccggauccaggaccuggagaaguacgucgaggacaccaagaucgaccuguggagcuacaacgccgagcuccugguggcccuggagaaccagcacaccaucgaccucacggacuccgagaugaacaagcuguucgagaagaccaagaagcagcugcgcgagaacgccgaggacauggggaacggcugcuucaagaucuaccacaagugcgacaacgcgugcaucgggagcauccgcaacggcaccuacaaccacgacguguaccgggacgaggcccucaacaaccgcuuccagaucaagggggucgagcugaaguccggcuacaaggacuggauccuguggaucagcuucgccaucagcugcuuccuccugugcguggcccugcucggcuucaucaugugggccugccagaaggggaacauccggugcaacaucugcaucuga

SEQ ID NO: 73099 - RNA, 1701 nt, Artificial Sequence; identical to SEQ ID NO: 70879
  derived and/or modified CDS sequence (opt1) from hemagglutinin__InfluenzaA__AFM45489

SEQ ID NO: 73100 - RNA, 1701 nt, Artificial Sequence; identical to SEQ ID NO: 73098
  derived and/or modified CDS sequence (opt1) from hemagglutinin__InfluenzaA__AFM45494

SEQ ID NO: 73101 - RNA, 1701 nt, Artificial Sequence
  derived and/or modified CDS sequence (opt1) from hemagglutinin__InfluenzaA__AFM68954
augaaggcccgccugcucgugcugcugugcgcccucgcggccaccgacgccgacaccaucugcaucggcuaccacgccaacaacagcacggacaccgucgacacccugcuggagaagaacgugaccgugacgcacuccgucaaccuccuggaggacagccacaacgggaagcugugcaagcucaagggcaucgcgccccugcagcuggggaagugcaacaucgccggcuggcuccuggggaacccggagugcgacucccugcuccccgcccggagcugguccuacaucguggagacccccaacagcgagaacggcgccugcuaccccggcgacuucaucgacuacgaggagcugaaggagcagcuguccagcguguccagccucgagcgcuucgagaucuucccgaaggaguccagcuggcccaaccacaacacccugaagggggucaccgccuccugcagccacggcgggaaguccagcuucuaccggaaccugcucuggcugacgaagaccgaggacuccuaccccaagcugagcaacuccuacgugaacaacaagggcaaggaggugcucguccuguggggcgugcaccaccccagcagcuccgacgagcagcagagccuguaccacaacgugaacgcguacgucuccguggugagcuccaacuacaacgggcgcuucaccccggagaucgccgcccggcccaagguccgcaaccagcccggccggaugaacuacuacuggacccuccuggagcccggggacacgaucaucuucgaggccaccggcaaccugaucgccccgugguacgcguucgcccucagccgcggguucggcuccggcaucaucaccagcaacgccuccaugcacgagugcaacaccaagugccagacgccccagggggccaucaacagcucccugcccuuccagaacauccaccccgugaccaucggcgagugcccgaaguacgugcggagcaccaagcugcgcauggucaccgggcuccggaacauccccuccauccaguuccgcggccuguucggggccaucgcgggcuucaucgagggcggguggacgggcaugaucgacgggugguacggcuaccaccaccagaacgagcaggggagcggcuacgccgccgaccagaaguccacccagaacgccaucaacggcaucaccaacaaggugaacagcgugaucgagaagaugaacacccaguucacggccgucuccaaggaguucaacaaccuggagaagcggauggagaaccucaacaagaagguggacgacggguuccuggacaucuggaccuacaacgcggagcugcucgugcugcuggagaacgagcgcacccucgacuuccacgaccugaacgucaagaaccuguacgagaaggucaagagccagcucaagaacaacgccaaggagaucggcaacgggugcuucgaguucuaccacaagugcgacaacaagugcauggaguccgugcggaacggcaccuacgacuaccccaaguacagcgaggagagcaagcugaaccgcgagaagaucgacggggugaagcuggaguccaugggcguguaccagauccucgccaucuacagcacggucgccuccagccuggugcugcuggugucccucggcgccaucagcuucuggaugugcuccaacgggagccugcagugccggaucugcaucuga

SEQ ID NO: 73102 - RNA, 1701 nt, Artificial Sequence
  derived and/or modified CDS sequence (opt1) from hemagglutinin__InfluenzaA__AFM68965
augaagaccaucaucgcccugagcuacaucuucugccaggugcucgcccagaaccugcccggcaacgacaacuccaccgcgacgcugugccucgggcaccacgccgucccgaacggcacccuggugaagaccaucaccaacgaccagaucgaggugacgaacgccaccgagcugguccagagcuccagcaccgggcgcaucugcgacagcccccaccggauccucgacggcaagaacugcacccugaucgacgcccugcucggggacccccacugcgacggcuuccagaacgagaagugggaccuguucguggagcgcuccaaggccuucuccaacugcuaccccuacgacgugccggacuacgcgagccugcggucccucgucgccagcuccggcacgcuggaguucaucaacgagggguucaacuggaccggcgugacccagaacgggggcagcuacgccugcaagcgcgggcccgacaacuccuucuucagccggcugaacuggcucuacaaguccgagagcaccuaccccgugcugaacgucacgaugcccaacaacgacaacuucgacaagcuguacaucuggggcgugcaccacccguccaccgacaaggagcagaccaaccucuacgugcaggccagcggccgcgucaccguguccacgaagcggagccagcagaccaucauccccaacguggggagccgccccuggguccggggccuguccagcgggaucuccaucuacuggaccaucgugaagcccggcgacauccugcucaucaacagcaacggcaaccugaucgcgccgcgcggguacuucaagauccggaccggcaaguccagcaucaugcgcuccgacgcccccaucgggacgugcagcuccgagugcaucacccccaacggcagcauccccaacgacaagccguuccagaacgugaacaagaucaccuacggggccugccccaaguacgucaagcagaacacccugaagcucgccacgggcaugcggaacgugcccgagaagcagacccgcggcaucuucggggccaaggcgggcuucaucgagaacgggugggagggcaugaucgacgggugguacggcuuccggcaccagaacuccgagggcaccgggcaggccgccgaccucaagagcacccaggccgccaucgaccagaucaacggcaagcugaaccgcgugaucgagaagacgaacgagaaguuccaccagaucgagaaggaguucuccgaggucgaggggcggauccaggaccucgagaaguacguggaggacaccaagaucgaccuguggagcuacaacgcggagcugcucguggcccuggagaaccagcacaccaucgaccugaccgacuccgagaugaacaagcuguucgagaagacgcgccggcagcugcgcgagaacgccgaggacaugggcaacgggugcuucaagaucuaccacaagugcgacaacgccugcaucggcagcauccggaacggcaccuacgaccacgacgucuaccgcgacgaggcccugaacaaccgcuuccagaucaaggggguggagcucaaguccggcuacaaggacuggauccuguggaucagcuucgcgaucuccugcuuccugcucugcgucgugcugcugggguucaucaugugggccugccagaagggcaacauccggugcaacaucugcaucuga

SEQ ID NO: 73103 - RNA, 1701 nt, Artificial Sequence
  derived and/or modified CDS sequence (opt1) from hemagglutinin__InfluenzaA__AFM68987
augaagaccaucaucgcccugagcuacaucuucugccucguguucgcccagaaccugcccggcaacgacaacuccaccgcgacgcugugccucgggcaccacgccgucccgaacggcacccuggugaagaccaucaccaacgaccagaucgaggugacgaacgccaccgagcugguccagagcuccagcaccgggcgcaucugcgacagcccccaccggauccucgacggcaagaacugcacccugaucgacgcccugcucggggacccccacugcgacggcuuccagaacgagaagugggaccuguucguggagcgcuccaaggccuucuccaacugcuaccccuacgacgugccggacuacgcgagccugcggucccucgucgccagcuccggcacgcuggaguucaucaacgagggguucaacuggaccggcgugacccagagcgggggcuccuacgccugcaagcgcgggagcgacaaguccuucuucagccggcugaacuggcucuacgaguccgagagcaaguaccccgugcugaacgucaccaugcccaacaacggcaacuucgacaagcuguacaucuggggcgugcaccaccccuccacggacaaggagcagaccaaccucuacgugcgcgccagcgggcgggucaccgugagcaccaagcgcucccagcagacggugaucccgaacaucggcagccggcccuggguccgcgggcuguccagccggaucuccaucuacuggaccaucgugaagcccggcgacauccugcucaucaacagcaacggcaaccugaucgcgccccgcggguacuucaagauccggaccggcaaguccagcaucaugcgcuccgacgccccgaucgggaccugcagcuccgagugcaucacgcccaacggcagcauccccaacgacaagcccuuccagaacgugaacaagaucaccuacggggccugcccgaaguacgucaagcagaacacccugaagcucgccaccggcaugcggaacgugcccgagaagcagacgcgcggcaucuucggggccaucgcgggcuucaucgagaacgggugggagggcaugguggacgggugguacggcuuccggcaccagaacuccgagggcaccgggcaggccgccgaccucaagagcacccaggccgccaucgaccagaucaacggcaagcugaaccgcgucaucgagaagaccaacgagaaguuccaccagaucgagaaggaguucuccgagguggaggggcggauccaggaccucgagaaguacguggaggacacgaagaucgaccuguggagcuacaacgcggagcugcucgucgcccuggagaaccagcacaccaucgaccugaccgacuccgagaugaacaagcuguucgagaagacccgccggcagcugcgcgagaacgccgaggacaugggcaacgggugcuucaagaucuaccacaagugcgacaacgccugcaucggcagcauccgcaacggcacguacgaccacgacguguaccgggacgaggcccugaacaaccgcuuccagaucaagggggucgagcucaaguccggcuacaaggacuggauccuguggaucagcuucgcgaucagcugcuuccugcucugcguggugcugcugggguucaucaugugggccugccagaagggcaacauccggugcaacaucugcaucuga

SEQ ID NO: 73104 - RNA, 1701 nt, Artificial Sequence
  derived and/or modified CDS sequence (opt1) from hemagglutinin__InfluenzaA__AFM71720
augaagaccaucaucgcccugagcuacaucuucugccucguguucgcccagaagcugcccggcaacgacaacuccaccgcgacgcugugccucgggcaccacgccgucccgaacggcacccuggugaagaccaucaccaacgaccagaucgaggugacgaacgccaccgagcugguccagagcuccagcaccgggcgcaucugcgacagcccccaccggauccucgacggcaagaacugcacccugaucgacgcccugcucggggacccccacugcgacggcuuccagaacgagaagugggaccuguucguggagcgcuccaaggccuacuccaacugcuaccccuacgacgugccggacuacgcgagccugcggucccucgucgccagcuccggcacgcuggaguucaucaacgaggacuucaacuggaccggggugacccagagcggcggguccuacgccugcaagcgcggcagcgugaacuccuucuucagccggcugaacuggcuccacgaguccgaguacaaguaccccgcccugaacgucgcgaugcccaacaacgggaaguucgacaagcuguacaucuggggcgugcaccaccccaucaccgaccgcgagcagacgaaccucuacgugcgggccagcggccgcgucaccguguccaccaagcggagccagcagaccgugaucccgaacaucgggagccgccccuggguccggggccuguccagccgcaucuccaucuacuggacgaucgugaagcccggggacauccuguucaucaacagcaccggcaaccucaucgcgccccggggcuacuucaagauccgcaccgggaaguccagcaucaugcgguccgacgccccgaucgggaccugcagcuccgagugcaucacgcccaacggcagcauccccaacgacaagcccuuccagaacgugaacaagaucaccuacggcgccugcccgcgcuacgucaagcagaacacccugaagcuggccaccgggaugcggaacgugcccgagaagcagacgcgcggcaucuucggcgccaucgccggguucaucgagaacggcugggaggggaugguggacggcugguacggguuccggcaccagaacuccgagggcaccggccaggccgccgaccucaagagcacccaggcggccaucgaccagaucaacgggaagcugaaccgccugaucgagaagaccaacgagaaguuccaccagaucgagaaggaguucuccgaggucgagggccggauccaggaccucgagaaguacguggaggacacgaagaucgaccuguggagcuacaacgccgagcugcucguggcccuggagaaccagcacaccaucgaccugaccgacuccgagaugaacaagcuguucgagaagacccgcaagcagcuccgcgagaacgccgaggacauggggaacggcugcuucaagaucuaccacaagugcgacaacgcgugcaucgggagcauccggaacggcacguacgaccacgacgucuaccgcgacgaggcccugaacaaccgguuccagaucaagggcguggagcucaaguccggguacaaggacuggauccuguggaucagcuucgccaucuccugcuuccugcucugcgucgugcugcugggcuucaucaugugggccugccagaaggggaacauccgcugcaacaucugcaucuga

SEQ ID NO: 73105 - RNA, 1701 nt, Artificial Sequence
  derived and/or modified CDS sequence (opt1) from hemagglutinin__InfluenzaA__AFM71731
augaagaccaucaucgcccugagcuacauccucugccugguguucgcccagaagcugcccggcaacgacaacuccaccgcgacgcucugccuggggcaccacgccgucccgaacggcacccuggugaagaccaucaccaacgaccagaucgaggugacgaacgccaccgagcucguccagagcuccagcaccgggcgcaucugcgacagcccccaccggauccuggacggcaagaacugcacccugaucgacgcccuccugggggacccccacugcgacggcuuccagaacaaggagugggaccuguucguggagcgcagcaaggccuacuccaacugcuaccccuacgacgugccggacuacgcgagccuccggucccuggucgccagcuccggcacgcuggaguucaucaacgaggacuucaacuggaccgggguggcccagagcggcgaguccuacgccugcaagcgcgggagcgugaaguccuucuucagccggcucaacuggcugcacaaguccgaguacaaguaccccgcgcugaacgucaccaugcccaacaacggcaaguucgacaagcucuacaucuggggcgugcaccaccccagcaccgaccgcgagcagacgaaccuguacgugcgggccuccgggcgcgucaccgugagcaccaagcggagccagcagaccgugaucccgaacaucggcucccgccccuggguccgggggcugagcucccgcaucagcaucuacuggacgaucgugaagcccggcgacauccuccugaucaacuccaccgggaaccugaucgcgccccggggcuacuucaagauccgcaccggcaagagcuccaucaugcggagcgacgccccgaucgggaccugcuccagcgagugcaucacgcccaacggcuccauccccaacgacaagcccuuccagaacgugaaccgcaucaccuacggggccugcccgcgguacgucaagcagaacacccucaagcuggccaccggcaugcgcaacgugcccgagaagcagacgcgggggaucuucggcgccaucgccggcuucaucgagaacgggugggagggcaugguggacgggugguacggcuuccgccaccagaacagcgaggggaccggccaggccgccgaccugaaguccacccaggcggccaucgaccagaucaacggcaagcucaaccggcugaucgagaagaccaacgagaaguuccaccagaucgagaaggaguucagcgaggucgaggggcgcauccaggaccuggagaaguacguggaggacacgaagaucgaccucugguccuacaacgccgagcugcugguggcccucgagaaccagcacaccaucgaccugaccgacagcgagaugaacaagcuguucgagaagacccgcaagcagcuccgggagaacgccgaggacaugggcaacgggugcuucaagaucuaccacaagugcgacaacgcgugcaucggcuccauccgcaacgggacguacgaccacgacgucuaccgggacgaggcccugaacaaccgcuuccagaucaagggcguggagcugaaguccggcuacaaggacuggauccucuggaucuccuucgccaucagcugcuuccugcugugcgucgugcuccugggguucaucaugugggccugccagaagggcaacauccggugcaacaucugcaucuga

SEQ ID NO: 73106 - RNA, 1701 nt, Artificial Sequence
  derived and/or modified CDS sequence (opt1) from hemagglutinin__InfluenzaA__AFM71754
augaagaccaucaucgcccugagcuacauccucugccugguguucgcccagaagcugcccggcaacgacaacuccaccgcgacgcucugccuggggcaccacgccgucccgaacggcaccaucgugaagaccaucaccaacgaccagaucgaggugacgaacgccaccgagcugguccagagcuccagcaccggggagaucugcgacagcccccaccagauccucgacggcaagaacugcacccugaucgacgcccugcucggggacccccagugcgacggcuuccagaacaagaagugggaccuguucguggagcgcuccaaggccuacuccaacugcuaccccuacgacgugccggacuacgcgagccugcggucccucgucgccagcuccggcacgcuggaguucaacaacgagagcuucaacuggaccggggugacccagaacggcaccuccagcgccugcauccgccgguccaagaacagcuucuucucccgccugaacuggcucacgcaccugaacuucaaguaccccgcccugaacgugaccaugcccaacaacgagcaguucgacaagcucuacaucuggggcguccaccaccccgggaccgacaaggaccagaucuucccguacgcgcaggccagcgggcggaucaccguguccacgaagcgcagccagcagaccgccauccccaacaucggcagccggccccgcgugcggaacauccccucccgcaucagcaucuacuggaccaucgucaagccgggcgacauccugcugaucaacuccaccgggaaccucaucgcgccccggggcuacuucaagauccgcagcgggaaguccagcaucaugcgguccgacgcccccaucggcaagugcaacagcgagugcaucacgcccaacggcuccaucccgaacgacaagcccuuccagaacgugaaccgcaucaccuacggggccugcccccgguacgugaagcagaacacccugaagcuggccaccggcaugcgcaacguccccgagaagcagacgcgggggaucuucggcgccaucgccggguucaucgagaacggcugggagggcaugguggacgggugguacggcuuccgccaccagaacagcgaggggcggggccaggccgcggaccucaaguccacccaggccgccaucgaccagaucaacgggaagcugaaccgccugaucggcaagaccaacgagaaguuccaccagaucgagaaggaguucagcgagguggagggccggauccaggaccucgagaaguacgucgaggacaccaagaucgaccugugguccuacaacgccgagcugcucguggcccuggagaaccagcacacgaucgaccugaccgacagcgagaugaacaagcuguucgagaagaccaagaagcagcuccgcgagaacgcggaggacauggggaacggcugcuucaagaucuaccacaagugcgacaacgccugcaucggguccauccgcaacggcaccuacgcccacgacguguaccgggacgaggcccugaacaaccgcuuccagaucaagggggucgagcucaagagcggcuacaaggacuggauccuguggaucuccuucgccaucagcugcuuccugcucugcguggcgcugcugggcuucaucaugugggccugccagaaggggaacauccggugcaacaucugcaucuga

SEQ ID NO: 73107 - RNA, 1701 nt, Artificial Sequence
  derived and/or modified CDS sequence (opt1) from hemagglutinin__InfluenzaA__AFM71768
augaagaccaucaucgcccugagcuacauccucugccugguguucgcccagaagcugcccggcaacgacaacuccaccgcgacgcucugccuggggcaccacgccgucccgaacggcaccaucgugaagaccaucaccaacgaccagaucgaggugacgaacgccaccgagcugguccagagcuccagcaccggggagaucugcgacagcccccaccagauccucgacggcaagaacugcacccugaucgacgcccugcucggggacccccagugcgacgacuuccagaacaagaagugggaccuguucguggagcgcuccaaggccuacuccaacugcuaccccuacgacgugccggacuacgcgagccugcggucccucgucgccagcuccggcacgcuggaguucaacaacgagagcuucaacuggaccggcgugacccagaacgggaccuccagcgccugcauccgccgguccaagaacagcuucuucucccgccugaacuggcucacgcaccugaacuucaaguaccccgcccugaacgugaccaugcccaacaacgagcaguucgacaagcucuacaucuggggcguccaccaccccgggaccgacaaggaccagaucuucccguacgcgcaggccagcggccggaucaccguguccacgaagcgcagccagcagaccgccauccccaacaucgggagccggccccgcgugcggaacauccccucccgcaucagcaucuacuggaccaucgucaagccgggcgacauccugcugaucaacuccaccggcaaccucaucgcgccccggggguacuucaagauccgcagcggcaaguccagcaucaugcgguccgacgcccccaucgggaagugcaacagcgagugcaucacgcccaacggcuccaucccgaacgacaagcccuuccagaacgugaaccgcaucaccuacggcgccugcccccgguacgugaagcagaacacccugaagcuggccaccgggaugcgcaacguccccgagaagcagacgcggggcaucuucggggccaucgccggcuucaucgagaacgggugggagggcaugguggacggcugguacggguuccgccaccagaacagcgagggccgggggcaggccgcggaccucaaguccacccaggccgccaucgaccagaucaacggcaagcugaaccgccugaucgggaagaccaacgagaaguuccaccagaucgagaaggaguucagcgagguggagggccggauccaggaccucgagaaguacgucgaggacaccaagaucgaccugugguccuacaacgccgagcugcucguggcccuggagaaccagcacacgaucgaccugaccgacagcgagaugaacaagcuguucgagaagaccaagaagcagcuccgcgagaacgcggaggacaugggcaacgggugcuucaagaucuaccacaagugcgacaacgccugcaucggcuccauccgcaacgggaccuacgcccacgacguguaccgggacgaggcccugaacaaccgcuuccagaucaagggcgucgagcucaagagcggguacaaggacuggauccuguggaucuccuucgccaucagcugcuuccugcucugcguggcgcugcugggcuucaucaugugggccugccagaagggcaacauccggugcaacaucugcaucuga

SEQ ID NO: 73108 - RNA, 1701 nt, Artificial Sequence
  derived and/or modified CDS sequence (opt1) from hemagglutinin__InfluenzaA__AFM71791
augaagaccaucaucgcccugagcuacacccucugccugguguucgcccagaagcugcccggcaacgacaacuccacggcgacccucugccuggggcaccacgccgucccgaacggcaccaucgugaagaccaucacgaacgaccagaucgaggugaccaacgccaccgagcugguccagagcuccagcaccggggagaucugcgacagcccccaccagauccucgacggcaagaacugcacgcugaucgacgcccugcucggggacccccagugcgacggcuuccagaacaagaagugggaccuguucguggagcgcuccaaggccuacuccaacugcuaccccuacgacgugccggacuacgcgagccugcggucccucgucgccagcuccggcacccuggaguucaacaacgagagcuucaacuggaccggggugacccagaacggcacguccagcgccugcauccgccgguccaagaacagcuucuucucccgccugaacuggcucacccaccugaacuucaaguaccccgcccugaacgugaccaugcccaacaacgagcaguucgacaagcucuacaucuggggcguccaccaccccgggaccgacaaggaccagaucuucccguacgcgcaggccagcgggcggaucacgguguccaccaagcgcagccagcagaccgugauccccaacaucggcagccggccccgcguccggaacauccccucccgcaucagcaucuacuggaccaucgugaagccgggcgacauccugcugaucaacuccacggggaaccucaucgcgccccggggcuacuucaagauccgcagcgggaaguccagcaucaugcgguccgacgcccccaucggcaagugcaacagcgagugcaucacccccaacggcuccaucccgaacgacaagcccuuccagaacgugaaccgcaucaccuacggggccugcccccgguacgucaagcagaacacccugaagcuggccacgggcaugcgcaacgugcccgagaagcagacccgggggaucuucggcgccaucgccggguucaucgagaacggcugggagggcaugguggacgggugguacggcuuccgccaccagaacagcgaggggcggggccaggccgccgaccucaaguccacccaggcggccaucgaccagaucaacgggaagcugaaccgccugaucggcaagaccaacgagaaguuccaccagaucgagaaggaguucagcgaggucgagggccggauccaggaccucgagaaguacguggaggacacgaagaucgaccugugguccuacaacgccgagcugcucguggcccuggagaaccagcacaccaucgagcugaccgacagcgagaugaacaagcuguucgagaagaccaagaagcagcuccgcgagaacgccgaggacauggggaacggcugcuucaagaucuaccacaagugcgacaacgcgugcaucggguccauccgcaacggcacguacgaccacgacgucuaccgggacgaggcccugaacaaccgcuuccagaucaaggggguggagcucaagagcggcuacaaggacuggauccuguggaucuccuucgccaucagcugcuuccugcucugcguggcccugcugggcuucaucaugugggccugccagaaggggaacauccggugcaacaucugcaucuga

SEQ ID NO: 73109 - RNA, 1701 nt, Artificial Sequence
  derived and/or modified CDS sequence (opt1) from hemagglutinin__InfluenzaA__AFM71824
augaagaccaucaucgcccugagcuacauccucugccugguguucgcccagaagcugcccggcaacgacaacuccaccgcgacgcucugccuggggcaccacgccgucccgaacggcaccaucgugaagaccaucaccaacgaccagaucgaggugacgaacgccaccgagcugguccagagcuccagcaccggggagaucugcgacagcccccaccagauccucgacggcaagaacugcacccugaucgacgcccugcucggggacccccagugcgacggcuuccagaacaagaagugggaccuguucguggagcgcuccaaggccuacuccaacugcuaccccuacgacgugccggacuacgcgagccugcggucccucgucgccagcuccggcacgcuggaguucaacaacgagagcuucaacuggaccggggugacccaggacggcaccuccagcgccugcauccgccgguccaagaacagcuucuucucccgccugaacuggcucacgcaccugaacuucaaguaccccgcccugaacgugaccaugcccaacaacgagcaguucgacaagcucuacaucuggggcguccaccaccccgggaccgacaaggaccagaucuucccguacgcgcaggccagcgggcggaucaccguguccacgaagcgcagccagcagaccgccauccccaacaucggcagccggccccgcgugcggaacauccccucccgcaucagcaucuacuggaccaucgucaagccgggcgacauccugcugaucaacuccaccgggaaccucaucgcgccccggggcuacuucaagauccgcagcgggaaguccagcaucaugcgguccgacgcccccaucggcaagugcaacagcgagugcaucacgcccaacggcuccaucccgaacgacaagcccuuccagaacgugaaccgcaucaccuacggggccugcccccgguacgugaagcagaacacccugaagcuggccaccggcaugcgcaacguccccgagaagcagacgcgggggaucuucggcgccaucgccggguucaucgagaacggcugggagggcaugguggacgggugguacggcuuccgccaccagaacagcgaggggcggggccaggccgcggaccucaaguccacccaggccgccaucgaccagaucaacgggaagcugaaccgccugaucggcaagaccaacgagaaguuccaccagaucgagaaggaguucagcgagguggagggccggauccaggaccucgagaaguacgucgaggacaccaagaucgaccugugguccuacaacgccgagcugcucguggcccuggagaaccagcacacgaucgaccugaccgacagcgagaugaacaagcuguucgagaagaccaagaagcagcuccgcgagaacgcggaggacauggggaacggcugcuucaagaucuaccacaagugcgacaacgccugcaucggguccauccgcaacggcaccuacgaccacgacguguaccgggacgaggcccugaacaaccgcuuccagaucaagggggucgagcucaagagcggcuacaaggacuggauccuguggaucuccuucgccaucagcugcuuccugcucugcguggcccugcugggcuucaucaugugggcgugccagaaggggaacauccggugcaacaucugcaucuga

SEQ ID NO: 73110 - RNA, 1701 nt, Artificial Sequence
  derived and/or modified CDS sequence (opt1) from hemagglutinin__InfluenzaA__AFM71835
augaagaccaucaucgcccugagcuacauccucugccugguguucgcccagaagcugcccggcaacgacaacuccaccgcgacgcucugccuggggcaccacgccgucccgaacggcaccaucgugaagaccaucaccaacgaccagaucgaggugacgaacgccaccgagcugguccagagcuccagcaccggggagaucugcgacagcccccaccagauccucgacggcgagaacugcacccugaucgacgcccugcucggggacccccagugcgacggcuuccagaacaagaagugggaccuguucguggagcgcuccaaggccuacuccagcugcuaccccuacgacgugccggacuacgcgucccugcggagccucgucgccuccagcggcacgcuggaguucaacuccgagagcuucaacuggaccggggugacccagaacggcaccuccagcgccugcauccgccgguccuacaacagcuucuucucccgccugaacuggcucacgcaccugaacuucaaguaccccgcccugaacgugaccaugcccaacaacgagcaguucgacaagcucuacaucuggggcguccaccaccccgggaccgacaaggaccagaucuucccguacgcgcaggccagcgggcggaucaccgugagcacgaagcgcucccagcaggccgugauccccaacaucggcagccggccccgcguccggaacauccccucccgcaucagcaucuacuggaccaucgugaagccgggcgacauccugcugaucaacuccaccgggaaccucaucgcgccccggggcuacuucaagauccgcagcgggaaguccagcaucaugcgguccgacgcccccaucggcaagugcaacagcgagugcaucacccccaacggcuccaucccgaacgacaagcccuuccagaacgugaaccgcaucacguacggggccugcccccgguacaucaagcagagcacccugaagcuggccaccggcaugcgcaacguccccgagaagcagacccgggggaucuucggcgccaucgccggguucaucgagaacggcugggagggcaugguggacgggugguacggcuuccgccaccagaacuccgaggggcggggccaggccgcggaccucaagagcacgcaggccgccaucgaccagaucaacgggaagcugaaccgccugaucggcaagaccaacgagaaguuccaccagaucgagaaggaguucuccgagguggagggccggauccaggaccucgagaaguacgucgaggacaccaagaucgaccuguggagcuacaacgccgagcugcucguggcccuggagaaccagcacaccaucgaccugacggacuccgagaugaacaagcuguucgagaagaccaagaagcagcuccgcgagaacgcggaggacauggggaacggcugcuucaagaucuaccacaagugcgacaacgccugcaucgggagcauccgcaacggcaccuacgaccacgacguguaccgggacgaggcccugaacaaccgcuuccagaucaagggggucgagcucaaguccggcuacaaggacuggauccuguggaucagccuggccaucagcugcuuccuccugugcguggcccugcucggcuucaucaugugggcgugccagaaggggaacauccggugcaacaucugcaucuga

SEQ ID NO: 73111 - RNA, 1698 nt, Artificial Sequence
  derived and/or modified CDS sequence (opt1) from hemagglutinin__InfluenzaA__AFM71846
augaaggccaaccugcucgugcugcugugcgcccucgcggccgccgacgccgacaccaucugcaucggcuaccacgccaacaacagcaccgacacggucgacaccgugcuggagaagaacgugaccgucacccacuccgugaaccugcucgaggacagccacaacgggaagcugugccgccugaagggcaucgcgccccuccagcuggggaagugcaacaucgccggcuggcugcucgggaacccggagugcgacccccugcugcccgugcgguccuggagcuacaucgucgagacgcccaacuccgagaacggcaucugcuacccgggcgacuucaucgacuacgaggagcuccgcgagcagcugagcuccgugagcuccuucgagcgguucgagaucuuccccaaggagagcuccuggcccaaccacaacaccaacggggugaccgccgccugcagccacgagggcaaguccagcuucuaccgcaaccugcucuggcugaccgagaaggagggguccuaccccaagcugaagaacagcuacgucaacaagaagggcaaggaggugcucgugcugugggggauccaccacccguccaacagcaaggagcagcagaaccuguaccagaacgagaacgcguacgucuccguggugacgagcaacuacaaccggcgcuucacccccgagaucgccgagcggcccaagguccgcgaccaggccggccggaugaacuacuacuggacccuccugaagcccggcgacaccaucaucuucgaggccaacgggaaccugaucgccccgauguacgcguucgcccucagccgcggcuucggguccggcaucaucacgagcaacgccuccaugcacgagugcaacaccaagugccagacgccccugggcgccaucaacagcucccugcccuaccagaacauccaccccgugaccaucggggagugcccgaaguacgugcggagcgccaagcuccgcauggucaccggccugcggaacauccccuccauccagagccgcgggcuguucggcgcgaucgccggguucaucgagggcggcuggaccgggaugaucgacggcugguacggguaccaccaccagaacgagcagggcuccggguacgccgccgaccagaaguccacccagaacgccaucaacggcaucaccaacaaggugaacacggugaucgagaagaugaacauccaguucaccgcggucggcaaggaguucaacaagcucgagaagcggauggagaaccugaacaagaagguggacgacggguuccuggacaucuggaccuacaacgccgagcuccuggugcugcucgagaacgagcgcacccuggacuuccacgacagcaacgucaagaaccuguacgagaaggucaagagccagcucaagaacaacgccaaggagaucggcaacgggugcuucgaguucuaccacaagugcgacaacgagugcauggaguccgugcggaacggcacguacgacuaccccaaguacagcgaggaguccaagcugaaccgcgagaagguggacggggugaagcuggagagcaugggcaucuaccagauccucgccaucuacuccaccgucgccagcucccuggugcugcucgugagccugggcgcgaucagcuucuggaugugcuccaacgggagccugcagugccggaucugcaucuga

SEQ ID NO: 73112 - RNA, 1701 nt, Artificial Sequence; identical to SEQ ID NO: 66342
  derived and/or modified CDS sequence (opt1) from hemagglutinin__InfluenzaA__AFM71857

SEQ ID NO: 73113 - RNA, 1701 nt, Artificial Sequence
  derived and/or modified CDS sequence (opt1) from hemagglutinin__InfluenzaA__AFM71868
augaagaccaucaucgcccugagcuacauccucugccugguguucgcccagaagcugcccggcaacgacaacuccaccgcgacgcucugccuggggcaccacgccgucccgaacggcaccaucgugaagaccaucaccaacgaccagaucgaggugacgaacgccaccgagcugguccagagcuccagcaccgggggcaucugcgacagcccccaccagauccucgacggggagaacugcacccugaucgacgcccugcucggcgacccccagugcgacggcuuccagaacaagaagugggaccuguucguggagcgcagcaaggccuacuccaacugcuaccccuacgacgugccggacuacgcgagccugcggucccucgucgccagcuccgggacgcuggaguucaacaacgagagcuucaacuggaccggcgugacccagaacgggaccuccagcuccugcaagcgccggagcaacaacuccuucuucagccgccugaacuggcucacgcaccugaaguucaaguaccccgcccugaacgugaccaugcccaacaacgagaaguucgacaagcucuacaucuggggcguccaccaccccgugaccgacaacgaccagauccggcuguacgcccaggcguccgggcgcaucaccgugagcacgaagcggagccagcagaccgucaucccgaacaucggcucccgcccccgggugcgcgacauccccagccggaucuccaucuacuggaccaucgugaagcccggcgacauccugcucaucaacagcaccgggaaccugaucgccccgcgcggcuacuucaagauccgguccgggaaguccuccaucaugcgcagcgacgcccccaucggcaagugcaacuccgagugcaucacgcccaacggcagcauccccaacgacaagccguuccagaacgucaaccggaucaccuacggggccugcccccgcuacgugaagcagaacacccugaagcucgccaccggcaugcggaacgugcccgagaagcagacgcgcgggaucuucggcgcgaucgccggguucaucgagaacggcugggagggcauggucgacgggugguacggcuuccggcaccagaacuccgaggggaucggccaggccgccgaccucaagagcacccaggccgcgaucaaccagaucaacgggaagcugaaccgccugaucggcaagaccaacgagaaguuccaccagaucgagaaggaguucuccgagguggagggccggauccaggaccuggagaaguacguggaggacaccaagaucgaccuguggagcuacaacgccgagcuccuggucgcccuggagaaccagcacacgaucgaccucaccgacuccgagaugaacaagcuguucgagcgcaccaagaagcagcugcgcgagaacgccgaggacauggggaacggcugcuucaagaucuaccacaagugcgacaacgccugcaucgggagcauccggaacggcaccuacgaccacgacguguaccgcgacgaggcgcucaacaaccgguuccagaucaaggggguggagcugaaguccggcuacaaggacuggauccuguggaucagcuucgccaucuccugcuuccuccugugcgucgugcugcucggcuucaucaugugggccugccagaaggggaacauccgcugcaacaucugcaucuga

SEQ ID NO: 73114 - RNA, 1701 nt, Artificial Sequence; identical to SEQ ID NO: 71022
  derived and/or modified CDS sequence (opt1) from hemagglutinin__InfluenzaA__AFM71879

SEQ ID NO: 73115 - RNA, 1701 nt, Artificial Sequence
  derived and/or modified CDS sequence (opt1) from hemagglutinin__InfluenzaA__AFM71890
augaaggcccgccugcucgugcugcugugcgcccucgcggccaccgacgccgacaccaucugcaucggcuaccacgccaacaacagcacggacaccgucgacacccugcuggagaagaacgugaccgugacgcacuccgucaaccuccuggaggacagccacaacgggaagcugugcaagcucaagggcaucgcgccccugcagcuggggaagugcaacaucgccggcuggcuccuggggaacccggagugcgacucccugcuccccgcccggagcugguccuacaucguggagacccccaacagcgagaacggcgccugcuaccccggcgacuucaucgacuacgaggagcugaaggagcagcuguccagcguguccagccucgagcgcuucgagaucuucccgaaggaguccagcuggcccaaccacaacacccugaagggggucaccgccuccugcagccacggcgggaaguccagcuucuaccggaaccugcucuggcugacgaagaccgaggacuccuaccccaagcugagcaacuccuacgugaacaacaagggcaaggaggugcucguccuguggggcgugcaccaccccagcagcuccgacgagcagcagagccuguaccacaacgugaacgcguacgucuccguggugagcuccaacuacaaccgccgguucaccccggagaucgccgcccgccccaagguccggaaccagcccgggcgcaugaacuacuacuggacccuccuggagcccggcgacacgaucaucuucgaggccaccgggaaccugaucgccccgugguacgcguucgcccucagccggggcuucggguccggcaucaucaccagcaacgccuccaugcacgagugcaacaccaagugccagacgccccagggcgccaucaacagcucccugcccuuccagaacauccaccccgugaccaucggggagugcccgaaguacgugcgcagcaccaagcugcggauggucaccggccuccgcaacauccccuccauccaguuccgggggcuguucggcgccaucgcgggguucaucgagggcggcuggacggggaugaucgacggcugguacggguaccaccaccagaacgagcagggcagcggguacgccgccgaccagaaguccacccagaacgccaucaacggcaucaccaacaaggugaacagcgugaucgagaagaugaacacccaguucacggccgucuccaaggaguucaacaaccuggagaagcgcauggagaaccucaacaagaagguggacgacggcuuccuggacaucuggaccuacaacgcggagcugcucgugcugcuggagaacgagcggacccucgacuuccacgaccugaacgucaagaaccuguacgagaaggucaagagccagcucaagaacaacgccaaggagaucgggaacggcugcuucgaguucuaccacaagugcgacaacaagugcauggaguccgugcgcaacgggaccuacgacuaccccaaguacagcgaggagagcaagcugaaccgggagaagaucgacggcgugaagcuggaguccauggggguguaccagauccucgccaucuacagcacggucgccuccagccuggugcugcuggugucccucggcgccaucagcuucuggaugugcuccaacggcagccugcagugccgcaucugcaucuga

SEQ ID NO: 73116 - RNA, 1701 nt, Artificial Sequence; identical to SEQ ID NO: 73101
  derived and/or modified CDS sequence (opt1) from hemagglutinin__InfluenzaA__AFM71901

SEQ ID NO: 73117 - RNA, 1701 nt, Artificial Sequence
  derived and/or modified CDS sequence (opt1) from hemagglutinin__InfluenzaA__AFM71923
augaagaccaucaucgcccugagcuacaucuucugccucgugcugggccaggaccugcccgggaacgacaacuccaccgccacgcucugccugggccaccacgcggucccgaacgggacccuggugaagaccaucaccaacgaccagaucgaggugacgaacgccaccgagcucguccagagcuccagcaccggcaagaucugcaacaacccccaccgcauccuggacgggaucgacugcacccugaucgacgcccuccugggcgacccccacugcgacuccuuccagaacgagacgugggaccuguucguggagcggagcaaggccuucuccaacugcuaccccuacgacgugccggacuacgccagccuccgcucccuggucgcgagcuccggcacccuggaguucaucaacgagggguucaccuggaccggcgugacgcagaacgggggcagcaacgccugcaagcgggggcccgacuccggcuucuucagccgccucaacuggcuguacaaguccggcagcaccuaccccgugcugaacgucaccaugcccaacaacgacaacuucgacaagcucuacaucuggggcgugcaccacccguccaccaaccaggagcagacgagccuguacgugcaggccuccggccgggucaccgugagcaccaagcgcagccagcagaccaucauccccaacaucgggucccggcccugggugcgcggccugagcucccggaucagcaucuacuggacgaucgucaagcccggcgacauccucgugaucaacuccaacgggaaccugaucgccccgcgcggcuacuucaagaugcggaccggcaagagcuccaucaugcgcagcgacgcgcccaucgggaccugcaucuccgagugcaucacccccaacgggagcauccccaacgacaagccguuccagaacgugaacaagaucacguacggggccugccccaaguacgucaagcagaacacccugaagcucgccaccggcaugcggaacgugcccgagaagcagacccgcgggcuguucggcgccaucgccggguucaucgagaacggcugggaggggaugaucgacggcugguacggcuuccggcaccagaacuccgaggggacgggccaggcggccgaccucaagagcacccaggccgccaucgaccagaucaacgggaagcugaaccgcgugaucgagaagaccaacgagaaguuccaccagaucgagaaggaguucuccgaggucgagggccggauccaggaccuggagaaguacguggaggacaccaagaucgaccuguggagcuacaacgccgagcuccugguggcgcuggagaaccagcacacgaucgaccucaccgacuccgagaugaacaagcuguucgagaagacccgccggcagcugcgcgagaacgccgaggacauggggaacggcugcuuccggaucuaccacaagugcgacaacgccugcaucggcagcauccgcaacgggaccuacgaccacgacgucuaccgcgacgaggcccucaacaaccgguuccagaucaagggcguggagcugaaguccggguacaaggacuggauccuguggaucagcuucgccaucuccugcuuccuccugugcgucgugcugcucggcuucaucaugugggcgugccagaagggcaacauccgcugcaacaucugcaucuga

SEQ ID NO: 73118 - RNA, 1701 nt, Artificial Sequence
  derived and/or modified CDS sequence (opt1) from hemagglutinin__InfluenzaA__AFM71934
augaagaccaucaucgcccugagcuacaucuucugccucgugcugggccaggaccugcccgggaacgacaacuccaccgccacgcucugccugggccaccacgcggucccgaacgggacccuggugaagaccaucaccaacgaccagaucgaggugacgaacgccaccgagcucguccagagcuccagcaccggcaagaucugcaacaacccccaccgcauccuggacgggaucgacugcacccugaucgacgcccuccugggcgacccccacugcgacggcuuccagaacgagacgugggaccuguucguggagcgguccaaggccuucagcaacugcuaccccuacgacgugccggacuacgccucccuccgcagccuggucgcguccagcgggacccuggaguucaucaacgagggcuucaccuggaccggggugacgcagaacggcggguccaacgccugcaagcggggccccgacagcggcuucuucucccgccucaacuggcuguacaagagcggguccaccuaccccgugcugaacgucaccaugcccaacaacgacaacuucgacaagcucuacaucuggggcgugcaccacccgagcaccaaccaggagcagacgucccuguacgugcaggccagcgggcgggucaccguguccaccaagggcagccagcagaccaucauccccaacaucggcagccgccccugggugcgggggcuguccagccgcaucuccaucuacuggacgaucgucaagcccggcgacauccucgugaucaacagcaacgggaaccugaucgccccgcggggcuacuucaagaugcgcaccgggaaguccagcaucaugcgguccgacgcgcccaucgggaccugcaucagcgagugcaucacccccaacggcuccauccccaacgacaagccguuccagaacgugaacaagaucacguacggcgccugccccaaguacgucaagcagaacacccugaagcucgccaccggcaugcgcaacgugcccgagaagcagacccgggggcuguucggcgccaucgccggguucaucgagaacggcugggagggcaugaucgacgggugguacggcuuccgccaccagaacagcgaggggacgggccaggcggccgaccugaaguccacccaggccgccaucgaccagaucaacgggaagcucaaccgggugaucgagaagaccaacgagaaguuccaccagaucgagaaggaguucagcgaggucgagggccgcauccaggaccuggagaaguacguggaggacaccaagaucgaccugugguccuacaacgccgagcuccugguggcgcuggagaaccagcacacgaucgaccucaccgacagcgagaugaacaagcuguucgagaagacccggcgccagcugcgggagaacgccgaggacaugggcaacgggugcuuccgcaucuaccacaagugcgacaacgccugcaucggcuccauccggaacgggaccuacgaccacgacgucuaccgcgacgaggcccucaacaaccgcuuccagaucaagggcguggagcucaagagcggcuacaaggacuggauccuguggaucuccuucgccaucagcugcuuccugcugugcgucgugcugcucggguucaucaugugggcgugccagaagggcaacauccggugcaacaucugcaucuga

SEQ ID NO: 73119 - RNA, 1701 nt, Artificial Sequence
  derived and/or modified CDS sequence (opt1) from hemagglutinin__InfluenzaA__AFM71945
augaagaccaucaucgcccugagcuacaucuucugccucgugcugggccaggacuuccccgggaacgacaacuccaccgccacgcugugccucggccaccacgcggucccgaacgggacccuggugaagaccaucaccaacgaccagaucgaggugacgaacgccaccgagcugguccagagcuccagcaccggcaagaucugcaacaacccccaccgcauccucgacgggaucaacugcacccugaucgacgcccugcucggcgacccccacugcgacggcuuccagaacgagacgugggaccuguucguggagcgguccaaggccuucagcaacugcuaccccuacgacgugccggacuacgccucccugcgcagccucgucgcguccagcgggacccuggaguucaucaacgagggcuucaccuggaccggggugacgcagaacggcggguccaacgccugcaagcggggccccgacagcggcuucuucucccgccugaacuggcucuacaagagcggguccgccuaccccgugcugaacgucaccaugcccaacaacgacaacuucgacaagcuguacaucuggggcgugcaccacccgagcaccgaccaggagcagaccaaccucuacgugcaggccuccgggcgggucacggugagcaccaagcgcucccagcagaccaucauccccaacaucggcagccggcccugggugcgcggccugagcucccggaucagcaucuacuggaccaucgucaagcccggggacauccuggugaucaacuccaacggcaaccucaucgcgccgcgcggguacuucaagaugcggacgggcaagagcuccaucaugcgcagcgacgcccccaucgggaccugcaucuccgagugcaucacccccaacggcagcauccccaacgacaagccguuccagaacgugaacaagaucaccuacggcgccugccccaaguacgucaagcagaacacgcugaagcuggccaccgggaugcggaacgugcccgagaagcagacccgcggcaucuucggggccaucgcgggcuucaucgagaacgggugggagggcaugaucgacggcugguacggguuccggcaccagaacuccgagggcaccgggcaggccgccgaccucaagagcacgcaggccgccaucgaccagaucaacggcaagcugaaccgcgugaucgagaagaccaacgagaaguuccaccagaucgagaaggaguucuccgaggucgaggggcggauccaggaccuggagaaguacguggaggacaccaagaucgaccucuggagcuacaacgcggagcugcugguggcccucgagaaccagcacaccaucgaccugacggacuccgagaugaacaagcuguucgagaagacccgccggcagcuccgcgagaacgccgaggacaugggcaacggcugcuucaagaucuaccacaagugcgacaacgccugcaucgggagcauccggaacggcaccuacgaccacgacgucuaccgcgacgaggcccugaacaaccgcuuccagaucaaggggguggagcugaaguccggcuacaaggacuggauccucuggaucagcuucgcgaucuccugcuuccugcugugcgucgugcuccugggcuucaucaugugggccugccagaaggggaacauccggugcaacaucugcaucuga

SEQ ID NO: 73120 - RNA, 1701 nt, Artificial Sequence; identical to SEQ ID NO: 73119
  derived and/or modified CDS sequence (opt1) from hemagglutinin__InfluenzaA__AFM71956

SEQ ID NO: 73121 - RNA, 1704 nt, Artificial Sequence
  derived and/or modified CDS sequence (opt1) from hemagglutinin__InfluenzaA__AFM71978
augaagaccaucaucgcccugagcuacaucuucugccucguguucgcccaggaccugcccggcaacgacaacaacuccaccgcgacgcugugccucgggcaccacgccgucccgaacggcacccuggugaagaccaucaccaacgaccagaucgaggugacgaacgccaccgagcugguccagagcuccagcaccgggaagaucugcaacaacccccaccgcauccucgacggcaucaacugcacccugaucgacgcccugcucggggacccccacugcgacggcuuccagaacgagaagugggaccuguucguggagcgguccaaggccuucagcaacugcuaccccuacgacgugccggacuacgcgucccugcgcagccucgucgccuccagcggcacgcuggaguucaucaacgagggguucaacuggaccggcgugacccagaacgggggcuccaacgccugcaagcgggggcccgacagcggcuucuucucccgccugaacuggcucuacaagagcggcuccaccuaccccgugcagaacgucacgaugcccaacaacgacaacagcgacaagcuguacaucuggggcgugcaccacccguccaccgacaaggagcagaccaaccuguacgugcaggccagcgggaaggucaccguguccacgaagcggagccagcagaccaucauccccaacguggggagccgccccuggguccggggccucuccagccgcaucuccaucuacuggaccaucgugaagcccggcgacauccuggugaucaacagcaacgggaaccugaucgcgccgcggggcuacuucaagaugcgcaccgggaaguccagcaucaugcgguccgacgcccccaucggcacgugcagcuccgagugcaucacccccaacgggagcauccccaacgacaagccguuccagaacgucaacaagaucaccuacggcgccugccccaaguacgugaagcagaacacccucaagcuggccacgggcaugcgcaacgugcccgagaagcagacccgggggaucuucggcgccaucgcgggguucaucgagaacggcugggaggggaugaucgacggcugguacggcuuccgccaccagaacuccgaggggaccggccaggccgccgaccucaagagcacccaggccgccaucgaccagaucaacgggaagcugaaccgggucaucgagaagacgaacgagaaguuccaccagaucgagaaggaguucuccgagguggagggccgcauccaggaccuggagaaguacguggaggacaccaagaucgaccuguggagcuacaacgcggagcuccuggucgcccuggagaaccagcacaccaucgaccucaccgacuccgagaugaacaagcuguucgagaagacgcggcgccagcugcgggagaacgccgaggacauggggaacggcugcuucaagaucuaccacaagugcgacaacgccugcaucggcagcauccgcaacgggaccuacgaccacgacguguaccgggacgaggcccucaacaaccgcuuccagaucaagggcgucgagcugaaguccggguacaaggacuggauccuguggaucagcuucgcgaucuccugcuuccuccugugcguggugcugcucggcuucaucaugugggccugccagaagggcaacauccgcugcaacaucugcaucuga

SEQ ID NO: 73122 - RNA, 1701 nt, Artificial Sequence
  derived and/or modified CDS sequence (opt1) from hemagglutinin__InfluenzaA__AFM71989
augaagaccaucaucgcccugagcuacauccucugccugguguucgcccagaagcugcccggcaacgacaacuccaccgcgacgcucugccuggggcaccacgccgucccgaacggcaccaucgugaagaccaucaccaacgaccagaucgaggugacgaacgccaccgagcugguccagagcuccagcaccggggagaucugcaacagcccccaccagauccucgacggcgagaacugcacccugaucgacgcccugcucggggacccccagugcgacggcuuccagaacaagaagugggaccuguucguggagcgcagcaaggcccacuccaacugcuaccccuacgacgugccggacuacgcgagccugcggucccucgucgccagcuccggcacgcuggaguucaacaacgagagcuucaacuggaccggggugacccagaacggcaccuccagcgccugcauccgccgguccaacaacagcuucuucucccgccugaacuggcucacgcaccugaacuucaaguaccccgcccugaacgugaccaugcccaacaacgagcaguucgacaagcucuacaucuggggcguccaccaccccagcaccgacaaggaccagaucuuccuguacacccaggcggccgggcggaucacgguguccaccaagcgcagccagcaggccgugaucccgaacaucgggagccggccccgcguccggaacauccccucccgcgugagcaucuacuggaccaucgugaagcccggcgacauccugcucaucaacuccaccggcaaccugaucgccccgcggggguacuucaagauccgcagcggcaaguccagcaucaugcgguccgacgcccccaucgggaagugcaacagcgcgugcaucacgcccaacggcuccauccccaacgacaagccguuccagaacgucaaccgcaucaccuacggcgccugcccccgguacgugaagcagaacacccugaagcucgccaccgggaugcgcaacgugcccgagaagcagacgcggggcaucuucggggccaucgccggcuucaucgagaacgggugggagggcauggucgacggcugguacggguuccgccaccagaacagcgagggccgggggcaggcggccgaccugaaguccacccaggccgccaucgaccagaucaacggcaagcugaaccgccucaucgggaagaccaacgagaaguuccaccagaucgagaaggaguucagcgagguggagggccggauccaggaccuggagaaguacguggaggacaccaagaucgaccugugguccuacaacgccgagcuccuggucgcgcuggagaaccagcacacgaucgaccucaccgacagcgagaugaacaagcuguucgagaagaccaagaagcagcugcgcgagaacgccgaggacaugggcaacgggugcuucaagaucuaccacaagugcgacaacgccugcaucggcuccauccgcaacgggaccuacgaccacgacguguaccgggacgaggcccucaacaaccgcuuccagaucaagggcguggagcugaaguccggguacaaggacuggauccuguggaucuccuucgccaucagcugcuuccuccugugcgucgcgcugcucggcuucaucaugugggccugccagaagggcaacauccggugcaacaucugcaucuga

SEQ ID NO: 73123 - RNA, 1701 nt, Artificial Sequence
  derived and/or modified CDS sequence (opt1) from hemagglutinin__InfluenzaA__AFM72010
augaagaccaucaucgcccugagcuacaucuucugccaggugcucgcccagaaccugcccggcaacgacaacuccaccgcgacgcugugccucgggcaccacgccgucccgaacggcacccuggugaagaccaucaccaacgaccagaucgaggugacgaacgccaccgagcugguccagagcuccagcaccgggcgcaucugcgacagcccccaccggauccucgacggcaagaacugcacccugaucgacgcccugcucggggacccccacugcgacggcuuccagaacgagaagugggaccuguucguggagcgcuccaaggccuucuccaacugcuaccccuacgacgugccggacuacgcgagccugcggucccucgucgccagcuccggcacgcuggaguucaucaacgagggguucaacuggaccggcgugacccagaacgggggcagcuacgccugcaagcgcgggcccgacaaguccuucuucagccggcugaacuggcucuacgaguccgagagcaccuaccccgugcugaacgucacgaugcccaacaacgacaacuucgacaagcuguacaucuggggcgugcaccacccguccaccgacaaggagcagaccaagcucuacgugcaggccagcggccgcgucaccguguccacgaagcggagccagcagaccaucauccccaacguggggagccgccccuggguccggggccuguccagccgcaucuccaucuacuggaccaucgugaagcccggggacauccugcucaucaacagcaacggcaaccugaucgcgccgcggggcuacuucaagauccgcaccgggaaguccagcaucaugcgguccgacgcccccaucggcacgugcagcuccgagugcaucacccccaacgggagcauccccaacgacaagccguuccagaacgugaacaagaucaccuacggcgccugccccaaguacgucaagcagaacacccugaagcucgccacggggaugcgcaacgugcccgagaagcagacccggggcaucuucggcgccaucgcgggguucaucgagaacggcugggaggggaugaucgacggcugguacggguuccgccaccagaacuccgagggcaccggccaggccgccgaccucaagagcacccaggccgccaucgaccagaucaacgggaagcugaaccgggugaucgagaagacgaacgagaaguuccaccagaucgagaaggaguucuccgaggucgagggccgcauccaggaccucgagaaguacguggaggacaccaagaucgaccuguggagcuacaacgcggagcugcucguggcccuggagaaccagcacaccaucgaccugaccgacuccgagaugaacaagcuguucgagaagacgcggcgccagcugcgggagaacgccgaggacauggggaacggcugcuucaagaucuaccacaagugcgacaacgccugcaucgggagcauccgcaacggcaccuacgaccacgacgucuaccgcgacgaggcccugaacaaccgguuccagaucaagggcguggagcucaaguccggguacaaggacuggauccuguggaucagcuucgcgaucuccugcuuccugcucugcgucgugcugcugggcuucaucaugugggccugccagaaggggaacauccgcugcaacaucugcaucuga

SEQ ID NO: 73124 - RNA, 1701 nt, Artificial Sequence; identical to SEQ ID NO: 64939
  derived and/or modified CDS sequence (opt1) from hemagglutinin__InfluenzaA__AFM72021

SEQ ID NO: 73125 - RNA, 1701 nt, Artificial Sequence
  derived and/or modified CDS sequence (opt1) from hemagglutinin__InfluenzaA__AFM72032
augaagaccaucaucgcccugagcuacauguucugccucguguucgcccagaaccugcccggcaacgacaacuccaccgcgacgcugugccucgggcaccacgccgucccgaacggcacccuggugaagaccaucaccaacgaccagaucgaggugacgaacgccaccgagcugguccagagcuccagcaccgggcgcaucugcgacagcccccaccggauccucgacggcaagaacugcacccugaucgacgcccugcucggggacccccacugcgacggcuuccagaacgagaagugggaccuguucguggagcgcuccaaggccuucuccaacugcuaccccuacgacgugccggacuacgcgagccugcggucccucgucgccagcuccggcacgcuggaguucaucaacgagggguucaacuggaccggcgugacccagagcgggggcuccuacacgugcaagcgcgggagcaacaacuccuucuucagccggcugaacuggcucuacgaguccgagagcaaguaccccgugcugaacgucaccaugcccaacaacggcaaguucgacaagcuguacaucuggggcauccaccaccccuccaccgacaaggagcagaccaaccucuacauccgcgccagcgggcgggugaccgugagcacgaagcgcucccagcagaccgucaucccgaacaucggcagccggcccugggugcgcgggcuguccagccggaucuccaucuacuggaccaucgugaagcccggcgacauccugcucaucaacagcaccggcaaccugaucgcgccccgcggguacuucaagauccggacgggcaaguccagcaucaugcgcuccgacgccccgaucgggaccugcagcuccgagugcaucacccccaacggcagcauccccaacgacaagcccuuccagaacgucaacaagaucaccuacggggccugcccgcgguacgugaagcagaacacgcugaagcucgccaccggcaugcgcaacgugcccgagaagcagacccggggcaucuucggggccaucgccggcuucaucgagaacgggugggagggcauggucgacgggugguacggcuuccgccaccagaacuccgagggcaccgggcaggcggccgaccucaagagcacgcaggccgccaucgaccagaucaacggcaagcugaaccgggugaucgagaagaccaacgagaaguuccaccagaucgagaaggaguucuccgagguggaggggcgcauccaggaccucgagaaguacgucgaggacaccaagaucgaccuguggagcuacaacgccgagcugcucguggcgcuggagaaccagcacaccaucgaccugacggacuccgagaugaacaagcuguucgagaagacccggaagcagcugcgcgagaacgccgaggacaugggcaacgggugcuucaagaucuaccacaagugcgacaacgccugcaucggcagcauccgcaacggcaccuacgaccacgacguguaccgggacgaggcccugaacaaccgcuuccagaucaagggggucgagcucaaguccggcuacaaggacuggauccuguggaucagcuucgccaucagcugcuuccugcucugcgugguccugcugggguucaucaugugggcgugccagaagggcaacauccggugcaacaucugcaucuga

SEQ ID NO: 73126 - RNA, 1701 nt, Artificial Sequence
  derived and/or modified CDS sequence (opt1) from hemagglutinin__InfluenzaA__AFM72043
augaagaccaucaucgcccugagcuacauguucugccucguguucgcccagaaccugcccggcaacgacaacuccaccgcgacgcugugccucgggcaccacgccgucccgaacggcacccuggugaagaccaucaccaacgaccagaucgaggugacgaacgccaccgagcugguccagagcuccagcaccgggcgcaucugcgacagcccccaccggauccucgacggcaagaacugcacccugaucgacgcccugcucggggacccccacugcgacggcuuccagaacgagaagugggaccuguucguggagcgcuccaaggccuucuccaacugcuaccccuacgacgugccggacuacgcgagccugcggucccucgucgccagcuccggcacgcuggaguucaucaacgagggguucaacuggaccggcgugacccagagcgggggcuccagcacgugcaagcgcggguccaacaacagcuucuucucccggcugaacuggcucuacgagagcgaguccaaguaccccgugcugaacgucaccaugcccaacaacggcaaguucgacaagcuguacaucuggggcauccaccaccccagcaccgacaaggagcagaccaaccucuacauccgcgccagcgggcgggugaccguguccacgaagcgcagccagcagaccgucaucccgaacaucggcucccggcccugggugcgcgggcugagcucccggaucagcaucuacuggaccaucgugaagcccggcgacauccugcucaucaacuccaccggcaaccugaucgcgccccgcggguacuucaagauccggacgggcaagagcuccaucaugcgcagcgacgccccgaucgggaccugcuccagcgagugcaucacccccaacggcuccauccccaacgacaagcccuuccagaacgucaacaagaucaccuacggggccugcccgcgguacgugaagcagaacacgcugaagcucgccaccggcaugcgcaacgugcccgagaagcagacccggggcaucuucggggccaucgccggcuucaucgagaacgggugggagggcauggucgacgggugguacggcuuccgccaccagaacagcgagggcaccgggcaggcggccgaccugaaguccacgcaggccgccaucgaccagaucaacggcaagcugaaccgggugaucgagaagaccaacgagaaguuccaccagaucgagaaggaguucagcgagguggaggggcgcauccaggaccucgagaaguacgucgaggacaccaagaucgaccugugguccuacaacgccgagcugcucguggcgcuggagaaccagcacaccaucgaccugacggacagcgagaugaacaagcuguucgagaagacccggaagcagcuccgcgagaacgccgaggacaugggcaacgggugcuucaagaucuaccacaagugcgacaacgccugcaucggcuccauccgcaacggcaccuacgaccacgacguguaccgggacgaggcccugaacaaccgcuuccagaucaagggggucgagcucaagagcggcuacaaggacuggauccuguggaucagcuucgccaucuccugcuuccugcucugcgugguccugcugggguucaucaugugggcgugccagaagggcaacauccggugcaacaucugcaucuga

SEQ ID NO: 73127 - RNA, 1701 nt, Artificial Sequence
  derived and/or modified CDS sequence (opt1) from hemagglutinin__InfluenzaA__AFM72054
augaaggccaagcugcucgugcugcugugcgcccucagcgcgaccgacgccgacaccaucugcaucggcuaccacgccaacaacuccacggacaccgucgacaccgugcuggagaagaacgugaccgucacgcacagcgugaaccugcucgaggacaaccacaacgggaagcugugcaagcugaagggcaucgcgccccuccagcuggggaagugcuccaucgccggcuggauccuggggaacccggagugcgagagccucuucuccaagaaguccuggagcuacaucgccgagacccccaacagcgagaacgggaccugcuaccccggcuacuucgccgacuacgaggagcugcgcgagcagcuguccagcguguccagcuucgagcgguucgagaucuuccccaaggaguccagcuggccgaagcacaacgucaccaagggggugacggccgccugcucccacaagggcaagagcuccuucuaccgcaaccuccuguggcugaccgagaagaacgggagcuaccccaaccucuccaagagcuacgugaacaacaaggagaaggagguccuggugcuguggggcgugcaccaccccagcaacaucgaggaccagaagaccaucuaccggaaggagaacgcguacgucuccguggugagcucccacuacaaccgccgguucacccccgagaucgccaagcgcccgaagguccggaaccaggaggggcgcaucaacuacuacuggacgcuccuggagcccggcgacaccaucaucuucgaggccaacggcaaccugaucgcccccugguacgccuucgcgcucagccggggguucggcuccgggaucaucaccagcaacgccuccauggacgagugcgacgccaagugccagacgccccagggcgccaucaacagcucccugccguuccagaacgugcaccccgugaccaucggcgagugccccaaguacguccgcagcaccaagcugcggauggugaccgggcuccgcaacauccccuccauccagagccggggccuguucggggccaucgcgggcuucaucgagggcggcuggaccggcaugaucgacgggugguacggcuaccaccaccagaacgagcagggguccggcuacgccgccgaccagaaguccacgcagaacgccaucaacgggaucaccaacaaggugaacagcaucaucgagaagaugaacacccaguucaccgccgucggcaaggaguucaacaagcuggagaagcgcauggagaaccucaacaagaagguggacgacggcuuccuggacaucuggacguacaacgcggagcugcucgugcugcuggagaacgagcggacccucgacuuccacgacagcaacgucaagaaccuguacgagaaggugaagucccagcugaagaacaacgccaaggagaucgggaacggcugcuucgaguucuaccacaagugcaacaacgagugcauggagagcgucaagaacgggaccuacgacuacccgaaguacuccgaggagagcaagcucaaccgcgagaagaucgacggcgugaagcuggagagcauggggguguaccagauccuggccaucuacuccaccgucgccagcucccucgugcugcuggugagccucggcgccaucuccuucuggaugugcagcaacggcucccugcagugccggaucugcaucuga

SEQ ID NO: 73128 - RNA, 1701 nt, Artificial Sequence; identical to SEQ ID NO: 73127
  derived and/or modified CDS sequence (opt1) from hemagglutinin__InfluenzaA__AFM72065

SEQ ID NO: 73129 - RNA, 1701 nt, Artificial Sequence
  derived and/or modified CDS sequence (opt1) from hemagglutinin__InfluenzaA__AFM72087
augaagaccaucaucgcccugagcuacaucuucugccucguguucgcccagaagcugcccggcaacgacaacuccaccgcgacgcugugccucgggcaccacgccgucccgaacggcacccuggugaagaccaucaccaacgaccagaucgaggugacgaacgccaccgagcugguccagagcuccagcaccgggcgcaucugcgacagcccccaccggauccucgacggcaagaacugcacccugaucgacgcccugcucggggacccccacugcgacggcuuccagaacgagaagugggaccuguucaucgagcgcagcaaggccuucuccaacugcuaccccuacgacgugccggacuacgcgagccugcggucccucguggccagcuccggcacgcuggaguucaucaacgagggguucaacuggaccggcgucacccagagcgggggcuccuacacgugcaagcgcgggagcgugaacuccuucuucagccggcugaacuggcucuacgaguccgaguacaaguaccccgcccugaacgugaccaugcccaacaacggcaaguucgacaagcuguacaucuggggcguccaccaccccagcaccgagaaggagcagaccaaccucuacgugcgcgccuccgggcgggugaccgucagcacgaagcgcagccagcagaccgugaucccgaacaucggcuccagccccugggugcgggggcuguccagccgcaucuccaucuacuggaccaucgucaagcccggcgacauccugcucaucaacagcaccggcaaccugaucgcgccccggggguacuucaagauccgcacgggcaaguccagcaucaugcgguccgacgccccgaucgggaccugcagcuccgagugcaucacccccaacggcagcauccccaacgacaagcccuuccagaacgugaacaagaucaccuacggggccugcccgcgcuacgugaagcagaacacgcugaagcucgccaccggcaugcggaacguccccgagaagcagacccgcggcaucuucggggccaucgcgggcuucaucgagaacgggugggagggcaugguggacgggugguacggcuuccggcaccagaacuccgagggcaccgggcaggccgccgaccugaaguccacgcaggccgccaucgaccagaucaacggcaagcugaaccgccucaucgagaagaccaacgagaaguuccaccagaucgagaaggaguucuccgagguggaggggcggauccaggaccuggagaaguacgucgaggacaccaagaucgaccuguggagcuacaacgcggagcuccugguggcccuggagaaccaguacaccaucgaccucacggacuccgagaugaacaagcuguucgagaagacccgcaagcagcugcgggagaacgccgaggacaugggcaacgggugcuucaagaucuaccacaagugcgacaacgccugcaucggcagcauccgcaacggcaccuacgaccacgacguguaccgcgacgaggcccucaacaaccgguuccagaucaagggggucgagcugaaguccggcuacaaggacuggauccuguggaucagcuucgcgaucagcugcuuccuccugugcgugguccugcucggguucaucaugugggccugccagaagggcaacauccgcugcaacaucugcaucuga

SEQ ID NO: 73130 - RNA, 1701 nt, Artificial Sequence
  derived and/or modified CDS sequence (opt1) from hemagglutinin__InfluenzaA__AFM72098
augaagaccaucaucgcccugagcuacaucuucugccucguguucgcccagaagcugcccggcaacgacaacuccaccgcgacgcugugccucgggcaccacgccgucccgaacggcacccuggugaagaccaucaccaacgaccagaucgaggugacgaacgccaccgagcugguccagagcuccagcaccgggcgcaucugcgacagcccccaccggauccucgacggcaagaacugcacccugaucgacgcccugcucggggacccccacugcgacggcuuccagaacgagaagugggaccuguucguggagcgcagcaaggccuacuccaacugcuaccccuacgacgugccggacuacgcgagccugcggucccucgucgccagcuccggcacgcuggaguucaucaacgaggacuucaacuggaccggggugacccagagcggcggguccuacgccugcaagcgcggcagcgugaacuccuucuucagccggcugaacuggcucuacaaguccgaguacaaguaccccgcccugaacgucaccaugcccaacaacgggaaguucgacaagcuguacaucuggggcgugcaccaccccgugacggaccgcgagcagaccaaccucuacguccgggcgagcggccgcgugaccguguccaccaagcggagccagcagacggucaucccgaacaucgggagccgccccugggugcggggccuguccagccgcaucuccaucuacuggaccaucgugaagcccggggacauccugcucaucaacagcaccggcaaccugaucgcgccccggggcuacuucaagauccgcaccgggaaguccagcaucaugcgguccgacgccccgaucggcacgugcagcuccgagugcaucacccccaacgggagcauccccaacgacaagcccuuccagaacgucaacaagaucaccuacggcgccugcccgcgcuacgugaagcagaacacccugaagcucgccacggggaugcggaacgugcccgagaagcagacccgcggcaucuucggcgccaucgccggguucaucgagaacggcugggaggggauggucgacggcugguacggguuccggcaccagaacuccgagggcaccggccaggccgccgaccugaaguccacccaggccgcgaucgaccagaucaacgggaagcugaaccgccucaucgagaagacgaacgagaaguuccaccagaucgagaaggaguucuccgagguggagggccggauccaggaccuggagaaguacguggaggacaccaagaucgaccuguggagcuacaacgccgagcuccuggucgcccuggagaaccagcacaccaucgaccucaccgacuccgagaugaacaagcuguucgagaagacgcgcaagcagcugcgcgagaacgccgaggacauggggaacggcugcuucaagaucuaccacaagugcgacaacgccugcaucgggagcauccggaacggcaccuacgaccacgacguguaccgcgacgaggcgcucaacaaccgguuccagaucaagggcgucgagcugaaguccggguacaaggacuggauccuguggaucagcuucgccaucuccugcuuccuccugugcguggugcugcucggcuucaucaugugggccugccagaaggggaacauccgcugcaacaucugcaucuga

SEQ ID NO: 73131 - RNA, 1701 nt, Artificial Sequence
  derived and/or modified CDS sequence (opt1) from hemagglutinin__InfluenzaA__AFM72109
augaagaccaucaucgcccugagcuacaucuucugccucguguucgcccagaagcugcccggcaacgacaacuccaccgcgacgcugugccucgggcaccacgccgucccgaacggcacccuggugaagaccaucaccaacgaccagaucgaggugacgaacgccaccgagcugguccagagcuccagcaccgggcgcaucugcgacagcccccaccggauccucgacggcaagaacugcacccugaucgacgcccugcucggggacccccacugcgacggcuuccagaacgagaagugggaccuguucguggagcgcagcaaggccuacuccaacugcuaccccuacgacgugccggacuacgcgagccugcggucccucgucgccagcuccggcacgcuggaguucaucaacgaggacuucaacuggaccggggugacccagagcggcggguccuacgccugcaagcgcggcagcgugaacuccuucuucagccggcugaacuggcuccacaaguccgaguacaaguaccccgcccugaacgucaccaugcccaacaacgggaaguucgacaagcuguacaucuggggcgugcaccaccccaucacggaccgcgagcagaccaaccucuacgugcgggcgagcggccgcgucaccguguccaccaagcggagccagcagacggugaucccgaacaucgggagccgccccuggguccggggccuguccagccgcaucuccaucuacuggaccaucgugaagcccggggacauccugcucaucaacagcaccggcaaccugaucgcgccccggggcuacuucaagauccgcaccgggaaguccagcaucaugcgguccgacgccccgaucggcacgugcagcuccgagugcaucacccccaacgggagcauccccaacgacaagcccuuccagaacgugaacaagaucaccuacggcgccugcccgcgcuacgucaagcagaacacccugaagcucgccacggggaugcggaacgugcccgagaagcagacccgcggcaucuucggcgccaucgccggguucaucgagaacggcugggaggggaugguggacggcugguacggguuccggcaccagaacuccgagggcaccggccaggccgccgaccugaaguccacccaggccgcgaucgaccagaucaacgggaagcugaaccgccucaucgagaagacgaacgagaaguuccaccagaucgagaaggaguucuccgaggucgagggccggauccaggaccuggagaaguacguggaggacaccaagaucgaccuguggagcuacaacgccgagcuccugguggcccuggagaaccagcacaccaucgaccucaccgacuccgagaugaacaagcuguucgagaagacgcgccgccagcugcgggagaacgccgaggacauggggaacggcugcuucaagaucuaccacaagugcgacaacgccugcaucgggagcauccgcaacggcaccuacgaccacgacgucuaccgggacgaggcgcucaacaaccgcuuccagaucaagggcguggagcugaaguccggguacaaggacuggauccuguggaucagcuucgccaucuccugcuuccuccugugcgucgugcugcucggcuucaucaugugggccugccagaaggggaacauccggugcaacaucugcaucuga

SEQ ID NO: 73132 - RNA, 1701 nt, Artificial Sequence
  derived and/or modified CDS sequence (opt1) from hemagglutinin__InfluenzaA__AFM72120
augaagaccaucaucgcccugagcuacaucuucugccucguguucgcccagaagcugcccggcaacgacaacuccaccgcgacgcugugccucgggcaccacgccgucccgaacggcacccuggugaagaccaucaccaacgaccagaucgaggugacgaacgccaccgagcugguccagagcuccagcaccgggcgcaucugcgacagcccccaccggauccucgacggcaagaacugcacccugaucgacgcccugcucggggacccccacugcgacggcuuccagaacgagaagugggaccuguucguggagcgcagcaaggccuacuccaacugcuaccccuacgacgugccggacuacgcgagccugcggucccucgucgccagcuccggcacgcuggaguucaucaacgaggacuucaacuggaccggggugacccagagcggcggguccuacgccugcaagcgcggcagcgugaacuccuucuucagccggcugaacuggcuccacgaguccgaguacaaguaccccgcccugaacgucaccaugcccaacaacgggaaguucgacaagcuguacaucuggggcgugcaccaccccaucacggaccgcgagcagaccaaccucuacgugcgggcgagcggccgcgucaccguguccaccaagcggagccagcagacggugaucccgaacaucggguuccgccccuggguccggggccugagcucccgcaucagcaucuacuggaccaucgugaagcccggggacauccugcucaucaacuccaccggcaaccugaucgcgccccggggcuacuucaagauccgcaacggcaagagcuccaucaugcggagcgacgccccgaucgggaccugcuccagcgagugcaucacgcccaacggguccauccccaacgacaagcccuuccagaacgugaacaagaucaccuacggcgccugcccgcgcuacgucaagcagaacacccugaagcucgccaccgggaugcggaacgugcccgagaagcagacgcgcggcaucuucggcgccaucgccggguucaucgagaacggcugggaggggaugguggacggcugguacggguuccggcaccagaacagcgagggcaccggccaggccgccgaccugaaguccacccaggccgcgaucgaccagaucaacgggaagcugaaccgccucaucgagaagaccaacgagaaguuccaccagaucgagaaggaguucagcgaggucgagggccggauccaggaccuggagaaguacguggaggacacgaagaucgaccugugguccuacaacgccgagcuccugguggcccuggagaaccagcacaccaucgaccucaccgacagcgagaugaacaagcuguucgagaagacccgcaagcagcugcgcgagaacgccgaggacauggggaacggcugcuucaagaucuaccacaagugcgacaacgccugcaucggguccauccggaacggcacguacgaccacgacgucuaccgcgacgaggcgcucaacaaccgguuccagaucaagggcguggagcugaaguccggguacaaggacuggauccuguggaucuccuucgccaucagcugcuuccuccugugcgucgugcugcucggcuucaucaugugggccugccagaaggggaacauccgcugcaacaucugcaucuga

SEQ ID NO: 73133 - RNA, 1701 nt, Artificial Sequence
  derived and/or modified CDS sequence (opt1) from hemagglutinin__InfluenzaA__AFM72131
augaagaccaucaucgcccugagcuacauccucugccugguguucgcccagaagcugcccggcaacgacaacuccaccgcgacgcucugccuggggcaccacgccgucccgaacggcacccuggugaagaccaucaccaacgaccagaucgaggugacgaacgccaccgagcucguccagagcuccagcaccgggcgcaucugcgacagcccccaccggauccuggacggcaaggacugcacccugaucgacgcccuccugggggacccccacugcgacggcuuccagaacaaggagugggaccuguucguggagcgcagcaaggccuacuccaacugcuaccccuacgacgugccggacuacgcgagccuccggucccuggucgccagcuccggcacgcuggaguucaucaacgaggacuucaacuggaacgggguggcccagagcggcgaguccuacgccugcaagcgcgggagcgugaaguccuucuucagccggcucaacuggcugcacgaguccgaguacaaguaccccgcgcugaacgucaccaugcccaacaacggcaaguucgacaagcucuacaucuggggcgugcaccaccccagcaccgaccgcgagcagaccaagcuguacgugcgggccuccgggcgcgucacggugagcaccaagcggagccagcagaccgugaucccgaacaucggcucccgccccuggguccgggggcugagcucccgcaucagcaucuacuggaccaucgugaagcccggcgacauccuccugaucaacuccacggggaaccugaucgcgccccggggcuacuucaagauccgcaccggcaagagcuccaucaugcggagcgacgccccgaucgggaccugcuccagcgagugcaucacccccaacggcuccauccccaacgacaagcccuuccagaacgugaaccgcaucacguacggggccugcccgcgguacgucaagcagaacacccucaagcuggccaccggcaugcgcaacgugcccgagaagcagacccgggggaucuucggcgccaucgccggcuucaucgagaacgggugggagggcaugguggacgggugguacggcuuccgccaccagaacagcgaggggacgggccaggccgccgaccugaaguccacccaggcggccaucgaccagaucaacggcaagcucaaccggcugaucgagaagaccaacgagaaguuccaccagaucgagaaggaguucagcgaggucgaggggcgcauccaggaccuggagaaguacguggaggacaccaagaucgaccucugguccuacaacgccgagcugcugguggcccucgagaaccagcacacgaucgaccugaccgacagcgagaugaacaagcuguucgagaagacccgcaagcagcuccgggagaacgccgaggacaugggcaacgggugcuucaagaucuaccacaagugcgacaacgcgugcaucggcuccauccgcaacgggaccuacgaccacgacgucuaccgggacgaggcccugaacaaccgcuuccagaucaagggcguggagcugaaguccggcuacaaggacuggauccucuggaucuccuucgccaucagcugcuuccugcugugcgucgugcuccugggguucaucaugugggccugccagaagggcaacauccggugcaacaucugcaucuga

SEQ ID NO: 73134 - RNA, 1701 nt, Artificial Sequence
  derived and/or modified CDS sequence (opt1) from hemagglutinin__InfluenzaA__AFM72142
augaagaccaucaucgcccugagcuacaucuccugccucguguucgcccagaagcugcccggcaacgacaacagcaccgcgacgcugugccucgggcaccacgccgucccgaacggcacccuggugaagaccaucaccaacgaccagaucgaggugacgaacgccaccgagcugguccaguccagcuccaccgggcgcaucugcgacagcccccaccggauccucgacggcaagaacugcacccugaucgacgcccugcucggggacccccacugcgacggcuuccagaacaaggagugggaccuguucguggagcgcuccaaggccuacagcaacugcuaccccuacgacgugccggacuacgcgucccugcggagccucgucgccuccagcggcacgcuggaguucaucaacgaggacuucaacuggaccgggguggcccaggacggcggguccuacgccugcaagcgcggcagcgugaacuccuucuucagccggcugaacuggcuccacaagcuggaguacaaguaccccgcgcugaacgucaccaugcccaacaacgggaaguucgacaagcucuacaucuggggcgugcaccaccccuccaccgaccgcgaccagacgagccuguacgugcgggccuccggccgcgucaccgugagcaccaagcggagccagcagaccgugaucccgaacaucgggucccgccccuggguccggggccagagcucccgcaucagcaucuacuggacgaucgugaagcccggggacauccugcucaucaacuccaccggcaaccugaucgcgccccggggcuacuucaagauccgcaacggcaagagcuccaucaugcggagcgacgccccgaucgggaacugcuccagcgagugcaucacccccaacggguccauccccaacgacaagcccuuccagaacgugaaccgcaucaccuacggcgccugcccgcgguacgucaagcagaacacgcugaagcucgccaccgggaugcgcaacgugcccgagaagcagacccggggcaucuucggcgccaucgccggguucaucgagaacggcugggaggggaugguggacggcugguacggguuccgccaccagaacagcgagggcaccggccaggccgccgaccugaaguccacgcaggcggccaucgaccagaucaacgggaagcugaaccggcucaucgagaagaccaacgagaaguuccaccagaucgagaaggaguucagcgaggucgagggccgcauccaggaccuggagaaguacguggaggacaccaagaucgaccugugguccuacaacgccgagcuccugguggcccuggagaaccagcacaccaucgaccucacggacagcgagaugaacaagcuguucgagcgcacccggaagcagcugcgcgagaacgccgaggacauggggaacggcugcuucaagaucuaccacaagugcgacaacgcgugcaucggguccauccggaacggcaccuacgaccacgacgucuaccgcgacgaggcccucaacaaccgguuccagaucaagggcguggagcucaagagcggguacaaggacuggauccuguggaucuccuucgccaucagcugcuuccugcugugcgucgugcugcucggcuucaucaugugggccugccagaaggggaacauccgcugcaacaucugcaucuga

SEQ ID NO: 73135 - RNA, 1701 nt, Artificial Sequence
  derived and/or modified CDS sequence (opt1) from hemagglutinin__InfluenzaA__AFM72153
augaagaccaucaucgcccugagcuacauccucugccugguguucgcccagaagcugcccggcaacgacaacuccaccgcgacgcucugccuggggcaccacgccgucccgaacggcacccuggugaagaccaucaccaacgaccagaucgaggugacgaacgccaccgagcucguccagagcuccagcaccgggcgcaucugcggcagcccccaccggauccuggacgggaagaacugcacccugaucgacgcccuccugggcgacccccacugcgacggcuuccagaacaaggagugggaccuguucguggagcgcagcaaggccuacuccaacugcuaccccuacgacgugccggacuacgcgagccuccggucccuggucgccagcuccgggacgcuggaguucaucaacgaggacuucaacuggaccggcguggcccaggacgggggcagcuacgccugcaagcgcggguccgugaacagcuucuucucccggcucaacuggcugcacaagcuggaguacaaguaccccgcgcucaacgucaccaugcccaacaacggcaaguucgacaagcuguacaucuggggcgugcaccaccccagcaccgacuccgaccagacgagccuguacgugcgcgccuccgggcgggucaccgugagcaccaagcgcagccagcagaccgugacgccgaacaucggcucccggcccuggguccgcgggcagagcucccggaucggcaucuacuggaccaucgugaagcccggcgacauccuccugaucaacagcaccgggaaccugaucgcgccccgcggcuacuucaagauccggaacgggaaguccagcaucaugcgcuccgacgccccgaucggcaacugcagcuccgagugcaucacccccaacgggagcauccccaacgacaagcccuuccagaacgugaaccggaucacguacggcgccugcccgcgcuacgucaagcagaacacccucaagcuggccaccggcaugcggaacgugcccgagaagcagacccgcgggaucuucggcgccaucgccggguucaucgagaacggcugggaggggaugguggacggcugguacggcuuccggcaccagaacuccgaggggacgggccaggccgccgaccugaaguccacccaggcggccaucgaccagaucaacgggaagcucaaccgccugaucgagaagaccaacgagaaguuccaccagaucgagaaggaguucuccgaggucgagggccggauccaggaccuggagaaguacguggaggacaccaagaucgaccucuggagcuacaacgccgagcugcugguggcccucgagaaccagcacacgaucgaccugaccgacuccgagaugaacaagcuguucgagaagacccgcaagcagcuccgcgagaacgccgaggacauggggaacggcugcuucaagaucuaccacaagugcgacaacgcgugcaucggcagcauccggaacgggaccuacgaccacgacgucuaccgcgacgaggcccugaacaaccgguuccagaucaagggcguggagcugaaguccggguacaaggacuggauccucuggaucagcuucgccaucuccugcuuccugcugugcgucgugcuccugggcuucaucaugugggccugccagaagggcaacauccgcugcaacaucugcaucuga

SEQ ID NO: 73136 - RNA, 1701 nt, Artificial Sequence
  derived and/or modified CDS sequence (opt1) from hemagglutinin__InfluenzaA__AFM72164
augaagaccaucaucgcccugagcuacauccucugccugguguucgcccagaagcugcccggcaacgacaacuccaccgcgacgcucugccuggggcaccacgccgucccgaacggcacccuggugaagaccaucaccaacgaccagaucgaggugacgaacgccaccgagcucguccagagcucccccaccgggcgcaucugcgacagcccccaccggauccuggacggcaagaacugcacccugaucgacgcccuccugggggacccccacugcgacggcuuccagaacaaggagugggaccuguucguggagcgcuccaaggccuacagcaacugcuacccguacgacgugcccgacuacgcgucccuccggagccuggucgccuccagcggcacgcuggaguucaucaacgagaacuucaacuggaccgggguggcccaggacggcaaguccuacgccugcaagcgcgggagcgugaacuccuucuucagccggcucaacuggcugcacaagcuggaguacaaguaccccgcgcucaacgucaccaugcccaacaacggcaaguucgacaagcuguacaucuggggcgugcaccacccguccaccgacagcgaccagacgucccuguacgugcgcgccagcgggcgggucaccguguccaccaagcgcagccagcagaccgugauccccgacaucggcuaccggcccuggguccgcgggcagagcucccggaucagcauccacuggacgaucgugaagcccggcgacauccuccugaucaacuccaccgggaaccugaucgccccgcgcggcuacuucaagauccggaacggcaagagcuccaucaugcgcagcgacgcccccaucgggaacugcuccagcgagugcaucacccccaacggcuccauccccaacgacaagccguuccagaacgugaaccggaucaccuacggggccugcccccgcuacgucaagcagaacacgcucaagcuggcgaccggcaugcggaacgugcccgagaagcagacccgcgggaucuucggcgccaucgccggcuucaucgagaacgggugggagggcaugguggacgggugguacggcuuccggcaccagaacagcgaggggaccggccaggccgccgaccugaaguccacgcaggcggccaucgaccagaucaacggcaagcucaaccgccuggucgagaagaccaacgagaaguuccaccagaucgagaaggaguucagcgagguggaggggcggauccaggaccuggagaaguacguggaggacaccaagaucgaccucugguccuacaacgccgagcugcuggucgcccucgagaaccagcacaccaucgaccugacggacagcgagaugaacaagcuguucgagcgcacccgcaagcagcuccgggagaacgccgaggacaugggcaacgggugcuucaagaucuaccacaagugcgacaacgcgugcaucggcuccauccgcaacgggaccuacgaccacgacguguaccgggacgaggcccugaacaaccgcuuccagaucaagggcgucgagcucaagagcggcuacaaggacuggauccuguggaucuccuucgccaucagcugcuuccugcugugcguggugcuccugggguucaucaugugggccugccagaagggcaacauccggugcaacaucugcaucuga

SEQ ID NO: 73137 - RNA, 1701 nt, Artificial Sequence
  derived and/or modified CDS sequence (opt1) from hemagglutinin__InfluenzaA__AFM72175
augaagaccaucaucgcccugagcuacauccucugccugguguucgcccagaagcugcccggcaacgacaacuccaccgcgacgcucugccuggggcaccacgccgucccgaacggcacccuggugaagaccaucaccaacgaccagaucgaggugacgaacgccaccgagcucguccagagcucccccaccgggcgcaucugcgacagcccccaccggauccuggacggcaagaacugcacccugaucgacgcccuccugggggacccccacugcgacggcuuccagaacaaggagugggaccuguucguggagcgcuccaaggccuacagcaacugcuacccguacgacgugcccgacuacgcgucccuccggagccuggucgccuccagcggcacgcuggaguucaucaacgagaacuucaacuggaccgggguggcccaggacggcaaguccuacgccugcaagcgcgggagcgugaacuccuucuucagccggcucaacuggcugcacaagcuggaguacaaguaccccgcgcucaacgucaccaugcccaacaacggcaaguucgacaagcuguacaucuggggcgugcaccacccguccaccgacagcgaccagacgaaccuguacgugcgcgccuccgggcgggucaccgugagcaccaagcgcucccagcagaccgugauccccgacaucggcuaccggcccuggguccgcgggcagagcagccggaucuccauccacuggacgaucgugaagcccggcgacauccuccugaucaacagcaccgggaaccugaucgccccgcgcggcuacuucaagauccggaacggcaaguccagcaucaugcgcuccgacgcccccaucgggaacugcagcuccgagugcaucacccccaacggcagcauccccaacgacaagccguuccagaacgugaaccggaucaccuacggggccugcccccgcuacgucaagcagaacacgcucaagcuggcgaccggcaugcggaacgugcccgagaagcagacccgcgggaucuucggcgccaucgccggcuucaucgagaacgggugggagggcaugguggacgggugguacggcuuccggcaccagaacuccgaggggaccggccaggccgccgaccucaagagcacgcaggcggccaucgaccagaucaacggcaagcugaaccgccuggucgagaagaccaacgagaaguuccaccagaucgagaaggaguucuccgagguggaggggcggauccaggaccuggagaaguacguggaggacaccaagaucgaccucuggagcuacaacgccgagcugcuggucgcccucgagaaccagcacaccaucgaccugacggacuccgagaugaacaagcuguucgagcgcacccgcaagcagcuccgggagaacgccgaggacaugggcaacgggugcuucaagaucuaccacaagugcgacaacgcgugcaucggcagcauccgcaacgggaccuacgaccacgacguguaccgggacgaggcccugaacaaccgcuuccagaucaagggcgucgagcugaaguccggcuacaaggacuggauccucuggaucagcuucgccaucuccugcuuccugcugugcguggugcuccugggguucaucaugugggccugccagaagggcaacauccggugcaacaucugcaucuga

SEQ ID NO: 73138 - RNA, 1701 nt, Artificial Sequence
  derived and/or modified CDS sequence (opt1) from hemagglutinin__InfluenzaA__AFM72197
augaagaccaucaucgcccugagcuacauccucugcaugguguucgcccagaagcugcccggcaacgacaacuccaccgcgacgcugugccucgggcaccacgccgucccgaacggcacccuggugaagaccaucaccaacgaccagaucgaggugacgaacgccaccgagcugguccagagcuccagcaccgggcgcaucugcgacagcccccaccggauccucgacggcaagaacugcacccugaucgacgcccugcucggggacccccacugcgacggcuuccagaacaaggagugggaccuguucguggagcgcagcaaggccuacuccaacugcuaccccuacgacgugccggacuacgcgagccugcggucccucgucgccagcuccggcacgcuggaguucaacaacgagagcuucaacuggaccgggguggcccagaacggcaccuccuacgccugcaagcgccggagcgugaaguccuucuucagccgccugaacuggcuccacaagcuggaguacaaguaccccgcgcugaacgucaccaugcccaacaacgacaaguucgacaagcucuacaucuggggcgugcaccaccccaucacggacuccgagcagaccagccuguacgugcaggccuccgggcgggucaccgugagcaccaagcgcagccagcagacggugaucccgaacaucggguaccggcccuggguccgcggcguguccagccggaucuccaucuacuggaccaucgugaagcccggcgacauccugcucaucaacagcaccgggaaccugaucgcgccccgcggcuacuucaagauccgguccgggaaguccuccaucaugcgcagcgacgccccgaucggcaacugcaacuccgagugcaucacccccaacggcagcauccccaacgacaagcccuuccagaacgucaaccggaucacguacggggccugcccgcgcuacgugaagcagaacacccugaagcucgccaccggcaugcggaacgugcccgagaagcagacccgcgggaucuucggcgccaucgccggguucaucgagaacggcugggagggcauggucgacgggugguacggcuuccggcaccagaacuccgaggggacgggccaggccgccgaccucaagagcacccaggcggccaucaaccagaucaacgggaagcugaaccgccugaucgagaagaccaacgagaaguuccaccagaucgagaaggaguucuccgagguggagggccggauccaggaccuggagaaguacguggaggacaccaagaucgaccuguggagcuacaacgccgagcuccuggucgcccuggagaaccagcacacgaucgaccucaccgacuccgagaugaacaagcuguucgagcgcacccgcaagcagcugcgggagaacgccgaggacaugggcaacgggugcuucaagaucuaccacaagugcgacaacgcgugcaucggcagcauccgcaacgggaccuacgaccacgacguguaccgggacgaggcccucaacaaccgcuuccagaucaagggcgucgagcugaaguccggguacaaggacuggauccuguggaucagcuucgccaucuccugcuuccuccugugcguggugcugcucggcuucaucaugugggccugccagaagggcaacaucaagugcaacaucugcaucuga

SEQ ID NO: 73139 - RNA, 1701 nt, Artificial Sequence
  derived and/or modified CDS sequence (opt1) from hemagglutinin__InfluenzaA__AFM72208
augaagaccaucaucgcccugagcuacauccucugccugguguucgcccagaagcugcccggcaacgacaacuccaccgcgacgcucugccuggggcaccacgccgucccgaacggcacccuggugaagaccaucaccaacgaccagaucgaggugacgaacgccaccgagcucguccagagcuccagcaccgggcgcaucugcgacagcccccaccagauccuggacggcgagaacugcacccugaucgacgcccuccugggggacccccacugcgacggcuuccagaacaaggagugggaccuguucguggagcggagcaaggccuacuccaacugcuaccccuacgacgugccggacuacgcgagccuccgcucccuggucgccagcuccggcacgcuggaguucaacaacgagagcuucaacuggaccgggguggcccagaacggcaccuccagcgccugcaagcggcgcuccaucaacagcuucuucucccggcucaacuggcugcaccagcugaaguaccgcuaccccgcgcucaacgugaccaugcccaacaacgacaaguucgacaagcuguacaucuggggcguccaccaccccagcacggacuccgaccagaccagccuguacacccaggccagcgggcgggugaccguguccacgaagcgcagccagcagaccgucaucccgaacaucgggucccggcccugggugcgcggcaucagcucccggaucagcaucuacuggaccaucgugaagcccggcgacauccuccugaucaacuccaccgggaaccugaucgcgccccgcggcuacuucaagauccggagcgggaaguccagcaucaugcgcuccgacgccccgaucggcaagugcaacagcgagugcaucacgcccaacggcuccauccccaacgacaagcccuuccagaacgucaaccggaucaccuacggggccugcccgcgcuacgugaagcagaacacccucaagcuggccaccggcaugcggaacgugcccgagaagcagacgcgcgggaucuucggcgccaucgccggguucaucgagaacggcugggagggcaugauggacgggugguacggcuuccggcaccagaacagcgaggggaccggccaggccgccgaccugaaguccacccaggcggccaucaaccagaucaacgggaagcucaaccgccugaucgagaagaccaacgagaaguuccaccagaucgagaaggaguucagcgaggucgagggccggauccaggaccuggagaaguacguggaggacacgaagaucgaccucugguccuacaacgccgagcugcugguggcccucgagaaccagcacaccaucgaccugaccgacagcgagaugaacaagcuguucgagcgcacccgcaagcagcuccgggagaacgccgaggacaugggcaacgggugcuucaagaucuaccacaagugcgacaacgcgugcaucggcuccauccgcaacgggacguacgaccacgacgucuaccgggacgaggcccugaacaaccgcuuccagaucaagggcguggagcugaaguccggguacaaggacuggauccucuggaucagcuucgccaucuccugcuuccugcugugcgugguccuccugggcuucaucaugugggccugccagaagggcaacauccggugcaacaucugcaucuga

SEQ ID NO: 73140 - RNA, 1701 nt, Artificial Sequence
  derived and/or modified CDS sequence (opt1) from hemagglutinin__InfluenzaA__AFM72219
augaagaccaucaucgcccugagcuacauccucugccugguguucgcccagaagcugcccggcaacgacaacuccaccgcgacgcucugccuggggcaccacgccgucccgaacggcacccuggugaagaccaucaccaacgaccagaucgaggugacgaacgccaccgagcucguccagagcuccagcaccgggcgcaucugcgacagcccccaccagauccuggacggcgagaacugcacccugaucgacgcccuccugggggacccccacugcgacggcuuccagaacaaggagugggaccuguucguggagcggagcaaggccuacuccaacugcuaccccuacgacgugccggacuacgcgagccuccgcucccuggucgccagcuccggcacgcuggaguucaacaacgagagcuucaacuggaccgggguggcccagaacggcaccuccagcgccugcaagcggcgcuccaucaacagcuucuucucccggcucaacuggcugcaccagcugaaguaccgcuaccccgcgcucaacgugaccaugcccaacaacgacaaguucgacaagcuguacaucuggggcguccaccaccccagcacggacuccgaccagaccagccuguacacccaggccagcgggcgggugaccguguccacgaagcgcagccagcagaccgucaucccgaacaucgggucccggcccugggugcgcggcaucagcucccggaucagcaucuacuggaccaucgugaagcccggcgacauccuccugaucaaguccaccgggaaccugaucgcgccccgcggcuacuucaagauccggagcgggaaguccagcaucaugcgcuccgacgccccgaucggcaagugcaacagcgagugcaucacgcccaacggcuccauccccaacgacaagcccuuccagaacgucaaccggaucaccuacggggccugcccgcgcuacgugaagcagaacacccucaagcuggccaccggcaugcggaacgugcccgagaagcagacgcgcgggaucuucggcgccaucgccggguucaucgagaacggcugggagggcaugauggacgggugguacggcuuccggcaccagaacagcgaggggaccggccaggccgccgaccugaaguccacccaggcggccaucaaccagaucaacgggaagcucaaccgccugaucgagaagaccaacgagaaguuccaccagaucgagaaggaguucagcgaggucgagggccggauccaggaccuggagaaguacguggaggacacgaagaucgaccucugguccuacaacgccgagcugcugguggcccucgagaaccagcacaccaucgaccugaccgacagcgagaugaacaagcuguucgagcgcacccgcaagcagcuccgggagaacgccgaggacaugggcaacgggugcuucaagaucuaccacaagugcgacaacgcgugcaucggcuccauccgcaacgggacguacgaccacgacgucuaccgggacgaggcccugaacaaccgcuuccagaucaagggcguggagcugaaguccggguacaaggacuggauccucuggaucagcuucgccaucuccugcuuccugcugugcgugguccuccugggcuucaucaugugggccugccagaagggcaacauccggugcaacaucugcaucuga

SEQ ID NO: 73141 - RNA, 1698 nt, Artificial Sequence
  derived and/or modified CDS sequence (opt1) from hemagglutinin__InfluenzaA__AFM72230
augaaggccaagcugcucgugcugcugugcaccuucaccgccacguacgcggacaccaucugcaucggcuaccacgccaacaacagcaccgacaccgucgacacggugcucgagaagaacgugaccgucacccacuccgugaaccugcuggaggacagccacaacgggaagcucugccugcugaagggcaucgcgccccuccagcuggggaacugcuccguggccggcuggauccuggggaacccggagugcgagcuccugaucagcaagaaguccuggagcuacaucgucgagacccccaaccccgagaacggcacgugcuaccccggcuacuucgccgacuacgaggagcugcgcgagcagcucuccagcguguccagcuucgagcgguucgagaucuucccgaaggaguccagcuggcccaaccacaccgugaccggggucuccgccagcugcucccacaacggcaagagcuccuucuaccgcaaccugcuguggcucaccgggaagaacggccuguaccccaaccugagcaaguccuacgugaacaacaaggagaaggaggugcucguccuguggggcgugcaccacccgcccaacaucgggaaccagcgggcccuguaccacacggagaacgccuacgugagcgucgugagcucccacuacagccgccgguucacccccgagaucgccaagcgccccaaggugcgggaccaggagggccgcaucaacuacuacuggacccuccuggagcccggggacaccaucaucuucgaggcgaacggcaaccugaucgccccgugguacgccuucgcccucucccggggguucggcagcggcaucaucacguccaacgcccccauggacgagugcgacgcgaagugccagacgccccagggggccaucaacagcucccugcccuuccagaacguccacccggugaccaucggcgagugccccaaguacgugcgcagcgccaagcugcggauggucaccgggcuccgcaacauccccuccauccagagccggggccuguucggggccaucgccggcuucaucgagggcggguggaccggcaugguggacgggugguacggcuaccaccaccagaacgagcagggguccggcuacgcggccgaccagaaguccacccagaacgccaucaacggcaucaccaacaaggugaacagcgucaucgagaagaugaacacccaguucacggccguggggaaggaguucaacaagcuggagcgccggauggagaaccucaacaagaaggucgacgacggcuuccuggacaucuggaccuacaacgccgagcugcucgugcugcuggagaacgagcgcacccucgacuuccacgacagcaacgugaagaaccuguacgagaaggucaagucccagcugaagaacaacgcgaaggagaucgggaacggcugcuucgaguucuaccacaagugcaacaacgagugcauggagagcgugaagaacgggaccuacgacuaccccaaguacuccgaggagagcaagcucaaccgggagaagaucgacggcgugaagcuggaguccaugggcgucuaccagauccuggccaucuacagcacgguggccagcucccucgugcugcuggucagccucggggccaucuccuucuggaugugcagcaacggcucccugcagugccgcaucugcaucuga

SEQ ID NO: 73142 - RNA, 1701 nt, Artificial Sequence
  derived and/or modified CDS sequence (opt1) from hemagglutinin__InfluenzaA__AFM72246
augaagaccaucaucgcccugagcuacauccucugccugguguucgcccagaagcugcccggcaacgacaacuccaccgcgacgcucugccuggggcaccacgccgucagcaacggcacccuggugaagaccaucaccaacgaccagaucgaggugacgaacgccaccgagcucguccaguccagcuccaccgggcgcaucugcgacagcccgcaccagauccuggacggcgagaacugcacccugaucgacgcccuccugggggacccccacugcgacggcuuccagaacaaggagugggaccuguucguggagcgguccaaggccuacagcaacugcuaccccuacgacgugcccgacuacgcgucccuccgcagccuggucgccuccagcggcacgcuggaguucaacaacgaguccuucaacuggaccgggguggcccagaacggcaccagcuccgccugcaagcggcgcagcaacaaguccuucuucagccggcucaacuggcugcaccagcugaaguacaaguacccggcgcucaacgugaccaugcccaacaacgagaaguucgacaagcuguacaucuggggcguccaccaccccuccacggacagcgaccagaucagcaucuacgcccaggccuccgggcgcgugaccgugagcaccaagcggucccagcagaccgucauccccaacaucgggagcuccccgugggugcgcggcgugagcucccggaucagcaucuacuggacgaucgucaagcccggcgacauccugcucaucaacuccaccgggaaccugaucgcgccccgcggcuacuucaagauccggagcgggaaguccagcaucaugcgcuccgacgcccccaucggcaagugcaacagcgagugcaucaccccgaacggcuccauccccaacgacaagcccuuccagaacgugaaccggaucaccuacggggccugcccccgcuacgugaagcagaacacgcugaagcucgccaccggcaugcggaacgucccggagaagcagacccgcgggaucuucggcgccaucgccggguucaucgagaacggcugggagggcaugguggacgggugguacggcuuccggcaccagaacagcgaggggaccggccaggccgcggaccugaaguccacgcaggccgccaucaaccagaucaacgggaagcugaaccgccucaucgagaagaccaacgagaaguuccaccagaucgagaaggaguucagcgagguggagggccggauccaggaccuggagaaguacgucgaggacaccaagaucgaccugugguccuacaacgccgagcuccugguggcccuggagaaccagcacaccaucgaccucacggacagcgagaugaacaagcuguucgagcgcaccaagaagcagcugcgggagaacgcggaggacaugggcaacgggugcuucaagaucuaccacaagugcgacaacgccugcaucggcagcauccgcaacgggaccuacgaccacgacguguaccgcgacgaggcccucaacaaccgguuccagaucaagggcgucgagcugaaguccggguacaaggacuggauccuguggaucagcuucgccaucuccugcuuccuccugugcgugguccugcucggcuucaucaugugggccugccagaagggcaacauccgcugcaacaucugcaucuga

SEQ ID NO: 73143 - RNA, 1701 nt, Artificial Sequence
  derived and/or modified CDS sequence (opt1) from hemagglutinin__InfluenzaA__AFM72257
augaagaccaucaucgcccugagcuacauccucugccugguguucgcccagaagcugcccgucaacgacaacuccaccgcgacgcucugccugggccaccacgccgugccgaacgggacccuggugaagaccaucaccaacgaccacaucgaggucacgaacgccaccgagcucgugcagagcuccagcaccggccgcaucugcgacagcccccaccagauccuggacggggagaacugcacccugaucgacgcccuccugggcgacccccacugcgacggguuccagaacaaggagugggaccuguucguggagcggagcacggccuacuccaacugcuaccccuacgacgucccggacuacgcgagccuccgcucccugguggccagcuccggcacccuggaguucaacaacgagagcuucaacuggaccggcguggcccagaacgggaccuccagcgccugcaagcggcgcuccaucaagagcuucuucucccggcucaacuggcugcaccagcugaacuacaaguaccccgcgcucaacgucacgaugcccaacaacgagaaguucgacaagcuguacaucuggggcgugcaccaccccagcaccgacuccgaccagaucagcaucuacgcccaggccagcgggcgcgugaccgucuccaccaagcggagccagcagacggugaucccgaacaucggcucccgccccugggugcgcggggucagcuccggcaucagcaucuacuggaccaucgugaagcccggcgacauccugcucaucaacuccaccgggaaccugaucgcgccccggggcuacuucaagauccggagcgggaaguccagcaucaugcgcuccaacgccccgaucggcaagugcaacagcgagugcaucacccccaacggcuccauccccaacgacaagcccuuccagaacgugaaccggaucacguacggggccugcccgcgcuacgucaagcagaacacccugaagcucgccaccggcaugcggaacgugcccgagaagcagacccgcgggaucuucggcgccaucgccggguucaucgagaacggcugggagggcaugguggacgggugguacggcuuccggcaccagaacagcgaggggacgggccaggccgcggaccugaaguccacccaggccgccaucaaccagaucaacgggaagcugaaccgccucaucgagaagaccaacgagaaguuccaccagaucgagaaggaguucagcgaggucgagggccggauccaggaccuggagaaguacguggaggacaccaagaucgaccugugguccuacaacgccgagcuccugguggcccuggagaaccagcacacgaucgaccucaccgacagcgagaugaacaagcuguucgagcgcacccggaagcagcugcgcgagaacgcggaggacaugggcaacgggugcuucaagaucuaccacaagugcgacaacgccugcaucggcuccauccgcaacgggaccuacgaccacgacgucuaccgggacgaggcccucaacaaccgcuuccagaucaagggcguggagcugaaguccggguacaaggacuggauccuguggaucagcuucgccaucuccugcuuccuccugugcgucgugcugcucggcuucaucaugugggccugccagaagggcaacauccggugcaacaucugcaucuga

SEQ ID NO: 73144 - RNA, 1701 nt, Artificial Sequence
  derived and/or modified CDS sequence (opt1) from hemagglutinin__InfluenzaA__AFM72268
augaagaccaucaucgcccugagcuacauccucugccugguguucgcccagaagcugcccgucaacgacaacuccaccgcgacgcucugccugggccaccacgccgugccgaacgggacccuggugaagaccaucaccaacgaccacaucgaggucacgaacgccaccgagcucgugcagagcuccagcaccggccgcaucugcgacagcccccaccagauccuggacggggagaacugcacccugaucgacgcccuccugggcgacccccacugcgacggguuccagaacaaggagugggaccuguucguggagcggagcacggccuacuccaacugcuaccccuacgacgucccggacuacgcgagccuccgcucccugguggccagcuccggcacccuggaguucaacaacgagagcuucaacuggaccggcguggcccagaacgggaccuccagcgccugcaagcggcgcuccaucaagagcuucuucucccggcucaacuggcugcaccagcugaacuacaaguaccccgcgcucaacgucacgaugcccaacaacgagaaguucgacaagcuguacaucuggggcgugcaccaccccaacaccgacagcgaccagaucuccaucuacgcccaggccagcgggcgcgugaccgucagcaccaagcggucccagcagacggugaucccgaacaucggcagccgccccugggugcgcggggucuccagcggcaucuccaucuacuggaccaucgugaagcccggcgacauccugcucaucaacagcaccgggaaccugaucgcgccccggggcuacuucaagauccgguccgggaaguccuccaucaugcgcagcaacgccccgaucggcaagugcaacuccgagugcaucacccccaacggcagcauccccaacgacaagcccuuccagaacgugaaccggaucacguacggggccugcccgcgcuacgucaagcagaacacccugaagcucgccaccggcaugcggaacgugcccgagaagcagacccgcgggaucuucggcgccaucgccggguucaucgagaacggcugggagggcaugguggacgggugguacggcuuccggcaccagaacuccgaggggacgggccaggccgcggaccucaagagcacccaggccgccaucaaccagaucaacgggaagcugaaccgccugaucgagaagaccaacgagaaguuccaccagaucgagaaggaguucuccgaggucgagggccggauccaggaccuggagaaguacguggaggacaccaagaucgaccuguggagcuacaacgccgagcuccugguggcccuggagaaccagcacacgaucgaccucaccgacuccgagaugaacaagcuguucgagcgcacccggaagcagcugcgcgagaacgcggaggacaugggcaacgggugcuucaagaucuaccacaagugcgacaacgccugcaucggcagcauccgcaacgggaccuacgaccacgacgucuaccgggacgaggcccucaacaaccgcuuccagaucaagggcguggagcugaaguccggguacaaggacuggauccuguggaucagcuucgccaucagcugcuuccuccugugcgucgugcugcucggcuucaucaugugggccugccagaagggcaacauccggugcaacaucugcaucuga

SEQ ID NO: 73145 - RNA, 1701 nt, Artificial Sequence
  derived and/or modified CDS sequence (opt1) from hemagglutinin__InfluenzaA__AFM72279
augaagaccaucaucgcccugagcuacauccucugccugguguucgcccagaagcugcccgucaacgacaacuccaccgcgacgcucugccugggccaccacgccgugccgaacgggacccuggugaagaccaucaccaacgaccacaucgaggucacgaacgccaccgagcucgugcagagcuccagcaccggccgcaucugcgacagcccccaccagauccuggacggggagaacugcacccugaucgacgcccuccugggcgacccccacugcgacggguuccagaacaaggagugggaccuguucguggagcggagcacggccuacuccaacugcuaccccuacgacgucccggacuacgcgagccuccgcucccugguggccagcuccggcacccuggaguucaacaacgagagcuucaacuggaccggcguggcccagaacgggaccuccagcgccugcaagcggcgcuccaucaagagcuucuucucccggcucaacuggcugcaccagcugaaguacaaguaccccgcgcucaacgucacgaugcccaacaacgagaaguucgacaagcuguacaucuggggcgugcaccaccccagcaccgacuccgaccagaucagcaucuacgcccaggccagcgggcgcgugaccgucuccaccaagcggagccagcagacggugaucccgaacaucggcuccaagcacugggugcgcggggucagcucccggaucagcaucuacuggaccaucgugaagcccggcgacauccugcucaucaacuccaccggcaaccugaucgcgccccgcggguacuucaagauccggagcggcaaguccagcaucaugcgcuccaacgcccccaucgggaagugcaacagcgagugcaucaccccgaacggcuccauccccaacgacaagcccuuccagaacgugaaccggaucacguacggcgccugcccccgcuacgucaagcagaacacccugaagcucgccaccgggaugcggaacgugccggagaagcagacccgcggcaucuucggggccaucgccggcuucaucgagaacgggugggagggcaugguggacggcugguacggguuccggcaccagaacagcgagggcacggggcaggccgcggaccugaaguccacccaggccgccaucaaccagaucaacggcaagcugaaccgccucaucgagaagaccaacgagaaguuccaccagaucgagaaggaguucagcgaggucgaggggcggauccaggaccuggagaaguacguggaggacaccaagaucgaccugugguccuacaacgccgagcuccugguggcccuggagaaccagcacacgaucgaccucaccgacagcgagaugaacaagcuguucgagcgcacccggaagcagcugcgcgagaacgcggaggacaugggcaacggcugcuucaagaucuaccacaagugcgacaacgccugcaucggguccauccgcaacggcaccuacgaccacgacgucuaccgggacgaggcccucaacaaccgcuuccagaucaaggggguggagcugaaguccggcuacaaggacuggauccuguggaucagcuucgccaucuccugcuuccuccugugcgucgugcugcucggguucaucaugugggccugccagaagggcaacauccggugcaacaucugcaucuga

SEQ ID NO: 73146 - RNA, 1701 nt, Artificial Sequence
  derived and/or modified CDS sequence (opt1) from hemagglutinin__InfluenzaA__AFM72290
augaagaccaucaucgcccugagcuacauccucugccugguguucgcccagaagcugcccgucaacgacaacuccaccgcgacgcucugccugggccaccacgccgugccgaacgggacccuggugaagaccaucaccaacgaccacaucgaggucacgaacgccaccgagcucgugcagagcuccagcaccggccgcaucugcgacagcccccaccagauccuggacggggagaacugcacccugaucgacgcccuccugggcgacccccacugcgacggguuccagaacaaggagugggaccuguucguggagcggagcacggccuacuccaacugcuaccccuacgacgucccggacuacgcgagccuccgcucccugguggccagcuccggcacccuggaguucaacaacgagagcuucaacuggaccggcguggcccagaacgggaccuccagcgccugcaagcggcgcuccaucaagagcuucuucucccggcucaacuggcugcaccagcugaaggacaaguaccccgcgcucaacgucacgaugcccaacaacgagaaguucgacaagcuguacaucuggggcgugcaccaccccagcaccgacuccgaccagaucagcaucuacgcccaggccagcgggcgcgugaccgucuccaccaagcggagccagcagacggugaucccgaacaucggcuccaagcacugggugcgcggggucagcucccggaucagcaucuacuggaccaucgugaagcccggcgacauccugcucaucaacuccaccggcaaccugaucgcgccccgcggguacuucaagauccggagcggcaaguccagcaucaugcgcuccaacgcccccaucgggaagugcaacagcgagugcaucaccccgaacggcuccauccccaacgacaagcccuuccagaacgugaaccggaucacguacggcgccugcccccgcuacgucaagcagaacacccugaagcucgccaccgggaugcggaacgugccggagaagcagacccgcggcaucuucggggccaucgccggcuucaucgagaacgggugggagggcaugguggacggcugguacggguuccggcaccagaacagcgagggcacggggcaggccgcggaccugaaguccacccaggccgccaucaaccagaucaacggcaagcugaaccgccucaucgagaagaccaacgagaaguuccaccagaucgagaaggaguucagcgaggucgaggggcggauccaggaccuggagaaguacguggaggacaccaagaucgaccugugguccuacaacgccgagcuccugguggcccuggagaaccagcacacgaucgaccucaccgacagcgagaugaacaagcuguucgagcgcacccggaagcagcugcgcgagaacgcggaggacaugggcaacggcugcuucaagaucuaccacaagugcgacaacgccugcaucggguccauccgcaacggcaccuacgaccacgacgucuaccgggacgaggcccucaacaaccgcuuccagaucaaggggguggagcugaaguccggcuacaaggacuggauccuguggaucagcuucgccaucuccugcuuccuccugugcgucgugcugcucggguucaucaugugggccugccagaagggcaacauccggugcaacaucugcaucuga

SEQ ID NO: 73147 - RNA, 1701 nt, Artificial Sequence
  derived and/or modified CDS sequence (opt1) from hemagglutinin__InfluenzaA__AFM72301
augaagaccaucaucgcccugagcuacauccucugccugguguucucccagaagcugcccggcaacgacaacagcaccgccacgcucugccuggggcaccacgcggucccgaacggcaccaucgugaagaccaucaccaacgaccagaucgaggugacgaacgccaccgagcugguccaguccagcuccaccgggggcaucugcgacagcccccaccagauccucgacggggagaacugcacccugaucgacgcccugcucggcgacccccagugcgacggcuuccagaacaagaagugggaccuguucguggagcgcuccaaggccuacagcaacugcuaccccuacgacgugccggacuacgccucccugcggagccucgucgcguccagcgggacgcuggaguucaacaacgaguccuucaacugggccggcgugacccagaacgggaccagcuccgccugcaagcgccggagcaacaaguccuucuucagccgccugaacuggcucacccagcugaaguacaaguaccccgcccugaacgugacgaugcccaacaacgagaaguucgacaagcucuacaucuggggcguccaccaccccgugaccgacuccgaccagaucagccuguacgcgcaggccagcgggcggaucaccguguccaccaagcgcagccagcagacggucaucccgaacaucggcuaccggccccgcgugcgggacaucuccagccgcaucuccaucuacuggaccaucgugaagcccggcgacauccugcucaucaacagcaccgggaaccugaucgcgccccggggcuacuucaagauccgcuccggcaagagcuccaucaugcggagcgacgccccgaucgggaagugcaacuccgagugcaucacccccaacggcagcauccccaacgacaagcccuuccagaacgucaaccgcaucacguacggggccugcccgcgguacgugaagcagaacacccugaagcucgccaccggcaugcgcaacgugcccgagaagcagacccgggggaucuucggcgccaucgccggguucaucgagaacggcugggagggcauggucgacgggugguacggcuuccgccaccagaacuccgaggggacgggccaggccgccgaccucaagagcacccaggcggccaucaaccagaucaacgggaagcugaaccggcugaucggcaagaccaacgagaaguuccaccagaucgagaaggaguucuccgagguggagggccgcauccaggaccuggagaaguacguggaggacaccaagaucgaccuguggagcuacaacgccgagcuccuggucgcccuggagaaccagcacacgaucgaccucaccgacuccgagaugaacaagcuguucgagcggaccaagaagcagcugcgcgagaacgccgaggacauggggaacggcugcuucaagaucuaccacaagugcgacaacgcgugcaucgagagcauccgcaacgggaccuacgaccacgacguguaccgggacgaggcccucaacaaccgcuuccagaucaagggcguggagcugaaguccggguacaaggacuggauccuguggaucagcuucgccaucagcugcuuccuccugugcgucgcccugcucggcuucaucaugugggccugccagaagggcaacauccggugcaacaucugcaucuga

SEQ ID NO: 73148 - RNA, 1701 nt, Artificial Sequence
  derived and/or modified CDS sequence (opt1) from hemagglutinin__InfluenzaA__AFM72312
augaagaccaucaucgcccugagcuacauccucugccugguguucgcccagaagcugcccggcaacgacaacuccaccgcgacgcucugccuggggcaccacgccgucccgaacggcaccaucgugaagaccaucaccaacgaccagaucgaggugacgaacgccaccgagcugguccagagcuccagcaccgggggcaucugcgacagcccccaccagauccucgacggggagaacugcacccugaucgacgcccugcucggcgacccccagugcgacggcuuccagaacaagaagugggaccuguucguggagcgcagcaaggccuacuccaacugcuaccccuacgacgugccggacuacgcgagccugcggucccucgucgccagcuccgggacgcuggaguucaacaacgagagcuucaacuggaccggcgugacccagaacgggaccuccagcgccugcaagcgccgguccaacaagagcuucuucucccgccugaacuggcucacgcaccugaaguacaaguaccccgcccugaacgugaccaugcccaacaacgagaaguucgacaagcucuacaucuggggcguccaccaccccgugaccgacagcgaccagaucaaccuguacgcgcaggccuccgggcggaucaccgugagcacgaagcgcagccagcagaccgucaucccgaacaucggcuaccggccccgcgugcgggacauccccucccgcaucagcaucuacuggaccaucgugaagcccggcgacauccugcucaucaacuccaccgggaaccugaucgccccgcggggcuacuucaagauccgcagcgggaaguccagcaucaugcgguccgacgcccccaucggcaagugcaacagcgagugcaucacgcccaacggcuccauccccaacgacaagccguuccagaacgucaaccgcaucaccuacggggccugcccccgguacgugaagcagaacacccugaagcucgcgaccggcaugcgcaacgugcccgagaagcagacgcgggggaucuucggcgccaucgccggguucaucgagaacggcugggagggcauggucgacgggugguacggcuuccgccaccagaacagcgaggggaccggccaggccgccgaccugaaguccacccaggcggccaucaaccagaucaacgggaagcugaaccggcucaucggcaagaccaacgagaaguuccaccagaucgagaaggaguucagcgagguggagggccgcauccaggaccuggagaaguacguggaggacacgaagaucgaccugugguccuacaacgccgagcuccuggucgcccuggagaaccagcacaccaucgaccucaccgacagcgagaugaacaagcuguucgagcggaccaagaagcagcugcgcgagaacgccgaggacauggggaacggcugcuucaagaucuaccacaagugcgacaacgcgugcaucggguccauccgcaacggcacguacgaccacgacguguaccgggacgaggcccucaacaaccgcuuccagaucaaggggguggagcugaaguccggcuacaaggacuggauccuguggaucuccuucgccaucagcugcuuccuccugugcgucgcccugcucggcuucaucaugugggccugccagaaggggaacauccggugcaacaucugcaucuga

SEQ ID NO: 73149 - RNA, 1701 nt, Artificial Sequence
  derived and/or modified CDS sequence (opt1) from hemagglutinin__InfluenzaA__AFM72323
augaaggccaucaucgcccugagcuacauccucugccugguguucgcgcagaagcugcccggcaacgacaacuccaccgccacccucugccuggggcaccacgccgucccgaacggcacgaucgugaagaccaucaccaacgaccagaucgaggugaccaacgccacggagcugguccagagcuccagcaccgggggcaucugcgacagcccccaccagauccucgacggggagaacugcacccugaucgacgcccugcucggcgacccccagugcgacggcuuccagaacaagaagugggaccuguucguggagcgcagcaaggcguacuccaacugcuaccccuacgacgugccggacuacgccagccugcggucccucgucgccagcuccgggacccuggaguucaacaacgagagcuucaacuggacgggcgugacccagaacgggaccuccagcgccugcaagcgccgguccaacaagagcuucuucucccgccugaacuggcucacccaccugaaguacaaguaccccgcgcugaacgugacgaugcccaacaacgagaaguucgacaagcucuacaucuggggcguccaccaccccgugaccgacagcgaccagaucaaccuguacgcccaggccuccgggcggaucaccgugagcaccaagcgcagccagcagacggucaucccgaacaucggcuaccggccccgcgugcgggacaaccccucccgcaucagcaucuacuggaccaucgugaagcccggcgacauccugcucaucaacuccaccgggaaccugaucgccccgcggggcuacuucaagauccgcagcgggaaguccagcaucaugcgguccgacgcccccaucggcaagugcaacagcgagugcaucacccccaacggcuccauccccaacgacaagccguuccagaacgucaaccgcaucacguacggggcgugcccccgguacgugaagcagaacacccugaagcucgccaccggcaugcgcaacgugcccgagaagcagacccgggggaucuucggcgccaucgccggguucaucgagaacggcugggagggcauggucgacgggugguacggcuuccgccaccagaacagcgaggggacgggccaggccgcggaccugaaguccacccaggccgccaucaaccagaucaacgggaagcugaaccggcucaucggcaagaccaacgagaaguuccaccagaucgagaaggaguucagcgagguggagggccgcauccaggaccuggagaaguacguggaggacaccaagaucgaccugugguccuacaacgccgagcuccuggucgcccuggagaaccagcacacgaucgaccucaccgacagcgagaugaacaagcuguucgagcggaccaagaagcagcugcgcgagaacgcggaggacauggggaacggcugcuucaagaucuaccacaagugcgacaacgccugcaucggguccauccgcaacggcaccuacgaccacgacguguaccgggacgaggcccucaacaaccgcuuccagaucaaggggguggagcugaaguccggcuacaaggacuggauccuguggaucuccuucgccaucagcugcuuccuccugugcgucgcccugcucggcuucaucaugugggcgugccagaaggggaacauccggugcaacaucugcaucuga

SEQ ID NO: 73150 - RNA, 1701 nt, Artificial Sequence
  derived and/or modified CDS sequence (opt1) from hemagglutinin__InfluenzaA__AFM72334
augaagaccaucaucgcccugagcuacauccucugccugguguucgcccagaagcugcccggcaacgacaacuccaccgcgacgcucugccuggggcaccacgccgucccgaacggcaccaucgugaagaccaucaccaacgaccagaucgaggugacgaacgccaccgagcugguccagagcuccagcaccggggagaucugcaacagcccccaccagauccucgacggcgagaacugcacccugaucgacgcccugcucggggacccccagugcgacggcuuccagaacaagaagugggaccuguucguggagcgcagcaaggcccacuccaacugcuaccccuacgacgugccggacuacgcgagccugcggucccucgucgccagcuccggcacgcuggaguucaacaacgagagcuucaacuggaccggggugacccagaacggcaccuccagcgccugcauccgccgguccaacaacagcuucuucucccgccugaacuggcucacgcaccugaacuucaaguaccccgcccugaacgugaccaugcccaacaacgagcaguucgacaagcucuacaucuggggcguccugcaccccgggaccuacaaggaccagaucuuccuguacgcgcaggccagcgggcggaucaccguguccacgaagcgcagccagcaggccgugaucccgaacaucggcagccggccccgcguccggaacauccccucccgcgugagcaucuacuggaccaucgugaagcccggcgacauccuccugaucaacuccaccgggaaccugaucgccccgcggggcuacuucaagauccgcagcgggaaguccagcaucaugcgguccgacgcccccaucggcaagugcaacagcgcgugcaucacccccaacggcuccauccccaacgacaagccguuccagaacgucaaccgcaucacguacggggccugcccccgguacgugaagcagaacacccucaagcuggccaccggcaugcgcaacgugcccgagaagcagacccgggggaucuucggcgccaucgccggguucaucgagaacggcugggagggcauggucgacgggugguacggcuuccgccaccagaacagcgaggggcggggccaggcggccgaccugaaguccacgcaggccgccaucgaccagaucaacgggaagcucaaccgccugaucggcaagaccaacgagaaguuccaccagaucgagaaggaguucagcgagguggagggccggauccaggaccuggagaaguacguggaggacaccaagaucgaccucugguccuacaacgccgagcugcuggucgcgcucgagaaccagcacaccaucgaccugacggacagcgagaugaacaagcuguucgagaagaccaagaagcagcuccgcgagaacgccgaggacauggggaacggcugcuucaagaucuaccacaagugcgacaacgccugcaucggguccauccgcaacggcaccuacgaccacgacguguaccgggacgaggcccugaacaaccgcuuccagaucaaggggguggagcugaaguccggcuacaaggacuggauccucuggaucuccuucgccaucagcugcuuccugcugugcgucgcgcuccugggcuucaucaugugggccugccagaaggggaacauccggugcaacaucugcaucuga

SEQ ID NO: 73151 - RNA, 1701 nt, Artificial Sequence
  derived and/or modified CDS sequence (opt1) from hemagglutinin__InfluenzaA__AFM72345
augaagaccaucaucgcccugagcuacauccucugccugguguucgcccagaagcugcccggcaacgacaacuccaccgcgacgcucugccuggggcaccacgccgucccgaacggcaccaucgugaagaccaucaccaacgaccagaucgaggugacgaacgccaccgagcugguccagagcuccagcaccgggggcaucugcgacagcccccaccagauccucgacggggagaacugcacccugaucgacgcccugcucggcgacccccagugcgacggcuuccagaacaagaagugggaccuguucguggagcgcagcaaggccuacuccaacugcuaccccuacgacgugccggacuacgcgagccugcggucccucgucgccagcuccgggacgcuggaguucaacaacgagagcuucgacuggaccggcgugacccagaacgggaccuccagcgccugcaagcgccgguccaacaagagcuucuucucccgccugaacuggcucacgcaccugaaguacaaguaccccgcccugaacgugaccaugcccaacaacgagaaguucgacaagcucuacaucuggggcguccaccaccccgugaccgacagcgaccagaucucccuguacacccaggcgagcgggcggaucacggugagcaccaagcgcucccagcagaccgucaucccgaacaucggcuuccggccccgcgugcgggacaucagcucccgcaucagcaucuacuggaccaucgugaagcccggcgacauccugcucaucaacuccacggggaaccugaucgcgccccggggcuacuucaagauccgcagcgggaaguccagcaucaugcgguccgacgccccgaucggcaagugcaacagcgagugcaucacccccaacggcuccauccccaacgacaagcccuuccagaacgucaaccgcaucaccuacggggccugcccgcgguacgugaagcagaacacccugaagcucgccacgggcaugcgcaacgugcccgagaagcagacccgggggaucuucggcgccaucgccggguucaucgagaacggcugggagggcauggucgacgggugguacggcuuccgccaccagaacagcgaggggaccggccaggccgccgaccugaaguccacccaggccgcgaucaaccagaucaacgggaagcugaaccggcucaucggcaagacgaacgagaaguuccaccagaucgagaaggaguucagcgagguggagggccgcauccaggaccuggagaaguacguggaggacaccaagaucgaccugugguccuacaacgccgagcuccuggucgcccuggagaaccagcacaccaucgaccucaccgacagcgagaugaacaagcuguucgagcggacgaagaagcagcugcgcgagaacgccgaggacauggggaacggcugcuucaagaucuaccacaagugcgacaacgccugcaucggguccauccgcaacggcaccuacgaccacgacguguaccgggacgaggcgcucaacaaccgcuuccagaucaaggggguggagcugaaguccggcuacaaggacuggauccuguggaucuccuucgccaucagcugcuuccuccugugcgucgcccugcucggcuucaucaugugggccugccagaaggggaacauccggugcaacaucugcaucuga

SEQ ID NO: 73152 - RNA, 1701 nt, Artificial Sequence
  derived and/or modified CDS sequence (opt1) from hemagglutinin__InfluenzaA__AFM72356
augaagaccaucaucgcccugagcuacauccucugccugguguucgcccagaagcugcccggcaacgacaacuccaccgcgacgcucugccuggggcaccacgccgucccgaacggcaccaucgugaagaccaucaccaacgaccagaucgaggugacgaacgccaccgagcugguccagagcuccagcaccgggggcaucugcgacagcccccaccagauccucgacggggagaacugcacccugaucgacgcccugcucggcgacccccagugcgacggcuuccagaacaagaagugggaccuguucguggagcgcagcaaggccuacuccaacugcuaccccuacgacgugccggacuacgcgagccugcggucccucgucgccagcuccgggacgcuggaguucaacaacgagagcuucaacuggaccggcgugacccagaacgggaccuccagcgccugcaagcgccgguccaacaagagcuucuucucccgccugaacuggcucacgcaccugaaguucaaguaccccgcccugaacgugaccaugcccaacaacgagaaguucgacaagcucuacaucuggggcguccaccaccccgggaccgacaacgaccagaucaaccuguacgugcaggcgagcggccggaucaccguguccacgaagcgcagccagcagaccgucaucccgaacaucggcagccggccccgcgugcgggacgugcccucccgcaucagcaucuacuggaccaucgucaagcccggggacauccugcucaucuccagcaccggcaaccugaucgccccgcggggguacuucaagauccgcuccggcaagagcuccaucaugcggagcgacgcccccaucggcaagugcaacuccgagugcaucacgcccaacgggagcauccccaacgacaagccguuccagaacgugaaccgcaucaccuacggcgccugcccccgguacgugaagcagaacacccugaagcucgccaccgggaugcgcaacguccccgagaagcagacgcggggcaucuucggggcgaucgccggcuucaucgagaacggcugggaggggaugguggacggcugguacggguuccgccaccagaacuccgagggcaccgggcaggccgccgaccugaaguccacccaggccgcgaucaaccagaucaacggcaagcugaaccggcucaucggcaagaccaacgagaaguuccaccagaucgagaaggaguucuccgagguggaggggcgcauccaggaccuggagaaguacgucgaggacacgaagaucgaccuguggagcuacaacgccgagcuccugguggcccuggagaaccagcacaccaucgaccucaccgacuccgagaugaacaagcuguucgagcggaccaagaagcagcugcgcgagaacgccgaggacaugggcaacgggugcuucaagaucuaccacaagugcgacaacgccugcaucggcagcauccgcaacgggacguacgaccacgacguguaccgggacgaggcgcucaacaaccgcuuccagaucaagggcgucgagcugaaguccggcuacaaggacuggauccuguggaucagcuucgccaucuccugcuuccuccugugcguggcccugcucggguucaucaugugggccugccagaagggcaacauccggugcaacaucugcaucuga

SEQ ID NO: 73153 - RNA, 1701 nt, Artificial Sequence
  derived and/or modified CDS sequence (opt1) from hemagglutinin__InfluenzaA__AFM72367
augaagaccaucaucgcccugagcuacauccucugccugguguucgcccagaagcugcccggcaacgacaacuccaccgcgacgcucugccuggggcaccacgccgucccgaacggcaccaucgugaagaccaucaccaacgaccagaucgaggugacgaacgccaccgagcugguccagagcuccagcaccgggggcaucugcgacagcccccaccagauccucgacggggagaacugcacccugaucgacgcccugcucggcgacccccagugcgacggcuuccagaacaagaagugggaccuguucguggagcgcagcaaggccuacuccaacugcuaccccuacgacgugccggacuacgcgagccugcggucccucgucgccagcuccgggacgcuggaguucaacaacgagagcuucaacuggaccggcgugacccagaacgggaccuccagcgccugcaagcgccgguccaacaagagcuucuucucccgccugaacuggcucacgcaccugaaguucaaguaccccgcccugaacgugaccaugcccaacaacgagaaguucgacaagcucuacaucuggggcguccaccaccccgugaccgacaacgaccagaucaaccuguacgcgcaggccagcgggcggaucaccguguccacgaagcgcagccagcagaccgucaucccgaacaucggcagccggccccgcgugcgggacgugcccucccgcaucagcaucuacuggaccaucgucaagcccggcgacauccugcucaucuccagcaccgggaaccugaucgccccgcggggcuacuucaagauccgcuccgggaaguccuccaucaugcggagcgacgcccccaucggcaagugcaacuccgagugcaucacgcccaacggcagcauccccaacgacaagccguuccagaacgugaaccgcaucaccuacggggccugcccccgguacgugaagcagaacacccugaagcucgcgaccggcaugcgcaacguccccgagaagcagacgcgggggaucuucggcgccaucgccggguucaucgagaacggcugggagggcaugguggacgggugguacggcuuccgccaccagaacuccgaggggaccggccaggccgccgaccucaagagcacccaggcggccaucaaccagaucaacgggaagcugaaccggcugaucggcaagaccaacgagaaguuccaccagaucgagaaggaguucuccgagguggagggccgcauccaggaccuggagaaguacgucgaggacacgaagaucgaccuguggagcuacaacgccgagcuccugguggcccuggagaaccagcacaccaucgaccucaccgacuccgagaugaacaagcuguucgagcggaccaagaagcagcugcgcgagaacgccgaggacauggggaacggcugcuucaagaucuaccacaagugcgacaacgcgugcaucgggagcauccgcaacggcacguacgaccacgacguguaccgggacgaggcccucaacaaccgcuuccagaucaagggggucgagcugaaguccggcuacaaggacuggauccuguggaucagcuucgccaucuccugcuuccuccugugcguggcccugcucggcuucaucaugugggccugccagaaggggaacauccggugcaacaucugcaucuga

SEQ ID NO: 73154 - RNA, 1701 nt, Artificial Sequence
  derived and/or modified CDS sequence (opt1) from hemagglutinin__InfluenzaA__AFM72378
augaagaccaucaucgcccugagcuacauccucugccugguguucgcccagaagcugcccggcaacgacaacuccaccgcgacgcucugccuggggcaccacgccgucccgaacggcaccaucgugaagaccaucaccaacgaccagaucgaggugacgaacgccaccgagcugguccagagcuccagcaccggggagaucugcaacagcccccaccagauccucgacggcgagaacugcacccugaucgacgcccugcucggggacccccagugcgacggcuuccagaacaagaagugggaccuguucguggagcgcagcaaggcccacuccaacugcuaccccuacgacgugccggacuacgcgagccugcggucccucgucgccagcuccggcacgcuggaguucaacaacgagagcuucaacuggaccggggugacccagaacggcaccuccagcgccugcauccgccgguccaacaacagcuucuucucccgccugaacuggcucacgcagcugaacuucaaguaccccgcccugaacgugaccaugcccaacaacgagcaguucgacaagcucuacaucuggggcguccaccaccccgugaccgacaaggaccagaucuuccuguacgcgcaggccagcgggcggaucaccguguccacgaagcgcagccagcaggccgucaucccgaacaucggguaccggccccgcgugcggaacauccccagccgcguguccaucuacuggaccaucgucaagcccggcgacauccugcucaucaacagcaccggcaaccugaucgccccgcggggguacuucaagauccgcuccggcaagagcuccaucaugcggagcgacgcccccaucgggaagugcaacuccgcgugcaucacccccaacggcagcauccccaacgacaagccguuccagaacgugaaccgcaucacguacggcgccugcccccgguacgugaagcagaacacccugaagcucgccaccgggaugcgcaacguccccgagaagcagacccggggcaucuucggggccaucgccggcuucaucgagaacgggugggagggcaugguggacggcugguacggguuccgccaccagaacuccgagggccgggggcaggcggccgaccugaaguccacgcaggccgccaucgaccagaucaacggcaagcugaaccgccucaucgggaagaccaacgagaaguuccaccagaucgagaaggaguucuccgagguggagggccggauccaggaccuggagaaguacgucgaggacaccaagaucgaccuguggagcuacaacgccgagcuccugguggcgcuggagaaccagcacaccaucgaccucacggacuccgagaugaacaagcuguucgagaagaccaagaagcagcugcgcgagaacgccgaggacaugggcaacgggugcuucaagaucuaccacaagugcgacaacgccugcaucggcagcauccgcaacgggaccuacgaccacgacguguaccgggacgaggcccucaacaaccgcuuccagaucaagggcgucgagcugaaguccggguacaaggacuggauccuguggaucagcuucgccaucuccugcuuccuccugugcguggcgcugcucggcuucaucaugugggccugccagaagggcaacauccggugcaacaucugcaucuga

SEQ ID NO: 73155 - RNA, 1701 nt, Artificial Sequence
  derived and/or modified CDS sequence (opt1) from hemagglutinin__InfluenzaA__AFM72389
augaagaccaucaucgcccugagcuacauccucugccugguguucgcccagaagcugcccggcaacgacaacuccaccgcgacgcucugccuggggcaccacgccgucccgaacggcaccaucgugaagaccaucaccaacgaccagaucgaggugacgaacgccaccgagcugguccagagcuccagcaccggggagaucugcaacagcccccaccagauccucgacggcgagaacugcacccugaucgacgcccugcucggggacccccagugcgacggcuuccagaacaagaagugggaccuguucguggagcgcagcaaggcccacuccaacugcuaccccuacgacgugccggacuacgcgagccugcggucccucgucgccagcuccggcacgcuggaguucaacaacgagagcuucaacuggaccggggugacccagaacggcaccuccagcgccugcauccgccgguccaacaacagcuucuucucccgccugaacuggcucacgcaccugaacuucaaguaccccgcccugaacgugaccaugcccaacaacgagcaguucgacaagcucuacaucuggggcguccaccaccccgugaccgacaaggaccagaucuuccuguacgcgcaggccagcgggcggaucaccguguccacgaagcgcagccagcaggccgucaucccgaacaucggguaccggccccgcgugcggaacaaccccagccgcguguccaucuacuggaccaucgucaagcccggcgacauccugcucaucaacagcaccggcaaccugaucgccccgcggggguacuucaagauccgcuccggcaagagcuccaucaugcggagcgacgcccccaucgggaagugcaacuccgcgugcaucacccccaacggcagcauccccaacgacaagccguuccagaacgugaaccgcaucacguacggcgccugcccccgguacgugaagcagaacacccugaagcucgccaccgggaugcgcaacguccccgagaagcagacccggggcaucuucggggccaucgccggcuucaucgagaacgggugggagggcaugguggacggcugguacggguuccgccaccagaacuccgagggccgggggcaggcggccgaccugaaguccacgcaggccgccaucgaccagaucaacggcaagcugaaccgccucaucgggaagaccaacgagaaguuccaccagaucgagaaggaguucuccgagguggagggccggauccaggaccuggagaaguacgucgaggacaccaagaucgaccuguggagcuacaacgccgagcuccugguggcgcuggagaaccagcacaccaucgaccucacggacuccgagaugaacaagcuguucgagaagaccaagaagcagcugcgcgagaacgccgaggacaugggcaacgggugcuucaagaucuaccacaagugcgacaacgccugcaucggcagcauccgcaacgggaccuacgaccacgacguguaccgggacgaggcccucaacaaccgcuuccagaucaagggcgucgagcugaaguccggguacaaggacuggauccuguggaucagcuucgccaucuccugcuuccuccugugcguggcgcugcucggcuucaucaugugggccugccagaagggcaacauccggugcaacaucugcaucuga

SEQ ID NO: 73156 - RNA, 1701 nt, Artificial Sequence
  derived and/or modified CDS sequence (opt1) from hemagglutinin__InfluenzaA__AFM72400
augaagaccaucaucgcccugagcuacauccucugccugguguucgcccagaagcugcccggcaucgacaacuccaccgcgacgcucugccuggggcaccacgccgucccgaacggcaccaucgugaagaccaucaccaacgaccagaucgaggugacgaacgccaccgagcugguccagagcuccagcaccggggagaucugcgacagcccccaccagauccucgacggcgagaacugcacccugaucgacgcccugcucggggacccccagugcgacggcuuccagaacaagaagugggaccuguucguggagcgcagcaaggccuacuccaacugcuaccccuacgacgugccggacuacgcgagccugcggucccucgucgccagcuccggcacgcuggaguucaacaacgagagcuucaacugggccggggugacccagaacggcaccuccagcgccugcaagcgcggguccaacaacagcuucuucucccggcugaacuggcucacccacagcaaguucaaguaccccgcgcugaacgugacgaugcccaacaacgaggaguucgacaagcuguacaucuggggcguccuccaccccgggaccgacaacgaccagaucuuccuguacgcccaggccuccggccgcaucaccgugagcaccaagcggagccagcagacggugaucccgaacaucggcucccgcccccggguccgcaacauccccagccggaucuccaucuacuggaccaucgugaagcccggggacauccugcucaucaacagcaccggcaaccugaucgccccgcgcggguacuucaagauccgguccggcaagagcuccaucaugcgcagcgacgcccccaucggcaagugcaacuccgagugcaucacccccaacgggagcauccccaacgacaagccguuccagaacgugaaccggaucacguacggcgcgugcccccgcuacgucaagcagaacacccugaagcucgccaccgggaugcggaacgugcccgagaagcagacccgcggcaucuucggggccaucgccggcuucaucgagaacggcugggaggggaugguggacggcugguacggguuccggcaccagaacuccgagggcaucgggcaggccgcggaccugaaguccacgcaggccgccaucgaccagaucaacggcaagcugaaccgccucaucggcaagaccaacgagaaguuccaccagaucgagaaggaguucuccgaggucgaggggcggauccaggaccuggagaaguacguggaggacaccaagaucgaccuguggagcuacaacgccgagcuccugguggcccuggagaaccagcacaccaucgaccucacggacuccgagaugaacaagcuguucgagaagaccaagaagcagcugcgcgagaacgcggaggacaugggcaacgggugcuucaagaucuaccacaagugcgacaacgccugcaucggcagcauccggaacgggaccuacgaccacgacgucuaccgcgacgaggcccucaacaaccgcuuccagaucaagggcguggagcugaaguccggcuacaaggacuggauccuguggaucagcuucgccaucuccugcuuccuccugugcguggcccugcucggguucaucaugugggcgugccagaagggcaacauccggugcaacaucugcaucuga

SEQ ID NO: 73157 - RNA, 1701 nt, Artificial Sequence
  derived and/or modified CDS sequence (opt1) from hemagglutinin__InfluenzaA__AFM72411
augaagaccaucaucgcccugagcuacauccucugccugguguucgcccagaagcugcccggcaucgacaacuccaccgcgacgcucugccuggggcaccacgccgucccgaacggcaccaucgugaagaccaucaccaacgaccagaucgaggugacgaacgccaccgagcugguccagagcuccagcaccggggagaucugcgacagcccccaccagauccucgacggcgagaacugcacccugaucgacgcccugcucggggacccccagugcgacggcuuccagaacaagaagugggaccuguucguggagcgcagcaaggccuacuccaacugcuaccccuacgacgugccggacuacgcgagccugcggucccucgucgccagcuccggcacgcuggaguucaacaacgagagcuucaacugggccggggugacccagaacggcaccuccagcgccugcaagcgcggguccaacaacagcuucuucucccggcugaacuggcucacccagagcaaguucaaguaccccgcgcugaacgugacgaugcccaacaacgaggaguucgacaagcuguacaucuggggcguccaccaccccgugaccgacaacgaccagaucuuccucuacgcccaggccuccgggcgcaucaccgugagcaccaagcggagccagcagacggucaucccgaacaucggcucccgcccccgggugcgcaacauccccagccggaucuccaucuacuggaccaucgugaagcccggcgacauccugcugaucaacagcaccgggaaccucaucgccccgcgcggcuacuucaagauccgguccgggaaguccuccaucaugcgcagcgacgcccccaucggcaagugcaacuccgagugcaucacccccaacggcagcauccccaacgacaagccguuccagaacgucaaccggaucacguacggggcgugcccccgcuacgugaagcagaacacccugaagcuggccaccggcaugcggaacgugcccgagaagcagacccgcgggaucuucggcgccaucgccggguucaucgagaacggcugggagggcauggucgacgggugguacggcuuccggcaccagaacuccgaggggaucggccaggccgcggaccucaagagcacgcaggccgccaucgaccagaucaacgggaagcugaaccgccugaucggcaagaccaacgagaaguuccaccagaucgagaaggaguucuccgagguggagggccggauccaggacuucgagaaguacguggaggacaccaagaucgaccucuggagcuacaacgccgagcugcuggucgcccucgagaaccagcacaccaucgaccugacggacuccgagaugaacaagcuguucgagaagaccaagaagcagcuccgcgagaacgcggaggacauggggaacggcugcuucaagaucuaccacaagugcgacaacgccugcaucgggagcauccggaacggcaccuacgaccacgacguguaccgcgacgaggcccugaacaaccgcuuccagaucaaggggguggagcugaaguccggcuacaaggacuggauccucuggaucagcuucgccaucuccugcuuccugcugugcgucgcccuccugggcuucaucaugugggcgugccagaaggggaacauccggugcaacaucugcaucuga

SEQ ID NO: 73158 - RNA, 1701 nt, Artificial Sequence
  derived and/or modified CDS sequence (opt1) from hemagglutinin__InfluenzaA__AFM72422
augaagaccaucaucgcccugagcuacauccucugccugguguucgcccagaagcugcccggcaacgacaacuccaccgcgacgcucugccuggggcaccacgccgucccgaacggcaccaucgugaagaccaucaccaacgaccagaucgaggugacgaacgccaccgagcugguccagagcuccagcaccggggagaucugcgacagcccccaccagauccucgacggcgagaacugcacccugaucgacgcccugcucggggacccccagugcgacggcuuccagaacaagaagugggaccuguucguggagcgcagcaaggccuacuccaacugcuaccccuacgacgugccggacuacgcgagccugcggucccucgucgccagcuccggcacgcuggaguucaacaacgagagcuucaacuggaccggggugacccagaacggcaccuccagcgccugcauccgccgguccaacaacagcuucuucucccgccugaacuggcucacgcaccugaaguucaaguaccccgcccugaacgugaccaugcccaacaacgaggaguucgacaagcucuacaucuggggcguccaccaccccgugaccgacaacgaccagaucuuccuguacgcgcaggccagcgggcggaucaccguguccacgaagcgcagccagcagaccgucaucccgaacaucggguuccggccccgcgugcggaacauccccagccgcaucuccaucuacuggaccaucgugaagcccggcgacauccugcucaucaacagcaccggcaaccugaucgccccgcggggguacuucaagauccgcuccggcaagagcuccaucaugcggagcgacgcccccaucgggaagugcaacuccgagugcaucacgcccaacggcagcauccccaacgacaagccguuccagaacgucaaccgcaucaccuacggcgccugcccccgguacgugaagcagaacacccugaagcucgcgaccgggaugcgcaacgugcccgagaagcagacgcggggcaucuucggggccaucgccggcuucaucgagaacgggugggagggcauggucgacggcugguacggguuccgccaccagaacuccgagggcaucgggcaggccgccgaccugaaguccacccaggcggccaucgaccagaucaacggcaagcugaaccggcucaucgggaagaccaacgagaaguuccaccagaucgagaaggaguucuccgagguggagggccgcauccaggaccuggagaaguacgccgaggacaccaagaucgaccuguggagcuacaacgccgagcuccugguggcccuggagaaccagcacacgaucgaccucaccgacuccgagaugaacaagcuguucgagaagaccaagaagcagcugcgggagaacgcggaggacaugggcaacgggugcuucaagaucuaccacaagugcgacaacgccugcaucggcagcauccgcaacgggaccuacgaccacgacgucuaccgcgacgaggcccucaacaaccgguuccagaucaagggcguggagcugaaguccggguacaaggacuggauccuguggaucagcuucgccaucuccugcuuccuccugugcguggcccugcucggcuucaucaugugggcgugccagaagggcaacauccgcugcaacaucugcaucuga

SEQ ID NO: 73159 - RNA, 1701 nt, Artificial Sequence
  derived and/or modified CDS sequence (opt1) from hemagglutinin__InfluenzaA__AFM72433
augaagaccaucaucgcccugagcuacauccucugccugguguucgcccagaagcugcccggcaacgacaacuccaccgcgacgcucugccuggggcaccacgccgucccgaacggcaccaucgugaagaccaucaccaacgaccagaucgaggugacgaacgccaccgagcugguccagagcuccagcaccggggagaucugcgacagcccccaccagauccucgacggcgagaacugcacccugaucgacgcccugcucggggacccccagugcgacggcuuccagaacaagaagugggaccuguucguggagcgcagcaaggccuacuccaacugcuaccccuacgacgugccggacuacgcgagccugcggucccucgucgccagcuccggcacgcuggaguucaacaacgagagcuucaacuggaccggggugacccagaacggcaccuccagcgccugcauccgccgguccaacaacagcuucuucucccgccugaacuggcucacgcaccugaaguucaaguaccccgcccugaacgugaccaugcccaacaacgaggaguucgacaagcucuacaucuggggcguccaccaccccgugaccgacaacgaccagaucuuccuguacgcgcaggccagcgggcggaucaccguguccacgaagcgcagccagcagaccgucaucccgaacaucggguuccggccccgcgugcggaacaaccccagccgcaucuccaucuacuggaccaucgugaagcccggcgacauccugcucaucaacagcaccggcaaccugaucgccccgcggggguacuucaagauccgcuccggcaagagcuccaucaugcggagcgacgcccccaucgggaagugcaacuccgagugcaucacgcccaacggcagcauccccaacgacaagccguuccagaacgucaaccgcaucaccuacggcgccugcccccgguacgugaagcagaacacccugaagcucgcgaccgggaugcgcaacgugcccgagaagcagacgcggggcaucuucggggccaucgccggcuucaucgagaacgggugggagggcauggucgacggcugguacggguuccgccaccagaacuccgagggcaucgggcaggccgccgaccugaaguccacccaggcggccaucgaccagaucaacggcaagcugaaccggcucaucgggaagaccaacgagaaguuccaccagaucgagaaggaguucuccgagguggagggccgcauccaggaccuggagaaguacgccgaggacaccaagaucgaccuguggagcuacaacgccgagcuccugguggcccuggagaaccagcacacgaucgaccucaccgacuccgagaugaacaagcuguucgagaagaccaagaagcagcugcgggagaacgcggaggacaugggcaacgggugcuucaagaucuaccacaagugcgacaacgccugcaucggcagcauccgcaacgggaccuacgaccacgacgucuaccgcgacgaggcccucaacaaccgguuccagaucaagggcguggagcugaaguccggguacaaggacuggauccuguggaucagcuucgccaucuccugcuuccuccugugcguggcccugcucggcuucaucaugugggcgugccagaagggcaacauccgcugcaacaucugcaucuga

SEQ ID NO: 73160 - RNA, 1701 nt, Artificial Sequence
  derived and/or modified CDS sequence (opt1) from hemagglutinin__InfluenzaA__AFM72444
augaagaccaucaucgcccugagcuacauccucugccugguguucgcccagaagcugcccggcaacgacaacuccaccgcgacgcucugccuggggcaccacgccgucccgaacggcaccaucgugaagaccaucaccaacgaccagaucgaggugacgaacgccaccgagcugguccagagcuccagcaccggggagaucugcgacagcccccaccagauccucgacggcgagaacugcacccugaucgacgcccugcucggggacccccagugcgacggcuuccagaacaagaagugggaccuguucguggagcgcagcaaggccuacuccaacugcuaccccuacgacgugccggacuacgcgagccugcggucccucgucgccagcuccggcacgcuggaguucaacaacgagagcuucaacuggaccggggugacccagaacggcaccuccagcgccugcauccgccgguccaacaacagcuucuucucccgccugaacuggcucacgcaccugaaguucaaguaccccgcccugaacgugaccaugcccaacaacgaggaguucgacaagcucuacaucuggggcguccaccaccccgugaccgacaacgaccagauccugcuguacgcgcaggccagcgggcggaucaccguguccacgaagcgcagccagcagaccgucaucccgaacaucggguuccggccccgcgugcggaacaaccccagccgcaucuccaucuacuggaccaucgugaagcccggcgacauccuccugaucaacagcaccggcaaccugaucgccccgcggggguacuucaagauccgcuccggcaagagcuccaucaugcggagcgacgcccccaucgggaagugcaacuccgagugcaucacgcccaacggcagcauccccaacgacaagccguuccagaacgucaaccgcaucaccuacggcgccugcccccgguacgugaagcagaacacccucaagcuggcgaccgggaugcgcaacgugcccgagaagcagacgcggggcaucuucggggccaucgccggcuucaucgagaacgggugggagggcauggucgacggcugguacggguuccgccaccagaacuccgagggcaucgggcaggccgccgaccugaaguccacccaggcggccaucgaccagaucaacggcaagcucaaccggcugaucgggaagaccaacgagaaguuccaccagaucgagaaggaguucuccgagguggagggccgcauccaggaccuggagaaguacgccgaggacaccaagaucgaccucuggagcuacaacgccgagcugcugguggcccucgagaaccagcacacgaucgaccugaccgacuccgagaugaacaagcuguucgagaagaccaagaagcagcuccgggagaacgcggaggacaugggcaacgggugcuucaagaucuaccacaagugcgacaacgccugcaucggcagcauccgcaacgggaccuacgaccacgacgucuaccgcgacgaggcccugaacaaccgguuccagaucaagggcguggagcugaaguccggguacaaggacuggauccucuggaucagcuucgccaucuccugcuuccugcugugcguggcccuccugggcuucaucaugugggcgugccagaagggcaacauccgcugcaacaucugcaucuga

SEQ ID NO: 73161 - RNA, 1701 nt, Artificial Sequence
  derived and/or modified CDS sequence (opt1) from hemagglutinin__InfluenzaA__AFM72455
augaagaccaucaucgcccugagcuacauccucugccugguguucgcccagaagcugcccggcaacgacaacuccaccgcgacgcucugccuggggcaccacgccgucccgaacggcaccaucgugaagaccaucaccaacgaccagaucgaggugacgaacgccaccgagcugguccagagcuccagcaccggggagaucugcgacagcccccaccagauccucgacggcgagaacugcacccugaucgacgcccugcucggggacccccagugcgacggcuuccagaacaagaagugggaccuguucguggagcgcagcaaggccuacuccaacugcuaccccuacgacgugccggacuacgcgagccugcggucccucgucgccagcuccggcacgcuggaguucaacaacgagagcuucaacuggaccggggugacccagaacggcaccuccagcgccugcauccgccgguccaacaacagcuucuucucccgccugaacuggcucacgcagcugaaguucaaguaccccgcccugaacgugaccaugcccaacaacgaggaguucgacaagcucuacaucuggggcguccaccaccccgugaccgacaacgaccagaucuuccuguacgcgcaggccagcgggcggaucaccguguccacgaagcgcagccagcagaccgucaucccgaacaucggguuccggccccgcgugcggaacaaccccagccgcaucuccaucuacuggaccaucgugaagcccggcgacauccugcucaucaacagcaccggcaaccugaucgccccgcggggguacuucaagauccgcuccggcaagagcuccaucaugcggagcgacgcccccaucgggaagugcaacuccgagugcaucacgcccaacggcagcauccccaacgacaagccguuccagaacgucaaccgcaucaccuacggcgccugcccccgguacgugaagcagaacacccugaagcucgcgaccgggaugcgcaacgugcccgagaagcagacgcggggcaucuucggggccaucgccggcuucaucgagaacgggugggagggcauggucgacggcugguacggguuccgccaccagaacuccgagggcaucgggcaggccgccgaccugaaguccacccaggcggccaucgaccagaucaacggcaagcugaaccggcucaucgggaagaccaacgagaaguuccaccagaucgagaaggaguucuccgagguggagggccgcauccaggaccuggagaaguacgccgaggacaccaagaucgaccuguggagcuacaacgccgagcuccugguggcccuggagaaccagcacacgaucgaccucaccgacuccgagaugaacaagcuguucgagaagaccaagaagcagcugcgggagaacgcggaggacaugggcaacgggugcuucaagaucuaccacaagugcgacaacgccugcaucggcagcauccgcaacgggaccuacgaccacgacgucuaccgcgacgaggcccucaacaaccgguuccagaucaagggcguggagcugaaguccggguacaaggacuggauccuguggaucagcuucgccaucuccugcuuccuccugugcguggcccugcucggcuucaucaugugggcgugccagaagggcaacauccgcugcaacaucugcaucuga

SEQ ID NO: 73162 - RNA, 1701 nt, Artificial Sequence
  derived and/or modified CDS sequence (opt1) from hemagglutinin__InfluenzaA__AFM72466
augaagaccaucaucgcccugagcuacauccucugccugguguucgcccagaagcugcccggcaacgacaacuccaccgcgacgcucugccuggggcaccacgccgucccgaacggcaccaucgugaagaccaucaccaacgaccagaucgaggugacgaacgccaccgagcugguccagagcuccagcaccggggagaucugcgacagcccccaccagauccucgacggcgagaacugcacccugaucgacgcccugcucggggacccccagugcgacggcuuccagaacaagaagugggaccuguucguggagcgcagcaaggccuacuccaacugcuaccccuacgacgugccggacuacgcgagccugcggucccucgucgccagcuccggcacgcuggaguucaacaacgagagcuucaacuggaccggggugacccagaacggcaccuccagcgccugcauccgccgguccaacaacagcuucuucucccgccugaacuggcucacgcaccugaaguucaaguaccccgcccugaacgugaccaugcccaacaacgaggaguucgacaagcucuacaucuggggcguccaccaccccgugaccgacaaggaccagaucuuccuguacgcgcaggccagcgggcggaucaccguguccacgaagcgcagccagcagaccgucaucccgaacaucggguuccggccccgcgugcggaacaaccccagccgcaucuccaucuacuggaccaucgugaagcccggcgacauccugcucaucaacagcaccggcaaccugaucgccccgcggggguacuucaagauccgcuccggcaagagcuccaucaugcggagcgacgcccccaucgggaagugcaacuccgagugcaucacgcccaacggcagcauccccaacgacaagccguuccagaacgucaaccgcaucaccuacggcgccugcccccgguacgugaagcagaacacccugaagcucgcgaccgggaugcgcaacgugcccgagaagcagacgcggggcaucuucggggccaucgccggcuucaucgagaacgggugggagggcauggucgacggcugguacggguuccgccaccagaacuccgagggcaucgggcaggccgccgaccugaaguccacccaggcggccaucgaccagaucaacggcaagcugaaccggcucaucgggaagaccaacgagaaguuccaccagaucgagaaggaguucuccgagguggagggccgcauccaggaccuggagaaguacgccgaggacaccaagaucgaccuguggagcuacaacgccgagcuccugguggcccuggagaaccagcacacgaucgaccucaccgacuccgagaugaacaagcuguucgagaagaccaagaagcagcugcgggagaacgcggaggacaugggcaacgggugcuucaagaucuaccacaagugcgacaacgccugcaucggcagcauccgcaacgggaccuacgaccacgacgucuaccgcgacgaggcccucaacaaccgguuccagaucaagggcguggagcugaaguccggguacaaggacuggauccuguggaucagcuucgccaucuccugcuuccuccugugcguggcccugcucggcuucaucaugugggcgugccagaagggcaacauccgcugcaacaucugcaucuga

SEQ ID NO: 73163 - RNA, 1701 nt, Artificial Sequence
  derived and/or modified CDS sequence (opt1) from hemagglutinin__InfluenzaA__AFM72488
augaagaccaucaucgcccugagcuacauccucugccugguguucgcccagaagcugcccggcaacgacaacuccaccgcgacgcucugccuggggcaccacgccgucccgaacggcaccaucgugaagaccaucaccaacgaccagaucgaggugacgaacgccaccgagcugguccagagcuccagcaccgggggcaucugcgacagcccccaccagauccucgacggggagaacugcacccugaucgacgcccugcucggcgacccccagugcgacggcuuccagaacaagaagugggaccuguucguggagcgcagcaaggccuacuccaacugcuaccccuacgacgugccggacuacgcgagccugcggucccucgucgccagcuccgggacgcuggaguucaacaacgagagcuucaacuggaccggcgugacccagaacgggaccuccagcgccugcaagcgccgguccaacaacagcuucuucucccgccugaacuggcucacgcagcugaaguucaaguaccccgcccugaacgugaccaugcccaacaacgagaaguucgacaagcucuacaucuggggcguccaccaccccgugaccgacaacgagcagaucuuccuguacgcgcaggccagcgggcggaucaccguguccacgaagcgcagccagcagaccgucaucccgaacaucggcuuccggccccgcgugcggaacauccccagccgcaucuccaucuacuggaccaucgugaagcccggcgacauccugcucaucaacagcaccgggaaccugaucgccccgcggggcuacuucaagauccgcuccgggaaguccuccaucaugcggagcgacgcccccaucggcaagugcaacuccaagugcaucacgcccaacggcagcauccccaacgacaagccguuccagaacgucaaccgcaucaccuacggggccugcccccgguacgugaagcagaacacccugaagcucgcgaccggcaugcgcaacgugcccgagaagcagacgcgggggaucuucggcgccaucgccggguucaucgagaacggcugggagggcauggucgacgggugguacggcuuccgccaccagaacuccgaggggaucggccaggccgccgaccucaagagcacccaggcggccaucgaccagaucaacgggaagcugaaccggcugaucggcaagaccaacgagaaguuccaccagaucgagaaggaguucuccgagguggagggccgcauccaggaccuggagaaguacguggaggacaccaagaucgaccuguggagcuacaacgccgagcuccuggucgcccuggagaaccagcacacgaucgaccucaccgacuccgagaugaacaagcuguucgagaagaccaagaagcagcugcgggagaacgccgaggacauggggaacggcugcuucaagaucuaccacaagugcgacaacgcgugcaucgggagcauccgcaacggcaccuacgaccacgacguguaccgcgacgaggcccucaacaaccgguuccagaucaaggggguggagcugaaguccggcuacaaggacuggauccuguggaucagcuucgccaucuccugcuuccuccugugcgucgcccugcucggcuucaucaugugggccugccagaaggggaacauccgcugcaacaucugcaucuga

SEQ ID NO: 73164 - RNA, 1701 nt, Artificial Sequence
  derived and/or modified CDS sequence (opt1) from hemagglutinin__InfluenzaA__AFM72499
augaagaccaucaucgcccugagcuacauccucugccugguguucgcccagaagcugcccggcaacgacaacuccaccgcgacgcucugccuggggcaccacgccgucccgaacggcaccaucgugaagaccaucaccaacgaccagaucgaggugacgaacgccaccgagcugguccagagcuccagcaccgggggcaucugcgacagcccccaccagauccucgacggggagaacugcacccugaucgacgcccugcucggcgacccccagugcgacggcuuccagaacaagaagugggaccuguucguggagcgcagcaaggccuacuccaacugcuaccccuacgacgugccggacuacgcgagccugcggucccucgucgccagcuccgggacgcuggaguucaacaacgagagcuucaacuggaccggcgugacccagaacgggaccuccagcgccugcaagcgccgguccaacaacagcuucuucucccgccugaacuggcucacgcagcugaaguucaaguaccccgcccugaacgugaccaugcccaacaacgagaaguucgacaagcucuacaucuggggcguccaccaccccgugaccgacaacgaccagaucuuccuguacgcgcaggccagcgggcggaucaccguguccacgaagcgcagccagcagaccgucaucccgaacaucggcagccggccccgcgugcggaacauccccucccgcaucagcaucuacuggaccaucgugaagcccggcgacauccugcucaucaacuccaccgggaaccugaucgccccgcggggcuacuucaagauccgcagcgggaaguccagcaucaugcgguccgacgcccccaucggcaagugcaacagcgagugcaucacgcccaacggcuccauccccaacgacaagccguuccagaacgucaaccgcaucaccuacggggccugcccccgguacgugaagcagaacacccugaagcucgcgaccggcaugcgcaacgugcccgagaagcagacgcgggggaucuucggcgccaucgccggguucaucgagaacggcugggagggcauggucgacgggugguacggcuuccgccaccagaacagcgaggggaucggccaggccgccgaccugaaguccacccaggcggccaucgaccagaucaacgggaagcugaaccggcucaucggcaagaccaacgagaaguuccaccagaucgagaaggaguucagcgagguggagggccgcauccaggaccuggagaaguacguggaggacaccaagaucgaccugugguccuacaacgccgagcuccuggucgcccuggagaaccagcacacgaucgaccucaccgacagcgagaugaacaagcuguucgagaagaccaagaagcagcugcgggagaacgccgaggacauggggaacggcugcuucaagaucuaccacaagugcgacaacgcgugcaucggguccauccgcaacggcaccuacgaccacgacguguaccgcgacgaggcccucaacaaccgguuccagaucaaggggguggagcugaaguccggcuacaaggacuggauccuguggaucuccuucgccaucagcugcuuccuccugugcgucgcccugcucggcuucaucaugugggccugccagaaggggaacauccgcugcaacaucugcaucuga

SEQ ID NO: 73165 - RNA, 1698 nt, Artificial Sequence
  derived and/or modified CDS sequence (opt1) from hemagglutinin__InfluenzaA__AFM72521
augaaggugaagcugcucguccugcugugcaccuucaccgccacguacgccgacaccaucugcaucggcuaccacgcgaacaacagcaccgacaccguggacacggugcucgagaagaacgucaccgugacccacuccgugaaccugcuggagaacagccacaacgggcgccucugccugcugaagggcaucgcgccccuccagcuggggaacugcuccgucgccggcuggauccuggggaacccggagugcgagcuccugaucagcaaggaguccuggagcuacaucguggagaagcccaaccccgagaacgggaccugcuaccccggccacuucgccgacuacgaggagcugcgggagcagcucuccagcguguccagccuggagcgcuucgagaucuucccgaaggaguccagcuggcccaaccacacggucaccgggguguccgccagcugcucccacaacggcgagagcuccuucuaccggaaccugcucuggcugaccgggaagaacggccuguaccccaaccucagcaaguccuacgccaacaacaaggagaaggaggugcugguccuguggggcgugcaccacccgcccaacaucggcaaccagaaggcccucuaccacaccgagaacgccuacgugagcgucgugagcucccacuacagccgcaaguucacgcccgagaucgccaagcggcccaaggugcgcgaccaggagggccggaucaacuacuacuggacccugcuggagcccggggacaccaucaucuucgaggcgaacggcaaccucaucgccccgcgcuacgccuucgcccugucccggggguucggcagcggcaucaucaacuccaacgcccccauggacaagugcgacgcgaagugccagacgccccagggggccaucaacagcucccugcccuuccagaacguccacccggugaccaucggcgagugccccaaguacgugcgcagcgccaagcuccggauggucaccgggcugcgcaacauccccuccauccagagccggggccuguucggggccaucgccggcuucaucgagggcggguggaccggcaugguggacgggugguacggcuaccaccaccagaacgagcagggguccggcuacgcggccgaccagaaguccacccagaacgccaucaacggcaucacgaacaaggugaacagcgucaucgagaagaugaacacccaguucaccgccguggggaaggaguucaacaagcucgagcgccggauggagaaccugaacaagaaggucgacgacggcuucaucgacaucuggaccuacaacgccgagcugcucgugcugcuggagaacgagcgcacgcucgacuuccacgacagcaacgugaagaaccuguacgagaaggucaagucccagcugaagaacaacgcgaaggagaucgggaacggcugcuucgaguucuaccacaagugcaacgacgagugcauggagagcgugaagaacgggaccuacgacuaccccaaguacuccgaggagagcaagcucaaccgggagaagaucgacggcgugaagcuggaguccaugggcgucuaccagauccuggccaucuacagcaccguggccagcucccucgugcugcuggucagccucggggccaucuccuucuggaugugcagcaacggcucccugcagugccgcaucugcaucuga

SEQ ID NO: 73166 - RNA, 1698 nt, Artificial Sequence; identical to SEQ ID NO: 73165
  derived and/or modified CDS sequence (opt1) from hemagglutinin__InfluenzaA__AFM72532

SEQ ID NO: 73167 - RNA, 1698 nt, Artificial Sequence; identical to SEQ ID NO: 73165
  derived and/or modified CDS sequence (opt1) from hemagglutinin__InfluenzaA__AFM72543

SEQ ID NO: 73168 - RNA, 1698 nt, Artificial Sequence
  derived and/or modified CDS sequence (opt1) from hemagglutinin__InfluenzaA__AFM72554
augaaggugaagcugcucguccugcugugcaccuucaccgccacguacgccgacaccaucugcaucggcuaccacgcgaacaacagcaccgacaccguggacacggugcucgagaagaacgucaccgugacccacuccgugaaccugcuggagaacagccacaacgggcgccucugccugcugaagggcaucgcgccccuccagcuggggaacugcuccgucgccggcuggauccuggggaacccggagugcgagcuccugaucagcaaggaguccuggagcuacaucguggagaagcccaaccccgagaacgggaccugcuaccccggccacuucgccgacuacgaggagcugcgggagcagcucuccagcguguccagccuggagcgcuucgagaucuucccgaaggaguccagcuggcccaaccacacggucaccgggguguccgccagcugcucccacaacggcgagagcuccuucuaccggaaccugcucuggcugaccgggaagaacggccuguaccccaaccucagcaaguccuacgccaacaacaaggagaaggaggugcugguccuguggggcgugcaccacccgcccaacaucggcaaccagaaggcccucuaccacaccgagaacgccuacgugagcgucgugagcucccacuacagccgcaaguucacgcccgagaucgccaagcggcccaaggugcgcgaccaggagggccggaucaacuacuacuggacccugcuggagcccggggacaccaucaucuucgaggcgaacggcaaccucaucgccccgcgcuacgccuucgcccugucccggggguucggcagcggcaucaucaacuccaacgcccccauggacaagugcgacgcgaagugccagacgccccagggggccaucaacagcucccugcccuuccagaacguccacccggugaccaucggcgagugccccaaguacgugcgcagcgccaagcuccggauggucaccgggcugcgcaacauccccuccauccagagccggggccuguucggggccaucgccggcuucaucgagggcggguggaccggcaugguggacgggugguacggcuaccaccaccagaacgagcagggguccggcuacgcggccgaccagaaguccacccagaacgccaucaacggcaucacgaacaaggugaacagcgucaucgagaagaugaacacccaguucaccgccguggggaaggaguucaacaagcucgagcgccggauggagaaccugaacaagaaggucgacgacggcuucaucgacaucuggaccuacaacgccgagcugcucgugcugcuggagaacgagcgcacgcucgacuuccacgacagcaacgugaagaaccuguacgagaaggucaagucccagcugaagaacaacgcgaaggagaucgggaacggcugcuucgaguucuaccacaagugcaacgacgagugcauggagagcgugaagaacgggaccuacgacuaccccaaguacuccgaggagagcaagcucaaccgggagaagaucgacgaggugaagcuggaguccaugggcgucuaccagauccuggccaucuacagcaccguggccagcucccucgugcugcuggucagccucggcgccaucuccuucuggaugugcagcaacgggucccugcagugccgcaucugcaucuga

SEQ ID NO: 73169 - RNA, 1701 nt, Artificial Sequence
  derived and/or modified CDS sequence (opt1) from hemagglutinin__InfluenzaA__AFM72565
augaagaccaucaucgcccugagcuacauccucugccugguguucgcccagaagcugcccggcaacgacaacuccaccgcgacgcucugccuggggcaccacgccgucccgaacggcaccaucgugaagaccaucaccaacgaccagaucgaggugacgaacgccaccgagcugguccagagcuccagcaccggggagaucugcgacagcccccaccagauccucgacggcgagaacugcacccugaucgacgcccugcucggggacccccagugcgacggcuuccagaacaagaagugggaccuguucguggagcgcagcaaggccuacuccaacugcuaccccuacgacgugccggacuacgcgagccugcggucccucgucgccagcuccggcacgcuggaguucaacaacgagagcuucaacuggaccggggugacccagaacggcaccuccagcuccugcauccgccggagcaacaacuccuucuucagccgccugaacuggcucacgcaccugaaguucaaguaccccgcccugaacgugaccaugcccaacaacgagaaguucgacaagcucuacaucuggggcguccaccaccccgggaccgacaacgaccagaucuucccguacgcccaggcguccgggcggaucaccgugagcacgaagcgcagccagcagaccgugauccccaacaucggcucccggccccgcguccggaacauccccagccgcaucuccaucuacuggaccaucgugaagccgggcgacauccugcugaucaacagcaccgggaaccucaucgcgccccggggcuacuucaagauccgcuccgggaaguccuccaucaugcggagcgacgcccccaucggcaagugcaacuccgagugcaucacgcccaacggcagcaucccgaacgacaagcccuuccagaacgugaaccgcaucaccuacggggccugcccccgguacgucaagcagaacacccugaagcuggccaccggcaugcgcaacgugcccgagaagcagacgcgggggaucuucggcgccaucgccggguucaucgagaacggcugggagggcaugguggacgggugguacggcuuccgccaccagaacuccgaggggaucggccaggccgccgaccucaagagcacccaggccgcgaucgaccagaucaacgggaagcugaaccggcugaucggcaagaccaacgagaaguuccaccagaucgagaaggaguucuccgaggucgagggccgcauccaggaccucgagaaguacguggaggacaccaagaucgaccuguggagcuacaacgccgagcugcucguggcccuggagaaccagcacacgaucgaccugaccgacuccgagaugaacaagcuguucgagaagaccaagaagcagcuccgggagaacgccgaggacauggggaacggcugcuucaagaucuaccacaagugcgacaacgccugcaucgggagcauccgcaacggcaccuacgaccacgacgucuaccgcgacgaggcgcugaacaaccgguuccagaucaaggggguggagcucaaguccggcuacaaggacuggauccuguggaucagcuucgccaucuccugcuuccugcucugcguggcccugcugggcuucaucaugugggccugccagaaggggaacauccgcugcaacaucugcaucuga

SEQ ID NO: 73170 - RNA, 1701 nt, Artificial Sequence
  derived and/or modified CDS sequence (opt1) from hemagglutinin__InfluenzaA__AFM72576
augaagaccaucaucgcccugagcuacauccucugccugguguucgcccagaagcugcccggcaacgacaacuccaccgcgacgcucugccuggggcaccacgccgucccgaacggcaccaucgugaagaccaucaccaacgaccagaucgaggugacgaacgccaccgagcugguccagagcuccagcaccggggagaucugcgacagcccccaccagauccucgacggcgagaacugcacccugaucgacgcccugcucggggacccccagugcgacggcuuccagaacaagaagugggaccuguucguggagcgcuccaaggccuacuccaacugcuaccccuacgacgugccggacuacgcgagccugcggucccucgucgccagcuccggcacgcuggaguucaacaacgagagcuucaacuggaccggggugacccagaacggcaccuccagcuccugcauccgcgggagcaacaacuccuucuucagccggcugaacuggcucacgcaccugaaguucaaguaccccgcccugaacgugaccaugcccaacaacgagaaguucgacaagcucuacaucuggggcguccaccaccccgggaccgacaacgaccagaucuucccguacgcccaggcguccggccgcaucaccgugagcacgaagcggagccagcagaccgugauccccaacaucggcucccgcccccggguccgcaacauccccagccggaucuccaucuacuggaccaucgugaagccgggggacauccugcugaucaacagcaccggcaaccucaucgcgccccgcggguacuucaagauccgguccggcaagagcuccaucaugcgcagcgacgcccccaucggcaagugcaacuccgagugcaucacgcccaacgggagcaucccgaacgacaagcccuuccagaacgugaaccggaucaccuacggcgccugcccccgcuacgucaagcagaacacccugaagcuggccaccgggaugcggaacgugcccgagaagcagacgcgcggcaucuucggggccaucgccggcuucaucgagaacggcugggaggggaugguggacggcugguacggguuccggcaccagaacuccgagggcaucgggcaggccgccgaccucaagagcacccaggccgcgaucgaccagaucaacggcaagcugaaccgccugaucggcaagaccaacgagaaguuccaccagaucgagaaggaguucuccgaggucgaggggcggauccaggaccucgagaaguacguggaggacaccaagaucgaccuguggagcuacaacgccgagcugcucguggcccuggagaaccagcacacgaucgaccugaccgacuccgagaugaacaagcuguucgagaagaccaagaagcagcuccgcgagaacgccgaggacaugggcaacgggugcuucaagaucuaccacaagugcgacaacgccugcaucggcagcauccggaacgggaccuacgaccacgacgucuaccgcgacgaggcgcugaacaaccgcuuccagaucaagggcguggagcucaaguccggcuacaaggacuggauccuguggaucagcuucgccaucuccugcuuccugcucugcguggcccugcugggguucaucaugugggccugccagaagggcaacauccggugcaacaucugcaucuga

SEQ ID NO: 73171 - RNA, 1698 nt, Artificial Sequence
  derived and/or modified CDS sequence (opt1) from hemagglutinin__InfluenzaA__AFM72799
augaaggugaagcugcucguccugcugugcaccuucaccgccacguacgccgacaccaucugcaucggcuaccacgcgaacaacagcaccgacaccguggacacggugcucgagaagaacgucaccgugacccacuccgugaaccugcuggaggacaaccacaacgggaagcucugccugcugaagggcaaggcgccccuccagcuggggaacugcagcgucgccggcuggauccuggggaacccggagugcggccuccugaucuccaaggagagcugguccuacaucguggagcgccccaaccccgagaacgggaccugcuaccccgggcacuucgccgacuacgaggagcugcgggagcagcucagcuccgugagcuccuucgagcgcuucgagaucuucccgaaggagagcuccuggcccaaccacacggucaccggcgugagcgccuccugcagccacaacggggaguccagcuucuacaagaaccugcuguggcucaccggcaagaacgggcuguaccccaaccuguccaagagcuacgccaacaacaaggagaaggaggugcucguccuguggggcgugcaccacccgcccaacaucggcaaccagaugacccuguaccacaaggagaacgccuacguguccgucgugagcagccacuacucccggaaguucacgcccgagaucgccaagcgccccaaggugcgggaccaggaggggcgcaucaacuacuacuggacccuccuggagcccggcgacaccaucaucuucgaggccaacgggaaccugaucgcgccgcgguacgccuucgcccucagccgcggcuucggcuccgggaucaucaacagcaacgcccccauggacgagugcgacgccaagugccagacgccccagggcgcgaucaacuccagccugcccuuccagaacguccacccggugaccaucggggagugccccaaguacgugcgguccgccaagcugcgcauggucaccggccuccggaacauccccagcauccagucccgcgggcuguucggcgccaucgccggcuucaucgagggcggcuggaccgggaugguggacggcugguacggguaccaccaccagaacgagcagggcagcggcuacgccgcggaccagaaguccacccagaacgccaucaacgggaucacgaacaaggugaacagcgucaucgagaagaugaacacccaguucaccgccgugggcaaggaguucaacaagcuggagcggcgcauggagaaccucaacaagaaggucgacgacggguucaucgacguguggaccuacaacgccgagcugcuggugcuccuggagaacgagcggacgcuggacuuccacgacuccaacgucaagaaccucuacgagaaggugaagaaccagcugaagaacaacgccaaggagaucggcaacgggugcuucgaguucuaccacaagugcaacgacgagugcauggagagcgugaagaacggcaccuacgacuaccccaaguacuccgaggagagcaagcugucccgcgagaagaucgacggcgucaagcucgagagcauggggguguaccagauccuggcgaucuacuccaccguggccagcagccugguccuccuggugucccugggcgccaucagcuucuggaugugcuccaacgggagccuccagugccggaucugcaucuga

SEQ ID NO: 73172 - RNA, 1698 nt, Artificial Sequence; identical to SEQ ID NO: 73171
  derived and/or modified CDS sequence (opt1) from hemagglutinin__InfluenzaA__AFM72810

SEQ ID NO: 73173 - RNA, 1698 nt, Artificial Sequence; identical to SEQ ID NO: 73171
  derived and/or modified CDS sequence (opt1) from hemagglutinin__InfluenzaA__AFM72821

SEQ ID NO: 73174 - RNA, 1701 nt, Artificial Sequence
  derived and/or modified CDS sequence (opt1) from hemagglutinin__InfluenzaA__AFM72852
augaaggccauccuggugguccuccuguacaccuucgccaccgcgaacgccgacacgcugugcaucggcuaccacgccaacaacagcaccgacaccguggacaccgugcucgagaagaacgucacggugacccacuccgugaaccugcuggaggacaagcacaacgggaagcucugcaagcugcgcggcgucgcgccccugcaccucgggaagugcaacaucgccggcuggauccuggggaacccggagugcgagagccuguccaccgcgagcuccuggagcuacaucguggagacccccuccagcgacaacggcacgugcuaccccggcgacuucaucgacuacgaggagcuccgggagcagcuguccagcguguccagcuucgagcgcuucgagaucuuccccaagaccuccagcuggccgaaccacgacuccgacaagggggucaccgccgccugcccccacgccggcgccaagagcuucuacaagaaccugaucuggcucgugaagaaggggaacuccuaccccaagcugagcaaguccuacaucaacgacaagggcaaggaggugcugguccucugggggauccaccaccccagcaccagcgccgaccagcagucccuguaccagaacgccgacgccuacguguucgugggcagcucccgguacagcaagacguucaagccggagaucgccauccgccccaagguccgggaccgcgagggccggaugaacuacuacuggacccugguggagcccggggacaagaucaccuucgaggcgaccggcaaccucguggucccccgcuacgccuucgccauggagcggaacgccggguccggcaucaucaucagcgacacgccggugcacgacugcaacacgaccugccagacccccaagggcgccaucaacaccucccugcccuuccagaacauccaccccaucaccaucgggaagugcccgaaguacgucaagagcaccaagcugcgccucgcgaccggccugcggaacauccccuccauccagagccgcgggcuguucggcgccaucgccggguucaucgagggcggcuggacggggaugguggacggcugguacggguaccaccaccagaacgagcagggcuccggguacgccgccgaccucaagagcacccagaacgcgaucgacgagaucaccaacaaggugaacuccgugaucgagaagaugaacacccaguucacggccgucggcaaggaguucaaccaccuggagaagcggaucgagaaccugaacaagaagguggacgacggcuuccucgacaucuggaccuacaacgccgagcugcugguccuccuggagaacgagcgcacccuggacuaccacgacagcaacgugaagaaccucuacgagaaggugcggucccagcugaagaacaacgccaaggagaucgggaacggcugcuucgaguucuaccacaagugcgacaacacgugcauggagagcgucaagaacgggaccuacgacuaccccaaguacuccgaggaggccaagcugaaccgcgaggagaucgacggcgugaagcucgagagcacccggaucuaccagauccuggcgaucuacuccaccguggccagcagccugguccucguggugucccugggggccaucagcuucuggaugugcuccaacggcagccugcagugccgcaucugcaucuga

SEQ ID NO: 73175 - RNA, 1701 nt, Artificial Sequence
  derived and/or modified CDS sequence (opt1) from hemagglutinin__InfluenzaA__AFM72862
augaaggccauccuggugguccuccuguacaccuucgccaccgcgaacgccgacacgcugugcaucggcuaccacgccaacaacagcaccgacaccguggacaccgugcucgagaagaacgucacggugacccacuccgugaaccugcuggaggacaagcacaacgggaagcucugcaagcugcgcggcgucgcgccccugcaccucgggaagugcaacaucgccggcuggauccuggggaacccggagugcgagagccuguccaccgcgagcuccuggagcuacaucguggagacccccuccagcgacaacggcacgugcuaccccggcgacuucaucgacuacgaggagcuccgggagcagcuguccagcguguccagcuucgagcgcuucgagaucuuccccaagaccuccagcuggccgaaccacgacuccaacaagggggucaccgccgccugcccccacgccggcgccaagagcuucuacaagaaccugaucuggcucgugaagaaggggaacuccuaccccaagcugagcaacuccuacaucaacgacaagggcaaggaggugcugguccucugggggauccaccaccccagcaccagcgccgaccagcagucccuguaccagaacgccgacgccuacguguucgugggcagcucccgguacagcaagacguucaagccggagaucgccauccgccccaagguccgggaccgcgagggccggaugaacuacuacuggacccugguggagcccggggacaagaucaccuucgaggcgaccggcaaccucguggucccccgcuacgccuucgccauggagcggaacgccggguccggcaucaucaucagcgacacgccggugcacgacugcaacacgaccugccagacccccaagggcgccaucaacaccucccugcccuuccagaacauccaccccaucaccaucgggaagugcccgaaguacgucaagagcaccaagcugcgccucgcgaccggccugcggaacauccccuccauccagagccgcgggcuguucggcgccaucgccggguucaucgagggcggcuggacggggaugguggacggcugguacggguaccaccaccagaacgagcagggcuccggguacgccgccgaccucaagagcacccagaacgcgaucgacgagaucaccaacaaggugaacuccgugaucgagaagaugaacacccaguucacggccgucggcaaggaguucaaccaccuggagaagcggaucgagaaccugaacaagaagguggacgacggcuuccucgacaucuggaccuacaacgccgagcugcugguccuccuggagaacgagcgcacccuggacuaccacgacagcaacgugaagaaccucuacgagaaggugcggucccagcugaagaacaacgccaaggagaucgggaacggcugcuucgaguucuaccacaagugcgacaacacgugcauggagagcgucaagaacgggaccuacgacuaccccaaguacuccgaggaggccaagcugaaccgcgaggagaucgacggcgugaagcucgagagcacccggaucuaccagauccuggcgaucuacuccaccguggccagcagccugguccucguggugucccugggggccaucagcuucuggaugugcuccaacggcagccugcagugccgcaucugcaucuga

SEQ ID NO: 73176 - RNA, 1701 nt, Artificial Sequence
  derived and/or modified CDS sequence (opt1) from hemagglutinin__InfluenzaA__AFM72872
augaagaccaucaucgcccugagcuacacccucugccugguguucgcccagaagcugcccggcaacgacaacuccacggcgacccucugccuggggcaccacgccgucccgaacggcaccaucgugaagaccaucacgaacgaccagaucgaggugaccaacgccaccgagcugguccagagcuccagcaccggggagaucugcgacagcccccaccagauccucgacggcaagaacugcacgcugaucgacgcccugcucggggacccccagugcgacggcuuccagaacaagaagugggaccuguucguggagcgcuccaaggccuacuccaacugcuaccccuacgacgugccggacuacgcgagccugcggucccucgucgccagcuccggcacccuggaguucaacaacgagagcuucaacuggaccggggugacccagaacggcacguccagcgccugcauccgccgguccaagaacagcuucuucucccgccugaacuggcucacccaccugaacuucaaguaccccgcccugaacgugaccaugcccaacaacgagcaguucgacaagcucuacaucuggggcguccaccaccccgggaccgacaaggaccagaucuucccguacgcgcaggccagcgggcggaucacgguguccaccaagcgcagccagcagaccgccauccccaacaucggcagccggccccgcgugcggaacauccccucccgcaucagcaucuacuggaccaucgucaagccgggcgacauccugcugaucaacuccacggggaaccucaucgcgccccggggcuacuucaagauccgcagcgggaaguccagcaucaugcgguccgacgcccccaucggcaagugcaacagcgagugcaucacccccaacggcuccaucccgaacgacaagcccuuccagaacgugaaccgcaucaccuacggggccugcccccgguacgugaagcagaacacccugaagcuggccacgggcaugcgcaacguccccgagaagcagacccgggggaucuucggcgccaucgccggguucaucgagaacggcugggagggcaugguggacgggugguacggcuuccgccaccagaacagcgaggggcggggccaggccgcggaccucaaguccacccaggccgccaucgaccagaucaacgggaagcugaaccgccugaucggcaagaccaacgagaaguuccaccagaucgagaaggaguucagcgagguggagggccggauccaggaccucgagaaguacgucgaggacacgaagaucgaccugugguccuacaacgccgagcugcucguggcccuggagaaccagcacaccaucgaccugaccgacagcgagaugaacaagcuguucgagaagaccaagaagcagcuccgcgagaacgcggaggacauggggaacggcugcuucaagaucuaccacaagugcgacaacgccugcaucggguccauccgcaacggcacguacgaccacgacguguaccgggacgaggcccugaacaaccgcuuccagaucaagggggucgagcucaagagcggcuacaaggacuggauccuguggaucuccuucgccaucagcugcuuccugcucugcguggcccugcugggcuucaucaugugggcgugccagaaggggaacauccggugcaacaucugcaucuga

SEQ ID NO: 73177 - RNA, 1701 nt, Artificial Sequence
  derived and/or modified CDS sequence (opt1) from hemagglutinin__InfluenzaA__AFM72883
augaagaccaucaucgcccugagcuacauccucugccugguguucgcccagaagcugcccggcaacgacaacuccaccgcgacgcucugccuggggcaccacgccgucccgaacggcaccaucgugaagaccaucaccaacgaccagaucgaggugacgaacgccaccgagcugguccagaacagcuccaccggggagaucugcgacagcccccaccagauccucgacggcaagaacugcacccugaucgacgcccugcucggggacccccagugcgacggcuuccagaacaagaagugggaccuguucguggagcgcuccaaggccuacagcaacugcuaccccuacgacgugccggacuacgcgucccugcggagccucgucgccuccagcggcacgcuggaguucaacaacgaguccuucaacuggaccggggugacccagaacggcaccagcuccgccugcauccgccggagcaagaacuccuucuucagccgccugaacuggcucacgcaccugaacuucaaguaccccgcccugaacgugaccaugcccaacaacgagcaguucgacaagcucuacaucuggggcguccaccaccccgugaccgacaaggaccagaucuuccuguacgcgcaggccuccgggcggaucaccgugagcacgaagcgcucccagcagaccgucaucccgaacaucgggagccggccccgcgugcggaacauccccacccgcaucagcaucuacuggaccaucgugaagcccggcgacauccugcucaucaacuccacgggcaaccugaucgccccgcggggguacuucaagaugcagagcggcaaguccagcaucaugcgcuccgacgcccccaucgggaagugcaacagcgagugcaucacccccaacggcuccauccccaacgacaagccguuccagaacgucaaccggaucaccuacggcgccugcccccgcuacgugaagcagaacacccugaagcucgcgacggggaugcggaacgugcccgagaagcagacccgcggcaucuucggggccaucgccggcuucaucgagaacgggugggagggcauggucgacggcugguacggguuccggcaccagaacagcgagggccgcgggcaggccgccgaccugaaguccacccaggcggccaucgaccagaucaacggcaagcugaaccggcucaucgggaagaccaacgagaaguuccaccagaucgagaaggaguucagcgagguggagggccgcauccaggaccuggagaaguacguggaggacacgaagaucgaccugugguccuacaacgccgagcuccuggucgcccuggagaaccagcacaccaucgaccucaccgacagcgagaugaacaagcuguucgagaagaccaagaagcagcugcgggagaacgccgaggacaugggcaacgggugcuucaagaucuaccacaagugcgacaacgcgugcaucggcuccauccgcaacgggacguacgaccacaacguguaccgcgacgaggcccucaacaaccgguuccagaucaagggcguggagcucaagagcggguacaaggacuggauccuguggaucuccuucgccaucagcugcuuccugcugugcgucgcccugcucggcuucaucaugugggccugccagaagggcaacauccgcugcaacaucugcaucuga

SEQ ID NO: 73178 - RNA, 1701 nt, Artificial Sequence
  derived and/or modified CDS sequence (opt1) from hemagglutinin__InfluenzaA__AFM72894
augaagaccaucaucgcccugagcuacauccucugccugguguucgcccagaagcugcccggcaacgacaacuccaccgcgacgcucugccuggggcaccacgccgucccgaacggcaccaucgugaagaccaucaccaacgaccagaucgaggugacgaacgccaccgagcugguccagaacagcuccaccggggagaucugcgacagcccccaccagauccucgacggcaagaacugcacccugaucgacgcccugcucggggacccccagugcgacggcuuccagaacaagaagugggaccuguucguggagcgcuccaaggccuacagcaacugcuaccccuacgacgugccggacuacgcgucccugcggagccucgucgccuccagcggcacgcuggaguucaacaacgaguccuucaacuggaccggggugacccagaacggcaccagcuccgccugcauccgccggagcaagaacuccuucuucagccgccugaacuggcucacgcagcugaacuucaaguaccccgcccugaacgugaccaugcccaacaacgagcaguucgacaagcucuacaucuggggcguccaccaccccgugaccgacaaggaccagaucuuccuguacgcgcaggccuccgggcggaucaccgugagcacgaagcgcucccagcagaccgucaucccgaacaucgggagccggccccgcgugcggaacauccccagccgcaucuccaucuacuggaccaucgugaagcccggcgacauccugcucaucaacagcaccggcaaccugaucgccccgcggggguacuucaagaugcaguccggcaagagcuccaucaugcgcagcgacgcccccaucgggaagugcaacuccgagugcaucacgcccaacggcagcauccccaacgacaagccguuccagaacgucaaccggaucaccuacggcgccugcccccgcuacgugaagcagaacacccugaagcucgcgaccgggaugcggaacgugcccgagaagcagacgcgcggcaucuucggggccaucgccggcuucaucgagaacgggugggagggcauggucgacggcugguacggguuccggcaccagaacuccgagggccgcgggcaggccgccgaccucaagagcacccaggcggccaucgaccagaucaacggcaagcugaaccggcugaucgggaagaccaacgagaaguuccaccagaucgagaaggaguucuccgagguggagggccgcauccaggaccuggagaaguacguggaggacaccaagaucgaccuguggagcuacaacgccgagcuccuggucgcccuggagaaccagcacacgaucgaccucaccgacuccgagaugaacaagcuguucgagaagaccaagaagcagcugcgggagaacgccgaggacaugggcaacgggugcuucaagaucuaccacaagugcgacaacgcgugcaucggcagcauccgcaacgggaccuacgaccacaacguguaccgcgacgaggcccucaacaaccgguuccagaucaagggcguggagcugaaguccggguacaaggacuggauccuguggaucagcuucgccaucuccugcuuccuccugugcgucgcccugcucggcuucaucaugugggccugccagaagggcaacauccgcugcaacaucugcaucuga

SEQ ID NO: 73179 - RNA, 1701 nt, Artificial Sequence
  derived and/or modified CDS sequence (opt1) from hemagglutinin__InfluenzaA__AFM72916
augaagaccaucaucgcccugagcuacauccucugccugguguucgcccagaagauccccggcaacgacaacuccaccgcgacgcugugccucgggcaccacgccgucccgaacggcaccaucgugaagaccaucaccaacgaccagaucgaggugacgaacgccaccgagcugguccagagcuccagcaccggggagaucugcgacagcccccaccagauccuggacggcaagaacugcacccucaucgacgcccugcugggggacccccagugcgacggcuuccagaacaagaagugggaccucuucguggagcgcagcaaggccuacuccaacugcuaccccuacgacgugccggacuacgcgagccugcggucccuggucgccagcuccggcacgcucgaguucaacaacgagagcuucaacuggaccggggugacccagaacggcaccuccagcgccugcauccgccgguccaagaacagcuucuucucccgccugaacuggcugacgcaccucaacuucaaguaccccgcccugaacgugaccaugcccaacaacgagcaguucgacaagcuguacaucuggggcguccaccaccccgggaccgacaaggaccagaucuucccguacgcgcaggccagcgggcggaucaccguguccacgaagcgcagccagcagaccgccauccccaacaucggcagccggccccgcgugcggaacauccccucccgcaucagcaucuacuggaccaucgucaagccgggcgacauccuccugaucaacuccaccgggaaccugaucgcgccccggggcuacuucaagauccgcagcgggaaguccagcaucaugcgguccgacgcccccaucggcaagugcaacagcggcugcaucacgcccaacggguccaucccgaacgacaagcccuuccagaacgugaaccgcaucaccuacggcgccugcccccgguacgugaagcagaacacccucaagcuggccaccgggaugcgcaacguccccgagaagcagacgcggggcaucuucggggccaucgccggcuucaucgagaacggcugggaggggaugguggacggcugguacggguuccgccaccagaacagcgagggccgggggcaggccgcggaccugaaguccacccaggccgccaucgaccagaucaacggcaagcucaaccgccugaucggcaagaccaacgagaaguuccaccagaucgagaaggaguucagcgagguggaggggcggauccaggaccuggagaaguacgucgaggacaccaagaucgaccucugguccuacaacgccgagcugcugguggcccucgagaaccagcacacgaucgaccugaccgacagcgagaugaacaagcuguucgagaagaccaagaagcagcuccgcgagaacgcggaggacaugggcaacgggugcuucaagaucuaccacaagugcgacaacgccugcaucggcuccauccgcaacgggaccuacgaccacgacguguaccgggacgaggcccugaacaaccgcuuccagaucaagggcgucgagcugaaguccggcuacaaggacugguuccucuggaucuccuucgccaucagcugcuuccugcugugcguggcccuccugggguucaucaugugggcgugccagaagggcaacauccggugcaacaucugcaucuga

SEQ ID NO: 73180 - RNA, 1701 nt, Artificial Sequence
  derived and/or modified CDS sequence (opt1) from hemagglutinin__InfluenzaA__AFM72927
augaagaccaucaucgcccugagcuacauccucugccugguguucgcccagaagcugcccggcaacgacaacuccaccgcgacgcucugccuggggcaccacgccgucccgaacggcaccaucgugaagaccaucaccaacgaccagaucgaggugacgaacgccaccgagcugguccagagcuccagcaccggggagaucugcgacagcccccaccagauccucgacggcgagaacugcacccugaucgacgcccugcucggggacccccagugcgacggcuuccagaacaagaagugggaccuguucguggagcgcagcaaggccuacuccaacugcuaccccuacgacgugccggacuacgcgagccugcggucccucgucgccagcuccggcacgcuggaguucaacaacgagagcuucaacuggaccggggugacccagaacggcaccuccagcgccugcauccgccgguccaacaacagcuucuucucccgccugaacuggcucacgcaccugaaguucaaguaccccgcccugaacgugaccaugcccaacaacgagcaguucgacaagcucuacaucuggggcguccaccaccccgggaccgacaacgaccagaccagccuguacgcgcaggccuccgggcggaucacggugagcaccaagcgcagccagcagaccgugaucccgaacaucggcucccggccccgcguccggaacauccccagccgcaucuccaucuacuggaccaucgugaagcccggcgacauccugcucaucaacagcaucgggaaccugaucgccccgcggggcuacuucaagauccgcuccgggaaguccuccaucaugcggagcgacgcccccaucggcaagugcaacuccgagugcaucacgcccaacggcagcauccccaacgacaagccguuccagaacgugaaccgcaucaccuacggggccugcccccgguacgucaagcagaacacccugaagcucgcgaccggcaugcgcaacgugcccgagaagcagacgcgggggaucuucggcgccaucgccggguucaucgagaacggcugggagggcaugguggacgggugguacggcuuccgccaccagaacuccgaggggcggggccaggccgccgaccucaagagcacccaggcggccaucgaccagaucaacgggaagcugaaccgccugaucggcaagaccaacgagaaguuccaccagaucgagaaggaguucuccgaggucgagggccggauccaggaccuggagaaguacguggaggacaccaagaucgaccuguggagcuacaacgccgagcuccugguggcccuggagaaccagcacacgaucgaccucaccgacuccgagaugaacaagcuguucgagaagaccaagaagcagcugcgcgagaacgccgaggacauggggaacggcugcuucaagaucuaccacaagugcgacaacgcgugcaucgggagcauccgcaacggcaccuacgaccacaacgucuaccgggacgaggcccucaacaaccgcuuccagaucaaggggguggagcugaaguccggcuacaaggacuggauccuguggaucagcuucgccaucuccugcuuccuccugugcguggcccugcucggcuucaucaugugggccugccagaaggggaacauccggugcaacaucugcaucuga

SEQ ID NO: 73181 - RNA, 1701 nt, Artificial Sequence
  derived and/or modified CDS sequence (opt1) from hemagglutinin__InfluenzaA__AFM72938
augaagaccaucaucgcccugagcuacauccucugccugguguucgcccagaagcugcccggcaacgacaacuccaccgcgacgcucugccuggggcaccacgccgucccgaacggcaccaucgugaagaccaucaccaacgaccagaucgaggugacgaacgccaccgagcugguccagagcuccagcaccggggagaucugcgacagcccccaccagauccucgacggcgagaacugcacccugaucgacgcccugcucggggacccccagugcgacggcuuccagaacaagaagugggaccuguucguggagcgcagcaaggccuacuccaacugcuaccccuacgacgugccggacuacgcgagccugcggucccucgucgccagcuccggcacgcuggaguucaacaacgagagcuucaacuggaccggggugacccagaacggcaccuccagcgccugcauccgccgguccaacaacagcuucuucucccgccugaacuggcucacgcaccugaaguucaaguaccccgcccugaacgugaccaugcccaacaacgagcaguucgacaagcucuacaucuggggcguccaccaccccgggaccgacaacgaccagaccagccuguacgcgcaggccuccgggcggaucacggugagcaccaagcgcagccagcagaccgugaucccgaacaucggcucccggccccgcguccggaacaaccccagccgcaucuccaucuacuggaccaucgugaagcccggcgacauccugcucaucaacagcaucgggaaccugaucgccccgcggggcuacuucaagauccgcuccgggaaguccuccaucaugcggagcgacgcccccaucggcaagugcaacuccgagugcaucacgcccaacggcagcauccccaacgacaagccguuccagaacgugaaccgcaucaccuacggggccugcccccgguacgucaagcagaacacccugaagcucgcgaccggcaugcgcaacgugcccgagaagcagacgcgggggaucuucggcgccaucgccggguucaucgagaacggcugggagggcaugguggacgggugguacggcuuccgccaccagaacuccgaggggcggggccaggccgccgaccucaagagcacccaggcggccaucgaccagaucaacgggaagcugaaccgccugaucggcaagaccaacgagaaguuccaccagaucgagaaggaguucuccgaggucgagggccggauccaggaccuggagaaguacguggaggacaccaagaucgaccuguggagcuacaacgccgagcuccugguggcccuggagaaccagcacacgaucgaccucaccgacuccgagaugaacaagcuguucgagaagaccaagaagcagcugcgcgagaacgccgaggacauggggaacggcugcuucaagaucuaccacaagugcgacaacgcgugcaucgggagcauccgcaacggcaccuacgaccacaacgucuaccgggacgaggcccucaacaaccgcuuccagaucaaggggguggagcugaaguccggcuacaaggacuggauccuguggaucagcuucgccaucuccugcuuccuccugugcguggcccugcucggcuucaucaugugggccugccagaaggggaacauccggugcaacaucugcaucuga

SEQ ID NO: 73182 - RNA, 1701 nt, Artificial Sequence
  derived and/or modified CDS sequence (opt1) from hemagglutinin__InfluenzaA__AFM72949
augaagaccaucaucgcccugagcuacauccucugccugguguucgcccagaagcugcccggcaacgacaacuccaccgcgacgcucugccuggggcaccacgccgucccgaacggcaccaucgugaagaccaucaccaacgaccagaucgaggugacgaacgccaccgagcugguccagagcuccagcaccggggagaucugcgacagcccccaccagauccucgacggcgagaacugcacccugaucgacgcccugcucggggacccccagugcgacggcuuccagaacaagaagugggaccuguucguggagcgcagcaaggccuacuccaacugcuaccccuacgacgugccggacuacgcgagccugcggucccucgucgccagcuccggcacgcuggaguucaacaacgagagcuucaacuggaccggggugacccagaacggcaccuccagcgccugcauccgccgguccaacaacagcuucuucucccgccugaacuggcucacgcagcugaaguucaaguaccccgcccugaacgugaccaugcccaacaacgagcaguucgacaagcucuacaucuggggcguccaccaccccgggaccgacaacgaccagaccagccuguacgcgcaggccuccgggcggaucacggugagcaccaagcgcagccagcagaccgugaucccgaacaucggcucccggccccgcguccggaacaaccccagccgcaucuccaucuacuggaccaucgugaagcccggcgacauccugcucaucaacagcaucgggaaccugaucgccccgcggggcuacuucaagauccgcuccgggaaguccuccaucaugcggagcgacgcccccaucggcaagugcaacuccgagugcaucacgcccaacggcagcauccccaacgacaagccguuccagaacgugaaccgcaucaccuacggggccugcccccgguacgucaagcagaacacccugaagcucgcgaccggcaugcgcaacgugcccgagaagcagacgcgggggaucuucggcgccaucgccggguucaucgagaacggcugggagggcaugguggacgggugguacggcuuccgccaccagaacuccgaggggcggggccaggccgccgaccucaagagcacccaggcggccaucgaccagaucaacgggaagcugaaccgccugaucggcaagaccaacgagaaguuccaccagaucgagaaggaguucuccgaggucgagggccggauccaggaccuggagaaguacguggaggacaccaagaucgaccuguggagcuacaacgccgagcuccugguggcccuggagaaccagcacacgaucgaccucaccgacuccgagaugaacaagcuguucgagaagaccaagaagcagcugcgcgagaacgccgaggacauggggaacggcugcuucaagaucuaccacaagugcgacaacgcgugcaucgggagcauccgcaacggcaccuacgaccacaacgucuaccgggacgaggcccucaacaaccgcuuccagaucaaggggguggagcugaaguccggcuacaaggacuggauccuguggaucagcuucgccaucuccugcuuccuccugugcguggcccugcucggcuucaucaugugggccugccagaaggggaacauccggugcaacaucugcaucuga

SEQ ID NO: 73183 - RNA, 1701 nt, Artificial Sequence
  derived and/or modified CDS sequence (opt1) from hemagglutinin__InfluenzaA__AFM72960
augaagaccaucaucgcccugagcuacauccucugccugguguucgcccagaagcugcccggcaacgacaacuccaccgcgacgcucugccuggggcaccacgccgucccgaacggcaccaucgugaagaccaucaccaacgaccagaucgaggugacgaacgccaccgagcugguccagagcuccagcaccggggagaucugcgacagcccccaccagauccucgacggcgagaacugcacccugaucgacgcccugcucggggacccccagugcgacggcuuccagaacaagaagugggaccuguucguggagcgcagcaaggccuacuccaacugcuaccccuacgacgugccggacuacgcgagccugcggucccucgucgccagcuccggcacgcuggaguucaacaacgagagcuucaaguggaccggggugacccagaacggcaccuccagcgccugcauccgccgguccaacaacagcuucuucucccgccugaacuggcucacgcaccugaaguucaaguaccccgcccugaacgugaccaugcccaacaacgagcaguucgacaagcucuacaucuggggcguccaccaccccgggaccgacaacgaccagaccagccuguacgcgcaggccuccgggcggaucacggugagcaccaagcgcagccagcagaccgugaucccgaacaucggcucccggccccgcguccggaacauccccagccgcaucuccaucuacuggaccaucgugaagcccggcgacauccugcucaucaacagcaucgggaaccugaucgccccgcggggcuacuucaagauccgcuccgggaaguccuccaucaugcggagcgacgcccccaucggcaagugcaacuccgagugcaucacgcccaacggcagcauccccaacgacaagccguuccagaacgugaaccgcaucaccuacggggccugcccccgguacgucaagcagaacacccugaagcucgcgaccggcaugcgcaacgugcccgagaagcagacgcgggggaucuucggcgccaucgccggguucaucgagaacggcugggagggcaugguggacgggugguacggcuuccgccaccagaacuccgaggggcggggccaggccgccgaccucaagagcacccaggcggccaucgaccagaucaacgggaagcugaaccgccugaucggcaagaccaacgagaaguuccaccagaucgagaaggaguucuccgaggucgagggccggauccaggaccuggagaaguacguggaggacaccaagaucgaccuguggagcuacaacgccgagcuccugguggcccuggagaaccagcacacgaucgaccucaccgacuccgagaugaacaagcuguucgagaagaccaagaagcagcugcgcgagaacgccgaggacauggggaacggcugcuucaagaucuaccacaagugcgacaacgcgugcaucgggagcauccgcaacggcaccuacgaccacaacgucuaccgggacgaggcccucaacaaccgcuuccagaucaaggggguggagcugaaguccggcuacaaggacuggauccuguggaucagcuucgccaucuccugcuuccuccugugcguggcccugcucggcuucaucaugugggccugccagaaggggaacauccggugcaacaucugcaucuga

SEQ ID NO: 73184 - RNA, 1701 nt, Artificial Sequence
  derived and/or modified CDS sequence (opt1) from hemagglutinin__InfluenzaA__AFM72971
augaagaccaucaucgcccugagcuacauccucugccugguguucgcccagaagcugcccggcaacgacaacuccaccgcgacgcucugccuggggcaccacgccgucccgaacggcaccaucgugaagaccaucaccaacgaccagaucgaggugacgaacgccaccgagcugguccagagcuccagcaccggggagaucugcgacagcccccaccagauccucgacggcgagaacugcacccugaucgacgcccugcucggggacccccagugcgacggcuuccagaacaagaagugggaccuguucguggagcgcagcaaggccuacuccaacugcuaccccuacgacgugccggacuacgcgagccugcggucccucgucgccagcuccggcacgcuggaguucaacaacgagagcuucaaguggaccggggugacccagaacggcaccuccagcgccugcauccgccgguccaacaacagcuucuucucccgccugaacuggcucacgcagcugaacuucaaguaccccgcccugaacgugaccaugcccaacaacgagcaguucgacaagcucuacaucuggggcguccaccaccccgggaccgacaacgaccagaccagccuguacgcgcaggccuccgggcggaucacggugagcaccaagcgcagccagcagaccgugaucccgaacaucggcucccggccccgcguccggaacauccccagccgcaucuccaucuacuggaccaucgugaagcccggcgacauccugcucaucaacagcaucgggaaccugaucgccccgcggggcuacuucaagauccgcuccgggaaguccuccaucaugcggagcgacgcccccaucggcaagugcaacuccgagugcaucacgcccaacggcagcauccccaacgacaagccguuccagaacgugaaccgcaucaccuacggggccugcccccgguacgucaagcagaacacccugaagcucgcgaccggcaugcgcaacgugcccgagaagcagacgcgggggaucuucggcgccaucgccggguucaucgagaacggcugggagggcaugguggacgggugguacggcuuccgccaccagaacuccgaggggcggggccaggccgccgaccucaagagcacccaggcggccaucgaccagaucaacgggaagcugaaccgccugaucggcaagaccaacgagaaguuccaccagaucgagaaggaguucuccgaggucgagggccggauccaggaccuggagaaguacguggaggacaccaagaucgaccuguggagcuacaacgccgagcuccugguggcccuggagaaccagcacacgaucgaccucaccgacuccgagaugaacaagcuguucgagaagaccaagaagcagcugcgcgagaacgccgaggacauggggaacggcugcuucaagaucuaccacaagugcgacaacgcgugcaucgggagcauccgcaacggcaccuacgaccacaacgucuaccgggacgaggcccucaacaaccgcuuccagaucaaggggguggagcugaaguccggcuacaaggacuggauccuguggaucagcuucgccaucuccugcuuccuccugugcguggcccugcucggcuucaucaugugggccugccagaaggggaacauccggugcaacaucugcaucuga

SEQ ID NO: 73185 - RNA, 1701 nt, Artificial Sequence
  derived and/or modified CDS sequence (opt1) from hemagglutinin__InfluenzaA__AFM72982
augaagaccaucaucgcccugagcuacauccucugccugguguucgcccagaagcugcccggcaacgacaacuccaccgcgacgcucugccuggggcaccacgccgucccgaacggcaccaucgugaagaccaucaccaacgaccagaucgaggugacgaacgccaccgagcugguccagagcuccagcaccggggagaucugcgacagcccccaccagauccucgacggcgagaacugcacccugaucgacgcccugcucggggacccccagugcgacggcuuccagaacaagaagugggaccuguucguggagcgcagcaaggccuacuccaacugcuaccccuacgacgugccggacuacgcgagccugcggucccucgucgccagcuccggcacgcuggaguucaacagcgaguccuucaacuggaccggggugacccagaacggcaccagcuccgccugcauccgccggagcaacaacuccuucuucagccgccugaacuggcucacgcaccugaacuucaaguaccccgcccugaacgugaccaugcccaacaacgagcaguucgacaagcucuacaucuggggcguccaccaccccgggaccgacaaggaccagaucuucccguacgcgcaggccuccgggcggaucaccgugagcacgaagcgcagccagcaggccgugauccccaacaucggcucccggccccgcguccggaacauccccagccgcaucuccaucuacuggaccaucgugaagccgggcgacauccugcugaucaacagcaccgggaaccucaucgcgccccggggcuacuucaagauccgcuccgggaaguccuccaucaugcggagcgacgcccccaucggcaagugcaacuccgagugcaucacccccaacggcagcaucccgaacgacaagcccuuccagaacgugaaccgcaucacguacggggccugcccccgguacaucaagcaguccacccugaagcuggccaccggcaugcgcaacguccccgagaagcagacccgggggaucuucggcgccaucgccggguucaucgagaacggcugggagggcaugguggacgggugguacggcuuccgccaccagaacagcgaggggcggggccaggccgcggaccucaaguccacgcaggccgccaucgaccagaucaacgggaagcugaaccgccugaucggcaagaccaacgagaaguuccaccagaucgagaaggaguucagcgagguggagggccggauccaggaccucgagaaguacgucgaggacaccaagaucgaccugugguccuacaacgccgagcugcucguggcccuggagaaccagcacaccaucgaccugacggacagcgagaugaacaagcuguucgagaagaccaagaagcagcuccgcgagaacgcggaggacauggggaacggcugcuucaagaucuaccacaagugcgacaacgccugcaucggguccauccgcaacggcaccuacgaccacgacguguaccgggacgaggcccugaacaaccgcuuccagaucaagggggucgagcucaagagcggcuacaaggacuggauccuguggaucucccuggccaucagcugcuuccuccugugcguggcccugcucggcuucaucaugugggcgugccagaaggggaacauccggugcaacaucugcaucuga

SEQ ID NO: 73186 - RNA, 1701 nt, Artificial Sequence
  derived and/or modified CDS sequence (opt1) from hemagglutinin__InfluenzaA__AFM72993
augaagaccaucaucgcccugagcuacauccucugccugguguucgcccagaagcugcccggcaacgacaacuccaccgcgacgcucugccuggggcaccacgccgucccgaacggcaccaucgugaagaccaucaccaacgaccagaucgaggugacgaacgccaccgagcugguccagagcuccagcgccggggagaucugcgacagcccccaccagauccucgacggcgagaacugcacccugaucgacgcccugcucggggacccccagugcgacggcuuccagaacaagaagugggaccuguucguggagcgcagccgggcguacuccaacugcuaccccuacgacgugccggacuacgccagccugcgcucccucgucgccagcuccggcacccuggaguucaacaacgagagcuucaacuggacgggggugacccagaacggcaccuccagcgccugcauccggcgcuccaacaacagcuucuucucccggcugaacuggcucacccaccugaacuucaaguaccccgcgcugaacgugacgaugcccaacaacgagcaguucgacaagcucuacaucuggggcguccugcaccccgggaccuacaaggaccagaucuuccuguacgcccaggccagcgggcgcaucaccguguccaccaagcggagccagcaggccgugaucccgaacaucggcagccgcccccggguccgcaacauccccucccggaucagcaucuacuggacgaucgugaagcccggcgacauccuccugaucaacuccaccgggaaccugaucgccccgcgcggcuacuucaagauccggagcgggaaguccagcaucaugcgcuccgacgcgcccaucggcaagugcaacagcgagugcaucacccccaacggcuccauccccaacgacaagccguuccagaacgugaaccggaucaccuacggggccugcccccgcuacgucaagcagagcacgcucaagcuggccaccggcaugcggaacgugcccgagaagcagacccgcgggaucuucggcgccaucgccggguucaucgagaacggcugggagggcaugguggacgggugguacggcuuccggcaccagaacuccgaggggcgcggccaggcggccgaccugaaguccacccaggccgccaucgaccagaucaacgggaagcucaaccggcugaucggcaagacgaacgagaaguuccaccagaucgagaaggaguucuccgaggucgagggccgcauccaggaccuggagaaguacguggaggacaccaagaucgaccucuggagcuacaacgccgagcugcugguggcgcucgagaaccagcacaccaucgaccugaccgacuccgagaugaacaagcuguucgagaagacgaagaagcagcuccgcgagaacgccgaggacauggggaacggcugcuucaagaucuaccacaagugcgacaacgccugcaucgggagcauccggaacggcaccuacgaccacgacgucuaccgcgacgaggcccugaacaaccgguuccagaucaaggggguggagcugaaguccggcuacaaggacuggauccucuggaucagcuucgccaucuccugcuuccugcugugcguggcgcuccugggcuucaucaugugggccugccagaaggggaacauccgcugcaacaucugcaucuga

SEQ ID NO: 73187 - RNA, 1701 nt, Artificial Sequence
  derived and/or modified CDS sequence (opt1) from hemagglutinin__InfluenzaA__AFM73004
augaagaccaucaucgcccugagcuacauccucugccugguguucgcccagaagcugcccggcaacgacaacuccaccgcgacgcucugccuggggcaccacgccgucccgaacggcaccaucgugaagaccaucaccaacgaccagaucgaggugacgaacgccaccgagcugguccagagcuccagcgccggggagaucugcgacagcccccaccagauccucgacggcgagaacugcacccugaucgacgcccugcucggggacccccagugcgacggcuuccagaacaagaagugggaccuguucguggagcgcagccgggcguacuccaacugcuaccccuacgacgugccggacuacgccagccugcgcucccucgucgccagcuccggcacccuggaguucaacaacgagagcuucaacuggacgggggugacccagaacggcaccuccagcgccugcauccggcgcuccaacaacagcuucuucucccggcugaacuggcucacccaccugaacuucaaguaccccgcgcugaacgugacgaugcccaacaacgagcaguucgacaagcucuacaucuggggcguccugcaccccgggaccuacaaggaccagaucuuccuguacgcccaggccagcgggcgcgugaccguguccaccaagcggagccagcaggccgucaucccgaacaucggcagccgcccccgggugcgcaacauccccucccggaucagcaucuacuggacgaucgugaagcccggcgacauccuccugaucaacuccaccgggaaccugaucgccccgcgcggcuacuucaagauccggagcgggaaguccagcaucaugcgcuccgacgcgcccaucggcaagugcaacagcgagugcaucacccccaacggcuccauccccaacgacaagccguuccagaacgucaaccggaucaccuacggggccugcccccgcuacgugaagcagagcacgcucaagcuggccaccggcaugcggaacgugcccgagaagcagacccgcgggaucuucggcgccaucgccggguucaucgagaacggcugggagggcauggucgacgggugguacggcuuccggcaccagaacuccgaggggcgcggccaggcggccgaccugaaguccacccaggccgccaucgaccagaucaacgggaagcucaaccggcugaucggcaagacgaacgagaaguuccaccagaucgagaaggaguucuccgagguggagggccgcauccaggaccuggagaaguacguggaggacaccaagaucgaccucuggagcuacaacgccgagcugcuggucgcgcucgagaaccagcacaccaucgaccugaccgacuccgagaugaacaagcuguucgagaagacgaagaagcagcuccgcgagaacgccgaggacauggggaacggcugcuucaagaucuaccacaagugcgacaacgccugcaucgggagcauccggaacggcaccuacgaccacgacguguaccgcgacgaggcccugaacaaccgguuccagaucaaggggguggagcugaaguccggcuacaaggacuggauccucuggaucagcuucgccaucuccugcuucuuccugugcgucgcgcugcucggcuucaucaugugggccugccagaaggggaacauccgcugcaacaucugcaucuga

SEQ ID NO: 73188 - RNA, 1701 nt, Artificial Sequence
  derived and/or modified CDS sequence (opt1) from hemagglutinin__InfluenzaA__AFM73015
augaaggccauccuggugguccuccuguacaccuucgccaccgcgaacgccgacacgcugugcaucggcuaccacgccaacaacagcaccgacaccguggacaccgugcucgagaagaacgucacggugacccacuccgugaaccugcuggaggacaagcacaacgggaagcucugcaagcugcgcggcgucgcgccccugcaccucgggaagugcaacaucgccggcuggauccuggggaacccggagugcgagagccuguccaccgccagcuccuggagcuacaucguggagaccuccagcuccgacaacggcacgugcuaccccggcgacuucaucgacuacgaggagcuccgggagcagcugagcuccgugagcuccuucgagcgcuucgagaucuuccccaagaccagcuccuggcccaaccacgacagcaacaagggggucaccgccgccugcccgcacgccggcgcgaagggguucuacaagaaccugaucuggcucgugaagaagggcaacuccuaccccaagcugagcaaguccuacaucaacgacaaggggaaggaggugcugguccucuggggcauccaccaccccagcaccacggccgaccagcagagccuguaccagaacgccgacaccuacguguucgugggcaccucccgguacagcaagaaguucaagcccgagaucgccauccgcccgaagguccgggaccgcgaggggcggaugaacuacuacuggacccugguggagcccggcgacaagaucacguucgaggccaccgggaaccucguggucccccgcuacgcguucgccauggagcggaacgccggcuccggcaucaucaucagcgacacccccgugcacgacugcaacaccacgugccagaccccgaagggggccaucaacaccucccugcccuuccagaacauccaccccaucaccaucggcaagugccccaaguacgucaagagcacgaagcugcgccucgccaccgggcugcggaacgugccguccauccagagccgcggccuguucggggcgaucgccggcuucaucgagggcggguggaccggcaugguggacgggugguacggcuaccaccaccagaacgagcagggguccggcuacgccgccgaccucaagagcacccagaacgccaucgacaagaucacgaacaaggugaacuccgucaucgagaagaugaacacccaguucaccgcggugggcaaggaguucaaccaccuggagaagcggaucgagaaccugaacaagaaggucgacgacggguuccucgacaucuggaccuacaacgccgagcugcuggugcuccuggagaacgagcgcacgcuggacuaccacgacagcaacgugaagaaccucuacgagaagguccggaaccagcugaagaacaacgccaaggagaucggcaacgggugcuucgaguucuaccacaagugcgacaacacgugcauggaguccgugaagaacggcaccuacgacuaccccaaguacagcgaggaggccaagcugaaccgcgaggagaucgacggggugaagcucgaguccacccggaucuaccagauccuggccaucuacagcaccgucgcguccagccuggugcucguggucucccugggcgccaucagcuucuggaugugcagcaacggcucccugcagugccgcaucugcaucuga

SEQ ID NO: 73189 - RNA, 1701 nt, Artificial Sequence
  derived and/or modified CDS sequence (opt1) from hemagglutinin__InfluenzaA__AFM73025
augaaggccauccuggugguccuccuguacaccuucgccaccgcgaacgccgacacgcugugcaucggcuaccacgccaacaacagcaccgacaccguggacaccgugcucgagaagaacgucacggugacccacuccgugaaccugcuggaggacaagcacaacgggaagcucugcaagcugcgcggcgucgcgccccugcaccucgggaagugcaacaucgccggcuggauccuggggaacccggagugcgagagccuguccaccgccagcuccuggagcuacaucguggagaccuccagcuccgacaacggcacgugcuaccccggcgacuucaucgacuacgaggagcuccgggagcagcugagcuccgugagcuccuucgagcgcuucgagaucuuccccaagaccagcuccuggcccaaccacgacagcaacaagggggucaccgccgccugcccgcacgccggcgcgaagggguucuacaagaaccugaucuggcucgugaagaagggcaacuccuaccccaagcugagcaaguccuacaucaacgacaaggggaaggaggugcugguccucuggggcauccaccaccccagcaccacggacgaccagcagagccuguaccagaacgccgacaccuacguguucgugggcaccucccgguacagcaagaaguucaagcccgagaucgccauccgcccgaagguccgggaccgcgaggggcggaugaacuacuacuggacccugguggagcccggcgacaagaucacguucgaggccaccgggaaccucguggucccccgcuacgccuucgcgauggagcggaacgccggcuccggcaucaucaucagcgacacccccgugcacgacugcaacaccacgugccagaccccgaagggggccaucaacaccucccugcccuuccagaacauccaccccaucaccaucggcaagugccccaaguacgucaagagcacgaagcugcgccucgccaccgggcugcggaacgugccguccauccagagccgcggccuguucggggccaucgcgggcuucaucgagggcggguggaccggcaugguggacgggugguacggcuaccaccaccagaacgagcagggguccggcuacgccgccgaccucaagagcacccagaacgccaucgacaagaucacgaacaaggugaacuccgucaucgagaagaugaacacccaguucaccgccgugggcaaggaguucaaccaccuggagaagcggaucgagaaccugaacaagaaggucgacgacggguuccucgacaucuggaccuacaacgcggagcugcuggugcuccuggagaacgagcgcacgcuggacuaccacgacagcaacgugaagaaccucuacgagaagguccggaaccagcugaagaacaacgccaaggagaucggcaacgggugcuucgaguucuaccacaagugcgacaacacgugcauggaguccgugaagaacggcaccuacgacuaccccaaguacagcgaggaggccaagcugaaccgcgaggagaucgacggggugaagcucgaguccacccggaucuaccagauccuggccaucuacagcaccgucgccuccagccuggugcucguggucucccugggcgcgaucagcuucuggaugugcagcaacggcucccugcagugccgcaucugcaucuga

SEQ ID NO: 73190 - RNA, 1701 nt, Artificial Sequence; identical to SEQ ID NO: 73189
  derived and/or modified CDS sequence (opt1) from hemagglutinin__InfluenzaA__AFM73035

SEQ ID NO: 73191 - RNA, 1701 nt, Artificial Sequence
  derived and/or modified CDS sequence (opt1) from hemagglutinin__InfluenzaA__AFM73045
augaaggccauccuggugguccuccuguacaccuucgccaccgcgaacgccgacacgcugugcaucggcuaccacgccaacaacagcaccgacaccguggacaccgugcucgagcgcaacgucacggugacccacuccgugaaccugcuggaggacaagcacaacgggaagcucugcaagcugcggggcgucgcgccccugcaccucgggaagugcaacaucgccggcuggauccuggggaacccggagugcgagagccuguccaccgccagcuccuggagcuacaucguggagaccuccagcuccgacaacggcacgugcuaccccggcgacuucaucgacuacgaggagcuccgcgagcagcugagcuccgugagcuccuucgagcgguucgagaucuuccccaagaccagcuccuggcccaaccacgagagcaacaagggggucaccgccgccugcccgcacgccggcgcgaaguccuucuacaagaaccugaucuggcucgugaagaaggggaacagcuaccccaagcuguccaagagcuacaucaacgacaagggcaaggaggugcugguccucugggggauccaccaccccagcaccuccgccgaccagcagagccuguaccagaacgccgacgccuacguguucgugggcacgucccgcuacagcaagaaguucaagcccgagaucgccauccggccgaagguccgcgaccaggagggccggaugaacuacuacuggacccugguggagcccggggacaagaucaccuucgaggcgaccggcaaccucguggucccccgcuacgccuucgccauggagcggaacgccggguccggcaucaucaucagcgacacgcccgugcacgacugcaacacgaccugccagaccccgaagggcgccaucaacaccucccugcccuuccagaacauccaccccaucaccaucgggaagugccccaaguacgucaagagcaccaagcugcgccucgcgaccggccugcggaacgugccguccauccagagccgcgggcuguucggcgccaucgccggguucaucgagggcggcuggacggggaugguggacggcugguacggguaccaccaccagaacgagcagggcuccggguacgccgccgaccucaagagcacccagaacgcgaucgacgagaucaccaacaaggugaacuccgucaucgagaagaugaacacccaguucacggccgugggcaaggaguucaaccaccuggagaagcggaucgagaaccugaacaagaaggucgacgacggcuuccucgacaucuggaccuacaacgccgagcugcuggugcuccuggagaacgagcgcacccuggacuaccacgacagcaacgugaagaaccucuacgagaagguccggucccagcugaagaacaacgccaaggagaucgggaacggcugcuucgaguucuaccacaagugcgacaacacgugcauggagagcgugaagaacgggaccuacgacuaccccaaguacuccgaggaggccaagcugaaccgcgaggagaucgacggcgugaagcucgagagcacccggaucuaccagauccuggcgaucuacuccaccgucgccagcagccuggugcucguggucucccugggggccaucagcuucuggaugugcuccaacggcagccugcagugccgcaucugcaucuga

SEQ ID NO: 73192 - RNA, 1701 nt, Artificial Sequence
  derived and/or modified CDS sequence (opt1) from hemagglutinin__InfluenzaA__AFM73055
augaaggccauccuggugguccuccuguacaccuucgccaccgcgaacgccgacacgcugugcaucggcuaccacgccaacaacagcaccgacaccguggacaccgugcucgagcgcaacgucacggugacccacuccgugaaccugcuggaggacaagcacaacgggaagcucugcaagcugcggggcgucgcgccccugcaccucgggaagugcaacaucgccggcuggauccuggggaacccggagugcgagagccuguccaccgccagcuccuggagcuacaucguggagaccuccagcuccgacaacggcacgugcuaccccggcgacuucaucgacuacgaggagcuccgcgagcagcugagcuccgugagcuccuucgagcgguucgagaucuuccccaagaccagcuccuggcccaaccacgacagcaacaagggggucaccgccgccugcccgcacgccggcgcgaaguccuucuacaagaaccugaucuggcucguggagaaggggaacagcuaccccaagcuguccaagagcuacaucaacgacaagggcaaggaggugcugguccucugggggauccaccaccccagcaccuccgccgaccagcagagccuguaccagaacgccgacgccuacguguucgugggcacgucccgcuacagcaagaaguucaagcccgagaucgccauccggccgaagguccgcgaccgggagggccgcaugaacuacuacuggacccugguggagcccggggacaagaucaccuucgaggcgaccggcaaccucguggucccccgguacgccuucgccauggagcgcaacgccggguccggcaucaucaucagcgacacgcccgugcacgacugcaacacgaccugccagaccccgaagggcgccaucaacaccucccugcccuuccagaacauccaccccaucaccaucgggaagugccccaaguacgucaagagcaccaagcugcggcucgcgaccggccugcgcaacgugccguccauccagagccgggggcuguucggcgccaucgccggguucaucgagggcggcuggacggggaugguggacggcugguacggguaccaccaccagaacgagcagggcuccggguacgccgccgaccucaagagcacccagaacgcgaucgacgagaucaccaacaaggugaacuccgucaucgagaagaugaacacccaguucacggccgugggcaaggaguucaaccaccuggagaagcgcaucgagaaccugaacaagaaggucgacgacggcuuccucgacaucuggaccuacaacgccgagcugcuggugcuccuggagaacgagcggacccuggacuaccacgacagcaacgugaagaaccucuacgagaagguccgcucccagcugaagaacaacgccaaggagaucgggaacggcugcuucgaguucuaccacaagugcgacaacacgugcauggagagcgugaagaacgggaccuacgacuaccccaaguacuccgaggaggccaagcugaaccgggaggagaucgacggcgugaagcucgagagcacccgcaucuaccagauccuggcgaucuacuccaccgucgccagcagccuggugcucguggucucccugggggccaucagcuucuggaugugcuccaacggcagccugcagugccggaucugcaucuga

SEQ ID NO: 73193 - RNA, 1701 nt, Artificial Sequence
  derived and/or modified CDS sequence (opt1) from hemagglutinin__InfluenzaA__AFM73065
augaaggccauccuggugguccuccuguacaccuucgccaccgcgaacgccgacacgcugugcaucggcuaccacgccaacaacagcaccgacaccguggacaccgugcucgagcgcaacgucacggugacccacuccgugaaccugcuggaggacaagcacaacgggaagcucugcaagcugcggggcgucgcgccccugcaccucgggaagugcaacaucgccggcuggauccuggggaacccggagugcgagagccuguccaccgccagcuccuggagcuacaucguggagaccuccagcuccgacaacggcacgugcuaccccggcgacuucaucgacuacgaggagcuccgcgagcagcugagcuccgugagcuccuucgagcgguucgagaucuuccccaagaccagcuccuggcccaaccacgacagcaacaagggggucaccgccgccugcccgcacgccggcgcgaaguccuucuacaagaaccugaucuggcucgugaaggaggggaacagcuaccccaagcuguccaagagcuacaucaacgacaagggcaaggaggugcugguccucugggggauccaccaccccagcaccuccgccgaccagcagagccuguaccagaacgccgacgccuacguguucgugggcacgucccgcuacagcaagaaguucaagcccgagaucgccauccggccgaagguccgcgaccgggagggccgcaugaacuacuacuggacccugguggagcccggggacaagaucaccuucgaggcgaccggcaaccucguggucccccgguacgccuucgccauggagcgcaacgccggguccggcaucaucaucagcgacacgcccgugcacgacugcaacacgaccugccagaccccgaagggcgccaucaacaccucccugcccuuccagaacauccaccccaucaccaucgggaagugccccaaguacgucaagagcaccaagcugcggcucgcgaccggccugcgcaacgugccguccauccagagccgggggcuguucggcgccaucgccggguucaucgagggcggcuggacggggaugguggacggcugguacggguaccaccaccagaacgagcagggcuccggguacgccgccgaccucaagagcacccagaacgcgaucgacgagaucaccaacaaggugaacuccgucaucgagaagaugaacacccaguucacggccgugggcaaggaguucaaccaccuggagaagcgcaucgagaaccugaacaagaaggucgacgacggcuuccucgacaucuggaccuacaacgccgagcugcuggugcuccuggagaacgagcggacccuggacuaccacgacagcaacgugaagaaccucuacgagaagguccgcucccagcugaagaacaacgccaaggagaucgggaacggcugcuucgaguucuaccacaagugcgacaacacgugcauggagagcgugaagaacgggaccuacgacuaccccaaguacuccgaggaggccaagcugaaccgggaggagaucgacggcgugaagcucgagagcacccgcaucuaccagauccuggcgaucuacuccaccgucgccagcagccuggugcucguggucucccugggggccaucagcuucuggaugugcuccaacggcagccugcagugccggaucugcaucuga

SEQ ID NO: 73194 - RNA, 1701 nt, Artificial Sequence; identical to SEQ ID NO: 64939
  derived and/or modified CDS sequence (opt1) from hemagglutinin__InfluenzaA__AFM73477

SEQ ID NO: 73195 - RNA, 1707 nt, Artificial Sequence
  derived and/or modified CDS sequence (opt1) from hemagglutinin__InfluenzaA__AFM78567
auggagaagaucgugcugcuccuggccaucgucagccuggugaaguccgaccagaucugcaucggcuaccacgccaacaacagcaccgagcaggucgacaccaucauggagaagaacgugacggugacccacgcgcaggacauccucgagaagacccacaacgggaagcugugcgaccuggacggcgugaagccccucauccugcgcgacugcuccgucgccggguggcugcucggcaacccgaugugcgacgaguucaucaacgugcccgaguggagcuacaucguggagaaggccaaccccaccaacgaccugugcuaccccggguccuucaacgacuacgaggagcugaagcaccuccugagccggaucaaccacuucgagaagauccagaucaucccgaaguccagcugguccgaccacgaggccagcuccggcgucagcuccgccugccccuaccugggcagccccuccuucuuccgcaacgugguguggcucaucaagaagaacagcacguaccccaccaucaagaaguccuacaacaacaccaaccaggaggaccugcugguccucugggggauccaccacccgaacgacgcggccgagcagacccggcuguaccagaaccccacgaccuacaucagcaucggcaccuccacccugaaccagcgccucgugcccaagaucgccacgcggagcaaggugaacgggcagagcggccgcauggaguucuucuggaccauccugaagcccaacgacgccaucaacuucgaguccaacgggaacuucaucgcgccggaguacgccuacaagaucgucaagaagggcgacagcgccaucaugaaguccgagcuggaguacggcaacugcaacaccaagugccagacccccaugggggccaucaacagcuccaugcccuuccacaacauccacccccucacgaucggcgagugcccgaaguacgugaaguccaaccggcuggugcuggccaccgggcuccgcaacagcccccagcgggagagccgccggaagaagcgcggccuguucggcgcgaucgccggguucaucgagggcggguggcagggcauggucgacgggugguacggcuaccaccacuccaacgagcagggcagcggguacgccgccgacaaggaguccacccagaaggccaucgacggcgugaccaacaaggugaacagcaucaucgacaagaugaacacgcaguucgaggcggucgggcgggaguucaacaaccuggagcgccggaucgagaaccucaacaagaagauggaggacggcuuccuggacguguggaccuacaacgccgagcugcucgugcugauggagaacgagcgcacccuggacuuccacgacuccaacgucaagaaccucuacgacaaggugcggcugcagcugcgcgacaacgccaaggagcucgggaacggcugcuucgaguucuaccacaagugcgacaacgagugcauggagagcauccggaacggcaccuacaacuacccccaguacuccgaggaggcccgccugaagcgggaggagaucagcggggucaagcuggaguccaucggcacguaccagauccucagcaucuacuccaccguggccagcagccuggcgcuggccaucaugauggccgggcucucccuguggaugugcagcaacggcucccugcagugccgcaucugcaucuga

SEQ ID NO: 73196 - RNA, 1701 nt, Artificial Sequence
  derived and/or modified CDS sequence (opt1) from hemagglutinin__InfluenzaA__AFM78646
augaaggccauccuggugguccuccuguacaccuucgccaccgcgaacgccgacacgcugugcaucggcuaccacgccaacaacagcaccgacaccguggacaccgugcucgagaagaacgucacggugacccacuccgugaaccugcuggaggacaagcacaacgggaagcucugcaagcugcgcggcgucgcgccccugcaccucgggaagugcaacaucgccggcuggauccuggggaacccggagugcgagagccuguccaccgcgagcuccuggagcuacaucguggagaccuccagcuccgacaacggcacgugcuaccccggcgacuucaucgacuacgaggagcuccgggagcagcugagcuccgugagcuccuucgagcgcuucgagaucuuccccaagaccagcuccuggcccaaccacgacccgaacaagggggucaccgccgccugcccccacgccggcgccaagagcuucuacaagaaccugaucuggcucgugaagaaggggaacuccuaccccaagcugagcaaguccuacaucaacgacaagggcaaggaggugcugguccucugggggauccaccaccccagcaccagcgccgaccagcagggccuguaccagaacgccgacgccuacguguucgugggcacgucccgguacagcaagaaguucaagccggagaucgccauccgccccaagguccgggaccaggaggggcgcaugaacuacuacuggacccugguggagcccggcgacaagaucaccuucgaggcgaccgggaaccucguggucccccgguacgccuucgccauggagcgcaacgccggcuccggcaucaucaucagcgacacgccggugcacgacugcaacacgaccugccagacccccaagggggccaucaacaccucccugcccuuccagaacauccaccccaucaccaucggcaagugcccgaaguacgucaagagcaccaagcugcggcucgcgaccgggcugcgcaacgugcccuccauccagagccggggccuguucggggccaucgccggcuucaucgagggcggguggacgggcaugguggacgggugguacggcuaccaccaccagaacgagcagggguccggcuacgccgccgaccucaagagcacccagaacgcgaucgacgagaucaccaacaaggugaacuccgucaucgagaagaugaacacccaguucacggccgugggcaaggaguucaaccaccuggagaagcgcaucgagaaccugaacaagaaggucgacgacggguuccucgacaucuggaccuacaacgccgagcugcuggugcuccuggagaacgagcggacccuggacuaccacgacagcaacgugaagaaccucuacgagaagguccgcucccagcugaagaacaacgccaaggagaucggcaacgggugcuucgaguucuaccacaagugcgacaacacgugcauggagagcgugaagaacggcaccuacgacuaccccaaguacuccgaggaggccaagcugaaccgggaggagaucgacggggugaagcucgagagcacccgcaucuaccagauccuggcgaucuacuccaccgucgccagcucccuggugcucguggucagccugggcgccaucagcuucuggaugugcuccaacggcagccugcagugccggaucugcaucuga

SEQ ID NO: 73197 - RNA, 1698 nt, Artificial Sequence
  derived and/or modified CDS sequence (opt1) from hemagglutinin__InfluenzaA__AFM85179
augaaggugaagcugcucauccugcugugcaccuucaccgccacguacgccgacaccaucugcaucggcuaccacgcgaacaacagcaccgacaccgucgacacggugcucgagaagaacgugaccgucacccacuccgugaaccugcuggagaacagccacaacgggaagcucugccugcugaagggcaucgcgccccuccagcuggggaacugcuccguggccggcuggauccuggggaacccggagugcgagcuccugaucagcaaggaguccuggagcuacaucgucgagacccccaaccccgagaacggcacgugcuaccccggcuacuucgccgacuacgaggagcugcgcgagcagcucuccagcguguccagcuucgagcgguucgagaucuucccgaaggaguccagcuggcccaaccacaccgugaccggggucuccgccagcugcucccacaacggcaagagcuccuucuaccgcaaccugcuguggcucaccgggaagaacggccuguaccccaaccugagcaaguccuacgccaacaacaaggagaaggaggugcucauccuguggggcgugcaccacccgcccaacaucggggaccagcggacgcuguacuacaccgagaacgccuacgucagcguggugagcucccacuacagccgccgguucacccccgagaucaccaagcgccccaagguccgggaccaggagggccgcaucaacuacuacuggacgcuccuggagcccggggacaccaucaucuucgaggccaacggcaaccugaucgccccgugguacgcguucgcccucucccggggguucggcagcggcaucaucaucuccaacgcccccauggacgagugcgacgccaagugccagacgccccagggggccaucaacagcucccugcccuuccagaacgugcacccggugaccaucggcgagugccccaaguacguccgcagcgcgaagcugcggauggugaccgggcuccgcaacauccccuccauccagagccggggccuguucggggccaucgccggcuucaucgagggcggguggaccggcaugguggacgggugguacggcuaccaccaccagaacgagcagggguccggcuacgccgccgaccagaaguccacccagaacgcgaucaacggcaucaccaacaaggucaacagcgugaucgagaagaugaacacgcaguucaccgccguggggaaggaguucaacaaguucgagcgccggauggagaaccugaacaagaaggucgacgacggcuuccucgacaucuggaccuacaacgccgagcugcuggugcuccuggagaacgagcgcacccuggacuuccacgacagcaacgucaagaaccucuacgagaaggugaagucccagcugaagaacaacgccaaggagaucgggaacggcugcuucgaguucuaccacaagugcaacaacgagugcauggagagcgugaagaacgggacguacgacuaccccaaguacuccgaggagagcaagcugaaccgggagaagaucgacggcgucaagcucgaguccaugggcguguaccagauccuggccaucuacagcaccguggcgagcucccugguccuccuggugagccugggggccaucuccuucuggaugugcagcaacggcucccuccagugccgcaucugcaucuga

SEQ ID NO: 73198 - RNA, 1701 nt, Artificial Sequence
  derived and/or modified CDS sequence (opt1) from hemagglutinin__InfluenzaA__AFN11846
augaagaccaucaucgcccugagcuacauccucugccugguguucgcccagaagcugcccggcaacgacaacuccaccgcgacgcucugccuggggcaccacgccgucccgaacggcacccuggugaagaccaucaccaacgaccagaucgaggugacgaacgccaccgagcucguccagagcuccagcaccgggcgcaucugcgacagcccccaccggauccuggacggcaagaacugcacccugaucgacgcccuccugggggacccccacugcgacggcuuccagaacaaggagugggaccuguucguggagcgcagcaaggccuacuccaacugcuaccccuacgacgugccggacuacgcgagccuccggucccuggucgccagcuccggcacgcuggaguucaccaacgagggguucaacuggaccggcguggcccaggacgggaaguccuacgccugcaagcgcggcuccgucaagagcuucuucucccggcucaacuggcugcacaagcuggaguacaaguaccccgcgcucaacgugaccaugcccaacaacgacaaguucgacaagcuguacaucuggggcgugcaccaccccagcacggacuccgaccagaccagccuguacgugcaggccuccgggcgcgucaccgugagcaccaagcggagccagcagacggugaucccgaacaucggcucccgccccuggguccgggggaucagcucccgcaucagcaucuacuggaccaucgugaagcccggcgacauccuccugaucaacuccaccgggaaccugaucgcgccccggggcuacuucaagauccgcaacggcaagagcuccaucaugcggagcgacgccccgaucgggaacugcaacuccgagugcaucacccccaacggcagcauccccaacgacaagcccuuccagaacgugaaccgcaucacguacggggccugcccgcgguacgucaagcagaacacccucaagcuggccaccggcaugcgcaacgugcccgagaagcagacccgggggaucuucggcgccaucgccggcuucaucgagaacgggugggagggcaugguggacgggugguacggcuuccgccaccagaacuccgaggggacgggccaggccgccgaccucaagagcacccaggcggccaucgaccagaucaacggcaagcugaaccggcugaucgagaagaccaacgagaaguuccaccagaucgagaaggaguucuccgaggucgaggggcgcauccaggaccuggagaaguacguggaggacaccaagaucgaccucuggagcuacaacgccgagcugcugguggcccucgagaaccagcacacgaucgaccugaccgacuccgagaugaacaagcuguucgagcggacccgcaagcagcuccgcgagaacgccgaggacaugggcaacgggugcuucaagaucuaccacaagugcgacaacgcgugcaucggcagcauccggaacgggaccuacgaccacgacgucuaccgcgacgaggcccugaacaaccgguuccagaucaagggcguggagcugaaguccggcuacaaggacuggauccucuggaucagcuucgccaucuccugcuuccugcugugcgucgugcuccugggguucaucaugugggccugccagaagggcaacauccgcugcaacaucugcaucuga

SEQ ID NO: 73199 - RNA, 1701 nt, Artificial Sequence; identical to SEQ ID NO: 67554
  derived and/or modified CDS sequence (opt1) from hemagglutinin__InfluenzaA__AFN17371

SEQ ID NO: 73200 - RNA, 1701 nt, Artificial Sequence; identical to SEQ ID NO: 66693
  derived and/or modified CDS sequence (opt1) from hemagglutinin__InfluenzaA__AFN17381

SEQ ID NO: 73201 - RNA, 1701 nt, Artificial Sequence; identical to SEQ ID NO: 66693
  derived and/or modified CDS sequence (opt1) from hemagglutinin__InfluenzaA__AFN17391

SEQ ID NO: 73202 - RNA, 1701 nt, Artificial Sequence; identical to SEQ ID NO: 66693
  derived and/or modified CDS sequence (opt1) from hemagglutinin__InfluenzaA__AFN17401

SEQ ID NO: 73203 - RNA, 1701 nt, Artificial Sequence; identical to SEQ ID NO: 66693
  derived and/or modified CDS sequence (opt1) from hemagglutinin__InfluenzaA__AFN17411

SEQ ID NO: 73204 - RNA, 1701 nt, Artificial Sequence; identical to SEQ ID NO: 66693
  derived and/or modified CDS sequence (opt1) from hemagglutinin__InfluenzaA__AFN17421

SEQ ID NO: 73205 - RNA, 1701 nt, Artificial Sequence; identical to SEQ ID NO: 66784
  derived and/or modified CDS sequence (opt1) from hemagglutinin__InfluenzaA__AFN17431

SEQ ID NO: 73206 - RNA, 1701 nt, Artificial Sequence
  derived and/or modified CDS sequence (opt1) from hemagglutinin__InfluenzaA__AFN17441
augaaggccauccuggugguccuccuguacaccuucgccaccgcgaacgccgacacgcugugcaucggcuaccacgccaacaacagcaccgacaccguggacaccgugcucgagaagaacgucacggugacccacuccgugaaccugcuggaggacaagcacaacgggaagcucugcaagcugcgcggcgucgcgccccugcaccucgggaagugcaacaucgccggcuggauccuggggaacccggagugcgagagccuguccaaggccagcuccuggagcuacaucguggagaccuccagcuccgacaacgggaccugcuaccccggcgacuucaucgacuacgaggagcuccgggagcagcugagcuccgugagcuccuucgagcgcuucgagaucuuccccaagacgagcuccuggcccaaccacgacagcaacaagggcgucaccgccgccugcccgcacgccggcgcgaaguccuucuacaagaaccugaucuggcucgugaagaaggggaacagcuaccccaagcuguccaagagcuacaucaacgacaagggcaaggaggugcugguccucugggggauccaccaccccagcaccuccgccgaccagcagagccuguaccagaacgccgacgccuacguguucgugggcaccucccgguacagcaagaaguucaagcccgagaucgccauccgcccgaagguccgggaccaggagggccgcaugaacuacuacuggacgcugguggagcccggggacaagaucaccuucgaggcgaccggcaaccucguggucccccgguacgccuucgccauggagcgcaacgccggguccggcaucaucaucagcgacacccccgugcacgacugcaacacgaccugccagaccccgaagggcgccaucaacaccucccugcccuuccagaacauccaccccaucacgaucgggaagugccccaaguacgucaagagcaccaagcugcggcucgcgaccggccugcgcaacgugccguccauccagagccgggggcuguucggcgccaucgccggguucaucgagggcggcuggaccgggaugguggacggcugguacggguaccaccaccagaacgagcagggcuccggguacgccgccgaccucaagagcacgcagaacgcgaucgacgagaucaccaacaaggugaacuccgucaucgagaagaugaacacccaguucaccgccgugggcaaggaguucaaccaccuggagaagcgcaucgagaaccugaacaagaaggucgacgacggcuuccucgacaucuggacguacaacgccgagcugcuggugcuccuggagaacgagcggacccuggacuaccacgacagcaacgugaagaaccucuacgagaagguccgcucccagcugaagaacaacgccaaggagaucgggaacggcugcuucgaguucuaccacaagugcgacaacacgugcauggagagcgugaagaacgggaccuacgacuaccccaaguacuccgaggaggccaagcugaaccgggaggagaucgacggcgugaagcucgagagcacccgcaucuaccagauccuggcgaucuacuccaccgucgccagcagccuggugcucguggucucccugggggccaucagcuucuggaugugcuccaacggcagccugcagugccggaucugcaucuga

SEQ ID NO: 73207 - RNA, 1701 nt, Artificial Sequence; identical to SEQ ID NO: 69248
  derived and/or modified CDS sequence (opt1) from hemagglutinin__InfluenzaA__AFN17451

SEQ ID NO: 73208 - RNA, 1701 nt, Artificial Sequence; identical to SEQ ID NO: 67535
  derived and/or modified CDS sequence (opt1) from hemagglutinin__InfluenzaA__AFN17467

SEQ ID NO: 73209 - RNA, 1701 nt, Artificial Sequence; identical to SEQ ID NO: 66693
  derived and/or modified CDS sequence (opt1) from hemagglutinin__InfluenzaA__AFN17477

SEQ ID NO: 73210 - RNA, 1701 nt, Artificial Sequence; identical to SEQ ID NO: 67554
  derived and/or modified CDS sequence (opt1) from hemagglutinin__InfluenzaA__AFN17487

SEQ ID NO: 73211 - RNA, 1701 nt, Artificial Sequence; identical to SEQ ID NO: 66693
  derived and/or modified CDS sequence (opt1) from hemagglutinin__InfluenzaA__AFN17497

SEQ ID NO: 73212 - RNA, 1701 nt, Artificial Sequence; identical to SEQ ID NO: 66693
  derived and/or modified CDS sequence (opt1) from hemagglutinin__InfluenzaA__AFN17507

SEQ ID NO: 73213 - RNA, 1701 nt, Artificial Sequence; identical to SEQ ID NO: 67535
  derived and/or modified CDS sequence (opt1) from hemagglutinin__InfluenzaA__AFN17517

SEQ ID NO: 73214 - RNA, 1701 nt, Artificial Sequence; identical to SEQ ID NO: 67554
  derived and/or modified CDS sequence (opt1) from hemagglutinin__InfluenzaA__AFN17527

SEQ ID NO: 73215 - RNA, 1701 nt, Artificial Sequence; identical to SEQ ID NO: 66693
  derived and/or modified CDS sequence (opt1) from hemagglutinin__InfluenzaA__AFN17537

SEQ ID NO: 73216 - RNA, 1701 nt, Artificial Sequence; identical to SEQ ID NO: 66935
  derived and/or modified CDS sequence (opt1) from hemagglutinin__InfluenzaA__AFN17547

SEQ ID NO: 73217 - RNA, 1701 nt, Artificial Sequence; identical to SEQ ID NO: 68224
  derived and/or modified CDS sequence (opt1) from hemagglutinin__InfluenzaA__AFN17557

SEQ ID NO: 73218 - RNA, 1701 nt, Artificial Sequence; identical to SEQ ID NO: 67535
  derived and/or modified CDS sequence (opt1) from hemagglutinin__InfluenzaA__AFN17567

SEQ ID NO: 73219 - RNA, 1701 nt, Artificial Sequence; identical to SEQ ID NO: 66935
  derived and/or modified CDS sequence (opt1) from hemagglutinin__InfluenzaA__AFN17574

SEQ ID NO: 73220 - RNA, 1701 nt, Artificial Sequence; identical to SEQ ID NO: 66693
  derived and/or modified CDS sequence (opt1) from hemagglutinin__InfluenzaA__AFN17580

SEQ ID NO: 73221 - RNA, 1701 nt, Artificial Sequence; identical to SEQ ID NO: 66693
  derived and/or modified CDS sequence (opt1) from hemagglutinin__InfluenzaA__AFN17586

SEQ ID NO: 73222 - RNA, 1701 nt, Artificial Sequence; identical to SEQ ID NO: 67554
  derived and/or modified CDS sequence (opt1) from hemagglutinin__InfluenzaA__AFN17595

SEQ ID NO: 73223 - RNA, 1701 nt, Artificial Sequence; identical to SEQ ID NO: 66693
  derived and/or modified CDS sequence (opt1) from hemagglutinin__InfluenzaA__AFN17605

SEQ ID NO: 73224 - RNA, 1701 nt, Artificial Sequence; identical to SEQ ID NO: 66693
  derived and/or modified CDS sequence (opt1) from hemagglutinin__InfluenzaA__AFN17615

SEQ ID NO: 73225 - RNA, 1701 nt, Artificial Sequence; identical to SEQ ID NO: 66693
  derived and/or modified CDS sequence (opt1) from hemagglutinin__InfluenzaA__AFN17625

SEQ ID NO: 73226 - RNA, 1701 nt, Artificial Sequence; identical to SEQ ID NO: 66693
  derived and/or modified CDS sequence (opt1) from hemagglutinin__InfluenzaA__AFN17635

SEQ ID NO: 73227 - RNA, 1701 nt, Artificial Sequence
  derived and/or modified CDS sequence (opt1) from hemagglutinin__InfluenzaA__AFN17645
augaaggccauccuggugguccuccuguacaccuucgccaccgcgaacgccgacacgcugugcaucggcuaccacgccaacaacagcaccgacaccguggacaccgugcucgagaagaacgucacggugacccacuccgugaaccugcuggaggacaagcacaacgggaagcucugcaagcugcgcggcgucgcgccccugcaccucgggaagugcaacaucgccggcuggauccuggggaacccggagugcgagagccuguccaccgccagcuccuggagcuacaucguggagaccuccagcuccgacaacggcacgugcuaccccggcgacuucaucgacuacgaggagcuccgggagcagcugagcuccgugagcuccuucgagcgcgucgagaucuuccccaagaccagcuccuggcccaaccacgacagcaacaagggggugaccgccgccugcccgcacgccggcgcgaaguccuucuacaagaaccugaucuggcucgugaagaaggggaacagcuaccccaagcuguccaagagcuacaucaacgacaagggcaaggagguccuggugcucugggggauccaccaccccagcaccuccgccgaccagcagagccuguaccagaacgccgacgccuacguguucgucggcacgucccgguacagcaagaaguucaagcccgagaucgccauccgcccgaaggugcgggaccaggagggccgcaugaacuacuacuggacccugguggagcccggggacaagaucaccuucgaggcgaccggcaaccucgucgugccccgguacgccuucgccauggagcgcaacgccggguccggcaucaucaucagcgacacgcccgugcacgacugcaacacgaccugccagaccccgaagggcgccaucaacaccucccugcccuuccagaacauccaccccaucaccaucgggaagugccccaaguacgucaagagcaccaagcugcggcucgcgaccggccugcgcaacgugccguccauccagagccgggggcuguucggcgccaucgccggguucaucgagggcggcuggacggggaugguggacggcugguacggguaccaccaccagaacgagcagggcuccggguacgccgccgaccucaagagcacccagaacgcgaucgacgagaucaccaacaaggucaacuccgugaucgagaagaugaacacccaguucacggccgucggcaaggaguucaaccaccuggagaagcgcaucgagaaccugaacaagaagguggacgacggcuuccucgacaucuggaccuacaacgccgagcugcuggugcuccuggagaacgagcggacccuggacuaccacgacagcaacgucaagaaccucuacgagaaggugcgcucccagcugaagaacaacgccaaggagaucgggaacggcugcuucgaguucuaccacaagugcgacaacacgugcauggagagcgugaagaacgggaccuacgacuaccccaaguacuccgaggaggccaagcugaaccgggaggagaucgacggcgucaagcucgagagcacccgcaucuaccagauccuggcgaucuacuccaccguggccagcagccuggugcucgucgugucccugggggccaucagcuucuggaugugcuccaacggcagccugcagugccggaucugcaucuga

SEQ ID NO: 73228 - RNA, 1701 nt, Artificial Sequence; identical to SEQ ID NO: 67554
  derived and/or modified CDS sequence (opt1) from hemagglutinin__InfluenzaA__AFN17655

SEQ ID NO: 73229 - RNA, 1701 nt, Artificial Sequence; identical to SEQ ID NO: 67554
  derived and/or modified CDS sequence (opt1) from hemagglutinin__InfluenzaA__AFN17665

SEQ ID NO: 73230 - RNA, 1701 nt, Artificial Sequence
  derived and/or modified CDS sequence (opt1) from hemagglutinin__InfluenzaA__AFN17675
augaaggccauccugaucgugcuccuguacaccuucgccaccgcgaacgccgacacgcugugcaucggcuaccacgccaacaacagcaccgacaccgucgacaccgugcucgagaagaacgugacggucacccacuccgugaaccugcuggaggacaagcacaacgggaagcucugcaagcugcgcggcguggcgccccugcaccucgggaagugcaacaucgccggcuggauccuggggaacccggagugcgagagccuguccaccgccagcuccuggagcuacaucgucgagaccuccagcuccgacaacggcacgugcuaccccggcgacuucaucgacuacgaggagcuccgggagcagcugagcuccgugagcuccuucgagcgcuucgagaucuuccccaagaccagcuccuggcccaaccacgacagcaacaagggggugaccgccgccugcccgcacgccggcgcgaaguccuucuacaagaaccugaucuggcucgucaagaaggggaacagcuaccccaagcuguccgagagcuacaucaacgacaagggcaaggaggugcuggugcucugggggauccaccaccccagcaccuccgccgaccagcagagccuguaccagaacgccgacgccuacgucuucgugggcacgucccgguacagcaagaaguucaagcccgagaucgccauccgcccgaaggugcgggaccaggagggccgcaugaacuacuacuggacccuggucgagcccggggacaagaucaccuucgaggcgaccggcaaccucguggugccccgguacgccuucgccauggagcgcaacgccggguccggcaucaucaucagcgacacgcccguccacgacugcaacacgaccugccagaccccgaagggcgccaucaacaccucccugcccuuccagaacauccaccccaucaccaucgggaagugccccaaguacgucaagagcaccaagcugcggcucgcgaccggccugcgcaacgugccguccauccagagccgggggcuguucggcgccaucgccggguucaucgagggcggcuggacggggaugguggacggcugguacggguaccaccaccagaacgagcagggcuccggguacgccgccgaccucaagagcacccagaacgcgaucgacgagaucaccaacaaggugaacuccgugaucgagaagaugaacacccaguucacggccgucggcaaggaguucaaccaccuggagaagcgcaucgagaaccugaacaagaagguggacgacggcuuccucgacaucuggaccuacaacgccgagcugcugguccuccuggagaacgagcggacccuggacuaccacgacagcaacgugaagaaccucuacgagaaggugcgcucccagcugaagaacaacgccaaggagaucgggaacggcugcuucgaguucuaccacaagugcgacaacacgugcauggagagcgucaagaacgggaccuacgacuaccccaaguacuccgaggaggccaagcugaaccgggaggagaucgacggcgugaagcucgagagcacccgcaucuaccagauccuggcgaucuacuccaccguggccagcagccugguccucguggugucccugggggccaucagcuucuggaugugcuccaacggcagccugcagugccggaucugcaucuga

SEQ ID NO: 73231 - RNA, 1701 nt, Artificial Sequence
  derived and/or modified CDS sequence (opt1) from hemagglutinin__InfluenzaA__AFN17685
augaaggccauccuggugguccuccuguacaccuucgccaccgcgaacgccgacacgcugugcaucggcuaccacgccaacaacagcaccgacaccguggacaccauccucgagaagaacgugacggucacccacuccgugaaccugcuggaggacaagcacaacgggaagcucugcaagcugcgcggcguggcgccccugcaccucgggaagugcaacaucgccggcuggauccuggggaacccggagugcgagagccuguccaccgccagcuccuggagcuacaucgucgagaccuccagcuccgacaacggcacgugcuaccccggcgacuucaucgacuacgaggagcuccgggagcagcugagcuccgugagcuccuucgagcgcuucgagaucuuccccaagaccagcuccuggcccaaccacgacagcaacaagggggugaccgccgccugcccgcacgccggcgcgaaguccuucuacaagaaccugaucuggcucgucaagaaggggaacagcuaccccaagcuguccaagagcuacaucaacgacaagggcaaggaggugcuggugcucugggggauccaccaccccagcaccuccgccgaccagcagagccuguaccagaacgccgacgccuacgucuucgugggcacgucccgguacagcaagaaguucaagcccgagaucgccauccgcccgaaggugcgggaccaggagggccgcaugaacuacuacuggacccuggucgagccccgggacaagaucaccuucgaggcgaccgggaaccucguggugccccgcuacgccuucgccauggagcggaacgccggcuccgggaucaucaucagcgacacgcccguccacgacugcaacacgaccugccagaccccgaagggcgccaucaacaccucccugcccuuccagaacauccaccccaucaccaucggcaagugccccaaguacgucaagagcaccaagcugcgccucgcgaccgggcugcggaacgugccguccauccagagccgcggccuguucggggccaucgccggcuucaucgagggcggguggacgggcaugguggacgggugguacggcuaccaccaccagaacgagcagggguccggcuacgccgccgaccucaagagcacccagaacgcgaucgacgagaucaccaacaaggugaacuccgugaucgagaagaugaacacccaguucacggccgucgggaaggaguucaaccaccuggagaagcggaucgagaaccugaacaagaagguggacgacggcuuccucgacaucuggaccuacaacgccgagcugcugguccuccuggagaacgagcgcacccuggacuaccacgacagcaacgugaagaaccucuacgagaaggugcggucccagcugaagaacaacgccaaggagaucggcaacgggugcuucgaguucuaccacaagugcgacaacacgugcauggagagcgucaagaacggcaccuacgacuaccccaaguacuccgaggaggccaagcugaaccgcgaggagaucgacggggugaagcucgagagcacccggaucuaccagauccuggcgaucuacuccaccguggccagcagccugguccucguggugucccugggcgccaucagcuucuggaugugcuccaacgggagccugcagugccgcaucugcaucuga

SEQ ID NO: 73232 - RNA, 1701 nt, Artificial Sequence; identical to SEQ ID NO: 66693
  derived and/or modified CDS sequence (opt1) from hemagglutinin__InfluenzaA__AFN17695

SEQ ID NO: 73233 - RNA, 1701 nt, Artificial Sequence; identical to SEQ ID NO: 66693
  derived and/or modified CDS sequence (opt1) from hemagglutinin__InfluenzaA__AFN17705

SEQ ID NO: 73234 - RNA, 1701 nt, Artificial Sequence; identical to SEQ ID NO: 67322
  derived and/or modified CDS sequence (opt1) from hemagglutinin__InfluenzaA__AFN17715

SEQ ID NO: 73235 - RNA, 1701 nt, Artificial Sequence
  derived and/or modified CDS sequence (opt1) from hemagglutinin__InfluenzaA__AFN17725
augaaggccauccuggugguccuccuguacaccuucgccaccgcgaacgccgacacgcugugcaucggcuaccacgccaacaacagcaccgacaccguggacaccgugcucgagaagaacgucacggugacccacuccgugaaccugcuggaggacaagcacaacgggaagcucugcaagcugcgcggcgucgcgccccugcaccucgggaagugcaacaucgccggcuggauccuggggaacccggagugcgagagccuguccaccgccagcuccuggagcuacaucguggagaccuccagcuccgacaacggcacgugcuaccccggcgacuucaucgacuacgaggagcuccgggagcagcugagcuccgugagcuccuucgagcgcuucgagaucuuccccaagaccagcuccuggcccaaccacgacagcaacaagggggucaccgccgccugcccgcacgccggcgcgaaguccuucuacaagaaccugaucuggcucgugaagaaggggaacagcuaccccaagcuguccaagagcuacaucaacgacaagggcaaggaggugcugguccucugggggauccaccaccccagcaccuccgccgaccagcagagccuguaccagaacgccgacgccuacguguucgugggcacgucccgguacagcaagaaguucaagcccgagaucgccauccgcccgcagguccgggaccaggagggccgcaugaacuacuacuggacccugguggagcccggggacaagaucaccuucgaggcgaccggcaaccucguggucccccgguacgccuucgccauggagcgcaacgccggguccggcaucaucaucagcgacacgcccgugcacgacugcaacacgaccugccagaccccgaagggcgccaucaacaccucccugcccuuccagaacauccaccccaucaccaucgggaagugccccaaguacgucaagagcaccaagcugcggcucgcgaccggccugcgcaacgugccguccauccagagccgggggcuguucggcgccaucgccggguucaucgagggcggcuggacggggaugguggacggcugguacggguaccaccaccagaacgagcagggcuccggguacgccgccgaccucaagagcacccagaacgcgaucgacgagaucaccaacaaggugaacuccgucaucgagaagaugaacacccaguucacggccgugggcaaggaguucaaccaccuggagaagcgcaucgagaaccugaacaagaaggucgacgacggcuuccucgacaucuggaccuacaacgccgagcugcuggugcuccuggagaacgagcggacccuggacuaccacgacagcaacgugaagaaccucuacgagaagguccgcucccagcugaagaacaacgccaaggagaucgggaacggcugcuucgaguucuaccacaagugcgacaacacgugcauggagagcgugaagaacgggaccuacgacuaccccaaguacuccgaggaggccaagcugaaccgggaggagaucgacggcgugaagcucgagagcacccgcaucuaccagauccuggcgaucuacuccaccgucgccagcagccuggugcucguggucucccugggggccaucagcuucuggaugugcuccaacggcagccugcagugccggaucugcaucuga

SEQ ID NO: 73236 - RNA, 1701 nt, Artificial Sequence; identical to SEQ ID NO: 66693
  derived and/or modified CDS sequence (opt1) from hemagglutinin__InfluenzaA__AFN17735

SEQ ID NO: 73237 - RNA, 1701 nt, Artificial Sequence; identical to SEQ ID NO: 66693
  derived and/or modified CDS sequence (opt1) from hemagglutinin__InfluenzaA__AFN17742

SEQ ID NO: 73238 - RNA, 1701 nt, Artificial Sequence; identical to SEQ ID NO: 66693
  derived and/or modified CDS sequence (opt1) from hemagglutinin__InfluenzaA__AFN17748

SEQ ID NO: 73239 - RNA, 1701 nt, Artificial Sequence; identical to SEQ ID NO: 66693
  derived and/or modified CDS sequence (opt1) from hemagglutinin__InfluenzaA__AFN17757

SEQ ID NO: 73240 - RNA, 1701 nt, Artificial Sequence; identical to SEQ ID NO: 67322
  derived and/or modified CDS sequence (opt1) from hemagglutinin__InfluenzaA__AFN17767

SEQ ID NO: 73241 - RNA, 1701 nt, Artificial Sequence; identical to SEQ ID NO: 71703
  derived and/or modified CDS sequence (opt1) from hemagglutinin__InfluenzaA__AFN17774

SEQ ID NO: 73242 - RNA, 1701 nt, Artificial Sequence; identical to SEQ ID NO: 66693
  derived and/or modified CDS sequence (opt1) from hemagglutinin__InfluenzaA__AFN17783

SEQ ID NO: 73243 - RNA, 1701 nt, Artificial Sequence; identical to SEQ ID NO: 67322
  derived and/or modified CDS sequence (opt1) from hemagglutinin__InfluenzaA__AFN17793

SEQ ID NO: 73244 - RNA, 1701 nt, Artificial Sequence; identical to SEQ ID NO: 66693
  derived and/or modified CDS sequence (opt1) from hemagglutinin__InfluenzaA__AFN17803

SEQ ID NO: 73245 - RNA, 1701 nt, Artificial Sequence; identical to SEQ ID NO: 66693
  derived and/or modified CDS sequence (opt1) from hemagglutinin__InfluenzaA__AFN17813

SEQ ID NO: 73246 - RNA, 1701 nt, Artificial Sequence
  derived and/or modified CDS sequence (opt1) from hemagglutinin__InfluenzaA__AFN17823
augaaggccauccuggugguccuccuguacaccuucgccaccgcgaacgccgacacgcugugcaucggcuaccacgccaacaacagcaccgacaccguggacaccgugcucgagaagaacgucacggugacccacuccgugaaccugcuggaggacaagcacaacgggaagcucugcaagcugcgcggcgucgcgccccugcaccucgggaagugcaacaucgccggcuggauccuggggaacccggagugcgagagccuguccaccgccagcuccuggagcuacaucguggagaccuccagcuccgacaacggcacgugcuaccccggcgacuucaucgacuacgaggagcuccgggagcagcugagcuccgugagcuccuucgagcgcuucgagaucuuccccaagaccagcuccuggcccaaccacgacagcaacaagggggucaccgccgccugcccgcacgccggcgcgaaguccuucuacaagaaccugaucuggcucgugaagaaggggaacagcuaccccaagcuguccgagagcuacaucaacgacaagggcaaggaggugcugguccucugggggauccaccaccccagcaccuccgccgaccagcagagccuguaccagaacgccgacgccuacguguucgugggcacgucccgguacagcaagaaguucaagcccgagaucgccauccgcccgaagguccgggaccaggagggccgcaugaacuacuacuggacccugguggagcccggggacaagaucaccuucgaggcgaccggcaaccucguggucccccgguacgccuucgccauggagcgcaacgccggguccggcaucaucaucagcgacacgcccgugcacgacugcaacacgaccugccagaccccgaagggcgccaucaacaccucccugcccuuccagaacauccaccccaucaccaucgggaagugccccaaguacgucaagagcaccaagcugcggcucgcgaccggccugcgcaacgugccguccauccagagccgggggcuguucggcgccaucgccggguucaucgagggcggcuggacggggaugguggacggcugguacggguaccaccaccagaacgagcagggcuccggguacgccgccgaccucaagagcacccagaacgcgaucgacgagaucaccaacaaggugaacuccgucaucgagaagaugaacacccaguucacggccgugggcaaggaguucaaccaccuggagaagcgcaucgagaaccugaacaagaaggucgacgacggcuuccucgacaucuggaccuacaacgccgagcugcuggugcuccuggagaacgagcggacccuggacuaccacgacagcaacgugaagaaccucuacgagaagguccgcucccagcugaagaacaacgccaaggagaucgggaacggcugcuucgaguucuaccacaagugcgacaacacgugcauggagagcgugaagaacgggaccuacgacuaccccaaguacuccgaggaggccaagcugaaccgggaggagaucgacggcgugaagcucgagagcacccgcaucuaccagauccuggcgaucuacuccaccgucgccagcagccuggugcucguggucucccugggggccaucagcuucuggaugugcuccaacggcagccugcagugccggaucugcaucuga

SEQ ID NO: 73247 - RNA, 1701 nt, Artificial Sequence
  derived and/or modified CDS sequence (opt1) from hemagglutinin__InfluenzaA__AFN17833
augaaggccauccuggugguccuccuguacaccuucgccaccgcgaacgccgacacgcugugcaucggcuaccacgccaacaacagcaccgacaccguggacaccgugcucgagaagaacgucacggugacccacuccgugaaccugcuggaggacaagcacaacgggaagcucugcaagcugcgcggcgucgcgccccugcaccucgggaagugcaacaucgccggcuggauccuggggaacccggagugcgagagccuguccaccgccagcuccuggagcuacaucguggagaccuccagcuccgacaacggcacgugcuaccccggcgacuucaucgacuacgaggagcuccgggagcagcugagcuccgugagcuccuucgagcgcuucgagaucuuccccaagaccagcuccuggcccaaccacgacagcaacaagggggucaccgccgccugcccgaacgccggcgcgaaguccuucuacaagaaccugaucuggcucgugaagaaggggaacagcuaccccaagcuguccaagagcuacaucaacgacaagggcaaggaggugcugguccucugggggauccaccaccccagcaccuccgccgaccagcagagccuguaccagaacgccgacgccuacguguucgugggcacgucccgguacagcaagaaguucaagcccgagaucgccauccgcccgaagguccgggaccaggagggccgcaugaacuacuacuggacccugguggagcccggggacaagaucaccuucgaggcgaccggcaaccucguggucccccgguacgccuucgccauggagcgcaacgccggguccggcaucaucaucagcgacacgcccgugcacgacugcaacacgaccugccagaccccgaagggcgccaucaacaccucccugcccuuccagaacauccaccccaucaccaucgggaagugccccaaguacgucaagagcaccaagcugcggcucgcgaccggccugcgcaacgugccguccauccagagccgggggcuguucggcgccaucgccggguucaucgagggcggcuggacggggaugguggacggcugguacggguaccaccaccagaacgagcagggcuccggguacgccgccgaccucaagagcacccagaacgcgaucgacgagaucaccaacaaggugaacuccgucaucgagaagaugaacacccaguucacggccgugggcaaggaguucaaccaccuggagaagcgcaucgagaaccugaacaagaaggucgacgacggcuuccucgacaucuggaccuacaacgccgagcugcuggugcuccuggagaacgagcggacccuggacuaccacgacagcaacgugaagaaccucuacgagaagguccgcucccagcugaagaacaacgccaaggagaucgggaacggcugcuucgaguucuaccacaagugcgacaacacgugcauggagagcgugaagaacgggaccuacgacuaccccaaguacuccgaggaggccaagcugaaccgggaggagaucgacggcgugaagcucgagagcacccgcaucuaccagauccuggcgaucuacuccaccgucgccagcagccuggugcucguggucucccugggggccaucagcuucuggaugugcuccaacggcagccugcagugccggaucugcaucuga

SEQ ID NO: 73248 - RNA, 1701 nt, Artificial Sequence; identical to SEQ ID NO: 71202
  derived and/or modified CDS sequence (opt1) from hemagglutinin__InfluenzaA__AFN17843

SEQ ID NO: 73249 - RNA, 1701 nt, Artificial Sequence; identical to SEQ ID NO: 66693
  derived and/or modified CDS sequence (opt1) from hemagglutinin__InfluenzaA__AFN17853

SEQ ID NO: 73250 - RNA, 1701 nt, Artificial Sequence; identical to SEQ ID NO: 66935
  derived and/or modified CDS sequence (opt1) from hemagglutinin__InfluenzaA__AFN17863

SEQ ID NO: 73251 - RNA, 1701 nt, Artificial Sequence
  derived and/or modified CDS sequence (opt1) from hemagglutinin__InfluenzaA__AFN17873
augaaggccauccuggugguccuccuguacaccuucgccaccgcgaacgccgacacgcugugcaucggcuaccacgccaacaacagcaccgacaccguggacaccgugcucgagaagaacgucacggugacccacuccgugaaccugcuggaggacaagcacaacgggaagcucugcaagcugcgcggcgucgcgccccugcaccucgggaagugcaacaucgccggcuggauccuggggaacccggagugcgagagccuguccaccgccggcagcugguccuacaucguggagaccagcuccagcgacaacggcacgugcuaccccggggacuucaucgacuacgaggagcuccgggagcagcuguccagcguguccagcuucgagcgcuucgagaucuuccccaagaccuccagcuggcccaaccacgaccugaacaagggcgucaccgccgccugcccgcacgccggggcgaaguccuucuacaagaaccucaucuggcuggugaagaagggcaacagcuaccccaagcuguccaagagcuacaucaacgacaaggggaaggaggugcucguccuguggggcauccaccaccccuccaccagcgccgaccagcagagccuguaccagaacgccgacgccuacguguucgugggcacgucccgguacagcaagaaguucaagcccgagaucgccauccgcccgaagguccgggaccaggaggggcgcaugaacuacuacuggacccucguggagcccggcgacaagaucaccuucgaggcgaccgggaaccugguggucccccgguacgccuucgccauggagcgcaacgccggcuccggcaucaucaucagcgacacgcccgugcacgacugcaacacgaccugccagaccccgaagggggccaucaacaccucccugcccuuccagaacauccaccccaucaccaucggcaagugccccaaguacgucaagagcaccaagcuccggcuggcgaccgggcugcgcaacgugccguccauccagagccggggccucuucggggccaucgccggcuucaucgagggcggguggacgggcaugguggacgggugguacggcuaccaccaccagaacgagcagggguccggcuacgccgccgaccucaagagcacccagaacgcgaucgacgagaucaccaacaaggugaacuccgucaucgagaagaugaacacccaguucacggccgugggcaaggaguucaaccaccuggagaagcgcaucgagaaccugaacaagaaggucgacgacggguuccuggacaucuggaccuacaacgccgagcugcucgugcugcuggagaacgagcggacccucgacuaccacgacagcaacgugaagaaccuguacgagaagguccgcucccagcugaagaacaacgccaaggagaucggcaacgggugcuucgaguucuaccacaagugcgacaacacgugcauggagagcgugaagaacggcaccuacgacuaccccaaguacuccgaggaggccaagcucaaccgggaggagaucgacggggugaagcuggagagcacccgcaucuaccagauccuggcgaucuacuccaccgucgccagcucccucgugcugguggucagccugggcgccaucagcuucuggaugugcuccaacggcagccuccagugccggaucugcaucuga

SEQ ID NO: 73252 - RNA, 1701 nt, Artificial Sequence
  derived and/or modified CDS sequence (opt1) from hemagglutinin__InfluenzaA__AFN17883
augaaggccauccuggugguccuccuguacaccuucgccaccgcgaacgccgacacgcugugcaucggcuaccacgccaacaacagcaccgacaccguggacaccgugcucgagaagaacgucacggugacccacuccgugaaccugcuggaggacaagcacaacgggaagcucugcaagcugcgcggcgucgcgccccugcaccucgggaagugcaacaucgccggcuggauccuggggaacccggagugcgagagccuguccaccgccagcuccuggagcuacaucguggagaccuccagcuccgacaacggcacgugcuaccccggcgacuucaucgacuacgaggagcuccgggagcagcugagcuccgugagcuccuucgagcgcuucgagaucuuccccaagaccagcuccuggcccaaccacgacagcaacaagggggucaccgccgccugcccgcacgccggcgcgaaguccuucuacaagaaccugaucuggcucgugaagaaggggaacagcuaccccaagcuguccaagagcuacaucaacgacaagggcaaggaggugcugguccucugggggauccaccaccccagcaccuccgccgaccagcagagccuguaccagaacgccgacgccuacguguucgugggcacgucccgguacagcaagaaguucaagcccgagaucgccauccgcccgaagguccgggaccaggagggccgcaugaacuacuacuggacccugguggagcccggggacaagaucaccuucgaggcgaccggcaaccucguggucccccgguacgccuucgccauggagcgcaacgccggguccggcaucaucaucagcgacacgcccgugcacgacugcaacacgaccugccagacccugaagggcgccaucaacaccucccugccguuccagaacauccaccccaucaccaucgggaagugccccaaguacgucaagagcaccaagcuccggcuggcgaccggccugcgcaacgugcccuccauccagagccgggggcuguucggcgccaucgccggguucaucgagggcggcuggacggggaugguggacggcugguacggguaccaccaccagaacgagcagggcuccggguacgccgccgaccucaagagcacccagaacgcgaucgacgagaucaccaacaaggugaacuccgucaucgagaagaugaacacccaguucacggccgugggcaaggaguucaaccaccuggagaagcgcaucgagaaccucaacaagaaggucgacgacggcuuccuggacaucuggaccuacaacgccgagcugcucgugcugcuggagaacgagcggacccucgacuaccacgacagcaacgugaagaaccuguacgagaagguccgcucccagcugaagaacaacgccaaggagaucgggaacggcugcuucgaguucuaccacaagugcgacaacacgugcauggagagcgugaagaacgggaccuacgacuacccgaaguacuccgaggaggccaagcucaaccgggaggagaucgacggcgugaagcuggagagcacccgcaucuaccagauccuggcgaucuacuccaccgucgccagcagccucgugcugguggucucccugggggccaucagcuucuggaugugcuccaacggcagccuccagugccggaucugcaucuga

SEQ ID NO: 73253 - RNA, 1701 nt, Artificial Sequence; identical to SEQ ID NO: 66693
  derived and/or modified CDS sequence (opt1) from hemagglutinin__InfluenzaA__AFN17893

SEQ ID NO: 73254 - RNA, 1701 nt, Artificial Sequence
  derived and/or modified CDS sequence (opt1) from hemagglutinin__InfluenzaA__AFN17903
augaaggccauccuggugguccuccuguacaccuucgccaccgcgaacgccgacacgcugugcaucggcuaccacgccaacaacagcaccgacaccguggacaccgugcucgagaagaacgucacggugacccacuccgugaaccugcuggaggacaagcacaacgggaagcucugcaagcugcgcggcgucgcgccccugcaccucgggaagugcaacaucgccggcuggauccuggggaacccggagugcgagagccuguccaccgccagcuccuggagcuacaucguggagaccuccagcuccgacaacggcacgugcuaccccggcgacuucaucgacuacgaggagcuccgggagcagcugagcuccgugagcuccuucgagcgcuucgagaucuuccccaagaccagcuccuggcccaaccacgagagcaacaagggggucaccgccgccugcccgcacgccggcgcgaaguccuucuacaagaaccugaucuggcucgugaagaaggggaacagcuaccccaagcuguccaagagcuacgugaacgacaagggcaaggagguccuggugcucugggggauccaccaccccagcaccuccgccgaccagcagagccuguaccagaacgccgacgccuacguguucgucggcacgucccgguacagcaagaaguucaagcccgagaucgccauccgcccgaaggugcgggaccaggagggccgcaugaacuacuacuggacccugguggagcccggggacaagaucaccuucgaggcgaccggcaaccucgucgugccccgguacgccuucgccauggagcgcaacgccggguccggcaucaucaucagcgacacgcccgugcacgacugcaacacgaccugccagaccccgaagggcgccaucaacaccucccugcccuuccagaacauccaccccaucaccaucgggaagugccccaaguacgucaagagcaccaagcugcggcucgcgaccggccugcgcaacgugccguccauccagagccgggggcuguucggcgccaucgccggguucaucgagggcggcuggacggggaugguggacggcugguacggguaccaccaccagaacgagcagggcuccggguacgccgccgaccucaagagcacccagaacgcgaucgacgagaucaccaacaaggucaacuccgugaucgagaagaugaacacccaguucacggccgucggcaaggaguucaaccaccuggagaagcgcaucgagaaccugaacaagaagguggacgacggcuuccucgacaucuggaccuacaacgccgagcugcuggugcuccuggagaacgagcggacccuggacuaccacgacagcaacgucaagaaccucuacgagaaggugcgcucccagcugaagaacaacgccaaggagaucgggaacggcugcuucgaguucuaccacaagugcgacaacacgugcauggagagcgugaagaacgggaccuacgacuaccccaaguacuccgaggaggccaagcugaaccgggaggagaucgacggcgucaagcucgagagcacccgcaucuaccagauccuggcgaucuacuccaccguggccagcagccuggugcucgucgugucccugggggccaucagcuucuggaugugcuccaacggcagccugcagugccggaucugcaucuga

SEQ ID NO: 73255 - RNA, 1701 nt, Artificial Sequence; identical to SEQ ID NO: 67046
  derived and/or modified CDS sequence (opt1) from hemagglutinin__InfluenzaA__AFN17919

SEQ ID NO: 73256 - RNA, 1701 nt, Artificial Sequence; identical to SEQ ID NO: 66935
  derived and/or modified CDS sequence (opt1) from hemagglutinin__InfluenzaA__AFN17929

SEQ ID NO: 73257 - RNA, 1701 nt, Artificial Sequence; identical to SEQ ID NO: 72951
  derived and/or modified CDS sequence (opt1) from hemagglutinin__InfluenzaA__AFN17939

SEQ ID NO: 73258 - RNA, 1701 nt, Artificial Sequence; identical to SEQ ID NO: 67554
  derived and/or modified CDS sequence (opt1) from hemagglutinin__InfluenzaA__AFN17949

SEQ ID NO: 73259 - RNA, 1701 nt, Artificial Sequence
  derived and/or modified CDS sequence (opt1) from hemagglutinin__InfluenzaA__AFN17959
augaaggccauccuggugguccuccuguacaccuucgccaccgcgaacgccgacacgcugugcaucggcuaccacgccaacaacagcaccgacaccguggacaccgugcucgagaagaacgucacggugacccacuccgugaaccugcuggaggacaagcacaacgggaagcucugcaagcugcgcggcgucgcgccccugcaccucgggaagugcaacaucgccggcuggauccuggggaacccggagugcgagagccuguccaccgccagcuccuggagcuacaucguggagaccuccagcuccgacaacggcacgugcuaccccggcgacuucaucgacuacgaggagcuccgggagcagcugagcuccgugagcuccuucgagcgcuucgagaucuuccccaagaccagcuccuggcccaaccacgacagcaacaagggggucaccgccgccugcccgcacgccggcgcgaaguccuucuacaagaaccugaucuggcucgugaagaaggggaacagcuaccccaagcuguccaagagcuacgugaacgacaagggcaaggagguccuggugcucugggggauccaccaccccagcaccuccgccgaccagcagagccuguaccagaacgccgacgccuacguguucgucggcacgucccgguacagcaagaaguucaagcccgagaucgccauccgcccgaaggugcgggaccaggagggccgcaugaacuacuacuggacccugguggagcccggggacaagaucaccuucgaggcgaccggcaaccucgucgugccccgguacgccuucgccauggagcgcaacgccggguccggcaucaucaucagcgacacgcccgugcacgacugcaacacgaccugccagaccccgaagggcgccaucaacaccucccugcccuuccagaacauccaccccaucaccaucgggaagugccccaaguacgucaagagcaccaagcugcggcucgcgaccggccugcgcaacgugccguccauccagagccgggggcuguucggcgccaucgccggguucaucgagggcggcuggacggggaugguggacggcugguacggguaccaccaccagaacgagcagggcuccggguacgccgccgaccucaagagcacccagaacgcgaucgacgagaucaccaacaaggucaacuccgugaucgagaagaugaacacccaguucacggccgucggcaaggaguucaaccaccuggagaagcgcaucgagaaccugaacaagaagguggacgacggcuuccucgacaucuggaccuacaacgccgagcugcuggugcuccuggagaacgagcggacccuggacuaccacgacagcaacgucaagaaccucuacgagaaggugcgcucccagcugaagaacaacgccaaggagaucgggaacggcugcuucgaguucuaccacaagugcgacaacacgugcauggagagcgugaagaacgggaccuacgacuaccccaaguacuccgaggaggccaagcugaaccgggaggagaucgacggcgucaagcucgagagcacccgcaucuaccagauccuggcgaucuacuccaccguggccagcagccuggugcucgucgugucccugggggccaucagcuucuggaugugcuccaacggcagccugcagugccggaucugcaucuga

SEQ ID NO: 73260 - RNA, 1701 nt, Artificial Sequence; identical to SEQ ID NO: 68375
  derived and/or modified CDS sequence (opt1) from hemagglutinin__InfluenzaA__AFN17969

SEQ ID NO: 73261 - RNA, 1701 nt, Artificial Sequence; identical to SEQ ID NO: 67554
  derived and/or modified CDS sequence (opt1) from hemagglutinin__InfluenzaA__AFN17979

SEQ ID NO: 73262 - RNA, 1701 nt, Artificial Sequence
  derived and/or modified CDS sequence (opt1) from hemagglutinin__InfluenzaA__AFN17989
augaaggccauccuggugguccuccuguacaccuucgccaccgcgaacgccgacacgcugugcaucggcuaccacgccaacaacagcaccgacaccguggacaccgugcucgagaagaacgucacggugacccacuccgugaaccugcuggaggacaagcacaacgggaagcucugcaagcugcgcggcgucgcgccccugcaccucgggaagugcaacaucgccggcuggauccuggggaacccggagugcgagagccuguccaccgccagcuccuggagcuacaucguggagaccuccagcuccgacaacggcacgugcuaccccggcgacuucaucgacuacgaggagcuccgggagcagcugagcuccgugagcuccuucgagcgcuucgagaucuuccccaagaccagcuccuggcccaaccacgacagcaacaagggggucaccgccgccugcccgcacgccggcgcgaaguccuucuacaagaaccugaucuggcucgugaagaaggggaacagcuaccccaagcuguccaagagcuacaucaacgacaagggcaaggaggugcugguccucugggggauccaccaccccagcaccuccgccgaccagcagagccuguaccagaacgccgacgccuacguguucgugggcacgucccgguacagcaagaaguucaagcccgagaucgccauccgcccgaagguccgggaccaggagggccgcaugaacuacuacuggacccugguggagcccggggacaagaucaccuucgaggcgaccggcaaccucguggucccccgguacgccuucgccauggagcgcaacgccggguccggcaucaucaucagcgacacgcccgugcacgacugcaacacgaccugccagaccccgaagggcgccaucaacaccucccugcccuuccagaacauccaccccaucaccaucgggaagugccccaaguacgucaagagcaccaagcugcggcucgcgaccggccugcgcaacgugccguccauccagagccgggggcuguucggcgccaucgccggguucaucgagggcggcuggacggggaugguggacggcugguacggguaccaccaccagaacgagcagggcuccggguacgccgccgaccucaagagcacccagaacgcgaucgacgagaucaccaacaaggugaacuccgucaucggcaagaugaacacccaguucacggccgugggcaaggaguucaaccaccuggagaagcgcaucgagaaccugaacaagaaggucgacgacggguuccucgacaucuggaccuacaacgccgagcugcuggugcuccuggagaacgagcggacccuggacuaccacgacagcaacgugaagaaccucuacgagaagguccgcucccagcugaagaacaacgccaaggagaucggcaacgggugcuucgaguucuaccacaagugcgacaacacgugcauggagagcgugaagaacggcaccuacgacuaccccaaguacuccgaggaggccaagcugaaccgggaggagaucgacggggugaagcucgagagcacccgcaucuaccagauccuggcgaucuacuccaccgucgccagcagccuggugcucguggucucccugggcgccaucagcuucuggaugugcuccaacggcagccugcagugccggaucugcaucuga

SEQ ID NO: 73263 - RNA, 1701 nt, Artificial Sequence; identical to SEQ ID NO: 66693
  derived and/or modified CDS sequence (opt1) from hemagglutinin__InfluenzaA__AFN17999

SEQ ID NO: 73264 - RNA, 1701 nt, Artificial Sequence
  derived and/or modified CDS sequence (opt1) from hemagglutinin__InfluenzaA__AFN18019
augaaggccauccuggugguccuccuguacaccuucgccaccgcgaaggccgacacgcugugcaucggcuaccacgccaacaacagcaccgacaccguggacaccgugcucgagaagaacgucacggugacccacuccgugaaccugcuggaggacaagcacaacgggaagcucugcaagcugcgcggcgucgcgccccugcaccucgggaagugcaacaucgccggcuggauccuggggaacccggagugcgagagccuguccaccgccagcuccuggagcuacaucguggagaccuccagcuccgacaacggcacgugcuaccccggcgacuucaucgacuacgaggagcuccgggagcagcugagcuccgugagcuccuucgagcgcuucgagauguuccccaagaccagcuccuggcccaaccacgacagcaacaagggggucaccgccgccugcccgcacgccggcgcgaaguccuucuacaagaaccugaucuggcucgugaagaaggggaacagcuaccccaagcuguccaagagcuacaucaacgacaagggcaaggaggugcugguccucugggggauccaccaccccagcaccuccgccgaccagcagagccuguaccagaacgccgacgccuacguguucgugggcacgucccgguacagcaagaaguucaagcccgagaucgccauccgcccgaagguccgggaccaggagggccgcaugaacuacuacuggacccugguggagcccggggacaagaucaccuucgaggcgaccggcaaccucguggucccccgguacgccuucgccauggagcgcaacgccggguccggcaucaucaucagcgacacgcccgugcacgacugcaacacgaccugccagaccccgaagggcgccaucaacaccucccugcccuuccagaacauccaccccaucaccaucgggaagugccccaaguacgucaagagcaccaagcugcggcucgcgaccggccugcgcaacgugccguccauccagagccgggggcuguucggcgccaucgccggguucaucgagggcggcuggacggggaugguggacggcugguacggguaccaccaccagaacgagcagggcuccggguacgccgccgaccucaagagcacccagaacgcgaucgacgagaucaccaacaaggugaacuccgucaucgagaagaugaacacccaguucacggccgugggcaaggaguucaaccaccuggagaagcgcaucgagaaccugaacaagaaggucgacgacggcuuccucgacaucuggaccuacaacgccgagcugcuggugcuccuggagaacgagcggacccuggacuaccacgacagcaacgugaagaaccucuacgagaagguccgcucccagcugaagaacaacgccaaggagaucgggaacggcugcuucgaguucuaccacaagugcgacaacacgugcauggagagcgugaagaacgggaccuacgacuaccccaaguacuccgaggaggccaagcugaaccgggaggagaucgacggcgugaagcucgagagcacccgcaucuaccagauccuggcgaucuacuccaccgucgccagcagccuggugcucguggucucccugggggccaucagcuucuggaugugcuccaacggcagccugcagugccggaucugcaucuga

SEQ ID NO: 73265 - RNA, 1701 nt, Artificial Sequence; identical to SEQ ID NO: 67554
  derived and/or modified CDS sequence (opt1) from hemagglutinin__InfluenzaA__AFN18039

SEQ ID NO: 73266 - RNA, 1701 nt, Artificial Sequence; identical to SEQ ID NO: 66693
  derived and/or modified CDS sequence (opt1) from hemagglutinin__InfluenzaA__AFN18049

SEQ ID NO: 73267 - RNA, 1701 nt, Artificial Sequence
  derived and/or modified CDS sequence (opt1) from hemagglutinin__InfluenzaA__AFN18059
augaaggccauccuggugguccuccuguacaccuucgccaccgcgaacgccgacacgcugugcaucggcuaccacgccaacaacagcaccgacaccguggacaccgugcucgagaagaacgucacggugacccacuccgugaaccugcuggaggacaagcacaacgggaagcucugcaagcugcgcggcgucgcgccccugcaccucgggaagugcaacaucgccggcuggauccuggggaacccggagugcgagagccuguccaccgccagcuccuggagcuacaucguggagaccuccagcuccgacaacggcacgugcuaccccggcgacuucaucgacuacgaggagcuccgggagcagcugagcuccgugagcuccuucgagcgcuucgagaucuuccccaagaccagcuccuggcccaaccacgacagcaacaagggggucaccgccgccugcccgcacgccggcgcgaaguccuucuacaagaaccugaucuggcucgugaagaaggggaacagcuaccccaagcuguccaagagcuacaucaacgacaagggcaaggaggugcugguccucugggggauccaccaccccagcaccuccgccgaccagcagagccuguaccagaacgccgacgccuacguguucgugggcacgucccgguacagcaagaaguucaagcccgagaucgccauccgcccgaagguccgggaccaggagggccgcaugaacuacuacuggacccugguggagcccggggacaagaucaccuucgaggcgaccggcaaccucguggucccccgguacgccuucgccauggagcgcaacgccggguccggcaucaucaucagcgacacgcccgugcacgacugcaacacgaccugccagaccccgaagggcgccaucaacaccucccugcccuuccagaacauccaccccaucaccaucgggaagugccccaaguacgucaagagcaccaagcugcggcucgcgaccggccugcgcaacgugccguccauccagagccgggggcuguucggcgccaucgccggguucaucgagggcggcuggacggggaugguggacggcugguacggguaccaccaccagaacgagcagggcuccggguacgccgccgaccucaagagcacccagaacgcgaucgacgagaucaccaacaaggugaacuccgucaucgagaagaugaacacccaguucacggccgugggcaaggaguucaaccaccuggagaagcgcaucgagaaccugaacaagaaggucgacgacggcuuccucgacaucuggaccuacaacgccgagcugcuggugcuccuggagaacgagcggacccuggacuaccacgacagcaacgugaagaaccucuacgagaagguccgcucccagcugaagaacaacgccaaggagaucgggaacggcugcuucgaguucuaccacaagugcgacaacgccugcauggagagcgugaagaacgggaccuacgacuaccccaaguacuccgaggaggcgaagcugaaccgggaggagaucgacggcgugaagcucgagagcacgcgcaucuaccagauccuggccaucuacuccaccgucgccagcagccuggugcucguggucucccugggggccaucagcuucuggaugugcuccaacggcagccugcagugccggaucugcaucuga

SEQ ID NO: 73268 - RNA, 1701 nt, Artificial Sequence; identical to SEQ ID NO: 66693
  derived and/or modified CDS sequence (opt1) from hemagglutinin__InfluenzaA__AFN18078

SEQ ID NO: 73269 - RNA, 1701 nt, Artificial Sequence
  derived and/or modified CDS sequence (opt1) from hemagglutinin__InfluenzaA__AFN18088
augaaggccauccuggugguccuccuguacaccuucgccaccgcgaacgccgacacgcugugcaucggcuaccacgccaacaacagcaccgacaccguggacaccgugcucgagaagaacgucacggugacccacuccgugaaccugcuggaggacaagcacaacgggaagcucugcaagcugcgcggcgucgcgccccugcaccucgggaagugcaacaucgccggcuggauccuggggaacccggagugcgagagccuguccaccgccagcuccuggagcuacaucguggagaccuccagcuccgacaacggcacgugcuaccccggcgacuucaucgacuacgaggagcuccgggagcagcugagcuccgugagcuccuucgagcgcuucgagaucuuccccaagaccagcuccuggcccaaccacgacagcaacaagggggucaccgccgccugcccgcacgccggcgcgaaguccuucuacaagaaccugaucuggcucgugaagaaggggaacagcuaccccaagcuguccaagagcuacaucaacgacaagggcaaggaggugcugguccucugggggauccaccaccccagcaccuccgccgaccagcagagccuguaccagaacgccgacacguacguguucgugggcaccucccgguacagcaagaaguucaagcccgagaucgccauccgcccgaagguccgggaccaggagggccgcaugaacuacuacuggacccugguggagcccggggacaagaucaccuucgaggccacgggcaaccucguggucccccgguacgcguucgccauggugcgcaacgccggguccggcaucaucaucagcgacacccccgugcacgacugcaacacgaccugccagaccccgaagggcgccaucaacaccucccugcccuuccagaacauccaccccaucaccaucgggaagugccccaaguacgucaagagcaccaagcugcggcucgccacgggccugcgcaacgugccguccauccagagccgggggcuguucggcgcgaucgccggguucaucgagggcggcuggaccgggaugguggacggcugguacggguaccaccaccagaacgagcagggcuccggguacgccgccgaccucaagagcacccagaacgccaucgacgagaucaccaacaaggucaacuccgugaucgagaagaugaacacgcaguucaccgcggucggcaaggaguucaaccaccuggagaagcgcaucgagaaccugaacaagaagguggacgacggcuuccucgacaucuggaccuacaacgccgagcugcuggugcuccuggagaacgagcggacccuggacuaccacgacagcaacgucaagaaccucuacgagaaggugcgcucccagcugaagaacaacgccaaggagaucgggaacggcugcuucgaguucuaccacaagugcgacaacacgugcauggagagcgugaagaacgggaccuacgacuaccccaaguacuccgaggaggccaagcugaaccgggaggagaucgacggcgucaagcucgagagcacccgcaucuaccagauccuggccaucuacuccaccguggcgagcagccuggugcucgucgugucccugggggccaucagcuucuggaugugcuccaacggcagccugcagugccggaucugcaucuga

SEQ ID NO: 73270 - RNA, 1701 nt, Artificial Sequence
  derived and/or modified CDS sequence (opt1) from hemagglutinin__InfluenzaA__AFN18098
augaaggccauccuggugguccuccuguacaccuucgccaccgcgaacgccgacacgcugugcaucggcuaccacgccaacaacagcaccgacaccguggacaccgugcucgagaagaacgucacggugacccacuccgugaaccugcuggaggacaagcacaacgggaagcucugcaagcugcgcggcaucgcgccccugcaccucgggaagugcaacaucgccggcuggauccuggggaacccggagugcgagagccuguccaccgccagcuccuggagcuacaucgucgagaccuccagcuccgacaacggcacgugcuaccccggcaacuucaucgacuacgaggagcuccgggagcagcugagcuccgugagcuccuucgagcgcuucgagaucuuccccaagaccagcuccuggcccaaccacgacagcaacaagggggugaccgccgccugcccgcacgccggcgcgaaguccuucuacaagaaccugaucuggcucgucaagaaggggaacagcuaccccaagcuguccaagagcuacaucaacgacaagggcaaggaggugcuggugcucugggggauccaccaccccagcaccuccgccgaccagcagagccuguaccagaacgccgacgccuacgucuucgugggcacgucccgguacagcaagaaguucaagcccgagaucgccauccgcccgaaggugcgggaccaggagggccgcaugaacuacuacuggacccuggucgagcccggggacaagaucaccuucgaggcgaccggcaaccucguggugccccgguacgccuucgccgucgagcgcaacgccggguccggcaucaucaucagcgacacgcccgugcacgacugcaacacgaccugccagaccccgaagggcgccaucaacaccucccugcccuuccagaacauccaccccaucaccaucgggaagugccccaaguacgucaagagcaccaagcugcggcucgcgaccggccugcgcaacgugccguccauccagagccgggggcuguucggcgccaucgccggguucaucgagggcggcuggacggggaugguggacggcugguacggguaccaccaccagaacgagcagggcuccggguacgccgccgaccucaagagcacccagaacgcgaucgacgagaucaccaacaaggugaacuccgucaucgagaagaugaacacccaguucacggccgugggcaaggaguucaaccaccuggagaagcgcaucgagaaccugaacaagaaggucgacgacggcuuccucgacaucuggaccuacaacgccgagcugcuggugcuccuggagaacgagcggacccuggacuaccacgacagcaacgugaagaaccucuacgagaagguccgcucccagcugaagaacaacgccaaggagaucgggaacggcugcuucgaguucuaccacaagugcgacaacacgugcauggagagcgugaagaacgggaccuacgacuaccccaaguacuccgaggaggccaagcugaaccgggaggagaucgacggcgugaagcucgagagcacccgcaucuaccagauccuggcgaucuacuccaccgucgccagcagccuggugcucguggucucccugggggccaucagcuucuggaugugcuccaacggcagccugcagugccggaucugcaucuga

SEQ ID NO: 73271 - RNA, 1701 nt, Artificial Sequence
  derived and/or modified CDS sequence (opt1) from hemagglutinin__InfluenzaA__AFN18105
augaaggccauccugaucgugcuccuguacaccuucgccaccgcgaacgccgacacgcugugcaucggcuaccacgccaacaacagcaccgacaccgucgacaccgugcucgagaagaacgugacggucacccacuccgugaaccugcuggaggacaagcacaacgggaagcucugcaagcugcgcggcguggcgccccugcaccucgggaagugcaacaucgccggcuggauccuggggaacccggagugcgagagccuguccaccgccagcuccuggagcuacaucgucgagaccuccagcuccgacaacggcacgugcuaccccggcgacuucaucgacuacgaggagcuccgggagcagcugagcuccgugagcuccuucgagcgcuucgagaucuuccccaagaccagcuccuggcccaaccacgacagcaacaagggggugaccgccgccugcccgcacgccggcgcgaaguccuucuacaagaaccugaucuggcucgucaagaaggggaacagcuaccccaagcuguccaagagcuacaucaacgacaagggcaaggaggugcuggugcucugggggauccaccaccccagcaccuccgccgaccagcagagccuguaccagaacgccgacgccuacgucuucgugggcacgucccgguacagcaagaaguucaagcccgagaucgccauccgcccgaaggugcgggaccaggagggccgcaugaacuacuacuggacccuggucgagcccggggacaagaucaccuucgaggcgaccggcaaccucguggugccccgguacgccuucgccauggagcgcaacgccggguccggcaucaucaucagcgacacgcccguccacgacugcaacaccaacugccagaccccgaagggcgccaucaacaccucccugcccuuccagaacauccaccccaucacgaucgggaagugccccaaguacgucaagagcaccaagcugcggcucgcgaccggccugcgcaacgugccguccauccagagccgggggcuguucggcgccaucgccggguucaucgagggcggcuggaccgggaugguggacggcugguacggguaccaccaccagaacgagcagggcuccggguacgccgccgaccucaagagcacgcagaacgcgaucgacgagaucaccaacaaggugaacuccgugaucgagaagaugaacacccaguucaccgccgucggcaaggaguucaaccaccuggagaagcgcaucgagaaccugaacaagaagguggacgacggcuuccucgacaucuggacguacaacgccgagcugcugguccuccuggagaacgagcggacccuggacuaccacgacagcaacgugaagaaccucuacgagaaggugcgcucccagcugaagaacaacgccaaggagaucgggaacggcugcuucgaguucuaccacaagugcgacaacacgugcauggagagcgucaagaacgggaccuacgacuaccccaaguacuccgaggaggccaagcugaaccgggaggagaucgacggcgugaagcucgagagcacccgcaucuaccagauccuggcgaucuacuccaccguggccagcagccugguccucguggugucccugggggccaucagcuucuggaugugcuccaacggcagccugcagugccggaucugcaucuga

SEQ ID NO: 73272 - RNA, 1701 nt, Artificial Sequence; identical to SEQ ID NO: 66935
  derived and/or modified CDS sequence (opt1) from hemagglutinin__InfluenzaA__AFN18107

SEQ ID NO: 73273 - RNA, 1701 nt, Artificial Sequence; identical to SEQ ID NO: 73267
  derived and/or modified CDS sequence (opt1) from hemagglutinin__InfluenzaA__AFN18117

SEQ ID NO: 73274 - RNA, 1701 nt, Artificial Sequence; identical to SEQ ID NO: 66693
  derived and/or modified CDS sequence (opt1) from hemagglutinin__InfluenzaA__AFN18119

SEQ ID NO: 73275 - RNA, 1701 nt, Artificial Sequence
  derived and/or modified CDS sequence (opt1) from hemagglutinin__InfluenzaA__AFN18121
augaaggccauccuggugguccuccuguacaccuucgccaccgcgaacgccgacacgcugugcaucggcuaccacgccaacaacagcaccgacaccguggacaccgugcucgagaagaacgucacggugacccacuccgugaaccugcuggaggacaagcacaacgggaagcucugcaagcugcgcggcgucgcgccccugcaccucgggaagugcaacaucgccggcuggauccuggggaacccggagugcgagagccuguccaccgccagcuccuggagcuacaucguggagaccuccagcuccgacaacggcacgugcuaccccggcgacuucaucgacuacgaggagcuccgggagcagcugagcuccgugagcuccuucgagcgcuucgagaucuuccccaagaccagcuccuggcccaaccacgacagcaacaagggggucaccgccgccugcccgcacgccggcgcgcgguccuucuacaagaaccugaucuggcucgugaagaaggggaacagcuaccccaagcuguccaagagcuacaucaacgacaagggcaaggaggugcugguccucugggggauccaccaccccagcaccuccgccgaccagcagagccuguaccagaacgccgacgccuacguguucgugggcacgucccgcuacagcaagaaguucaagcccgagaucgccauccggccgaagguccgcgaccaggagggccggaugaacuacuacuggacccugguggagcccggggacaagaucaccuucgaggcgaccggcaaccucguggucccccgcuacgccuucgccauggugcggaacgccggguccggcaucaucaucagcgacacgcccgugcacgacugcaacacgaccugccagaccccgaagggcgccaucaacaccucccugcccuuccagaacauccaccccaucaccaucgggaagugccccaaguacgucaagagcaccaagcugcgccucgcgaccggccugcggaacgugccguccauccagagccgcgggcuguucggcgccaucgccggguucaucgagggcggcuggacggggaugguggacggcugguacggguaccaccaccagaacgagcagggcuccggguacgccgccgaccucaagagcacccagaacgcgaucgacgagaucaccaacaaggucaacuccgugaucgagaagaugaacacccaguucacggccgucggcaaggaguucaaccaccuggagaagcggaucgagaaccugaacaagaagguggacgacggcuuccucgacaucuggaccuacaacgccgagcugcuggugcuccuggagaacgagcgcacccuggacuaccacgacagcaacgucaagaaccucuacgagaaggugcggucccagcugaagaacaacgccaaggagaucgggaacggcugcuucgaguucuaccacaagugcgacaacacgugcauggagagcgugaagaacgggaccuacgacuaccccaaguacuccgaggaggccaagcugaaccgcgaggagaucgacggcgucaagcucgagagcacccggaucuaccagauccuggcgaucuacuccaccguggccagcagccuggugcucgucgugucccugggggccaucagcuucuggaugugcuccaacggcagccugcagugccgcaucugcaucuga

SEQ ID NO: 73276 - RNA, 1701 nt, Artificial Sequence; identical to SEQ ID NO: 73267
  derived and/or modified CDS sequence (opt1) from hemagglutinin__InfluenzaA__AFN18133

SEQ ID NO: 73277 - RNA, 1701 nt, Artificial Sequence; identical to SEQ ID NO: 72951
  derived and/or modified CDS sequence (opt1) from hemagglutinin__InfluenzaA__AFN18135

SEQ ID NO: 73278 - RNA, 1701 nt, Artificial Sequence; identical to SEQ ID NO: 67535
  derived and/or modified CDS sequence (opt1) from hemagglutinin__InfluenzaA__AFN18137

SEQ ID NO: 73279 - RNA, 1701 nt, Artificial Sequence
  derived and/or modified CDS sequence (opt1) from hemagglutinin__InfluenzaA__AFN18139
auggaggccauccuggugguccuccuguacaccuucgccaccgcgaacgccgacacgcugugcaucggcuaccacgccaacaacagcaccgacaccguggacaccgugcucgagaagaacgucacggugacccacuccgugaaccugcuggaggacaagcacaacgggaagcucugcaagcugcgcggcgucgcgccccugcaccucgggaagugcaacaucgccggcuggauccuggggaacccggagugcgagagccuguccaccgccagcuccuggagcuacaucguggagaccuccagcuccgacaacggcacgugcuaccccggcgacuucaucgacuacgaggagcuccgggagcagcugagcuccgugagcuccuucgagcgcuucgagaucuuccccaagaccagcuccuggcccaaccacgacagcaacaagggggucaccgccgccugcccgcacgccggcgcgaaguccuucuacaagaaccugaucuggcucgugaagaaggggaacagcuaccccaagcuguccaagagcuacaucaacgacaagggcaaggaggugcugguccucugggggauccaccaccccagcaccuccgccgaccagcagggccuguaccagaacgccgacgccuacguguucgugggcagcucccgguacagcaagaaguucaagcccgagaucgccauccgcccgaagguccgggaccaggaggggcgcaugaacuacuacuggacgcugguggagcccggcgacaagaucaccuucgaggcgaccgggaaccucguggucccccgguacgccuucgccauggagcgcaacgccggcuccggcaucaucaucagcgacacccccgugcacgacugcaacacgaccugccagaccccgaagggggccaucaacaccucccugcccuuccacaacauccaccccaucacgaucggcaagugccccaaguacgucaagagcaccaagcugcggcucgcgaccgggcugcgcaacgugccguccauccagagccggggccuguucggggccaucgccggcuucaucgagggcggguggaccggcaugguggacgggugguacggcuaccaccaccagaacgagcagggguccggcuacgccgccgaccucaagagcacgcagaacgcgaucgacgagaucaccaacaaggugaacuccgucaucgagaagaugaacacccaguucaccgccgugggcaaggaguucaaccaccuggagaagcgcaucgagaaccugaacaagaaggucgacgacggguuccucgacaucuggacguacaacgccgagcugcuggugcuccuggagaacgagcggacccuggacuaccacgacagcaacgugaagaaccucuacgagaagguccgcucccagcugaagaacaacgccaaggagaucggcaacgggugcuucgaguucuaccacaagugcgacaacacgugcauggagagcgugaagaacggcaccuacgacuaccccaaguacuccgaggaggccaagcugaaccgggaggagaucgacggggugaagcucgagagcacccgcaucuaccagauccuggcgaucuacuccaccgucgccagcagccuggugcucguggucucccugggcgccaucagcuucuggaugugcuccaacggcagccugcagugccggaucugcaucuga

SEQ ID NO: 73280 - RNA, 1701 nt, Artificial Sequence; identical to SEQ ID NO: 73275
  derived and/or modified CDS sequence (opt1) from hemagglutinin__InfluenzaA__AFN18141

SEQ ID NO: 73281 - RNA, 1701 nt, Artificial Sequence; identical to SEQ ID NO: 67554
  derived and/or modified CDS sequence (opt1) from hemagglutinin__InfluenzaA__AFN18148

SEQ ID NO: 73282 - RNA, 1701 nt, Artificial Sequence; identical to SEQ ID NO: 67857
  derived and/or modified CDS sequence (opt1) from hemagglutinin__InfluenzaA__AFN18155

SEQ ID NO: 73283 - RNA, 1701 nt, Artificial Sequence
  derived and/or modified CDS sequence (opt1) from hemagglutinin__InfluenzaA__AFN18157
augaaggccauccuggugguccuccuguacaccuucgccaccgcgaacgccgacacgcugugcaucggcuaccacgccaacaacagcaccgacaccguggacaccgugcucgagaagaacgucacggugacccacuccgugaaccugcuggaggacaagcacaacgggaagcucugcaagcugcgcggcgucgcgccccugcaccucgggaagugcaacaucgccggcuggauccuggggaacccggagugcgagagccuguccaccgccagcuccuggagcuacaucguggagaccuccagcuccggcaacggcacgugcuaccccggggacuucaucgacuacgaggagcuccgggagcagcugagcuccgugagcuccuucgagcgcuucgagaucuuccccaagaccagcuccuggcccaaccacgacagcaacaagggcgucaccgccgccugcccgcacgccggggcgaaguccuucuacaagaaccugaucuggcucgugaagaagggcaacagcuaccccaagcuguccaagagcuacaucaacgacaaggggaaggaggugcugguccucuggggcauccaccaccccagcaccuccgccgaccagcagagccuguaccagaacgccgacgccuacgccuucgugggcacgucccgguacagcaagaaguucaagcccgagaucgcgauccgcccgaaggugcgggaccaggaggggcgcaugaacuacuacuggacccuggucgagcccggcgacaagaucaccuucgaggccaccgggaaccucguggugccccgguacgccuucgccauggagcgcaacgccggcuccggcaucaucaucagcgacacgcccguccacgacugcaacacgaccugccagaccccgaagggggcgaucaacaccucccugcccuuccagaacauccaccccaucaccaucggcaagugccccaaguacgucaagagcaccaagcugcggcucgccaccgggcugcgcaacgugccguccauccagagccggggccuguucggggccaucgccggcuucaucgagggcggguggacgggcaugguggacgggugguacggcuaccaccaccagaacgagcagggguccggcuacgccgcggaccucaagagcacccagaacgccaucgacgagaucaccaacaaggugaacuccgugaucgagaagaugaacacccaguucacggccgucggcaaggaguucaaccaccuggagaagcgcaucgagaaccugaacaagaagguggacgacggguuccucgacaucuggaccuacaacgccgagcugcugguccuccuggagaacgagcggacccuggacuaccacgacagcaacgugaagaaccucuacgagaaggugcgcucccagcugaagaacaacgccaaggagaucggcaacgggugcuucgaguucuaccacaagugcgacaacacgugcauggagagcgucaagaacggcaccuacgacuaccccaaguacuccgaggaggcgaagcugaaccgggaggagaucgacggggugaagcucgagagcacccgcaucuaccagauccuggccaucuacuccaccguggccagcagccugguccucguggugucccugggcgccaucagcuucuggaugugcuccaacggcagccugcagugccggaucugcaucuga

SEQ ID NO: 73284 - RNA, 1701 nt, Artificial Sequence
  derived and/or modified CDS sequence (opt1) from hemagglutinin__InfluenzaA__AFN18159
auggaggccauccuggugguccuccuguacaccuucgccaccgcgaacgccgacacgcugugcaucggcuaccacgccaacaacagcaccgacaccguggacaccgugcucgagaagaacgucacggugacccacuccgugaaccugcuggaggacaagcacaacgggaagcucugcaagcugcgcggcgucgcgccccugcaccucgggaagugcaacaucgccggcuggauccuggggaacccggagugcgagagccuguccaccgccagcuccuggagcuacaucguggagaccuccagcuccgacaacggcacgugcuaccccggcgacuucaucgacuacgaggagcuccgggagcagcugagcuccgugagcuccuucgagcgcuucgagaucuuccccaagaccagcuccuggcccaaccacgacagcaacaagggggucaccgccgccugcccgcacgccggcuccaagagcuucuacaagaaccugaucuggcucgugaagaaggggaacuccuaccccaagcugagcaagagcuacaucaacgacaagggcaaggaggugcugguccucugggggauccaccaccccuccaccagcgcggaccagcagucccuguaccagaacgccgacgccuacguguucgugggcagcucccgguacagcaagaaguucaagcccgagaucgccauccgcccgaagguccgggaccaggagggccgcaugaacuacuacuggacgcugguggagcccggggacaagaucaccuucgaggccaccggcaaccucguggucccccgguacgcguucgccauggagcgcaacgccggguccggcaucaucaucagcgacacccccgugcacgacugcaacacgaccugccagaccccgaagggcgccaucaacaccucccugcccuuccacaacauccaccccaucacgaucgggaagugccccaaguacgucaagagcaccaagcugcggcucgccaccggccugcgcaacgugccguccauccagagccgggggcuguucggcgcgaucgccggguucaucgagggcggcuggaccgggaugguggacggcugguacggguaccaccaccagaacgagcagggcuccggguacgccgccgaccucaagagcacgcagaacgccaucgacgagaucaccaacaaggugaacuccgucaucgagaagaugaacacccaguucaccgcggugggcaaggaguucaaccaccuggagaagcgcaucgagaaccugaacaagaaggucgacgacggcuuccucgacaucuggacguacaacgccgagcugcuggugcuccuggagaacgagcggacccuggacuaccacgacagcaacgugaagaaccucuacgagaagguccgcaaccagcugaagaacaacgccaaggagaucgggaacggcugcuucgaguucuaccacaagugcgacaacacgugcauggaguccgugaagaacgggaccuacgacuaccccaaguacagcgaggaggccaagcugaaccgggaggagaucgacggcgugaagcucgaguccacccgcaucuaccagauccuggccaucuacagcaccgucgcgagcucccuggugcucguggucagccugggggccaucuccuucuggaugugcagcaacggcucccugcagugccggaucugcaucuga

SEQ ID NO: 73285 - RNA, 1701 nt, Artificial Sequence
  derived and/or modified CDS sequence (opt1) from hemagglutinin__InfluenzaA__AFN18164
augaaggccauccuggugguccuccuguacaccuucgccaccacgaacgcggacacccugugcaucggcuaccacgccaacaacagcaccgacaccguggacacggugcucgagaagaacgucaccgugacccacuccgugaaccugcuggaggacaagcacaacgggaagcucugcaagcugcgcggcgucgcgccccugcaccucgggaagugcaacaucgccggcuggauccuggggaacccggagugcgagagccuguccaccgccagcuccuggagcuacaucguggagacguccagcuccgacaacgggaccugcuaccccggcgacuucaucgacuacgaggagcuccgggagcagcugagcuccgugagcuccuucgagcgcuucgagaucuuccccaagaccagcuccuggcccaaccacgacagcaacaagggcgucaccgccgccugcccgcacgccggcgccaaguccuucuacaagaaccugaucuggcucgugaagaaggggaacagcuaccccaagcuguccaagagcuacaucaacgacaagggcaaggaggugcugguccucugggggauccaccaccccagcacguccgcggaccagcagagccuguaccagaacgccgacgccuacguguucgugggcaccucccgguacagcaagaaguucaagcccgagaucgccauccgcccgaagguccgggaccaggagggccgcaugaacuacuacuggacccugguggagcccggggacaagaucaccuucgaggccacgggcaaccucaucgugccccgguacgcguucgccauggagcgcaacgccggguccggcaucaucaucagcaacacccccguccacgacugcaacacgaccugccagaccccgaagggcgccaucaacaccucccugcccuuccagaacauccaccccaucaccaucgggaagugccccaaguacgucaagagcaccaagcugcggcucgccacgggccugcgcaacgugccguccauccagagccgggggcuguucggcgcgaucgccggguucaucgagggcggcuggaccgggaugguggacggcugguacggguaccaccaccagaacgagcagggcuccggguacgccgccgaccucaagagcacccagaacgccaucgacaagaucaccaacaaggugaacuccgugaucgagaagaugaacacgcaguucaccgcggucggcaaggagcugaaccaccuggagaagcgcaucgagaaccucaacaagaagguggacgacggcuuccuggacaucuggaccuacaacgccgagcugcucguccugcuggagaacgagcggacccucgacuaccacgacagcaacgugaagaaccuguacgagaaggugcgcucccagcugaagaacaacgccaaggagaucgggaacggcugcuucgaguucuaccacaagugcgacaacacgugcauggagagcgucaagaacgggaccuacgacuaccccaaguacuccgaggaggccaagcucaaccgggaggagaucgacggcgugaagcuggagagcacccgcaucuaccagauccuggccguguacuccaccgucgcgagcagccucgugcugguggucucccugggggccaucagcuucuggaugugcuccaacggcagccuccagugccggaucugcaucuga

SEQ ID NO: 73286 - RNA, 1701 nt, Artificial Sequence
  derived and/or modified CDS sequence (opt1) from hemagglutinin__InfluenzaA__AFN18171
augaaggccauccuggugguccuccuguacaccuucgccaccgcgaacgccgacacgcugugcaucggcuaccacgccaacaacagcaccgacaccguggacaccgugcucgagaagaacgucacggugacccacuccgugaaccugcuggaggacaagcacagcgggaagcucugcaagcugcgcggcgucgcgccccugcaccucgggaagugcaacaucgccggcuggauccuggggaacccggagugcgagucccugagcaccgcguccagcugguccuacaucguggagaccagcuccagcgacaacggcaagugcuaccccggcgacuucaucgacuacgaggagcuccgggagcagcuguccagcguguccagcuucgagcgcuucgagaucuuccccaagacguccagcuggcccaaccacgacuccaacaagggggucaccgccgccugcccgcacgccggcgccaagagcuucuacaagaaccugaucuggcucgugaagaaggggaacuccuaccccaagcugagcaagagcuacaucaacgacaagggcaaggaggugcugguccucugggggauccaccaccccuccaccagcgccgaccagcagucccuguaccagaacgccgacgccuacguguucgugggcaccagcaaguacuccaagaaguucaagcccgagaucgccauccggccgaagguccgcgaccaggagggccggaugaacuacuacuggacgcugguggagcccggggacaagaucaccuucgaggcgaccggcaaccucguggucccccgcuacgccuucgccauggagcggaacgccgggagcggcaucaucaucuccgacacccccgugaaggacugcaacacgaccugccagaccccgaagggcgccaucaacaccagccugcccuuccagaacauccaccccaucacgaucgggaagugccccaaguacgugaaguccaccaagcugcgccucgcgaccggccugcggaacgucccgagcauccagucccgcgggcuguucggcgccaucgccggguucaucgagggcggcuggaccgggaugguggacggcugguacggguaccaccaccagaacgagcagggcagcggguacgccgccgaccucaaguccacgcagaacgcgaucgacgagaucaccaacaaggugaacagcgucaucgagaagaugaacacccaguucaccgccgugggcaaggaguucaaccaccuggagaagcggaucgagaaccugaacaagaaggucgacgacggcuuccucgacaucuggacguacaacgccgagcugcuggugcuccuggagaacgagcgcacccuggacuaccacgacuccaacgugaagaaccucuacgagaagguccggagccagcugaagaacaacgccaaggagaucgggaacggcugcuucgaguucuaccacaagugcgacaacacgugcauggaguccgugaagaacgggaccuacgacuaccccaaguacagcgaggaggccaagcugaaccgcgaggagaucgacggcgugaagcucgaguccacccggaucuaccagauccuggcgaucuacagcaccgucgccagcucccuggugcucguggucagccugggggccaucuccuucuggaugugcagcaacggcucccugcagugccgcaucugcaucuga

SEQ ID NO: 73287 - RNA, 1701 nt, Artificial Sequence
  derived and/or modified CDS sequence (opt1) from hemagglutinin__InfluenzaA__AFN18176
augaaggccauccuggugguccuccuguacaccuucgccaccgcgaacgccgacacgcugugcaucggcuaccacgccaacaacagcaccgacaccguggacaccgugcucgagaagaacgucacggugacccacuccgugaaccugcuggaggacaagcacaacgggaagcucugcaagcugcgcggcgucgcgccccugcaccucgggaagugcaacaucgccggcuggauccuggggaacccggagugcgagagccuguccaccgccagcuccuggagcuacaucguggagaccuccagcuccgacaacggcacgugcuaccccggcgacuucaucgacuacgaggagcuccgggagcagcugagcuccgugagcuccuucgagcgcuucgagaucuuccccaagaccagcuccuggcccaaccacgacagcaacaagggggucaccgccgccugcccgcacgccggcgcgaaguccuucuacaagaaccugaucuggcucgugaagaaggggaacagcuaccccaagcuguccaagagcuacaucaacgacaagggcaaggaggugcugguccucugggggauccaccaccccagcaccuccgccgaccagcagagccuguaccagaacgccgacgccuacguguucgugggcacgucccgguacagcaagaaguucaagcccgagaucgccauccgcccgaagguccgggaccaggagggccgcaugaacuacuacuggacccugguggagcccggggacaagaucaccuucgaggcgaccggcaaccuccuggugccccgguacgccuucgccauggagcgcaacgccggguccggcaucaucaucagcgacacgcccguccacgacugcaacacgaccugccagaccccgaagggcgccaucaacaccucccugcccuuccagaacauccaccccaucaccaucgggaagugccccaaguacgucaagagcaccaagcuccggcuggcgaccggccugcgcaacaucccguccauccagagccgggggcuguucggcgccaucgccggguucaucgagggcggcuggacggggaugguggacggcugguacggguaccaccaccagaacgagcagggcuccggguacgccgccgaccucaagagcacccagaacgcgaucgacgagaucaccaacaaggugaacuccgugaucgagaagaugaacacccaguucacggccgugggcaaggaguucaaccaccuggagaagcgcaucgagaaccucaacaagaaggucgacgacggcuuccuggacaucuggaccuacaacgccgagcugcucgugcugcuggagaacgagcggacccucgacuaccacgacagcaacgucaagaaccuguacgagaaggugcgcucccagcugaagaacaacgccaaggagaucgggaacggcugcuucgaguucuaccacaagugcgacaacacgugcauggagagcgugaagaacgggaccuacgacuaccccaaguacuccgaggaggccaagcucaaccgggaggagaucgacggcgucaagcuggagagcacccgcaucuaccagauccuggcgaucuacuccaccguggccagcagccucgugcuggucgugucccugggggccaucagcuucuggaugugcuccaacggcagccuccagugccggaucugcaucuga

SEQ ID NO: 73288 - RNA, 1701 nt, Artificial Sequence
  derived and/or modified CDS sequence (opt1) from hemagglutinin__InfluenzaA__AFN18183
augaaggccauccuggugguccuccuguacaccuucgccaccgcgaacgccgacacgcugugcaucggcuaccacgccaacaacagcaccgacaccguggacaccauccucgagaagaacgugacggucacccacuccgugaaccugcuggaggacaagcacaacgggaagcucugcaagcugcgcggcguggcgccccugcaccucgggaagugcaacaucgccggcuggauccuggggaacccggagugcgagagccuguccaccgccagcuccuggagcuacaucgucgagaccuccagcuccgacaacggcacgugcuaccccggcgacuucaucgacuacgaggagcuccgggagcagcugagcuccgugagcuccuucgagcgcuucgagaucuuccccaagaccagcuccuggcccaaccacgacagcaacaagggggugaccgccgccugcccgcacgccggcgcgaaguccuucuacaagaaccugaucuggcucgucaagaaggggaacagcuaccccaagcuguccaagagcuacaucaacgacaagggcaaggaggugcuggugcucugggggauccaccaccccagcaccuccgccgaccagcagagccuguaccagaacgccgacgccuacgucuucgugggcacgucccgguacagcaagaaguucaagcccgagaucgccauccgcccgaaggugcgggaccaggagggccgcaugaacuacuacuggacccuggucgagcccggggacaagaucaccuucgaggcgaccggcaaccucauggugccccgguacgccuucgccauggagcgcaacgccggguccggcaucaucaucagcgacacgcccgugcacgacugcaacacgaccugccagaccccgaagggcgccaucaacaccucccugcccuuccagaacauccaccccaucaccaucgggaagugccccaaguacgucaagagcaccaagcugcggcucgcgaccggccugcgcaacgugccguccauccagagccgggggcuguucggcgccaucgccggguucaucgagggcggcuggacggggaugguggacggcugguacggguaccaccaccagaacgagcagggcuccggguacgccgccgaccucaagagcacccagaacgcgaucgacgagaucaccaacaaggucaacuccgugaucgagaagaugaacacccaguucacggccgugggcaaggaguucaaccaccuggagaagcgcaucgagaaccugaacaagaaggucgacgacggcuuccucgacaucuggaccuacaacgccgagcugcuggugcuccuggagaacgagcggacccuggacuaccacgacagcaacgucaagaaccucuacgagaaggugcgcucccagcugaagaacaacgccaaggagaucgggaacggcugcuucgaguucuaccacaagugcgacaacacgugcauggagagcgugaagaacgggaccuacgacuaccccaaguacuccgaggaggccaagcugaaccgggaggagaucgacggcgucaagcucgagagcacccgcaucuaccagauccuggcgaucuacuccaccguggccagcagccuggugcucgucgugucccugggggccaucagcuucuggaugugcuccaacggcagccugcagugccggaucugcaucuga

SEQ ID NO: 73289 - RNA, 1701 nt, Artificial Sequence; identical to SEQ ID NO: 68245
  derived and/or modified CDS sequence (opt1) from hemagglutinin__InfluenzaA__AFN18195

SEQ ID NO: 73290 - RNA, 1701 nt, Artificial Sequence; identical to SEQ ID NO: 66693
  derived and/or modified CDS sequence (opt1) from hemagglutinin__InfluenzaA__AFN18200

SEQ ID NO: 73291 - RNA, 1701 nt, Artificial Sequence
  derived and/or modified CDS sequence (opt1) from hemagglutinin__InfluenzaA__AFN18207
augaaggccauccuggugguccuccuguacaccuucgccaccgcgaacgccgacacgcugugcaucggcuaccacgccaacaacagcaccgacaccguggacaccgugcucgagaagaacgucacggugacccacuccgugaaccugcuggaggacaagcacaacgggaagcucugcaagcugcgcggcgucgcgccccugcaccucgggaagugcaacaucgccggcuggauccuggggaacccggagugcgagagccuguccaccgccagcuccuggagcuacaucguggagaccuccagcuccgacaacggcacgugcuaccccggcgacuucaucgacuacgaggagcuccgggagcagcugagcuccgugagcuccuucgagcgcuucgagaucuuccccaagaccagcuccuggcccaaccacgacagcaacaagggggucaccgccgccugcccgcacgccggcgcgaaguccuucuacaagagccugaucuggcucgugaagaaggggaacuccuaccccaagcugagcaagagcuacaucaacgacaagggccgggaggugcugguccucugggggauccaccaccccuccaccagcgccgaccagcagucccuguaccagaacgccgacgccuacguguucgugggcacgagccgcuacuccaagaaguucaagcccgagaucgccauccggccgaagguccgcgaccaggagggccggaugaacuacuacuggacccugguggagcccggggacaagaucaccuucgaggcgaccggcaaccucguggucccccgcuacgccuucgccauggagcggaacgccgggagcggcaucaucaucuccgacacgcccgugcacgacugcaacacgaccugccagaccccgaagggcgccaucaacaccagccugcccuuccagaacauccaccccaucaccaucgggaagugccccaaguacgugaaguccaccaagcugcgccucgcgaccggccugcggaacgucccgagcauccagucccgcgggcuguucggcgccaucgccggguucaucgagggcggcuggacggggaugguggacggcugguacggguaccaccaccagaacgagcagggcagcggguacgccgccgaccucaaguccacccagaacgcgaucgacgagaucaccaacaaggugaacagcgucaucgagaagaugaacacccaguucacggccgugggcaaggaguucaaccaccuggagaagcggaucgagaaccugaacaagaaggucgacgacggcuuccucgacaucuggaccuacaacgccgagcugcuggugcuccuggagaacgagcgcacccuggacuaccacgacuccaacgugaagaaccucuacgagaagguccggagccagcugaagaacaacgccaaggagaucgggaacggcugcuucgaguucuaccacaagugcgacaacacgugcauggaguccgugaagaacgggaccuacgacuaccccaaguacagcgaggaggccaagcugaaccgcgaggagaucgacggcgugaagcucgaguccacccggaucuaccagauccuggcgaucuacagcaccgucgccagcucccuggugcucguggucagccugggggccaucuccuucuggaugugcagcaacggcucccugcagugccgcaucugcaucuga

SEQ ID NO: 73292 - RNA, 1701 nt, Artificial Sequence
  derived and/or modified CDS sequence (opt1) from hemagglutinin__InfluenzaA__AFN18214
augaaggccauccuggugguccuccuguacaccuucgccaccgcgaacgccgacacgcugugcaucggcuaccacgccaacaacagcaccgacaccguggacaccgugcucgagaagaacgucacggugacccacuccgugaacauccuggaggacaagcacaacgggaagcugugcaagcuccgcggcgucgcgccccugcaccuggggaagugcaacaucgccggcuggauccucgggaacccggagugcgagagccuguccaccgccagcuccuggagcuacaucguggagaccuccagcuccgacaacggcacgugcuaccccggcgacuucaucaacuacgaggagcugcgggagcagcucagcuccgugagcuccuucgagcgcuucgagaucuuccccaagaccagcuccuggcccaaccacgacagcaacaagggggucaccgccgccugcccgcacgccggcgcgaaguccuucuacaagaaccugaucuggcuggugaagaaggggaacagcuaccccaagcucuccaagagcuacaucaacgacaagggcaaggaggugcugguccugugggggauccaccaccccagcaccuccgccgaccagcagagccucuaccagaacgccgacgccuacguguucgugggcuccagccgguacuccaagaaguucaagcccgagaucgccauccgcccgaagguccgggaccaggagggccgcaugaacuacuacuggacgcugguggagcccggggacaagaucaccuucgaggcgaccggcaaccugguggucccccgguacgccuucgccauggagcgcaacgccgggagcggcaucaucaucuccgacacccccgugcacgacugcaacacgaccugccagaccccgaagggcgccaucaacaccagccuccccuuccagaacauccaccccaucacgaucgggaagugccccaaguacgugaaguccaccaagcugcggcuggcgaccggccuccgcaacgucccgagcauccagucccgggggcuguucggcgccaucgccggguucaucgagggcggcuggaccgggaugguggacggcugguacggguaccaccaccagaacgagcagggcagcggguacgccgccgaccugaaguccacgcagaacgcgaucgacgagaucaccaacaaggugaacagcgucaucgagaagaugaacacccaguucaccgccgugggcaaggaguucaaccaccucgagaagcgcaucgagaaccugaacaagaaggucgacgacggcuuccuggacaucuggacguacaacgccgagcuccuggugcugcucgagaacgagcggacccuggacuaccacgacuccaacgugaagaaccuguacgagaagguccgcagccagcucaagaacaacgccaaggagguggggaacggcugcuucgaguucuaccacaagugcgacaacacgugcauggaguccgugaagaacgggaccuacgacuaccccaaguacagcgaggaggccaagcugaaccgggaggagaucgacggcgucaagcuggaguccacccgcaucuaccagauccucgcgaucuacagcaccgccgccagcucccuggugcugguggucagccucggggccaucuccuucuggaugugcagcaacggcucccugcagugccggaucugcaucuga

SEQ ID NO: 73293 - RNA, 1701 nt, Artificial Sequence; identical to SEQ ID NO: 69248
  derived and/or modified CDS sequence (opt1) from hemagglutinin__InfluenzaA__AFN18224

SEQ ID NO: 73294 - RNA, 1701 nt, Artificial Sequence; identical to SEQ ID NO: 68245
  derived and/or modified CDS sequence (opt1) from hemagglutinin__InfluenzaA__AFN18231

SEQ ID NO: 73295 - RNA, 1701 nt, Artificial Sequence
  derived and/or modified CDS sequence (opt1) from hemagglutinin__InfluenzaA__AFN18233
augaaggccauccuggugguccuccuguacaccuucgccaccgcgaacgccgacacgcugugcaucggcuaccacgccaacaacagcaccgacaccguggacaccgugcucgagaagaacgucacggugacccacuccgugaaccugcuggaggacaagcacaacgggaagcucugcaagcugcgcggcgucgcgccccugcaccucgggaagugcaacaucgccggcuggauccuggggaacccggagugcgagagccuguccaccgcgagcuccuggagcuacaucguggagaccuccagcuccgacaacggcacgugcuaccccggcgacuucaucgacuacgaggagcuccgggagcagcugagcuccgugagcuccuucgagcgcuucgagaucuuccccaagaccagcuccuggcccaaccacgacccgaacaagggggucaccgccgccugcccccacgccggcgccaagagcuucuacaagaaccugaucuggcucgugaagaaggggaacuccuaccccaagcugagcaaguccuacaucaacgacaagggcaaggaggugcugguccucugggggauccaccaccccagcaccagcgccgaccagcagucccuguaccagaacgccgacgccuacguguucgugggcacgagccgguacucccgcaaguucaagccggagaucgccauccggcccaagguccgcgaccaggagggccggaugaacuacuacuggacccugguggagcccggggacaagaucaccuucgaggcgaccggcaaccucguggucccccgcuacgccuucgccauggagcggaacgccgggagcggcaucaucaucuccgacacgccggugcacgacugcaacacgaccugccagacccccaagggcgccaucaacaccagccugcccuuccagaacauccaccccaucaccaucgggaagugcccgaaguacgugaaguccaccaagcugcgccucgcgaccggccugcggaacguccccagcauccagucccgcgggcuguucggcgccaucgccggguucaucgagggcggcuggacggggaugguggacggcugguacggguaccaccaccagaacgagcagggcagcggguacgccgccgaccucaaguccacccagaacgcgaucgacgagaucaccaacaaggugaacagcgucaucgagaagaugaacacccaguucacggccgugggcaaggaguucaaccaccuggagaagcggaucgagaaccugaacaagaaggucgacgacggcuuccucgacaucuggaccuacaacgccgagcugcuggugcuccuggagaacgagcgcacccuggacuaccacgacuccaacgugaagaagcucuacgagaagguccggagccagcugaagaacaacgccaaggagaucgggaacggcugcuucgaguucuaccacaagugcgacaacacgugcauggaguccgugaagaacgggaccuacgacuaccccaaguacagcgaggaggccaagcugaaccgcgaggagaucgacggcgugaagcucgaguccacccggaucuaccagauccuggcgaucuacagcaccgucgccuccagccuggugcucguggucagccugggggccaucuccuucuggaugugcagcaacggcucccugcagugccgcaucugcaucuga

SEQ ID NO: 73296 - RNA, 1701 nt, Artificial Sequence
  derived and/or modified CDS sequence (opt1) from hemagglutinin__InfluenzaA__AFN18243
augaaggccauccuggugguccuccuguacaccuucgccaccgcgaacgccgacacgcugugcaucggcuaccacgccaacaacagcaccgacaccguggacaccgugcucgagaagaacgucacggugacccacuccgugaaccugcuggaggacaagcacaacgggaagcucugcaagcugcgcggcgucgcgccccugcaccucgggaagugcaacaucgccggcuggauccuggggaacccggagugcgagagccuguccaccgccagcuccuggagcuacaucguggagaccuccagcuccgacaacggcacgugcuaccccggcgacuucaucgacuacgaggagcuccgggagcagcugagcuccgugagcuccuucgagcgcuucgagaucuuccccaagaccagcuccuggcccaaccacgacagcaacaagggggucaccgccgccugcccgcacgccggcgcgaaguccuucuacaagaaccugaucuggcucgugaagaaggggaacagcuaccccaagcuguccaagagcuacaucaacgacaagggcaaggaggugcugguccucugggggauccaccaccccagcaccuccgccgaccagcagagccuguaccagaacgccgacacguacguguucgugggcaccucccgguacagcaagaaguucaagcccgagaucgccauccgcccgaagguccgggaccaggagggccgcaugaacuacuacuggacccugguggagcccggggacaagaucaccuucgaggccacgggcaaccucguggucccccgguacgcguucgccauggagcgcaacgccggguccggcaucaucaucagcgacacccccgugcacgacugcaacacgaccugccagaccccgaagggcgccaucaacaccucccugcccuuccagaacauccaccccaucaccaucgggaagugccccaaguacgucaagagcaccaagcugcggcucgccacgggccugcgcaacgugccguccauccagagccgggggcuguucggcgcgaucgccggguucaucgagggcggcuggaccgggaugguggacggcugguacggguaccaccaccagaacgagcagggcuccggguacgccgccgaccucaagagcacccagaacgccaucgacgagaucaccaacaaggugaacuccgucaucgagaagaugaacacgcaguucaccgcggugggcaaggaguucaaccaccuggagaagcgcaucgagaaccugaacaagaaggucgacgacggcuuccucgacaucuggaccuacaacgccgagcugcuggugcuccuggagaacgagcggacccuggacuaccacgacagcaacgugaagaaccucuacgagaagguccgcucccagcugaagaacaacgccaaggagaucgggaacggcugcuucgaguucuaccacaagugcgacaacacgugcauggagagcgugaagaacgggaccuacgacuaccccaaguacuccgaggaggccaagcugaaccgggaggagaucgacggcgugaagcucgagagcacccgcaucuaccagauccuggccaucuacuccaccgucgcgagcagccuggugcucguggucucccugggggccaucagcuucuggaugugcuccaacggcagccugcagugccggaucugcaucuga

SEQ ID NO: 73297 - RNA, 1701 nt, Artificial Sequence; identical to SEQ ID NO: 72782
  derived and/or modified CDS sequence (opt1) from hemagglutinin__InfluenzaA__AFN18245

SEQ ID NO: 73298 - RNA, 1701 nt, Artificial Sequence; identical to SEQ ID NO: 69248
  derived and/or modified CDS sequence (opt1) from hemagglutinin__InfluenzaA__AFN18255

SEQ ID NO: 73299 - RNA, 1701 nt, Artificial Sequence; identical to SEQ ID NO: 73296
  derived and/or modified CDS sequence (opt1) from hemagglutinin__InfluenzaA__AFN18260

SEQ ID NO: 73300 - RNA, 1701 nt, Artificial Sequence; identical to SEQ ID NO: 73296
  derived and/or modified CDS sequence (opt1) from hemagglutinin__InfluenzaA__AFN18267

SEQ ID NO: 73301 - RNA, 1701 nt, Artificial Sequence
  derived and/or modified CDS sequence (opt1) from hemagglutinin__InfluenzaA__AFN18269
augaaggccauccuggugguccuccuguacaccuucgccaccgcgaacgccgacacgcugugcaucggcuaccacgccaacaacagcaccgacaccguggacaccgugcucgagaagaacgucacggugacccacuccgugaaccugcuggaggacaagcacaacgggaagcucugcaagcugcgcggcgucgcgccccugcaccucgggaagugcaacaucgccggcuggauccuggggaacccggagugcgagagccuguccaccgccagcuccuggagcuacaucguggagaccuccagcuccgacaacggcacgugcuaccccggcgacuucaucgacuacgaggagcuccgggagcagcugagcuccgugagcuccuucgagaaguucgagaucuuccccaagaccagcuccuggcccaaccacgacagcaacaagggggucaccgccgccugcccgcacgccggcgcgaaguccuucuacaagaaccugaucuggcucgugaagaaggggaacagcuaccccaagcuguccaagagcuacaucaacgacaagggcaaggaggugcugguccucugggggauccaccaccccagcaccuccgccgaccagcagagccuguaccagaacgccgacgccuacguguucgugggcacgucccgcuacagcaagaaguucaagcccgagaucgccauccggccgaagguccgcgaccaggagggccggaugaacuacuacuggacccugguggagcccggggacaagaucaccuucgaggcgaccggcaaccucguggucccccgcuacgccuucgccauggagcggaacgccggguccggcaucaucaucagcgacacgcccgugcacgacugcaacacgaccugccagaccccgaagggcgccaucaacaccucccugcccuuccagaacauccaccccaucaccaucgggaagugccccaaguacgucaagagcaccaagcugcgccucgcgaccggccugcggaacgugccguccauccagagccgcgggcuguucggcgccaucgccggguucaucgagggcggcuggacggggaugguggacggcugguacggguaccaccaccagaacgagcagggcuccggguacgccgccgaccucaagagcacccagaacgcgaucgacgagaucaccaacaaggugaacuccgucaucgagaagaugaacacccaguucacggccgugggcaaggaguucaaccaccuggagaagcggaucgagaaccugaacaagaaggucgacgacggcuuccucgacaucuggaccuacaacgccgagcugcuggugcuccuggagaacgagcgcacccuggacuaccacgacagcaacgugaagaaccucuacgagaagguccggucccagcugaagaacaacgccaaggagaucgggaacggcugcuucgaguucuaccacaagugcgacaacacgugcauggagagcgugaagaacgggaccuacgacuaccccaaguacuccgaggaggccaagcugaaccgcgaggagaucgacggcgugaagcucgagagcacccggaucuaccagauccuggcgaucuacuccaccgucgccagcagccuggugcucguggucucccugggggccaucagcuucuggaugugcuccaacggcagccugcagugccgcaucugcaucuga

SEQ ID NO: 73302 - RNA, 1701 nt, Artificial Sequence; identical to SEQ ID NO: 67857
  derived and/or modified CDS sequence (opt1) from hemagglutinin__InfluenzaA__AFN18271

SEQ ID NO: 73303 - RNA, 1701 nt, Artificial Sequence; identical to SEQ ID NO: 68245
  derived and/or modified CDS sequence (opt1) from hemagglutinin__InfluenzaA__AFN18273

SEQ ID NO: 73304 - RNA, 1701 nt, Artificial Sequence; identical to SEQ ID NO: 67857
  derived and/or modified CDS sequence (opt1) from hemagglutinin__InfluenzaA__AFN18280

SEQ ID NO: 73305 - RNA, 1701 nt, Artificial Sequence; identical to SEQ ID NO: 67491
  derived and/or modified CDS sequence (opt1) from hemagglutinin__InfluenzaA__AFN18303

SEQ ID NO: 73306 - RNA, 1701 nt, Artificial Sequence
  derived and/or modified CDS sequence (opt1) from hemagglutinin__InfluenzaA__AFN18305
augaaggccauccuggugguccuccuguacaccuucgccaccgcgaacgccgacacgcugugcaucggcuaccacgccaacaacagcaccgacaccguggacaccgugcucgagaagaacgucacggugacccacuccgccaaccugcuggaggacaagcacaacgggaagcucugcaagcugcgcggcguggcgccccugcaccucgggaagugcaacaucgccggcuggauccuggggaacccggagugcgagagccuguccaccgccagcuccuggagcuacaucgucgagaccuccagcuccgacaacggcacgugcuaccccggcgacuucaucgacuacgaggagcuccgggagcagcugagcuccgugagcuccuucgagcgcuucgagaucuuccccaagaccagcuccuggcccaaccacgacagcaacaagggggugaccgccgccugcccgcacgcgggcgccaaguccuucuacaagaaccugaucuggcucgucaagaaggggaacagcuaccccaagcuguccaagagcuacaucaacgacaagggcaaggaggugcuggugcucugggggauccaccaccccagcaccuccgccgaccagcagagccuguaccagaacgccgacgccuacgucuucgugggcacgucccgguacagcaagaaguucaagcccgagaucgcgauccgcccgaaggugcgggaccaggagggccgcaugaacuacuacuggacccuggucgagcccggggacaagaucaccuucgaggccaccggcaaccucguggugccccgguacgccuucgccauggagcgcaacgccggguccggcaucaucaucagcgacacgcccguccacgacugcaacacgaccugccagaccccgaagggcgcgaucaacaccucccugcccuuccagaacauccaccccaucaccaucgggaagugccccaaguacgucaagagcaccaagcugcggcucgccaccggccugcgcaacgugccguccauccagagccgggggcuguucggcgccaucgccggguucaucgagggcggcuggacggggaugguggacggcugguacggguaccaccaccagaacgagcagggcuccggguacgccgcggaccucaagagcacccagaacgccaucgacaagaucaccaacaaggugaacuccgugaucgagaagaugaacacccaguucacggccgucggcaaggaguucaaccaccugggcaagcgcaucgagaaccugaacaagaagguggacgacggguuccucgacaucuggaccuacaacgccgagcugcugguccuccuggagaacgagcggacccuggacuaccacgacagcaacgugaagaaccucuacgagaaggugcgcucccagcugaagaacaacgccaaggagaucggcaacgggugcuucgaguucuaccacaagugcgacaacacgugcauggagagcgucaagaacggcaccuacgacuaccccaaguacuccgaggaggcgaagcugaaccgggaggagaucgacggggugaagcucgagagcacccgcaucuaccagauccuggccaucuacuccaccguggccagcagccugguccucguggugucccugggcgccaucagcuucuggaugugcuccaacggcagccugcagugccggaucugcaucuga

SEQ ID NO: 73307 - RNA, 1701 nt, Artificial Sequence
  derived and/or modified CDS sequence (opt1) from hemagglutinin__InfluenzaA__AFN18307
augaaggccauccuggugguccuccuguacaccuucgccgcggccaacgccgacacccugugcaucggcuaccacgccaacaacagcacggacaccguggacaccgugcucgagaagaacgucaccgugacgcacuccgugaaccugcuggaggacaagcacaacgggaagcucugcaagcugcgcggcgucgcgccccugcaccucgggaagugcaacaucgccggcuggauccuggggaacccggagugcgagagccuguccaccgccagcuccuggagcuacaucguggagaccuccagcuccgacaacgggaccugcuaccccggcgacuucaucgacuacgaggagcuccgggagcagcugagcuccgugagcuccuucgagcgcuucgagaucuuccccaagacgagcuccuggcccaaccacgacagcaacaagggcgucaccgccgccugcccgcacgcgggcgccaaguccuucuacaagaaccugaucuggcucgugaagaaggggaacagcuaccccaagcuguccaagagcuacaucaacgacaagggcaaggaggugcugguccucugggggauccaccaccccagcaccuccgccgaccagcagagccuguaccagaacgccgacgccuacguguucgugggcaccucccgguacagcaagaaguucaagcccgagaucgcgauccgcccgaagguccgggaccaggagggccgcaugaacuacuacuggacgcugguggagcccggggacaagaucaccuucgaggccaccggcaaccucguggucccccgguacgccuucgccauggagcgcaacaccggguccggcaucaucaucagcgacacgcccgugcacgacugcaacacgaccugccagaccccgaagggcgccaucaacaccucccugcccuuccagaacauccaccccaucaccaucgggaagugccccaaguacgucaagagcaccaagcugcggcucgcgaccggccugcgcaacgugccguccauccagagccgggggcuguucggcgccaucgccggguucaucgagggcggcuggacggggaugguggacggcugguacggguaccaccaccagaacgagcagggcuccggguacgccgccgaccucaagagcacccagaacgcgaucgacaagaucaccaacaaggugaacuccgucaucgagaagaugaacacccaguucacggccgugggcaaggaguucaaccaccuggagaagcgcaucgagaaccugaacaagaaggucgacgacggcuuccucgacaucuggaccuacaacgccgagcugcuggugcuccuggagaacgagcggacccuggacuaccacgacagcaacgugaagaaccucuacgagaagguccgcucccagcugaagaacaacgccaaggagaucgggaacggcugcuucgaguucuaccacaagugcgacaacacgugcauggagagcgugaagaacgggaccuacgacuaccccaaguacuccgaggaggccaagcugaaccgggaggagaucgacggcgugaagcucgagagcacccgcaucuaccagauccuggcgaucuacuccaccgucgccagcagccuggugcucguggucucccugggggccaucagcuucuggaugugcuccaacggcagccugcagugccggaucugcaucuga

SEQ ID NO: 73308 - RNA, 1701 nt, Artificial Sequence
  derived and/or modified CDS sequence (opt1) from hemagglutinin__InfluenzaA__AFN18312
augaaggccauccuggugguccuccuguacaccuucgccaccgcgaacgccgacacgcugugcaucggcuaccacgccaacaacagcaccgacaccguggacaccgugcucgagaagaacgucacggugacccacuccgugaaccugcuggaggacaagcacaacgggaagcucugcaagcugcgcggcgucgcgccccugcaccucgggaagugcaacaucgccggcuggauccuggggaacccggagugcgagagccuguccaccgccagcuccuggagcuacaucguggagaccuccagcuccgacaacggcacgugcuaccccggcgacuucaucgacuacgaggagcuccgggagcagcugagcuccgugagcuccuucgagcgcuucgagaucuuccccaagaccagcuccuggcccaaccacgacagcaacaaggggaucaccgccgccugcccgcacgccggcgcgaaguccuucuacaagaaccugaucuggcucgucaagaaggggaacagcuaccccaagcuguccaagagcuacaucaacgacaagggcaaggaggugcuggugcucugggggauccaccaccccagcaccuccgccgaccagcagagccuguaccagaacgccgacgccuacgucuucgugggcacgucccgguacagcaagaaguucaagcccgagaucgccauccgcccgaaggugcgggaccaggagggccgcaugaacuacuacuggacccuggucgagcccggggacaagaucaccuucgaggcgaccggcaaccucguggugccccgguacgccuucgccauggagcgcaacgccggguccggcaucaucaucagcgacacgcccguccacgacugcaacacgaccugccagaccccgaagggcgccaucaacaccucccugcccuuccagaacauccaccccaucaccaucgggaagugccccaaguacgucaagagcaccaagcugcggcucgcgaccggccugcgcaacgugccguccauccagagccgggggcuguucggcgccaucgccggguucaucgagggcggcuggacggggaugguggacggcugguacggguaccaccaccagaacgagcagggcuccggguacgccgccgaccucaagagcacccagaacgcgaucgacaagaucaccaacaaggugaacuccgugaucgagaagaugaacacccaguucacggccgucggcaaggaguucaaccaccuggagaagcgcaucgagaaccugaacaagaagguggacgacggcuuccucgacaucuggaccuacaacgccgagcugcugguccuccuggagaacgagcggacccuggacuaccacgacagcaacgugaagaaccucuacgagaaggugcgcucccagcugaagaacaacgccaaggagaucgggaacggcugcuucgaguucuaccacaagugcgacaacacgugcauggagagcgucaagaacgggaccuacgacuaccccaaguacuccgaggaggccaagcugaaccgggaggagaucgacggcgugaagcucgagagcacccgcaucuaccagauccuggcgaucuacuccaccguggccagcagccugguccucgugaucucccugggggccaucagcuucuggaugugcuccaacggcagccugcagugccggaucugcaucuga

SEQ ID NO: 73309 - RNA, 1701 nt, Artificial Sequence; identical to SEQ ID NO: 69058
  derived and/or modified CDS sequence (opt1) from hemagglutinin__InfluenzaA__AFN18319

SEQ ID NO: 73310 - RNA, 1701 nt, Artificial Sequence; identical to SEQ ID NO: 71155
  derived and/or modified CDS sequence (opt1) from hemagglutinin__InfluenzaA__AFN18324

SEQ ID NO: 73311 - RNA, 1701 nt, Artificial Sequence; identical to SEQ ID NO: 67046
  derived and/or modified CDS sequence (opt1) from hemagglutinin__InfluenzaA__AFN18334

SEQ ID NO: 73312 - RNA, 1701 nt, Artificial Sequence; identical to SEQ ID NO: 68809
  derived and/or modified CDS sequence (opt1) from hemagglutinin__InfluenzaA__AFN18344

SEQ ID NO: 73313 - RNA, 1701 nt, Artificial Sequence; identical to SEQ ID NO: 66693
  derived and/or modified CDS sequence (opt1) from hemagglutinin__InfluenzaA__AFN18354

SEQ ID NO: 73314 - RNA, 1701 nt, Artificial Sequence
  derived and/or modified CDS sequence (opt1) from hemagglutinin__InfluenzaA__AFN18364
augaaggccauccuggugguccuccuguacaccuucgccaccgcgaacgccgacacgcugugcaucggcuaccacgccaacaacagcaccgacaccguggacaccgugcucgagaagaacgucacggugacccacuccgugaaccugcuggaggacaagcacaacgggaagcucugcaagcugcgcggcgucgcgccccugcaccucgggaagugcaacaucgccggcuggauccuggggaacccggagugcgagagccuguccaccgcgagcuccuggagcuacaucguggagaccuccagcuccgacaacggcacgugcuaccccggcgacuucaucgacuacgaggagcuccgggagcagcugagcuccgugagcuccuucgagcgcuucgagaucuuccccaagaccagcuccuggcccaaccacgaccugaacaagggggucaccgccgccugcccgcacgccggcgccaagagcuucuacaagaaccucaucuggcuggugaagaaggggaacuccuaccccaagcugagcaaguccuacaucaacgacaagggcaaggaggugcucguccugugggggauccaccaccccagcaccagcgccgaccagcagucccuguaccagaacgccgacgccuacguguucgugggcacgagccgguacuccaagaaguucaagcccgagaucgccauccgcccgaagguccgggaccaggagggccgcaugaacuacuacuggacccucguggagcccggggacaagaucaccuucgaggcgaccggcaaccugguggucccccgguacgccuucgccauggagcgcaacgccgggagcggcaucaucaucuccgacacgcccgugcacgacugcaacacgaccugccagaccccgaagggcgccaucaacaccagccugcccuuccagaacauccaccccaucaccaucgggaagugccccaaguacgugaaguccaccaagcuccggcuggcgaccggccugcgcaacgucccgagcauccagucccggggccucuucggggccaucgccggguucaucgagggcggcuggacggggaugguggacggcugguacggguaccaccaccagaacgagcagggcagcggguacgccgccgaccugaaguccacccagaacgcgaucgacgagaucaccaacaaggugaacagcgucaucgagaagaugaacacccaguucacggccgugggcaaggaguucaaccaccuggagaagcgcaucgagaaccucaacaagaagaucgacgacggcuuccuggacaucuggaccuacaacgccgagcugcucguccugcuggagaacgagcggacccucgacuaccacgacuccaacgugaagaaccuguacgagaaggugcgcagccagcugaagaacaacgccaaggagaucgggaacggcugcuucgaguucuaccacaagugcgacaacacgugcauggaguccgucaagaacgggaccuacgacuaccccaaguacagcgaggaggccaagcucaaccgggaggagaucgacggcgugaagcuggaguccacccgcaucuaccagauccuggcgaucuacagcaccguggccuccagccucguccugguggugagccugggggccaucuccuucuggaugugcagcaacggcucccuccagugccggaucugcaucuga

SEQ ID NO: 73315 - RNA, 1701 nt, Artificial Sequence; identical to SEQ ID NO: 66693
  derived and/or modified CDS sequence (opt1) from hemagglutinin__InfluenzaA__AFN18374

SEQ ID NO: 73316 - RNA, 1701 nt, Artificial Sequence
  derived and/or modified CDS sequence (opt1) from hemagglutinin__InfluenzaA__AFN18381
augaaggccauccuggugguccuccuguacaccuucgccaccgcgaacgccgacacgcugugcaucggcuaccacgccaacaacagcaccgacaccguggacaccgugcucgagaagaacgucacggugacccacuccgugaaccugcuggaggacaagcacaacgggaagcucugcaagcugcgcggcgucgcgccccugcaccucgggaagugcaacaucgccggcuggauccuggggaacccggagugcgagagccuguccaccgccagcuccuggagcuacaucguggagaccuccagcuccgacaacggcacgugcuaccccggcgacuucaucgacuacgaggagcuccgggagcagcugagcuccgugagcuccuucgagcgcuucgagaucuuccccaagaccagcuccuggcccaaccacgacagcaacaagggggucaccgccgccugcccgcacgccggcgcgaaguccuucuacaagaaccugaucuggcucgugaagaaggggaacagcuaccccaagcuguccaagagcuacaucaacgacaagggcaaggaggugcugguccucugggggauccaccaccccagcaccuccgccgaccagcagagccuguaccagaacgccgacgccuacguguucgugggcacguccaaguacagcaagaaguucaagcccgagaucgccauccggccgaagguccgcgaccaggagggccggaugaacuacuacuggacccuggugaagcccggggacaagaucaccuucgaggcgaccggcaaccucguggucccccgcuacgccuucgccauggagcggaacgccggguccggcaucaucaucagcgacacgcccgugcaggacugcaacacgaccugccagaccccgaagggcgccaucaacaccucccugcccuuccagaacauccaccccaucaccaucgggaagugccccaaguacgucaagagcaccaagcugcgccucgcgaccggccugcggaacgugccguccauccagagccgcgggcuguucggcgccaucgccggguucaucgagggcggcuggacggggaugguggacggcugguacggguaccaccaccagaacgagcagggcuccggguacgccgccgaccucaagagcacccagaacgcgaucgacgagaucaccaacaaggugaacuccgucaucgagaagaugaacacccaguucacggccgugggcaaggaguucaaccaccuggagaagcggaucgagaaccugaacaagaaggucgacgacggcuuccucgacaucuggaccuacaacgccgagcugcuggugcuccuggagaacgagcgcacccuggacuaccacgacagcaacgugaagaaccucuacgagaagguccggucccagcugaagaacaacgccaaggagaucgggaacggcugcuucgaguucuaccacaagugcgacaacacgugcauggagagcgugaagaacgggaccuacgacuaccccaaguacuccgaggaggccaagcugaaccgcgaggagaucgacggcgugaagcucgagagcacccggaucuaccagauccuggcgaucuacuccaccgucgccagcagccuggugcucguggucucccugggggccaucagcuucuggaugugcuccaacggcagccugcagugccgcaucugcaucuga

SEQ ID NO: 73317 - RNA, 1701 nt, Artificial Sequence
  derived and/or modified CDS sequence (opt1) from hemagglutinin__InfluenzaA__AFN18390
augaaggccauccuggugguccuccuguacaccuucgccaccgcgaacgccgacacgcugugcaucggcuaccacgccaacaacagcaccgacaccguggacaccgugcucgagaagaacgucacggugacccacuccgugaaccugcuggaggacaagcacaacgggaagcucugcaagcugcgcggcgucgcgccccugcaccucgggaagugcaacaucgccggcuggauccuggggaacccggagugcgagagccuguccaccgccagcuccuggagcuacaucguggagaccuccagcuccgacaacggcacgugcuaccccggcgacuucaucgacuacgaggagcuccgggagcagcugagcuccgugagcuccuucgagcgcuucgagaucuuccccaagaccagcuccuggcccaaccacgacagcaacaagggggucaccgccgccugcccgcacgccggcgcgaaguccuucuacaagaaccugaucuggcucgugaagaaggggaacagcuaccccaagcuguccaagagcuacaucaacgacaagggcaaggaggugcugguccucugggggauccaccaccccagcaccuccgccgaccagcagagccuguaccagaacgccgacgccuacguguucgugggcacgucccgguacagcaagaaguucaagcccgagaucgccauccgcccgaagguccgggaccaggagggccgcaugaacuacuacuggacccugguggagcccggggacaagaucaccuucgaggcgaccggcaaccucguggucccccgguacgccuucgccauggagcgcaacgccggguccggcaucaucaucagcgacacgcccgugcacgacugcaacacgaccugccagaccccgaagggcgccaucaacaccucccugcccuuccagaacauccaccccaucaccaucgggaagugccccaaguacgucaagagcaccaagcugcggcucgcgaccggccugcgcaacgugccguccauccagagccgggggcuguucggcgccaucgccggguucaucgagggcggcuggacggggaugguggacggcugguacggguaccaccaccagaacgagcagggcuccggguacgccgccgaccucaagagcacccagaacgcgaucgacgagaucaccaacaaggugaacuccgucaucgagaagaugaacacccaguucacggccgugggcaaggaguucaaccaccuggagaagcgcaucgagaaccugaacaagaaggucgacgacggcuuccucgacaucuggaccuacaacgccgagcugcuggugcuccuggagaacgagcggacccuggacuaccacgacagcaacgugaagaaccucuacgagaagauccgcucccagcugaagaacaacgccaaggagaucgggaacggcugcuucgaguucuaccacaagugcgacaacacgugcauggagagcgucaagaacgggaccuacgacuaccccaaguacuccgaggaggccaagcugaaccgggaggagaucgacggcgugaagcucgagagcacccgcaucuaccagauccuggcgaucuacuccaccguggccagcagccugguccucguggugucccugggggccaucagcuucuggaugugcuccaacggcagccugcagugccggaucugcaucuga

SEQ ID NO: 73318 - RNA, 1701 nt, Artificial Sequence
  derived and/or modified CDS sequence (opt1) from hemagglutinin__InfluenzaA__AFN18400
augaaggccauccuggugguccuccuguacaccuucgccaccgcgaacgccgacacgcugugcaucggcuaccacgccaacaacagcaccgacaccguggacaccgugcucgagaagaacgucacggugacccacuccgugaaccugcuggaggacaagcacaacgggaagcucugcaagcugcgcggcgucaccccgcugcaccucgggaagugcaacaucgccggcuggauccuggggaaccccgagugcgagagccuguccaaggccagcuccuggagcuacaucguggagaccuccagcuccgacaacggcacgugcuaccccggcgacuucaucgacuacgaggagcuccgggagcagcugagcuccgugagcuccuucgagcgcuucgagaucuuccccaagaccagcuccuggcccaaccacgacagcaacaagggggucaccgcggccugcccgcacgccggcgccaaguccuucuacaagaaccugaucuggcucgugaagaaggggaacagcuaccccaagcuguccaagagcuacaucaacgacaagggcaaggaggugcugguccucugggggauccaccaccccagcaccuccgcggaccagcagagccuguaccagaacgccgacgccuacguguucgugggcacgucccgguacagcaagaaguucaagcccgagaucgccauccgcccgaagguccgggaccaggagggccgcaugaacuacuacuggacccugguggagcccggggacaagaucaccuucgaggccaccggcaaccucguggucccccgguacgcguucgccauggagcgcaacgugggguccggcaucaucaucagcgacacgcccgugcacgacugcaacacgaccugccagaccccgaagggcgccaucaacaccucccugcccuuccagaacauccaccccaucaccaucgggaagugccccaaguacgucaagagcaccaagcugcggcucgccaccggccugcgcaacgugccguccauccagagccgggggcuguucggcgccaucgcgggguucaucgagggcggcuggacggggaugguggacggcugguacggguaccaccaccagaacgagcagggcuccggguacgccgccgaccucaagagcacccagaacgccaucgacgagaucaccaacaaggucaacuccgugaucgagaagaugaacacccaguucacggccgucggcaaggaguucaaccaccuggagaagcgcaucgagaaccugaacaagaagguggacgacggcuuccucgacaucuggaccuacaacgcggagcugcuggugcuccuggagaacgagcggacccuggacuaccacgacagcaacgucaagaaccucuacgagaaggugcgcucccagcugaagaacaacgccaaggagaucgggaacggcugcuucgaguucuaccacaagugcgacaacacgugcauggagagcgugaagaacgggaccuacgacuaccccaaguacuccgaggaggccaagcugaaccgggaggagaucgacggcgucaagcucgagagcacccgcaucuaccagauccuggccaucuacuccaccguggccagcagccuggugcucgucgugucccugggggcgaucagcuucuggaugugcuccaacggcagccugcagugccggaucugcaucuga

SEQ ID NO: 73319 - RNA, 1701 nt, Artificial Sequence; identical to SEQ ID NO: 66784
  derived and/or modified CDS sequence (opt1) from hemagglutinin__InfluenzaA__AFN18410

SEQ ID NO: 73320 - RNA, 1701 nt, Artificial Sequence; identical to SEQ ID NO: 66693
  derived and/or modified CDS sequence (opt1) from hemagglutinin__InfluenzaA__AFN18420

SEQ ID NO: 73321 - RNA, 1701 nt, Artificial Sequence
  derived and/or modified CDS sequence (opt1) from hemagglutinin__InfluenzaA__AFN18430
augaaggccauccuggugguccuccuguacaccuucgccaccgcgaacgccgacacgcugugcaucggcuaccacgccaacaacagcaccgacaccguggacaccgugcucgagaagaacgucacggugacccacuccgugaaccugcuggagaacaagcacaacgggaagcucugcaagcugcgcggcgucgcgccccugcaccucgggaagugcaacaucgccggcuggauccuggggaacccggagugcgagagccuguccaccgccagcuccuggagcuacaucguggagaccuccagcuccgacaacggcacgugcuaccccggcgacuucaucgacuacgaggagcuccgggagcagcugagcuccgugagcuccuucgagcgcuucgagaucuuccccaagaccagcuccuggcccaaccacgacagcaacaagggggucaccgccgccugcccgcacgccggcgcgaaguccuucuacaagaaccugaucuggcucgugaagaaggggaacagcuaccccaagcuguccaagagcuacaucaacgacaagggcaaggaggugcugguccucugggggauccaccaccccagcaccuccgccgaccagcagagccuguaccagaacgccgacgccuacguguucgugggcacgucccgguacagcaagaaguucaagcccgagaucgccauccgcccgaagguccgggaccaggagggccgcaugaacuacuacuggacccugguggagcccggggacaagaucaccuucgaggcgaccggcaaccucguggucccccgguacgccuucgccauggugcgcaacgccggguccggcaucaucaucagcgacacgcccgugcacgacugcaacacgaccugccagaccccgaagggcgccaucaacaccucccugcccuuccagaacauccaccccaucaccaucgggaagugccccaaguacgucaagagcaccaagcugcggcucgcgaccggccugcgcaacgugccguccauccagagccgggggcuguucggcgccaucgccggguucaucgagggcggcuggacggggaugguggacggcugguacggguaccaccaccagaacgagcagggcuccggguacgccgccgaccucaagagcacccagaacgcgaucgacgagaucaccaacaaggucaacuccgugaucgagaagaugaacacccaguucacggccgucggcaaggaguucaaccaccuggagaagcgcaucgagaaccugaacaagaagguggacgacggcuuccucgacaucuggaccuacaacgccgagcugcuggugcuccuggagaacgagcggacccuggacuaccacgacagcaacgucaagaaccucuacgagaaggugcgcucccagcugaagaacaacgccaaggagaucgggaacggcugcuucgaguucuaccacaagugcgacaacacgugcauggagagcgugaagaacgggaccuacgacuaccccaaguacuccgaggaggccaagcugaaccgggaggagaucgacggcgucaagcucgagagcacccgcaucuaccagauccuggcgaucuacuccaccguggccagcagccuggugcucgucgugucccugggggccaucagcuucuggaugugcuccaacggcagccugcagugccggaucugcaucuga

SEQ ID NO: 73322 - RNA, 1701 nt, Artificial Sequence; identical to SEQ ID NO: 66693
  derived and/or modified CDS sequence (opt1) from hemagglutinin__InfluenzaA__AFN18440

SEQ ID NO: 73323 - RNA, 1701 nt, Artificial Sequence; identical to SEQ ID NO: 66693
  derived and/or modified CDS sequence (opt1) from hemagglutinin__InfluenzaA__AFN18450

SEQ ID NO: 73324 - RNA, 1701 nt, Artificial Sequence; identical to SEQ ID NO: 69248
  derived and/or modified CDS sequence (opt1) from hemagglutinin__InfluenzaA__AFN18460

SEQ ID NO: 73325 - RNA, 1701 nt, Artificial Sequence; identical to SEQ ID NO: 67554
  derived and/or modified CDS sequence (opt1) from hemagglutinin__InfluenzaA__AFN18470

SEQ ID NO: 73326 - RNA, 1701 nt, Artificial Sequence; identical to SEQ ID NO: 66784
  derived and/or modified CDS sequence (opt1) from hemagglutinin__InfluenzaA__AFN18480

SEQ ID NO: 73327 - RNA, 1701 nt, Artificial Sequence; identical to SEQ ID NO: 67554
  derived and/or modified CDS sequence (opt1) from hemagglutinin__InfluenzaA__AFN18490

SEQ ID NO: 73328 - RNA, 1701 nt, Artificial Sequence; identical to SEQ ID NO: 66693
  derived and/or modified CDS sequence (opt1) from hemagglutinin__InfluenzaA__AFN18497

SEQ ID NO: 73329 - RNA, 1701 nt, Artificial Sequence; identical to SEQ ID NO: 66693
  derived and/or modified CDS sequence (opt1) from hemagglutinin__InfluenzaA__AFN18512

SEQ ID NO: 73330 - RNA, 1701 nt, Artificial Sequence
  derived and/or modified CDS sequence (opt1) from hemagglutinin__InfluenzaA__AFN18519
augaaggccauccuggugguccuccuguacaccuucgccaccgcgaacgccgacacgcugugcaucggcuaccacgccaacaacagcaccgacaccguggacaccgugcucgagaagaacgucacggugacccacuccgugaaccugcuggaggacaagcacaacgggaagcucugcaagcugcgcggcgucgcgccccugcaccucgggaagugcaacaucgccggcuggauccuggggaacccggagugcgagagccuguccaccgccagcuccuggagcuacaucguggagaccuccagcuccgacaacggcacgugcuaccccggcgacuucaucgacuacgaggagcuccgggagcagcugagcuccgugagcuccuucgagcgcuucgagaucuuccccaagaccagcuccuggcccaaccacgacagcaacaagggggucaccgccgccugcccgcacgccggcgcgaaguccuucuacaagaaccugaucuggcucgugaagaaggagaacagcuaccccaagcuguccaagagcuacaucaacgacaaggggaaggaggugcugguccucuggggcauccaccaccccagcaccuccgccgaccagcagagccuguaccagaacgccgacgccuacguguucguggggacgucccgguacagcaagaaguucaagcccgagaucgccauccgcccgaagguccgggaccaggagggccgcaugaacuacuacuggacccugguggagcccggcgacaagaucaccuucgaggcgaccgggaaccucguggucccccgguacgccuucgccauggagcgcaacgccggcuccgggaucaucaucagcgacacgcccgugcacgacugcaacacgaccugccagaccccgaagggcgccaucaacaccucccugcccuuccagaacauccaccccaucaccaucggcaagugccccaaguacgucaagagcaccaagcugcggcucgcgaccgggcugcgcaacgugccguccauccagagccggggccuguucggggccaucgccggcuucaucgagggcggguggacgggcaugguggacgggugguacggcuaccaccaccagaacgagcagggguccggcuacgccgccgaccucaagagcacccagaacgcgaucgacgagaucaccaacaaggugaacuccgucaucgagaagaugaacacccaguucacggccguggggaaggaguucaaccaccuggagaagcgcaucgagaaccugaacaagaaggucgacgacggcuuccucgacaucuggaccuacaacgccgagcugcuggugcuccuggagaacgagcggacccuggacuaccacgacagcaacgugaagaaccucuacgagaagguccgcucccagcugaagaacaacgccaaggagaucggcaacgggugcuucgaguucuaccacaagugcgacaacacgugcauggagagcgugaagaacggcaccuacgacuaccccaaguacuccgaggaggccaagcugaaccgggaggagaucgacggggugaagcucgagagcacccgcaucuaccagauccuggcgaucuacuccaccgucgccagcagccuggugcucguggucucccugggcgccaucagcuucuggaugugcuccaacgggagccugcagugccggaucugcaucuga

SEQ ID NO: 73331 - RNA, 1701 nt, Artificial Sequence
  derived and/or modified CDS sequence (opt1) from hemagglutinin__InfluenzaA__AFN18521
augaaggccauccuggugguccuccuguacaccuucgccaccgcgaacgccgacacgcugugcaucggcuaccacgccaacaacagcaccgacaccguggacaccgugcucgagaagaacgucacggugacccacuccgugaaccugcuggaggacaagcacaacgggaagcucugcaagcugcgcggcgucgcgccccugcaccucgggaagugcaacaucgccggcuggauccuggggaacccggagugcgagagccuguccaccgccagcuccuggagcuacaucguggagaccuccagcuccgacaacggcacgugcuaccccggcgacuucaucgacuacgaggagcuccgggagcagcugagcuccgugagcuccuucgagcgcuucgagaucuuccccaagaccagcuccuggcccaaccacgacagcaacaagggggucaccgccgccugcccgcacgccggcgcgaaguccuucuacaagaaccugaucuggcucgugaagaaggggaacagcuaccccaagcuguccaagagcuacaucaacgacaagggcaaggaggugcugguccucugggggauccaccaccccagcaccuccgccgaccagcagagccuguaccagaacgccgacgccuacguguucgugggcacgucccgguacagcaagaaguucaagcccgagaucgccauccgcccgaagguccgggaccaggagggccgcaugaacuacuacuggacccugguggagcccggggacaagaucaccuucgaggcgaccggcaaccucguggucccccgguacgccuucgccauggugcgcaacgccggguccggcaucaucaucagcgacacgcccgugcacgacugcaacacgaccugccagaccccgaagggcgccaucaacaccucccugcccuuccagaacauccaccccaucaccaucgggaagugccccaaguacgucaagagcaccaagcugcggcucgcgaccggccugcgcaacgugccguccauccagagccgggggcuguucggcgccaucgccggguucaucgagggcggcuggacggggaugguggacggcugguacggguaccaccaccagaacgagcagggcuccggguacgccgccgaccucaagagcacccagaacgcgaucgacgagaucaccaacaaggucaacuccgugaucgagaagaugaacacccaguucacggccgucggcaaggaguucaaccaccuggagaagcgcaucgagaaccugaacaagaagguggacgacggcuuccucgacaucuggaccuacaacgccgagcugcuggugcuccuggagaacgagcggacccuggacuaccacgacagcaacgucaagaaccucuacgagaaggugcgcucccagcugaagaacaacgccaaggagaucgggaacggcugcuucgaguucuaccacaagugcgacaacacgugcauggagagcgugaagaacgggaccuacgacuaccccaaguacuccggcgaggccaagcugaaccgggaggagaucgacggggucaagcucgagagcacccgcaucuaccagauccuggcgaucuacuccaccguggccagcagccuggugcucgucgugucccugggcgccaucagcuucuggaugugcuccaacggcagccugcagugccggaucugcaucuga

SEQ ID NO: 73332 - RNA, 1701 nt, Artificial Sequence; identical to SEQ ID NO: 66693
  derived and/or modified CDS sequence (opt1) from hemagglutinin__InfluenzaA__AFN18528

SEQ ID NO: 73333 - RNA, 1701 nt, Artificial Sequence; identical to SEQ ID NO: 66693
  derived and/or modified CDS sequence (opt1) from hemagglutinin__InfluenzaA__AFN18531

SEQ ID NO: 73334 - RNA, 1701 nt, Artificial Sequence; identical to SEQ ID NO: 69290
  derived and/or modified CDS sequence (opt1) from hemagglutinin__InfluenzaA__AFN18543

SEQ ID NO: 73335 - RNA, 1701 nt, Artificial Sequence; identical to SEQ ID NO: 71575
  derived and/or modified CDS sequence (opt1) from hemagglutinin__InfluenzaA__AFN18545

SEQ ID NO: 73336 - RNA, 1701 nt, Artificial Sequence; identical to SEQ ID NO: 67554
  derived and/or modified CDS sequence (opt1) from hemagglutinin__InfluenzaA__AFN18550

SEQ ID NO: 73337 - RNA, 1701 nt, Artificial Sequence
  derived and/or modified CDS sequence (opt1) from hemagglutinin__InfluenzaA__AFN18557
augaaggccauccuggugguccuccuguacaccuucgccaccgcgaacgccgacacgcugugcaucggcuaccacgccaacaacagcaccgacaccguggacaccgugcucgagaagaacgucacggugacccacuccgugaaccugcuggaggacaagcacaacgggaagcucugcaagcugcgcggcgucgcgccccugcaccucgggaagugcaacaucgccggcuggauccuggggaacccggagugcgagagccuguccaccgccagcuccuggagcuacaucguggagaccuccagcuccgacaacggcacgugcuaccccggcgacuucaucgacuacgaggagcuccgggagcagcugagcuccgugagcuccuucgagcgcuucgagaucuuccccaagaccagcuccuggcccaaccacgacagcaacaagggggucaccgccgccugcccgcacgccggcgcgaaguccuucuacaagaaccugaucuggcucgugaagaaggggaacagcuaccccaagcuguccaagagcuacaucaacgacaagggcaaggaggugcugguccucugggggauccaccaccccagcaccuccgccgaccagcagagccuguaccagaacgccgacgccuacguguucgugggcacgucccgguacagcaagaaguucaagcccgagaucgccauccgcccgaagguccgggaccaggagggccgcaugaacuacuacuggacccugguggagcccggggacaagaucaccuucgaggcgaccggcaaccucguggucccccgguacgccuucgccauggagcgcaacgccggguccggcaucaucaucagcgacacgcccgcccacgacugcaacacgaccugccagaccccgaagggcgcgaucaacaccucccugcccuuccagaacauccaccccaucaccaucgggaagugccccaaguacgucaagagcaccaagcugcggcucgccaccggccugcgcaacgugccguccauccagagccgggggcuguucggcgccaucgccggguucaucgagggcggcuggacggggaugguggacggcugguacggguaccaccaccagaacgagcagggcuccggguacgccgcggaccucaagagcacccagaacgccaucgacgagaucaccaacaaggugaacuccgugaucgagaagaugaacacccaguucacggccgucggcaaggaguucaaccaccuggagaagcgcaucgagaaccugaacaagaagguggacgacggcuuccucgacaucuggaccuacaacgccgagcugcugguccuccuggagaacgagcggacccuggacuaccacgacagcaacgugaagaaccucuacgagaaggugcgcucccagcugaagaacaacgccaaggagaucgggaacggcugcuucgaguucuaccacaagugcgacaacacgugcauggagagcgucaagaacgggaccuacgacuaccccaaguacuccgaggaggcgaagcugaaccgggaggagaucgacggcgugaagcucgagagcacccgcaucuaccagauccuggccaucuacuccaccguggccagcagccugguccucguggugucccugggggccaucagcuucuggaugugcuccaacggcagccugcagugccggaucugcaucuga

SEQ ID NO: 73338 - RNA, 1701 nt, Artificial Sequence
  derived and/or modified CDS sequence (opt1) from hemagglutinin__InfluenzaA__AFN18559
augaaggccauccuggugguccuccuguacaccuucgccaccgcgaacgccgacacgcugugcaucggcuaccacgccaacaacagcaccgacaccguggacaccgugcucgagaagaacgucacggugacccacuccgugaaccugcuggaggacaagcacaacgggaagcucugcaagcugcgcggcgucgcgccccugcaccucgggaagugcaacaucgccggcuggauccuggggaacccggagugcgagagccuguccaccgccagcuccuggagcuacaucguggagaccuccagcuccgacaacggcacgugcuaccccggcgacuucaucgacuacgaggagcuccgggagcagcugagcuccgugagcuccuucgagcgcuucgagaucuuccccaagaccagcuccuggcccaaccacgacagcaacaagggggucaccgccgccugcccgcacgccggcgcgaaguccuucuacaagaaccugaucuggcucgugaagaaggggaacagcuaccccaagcuguccaagagcuacaucaacgacaagggcaaggaggugcugguccucugggggauccaccaccccagcaccuccgccgaccagcagaaccuguaccagaacgccgacgccuacguguucgugggcacgagccgguacuccaagaaguucaagcccgagaucgccauccgcccgaagguccgggaccaggagggccgcaugaacuacuacuggacccugguggagcccggggacaagaucaccuucgaggcgaccggcaaccucguggucccccgguacgccuucgccauggagcgcaacgccgggagcggcaucaucaucuccgacacgcccgugcacgacugcaacacgaccugccagaccccgaagggcgccaucaacaccagccugcccuuccagaacauccaccccaucaccaucgggaagugccccaaguacgugaaguccaccaagcugcggcucgcgaccggccugcgcaacgucccgagcauccagucccgggggcuguucggcgccaucgccggguucaucgagggcggcuggacggggaugguggacggcugguacggguaccaccaccagaacgagcagggcagcggguacgccgccgaccucaaguccacccagaacgcgaucgacgagaucaccaacaaggugaacagcgucaucgagaagaugaacacccaguucacggccgugggcaaggaguucaaccaccuggagaagcgcaucgagaaccugaacaagaaggucgacgacggcuuccucgacaucuggaccuacaacgccgagcugcuggugcuccuggagaacgagcggacccuggacuaccacgacuccaacgugaagaaccucuacgagaagguccgcagccagcugaagaacaacgccaaggagaucgggaacggcugcuucgaguucuaccacaagugcgacaacacgugcauggaguccgugaagaacgggaccuacgacuaccccaaguacagcgaggaggccaagcugaaccgggaggagaucgacggcgugaagcucgaguccacccgcaucuaccagauccuggcgaucuacagcaccgucgccuccagccuggugcucguggucagccugggggccaucuccuucuggaugugcagcaacggcucccugcagugccggaucugcaucuga

SEQ ID NO: 73339 - RNA, 1701 nt, Artificial Sequence; identical to SEQ ID NO: 67559
  derived and/or modified CDS sequence (opt1) from hemagglutinin__InfluenzaA__AFN18561

SEQ ID NO: 73340 - RNA, 1701 nt, Artificial Sequence; identical to SEQ ID NO: 67795
  derived and/or modified CDS sequence (opt1) from hemagglutinin__InfluenzaA__AFN18563

SEQ ID NO: 73341 - RNA, 1701 nt, Artificial Sequence
  derived and/or modified CDS sequence (opt1) from hemagglutinin__InfluenzaA__AFN18565
augaaggccauccuggugguccuccuguacaccuucgccaccgcgaacgccgacacgcugugcaucggcuaccacgccaacaacagcaccgacaccguggacaccgugcucgagaagaacgucacggugacccacuccgugaaccugcuggaggacaagcacaacgggaagcucugcaagcugcgcggcgucgcgccccugcaccucgggaagugcaacaucgccggcuggauccuggggaacccggagugcgagagccuguccaccgccagcuccuggagcuacaucguggagaccuccagcuccgacaacggcacgugcuaccccggcgacuucaucgacuacgaggagcuccgggagcagcugagcuccgugagcuccuucgagcgcuucgagaucuuccccaagaccagcuccuggcccaaccacgacagcaacaagggggucaccgccgccugcccgcacgccggcgcgaaguccuucuacaagaaccugaucuggcucgugaagaaggggaacagcuaccccaagcuguccaagagcuacaucaacgacaagggcaaggaggugcugguccucugggggauccaccaccccagcaccuccgccgaccagcagagccuguaccagaacgccgacgccuacguguucgugggcacgucccgguacagcaagaaguucaagcccgagaucgccauccgcccgaagguccgggaccaggagggccgcaugaacuacuacuggacccugguggagcccggggacaagaucaccuucgaggcgaccggcaaccucguggucccccgguacgccuucgccauggugcgcaacgccggguccggcaucaucaucagcgacacgcccgugcacgacugcaacacgaccugccagaccccgaagggcgccaucaacaccucccugcccuuccagaacauccaccccaucaccaucgggaagugccccaaguacgucaagagcaccaagcugcggcucgcgaccggccugcgcaacgugccguccauccagagccgggggcuguucggcgccaucgccggguucaucgagggcggcuggacggggaugguggacggcugguacggguaccaccaccagaacgagcagggcuccggguacgccgccgaccucaagagcacccagaacgcgaucgacgagaucaccaacaaggucaacuccgugaucgagaagaugaacacccaguucacggccgucggcaaggaguucaaccaccuggagaagcgcauggagaaccugaacaagaagguggacgacggcuuccucgacaucuggaccuacaacgccgagcugcuggugcuccuggagaacgagcggacccuggacuaccacgacagcaacgucaagaaccucuacgagaaggugcgcucccagcugaagaacaacgccaaggagaucgggaacggcugcuucgaguucuaccacaagugcgacaacacgugcauggagagcgugaagaacgggaccuacgacuaccccaaguacuccgaggaggccaagcugaaccgggaggagaucgacggcgucaagcucgagagcacccgcaucuaccagauccuggcgaucuacuccaccguggccagcagccuggugcucgucgugucccugggggccaucagcuucuggaugugcuccaacggcagccugcagugccggaucugcaucuga

SEQ ID NO: 73342 - RNA, 1701 nt, Artificial Sequence
  derived and/or modified CDS sequence (opt1) from hemagglutinin__InfluenzaA__AFN18570
augaaggccauccuggugguccuccuguacaccuucgccaccgcgaacgccgacacgcugugcaucggcuaccacgccaacaacagcaccgacaccguggacaccgugcucgagaagaacgucacggugacccacuccgugaaccugcuggaggacaagcacaacgggaagcucugcaagcugcgcggcgucgcgccccugcaccucgggaagugcaacaucgccggcuggauccuggggaacccggagugcgagagccuguccaccgugagcuccuggagcuacaucguggagaccuccagcuccgacaacggcacgugcuaccccggcgacuucaucgacuacgaggagcuccgggagcagcugagcuccgucagcuccuucgagcgcuucgagaucuuccccaagaccagcuccuggcccaaccacgacagcaacaagggggugaccgccgccugcccgcacgccggcgccaaguccuucuacaagaaccugaucuggcucgugaagaaggggaacagcuaccccaagcuguccaagagcuacaucaacgacaagggcaaggagguccuggugcucugggggauccaccaccccagcaccuccgcggaccagcagagccuguaccagaacgccgacgccuacguguucgucggcacgucccgguacagcaagaaguucaagcccgagaucgccauccgcccgaaggugcgggaccaggagggccgcaugaacuacuacuggacccugguggagcccggggacaagaucaccuucgaggccaccggcaaccucgucgugccccgguacgcguucgccauggagcgcaacgccggguccggcaucaucaucagcgacacgcccgugcacgacugcaacacgaccugccagaccccgaagggcgccaucaacaccucccugcccuuccagaacauccaccccaucaccaucgggaagugccccaaguacgucaagagcaccaagcugcggcucgccaccggccugcgcaacgugccguccauccagagccgggggcuguucggcgcgaucgccggguucaucgagggcggcuggacggggaugguggacggcugguacggguaccaccaccagaacgagcagggcuccggguacgccgccgaccucaagagcacccagaacgccaucgacgagaucaccaacaaggucaacuccgugaucgagaagaugaacacccaguucacggcggucggcaaggaguucaaccaccuggagaagcgcaucgagaaccugaacaagaagguggacgacggcuuccucgacaucuggaccuacaacgccgagcugcuggugcuccuggagaacgagcggacccuggacuaccacgacagcaacgucaagaaccucuacgagaaggugcgcucccagcugaagaacaacgccaaggagaucgggaacggcugcuucgaguucuaccacaagugcgacaacacgugcauggagagcgugaagaacgggaccuacgacuaccccaaguacuccgaggaggccaagcugaaccgggaggagaucgacggcgucaagcucgagagcacccgcaucuaccagauccuggccaucuacuccaccguggcgagcagccuggugcucgucgugucccugggggccaucagcuucuggaugugcuccaacggcagccugcagugccggaucugcaucuga

SEQ ID NO: 73343 - RNA, 1701 nt, Artificial Sequence; identical to SEQ ID NO: 66693
  derived and/or modified CDS sequence (opt1) from hemagglutinin__InfluenzaA__AFN18580

SEQ ID NO: 73344 - RNA, 1701 nt, Artificial Sequence; identical to SEQ ID NO: 66935
  derived and/or modified CDS sequence (opt1) from hemagglutinin__InfluenzaA__AFN18590

SEQ ID NO: 73345 - RNA, 1701 nt, Artificial Sequence
  derived and/or modified CDS sequence (opt1) from hemagglutinin__InfluenzaA__AFN18600
augaaggccauccuggugguccuccuguacaccuucgccaccgcgaacgccgacacgcugugcaucggcuaccacgccaacaacagcaccgacaccguggacaccgugcucgagaagaacgucacggugacccacuccgugaaccugcuggaggacaagcacaacgggaagcucugcaagcugcgcggcgucgcgccccugcaccucgggaagugcaacaucgccggcuggauccuggggaacccggagugcgagagccuguccaccgccagcuccuggagcuacaucguggagaccuccagcuccgacaacggcacgugcuaccccggcgacuucaucgacuacgaggagcuccgggagcagcugagcuccgugagcuccuucgagcgcuucgagaucuuccccaagaccagcuccuggcccaaccacgacagcaacaagggggucaccgccgccugcccgcacgccggcgcgaaguccuucuacaagaaccugaucuggcucgugaagaaggggaacagcuaccccaagcuguccaagagcuacaucaacgacaagggcaaggaggugcugguccucugggggauccaccaccccagcaccuccgccgaccagcagaaccuguaccagaacgccgacgccuacguguucgugggcacgagccgguacuccaagaaguucaagcccgagaucgccauccgcccgaagguccgggaccaggagggccgcaugaacuacuacuggacccugguggagcccggggacaagaucaccuucgaggcgaccggcaaccucguggucccccgguacgccuucgccauggagcgcaacgccgggagcggcaucaucaucuccgacacgcccgugcacgacugcaacacgaccugccagaccccgaagggcgccaucaacaccagccugcccuuccagaacauccaccccaucaccaucgggaagugccccaaguacgugaaguccaccaagcugcggcucgcgaccggccugcgcaacgucccgagcauccagucccgggggcuguucggcgccaucgccggguucaucgagggcggcuggacggggaugguggacggcugguacggguaccaccaccagaacgagcagggcagcggguacgccgccgaccucaaguccacccagaacgcgaucgacgagaucaccaacaaggugaacagcgucaucgagaagaugaacacccaguucacggccgugggcaaggaguucaaccaccuggagaagcgcaucgagaaccugaacaagaaggucgacgacggcuuccucgacaucuggaccuacaacgccgagcugcuggugcuccuggagaacgagcggacccuggacuaccacgacuccaacgugaagaaccucuacgagaagguccgcagccagcugaagaacaacgccaaggagaucgggaacggcugcuucgaguucuaccacaagugcgacaacgccugcauggaguccgugaagaacgggaccuacgacuaccccaaguacagcgaggaggcgaagcugaaccgggaggagaucgacggcgugaagcucgaguccacgcgcaucuaccagauccuggccaucuacagcaccgucgccuccagccuggugcucguggucagccugggggccaucuccuucuggaugugcagcaacggcucccugcagugccggaucugcaucuga

SEQ ID NO: 73346 - RNA, 1701 nt, Artificial Sequence; identical to SEQ ID NO: 66693
  derived and/or modified CDS sequence (opt1) from hemagglutinin__InfluenzaA__AFN18610

SEQ ID NO: 73347 - RNA, 1701 nt, Artificial Sequence
  derived and/or modified CDS sequence (opt1) from hemagglutinin__InfluenzaA__AFN18617
augaaggccauccuggugguccuccuguacaccuucgccaccgcgaacgccgacacgcugugcaucggcuaccacgccaacaacagcaccgacaccguggacaccgugcucgagaagaacgucacggugacccacuccgugaaccugcuggaggacaagcacaacgggaagcucugcaagcugcgcggcgucgcgccccugcaccucgggaagugcaacaucgccggcuggauccuggggaacccggagugcgagagccuguccaccgccagcuccuggagcuacaucguggagaccuccagcuccgacaacggcacgugcuaccccggcgacuucaucgacuacgaggagcuccgggagcagcugagcuccgugagcuccuucgagcgcuucgagaucuuccccaagaccagcuccuggcccaaccacgacagcaacaagggggucaccgccgccugcccgcacgccggcgcgaaguccuucuacaagaaccugaucuggcucgugaagaaggggaacagcuaccccaagcuguccaagagcuacaucaacgacaagggcaaggaggugcugguccucugggggauccaccaccccagcaccuccgccgaccagcagagccuguaccagaacgccgacgccuacguguucgugggcacgucccgguacagcaagaaguucaagcccgagaucgccauccgcccgaagguccgggaccaggagggccgcaugaacuacuacuggacccugguggagcccggggacaagaucaccuucgaggcgaccggcaaccucguggucccccgguacgccuucgccauggugcgcaacgccggguccggcaucaucaucagcgacacgcccgugcacgacugcaacacgaccugccagaccccgaagggcgccaucaacaccucccugcccuuccagaacauccaccccaucaccaucgggaagugccccaaguacgucaagagcaccaagcugcggcucgcgaccggccugcgcaacgugccguccauccagagccgggggcuguucggcgccaucgccggguucaucgagggcggcuggacggggaugguggacggcugguacggguaccaccaccagaacgagcagggcuccggguacgccgccgaccucaagagcacccaguccgcgaucgacgagaucaccaacaaggucaacagcgugaucgagaagaugaacacccaguucacggccgucggcaaggaguucaaccaccuggagaagcgcaucgagaaccugaacaagaagguggacgacggcuuccucgacaucuggaccuacaacgccgagcugcuggugcuccuggagaacgagcggacccuggacuaccacgacuccaacgucaagaaccucuacgagaaggugcgcagccagcugaagaacaacgccaaggagaucgggaacggcugcuucgaguucuaccacaagugcgacaacacgugcauggaguccgugaagaacgggaccuacgacuaccccaaguacagcgaggaggccaagcugaagcgggaggagaucgacggcgucaagcucgaguccacccgcaucuaccagauccuggcgaucuacagcaccguggccagcucccuggugcucgucgugagccugggggccaucuccuucuggaugugcagcaacggcucccugcagugccggaucugcaucuga

SEQ ID NO: 73348 - RNA, 1701 nt, Artificial Sequence; identical to SEQ ID NO: 67554
  derived and/or modified CDS sequence (opt1) from hemagglutinin__InfluenzaA__AFN18622

SEQ ID NO: 73349 - RNA, 1701 nt, Artificial Sequence; identical to SEQ ID NO: 66693
  derived and/or modified CDS sequence (opt1) from hemagglutinin__InfluenzaA__AFN18629

SEQ ID NO: 73350 - RNA, 1701 nt, Artificial Sequence; identical to SEQ ID NO: 66935
  derived and/or modified CDS sequence (opt1) from hemagglutinin__InfluenzaA__AFN18634

SEQ ID NO: 73351 - RNA, 1701 nt, Artificial Sequence
  derived and/or modified CDS sequence (opt1) from hemagglutinin__InfluenzaA__AFN18644
augaaggccauccuggugguccuccuguacaccuucgccaccgcgaacgccgacacgcugugcaucggcuaccacgccaacaacagcaccgacaccguggacaccgugcucgagaagaacgucacggugacccacuccgugaaccugcuggaggacaagcacaacgggaagcucugcaagcugcgcggcgucgcgccccugcaccucgggaagugcaacaucgccggcuggauccuggggaacccggagugcgagagccuguccaccgccagcuccuggagcuacaucguggagaccuccagcuccgacaacggcacgugcuaccccggcgacuucaucgacuacgaggagcuccgggagcagcugagcuccgugagcuccuucgagcgcuucgagaucuuccccaagaccagcuccuggcccaaccacgacagcaacaagggggucaccgccgccugcccgcacgccggcgcgaaguccuucuacaagaaccugaucuggcucgugaagaaggggaacagcuaccccaagcuguccaagagcuacaucaacgacaagggcaaggaggugcugguccucugggggauccaccaccccagcaccuccgccgaccagcagagccuguaccagaacgccgacgccuacguguucgugggcacgucccgguacagcaagaaguucaagcccgagaucgccauccgcccgaagguccgggaccaggagggccgcaugaacuacuacuggacccugguggagcccggggacaagaucaccuucgaggcgaccggcaaccucguggucccccgguacgccuucgccauggugcgcaacgccggguccggcaucaucaucagcgacacgcccgugcacgacugcaacacgaccugccagaccccgaagggcgccaucaacaccucccugcccuuccagaacauccaccccaucaccaucgggaagugccccaaguacgucaagagcaccaagcugcggcucgcgaccggccugcgcaacgugccguccauccagagccgggggcuguucggcgccaucgccggguucaucgagggcggcuggacggggaugguggacggcugguacggguaccaccaccagaacgagcagggcuccggguacgccgccgaccucaagagcacccaguccgcgaucgacgagaucaccaacaaggucaacagcgugaucgagaaggucaacacccaguucacggccgugggcaaggaguucaaccaccuggagaagcgcaucgagaaccugaacaagaagguggacgacggcuuccucgacaucuggaccuacaacgccgagcugcugguccuccuggagaacgagcggacccuggacuaccacgacuccaacgugaagaaccucuacgagaaggugcgcagccagcugaagaacaacgccaaggagaucgggaacggcugcuucgaguucuaccacaagugcgacaacacgugcauggaguccgucaagaacgggaccuacgacuaccccaaguacagcgaggaggccaagcugaaccgggaggagaucgacggcgugaagcucgaguccacccgcaucuaccagauccuggcgaucuacagcaccguggccagcucccugguccucguggugagccugggggccaucuccuucuggaugugcagcaacggcucccugcagugccggaucugcaucuga

SEQ ID NO: 73352 - RNA, 1701 nt, Artificial Sequence; identical to SEQ ID NO: 67554
  derived and/or modified CDS sequence (opt1) from hemagglutinin__InfluenzaA__AFN18654

SEQ ID NO: 73353 - RNA, 1701 nt, Artificial Sequence; identical to SEQ ID NO: 66693
  derived and/or modified CDS sequence (opt1) from hemagglutinin__InfluenzaA__AFN18664

SEQ ID NO: 73354 - RNA, 1701 nt, Artificial Sequence; identical to SEQ ID NO: 66935
  derived and/or modified CDS sequence (opt1) from hemagglutinin__InfluenzaA__AFN18674

SEQ ID NO: 73355 - RNA, 1701 nt, Artificial Sequence; identical to SEQ ID NO: 66693
  derived and/or modified CDS sequence (opt1) from hemagglutinin__InfluenzaA__AFN18684

SEQ ID NO: 73356 - RNA, 1701 nt, Artificial Sequence; identical to SEQ ID NO: 67554
  derived and/or modified CDS sequence (opt1) from hemagglutinin__InfluenzaA__AFN18694

SEQ ID NO: 73357 - RNA, 1701 nt, Artificial Sequence
  derived and/or modified CDS sequence (opt1) from hemagglutinin__InfluenzaA__AFN18704
augaaggccauccuggugguccuccuguacaccuucgccaccgcgaacgccgacacgcugugcaucggcuaccacgccaacaacagcaccgacaccguggacaccgugcucgagaagaacgucacggugacccacuccgugaaccugcuggaggacaagcacaacgggaagcucugcaagcugcgcggcgucgcgccccugcaccucgggaagugcaacaucgccggcuggauccuggggaacccggagugcgagagccuguccaccgccagcuccuggagcuacaucguggagaccuccagcuccgacaacggcacgugcuaccccggcgacuucaucgacuacgaggagcuccgggagcagcugagcuccgugagcuccuucgagcgcuucgagaucuuccccaagaccagcuccuggcccaaccacgacagcaacaagggggucaccgccgccugcccgcacgccggcgcgaaguccuucuacaagaaccugaucuggcucgugaagaaggggaacagcuaccccaagcuguccaagagcuacaucaacgacaagggcaaggaggugcugguccucugggggauccaccaccccagcaccuccgccgaccagcagagccuguaccagaacgccgacgccuacguguucgugggcacgucccgguacagcaagaaguucaagcccgagaucgccauccgcccgaagguccgggaccaggagggccgcaugaacuacuacuggacccugguggagcccggggacaagaucaccuucgaggcgaccggcaaccucguggucccccgguacgccuucgccauggugcgcaacgccggguccggcaucaucaucagcgacacgcccgugcacgacugcaacacgaccugccagaccccgaagggcgccaucaacaccucccugcccuuccagaacauccaccccaucaccaucgggaagugccccaaguacgucaagagcaccaagcugcggcucgcgaccggccugcgcaacgugccguccauccagagccgggggcuguucggcgccaucgccggguucaucgagggcggcuggacggggaugguggacggcugguacggguaccaccaccagaacgagcagggcuccggguacgccgccgaccucaagagcacccaguccgcgaucgacgagaucaccaacaaggucaacagcgugaucgagaagaugaacacccaguucacggccgucggcaaggaguucaaccaccuggagaagcgcaucgagaaccugaacaagaagguggacgacggcuuccucgacaucuggaccuacaacgccgagcugcuggugcuccuggagaacgagcggacccuggacuaccacgacuccaacgucaagaaccucuacgagaaggugcgcagccagcugaagaacaacgccaaggagaucgggaacggcugcuucgaguucuaccacaagugcgacaacacgugcauggaguccgugaagaacgggaccuacgacuaccccaaguacagcgaggaggccaagcugaaccgggaggagaucgacggcgucaagcucgaguccacccgcaucuaccagauccuggcgaucuacagcaccguggccagcucccuggugcucgucgugagccugggggccaucuccuucuggaugugcagcaacggcucccugcagugccggaucugcaucuga

SEQ ID NO: 73358 - RNA, 1701 nt, Artificial Sequence; identical to SEQ ID NO: 68927
  derived and/or modified CDS sequence (opt1) from hemagglutinin__InfluenzaA__AFN18714

SEQ ID NO: 73359 - RNA, 1701 nt, Artificial Sequence; identical to SEQ ID NO: 66693
  derived and/or modified CDS sequence (opt1) from hemagglutinin__InfluenzaA__AFN18721

SEQ ID NO: 73360 - RNA, 1701 nt, Artificial Sequence; identical to SEQ ID NO: 69359
  derived and/or modified CDS sequence (opt1) from hemagglutinin__InfluenzaA__AFN18725

SEQ ID NO: 73361 - RNA, 1701 nt, Artificial Sequence
  derived and/or modified CDS sequence (opt1) from hemagglutinin__InfluenzaA__AFN18735
augaaggccauccuggugguccuccuguacaccuucgccaccgcgaacgccgacacgcugugcaucggcuaccacgccaacaacagcaccgacaccguggacaccgugcucgagaagaacgucacggugacccacuccgugaaccugcuggaggacaagcacaacgggaagcucugcaagcugcgcggcgucgcgccccugcaccucgggaagugcaacaucgccggcuggauccuggggaacccggagugcgagagccuguccaccgccagcuccuggagcuacaucguggagaccuccagcuccgacaacggcacgugcuaccccggcgacuucaucgacuacgaggagcuccgggagcagcugagcuccgugagcuccuucgagcgcuucgagaucuuccccaagaccagcuccuggcccaaccacgacagcaacaagggggucaccgccgccugcccgcacgccggcgcgaaguccuucuacaagacccugaucuggcucgugaagaaggggaacagcuaccccaagcuguccaagagcuacaucaacgacaagggcaaggaggugcugguccucugggggauccaccaccccagcacguccgccgaccagcagagccuguaccagaacgccgacgccuacguguucgugggcaccucccgguacagcaagaaguucaagcccgagaucgccauccgcccgaagguccgggaccaggagggccgcaugaacuacuacuggacccugguggagcccggggacaagaucaccuucgaggcgacgggcaaccucguggucccccgguacgccuucgccauggagcgcaacgccggguccggcaucaucaucagcgacacccccgugcacgacugcaacacgaccugccagaccccgaagggcgccaucaacaccucccugcccuuccagaacauccaccccaucaccaucgggaagugccccaaguacgucaagagcaccaagcugcggcucgcgacgggccugcgcaacgugccguccauccagagccgggggcuguucggcgccaucgccggguucaucgagggcggcuggaccgggaugguggacggcugguacggguaccaccaccagaacgagcagggcuccggguacgccgccgaccucaagagcacccagaacgcgaucgacgagaucaccaacaaggugaacuccgucaucgagaagaugaacacgcaguucaccgccgugggcaaggaguucaaccaccuggagaagcgcaucgagaaccugaacaagaaggucgacgacggcuuccucgacaucuggaccuacaacgccgagcugcuggugcuccuggagaacgagcggacccuggacuaccacgacagcaacgugaagaaccucuacgagaagguccgcucccagcugaagaacaacgccaaggagaucgggaacggcugcuucgaguucuaccacaagugcgacaacacgugcauggagagcgugaagaacgggaccuacgacuaccccaaguacuccgaggaggccaagcugaaccgggaggagaucgacggcgugaagcucgagagcacccgcaucuaccagauccuggcgaucuacuccaccgucgccagcagccuggugcucguggucucccugggggccaucagcuucuggaugugcuccaacggcagccugcagugccggaucugcaucuga

SEQ ID NO: 73362 - RNA, 1701 nt, Artificial Sequence; identical to SEQ ID NO: 66693
  derived and/or modified CDS sequence (opt1) from hemagglutinin__InfluenzaA__AFN18742

SEQ ID NO: 73363 - RNA, 1701 nt, Artificial Sequence; identical to SEQ ID NO: 67795
  derived and/or modified CDS sequence (opt1) from hemagglutinin__InfluenzaA__AFN18747

SEQ ID NO: 73364 - RNA, 1701 nt, Artificial Sequence
  derived and/or modified CDS sequence (opt1) from hemagglutinin__InfluenzaA__AFN18757
augaaggccauccuggugguccuccuguacaccuucgccaccgcgaacgccgacacgcugugcaucggcuaccacgccaacaacagcaccgacaccguggacaccgugcucgagaagaacgucacggugacccacuccgugaaccugcuggaggacaagcacaacgggaagcucugcaagcugcgcggcgucgcgccccugcaccucgggaagugcaacaucgccggcuggauccuggggaacccggagugcgagagccuguccaccgccagcuccuggagcuacaucguggagaccuccagcuccgacaacggcacgugcuaccccggcgacuucaucgacuacgaggagcuccgggagcagcugagcuccgugagcuccuucgagcgcuucgagaucuuccccaagaccagcuccuggcccaaccacgacagcaacaagggggucaccgccgccugcccgcacgccggcgcgaaguccuucuacaagaaccugaucuggcucgugaagaaggggaacagcuaccccaagcuguccaagagcuacaucaacgacaagggcaaggaggugcugguccucugggggauccaccaccccagcaccuccgccgaccagcagagccuguaccagaacgccgacgccuacguguucgugggcacgucccgguacagcaagaaguucaagcccgagaucgccauccgcccgaagguccgggaccaggagggccgcaugaacuacuacuggacccugguggagcccggggacaagaucaccuucgaggcgaccggcaaccucgccgugccccgguacgccuucgccauggagcgcaacgccggguccggcaucaucaucagcgacacgcccguccacgacugcaacacgaccugccagaccccgaagggcgcgaucaacaccucccugcccuuccagaacauccaccccaucaccaucgggaagugccccaaguacgucaagagcaccaagcugcggcucgccaccggccugcgcaacgugccguccauccagagccgggggcuguucggcgccaucgccggguucaucgagggcggcuggacggggaugguggacggcugguacggguaccaccaccagaacgagcagggcuccggguacgccgcggaccucaagagcacccagaacgccaucgacgagaucaccaacaaggugaacuccgugaucgagaagaugaacacccaguucacggccgucggcaaggaguucaaccaccuggagaagcgcaucgagaaccugaacaagaagguggacgacggcuuccucgacaucuggaccuacaacgccgagcugcugguccuccuggagaacgagcggacccuggacuaccacgacagcaacgugaagaaccucuacgagaaggugcgcucccagcugaagaacaacgccaaggagaucgggaacggcugcuucgaguucuaccacaagugcgacaacacgugcauggagagcgucaagaacgggaccuacgacuaccccaaguacuccgaggaggcgaagcugaaccgggaggagaucgacggcgugaagcucgagagcacccgcaucuaccagauccuggccaucuacuccaccguggccagcagccugguccucguggugucccugggggccaucagcuucuggaugugcuccaacggcagccugcagugccggaucugcaucuga

SEQ ID NO: 73365 - RNA, 1701 nt, Artificial Sequence; identical to SEQ ID NO: 66693
  derived and/or modified CDS sequence (opt1) from hemagglutinin__InfluenzaA__AFN18767

SEQ ID NO: 73366 - RNA, 1701 nt, Artificial Sequence; identical to SEQ ID NO: 73357
  derived and/or modified CDS sequence (opt1) from hemagglutinin__InfluenzaA__AFN18774

SEQ ID NO: 73367 - RNA, 1701 nt, Artificial Sequence; identical to SEQ ID NO: 66693
  derived and/or modified CDS sequence (opt1) from hemagglutinin__InfluenzaA__AFN18776

SEQ ID NO: 73368 - RNA, 1701 nt, Artificial Sequence; identical to SEQ ID NO: 67559
  derived and/or modified CDS sequence (opt1) from hemagglutinin__InfluenzaA__AFN18778

SEQ ID NO: 73369 - RNA, 1701 nt, Artificial Sequence; identical to SEQ ID NO: 66693
  derived and/or modified CDS sequence (opt1) from hemagglutinin__InfluenzaA__AFN18784

SEQ ID NO: 73370 - RNA, 1701 nt, Artificial Sequence; identical to SEQ ID NO: 67559
  derived and/or modified CDS sequence (opt1) from hemagglutinin__InfluenzaA__AFN18789

SEQ ID NO: 73371 - RNA, 1701 nt, Artificial Sequence; identical to SEQ ID NO: 66693
  derived and/or modified CDS sequence (opt1) from hemagglutinin__InfluenzaA__AFN18799

SEQ ID NO: 73372 - RNA, 1701 nt, Artificial Sequence; identical to SEQ ID NO: 66693
  derived and/or modified CDS sequence (opt1) from hemagglutinin__InfluenzaA__AFN18809

SEQ ID NO: 73373 - RNA, 1701 nt, Artificial Sequence; identical to SEQ ID NO: 67795
  derived and/or modified CDS sequence (opt1) from hemagglutinin__InfluenzaA__AFN18816

SEQ ID NO: 73374 - RNA, 1701 nt, Artificial Sequence; identical to SEQ ID NO: 66693
  derived and/or modified CDS sequence (opt1) from hemagglutinin__InfluenzaA__AFN18818

SEQ ID NO: 73375 - RNA, 1701 nt, Artificial Sequence
  derived and/or modified CDS sequence (opt1) from hemagglutinin__InfluenzaA__AFN18820
augaaggccauccuggugguccuccuguacaccuucgccaccgcgaacgccgacacgcugugcaucggcuaccacgccaacaacagcaccgacaccguggacaccgugcucgagaagaacgucacggugacccacuccgugaaccugcuggaggacaagcacaacgggaagcucugcaagcugcgcggcgucgcgccccugcaccucgggaacugcaacaucgccggcuggauccuggggaacccggagugcgagagccuguccaccgccagcuccuggagcuacaucguggagaccuccagcuccgacaacggcacgugcuaccccggcgacuucaucgacuacgaggagcuccgggagcagcugagcuccgugagcuccuucgagcgcuucgagaucuuccccaagaccagcuccuggcccaaccacgacagcaacaagggggucaccgccgccugcccgcacgccggcgcgaaguccuucuacaagaaccugaucuggcucgugaagaaggggaacagcuaccccaagcuguccaagagcuacaucaacgacaagggcaaggaggugcugguccucugggggauccaccaccccagcaccuccgccgaccagcagagccuguaccagaacgccgacgccuacguguucgugggcacgucccgguacagcaagaaguucaagcccgagaucgccauccgcccgaagguccgggaccaggagggccgcaugaacuacuacuggacccugguggagcccggggacaagaucaccuucgaggcgaccggcaaccucguggucccccgguacgccuucgccauggagcgcaacgccggguccggcaucaucaucagcgacacgcccgugcacgacugcaacacgaccugccagaccccgaagggcgccaucaacaccucccugcccuuccagaacauccaccccaucaccaucgggaagugccccaaguacgucaagagcaccaagcugcggcucgcgaccggccugcgcaacgugccguccauccagagccgggggcuguucggcgccaucgccggguucaucgagggcggcuggacggggaugguggacggcugguacggguaccaccaccagaacgagcagggcuccggguacgccgccgaccucaagagcacccagaacgcgaucgacgagaucaccaacaaggugaacuccgucaucgagaagaugaacacccaguucacggccgugggcaaggaguucaaccaccuggagaagcgcaucgagaaccugaacaagaaggucgacgacggcuuccucgacaucuggaccuacaacgccgagcugcuggugcuccuggagaacgagcggacccuggacuaccacgacagcaacgugaagaaccucuacgagaagguccgcucccagcugaagaacaacgccaaggagaucgggaacggcugcuucgaguucuaccacaagugcgacaacacgugcauggagagcgugaagaacgggaccuacgacuaccccaaguacuccgaggaggccaagcugaaccgggaggagaucgacggcgugaagcucgagagcacccgcaucuaccagauccuggcgaucuacuccaccgucgccagcagccuggugcucguggucucccugggggccaucagcuucuggaugugcuccaacggcagccugcagugccggaucugcaucuga

SEQ ID NO: 73376 - RNA, 1701 nt, Artificial Sequence; identical to SEQ ID NO: 66693
  derived and/or modified CDS sequence (opt1) from hemagglutinin__InfluenzaA__AFN18822

SEQ ID NO: 73377 - RNA, 1701 nt, Artificial Sequence
  derived and/or modified CDS sequence (opt1) from hemagglutinin__InfluenzaA__AFN18824
augaaggccauccuggugguccuccuguacaccuucgccaccgcgaacgccgacacgcugugcaucggcuaccacgccaacaacagcaccgacaccguggacaccgugcucgagaagaacgucacggugacccacuccgugaaccugcuggaggacaagcacaacgggaagcucugcaagcugcgcggcgucgcgccccugcaccucgggaagugcaacaucgccggcuggauccuggggaacccggagugcgagagccuguccaccgccagcuccuggagcuacaucguggagaccuccagcuccgacaacggcacgugcuaccccggcgacuucaucgacuacgaggagcuccgggagcagcugagcuccgugagcuccuucgagcgcuucgagaucuuccccaagaccagcuccuggcccaaccacgacagcaacaagggggucaccgccgccugcccgcacgccggcgcgaaguccuucuacaagaaccugaucuggcucgugaagaaggggaacagcuaccccaagcuguccaagagcuacaucaacgacaagggcaaggaggugcugguccucugggggauccaccaccccagcaccuccgccgaccagcagagccuguaccagaacgccgacgccuacguguucgugggcacgucccgguacagcaagaaguucaagcccgagaucgccauccgcccgaagguccgggaccaggagggccgcaugaacuacuacuggacccugguggagcccggggacaagaucaccuucgaggcgaccggcaaccucguggucccccgguacgccuucgccauggagcgcaacgccggguccggcaucaucaucagcgacacgcccgugcacgacugcaacacgaccugccagaccccgaagggcgccaucaacaccucccugcccuuccagaacauccaccccaucaccaucgggaagugccccaaguacgucaagagcaccaagcugcggcucgcgaccggccugcgcaacgugccguccauccagagccgggggcuguucggcgccaucgccggguucaucgagggcggcuggacggggaugguggacggcugguacggguaccaccaccagaacgagcagggcuccggguacgccgccgaccucaagagcacccagaacgcgaucgacgagaucaccaacaaggugaacuccgucaucgagaagaugaacacccaguucacggccgugggcaaggaguucaaccaccuggagaagcgcaucgagaaccugaacaagaaggucgacgacggcuuccucgacaucuggaccuacaacgccgagcugcuggugcuccuggagaacgagcggacccuggacuaccacgacagcaacgugaagaaccucuacgagaagguccgcucccagcugaagaacaacgccaaggagaucgggaacggcugcuucgaguucuaccacaagugcgacaacacgugcauggagagcgugaagaacgggaccuacgacuaccccaaguacuccgaggaggccaagcugaaccgggaggagaucgacggcgugcgccucgagagcacccggaucuaccagauccuggcgaucuacuccaccgucgccagcagccuggugcucguggucucccugggggccaucagcuucuggaugugcuccaacggcagccugcagugccgcaucugcaucuga

SEQ ID NO: 73378 - RNA, 1701 nt, Artificial Sequence; identical to SEQ ID NO: 73301
  derived and/or modified CDS sequence (opt1) from hemagglutinin__InfluenzaA__AFN18826

SEQ ID NO: 73379 - RNA, 1701 nt, Artificial Sequence
  derived and/or modified CDS sequence (opt1) from hemagglutinin__InfluenzaA__AFN18828
augaaggccauccuggugguccuccuguacaccuucgccaccgcgaacgccgacacgcugugcaucggcuaccacgccaacaacagcaccgacaccguggacaccgugcucgagaagaacgucacggugacccacuccgugaaccugcuggaggacaagcacaacgggaagcucugcaagcugcgcggcgucgcgccccugcaccucgggaagugcaacaucgccggcuggauccuggggaacccggagugcgagagccuguccaccgccagcuccuggagcuacaucguggagaccuccagcuccgacaacggcacgugcuaccccggcgacuucaucgacuacgaggagcuccgggagcagcugagcuccgugagcuccuucgagcgcuucgagaucuuccccaagaccagcuccuggcccaaccacgacagcaacaagggggucaccgccgccugcccgcacgccggcgcgaaguccuucuacaagaaccugaucuggcucgugaagaaggggaacagcuaccccaagcuguccaagagcuacaucaacgacaagggcaaggaggugcugguccucugggggauccaccaccccagcaccuccgccgaccagcagagccuguaccagaacgccgacgccuacguguucgugggcacgucccgguacagcaagaaguucaagcccgagaucgccauccgcccgaagguccgggaccaggagggccgcaugaacuacuacuggacccugguggagcccggggacaagaucaccuucgaggcgaccggcaaccucguggucccccgguacgccuucgccauggagcgcaacgccggguccggcaucaucaucagcgacacgcccgugcacgacugcaacacgaccugccagaccccgaagggcgccaucaacaccucccugcccuuccagaacauccaccccaucaccaucgggaagugccccaaguacgucaagagcaucaagcugcggcucgcgaccggccugcgcaacgugccguccauccagagccgggggcuguucggcgccaucgccggguucaucgagggcggcuggaccgggaugguggacggcugguacggguaccaccaccagaacgagcagggcuccggguacgccgccgaccucaagagcacgcagaacgcgaucgacgagaucaccaacaaggugaacuccgucaucgagaagaugaacacccaguucaccgccgugggcaaggaguucaaccaccuggagaagcgcaucgagaaccugaacaagaaggucgacgacggcuuccucgacaucuggacguacaacgccgagcugcuggugcuccuggagaacgagcggacccuggacuaccacgacagcaacgugaagaaccucuacgagaagguccgcucccagcugaagaacaacgccaaggagaucgggaacggcugcuucgaguucuaccacaagugcgacaacacgugcauggagagcgugaagaacgggaccuacgacuaccccaaguacuccgaggaggccaagcugaaccgggaggagaucgacggcgugaagcucgagagcacccgcaucuaccagauccuggcgaucuacuccaccgucgccagcagccuggugcucguggucucccugggggccaucagcuucuggaugugcuccaacggcagccugcagugccggaucugcaucuga

SEQ ID NO: 73380 - RNA, 1701 nt, Artificial Sequence; identical to SEQ ID NO: 73364
  derived and/or modified CDS sequence (opt1) from hemagglutinin__InfluenzaA__AFN18830

SEQ ID NO: 73381 - RNA, 1701 nt, Artificial Sequence; identical to SEQ ID NO: 66693
  derived and/or modified CDS sequence (opt1) from hemagglutinin__InfluenzaA__AFN18832

SEQ ID NO: 73382 - RNA, 1701 nt, Artificial Sequence; identical to SEQ ID NO: 67559
  derived and/or modified CDS sequence (opt1) from hemagglutinin__InfluenzaA__AFN18834

SEQ ID NO: 73383 - RNA, 1701 nt, Artificial Sequence
  derived and/or modified CDS sequence (opt1) from hemagglutinin__InfluenzaA__AFN18849
augaaggccauccuggugguccuccuguacaccuucgccaccgcgaacgccgacacgcugugcaucggcuaccacgccaacaacagcaccgacaccguggacaccgugcucgagaagaacgucacggugacccacuccgugaaccugcuggaggacaagcacaacgggaagcucugcaagcugcgcggcgucgcgccccugcaccucgggaagugcaacaucgccggcuggauccuggggaacccggagugcgagagccuguccaccgccagcuccuggagcuacaucguggagaccuccagcuccgacaacggcacgugcuaccccggcgacuucaucgacuacgaggagcuccgggagcagcugagcuccgugagcuccuucgagcgcuucgagaucuuccccaagaccagcuccuggcccaaccacgacagcaacaagggggucaccgccgccugcccgcacgccggcgcgaaguccuucuacaagaaccugaucuggcucgugaagaaggggaacagcuaccccaagcuguccaagagcuacaucaacgacaagggcaaggaggugcugguccucugggggauccaccaccccagcaccuccgccgaccagcagagccuguaccagaacguggacgccuacguguucgucggcacgucccgguacagcaagaaguucaagcccgagaucgccauccgcccgaaggugcgggaccaggagggccgcaugaacuacuacuggacccugguggagcccggggacaagaucaccuucgaggccaccggcaaccucgucgugccccgguacgcguucgccauggagcgcaacgccggguccggcaucaucaucagcgacacgcccgugcacgacugcaacacgaccugccagaccccgaagggcgccaucaacaccucccugcccuuccagaacauccaccccaucaccaucgggaagugccccaaguacgucaagagcaccaagcugcggcucgccaccggccugcgcaacgugccguccauccagagccgggggcuguucggcgcgaucgccggguucaucgagggcggcuggacggggaugguggacggcugguacggguaccaccaccagaacgagcagggcuccggguacgccgccgaccucaagagcacccagaacgccaucgacgagaucaccaacaaggucaacuccgugaucgagaagaugaacacccaguucacggcggucggcaaggaguucaaccaccuggagaagcgcaucgagaaccugaacaagaagguggacgacggcuuccucgacaucuggaccuacaacgccgagcugcuggugcuccuggagaacgagcggacccuggacuaccacgacagcaacgucaagaaccucuacgagaaggugcgcucccagcugaagaacaacgccaaggagaucgggaacggcugcuucgaguucuaccacaagugcgacaacacgugcauggagagcgugaagaacgggaccuacgacuaccccaaguacuccgaggaggccaagcugaaccgggaggagaucgacggcgucaagcucgagagcacccgcaucuaccagauccuggccaucuacuccaccguggcgagcagccuggugcucgucgugucccugggggccaucagcuucuggaugugcuccaacggcagccugcagugccggaucugcaucuga

SEQ ID NO: 73384 - RNA, 1701 nt, Artificial Sequence
  derived and/or modified CDS sequence (opt1) from hemagglutinin__InfluenzaA__AFN18856
augaaggccauccuggugguccuccuguacaccuucgccaccgcgaacgccgacacgcugugcaucggcuaccacgccaacaacagcaccgacaccguggacaccgugcucgagaagaacgucacggugacccacuccgugaaccugcuggagaacaagcacaacgggaagcucugcaagcugcgcggcgucgcgccccugcaccucgggaagugcaacaucgccggcuggauccuggggaacccggagugcgagagccuguccaccgccagcuccuggagcuacaucguggagaccuccagcuccgacaacggcacgugcuaccccggcgacuucaucgacuacgaggagcuccgggagcagcugagcuccgugagcuccuucgagcgcuucgagaucuuccccaagaccagcuccuggcccaaccacgacagcaacaagggggucaccgccgccugcccgcacgccggcgcgaaguccuucuacaagaaccugaucuggcucgugaagaaggggaacagcuaccccaagcuguccaagagcuacaucaacgacaagggcaaggaggugcugguccucugggggauccaccaccccagcaccuccgccgaccagcagagccuguaccagaacgccgacgccuacguguucgugggcacgucccgguacagcaagaaguucaagcccgagaucgccauccgcccgaagguccgggaccaggagggccgcaugaacuacuacuggacccugguggagcccggggacaagaucaccuucgaggcgaccggcaaccucguggucccccgguacgccuucgccauggagcgcaacgccggguccggcaucaucaucagcgacacgcccgugcacgacugcaacacgaccugccagaccccgaagggcgccaucaacaccucccugcccuuccagaacauccaccccaucaccaucgggaagugccccaaguacgucaagagcaccaagcugcggcucgcgaccggccugcgcaacgugccguccauccagagccgggggcuguucggcgccaucgccggguucaucgagggcggcuggacggggaugguggacggcugguacggguaccaccaccagaacgagcagggcuccggguacgccgccgaccucaagagcacccagaacgcgaucgacgagaucaccaacaaggugaacuccgucaucgagaagaugaacacccaguucacggccgugggcaaggaguucaaccaccuggagaagcgcaucgagaaccugaacaagaaggucgacgacggcuuccucgacaucuggaccuacaacgccgagcugcuggugcuccuggagaacgagcggacccuggacuaccacgacagcaacgugaagaaccucuacgagaagguccgcucccagcugaagaacaacgccaaggagaucgggaacggcugcuucgaguucuaccacaagugcgacaacacgugcauggagagcgugaagaacgggaccuacgacuaccccaaguacuccgaggaggccaagcugaaccgggaggagaucgacggcgugaagcucgagagcacccgcaucuaccagauccuggcgaucuacuccaccgucgccagcagccuggugcucguggucucccugggggccaucagcuucuggaugugcuccaacggcagccugcagugccggaucugcaucuga

SEQ ID NO: 73385 - RNA, 1701 nt, Artificial Sequence; identical to SEQ ID NO: 67554
  derived and/or modified CDS sequence (opt1) from hemagglutinin__InfluenzaA__AFN18858

SEQ ID NO: 73386 - RNA, 1701 nt, Artificial Sequence
  derived and/or modified CDS sequence (opt1) from hemagglutinin__InfluenzaA__AFN18860
augaaggccauccuggugguccuccuguacaccuucgccaccgcgaacgccgacacgcugugcaucggcuaccacgccaacaacagcaccgacaccguggacaccgugcucgagaagaacgucacggugacccacuccgugaaccugcuggaggacaagcacaacgggaagcucugcaagcugcgcggcgucgcgccccugcaccucgggaagugcaacaucgccggcuggauccuggggaacccggagugcgagagccuguccaccgcgagcuccuggagcuacaucguggagaccuccagcuccgacaacggcacgugcuaccccggcgacuucaucgacuacgaggagcuccgggagcagcugagcuccgugagcuccuucgagcgcuucgagaucuuccccaagaccagcuccuggcccaaccacgacagcaacaagggggucaccgccgccugcucccacgccggcgccaagagcuucuacaagaaccugaucuggcucgugaagaaggggaacuccuacccgaagcugagcaagagcuacaucaacgacaagggcaaggaggugcugguccucugggggauccaccaccccuccaccagcgccgaccagcagucccuguaccagaacgccgacgccuacguguucgugggcacgagccgguacuccaagaaguucaagcccgagaucgccauccgccccaagguccgggaccaggagggccgcauggacuacuacuggacccugguggagccgggggacaagaucaccuucgaggcgaccggcaaccucguggucccccgguacgccuucgccauggagcgcaacgccgggagcggcaucaucaucuccgacacgcccgugcacgacugcaacacgaccugccagacccccaagggcgccaucaacaccagccugccguuccagaacauccaccccaucaccaucgggaagugccccaaguacgugaaguccaccaagcugcggcucgcgaccggccugcgcaacguccccagcauccagucccgggggcuguucggcgccaucgccggguucaucgagggcggcuggacggggaugguggacggcugguacggguaccaccaccagaacgagcagggcagcggguacgccgccgaccucaaguccacccagaacgcgaucgacgagaucaccaacaaggugaacagcgucaucgagaagaugaacacccaguucacggccgugggcaaggaguucaaccaccuggagaagcgcaucgagaaccugaacaagaaggucgacgacggcuuccucgacaucuggaccuacaacgccgagcugcuggugcuccuggagaacgagcggacccuggacuaccacgacuccaacgugaagaaccucuacgagaagguccgcagccagcugaagaacaacgccaaggagaucgggaacggcugcuucgaguucuaccacaagugcgacaacacgugcauggaguccgugaagaacgggaccuacgacuacccgaaguacagcgaggaggccaagcugaaccgggaggagaucgacggcgugaagcucgaguccacccgcaucuaccagauccuggcgaucuacagcaccgucgccagcucccuggugcucguggucagccugggggccaucuccuucuggaugugcagcaacggcucccugcagugccggaucugcaucuga

SEQ ID NO: 73387 - RNA, 1701 nt, Artificial Sequence
  derived and/or modified CDS sequence (opt1) from hemagglutinin__InfluenzaA__AFN18865
augaaggccauccuggugguccuccuguacaccuucgccaccgcgaacgccgacacgcugugcaucggcuaccacgccaacaacagcaccgacaccguggacaccgugcucgagaagaacgucacggugacccacuccgugaaccugcuggaggacaagcacaacgggaagcucugcaagcugcgcggcgucgcgccccugcaccucgggaagugcaacaucgccggcuggauccuggggaacccggagugcgagagccuguccaccgccagcuccuggagcuacaucguggagaccuccagcuccgacaacggcacgugcuaccccggcgacuucaucgacuacgaggagcuccgggagcagcugagcuccgugagcuccuucgagcgcuucgagaucuuccccaagaccagcuccuggcccaaccacgacagcaacaagggggucaccgccgccugcccgcacgccggcgcgaaguccuucuacaagaaccugaucuggcucgugaagaaggggaacagcuaccccaagcuguccaagagcuacaucaacgacaagggcaaggaggugcugguccucugggggauccaccaccccagcaccuccgccgaccagcagagccuguaccagaacgccgacgccuacguguucgugggcacgucccgguacagcaagaaguucaagcccgagaucgccauccgcccgaagguccgggaccaggagggccgcaugaacuacuacuggacccugguggagcccggggacaagaucaccuucgaggcgaccggcaaccucguggucccccgguacgccuucgccauggagcgcaacgccggguccggcaucaucaucagcgacacguccgugcacgacugcaacacgaccugccagacccccaagggcgccaucaacaccagccugccguuccagaacauccaccccaucaccaucgggaagugccccaaguacgugaaguccaccaagcugcggcucgcgaccggccugcgcaacguccccagcauccagucccgggggcuguucggcgccaucgccggguucaucgagggcggcuggacggggaugguggacggcugguacggguaccaccaccagaacgagcagggcagcggguacgccgccgaccucaaguccacccagaacgcgaucgacaagaucaccaacaaggugaacagcgucaucgagaagaugaacacccaguucacggccgugggcaaggaguucaaccaccuggagaagcgcaucgagaaccugaacaagaaggucgacgacggcuuccucgacaucuggaccuacaacgccgagcugcuggugcuccuggagaacgagcggacccuggacuaccacgacuccaacgugaagaaccucuacgagaagguccgcagccagcugaagaacaacgccaaggagaucgggaacggcugcuucgaguucuaccacaagugcgacaacacgugcauggaguccgugaagaacgggaccuacgacuacccgaaguacagcgaggaggccaagcugaaccgggaggagaucgacggcgugaagcucgaguccacccgcaucuaccagauccuggcgaucuacagcaccgucgccagcucccuggugcucguggucagccugggggccaucuccuucuggaugugcagcaacggcucccugcagugccggaucugcaucuga

SEQ ID NO: 73388 - RNA, 1701 nt, Artificial Sequence
  derived and/or modified CDS sequence (opt1) from hemagglutinin__InfluenzaA__AFN18875
auggaggccauccuggugguccuccuguacaccuucgccaccgcgaacgccgacacgcugugcaucggcuaccacgccaacaacagcaccgacaccguggacaccgugcucgagaagaacgucacggugacccacuccgugaaccugcuggaggacaagcacaacgggaagcucugcaagcugcgcggcgucgcgccccugcaccucgggaagugcaacaucgccggcuggauccuggggaacccggagugcgagagccuguccaccgccagcuccuggagcuacaucguggagaccuccagcuccgacaacggcacgugcuaccccggcgacuucaucgacuacgaggagcuccgggagcagcugagcuccgugagcuccuucgagcgcuucgagaucuuccccaagaccagcuccuggcccaaccacgacagcaacaagggggucaccgccgccugcccgcacgccggcgcgaaguccuucuacaagaaccugaucuggcucgugaagaaggggaacagcuaccccaagcuguccaagagcuacaucaacgacaagggcaaggaggugcugguccucugggggauccaccaccccagcaccuccgccgcccagcagagccuguaccagaacgccgacgccuacguguucgugggcuccagccgguacuccaagaaguucaagcccgagaucgcgauccgcccgaagguccgggaccaggagggccgcaugaacuacuacuggacgcugguggagcccggggacaagaucaccuucgaggccaccggcaaccucguggucccccgguacgccuucgccauggagcgcaacgccgggagcggcaucaucaucuccgacacccccgugcacgacugcaacacgaccugccagaccccgaagggcgcgaucaacaccagccugcccuuccacaacauccaccccaucacgaucgggaagugccccaaguacgugaaguccaccaagcugcggcucgccaccggccugcgcaacgucccgagcauccagucccgggggcuguucggcgccaucgccggguucaucgagggcggcuggaccgggaugguggacggcugguacggguaccaccaccagaacgagcagggcagcggguacgccgcggaccucaaguccacgcagaacgccaucgacgagaucaccaacaaggugaacagcgucaucgagaagaugaacacccaguucaccgccgugggcaaggaguucaaccaccuggagaagcgcaucgagaaccugaacaagaaggucgacgacggcuuccucgacaucuggacguacaacgccgagcugcuggugcuccuggagaacgagcggacccuggacuaccacgacuccaacgugaagaaccucuacgagaagguccgcagccagcugaagaacaacgccaaggagaucgggaacggcugcuucgaguucuaccacaagugcgacaacacgugcauggaguccgugaagaacgggaccuacgacuaccccaaguacagcgaggaggcgaagcugaaccgggaggagaucgacggcgugaagcucgaguccacccgcaucuaccagauccuggccaucuacagcaccgucgccagcucccuggugcucguggucagccugggggccaucuccuucuggaugugcagcaacggcucccugcagugccggaucugcaucuga

SEQ ID NO: 73389 - RNA, 1701 nt, Artificial Sequence
  derived and/or modified CDS sequence (opt1) from hemagglutinin__InfluenzaA__AFN18885
augaaggccauccugaucgugcuccuguacaccuucgccaccgcgaacgccgacacgcugugcaucggcuaccacgccaacaacagcaccgacaccgucgacaccgugcucgagaagaacgugacggucacccacuccgugaaccugcuggaggacaagcacaacgggaagcucugcaagcugcgcggcguggcgccccugcaccucgggaagugcaacaucgccggcuggauccuggggaacccggagugcgagagccuguccaccgccagcuccuggagcuacaucgucgagaccuccagcuccgacaacggcacgugcuaccccggcgacuucaucgacuacgaggagcuccgggagcagcugagcuccgugagcuccuucgagcgcuucgagaucuuccccaagaccagcuccuggcccaaccacgacagcaacaagggggugaccgccgccugcccgcacgccggcgcgaaguccuucuacaagaaccugaucuggcucgucaagaaggggaacagcuaccccaagcuguccaagagcuacaucaacgacaagggcaaggaggugcuggugcucugggggauccaccaccccagcaccuccgccgaccagcagagccuguaccagaacgccgacgccuacgucuucgugggcacgucccgguacagcaagaaguucaagcccgagaucgccauccgcccgaaggugcgggaccaggagggccgcaugaacuacuacuggacccuggucgagcccggggacaagaucaccuucgaggcgaccggcaaccucguggugccccgguacgccuucgccauggagcgcaacgccggguccggcaucaucaucagcgacacgcccguccacgacugcaacacgaccugccagaccccgaagggcgccaucaacaccaaccugcccuuccagaacauccaccccaucaccaucgggaagugccccaaguacgugaaguccaccaagcugcggcucgcgaccggccugcgcaacgugccgagcacgcagucccgggggcuguucggcgccaucgccggguucaucgagggcggcuggaccgggauggucgacggcugguacggguaccaccaccagaacgagcagggcagcggguacgccgccgaccucaaguccacccagaacgcgaucgacgagaucaccaacaaggugaacagcgugaucgagaagaugaacacgcaguucaccgccgucggcaaggaguucaaccaccuggagaagcgcaucgagaaccugaacaagaagguggacgacggcuuccucgacaucuggaccuacaacgccgagcugcugguccuccuggagaacgagcggacccuggacuaccacgacuccaacgugaagaaccucuacgagaaggugcgcagccagcugaagaacaacgccaaggagaucgggaacggcugcuucgaguucuaccacaagugcgacaacacgugcauggaguccgucaagaacgggaccuacgacuaccccaaguacagcgaggaggccaagcugaaccgggaggagaucgacggcgugaagcucgaguccacccgcaucuaccagauccuggcgaucuacagcaccguggccuccagccugguccucguggugagccugggggccaucuccuucuggaugugcagcaacggcucccugcagugcaagaucugcaucuga

SEQ ID NO: 73390 - RNA, 1701 nt, Artificial Sequence; identical to SEQ ID NO: 66693
  derived and/or modified CDS sequence (opt1) from hemagglutinin__InfluenzaA__AFN18892

SEQ ID NO: 73391 - RNA, 1701 nt, Artificial Sequence; identical to SEQ ID NO: 66935
  derived and/or modified CDS sequence (opt1) from hemagglutinin__InfluenzaA__AFN18894

SEQ ID NO: 73392 - RNA, 1701 nt, Artificial Sequence; identical to SEQ ID NO: 73357
  derived and/or modified CDS sequence (opt1) from hemagglutinin__InfluenzaA__AFN18903

SEQ ID NO: 73393 - RNA, 1701 nt, Artificial Sequence; identical to SEQ ID NO: 67795
  derived and/or modified CDS sequence (opt1) from hemagglutinin__InfluenzaA__AFN18910

SEQ ID NO: 73394 - RNA, 1701 nt, Artificial Sequence
  derived and/or modified CDS sequence (opt1) from hemagglutinin__InfluenzaA__AFN18912
auggaggccauccuggugguccuccuguacaccuucgccaccgcgaacgccgacacgcugugcaucggcuaccacgccaacaacagcaccgacaccguggacaccgugcucgagaagaacgucacggugacccacuccgugaaccugcuggaggacaagcacaacgggaagcucugcaagcugcgcggcgucgcgccccugcaccucgggaagugcaacaucgccggcuggauccuggggaacccggagugcgagagccuguccaccgccagcuccuggagcuacaucguggagaccuccagcuccgacaacggcacgugcuaccccggcgacuucaucgacuacgaggagcuccgggagcagcugagcuccgugagcuccuucgagcgcuucgagaucuuccccaagaccagcuccuggcccaaccacgacagcaacaagggggucaccgccgccugcccgcacgccggcgcgaaguccuucuacaagaaccugaucuggcucgugaagaaggggaacagcuaccccaagcuguccaagagcuacaucaacgacaagggcaaggaggugcugguccucugggggauccaccaccccagcaccuccgccgaccagcagagccuguaccagaacgccgacgccuacguguucgugggcuccagccgguacuccaagaaguucaagcccgagaucgccauccgcccgaagguccgggaccaggagggccgcaugaacuacuacuggacgcugguggagcccggggacaagaucaccuucgaggcgaccggcaaccucguggucccccgguacgccuucgccauggagcgcaacgccgggagcggcaucaucaucuccgacaccagcgugcacgacugcaacacgaccugccagacccccaagggcgccaucaacaccucccugccguuccacaacauccaccccaucacgaucgggaagugccccaaguacgucaagagcaccaagcugcggcucgcgaccggccugcgcaacgugcccuccauccagagccgggggcuguucggcgccaucgccggguucaucgagggcggcuggaccgggaugguggacggcugguacggguaccaccaccagaacgagcagggcuccggguacgccgccgaccucaagagcacgcagaacgcgaucgacgagaucaccaacaaggugaacuccgucaucgagaagaugaacacccaguucaccgccgugggcaaggaguucaaccaccuggagaagcgcaucgagaaccugaacaagaaggucgacgacggcuuccucgacaucuggacguacaacgccgagcugcuggugcuccuggagaacgagcggacccuggacuaccacgacagcaacgugaagaaccucuacgagaagguccgcucccagcugaagaacaacgccaaggagaucgggaacggcugcuucgaguucuaccacaagugcgacaacacgugcauggagagcgugaagaacgggaccuacgacuacccgaaguacuccgaggaggccaagcugaaccgggaggagaucgacggcgugaagcucgagagcacccgcaucuaccagauccuggcgaucuacagcaccgucgccuccagccuggugcucguggucucccugggggccaucagcuucuggaugugcuccaacggcagccugcagugccggaucugcaucuga

SEQ ID NO: 73395 - RNA, 1701 nt, Artificial Sequence; identical to SEQ ID NO: 67795
  derived and/or modified CDS sequence (opt1) from hemagglutinin__InfluenzaA__AFN18917

SEQ ID NO: 73396 - RNA, 1701 nt, Artificial Sequence; identical to SEQ ID NO: 66693
  derived and/or modified CDS sequence (opt1) from hemagglutinin__InfluenzaA__AFN18927

SEQ ID NO: 73397 - RNA, 1701 nt, Artificial Sequence; identical to SEQ ID NO: 69359
  derived and/or modified CDS sequence (opt1) from hemagglutinin__InfluenzaA__AFN18937

SEQ ID NO: 73398 - RNA, 1701 nt, Artificial Sequence
  derived and/or modified CDS sequence (opt1) from hemagglutinin__InfluenzaA__AFN18952
augaaggccauccuggugguccuccuguacaccuucgccaccgcgaacgccgacacgcugugcaucggcuaccacgccaacaacagcaccgacaccguggacaccgugcucgagaagaacgucacggugacccacuccgugaacauccuggaggacaagcacaaccgcaagcugugcaagcuccgcggggucgcgccccugcaccugggcaagugcaacaucgccggguggauccucggcaacccggagugcgagagccuguccaccgccagcuccuggagcuacaucguggagaccuccagcuccgacaacgggacgugcuaccccggcgacuucaucgacuacgaggagcugcgggagcagcucagcuccgugagcuccuucgagcgguucgagaucuuccccaagaccagcuccuggcccaaccacgacagcaacaagggcgucaccgccgccugcccgcacgccggggcgaaguccuucuacaagaaccugaucuggcuggugaagaagggcaacagcuaccccaagcucuccaagagcuacaucaacgacaaggggaaggaggugcugguccuguggggcauccaccaccccagcaccuccgccgaccagcagagccucuaccagaacgccgacgccuacguguucguggggacgucccgcuacagcaagaaguucaagcccgagaucgccauccggccgaagguccgcgaccaggagggccggaugaacuacuacuggacccugguggagcccggcgacaagaucaccuucgaggcgaccgggaaccugguggucccccgcuacgccuucgccauggagcggaacgccggcuccgggaucaucaucagcgacacgcccgugcacgacugcaacacgaccugccagaccccgaagggcgccaucaacaccucccuccccuuccagaacauccaccccaucaccaucggcaagugccccaaguacgucaagagcaccaagcugcgccuggcgaccgggcuccggaacgugccguccauccagagccgcggccuguucggggccaucgccggcuucaucgagggcggguggacgggcaugguggacgggugguacggcuaccaccaccagaacgagcagggguccggcuacgccgccgaccucaagagcacccagaacgcgaucgacgagaucaccaacaaggugaacuccgucaucgagaagaugaacacccaguucacggccguggggaaggaguucaaccaccuggagaagcggaucgagaaccugaacaagaaggucgacgacggcuuccuggacaucuggaccuacaacgccgagcuccuggugcugcucgagaacgagcgcacccuggacuaccacgacagcaacgugaagaaccuguacgagaagguccggucccagcucaagaacaacgccaaggagaucggcaacgggugcuucgaguucuaccacaagugcgacaacacgugcauggagagcgugaagaacggcaccuacgacuaccccaaguacuccgaggaggccaagcugaaccgcgagaagaucgacggggugaagcuggagagcacccggaucuaccagauccucgcgaucuacuccaccgucgccagcagccuggugcugguggucucccucggcgccaucagcuucuggaugugcuccaacgggagccugcagugccgcaucugcaucuga

SEQ ID NO: 73399 - RNA, 1701 nt, Artificial Sequence
  derived and/or modified CDS sequence (opt1) from hemagglutinin__InfluenzaA__AFN18957
augaaggccauccuggugguccuccuguacaccuucgccaccgcgaacgccgacacgcugugcaucggcuaccacgccaacaacagcaccgacaccguggacaccgugcucgagaagaacgucacggugacccacuccgugaaccugcuggaggacaaccacaacgggaagcucugcaagcugcgcggcgucgcgccccugcaccucgggaagugcaacaucgccggcuggauccuggggaacccggagugcgagagccuguccaccgccagcuccuggagcuacaucguggagaccuccagcuccgacaacggcacgugcuaccccggcgacuucaucgacuacgaggagcuccgggagcagcugagcuccgugagcuccuucgagcgcuucgagaucuuccccaagaccagcuccuggcccaaccacgacagcaacaagggggucaccgccgccugcccgcacgccggcgcgaaguccuucuacaagaaccugaucuggcucgugaagaaggggaacagcuaccccaagcuguccaagagcuacaucaacgacaagggcaaggaggugcugguccucugggggauccaccaccccagcaccuccgccgaccagcagagccuguaccagaacgccgacgccuacguguucgugggcacgucccgguacagcaagaaguucaagcccgagaucgccauccgcccgaagguccgggaccaggagggccgcaugaacuacuacuggacccugguggagcccggggacaagaucaccuucgaggcgaccggcaaccucguggucccccgguacgccuucgccauggagcgcaacgccggguccggcaucaucaucagcgacacgcccgugcacgacugcaacacgaccugccagaccccgaagggcgccaucaacaccucccugcccuuccagaacauccaccccaucaccaucgggaagugccccaaguacgucaagagcaccaagcugcggcucgcgaccggccugcgcaacgugccguccauccagagccgggggcuguucggcgccaucgccggguucaucgagggcggcuggacggggaugguggacggcugguacggguaccaccaccagaacgagcagggcuccggguacgccgccgaccucaagagcacccagaacgcgaucgacgagaucaccaacaaggugaacuccgucaucgagaagaugaacacccaguucacggccgugggcaaggaguucaaccaccuggagaagcgcaucgagaaccugaacaagaaggucgacgacggcuuccucgacaucuggaccuacaacgccgagcugcuggugcuccuggagaacgagcggacccuggacuaccacgacagcaacgugaagaaccucuacgagaagguccgcucccagcugaagaacaacgccaaggagaucgggaacggcugcuucgaguucuaccacaagugcgacaacacgugcauggagagcgugaagaacgggaccuacgacuaccccaaguacuccgaggaggccaagcugaaccgggaggagaucgacggcgugaagcucgagagcacccgcaucuaccagauccuggcgaucuacuccaccgucgccagcagccuggugcucguggucucccugggggccaucagcuucuggaugugcuccaacggcagccugcagugccggaucugcaucuga

SEQ ID NO: 73400 - RNA, 1701 nt, Artificial Sequence; identical to SEQ ID NO: 72782
  derived and/or modified CDS sequence (opt1) from hemagglutinin__InfluenzaA__AFN18964

SEQ ID NO: 73401 - RNA, 1701 nt, Artificial Sequence
  derived and/or modified CDS sequence (opt1) from hemagglutinin__InfluenzaA__AFN18974
augaaggccauccuggugguccuccuguacaccuucgccaccgcgaacgccgacacgcugugcaucggcuaccacgccaacaacagcaccgacaccguggacaccgugcucgagaagaacgucacggugacccacuccgugaaccugcuggaggacaagcacaacgggaagcucugcaagcugcgcggcgucgcgccccugcaccucgggaagugcaacaucgccggcuggauccuggggaacccggagugcgagagccuguccaccgcgagcuccuggagcuacaucguggagaccuccagcuccgacaacggcacgugcuaccccggcgacuucaucgacuacgaggagcuccgggagcagcugagcuccaugagcuccuucgagcgcuucgagaucuuccccaagaccagcuccuggcccaaccacgacccgaacaagggggugaccgccgccugcccccacgccggcgccaagagcuucuacaagaaccugaucuggcucgucaagaaggggaacuccuaccccaagcugagcaaguccuacaucaacgacaagggcaagaaggugcuggugcucugggggauccaccaccccagcaccagcgccgaccagcagucccuguaccagaacgccgacgccuacgucuucgugggcacgagccgguacuccaagaaguucaagccggagaucgccauccgccccaaggugcgggaccaggagggccgcaugaacuacuacuggacccuggucgagcccggggacaagaucaccuucgaggcgaccggcaaccucguggugccccgguacgccuucgccauggagcgcaacgccgggagcggcaucaucaucuccgacacgccgguccacgacugcaacacgaccugccagacccccaagggcgccaucaacaccagccugcccuuccagaacauccaccccaucaccaucgggaagugcccgaaguacgugaaguccaccaagcugcggcucgcgaccggccugcgcaacgugcccagcauccagucccgggggcuguucggcgccaucgccggguucaucgagggcggcuggacggggauggucgacggcugguacggguaccaccaccagaacgagcagggcagcggguacgccgccgaccucaaguccacccagaacgcgaucgacgagaucaccaacaaggugaacagcgugaucgagaagaugaacacccaguucacggccgucggcaaggaguucaaccaccuggagaagcgcaucgagaaccugaacaagaagguggacgacggcuuccucgacaucuggaccuacaacgccgagcugcugguccuccuggagaacgagcggacccuggacuaccacgacuccaacgugaagaaccucuacgagaaggugcgcagccagcugaagaacaacgccaaggagaucgggaacggcugcuucgaguucuaccacaagugcgacaacacgugcauggaguccgucaagaacgggaccuacgacuaccccaaguacagcgacgaggccaagcugaaccgggaggagaucgacggcgugaagcucgaguccacccgcaucuaccagauccuggcgaucuacagcaccguggccuccagccugguccucguggugagccugggggccaucuccuucuggaugugcagcaacggcucccugcagugccggaucugcaucuga

SEQ ID NO: 73402 - RNA, 1701 nt, Artificial Sequence; identical to SEQ ID NO: 68245
  derived and/or modified CDS sequence (opt1) from hemagglutinin__InfluenzaA__AFN18979

SEQ ID NO: 73403 - RNA, 1701 nt, Artificial Sequence
  derived and/or modified CDS sequence (opt1) from hemagglutinin__InfluenzaA__AFN18982
augaaggccauccuggugguccuccuguacaccuucgccaucgcgaacgccgacacccugugcaucggcuaccacgccaacaacagcacggacaccguggacaccgugcucgagaagaacgucaccgugacgcacuccgugaaccugcuggaggacaagcacaacgggaagcucugcaagcugcgcggcgucgcgccccugcaccucgggaagugcaacaucgccggcuggauccuggggaacccggagugcgagagccuguccaccgcgagcuccuggagcuacaucguggagaccuccagcuccgacaacgggaccugcuaccccggcgacuucaucgacuacgaggagcuccgggagcagcugagcuccgugagcuccuucgagcgcuucgagaucuuccccaagacgaacagcuggcccaaccacgacuccaacaagggcgucaccgccgccugcccgcacgccggcgccaagagcuucuacaagaaccugaucuggcucgugaagaaggggaacuccuaccccaagcugagcaaguccuacaucaacgacaagggcaaggaggugcugguccucugggggauccaccaccccagcaccagcgccgaccagcagucccuguaccagaacgccgacgccuacguguucgugggcaccagccgguacuccaagaaguucaagcccgagaucgccauccgcccgaagguccgggaccaggagggccgcaugaacuacuacuggacgcugguggagcccggggacaagaucaccuucgaggcgaccggcaaccucguggucccccgguacgccuucgccauggagcgcaacgccgggagcggcaucaucaucuccgacacccccgugcacgacugcaacacgaccugccagaccccgaagggcgccaucaacaccagccugcccuuccagaacauccaccccaucacgaucgggaagugccccaaguacgugaaguccaccaagcugcggcucgcgaccggccugcgcaacgucccgagcauccagucccgggggcuguucggcgccaucgccggguucaucgagggcggcuggaccgggaugguggacggcugguacggguaccaccaccagaacgagcagggcagcggguacgccgccgaccucaaguccacgcagcacgcgaucgacgagaucaccaacaaggugaacagcgucaucgagaagaugaacacccaguucaccgccgugggcaaggaguucaaccaccuggagaagcgcaucgagaaccugaacaagaaggucgacgacggcuuccucgacaucuggacguacaacgccgagcugcuggugcuccuggagaacgagcggacccuggacuaccacgacuccaacgugaagaaccucuacgagaagguccgcagccagcugaagaacaacgccaaggagaucgggaacggcugcuucgaguucuaccacaagugcgacaacacgugcauggaguccgugaagaacgggaccuacgacuaccccaaguacagcgaggaggccaagcugaaccgggaggagaucaacggcgugaagcucgaguccacccgcaucuaccagauccuggcgaucuacagcaccgucgccuccagccuggugcucguggucagccugggggccaucuccuucuggaugugcagcaacggcucccugcagugccggaucugcaucuga

SEQ ID NO: 73404 - RNA, 1701 nt, Artificial Sequence; identical to SEQ ID NO: 73296
  derived and/or modified CDS sequence (opt1) from hemagglutinin__InfluenzaA__AFN18984

SEQ ID NO: 73405 - RNA, 1701 nt, Artificial Sequence; identical to SEQ ID NO: 66693
  derived and/or modified CDS sequence (opt1) from hemagglutinin__InfluenzaA__AFN18986

SEQ ID NO: 73406 - RNA, 1701 nt, Artificial Sequence; identical to SEQ ID NO: 66693
  derived and/or modified CDS sequence (opt1) from hemagglutinin__InfluenzaA__AFN18988

SEQ ID NO: 73407 - RNA, 1701 nt, Artificial Sequence; identical to SEQ ID NO: 67857
  derived and/or modified CDS sequence (opt1) from hemagglutinin__InfluenzaA__AFN18993

SEQ ID NO: 73408 - RNA, 1701 nt, Artificial Sequence; identical to SEQ ID NO: 67857
  derived and/or modified CDS sequence (opt1) from hemagglutinin__InfluenzaA__AFN18999

SEQ ID NO: 73409 - RNA, 1701 nt, Artificial Sequence; identical to SEQ ID NO: 67491
  derived and/or modified CDS sequence (opt1) from hemagglutinin__InfluenzaA__AFN19006

SEQ ID NO: 73410 - RNA, 1701 nt, Artificial Sequence; identical to SEQ ID NO: 66693
  derived and/or modified CDS sequence (opt1) from hemagglutinin__InfluenzaA__AFN19026

SEQ ID NO: 73411 - RNA, 1701 nt, Artificial Sequence; identical to SEQ ID NO: 67833
  derived and/or modified CDS sequence (opt1) from hemagglutinin__InfluenzaA__AFN19036

SEQ ID NO: 73412 - RNA, 1701 nt, Artificial Sequence; identical to SEQ ID NO: 66693
  derived and/or modified CDS sequence (opt1) from hemagglutinin__InfluenzaA__AFN19043

SEQ ID NO: 73413 - RNA, 1701 nt, Artificial Sequence; identical to SEQ ID NO: 66693
  derived and/or modified CDS sequence (opt1) from hemagglutinin__InfluenzaA__AFN19053

SEQ ID NO: 73414 - RNA, 1701 nt, Artificial Sequence; identical to SEQ ID NO: 66693
  derived and/or modified CDS sequence (opt1) from hemagglutinin__InfluenzaA__AFN19063

SEQ ID NO: 73415 - RNA, 1701 nt, Artificial Sequence; identical to SEQ ID NO: 66693
  derived and/or modified CDS sequence (opt1) from hemagglutinin__InfluenzaA__AFN19070

SEQ ID NO: 73416 - RNA, 1701 nt, Artificial Sequence
  derived and/or modified CDS sequence (opt1) from hemagglutinin__InfluenzaA__AFN19076
augaaggccauccuggugguccuccuguacaccuucgccaccgcgaacgccgacacgcugugcaucggcuaccacgccaacaacagcaccgacaccguggacaccgugcucgagaaggacgucacggugacccacuccgugaaccugcuggaggacaagcacaacgggaagcucugcaagcugcgcggcgucgcgccccugcaccucgggaagugcaacaucgccggcuggauccuggggaacccggagugcgagagccuguccaccgccagcuccuggagcuacaucguggagaccuccagcuccgacaacggcacgugcuaccccggcgacuucaucgacuacgaggagcuccgggagcagcugagcuccgugagcuccuucgagcgcuucgagaucuuccccaagaccagcuccuggcccaaccacgacagcaacaagggggucaccgccgccugcccgcacgccggcgcgaaguccuucuacaagaaccugaucuggcucgugaagaaggggaacagcuaccccaagcuguccaagagcuacaucaacgacaagggcaaggaggugcugguccucugggggauccaccaccccagcaccuccgccgaccagcagagccuguaccagaacgccgacgccuacguguucgugggcacgucccgguacagcaagaaguucaagcccgagaucgccauccgcccgaagguccgggaccaggagggccgcaugaacuacuacuggacccugguggagcccggggacaagaucaccuucgaggcgaccggcaaccucguggucccccgguacgccuucgccauggagcgcaacgccggguccggcaucaucaucagcgacacgcccgugcacgacugcaacacgaccugccagaccccgaagggcgccaucaacaccucccugcccuuccagaacauccaccccaucaccaucgggaagugccccaaguacgucaagagcaccaagcugcggcucgcgaccggccugcgcaacgugccguccauccagagccgggggcuguucggcgccaucgccggguucaucgagggcggcuggacggggaugguggacggcugguacggguaccaccaccagaacgagcagggcuccggguacgccgccgaccucaagagcacccagaacgcgaucgacgagaucaccaacaaggugaacuccgucaucgagaagaugaacacccaguucacggccgugggcaaggaguucaaccaccuggagaagcgcaucgagaaccugaacaagaaggucgacgacggcuuccucgacaucuggaccuacaacgccgagcugcuggugcuccuggagaacgagcggacccuggacuaccacgacagcaacgugaagaaccucuacgagaagguccgcucccagcugaagaacaacgccaaggagaucgggaacggcugcuucgaguucuaccacaagugcgacaacacgugcauggagagcgugaagaacgggaccuacgacuaccccaaguacuccgaggaggccaagcugaaccgggaggagaucgacggcgugaagcucgagagcacccgcaucuaccagauccuggcgaucuacuccaccgucgccagcagccuggugcucguggucucccugggggccaucagcuucuggaugugcuccaacggcagccugcagugccggaucugcaucuga

SEQ ID NO: 73417 - RNA, 1701 nt, Artificial Sequence; identical to SEQ ID NO: 66693
  derived and/or modified CDS sequence (opt1) from hemagglutinin__InfluenzaA__AFN19082

SEQ ID NO: 73418 - RNA, 1701 nt, Artificial Sequence; identical to SEQ ID NO: 66693
  derived and/or modified CDS sequence (opt1) from hemagglutinin__InfluenzaA__AFN19088

SEQ ID NO: 73419 - RNA, 1701 nt, Artificial Sequence; identical to SEQ ID NO: 66693
  derived and/or modified CDS sequence (opt1) from hemagglutinin__InfluenzaA__AFN19097

SEQ ID NO: 73420 - RNA, 1701 nt, Artificial Sequence; identical to SEQ ID NO: 66693
  derived and/or modified CDS sequence (opt1) from hemagglutinin__InfluenzaA__AFN19104

SEQ ID NO: 73421 - RNA, 1701 nt, Artificial Sequence; identical to SEQ ID NO: 66693
  derived and/or modified CDS sequence (opt1) from hemagglutinin__InfluenzaA__AFN19113

SEQ ID NO: 73422 - RNA, 1701 nt, Artificial Sequence; identical to SEQ ID NO: 66693
  derived and/or modified CDS sequence (opt1) from hemagglutinin__InfluenzaA__AFN19119

SEQ ID NO: 73423 - RNA, 1701 nt, Artificial Sequence; identical to SEQ ID NO: 69204
  derived and/or modified CDS sequence (opt1) from hemagglutinin__InfluenzaA__AFN19125

SEQ ID NO: 73424 - RNA, 1701 nt, Artificial Sequence; identical to SEQ ID NO: 66693
  derived and/or modified CDS sequence (opt1) from hemagglutinin__InfluenzaA__AFN19134

SEQ ID NO: 73425 - RNA, 1701 nt, Artificial Sequence; identical to SEQ ID NO: 66693
  derived and/or modified CDS sequence (opt1) from hemagglutinin__InfluenzaA__AFN19144

SEQ ID NO: 73426 - RNA, 1701 nt, Artificial Sequence; identical to SEQ ID NO: 69248
  derived and/or modified CDS sequence (opt1) from hemagglutinin__InfluenzaA__AFN19154

SEQ ID NO: 73427 - RNA, 1701 nt, Artificial Sequence; identical to SEQ ID NO: 66693
  derived and/or modified CDS sequence (opt1) from hemagglutinin__InfluenzaA__AFN19164

SEQ ID NO: 73428 - RNA, 1701 nt, Artificial Sequence; identical to SEQ ID NO: 66693
  derived and/or modified CDS sequence (opt1) from hemagglutinin__InfluenzaA__AFN19174

SEQ ID NO: 73429 - RNA, 1701 nt, Artificial Sequence; identical to SEQ ID NO: 66693
  derived and/or modified CDS sequence (opt1) from hemagglutinin__InfluenzaA__AFN19184

SEQ ID NO: 73430 - RNA, 1701 nt, Artificial Sequence; identical to SEQ ID NO: 66693
  derived and/or modified CDS sequence (opt1) from hemagglutinin__InfluenzaA__AFN19194

SEQ ID NO: 73431 - RNA, 1701 nt, Artificial Sequence; identical to SEQ ID NO: 66693
  derived and/or modified CDS sequence (opt1) from hemagglutinin__InfluenzaA__AFN19203

SEQ ID NO: 73432 - RNA, 1701 nt, Artificial Sequence; identical to SEQ ID NO: 66693
  derived and/or modified CDS sequence (opt1) from hemagglutinin__InfluenzaA__AFN19213

SEQ ID NO: 73433 - RNA, 1701 nt, Artificial Sequence; identical to SEQ ID NO: 66693
  derived and/or modified CDS sequence (opt1) from hemagglutinin__InfluenzaA__AFN19223

SEQ ID NO: 73434 - RNA, 1701 nt, Artificial Sequence; identical to SEQ ID NO: 66693
  derived and/or modified CDS sequence (opt1) from hemagglutinin__InfluenzaA__AFN19233

SEQ ID NO: 73435 - RNA, 1701 nt, Artificial Sequence
  derived and/or modified CDS sequence (opt1) from hemagglutinin__InfluenzaA__AFN19243
augaaggccauccuggugguccuccuguacaccuucgccaccgcgaacgccgacacgcugugcaucggcuaccacgccaacaacagcaccgacaccguggacaccgugcucgagaagaacgucacggugacccacuccgugaaccugcuggaggacaagcacaacgggaagcucugcaagcugcgcggcgucgcgccccugcaccucgggaagugcaacaucgccggcuggauccuggggaacccggagugcgagagccuguccaccgccagcuccuggagcuacaucguggagaccuccagcuccgacaacggcacgugcuaccccggcgacuucaucgacuacgaggagcuccgggagcagcugagcuccgugagcuccuucgagcgcuucgagaucuuccccaagaccagcuccuggcccaaccacgacagcaacaagggggucaccgccgccugcccgcacgccggcgcgaaguccuucuacaagaaccugaucuggcucgugaagaaggggaacagcuaccccaagcuguccaagagcuacaucaacgacaagggcaaggaggugcugguccucugggggauccaccaccccagcaccuccgccgaccagcagagccuguaccagaacgccgacgccuacguguucgugggcacguccaaguacagcaagaaguucaagcccgagaucgccauccggccgaagguccgcgaccaggagggccggaugaacuacuacuggacccugguggagcccggggacaagaucaccuucgaggcgaccggcaaccucguggucccccgcuacgccuucgccauggagcggaacgccggguccggcaucaucaucagcgacacgcccgugcaggacugcaacacgaccugccagaccccgaagggcgccaucaacaccucccugcccuuccagaacauccaccccaucaccaucgggaagugccccaaguacgucaagagcaccaagcugcgccucgcgaccggccugcggaacgugccguccauccagagccgcgggcuguucggcgccaucgccggguucaucgagggcggcuggacggggaugguggacggcugguacggguaccaccaccagaacgagcagggcuccggguacgccgccgaccucaagagcacccagaacgcgaucgacgagaucaccaacaaggugaacuccgucaucgagaagaugaacacccaguucacggccgugggcaaggaguucaaccaccuggagaagcggaucgagaaccugaacaagaaggucgacgacggcuuccucgacaucuggaccuacaacgccgagcugcuggugcuccuggagaacgagcgcacccuggacuaccacgacagcaacgugaagaaccucuacgagaagguccggucccagcugaagaacaacgccaaggagaucgggaacggcugcuucgaguucuaccacaagugcgacaacacgugcauggagagcgugaagaacgggaccuacgacuaccccaaguacuccgaggaggccaagcugaaccgcgaggagaucgacggcgugaagcucgagagcacccggaucuaccagauccuggcgaucuacuccaccgucgccagcagccuggugcucguggucucccugggggccaucagcuucuggaugugcuccaacggcagccugcagugccgcaucugcaucuga

SEQ ID NO: 73436 - RNA, 1701 nt, Artificial Sequence; identical to SEQ ID NO: 68809
  derived and/or modified CDS sequence (opt1) from hemagglutinin__InfluenzaA__AFN19250

SEQ ID NO: 73437 - RNA, 1701 nt, Artificial Sequence; identical to SEQ ID NO: 66693
  derived and/or modified CDS sequence (opt1) from hemagglutinin__InfluenzaA__AFN19259

SEQ ID NO: 73438 - RNA, 1701 nt, Artificial Sequence; identical to SEQ ID NO: 66693
  derived and/or modified CDS sequence (opt1) from hemagglutinin__InfluenzaA__AFN19269

SEQ ID NO: 73439 - RNA, 1701 nt, Artificial Sequence; identical to SEQ ID NO: 66693
  derived and/or modified CDS sequence (opt1) from hemagglutinin__InfluenzaA__AFN19279

SEQ ID NO: 73440 - RNA, 1701 nt, Artificial Sequence; identical to SEQ ID NO: 67554
  derived and/or modified CDS sequence (opt1) from hemagglutinin__InfluenzaA__AFN19286

SEQ ID NO: 73441 - RNA, 1701 nt, Artificial Sequence; identical to SEQ ID NO: 66693
  derived and/or modified CDS sequence (opt1) from hemagglutinin__InfluenzaA__AFN19295

SEQ ID NO: 73442 - RNA, 1701 nt, Artificial Sequence; identical to SEQ ID NO: 66693
  derived and/or modified CDS sequence (opt1) from hemagglutinin__InfluenzaA__AFN19305

SEQ ID NO: 73443 - RNA, 1701 nt, Artificial Sequence; identical to SEQ ID NO: 67559
  derived and/or modified CDS sequence (opt1) from hemagglutinin__InfluenzaA__AFN19315

SEQ ID NO: 73444 - RNA, 1701 nt, Artificial Sequence; identical to SEQ ID NO: 66693
  derived and/or modified CDS sequence (opt1) from hemagglutinin__InfluenzaA__AFN19325

SEQ ID NO: 73445 - RNA, 1701 nt, Artificial Sequence; identical to SEQ ID NO: 66693
  derived and/or modified CDS sequence (opt1) from hemagglutinin__InfluenzaA__AFN19335

SEQ ID NO: 73446 - RNA, 1701 nt, Artificial Sequence; identical to SEQ ID NO: 66693
  derived and/or modified CDS sequence (opt1) from hemagglutinin__InfluenzaA__AFN19344

SEQ ID NO: 73447 - RNA, 1701 nt, Artificial Sequence
  derived and/or modified CDS sequence (opt1) from hemagglutinin__InfluenzaA__AFN19351
augaagaccaucaucgcccugagcuacauccucugccugguguucgcccagaagcugcccggcaacgacaacuccauggcgacccucugccuggggcaccacgccgucccgaacggcacgaucgugaagaccaucaccaacgaccagaucgaggugaccaacgccacggagcugguccagaacagcuccaucggggagaucugcgacagcccccaccagauccucgacggcgagaacugcacccugaucgacgcccugcucggggacccccagugcgacggcuuccagaacaagaagugggaccuguucguggagcgcuccaaggccuacagcaacugcuaccccuacgacgugccggacuacgcgucccugcggagccucgucgccuccagcggcacccuggaguucaacaacgaguccuucaacuggaccggggugacgcagaacggcaccagcuccgccugcauccgccggagcaacaacuccuucuucagccgccugaacuggcucacccaccugaacuucaaguaccccgcccugaacgugaccaugcccaacaacgagcaguucgacaagcucuacaucuggggcguccaccaccccgggacggacaaggaccagaucuuccuguacgcgcaguccagcgggcggaucaccguguccaccaagcgcagccagcaggccgugaucccgaacaucggcagccggccccgcauccggaacauccccucccgcaucagcaucuacuggaccaucgucaagcccggcgacauccugcucaucaacuccacggggaaccugaucgccccgcggggcuacuucaagauccgcagcgggaaguccagcaucaugcgguccgacgcccccaucggcaagugcaacagcgagugcaucacccccaacggcuccauccccaacgacaagccguuccagaacgugaaccgcaucaccuacggggccugcccccgguacgugaagcagagcacccugaagcucgcgacgggcaugcgcaacguccccgagaagcagacccgggggaucuucggcgccaucgccggguucaucgagaacggcugggagggcaugguggacgggugguacggcuuccgccaccagaacuccgaggggcggggccaggccgccgaccucaagagcacccaggcggccaucgaccagaucaacgggaagcugaaccgccugaucggcaagaccaacgagaaguuccaccagaucgagaaggaguucuccgagguggagggccggauccaggaccuggagaaguacgucgaggacacgaagaucgaccuguggagcuacaacgccgagcuccugguggcccuggagaaccagcacaccaucgaccucaccgacuccgagaugaacaagcuguucgagaagaccaagaagcagcugcgcgagaacgccgaggacauggggaacggcugcuucaagaucuaccacaagugcgacaacgcgugcaucgggagcauccgcaacggcacguacgaccacgacguguaccgggacgaggcccucaacaaccgcuuccagaucaagggggucgagcugaaguccggcuacaaggacuggauccuguggaucagcuucgccaucuccugcuuccuccugugcguggcccugcucggcuucaucaugugggccugccagaaggggaacgugcggugcaacaucugcaucuga

SEQ ID NO: 73448 - RNA, 1701 nt, Artificial Sequence; identical to SEQ ID NO: 73098
  derived and/or modified CDS sequence (opt1) from hemagglutinin__InfluenzaA__AFN19355

SEQ ID NO: 73449 - RNA, 1701 nt, Artificial Sequence; identical to SEQ ID NO: 73098
  derived and/or modified CDS sequence (opt1) from hemagglutinin__InfluenzaA__AFN19357

SEQ ID NO: 73450 - RNA, 1701 nt, Artificial Sequence; identical to SEQ ID NO: 73098
  derived and/or modified CDS sequence (opt1) from hemagglutinin__InfluenzaA__AFN19361

SEQ ID NO: 73451 - RNA, 1701 nt, Artificial Sequence
  derived and/or modified CDS sequence (opt1) from hemagglutinin__InfluenzaA__AFN19363
augaagaccaucaucgcccugagcuacauccucugccugguguucgcccagaagcugcccggcaacgacaacuccaccgcgacgcucugccuggggcaccacgccgucccgaacggcaccaucgugaagaccaucaccaacgaccagaucgaggugacgaacgccaccgagcugguccagaucagcuccaccggggagaucugcgacagcccccaccagauccucgacggcgagaacugcacccugaucgacgcccugcucggggacccccagugcgacggcuuccagaacaagaagugggaccuguucguggagcgcuccaaggccuacagcaacugcuaccccuacgacgugccggacuacgcgucccugcggagccucgucgccuccagcggcacgcuggaguucaacaacgaguccuucaacuggaccggggugacccagaacggcaccagcuccgccugcauccgccggagcaacuccagcuucuucucccgccugaacuggcucacgcaccugaacuucaaguaccccgcccugaacgugaccaugcccaacaacgagcaguucgacaagcucuacaucuggggcguccaccaccccgggaccgacaaggaccagaucuuccuguacgcgcagagcuccgggcggaucaccgugagcacgaagcgcagccagcaggccgugaucccgaacaucggcucccggccccgcauccggaacauccccagccgcaucuccaucuacuggaccaucgucaagcccggcgacauccugcucaucaacagcaccgggaaccugaucgccccgcggggcuacuucaagauccgcuccggcaagagcuccaucaugcggagcgacgcccccaucgggaagugcaacuccgagugcaucacccccaacggcagcauccccaacgacaagccguuccagaacgugaaccgcaucacguacggggccugcccccgguacgugaagcaguccacccugaagcucgcgaccggcaugcgcaacguccccgagaagcagacccgggggaucuucggcgccaucgccggguucaucgagaacggcugggagggcaugguggacgggugguacggcuuccgccaccagaacagcgaggggcggggccaggccgccgaccugaaguccacgcaggcggccaucgaccagaucaacgggaagcugaaccgccucaucggcaagaccaacgagaaguuccaccagaucgagaaggaguucagcgagguggagggccggauccaggaccuggagaaguacgucgaggacaccaagaucgaccugugguccuacaacgccgagcuccugguggcccuggagaaccagcacaccaucgaccucacggacagcgagaugaacaagcuguucgagaagaccaagaagcagcugcgcgagaacgccgaggacauggggaacggcugcuucaagaucuaccacaagugcgacaacgcgugcaucggguccauccgcaacggcaccuacaaccacgacguguaccgggacgaggcccucaacaaccgcuuccagaucaagggggucgagcucaagagcggcuacaaggacuggauccuguggaucuccuucgccaucagcugcuuccugcugugcguggcccugcucggcuucaucaugugggccugccagaaggggaacauccggugcaacaucugcaucuga

SEQ ID NO: 73452 - RNA, 1701 nt, Artificial Sequence; identical to SEQ ID NO: 71006
  derived and/or modified CDS sequence (opt1) from hemagglutinin__InfluenzaA__AFN19365

SEQ ID NO: 73453 - RNA, 1701 nt, Artificial Sequence
  derived and/or modified CDS sequence (opt1) from hemagglutinin__InfluenzaA__AFN19367
augaagaccaucaucgcccugagcuacauccucugccugguguucgcccagaagcugcccgagaacgacaacuccaccgcgacgcucugccugggccaccacgccgucccgaacgggaccaucgugaagaccaucaccaacgaccagaucgaggugacgaacgccaccgagcugguccagagcuccagcaccggcgagaucugcgacagcccccaccagauccucgacggggugaacugcacccugaucgacgcccugcucggcgacccccagugcgacggguuccagaacaagaagugggaccuguucguggagcgcagcaaggccuacuccaacugcuaccccuacgacgucccggacuacgcgagccugcggucccucguggccagcuccggcacgcuggaguucaacaacgagagcuucaacuggaccggcgugacccagaacgggaccuccagcgccugcauccgccgguccaacagcuccuucuucagccgccugaacuggcucacgcaccugaacuucaaguaccccgcccugaacgucaccaugcccaacaacgagcaguucgacaagcucuacaucuggggcgugcaccaccccgggaccgacaaggaccagaucuuccuguacgcgcaguccagcggccggaucaccgugagcacgaagcgcucccagcaggccgucaucccgaacaucgggagccggccccgcauccggaacauccccucccgcaucagcaucuacuggaccaucgugaagcccggcgacauccugcucaucaacuccaccggcaaccugaucgccccgcggggguacuucaagauccagagcggcaaguccagcaucaugcgcuccgacgcccccaucgggaagugcaacagcgagugcaucacccccaacggcuccauccccaacgacaagccguuccagaacgugaaccggaucacguacggcgccugcccccgcuacgucaagcagagcacccugaagcucgcgaccgggaugcggaacgugcccgagaagcagacccgcggcaucuucggggccaucgccggcuucaucgagaacgggugggagggcaugguggacggcugguacggguuccggcaccagaacuccgagggccgcgggcaggccgccgaccugaaguccacgcaggcggccaucgaccagaucaacggcaagcugaaccggcucaucgggaagaccaacgagaaguuccaccagaucgagaaggaguucuccgaggucgagggccgcauccaggaccuggagaaguacguggaggacaccaagaucgaccuguggagcuacaacgccgagcuccugguggcccuggagaaccagcacaccaucgaccucacggacuccgagaugaacaagcuguucgagaagaccaagaagcagcugcgggagaacgccgaggacaugggcaacgggugcuucaagaucuaccacaagugcgacaacgcgugcaucggcagcauccgcaacgggaccuacaaccacgacgucuaccgcgacgaggcccucaacaaccgguuccagaucaagggcguggagcugaaguccggguacaaggacuggauccuguggaucagcuucgccaucagcugcuuccuccugugcguggcccugcucggcuucaucaugugggccugccagaagggcaacauccgcugcaacaucugcaucuga

SEQ ID NO: 73454 - RNA, 1701 nt, Artificial Sequence
  derived and/or modified CDS sequence (opt1) from hemagglutinin__InfluenzaA__AFN19369
augaagaccaucaucgcccugagcuacauccucugccugguguucgcccagaagcugcccgagaacgacaacuccaccgcgacgcucugccugggccaccacgccgucccgaacgggaccaucgugaagaccaucaccaacgaccagaucgaggugacgaacgccaccgagcugguccagagcuccagcaccggcgagaucugcgacagcccccaccagauccucgacggggugaacugcacccugaucgacgcccugcucggcgacccccagugcgacggguuccagaacaagaagugggaccuguucguggagcgcagcaaggccuacuccaacugcuaccccuacgacgucccggacuacgcgagccugcggucccucguggccagcuccggcacgcuggaguucaacaacgagagcuucaacuggaccggcgugacccagaacgggaccuccagcgccugcauccgccgguccaacagcuccuucuucagccgccugaacuggcucacgcaccugaacuucaaguaccccgcccugaacgucaccaugcccaacaacgagcaguucgacaagcucuacaucuggggcgugcaccaccccgggaccgacaaggaccagaucuuccuguacgcgcaguccagcggccggaucaccgugagcacgaagcgcucccagcaggccgucaucccgaacaucgggagccggccccgcauccggaacauccccucccgcaucagcaucuacuggaccaucgugaagcccggcgacauccugcucaucaacuccaccggcaaccugaucgccccgcggggguacuucaagauccgcagcggcaaguccagcaucaugcgguccgacgcccccaucgggaagugcaacagcgagugcaucacccccaacggcuccauccccaacgacaagccguuccagaacgugaaccgcaucacguacggcgccugcccccgguacgucaagcagagcacccugaagcucgcgaccgggaugcgcaacgugcccgagaagcagacccggggcaucuucggggccaucgccggcuucaucgagaacgggugggagggcaugguggacggcugguacggguuccgccaccagaacuccgagggccgggggcaggccgccgaccugaaguccacgcaggcggccaucgaccagaucaacggcaagcugaaccgccucaucgggaagaccaacgagaaguuccaccagaucgagaaggaguucuccgaggucgagggccggauccaggaccuggagaaguacguggaggacaccaagaucgaccuguggagcuacaacgccgagcuccugguggcccuggagaaccagcacaccaucgaccucacggacuccgagaugaacaagcuguucgagaagaccaagaagcagcugcgcgagaacgccgaggacaugggcaacgggugcuucaagaucuaccacaagugcgacaacgcgugcaucggcagcauccgcaacgggaccuacaaccacgacgucuaccgggacgaggcccucaacaaccgcuuccagaucaagggcguggagcugaaguccggguacaaggacuggauccuguggaucagcuucgccaucagcugcuuccuccugugcguggcccugcucggcuucaucaugugggccugccagaagggcaacauccggugcaacaucugcaucuga

SEQ ID NO: 73455 - RNA, 1701 nt, Artificial Sequence
  derived and/or modified CDS sequence (opt1) from hemagglutinin__InfluenzaA__AFN19373
augaagaccaucaucgcccugagcuacauccucugccugguguucgcccagaagcugcccggcaacgacaacuccaccgcgacgcucugccuggggcaccacgccgucccgaacggcaccaucgugaagaccaucaccaacgaccagaucgaggugacgaacgccaccgagcugguccagaacagcuccaucggggagaucugcgacagcccccaccagauccucgacggcgagaacugcacccugaucgacgcccugcucggggacccccagugcgacggcuuccagaacaagaagugggaccuguucguggagcgcuccaaggccuacagcaacugcuaccccuacgacgugccggacuacgcgucccugcggagccucgucgccuccagcggcacccuggaguucaacaacgaguccuucaacuggacgggggugacccagaacggcaccagcuccgccugcauccgccggagcaacaacuccuucuucagccgccugaacuggcucacccaccugaacuucaaguaccccgcccugaacgugacgaugcccaacaacgagcaguucgacaagcucuacaucuggggcguccaccaccccgggaccgacaaggaccagaucuuccuguacgcgcaguccagcgggcggaucaccguguccaccaagcgcagccagcaggccgugaucccgaacaucggcagccggccccgcauccggaacauccccucccgcaucagcaucuacuggacgaucgucaagcccggcgacauccugcucaucaacuccaccgggaaccugaucgccccgcggggcuacuucaagauccgcagcgggaaguccagcaucaugcgguccgacgcccccaucggcaagugcaacagcgagugcaucacccccaacggcuccauccccaacgacaagccguuccagaacgugaaccgcaucaccuacggggccugcccccgguacgugaagcagagcacgcugaagcucgcgaccggcaugcgcaacguccccgagaagcagacccgggggaucuucggcgccaucgccggguucaucgagaacggcugggagggcaugguggacgggugguacggcuuccgccaccagaacuccgaggggcggggccaggccgccgaccucaagagcacccaggcggccaucgaccagaucaacgggaagcugaaccgccugaucggcaagacgaacgagaaguuccaccagaucgagaaggaguucuccgagguggagggccggauccaggaccuggagaaguacgucgaggacaccaagaucgaccuguggagcuacaacgccgagcuccugguggcccuggagaaccagcacaccaucgaccucaccgacuccgagaugaacaagcuguucgagaagacgaagaagcagcugcgcgagaacgccgaggacauggggaacggcugcuucaagaucuaccacaagugcgacaacgcgugcaucgggagcauccgcaacggcaccuacgaccacgacguguaccgggacgaggcccucaacaaccgcuuccagaucaagggggucgagcugaaguccggcuacaaggacuggauccuguggaucagcuucgccaucuccugcuuccuccugugcguggcccugcucggcuucaucaugugggccugccagaaggggaacauccggugcaacaucugcaucuga

SEQ ID NO: 73456 - RNA, 1701 nt, Artificial Sequence; identical to SEQ ID NO: 73098
  derived and/or modified CDS sequence (opt1) from hemagglutinin__InfluenzaA__AFN19375

SEQ ID NO: 73457 - RNA, 1701 nt, Artificial Sequence
  derived and/or modified CDS sequence (opt1) from hemagglutinin__InfluenzaA__AFN19377
augaagaccaucaucgcccugagcuacauccucugccugguguucgcccagaagcugcccgagaacgacaacuccaccgcgacgcucugccugggccaccacgccgucccgaacgggaccaucgugaagaccaucaccaacgaccagaucgaggugacgaacgccaccgagcugguccagagcuccagcaccggcgagaucugcgacagcccccaccagauccucgacggggugaacugcacccugaucgacgcccugcucggcgacccccagugcgacggguuccagaacaagaagugggaccuguucguggagcgcagcaaggccuacuccaacugcuaccccuacgacgucccggacuacgcgagccugcggucccucguggccagcuccggcacgcuggaguucaacaacgagagcuucaacuggaccggcgugacccagaacgggaccuccagcgccugcauccgccgguccaacagcuccuucuucagccgccugaacuggcucacgcaccugaacuucaaguaccccgcccugaacgucaccaugcccaacaacgagcaguucgacaagcucuacaucuggggcgugcaccaccccgggaccgacaaggaccagaucuuccuguacgcgcaguccagcggccggaucaccgugagcacgaagcgcucccagcaggccgucaucccgaacaucgggagccggccccgcauccggaacauccccucccgcaucagcaucuacuggaccaucgugaagcccggcgacauccugcucaucaacuccaccggcaaccugaucgccccgcggggguacuucaagauccgcagcggcaaguccagcaucaugcgguccgacgcccccaucgggaagugcaacagcgagugcaucacccccaacggcuccauccccaacgacaagccguuccagaacgugaaccgcaucacguacggcgccugcccccgguacgucaagcagagcacccugaagcucgcgaccgggaugcgcaacgugcccgagaagcagacccggggcaucuucggggccaucgccggcuucaucgagaacgggugggagggcaugguggacggcugguacggguuccgccaccagaacuccgagggccgggggcaggccgccgaccugaaguccacgcaggcggccaucgaccagaucaacggcaagcugaaccgccucaucgggaagaccaacgagaaguuccaccagaucgagaaggaguucuccgaggucgagggccggauccaggaccuggagaaguacguggaggacaccaagaucgaccuguggagcuacaacgccgagcuccugguggcccuggagaaccagcacaccaucgaccucacggacuccgagaugaacaagcuguucgagaagaccaagaagcagcugcgcgagaacgccgaggacaugggcaacgggugcuucaagaucuaccacaagugcgacaacgcgugcaucggcagcauccgcaacgggaccuacaaccacgacgucuaccgggacgaggcccucaacaaccgcuuccagaucaagggcguggagcugaaguccggguacaaggacuggauccuguggaucagcuucgccaucagcugcuuccuccugugcguggcccugcucggcuucaucaugugggccugccagaacggcaacauccggugcaacaucugcaucuga

SEQ ID NO: 73458 - RNA, 1701 nt, Artificial Sequence; identical to SEQ ID NO: 73098
  derived and/or modified CDS sequence (opt1) from hemagglutinin__InfluenzaA__AFN19379

SEQ ID NO: 73459 - RNA, 1701 nt, Artificial Sequence; identical to SEQ ID NO: 73455
  derived and/or modified CDS sequence (opt1) from hemagglutinin__InfluenzaA__AFN19381

SEQ ID NO: 73460 - RNA, 1701 nt, Artificial Sequence; identical to SEQ ID NO: 73454
  derived and/or modified CDS sequence (opt1) from hemagglutinin__InfluenzaA__AFN19383

SEQ ID NO: 73461 - RNA, 1701 nt, Artificial Sequence
  derived and/or modified CDS sequence (opt1) from hemagglutinin__InfluenzaA__AFN19385
augaagaccaucaucgcccugagcuacauccucugccugguguucgcccagaagcugcccgagaacgacaacuccaccgcgacgcucugccugggccaccacgccgucccgaacgggaccaucgugaagaccaucaccaacgaccagaucgaggugacgaacgccaccgagcugguccagagcuccagcaccggcgagaucugcgacagcccccaccagauccucgacggggugaacugcacccugaucgacgcccugcucggcgacccccagugcgacggguuccagaacaagaagugggaccuguucguggagcgcuccaaggccuacuccaacugcuaccccuacgacgucccggacuacgcgagccugcggucccucguggccagcuccggcacgcuggaguucaacaacgagagcuucaacuggaccggcgugacccagaacgggaccuccagcgccugcauccgccgguccaacagcuccuucuucagccgccugaacuggcucacgcaccugaacuucaaguaccccgcccugaacgucaccaugcccaacaacgagcaguucgacaagcucuacaucuggggcgugcaccaccccgggaccgacaaggaccagaucuuccuguacgcgcaguccagcggccggaucaccgugagcacgaagcgcucccagcaggccgucaucccgaacaucgggagccggccccgcauccggaacauccccucccgcaucagcaucuacuggaccaucgugaagcccggcgacauccugcucaucaacuccaccggcaaccugaucgccccgcggggguacuucaagauccagagcggcaaguccagcaucaugcgcuccgacgcccccaucgggaagugcaacagcgagugcaucacccccaacggcuccauccccaacgacaagccguuccagaacgugaaccggaucacguacggcgccugcccccgcuacgucaagcagagcacccugaagcucgcgaccgggaugcggaacgugcccgagaagcagacccgcggcaucuucggggccaucgccggcuucaucgagaacgggugggagggcaugguggacggcugguacggguuccggcaccagaacuccgagggccgcgggcaggccgccgaccucaagagcacgcaggcggccaucgaccagaucaacggcaagcugaaccggcucaucgggaagaccaacgagaaguuccaccagaucgagaaggaguucuccgaggucgagggccgcauccaggaccuggagaaguacguggaggacaccaagaucgacaucuggagcuacaacgccgagcugcucguggcccuggagaaccagcacaccaucgaccugacggacuccgagaugaacaagcuguucgagaagaccaagaagcagcugcgggagaacgccgaggacaugggcaacgggugcuucaagaucuaccacaagugcgacaacgcgugcaucggcagcauccgcaacgggaccuacaaccacgacgucuaccgcgacgaggcccugaacaaccgguuccagaucaagggcguggagcucaaguccggguacaaggacuggauccuguggaucagcuucgccaucagcugcuuccugcucugcguggcccugcugggcuucaucaugugggccugccagaagggcaacauccgcugcaacaucugcaucuga

SEQ ID NO: 73462 - RNA, 1701 nt, Artificial Sequence; identical to SEQ ID NO: 73454
  derived and/or modified CDS sequence (opt1) from hemagglutinin__InfluenzaA__AFN19387

SEQ ID NO: 73463 - RNA, 1701 nt, Artificial Sequence; identical to SEQ ID NO: 73098
  derived and/or modified CDS sequence (opt1) from hemagglutinin__InfluenzaA__AFN19389

SEQ ID NO: 73464 - RNA, 1701 nt, Artificial Sequence; identical to SEQ ID NO: 73098
  derived and/or modified CDS sequence (opt1) from hemagglutinin__InfluenzaA__AFN19391

SEQ ID NO: 73465 - RNA, 1701 nt, Artificial Sequence
  derived and/or modified CDS sequence (opt1) from hemagglutinin__InfluenzaA__AFN19393
augaagaccaucaucgcccugagcuacauccucugccugguguucgcccagaagcugcccggcaacgacaacuccaccgcgacgcucugccuggggcaccacgccgucccgaacggcaccaucgugaagaccaucaccaacgaccagaucgaggugacgaacgccaccgagcugguccagagcuccagcgccggggagaucugcgacagcccccaccacauccucgacggcgagaacugcacccugaucgacgcccugcucggggacccccagugcgacggcuuccagaacaagaagugggaccuguucguggagcgcagccgggcguacuccaacugcuaccccuacgacgugccggacuacgccagccugcgcucccucgucgccagcuccggcacccuggaguucaacaacgagagcuucaacuggacgggggugacccagaacggcaccuccagcgccugcauccggcgcuccaacaacagcuucuucucccggcugaacuggcucacccaccugaacuucaaguaccccgcgcugaacgugacgaugcccaacaacgagcaguucgacaagcucuacaucuggggcguccaccaccccgggaccgacaaggaccagaucuuccuguacgcccaggccagcgggcgcaucaccguguccaccaagcggagccagcaggccgugaucccgaacaucggcagccgcccccggguccgcaacauccccucccggaucagcaucuacuggacgaucgugaagcccggcgacauccugcucaucaacuccaccgggaaccugaucgccccgcgcggcuacuucaagauccggagcgggaaguccagcaucaugcgcuccgacgcgcccaucggcaagugcaacagcgagugcaucacccccaacggcuccauccccaacgacaagccguuccagaacgugaaccggaucaccuacggggccugcccccgcuacgucaagcagagcacgcugaagcucgccaccggcaugcggaacgugcccgagaagcagacccgcgggaucuucggcgccaucgccggguucaucgagaacggcugggagggcaugauggacgggugguacggcuuccggcaccagaacuccgaggggcgcggccaggcggccgaccugaaguccacccaggccgccaucgaccagaucaacgggaagcugaaccggcucaucggcaagacgaacgagaaguuccaccagaucgagaaggaguucuccgagguggagggccgcauccaggaccuggagaaguacgucgaggacaccaagaucgaccuguggagcuacaacgccgagcuccugguggcgcuggagaaccagcacaccaucgaccucaccgacuccgagaugaacaagcuguucgagaagacgaagaagcagcugcgcgagaacgccgaggacauggggaacggcugcuucaagaucuaccacaagugcgacaacgccugcaucgggagcauccggaacggcaccuacgaccacgacguguaccgcgacgaggcccucuccaaccgguuccagaucaagggggucgagcucaagagcggcuacaaggacuggauccuguggaucuccuucgccaucagcugcuuccugcugugcguggcgcugcucggcuucaucaugugggccugccagaaggggaacauccgcugcaacaucugcaucuga

SEQ ID NO: 73466 - RNA, 1701 nt, Artificial Sequence; identical to SEQ ID NO: 73454
  derived and/or modified CDS sequence (opt1) from hemagglutinin__InfluenzaA__AFN19397

SEQ ID NO: 73467 - RNA, 1701 nt, Artificial Sequence; identical to SEQ ID NO: 73098
  derived and/or modified CDS sequence (opt1) from hemagglutinin__InfluenzaA__AFN19399

SEQ ID NO: 73468 - RNA, 1701 nt, Artificial Sequence; identical to SEQ ID NO: 73454
  derived and/or modified CDS sequence (opt1) from hemagglutinin__InfluenzaA__AFN19401

SEQ ID NO: 73469 - RNA, 1701 nt, Artificial Sequence; identical to SEQ ID NO: 73098
  derived and/or modified CDS sequence (opt1) from hemagglutinin__InfluenzaA__AFN19403

SEQ ID NO: 73470 - RNA, 1701 nt, Artificial Sequence; identical to SEQ ID NO: 73454
  derived and/or modified CDS sequence (opt1) from hemagglutinin__InfluenzaA__AFN19405

SEQ ID NO: 73471 - RNA, 1701 nt, Artificial Sequence
  derived and/or modified CDS sequence (opt1) from hemagglutinin__InfluenzaA__AFN19407
augaagaccaucaucgcccugagcuacauccucugccugguguucgcccagaagcugcccggcaacgacaacuccaccgcgacgcucugccuggggcaccacgccgucccgaacggcaccaucgugaagaccaucaccaacgaccagaucgaggugacgaacgccaccgagcugguccagaacagcuccaucggggagaucugcgacagcccccaccagauccucgacggcgagaacugcacccugaucgacgcccugcucggggacccccagugcgacggcuuccagaacaagaagugggaccuguucguggagcgcuccaaggccuacagcaacugcuaccccuacgacgugccggacuacgcgucccugcggagccucgucgccuccagcggcacccuggaguucaacaacgaguccuucaacuggagcggggugacgcagaacggcaccuccagcgccugcaugcgccgguccaacagcuccuucuucagccgccugaacuggcucacccaccugaacuucaaguaccccgcccugaacgugaccaugcccaacaacgagcaguucgacaagcucuacaucuggggcguccaccaccccgggacggacaaggaccagaucuuccuguacgcgcaguccagcgggcggaucaccgugagcaccaagcgcucccagcaggccgugaucccgaacaucggcagccggccccgcauccggaacauccccucccgcaucagcaucuacuggaccaucgucaagcccggcgacauccugcucaucaacuccacggggaaccugaucgccccgcggggcuacuucaagauccgcagcgggaaguccagcaucaugcgguccgacgcccccaucggcaagugcaacagcgagugcaucacccccaacggcuccauccccaacgacaagccguuccagaacgugaaccgcaucaccuacggggccugcccccgguacgugaagcagagcacccugaagcucgcgacgggcaugcgcaacguccccgagaagcagacccgggggaucuucggcgccaucgccggguucaucgagaacggcugggagggcaugguggacgggugguacggcuuccgccaccagaacuccgaggggcggggccaggccgccgaccucaagagcacccaggcggccaucgaccagaucaacgggaagcugaaccgccugaucggcaagaccaacgagaaguuccaccagaucgagaaggaguucuccgagguggagggccggauccaggaccuggagaaguacgucgaggacacgaagaucgaccuguggagcuacaacgccgagcuccugguggcccuggagaaccagcacaccaucgaccucaccgacuccgagaugaacaagcuguucgagaagaccaagaagcagcugcgcgagaacgccgaggacauggggaacggcugcuucaagaucuaccacaagugcgacaacgcgugcaucgggagcauccgcaacggcacguacgaccacgacguguaccgggacgaggcccucaacaaccgcuuccagaucaagggggucgagcugaaguccggcuacaaggacuggauccuguggaucagcuucgccaucagcugcuuccuccugugcguggcccugcucggcuucaucaugugggccugccagaaggggaacauccggugcaacaucugcaucuga

SEQ ID NO: 73472 - RNA, 1701 nt, Artificial Sequence
  derived and/or modified CDS sequence (opt1) from hemagglutinin__InfluenzaA__AFN19409
augaagaccaucaucgcccugagcuacauccucugccugguguucgcccagaagcugcccggcaacgacaacuccaccgcgacgcucugccuggggcaccacgccgucccgaacggcaccaucgugaagaccaucaccaacgaccagaucgaggugacgaacgccaccgagcugguccagagcuccagcaucggggagaucugcgacagcccccaccagauccucgacggcgagaacugcacccugaucgacgcccugcucggggacccccagugcgacggcuuccagaacaagaagugggaccuguucguggagcgcagcaaggccuacuccaacugcuaccccuacgacgugccggacuacgcgagccugcggucccucgucgccagcuccggcacccuggaguucaacaacgagagcuucaacuggacgggggugacccagaacggcaccuccagcgccugcauccgccgguccaacagcuccuucuucagccgccugaacuggcucacccaccugaacuucaaguaccccgcccugaacgugacgaugcccaacaacgagcaguucgacaagcucuacaucuggggcguccaccaccccgggaccgacaaggaccagaucuuccuguacgcgcaguccagcgggcggaucaccgugagcaccaagcgcucccagcaggccgugaucccgaacaucggcagccggccccgcauccggaacauccccucccgcaucagcaucuacuggacgaucgucaagcccggcgacauccugcucaucaacuccaccgggaaccugaucgccccgcggggcuacuucaagauccgcagcgggaaguccagcaucaugcgguccgacgcccccaucggcaagugcaacagcgagugcaucacccccaacggcuccauccccaacgacaagccguuccagaacgugaaccgcaucaccuacggggccugcccccgguacgugaagcagagcacgcugaagcucgcgaccggcaugcgcaacguccccgagaagcagacccgggggaucuucggcgccaucgccggguucaucgagaacggcugggagggcaugguggacgggugguacggcuuccgccaccagaacuccgaggggcggggccaggccgccgaccugaaguccacccaggcggccaucgaccagaucaacgggaagcugaaccgccucaucggcaagacgaacgagaaguuccaccagaucgagaaggaguucuccgagguggagggccggauccaggaccuggagaaguacgucgaggacaccaagaucgaccuguggagcuacaacgccgagcuccugguggcccuggagaaccagcacaccaucgaccucaccgacuccgagaugaacaagcuguucgagaagacgaagaagcagcugcgcgagaacgccgaggacauggggaacggcugcuucaagaucuaccacaagugcgacaacgcgugcaucgggagcauccgcaacggcaccuacaaccacgacguguaccgggacgaggcccucaacaaccgcuuccagaucaagggggucgagcugaaguccggcuacaaggacuggauccuguggaucagcuucgccaucagcugcuuccuccugugcguggcccugcucggcuucaucaugugggccugccagaaggggaacauccggugcaacaucugcaucuga

SEQ ID NO: 73473 - RNA, 1701 nt, Artificial Sequence; identical to SEQ ID NO: 73454
  derived and/or modified CDS sequence (opt1) from hemagglutinin__InfluenzaA__AFN19411

SEQ ID NO: 73474 - RNA, 1701 nt, Artificial Sequence; identical to SEQ ID NO: 73098
  derived and/or modified CDS sequence (opt1) from hemagglutinin__InfluenzaA__AFN19413

SEQ ID NO: 73475 - RNA, 1701 nt, Artificial Sequence
  derived and/or modified CDS sequence (opt1) from hemagglutinin__InfluenzaA__AFN19415
augaagaccaucaucgcccugagcuacauccucugccugguguucgcccagaagcugcccggcaacgacaacuccaccgcgacgcucugccuggggcaccacgccgucccgaacggcaccaucgugaagaccaucaccaacgaccagaucgaggugacgaacgccaccgagcugguccagagcuccagcaccggggagaucugcgacagcccccaccagauccucgacggcgagaacugcacccugaucgacgcccugcucggggacccccagugcgacggcuuccagaacaagaagugggaccuguucguggagcgcagcaaggccuacuccaacugcuaccccuacgacgugccggacuacgcgagccugcggucccucgucgccagcuccggcacgcuggaguucaacaacgagagcuucaacuggaccggggugacccagaacggcaccuccagcgccugcauccgccgguccaacagcuccuucuucagccgccugaacuggcucacgcaccugaacuucaaguaccccgcccugaacgugaccaugcccaacaacgagcaguucgacaagcucuacaucuggggcguccaccaccccgggaccgacaaggaccagaucuuccuguacgcgcaguccagcgggcggaucaccgugagcacgaagcgcucccagcaggccgugaucccgaacaucggcagccggccccgcauccggaacauccccucccgcaucagcaucuacuggaccaucgucaagcccggcgacauccugcucaucaacuccaccgggaaccugaucgccccgcggggcuacuucaagauccgcagcgggaaguccagcgugaugcgguccgacgcccccaucggcaagugcaacagcgagugcaucacccccaacggcuccauccccaacgacaagccguuccagaacgugaaccgcaucacguacggggccugcccccgguacgucaagcagagcacccugaagcucgcgaccggcaugcgcaacgugcccgagaagcagacccgggggaucuucggcgccaucgccggguucaucgagaacggcugggagggcaugguggacgggugguacggcuuccgccaccagaacuccgaggggcggggccaggccgccgaccugaaguccacgcaggcggccaucgaccagaucaacgggaagcugaaccgccucaucggcaagaccaacgagaaguuccaccagaucgagaaggaguucuccgaggucgagggccggauccaggaccuggagaaguacguggaggacaccaagaucgaccuguggagcuacaacgccgagcuccugguggcccuggagaaccagcacaccaucgaccucacggacuccgagaugaacaagcuguucgagaagaccaagaagcagcugcgcgagaacgccgaggacauggggaacggcugcuucaagaucuaccacaagugcgacaacgcgugcaucgggagcauccgcaacggcaccuacaaccacgacgucuaccgggacgaggcccucaacaaccgcuuccagaucaaggggguggagcugaaguccggcuacaaggacuggauccuguggaucagcuucgccaucagcugcuuccuccugugcguggcccugcucggcuucaucaugugggccugccagaaggggaacauccggugcaacaucugcaucuga

SEQ ID NO: 73476 - RNA, 1701 nt, Artificial Sequence
  derived and/or modified CDS sequence (opt1) from hemagglutinin__InfluenzaA__AFN19417
augaagaccaucaucgcccugagcuacauccucugccugguguucgcccagaagcugcccggcaacgacaacuccaccgcgacgcucugccuggggcaccacgccgucccgaacggcaccaucgugaagaccaucaccaacgaccagaucgaggugacgaacgccaccgagcugguccagagcuccagcaccggggagaucugcgacagcccccaccagauccucgacggcgagaacugcacccugaucgacgcccugcucggggacccccagugcgacggcuuccagaacaagaagugggaccuguucguggagcgcagcaaggccuacuccaacugcuaccccuacgacgugccggacuacgcgagccugcggucccucaucgccagcuccggcacgcuggaguucaacaacgagagcuucaacuggaccggggucacccagaacggcaccuccagcgccugcauccgccgguccaacagcuccuucuucagccgccugaacuggcucacgcaccugaacuucaaguaccccgcccugaacgugaccaugcccaacaacgagcaguucgacaagcucuacaucuggggcgugcaccaccccgggaccgacaaggaccagaucuuccuguacgcgcaguccagcgggcggaucaccgucagcacgaagcgcucccagcaggccgugaucccgaacaucggcagccggccccgcauccggaacauccccucccgcaucagcaucuacuggaccaucgugaagcccggcgacauccugcucaucaacuccaccgggaaccugaucgccccgcggggcuacuucaagauccgcagcgggaaguccagcaucaugcgguccgacgcccccaucggcaagugcaacagcgagugcaucacccccaacggcuccauccccaacgacaagccguuccagaacgucaaccgcaucacguacggggccugcccccgguacgugaagcagagcacccugaagcucgcgaccggcaugcgcaacgugcccgagaagcagacccgggggaucuucggcgccaucgccggguucaucgagaacggcugggagggcauggucgacgggugguacggcuuccgccaccagaacuccgaggggcggggccaggccgccgaccugaaguccacgcaggcggccaucgaccagaucaacgggaagcugaaccgccucaucggcaagaccaacgagaaguuccaccagaucgagaaggaguucuccgagguggagggccggauccaggaccuggagaaguacguggaggacaccaagaucgaccuguggagcuacaacgccgagcuccuggucgcccuggagaaccagcacaccaucgaccucacggacuccgagaugaacaagcuguucgagaagaccaagaagcagcugcgcgagaacgccgaggacauggggaacggcugcuucaagaucuaccacaagugcgacaacgcgugcaucgggagcauccgcaacggcaccuacaaccacgacguguaccgggacgaggcccucaacaaccgcuuccagaucaaggggguggagcugaaguccggcuacaaggacuggauccuguggaucagcuucgccaucagcugcuuccuccugugcgucgcccugcucggcuucaucaugugggccugccagaaggggaacauccggugcaacaucugcaucuga

SEQ ID NO: 73477 - RNA, 1701 nt, Artificial Sequence
  derived and/or modified CDS sequence (opt1) from hemagglutinin__InfluenzaA__AFN19423
augaagaccaucaucgcccugagcuacauccucugccugguguucgcccagaagcugcccggcaacgacaacuccaccgcgacgcucugccuggggcaccacgccgucccgaacggcaccaucgugaagaccaucaccaacgaccgcaucgaggugacgaacgccaccgagcugguccagaacagcuccaucggggagaucugcgacagcccccaccagauccucgacggcgagaacugcacccugaucgacgcccugcucggggacccccagugcgacggcuuccagaacaagaagugggaccuguucguggagcgguccaaggccuacagcaacugcuaccccuacgacgugccggacuacgcgucccugcgcagccucgucgccuccagcggcacccuggaguucaacaacgaguccuucaacuggacgggggugacccagaacggcaccagcuccgccugcauccggcgcagcaacaacuccuucuucagccggcugaacuggcucacccaccugaacuucaaguaccccgcccugaacgugacgaugcccaacaacgagcaguucgacaagcucuacaucuggggcguccaccaccccgggaccgacaaggaccagaucuuccuguacgcgcaguccagcgggcgcaucaccguguccaccaagcggagccagcaggccgugaucccgaacaucggcagccgcccccggauccgcaacauccccucccggaucagcaucuacuggacgaucgucaagcccggcgacauccugcucaucaacuccaccgggaaccugaucgccccgcgcggcuacuucaagauccggagcgggaaguccagcaucaugcgcuccgacgcccccaucggcaagugcaagagcgagugcaucacccccaacggcuccauccccaacgacaagccguuccagaacgugaaccggaucaccuacggggccugcccccgcuacgugaagcagagcacgcugaagcucgcgaccggcaugcggaacguccccgagaagcagacccgcgggaucuucggcgccaucgccggguucaucgagaacggcugggagggcaugguggacgggugguacggcuuccggcaccagaacuccgaggggcgcggccaggccgccgaccucaagagcacccaggcggccaucgaccagaucaacgggaagcugaaccggcugaucggcaagacgaacgagaaguuccaccagaucgagaaggaguucuccgagguggagggccgcauccaggaccuggagaaguacgucgaggacaccaagaucgaccuguggagcuacaacgccgagcuccugguggcccuggagaaccagcacaccaucgaccucaccgacuccgagaugaacaagcuguucgagaagacgaagaagcagcugcgcgagaacgccgaggacauggggaacggcugcuucaagaucuaccacaagugcgacaacgcgugcaucgggagcauccggaacggcaccuacgaccacgacguguaccgcgacgaggcccucaacaaccgguuccagaucaagggggucgagcugaaguccggcuacaaggacuggauccuguggaucagcuucgccaucuccugcuuccuccugugcguggcccugcucggcuucaucaugugggccugccagaaggggaacauccgcugcaacaucugcaucuga

SEQ ID NO: 73478 - RNA, 1701 nt, Artificial Sequence; identical to SEQ ID NO: 73454
  derived and/or modified CDS sequence (opt1) from hemagglutinin__InfluenzaA__AFN19425

SEQ ID NO: 73479 - RNA, 1701 nt, Artificial Sequence
  derived and/or modified CDS sequence (opt1) from hemagglutinin__InfluenzaA__AFN19437
augaagaccaucaucgcccugagcuacauccucugccugguguucgcccagaagcugcccggcaacgacaacuccaccgcgacgcucugccuggggcaccacgccgucccgaacggcaccaucgugaagaccaucaccaacgaccagaucgaggugacgaacgccaccgagcugguccagaacagcuccaucggggagaucugcgacagcccccaccagauccucgacggcgagaacugcacccugaucgacgcccugcucggggacccccagugcgacggcuuccagaacaagaagugggaccuguucguggagcgcuccaaggccuacagcaacugcuaccccuacgacgugccggacuacgcgucccugcggagccucgucgccuccagcggcacccuggaguucaacaacgaguccuucaacuggacgggggugacccagaacggcaccagcuccgccugcauccgccggagcaacuccagcuucuucucccgccugaacuggcucacccaccugaacuucaaguaccccgcccugaacgugacgaugcccaacaacgagcaguucgacaagcucuacaucuggggcguccaccaccccgggaccgacaaggaccagaucuuccuguacgcgcagagcuccgggcggaucaccgugagcaccaagcgcagccagcaggccgugaucccgaacaucggcucccggccccgcauccggaacauccccagccgcaucuccaucuacuggacgaucgucaagcccggcgacauccugcucaucaacagcaccgggaaccugaucgccccgcggggcuacuuccgcauccgguccggcaagagcuccaucaugcgcagcgacgcccccaucgggaagugcaacuccgagugcaucacccccaacggcagcauccccaacgacaagccguuccagaacgugaaccggaucaccuacggggccugcccccgcuacgugaagcaguccacgcugaagcucgcgaccggcaugcggaacguccccgagaagcagacccgcgggaucuucggcgccaucgccggguucaucgagaacggcugggagggcaugguggacgggugguacggcuuccggcaccagaacagcgaggggcgcggccaggccgccgaccugaaguccacccaggcggccaucgaccagaucaaccggaagcugaaccgccucaucgggaagacgaacgagaaguuccaccagaucgagaaggaguucagcgagguggagggccgcauccaggaccuggagaaguacgucgaggacaccaagaucgaccugugguccuacaacgccgagcuccugguggcccuggagaaccagcacaccaucgaccucaccgacagcgagaugaacaagcuguucgagaagacgaagaagcagcugcgggagaacgccgaggacaugggcaacgggugcuucaagaucuaccacaagugcgacaacgcgugcaucggcuccauccgcaacgggaccuacgaccacuacguguaccgggacgaggcccucaacaaccgcuuccagaucaagggcgucgagcucaagagcggguacaaggacuggauccuguggaucuccuucgccaucagcugcuuccugcugugcguggcccugcucggcuucaucaugugggccugccagaagggcaacauccggugcaacaucugcaucuga

SEQ ID NO: 73480 - RNA, 1701 nt, Artificial Sequence
  derived and/or modified CDS sequence (opt1) from hemagglutinin__InfluenzaA__AFN19439
augaagaccaucaucgcccugagccacauccucugccugguguucgcccagaagcugcccgagaacgacaacuccaccgcgacgcucugccugggccaccacgccgucccgaacgggaccaucgugaagaccaucaccaacgaccagaucgaggugacgaacgccaccgagcugguccagagcuccagcaccggcgagaucugcgacagcccccaccagauccucgacgggaucaacugcacccugaucgacgcccugcucggcgacccccagugcgacggguuccagaacaagaagugggaccuguucguggagcgcagcaaggccuacuccaacugcuaccccuacgacgugccggacuacgcgagccugcggucccucgucgccagcuccggcacgcuggaguucaacaacgagagcuucaacuggaccggcgugacccagaacgggaccuccagcgccugcauccgccgguccaacagcuccuucuucagccgccugaacuggcucacgcaccugaacuucaaguaccccgcccugaacgugaccaugcccaacaacgagcaguucgacaagcucuacaucuggggcguccaccaccccgggaccgacaaggaccagaucuuccuguacgcgcagccguccggccggaucaccgugagcacgaagcgcagccagcaggccgugauccccaacaucgggucccggccccgcauccggaacauccccagccgcaucuccaucuacuggaccaucgucaagccgggcgacauccugcucaucaacagcaccggcaaccugaucgcgccccggggguacuucaagauccgcuccggcaagagcuccaucaugcggagcgacgcccccaucgggaagugcaacuccgagugcaucacccccaacggcagcaucccgaacgacaagcccuuccagaacgugaaccgcaucacguacggcgccugcccccgguacgugaagcaguccacccugaagcucgccaccgggaugcgcaacguccccgagaagcagacccggggcaucuucggggccaucgccggcuucaucgagaacgggugggagggcaugguggacggcugguacggguuccgccaccagaacagcgagggccgggggcaggccgccgaccugaaguccacgcaggcggccaucgaccagaucaacggcaagcugaaccgccucaucgggaagaccaacgagaaguuccaccagaucgagaaggaguucagcgagguggagggccggauccaggaccuggagaaguacgucgaggacaccaagaucgaccugugguccuacaacgccgagcuccugguggcccuggagaaccagcacaccaucgaccucacggacagcgagaugaacaagcuguucgagaagaccaagaagcagcugcgcgagaacgccgaggacaugggcaacgggugcuucaagaucuaccacaagugcgacaacgcgugcaucggcuccauccgcaacgggaccuacaaccacgacguguaccgggacgaggcccucaacaaccgcuuccagaucaagggcgucgagcugaaguccggguacaaggacuggauccuguggaucuccuucgccaucagcugcuuccuccugugcguggcccugcucggcuucaucaugugggccugccagaagggcaacauccggugcaacaucugcaucuga

SEQ ID NO: 73481 - RNA, 1701 nt, Artificial Sequence; identical to SEQ ID NO: 73455
  derived and/or modified CDS sequence (opt1) from hemagglutinin__InfluenzaA__AFN19443

SEQ ID NO: 73482 - RNA, 1701 nt, Artificial Sequence
  derived and/or modified CDS sequence (opt1) from hemagglutinin__InfluenzaA__AFN19445
augaagaccaucaucgcccugagcuacauccucugccugguguucgcccagaagcugcccggcaacgacaacuccaccgcgacgcucugccuggggcaccacgccgucccgaacggcaccaucgugaagaccaucaccaacgaccgcaucgaggugacgaacgccaccgagcugguccagaacagcuccaucggggagaucugcgacagcccccaccagauccucgacggcgagaacugcacccugaucgacgcccugcucggggacccccagugcgacggcuuccagaacaagaagugggaccuguucguggagcgguccaaggccuacagcaacugcuaccccuacgacgugccggacuacgcgucccugcgcagccucgucgccuccagcggcacccuggaguucaacaacgaguccuucaacuggacgggggugacccagaacggcaccagcuccgccugcauccggcgcagcaacaacuccuucuucagccggcugaacuggcucacccaccugaacuucaaguaccccgcccugaacgugacgaugcccaacaacgagcaguucgacaagcucuacaucuggggcguccaccaccccgggaccgacaaggaccagaucuuccuguacgcgcaguccagcgggcgcaucaccguguccaccaagcggagccagcaggccgugaucccgaacaucggcagccgcccccggauccgcaacauccccucccggaucagcaucuacuggacgaucgucaagcccggcgacauccugcucaucaacuccaccgggaaccugaucgccccgcgcggcuacuucaagauccggagcgggaaguccagcaucaugcgcuccgacgcccccaucggcaagugcaagagcgagugcaucacccccaacggcuccauccccaacgacaagccguuccagaacgugaaccggaucaccuacggggccugcccccgcuacgugaagcagagcacgcugcggcucgcgaccggcaugcgcaacguccccgagaagcagacccgggggaucuucggcgccaucgccggguucaucgagaacggcugggagggcaugguggacgggugguacggcuuccgccaccagaacuccgaggggcggggccaggccgccgaccucaagagcacccaggcggccaucgaccagaucaacgggaagcugaaccgccugaucggcaagacgaacgagaaguuccaccagaucgagaaggaguucuccgagguggagggccgcauccaggaccuggagaaguacgucgaggacaccaagaucgaccuguggagcuacaacgccgagcuccugguggcccuggagaaccagcacaccaucgaccucaccgacuccgagaugaacaagcuguucgagaagacgaagaagcagcugcgggagaacgccgaggacauggggaacggcugcuucaagaucuaccacaagugcgacaacgcgugcaucgggagcauccgcaacggcaccuacgaccacgacguguaccgggacgaggcccucaacaaccgcuuccagaucaagggggucgagcugaaguccggcuacaaggacuggauccuguggaucagcuucgccaucuccugcuuccuccugugcguggcccugcucggcuucaucaugugggccugccagaaggggaacauccggugcaacaucugcaucuga

SEQ ID NO: 73483 - RNA, 1701 nt, Artificial Sequence; identical to SEQ ID NO: 73477
  derived and/or modified CDS sequence (opt1) from hemagglutinin__InfluenzaA__AFN19447

SEQ ID NO: 73484 - RNA, 1701 nt, Artificial Sequence
  derived and/or modified CDS sequence (opt1) from hemagglutinin__InfluenzaA__AFN19451
augaagaccaucaucgcccugagcuacauccucugccugguguucgcccagaagcugcccggcaacgacaacuccaccgcgacgcucugccuggggcaccacgccgucccgaacggcaccaucgugaagaccaucaccaacgaccagaucgaggugacgaacgccaccgagcugguccagaacagcuccaucggggagaucugcgacagcccccaccagauccucgacggcgagaacugcacccugaucgacgcccugcucggggacccccagugcgacggcuuccagaacaagaagugggaccuguucguggagcgcuccaaggccuacagcaacugcuaccccuacgacgugccggacuacgcgucccugcggagccucgucgccuccagcggcacccuggaguucaacaacgaguccuucaacuggacgggggugacccagaacggcaccagcuccgccugcauccgccggagcaacuccagcuucuucucccgccugaacuggcucacccaccugaacuucaaguaccccgcccugaacgugacgaugcccaacaacgagcaguucgacaagcucuacaucuggggcguccaccaccccgggaccgacaaggaccagaucuuccuguacgcgcagagcuccgggcggaucaccgugagcaccaagcgcagccagcaggccgugaucccgaacaucggcucccggccccgcauccggaacauccccagccgcaucuccaucuacuggacgaucgucaagcccggcgacauccugcucaucaacagcaccgggaaccugaucgccccgcggggcuacuucaagauccgcuccggcaagagcuccaucaugcggagcgacgcccccaucgggaagugcaacuccgagugcaucacccccaacggcagcauccccaacgacaagccguuccagaacgugaaccgcaucaccuacggggccugcccccgguacgugaagcaguccacgcugaagcucgcgaccggcaugcgcaacguccccgagaagcagacccgggggaucuucggcgccaucgccggguucaucgagaacggcugggagggcaugguggacgggugguacggcuuccgccaccagaacagcgaggggcggggccaggccgccgaccugaaguccacccaggcggccaucgaccagaucaacgggaagcugaaccgccucaucggcaagacgaacgagaaguuccaccagaucgagaaggaguucagcgagguggagggccggauccaggaccuggagaaguacgucgaggacaccaagaucgaccugugguccuacaacgccgagcuccugguggcccuggagaaccagcacaccaucgaccucaccgacagcgagaugaacaagcuguucgagaagacgaagaagcagcugcgcgagaacgccgaggacauggggaacggcugcuucaagaucuaccacaagugcgacaacgcgugcaucggguccauccgcaacggcaccuacgaccacgacguguaccgggacgaggcccucaacaaccgcuuccagaucaacggggucgagcucaagagcggcuacaaggacuggauccuguggaucuccuucgccaucagcugcuuccugcugugcguggcccugcucggcuucaucaugugggccugccagaaggggaacauccggugcaacaucugcaucuga

SEQ ID NO: 73485 - RNA, 1701 nt, Artificial Sequence
  derived and/or modified CDS sequence (opt1) from hemagglutinin__InfluenzaA__AFN19453
augaagaccaucaucgcccugagcuacauccucugccugguguucgcccagaagcugcccggcaacgacaacuccaccgcgacgcucugccuggggcaccacgccgucccgaacggcaccaucgugaagaccaucaccaacgaccagaucgaggugacgaacgccaccgagcugguccagaacagcuccaucggggagaucugcgacagcccccaccagauccucgacggcgagaacugcacccugaucgacgcccugcucggggacccccagugcgacggcuuccagaacaagaagugggaccuguucguggagcgcuccaaggccuacagcaacugcuaccccuacgacgugccggacuacgcgucccugcggagccucgucgccuccagcggcacccuggaguucaacaacgaguccuucaacuggacgggggugacccagaacggcaccagcuccgccugcauccgccggagcaacuccagcuucuucucccgccugaacuggcucacccaccugaacuucaaguaccccgcccugaacgugacgaugcccaacaacgagcaguucgacaagcucuacaucuggggcguccaccaccccgggaccgacaaggaccagaucuuccuguacgcgcagagcuccgggcggaucaccgugagcaccaagcgcagccagcaggccgugaucccgaacaucggcucccggccccgcauccggaacauccccagccgcaucuccaucuacuggacgaucgucaagcccggcgacauccugcucaucaacagcaccgggaaccugaucgccccgcggggcuacuucaagauccgcuccggcaagagcuccaucaugcggagcgacgcccccaucgggaagugcaacuccgagugcaucacccccaacggcagcauccccaacgacaagccguuccagaacgugaaccgcaucaccuacggggccugcccccgguacgugaagcaguccacgcugaagcucgcgaccggcaugcgcaacguccccgagaagcagacccgggggaucuucggcgccaucgccggguucaucgagaacggcugggagggcaugguggacgggugguacggcuuccgccaccagaacagcgaggggcggggccaggccgccgaccugaaguccacccaggcggccaucgaccagaucaacgggaagcugaaccgccucaucggcaagacgaacgagaaguuccaccagaucgagaaggaguucagcgagguggagggccggauccaggaccuggagaaguacgucgaggacaccaagaucgaccugugguccuacaacgccgagcuccugguggcccuggagaaccagcacaccaucgaccucaccgacagcgagaugaacaagcuguucgagaagacgaagaagcagcugcgcgagaacgccgaggacauggggaacggcugcuucaagaucuaccacaagugcgacaacgcgugcaucggguccauccgcaacggcaccuacgaccacgacguguaccgggacgaggcccucaacaaccgcuuccaggucaaggggguggagcucaagagcggcuacaaggacuggauccuguggaucuccuucgccaucagcugcuuccugcugugcguggcccugcucggcuucaucaugugggccugccagaaggggaacauccggugcaacaucugcaucuga

SEQ ID NO: 73486 - RNA, 1701 nt, Artificial Sequence; identical to SEQ ID NO: 73477
  derived and/or modified CDS sequence (opt1) from hemagglutinin__InfluenzaA__AFN19455

SEQ ID NO: 73487 - RNA, 1701 nt, Artificial Sequence; identical to SEQ ID NO: 73098
  derived and/or modified CDS sequence (opt1) from hemagglutinin__InfluenzaA__AFN19457

SEQ ID NO: 73488 - RNA, 1701 nt, Artificial Sequence; identical to SEQ ID NO: 73098
  derived and/or modified CDS sequence (opt1) from hemagglutinin__InfluenzaA__AFN19459

SEQ ID NO: 73489 - RNA, 1701 nt, Artificial Sequence; identical to SEQ ID NO: 73455
  derived and/or modified CDS sequence (opt1) from hemagglutinin__InfluenzaA__AFN19461

SEQ ID NO: 73490 - RNA, 1701 nt, Artificial Sequence
  derived and/or modified CDS sequence (opt1) from hemagglutinin__InfluenzaA__AFN19465
augaagaccaucaucgcccugagcuacauccucugccugguguucgcccagaagcugcccggcaacgacaacuccaccgcgacgcucugccuggggcaccacgccgucccgaacggcaccaucgugaagaccaucaccaacgaccagaucgaggugacgaacgccaccgagcugguccagagcuccagcaccggggagaucugcgacagcccccaccagauccucgacggcgagaacugcacccugaucgacgcccugcucggggacccccagugcgacggcuuccagaacaagaagugggaccuguucguggagcgcagcaaggccuacuccaacugcuaccccuacgacgugccggacuacgcgagccugcggucccucgucgccagcuccggcacgcuggaguucaacaacgagagcuucaacuggaccggggugacccagaacggcaccuccagcgccugcauccgccgguccaacagcuccuucuucagccgccugaacuggcucacgcaccugaacuucaaguaccccgcccugaacgugaccaugcccaacaacgagcaguucgacaagcucuacaucuggggcguccaccaccccgggaccgacaaggaccagaucuuccuguacgcgcaguccagcgggcggaucaccgugagcacgaagcgcucccagcaggccgugaucccgaacaucggcagccggccccgcauccggaacauccccucccgcaucagcaucuacuggaccaucgucaagcccggcgacauccugcucaucaacuccaccgggaaccugaucgccccgcggggcuacuucaagauccgcagcgggaaguccagcaucaugcgguccgacgcccccaucggcaagugcaacagcgagugcaucacccccaacggcuccauccccaacgacaagccguuccagaacgugaaccgcaucacguacggggccugcccccgguacgugaagcagagcacccugaagcucgcgaccggcaugcgcaacguccccgagaagcagacccgggggaucuucggcgccaucgccggguucaucgagaacggcugggagggcaugguggacgggugguacggcuuccgccaccagaacuccgaggggcggggccaggccgccgaccugaaguccacgcaggcggccaucgaccagaucaacgggaagcugaaccgccucaucggcaagaccaacgagaaguuccaccagaucgagaaggaguucuccgagguggagggccggauccaggaccuggagaaguacgucgaggacaccaagaucgaccuguggagcuacaacgccgagcuccugguggcccuggagaaccagcacaccaucgaccucacggacuccgagaugaacaagcuguucgagaagaccaagaagcagcugcgcgagaacgccgaggacaucgggaacggcugcuucaagaucuaccacaagugcgacaacgcgugcaucgggagcauccgcaacggcaccuacaaccacgacguguaccgggacgaggcccucaacaaccgcuuccagaucaagggggucgagcugaaguccggcuacaaggacuggauccuguggaucagcuucgccaucagcugcuuccuccugugcaucgcccugcucggcuucaucaugugggccugccagaaggggaacauccggugcaacaucugcaucuga

SEQ ID NO: 73491 - RNA, 1701 nt, Artificial Sequence; identical to SEQ ID NO: 73477
  derived and/or modified CDS sequence (opt1) from hemagglutinin__InfluenzaA__AFN19467

SEQ ID NO: 73492 - RNA, 1701 nt, Artificial Sequence; identical to SEQ ID NO: 73485
  derived and/or modified CDS sequence (opt1) from hemagglutinin__InfluenzaA__AFN19469

SEQ ID NO: 73493 - RNA, 1701 nt, Artificial Sequence; identical to SEQ ID NO: 73098
  derived and/or modified CDS sequence (opt1) from hemagglutinin__InfluenzaA__AFN19471

SEQ ID NO: 73494 - RNA, 1701 nt, Artificial Sequence
  derived and/or modified CDS sequence (opt1) from hemagglutinin__InfluenzaA__AFN19473
augaagaccaucaucgcccugagcuacauccucugccugguguucgcccagaagcugcccggcaacgacaacuccaccgcgacgcucugccuggggcaccacgccgucccgaacggcaccaucgugaagaccaucaccaacgaccagaucgaggugacgaacgccaccgagcugguccagagcuccagcaccggggagaucugcggcagcccccaccagauccucgacggggagaacugcacccugaucgacgcccugcucggcgacccccagugcgacggcuuccagaacaagaagugggaccuguucguggagcgcagcaaggccuacuccaacugcuaccccuacgacgugccggacuacgcgagccugcggucccucgucgccagcuccgggacgcuggaguucaacaacgagagcuucaacuggaccggcgugacccagaacgggaccuccagcgccugcauccgccgguccaacagcuccuucuucagccgccugaacuggcucacgcaccugaacuucaaguaccccgcccugaacgugaccaugcccaacaacgagcaguucgacaagcucuacaucuggggcguccaccaccccgggaccgacaaggaccagaucuuccuguacgcgcaguccagcggccggaucaccgugagcacgaagcgcucccagcaggccgugaucccgaacaucggcagccggccccgcauccggaacauccccucccgcaucagcaucuacuggaccaucgucaagcccggggacauccugcucaucaacuccaccggcaaccugaucgccccgcggggguacuucaagauccgcagcggcaaguccagcaucaugcgguccgacgcccccaucggcaagugcaacagcgagugcaucacccccaacggguccauccccaacgacaagccguuccagaacgugaaccgcaucacguacggcgccugcccccgguacgugaagcagagcacccugaagcucgcgaccgggaugcgcaacguccccgagaagcagacccggggcaucuucggggccaucgccggcuucaucgagaacggcugggaggggaugguggacggcugguacggguuccgccaccagaacuccgagggccgggggcaggccgccgaccugaaguccacgcaggcggccaucgaccagaucaacggcaagcugaaccgccucaucggcaagaccaacgagaaguuccaccagaucgagaaggaguucuccgagguggaggggcggauccaggaccuggagaaguacgucgaggacaccaagaucgaccuguggagcuacaacgccgagcuccugguggcccuggagaaccagcacaccaucgaccucacggacuccgagaugaacaagcuguucgagaagaccaagaagcagcugcgcgagaacgccgaggacaugggcaacgggugcuucaagaucuaccacaagugcgacaacgcgugcaucggcagcauccgcaacgggaccuacaaccacgacguguaccgggacgaggcccucaacaaccgcuuccagaucaagggcgucgagcugaaguccggcuacaaggacuggauccuguggaucagcuucgccaucagcugcuuccuccugugcguggcccugcucggguucaucaugugggccugccagaagggcaacauccggugcaacaucugcaucuga

SEQ ID NO: 73495 - RNA, 1701 nt, Artificial Sequence; identical to SEQ ID NO: 73477
  derived and/or modified CDS sequence (opt1) from hemagglutinin__InfluenzaA__AFN19475

SEQ ID NO: 73496 - RNA, 1701 nt, Artificial Sequence; identical to SEQ ID NO: 73098
  derived and/or modified CDS sequence (opt1) from hemagglutinin__InfluenzaA__AFN19477

SEQ ID NO: 73497 - RNA, 1701 nt, Artificial Sequence
  derived and/or modified CDS sequence (opt1) from hemagglutinin__InfluenzaA__AFN19479
augaagaccaucaucgcccugagcugcauccucugccugguguucgcccagaagcugcccggcaacgacaacuccaccgcgacgcucugccuggggcaccacgccgucccgaacggcaccaucgugaagaccaucaccaacgaccagaucgaggugacgaacgccaccgagcugguccagaacagcuccaucggggagaucugcgacagcccccaccagauccucgacggcgagaacugcacccugaucgacgcccugcucggggacccccagugcgacggcuuccagaacaagaagugggaccuguucguggagcgcuccaaggccuacagcaacugcuaccccuacgacgugccggacuacgcgucccugcggagccucgucgccuccagcggcacccuggaguucaacaacgaguccuucaacuggacgggggugacccagaacggcaccagcuccgccugcauccgccggagcaacuccagcuucuucucccgccugaacuggcucacccaccugaacuucaaguaccccgcccugaacgugacgaugcccaacaacgagcaguucgacaagcucuacaucuggggcguccaccaccccgggaccgacaaggaccagaucuuccuguacgcgcagagcuccgggcggaucaccgugagcaccaagcgcagccagcaggccgugaucccgaacaucggcucccggccccgcauccggaacauccccagccgcaucuccaucuacuggacgaucgucaagcccggcgacauccugcucaucaacagcaccgggaaccugaucgccccgcggggcuacuucaagauccgcuccggcaagagcuccaucaugcggagcgacgcccccaucgggaagugcaacuccgagugcaucacccccaacggcagcauccccaacgacaagccguuccagaacgugaaccgcaucaccuacggggccugcccccgguacgugaagcaguccacgcugaagcucgcgaccggcaugcgcaacguccccgagaagcagacccgggggaucuucggcgccaucgccggguucaucgagaacggcugggagggcaugguggacgggugguacggcuuccgccaccagaacagcgaggggcggggccaggccgccgaccugaaguccacccaggcggccaucgaccagaucaacgggaagcugaaccgccucaucggcaagacgaacgagaaguuccaccagaucgagaaggaguucagcgagguggagggccggauccaggaccuggagaaguacgucgaggacaccaagaucgaccugugguccuacaacgccgagcuccugguggcccuggagaaccagcacaccaucgaccucaccgacagcgagaugaacaagcuguucgagaagacgaagaagcagcugcgcgagaacgccgaggacauggggaacggcugcuucaagaucuaccacaagugcgacaacgcgugcaucggguccauccgcaacggcaccuacgaccacgacguguaccgggacgaggcccucaacaaccgcuuccagaucaagggggucgagcucaagagcggcuacaaggacuggauccuguggaucuccuucgccaucagcugcuuccugcugugcguggcccugcucggcuucaucaugugggccugccagaaggggaacauccggugcaacaucugcaucuga

SEQ ID NO: 73498 - RNA, 1701 nt, Artificial Sequence; identical to SEQ ID NO: 73477
  derived and/or modified CDS sequence (opt1) from hemagglutinin__InfluenzaA__AFN19483

SEQ ID NO: 73499 - RNA, 1701 nt, Artificial Sequence; identical to SEQ ID NO: 70879
  derived and/or modified CDS sequence (opt1) from hemagglutinin__InfluenzaA__AFN19485

SEQ ID NO: 73500 - RNA, 1701 nt, Artificial Sequence; identical to SEQ ID NO: 73098
  derived and/or modified CDS sequence (opt1) from hemagglutinin__InfluenzaA__AFN19487

SEQ ID NO: 73501 - RNA, 1701 nt, Artificial Sequence
  derived and/or modified CDS sequence (opt1) from hemagglutinin__InfluenzaA__AFN19491
augaagaccaucaucgcccugagcuacauccucugccugguguucgcccagaagcugcccggcaacgacaacuccaccgcgacgcucugccuggggcaccacgccgucccgaacggcaccaucgugaagaccaucaccaacgaccagaucgaggugacgaacgccaccgagcugguccagagcuccagcaccggggagaucugcgacagcccccaccagauccucgacggcgagaacugcacccugaucgacgcccugcucggggacccccagugcgacggcuuccagaacaagaagugggaccuguucguggagcgcagcaaggccuacuccaacugcuaccccuacgacgugccggacuacgcgagccugcggucccucgucgccagcuccggcacgcuggaguucaacaacgagagcuucaacuggaccggggugacccagaacggcaccuccagcgccugcauccgccgguccaacagcuccuucuucagccgccugaacuggcucacgcaccugaacuucaaguaccccgcccugaacgugaccaugcccaacaacgagcaguucgacaagcucuacaucuggggcguccaccaccccgggaccgacaaggaccagaucuuccuguacgcgcaguccagcgggcggaucaccgugagcacgaagcgcucccagcaggccgugaucccgaacaucggcagccggccccgcauccggaacauccccucccgcaucagcaucuacuggaccaucgucaagcccggcgacauccugcucaucaacuccaccgggaaccugaucgccccgcggggcuacuucaagauccgcagcgggaaguccagcaucaugcgguccgacgcccccaucggcaagugcaacagcgagugcaucacccccaacggcuccauccccaacgacaagccguuccagaacgugaaccgcaucacguacggggccugcccccgguacgugaagcagagcacccugaagcucgcgaccggcaugcgcaacguccccgagaagcagacccgggggaucuucggcgccaucgccggguucaucgagaacggcugggagggcaugguggacgggugguacggcuuccgccaccagaacuccgaggggcggggccaggccgccgaccugaaguccacgcaggcggccaucgaccagaucaacgggaagcugaaccgccucaucggcaagaccaacgagaaguuccaccagaucgagaaggaguucuccgagguggagggccggauccaggaccuggagaaguacgucgaggacaccaagaucgaccuguggagcuacaacgccgagcuccugguggcccuggagaaccagcacaccaucgaccucacggacuccgagaugaacaagcuguucgagaagaccaagaagcagcugcgcgagaacgccgaggacauggggaacggcugcuucaagaucuaccacaagugcgacaacgcgugcaucgggagcauccgcaacggcaccuacaaccacgacguguaccgggacgaggcccucaacaaccgcuuccagaucaagggggucgagcugaaguccggcuacaaggacuggauccuguggaucagcuucgccaucagcugcuuccuccugugcguggugcugcucggcuucaucaugugggccugccagaaggggaacauccggugcaacaucugcaucuga

SEQ ID NO: 73502 - RNA, 1701 nt, Artificial Sequence
  derived and/or modified CDS sequence (opt1) from hemagglutinin__InfluenzaA__AFN19493
augaagaccaucaucgcccugagcuacauccucugccugguguucgcccagaagcugcccggcaacgacaacuccaccgcgacgcucugccuggggcaccacgccgucccgaacggcaccaucgugaagaccaucaccaacgaccagaucgaggugacgaacgccaccgagcugguccagagcuccagcaccggggagaucugcaacagcccccaccagauccucgacggcgagaacugcacccugaucgacgcccugcucggggacccccagugcgacggcuuccagaacaagaagugggaccuguucguggagcgcagcaaggcccacuccaacugcuaccccuacgacgugccggacuacgcgagccugcggucccucgucgccagcuccggcacgcuggaguucaacaacgagagcuucaacuggaccggggugacccagaacggcaccuccagcgccugcauccgccgguccaacaacagcuucuucucccgccugaacuggcucacgcaccugaacuucaaguaccccgcccugaacgugaccaugcccaacaacgagcaguucgacaagcucuacaucuggggcguccaccaccccgggaccgacaaggaccagaucuuccuguacgcgcaggccagcgggcggaucaccguguccacgaagcgcagccagcagaccgugaucccgaacaucggcagccggccccgcguccggaacauccccucccgcgugagcaucuacuggaccaucgugaagcccggcgacauccugcucaucaacuccaccgggaaccugaucgccccgcggggcuacuucaagauccgcagcgggaaguccagcaucaugcgguccgacgcccccaucggcaagugcaacagcgccugcaucacgcccaacggcuccauccccaacgacaagccguuccagaacgucaaccgcaucaccuacggggcgugcccccgguacgugaagcagaacacccugaagcucgccaccggcaugcgcaacgugcccgagaagcagacgcgggggaucuucggcgccaucgccggguucaucgagaacggcugggagggcauggucgacgggugguacggcuuccgccaccagaacagcgaggggcggggccaggccgcggaccugaaguccacccaggccgccaucgaccagaucaacgggaagcugaaccgccucaucggcaagaccaacgagaaguuccaccagaucgagaaggaguucagcgagguggagggccggauccaggaccuggagaaguacguggaggacaccaagaucgaccugugguccuacaacgccgagcuccuggucgcccuggagaaccagcacacgaucgaccucaccgacagcgagaugaacaagcuguucgagaagaccaagaagcagcugcgcgagaacgcggaggacauggggaacggcugcuucaagaucuaccacaagugcgacaacgccugcaucggguccauccgcaacggcaccuacgaccacgacguguaccgggacgaggcccucaacaaccgcuuccagaucaaggggguggagcugaaguccggcuacaaggacuggauccuguggaucuccuucgccaucagcugcuuccuccugugcgucgcccugcucggcuucaucaugugggcgugccagaaggggaacauccggugcaacaucugcaucuga

SEQ ID NO: 73503 - RNA, 1701 nt, Artificial Sequence
  derived and/or modified CDS sequence (opt1) from hemagglutinin__InfluenzaA__AFN19495
augaagaccaucaucgcccugagcuacauccucugccugguguucgcccagaagauccccggcaacgacaacuccaccgcgacgcugugccucgggcaccacgccgucccgaacggcaccaucgugaagaccaucaccaacgaccagaucgaggugacgaacgccaccgagcugguccagagcuccagcgccggggagaucugcgacagcccccaccacauccuggacggcgagaacugcacccucaucgacgcccugcugggggacccccagugcgacggcuuccagaacaagaagugggaccucuucguggagcgcucccgggcguacuccaacugcuaccccuacgacgugccggacuacgccagccugcgcucccuggucgccagcuccggcacccucgaguucaacaacgagagcuucaacuggacgggggugacccagaacggcaccuccagcgccugcauccggcgcuccaacaacagcuucuucucccggcugaacuggcugacccaccucaacuucaaguaccccgcgcugaacgugacgaugcccaacaacgagcaguucgacaagcuguacaucuggggcguccaccaccccgggaccgacaaggaccagaucuuccucuacgcccaggccagcgggcgcaucaccguguccaccaagcggagccagcaggccgugaucccgaacaucggcagccgcccccggguccgcaacauccccucccggaucagcaucuacuggacgaucgugaagcccggcgacauccugcugaucaacuccaccgggaaccucaucgccccgcgcggcuacuucaagauccggagcgggaaguccagcaucaugcgcuccgacgcgcccaucggcaagugcaacagcgagugcaucacccccaacggcuccauccccaacgacaagccguuccagaacgugaaccggaucaccuacggggccugcccccgcuacgucaagcagagcacgcugaagcuggccaccggcaugcggaacgugcccgagaagcagacccgcgggaucuucggcgccaucgccggguucaucgagaacggcugggagggcaugauggacgggugguacggcuuccggcaccagaacuccgaggggcgcggccaggcggccgaccucaagagcacccaggccgccaucgaccagaucaacgggaagcugaaccggcugaucggcaagacgaacgagaaguuccaccagaucgagaaggaguucuccgagguggagggccgcauccaggaccucgagaaguacgucgaggacaccaagaucgaccuguggagcuacaacgccgagcugcucguggcgcuggagaaccagcacaccaucgaccugaccgacuccgagaugaacaagcuguucgagaagacgaagaagcagcuccgcgagaacgccgaggacauggggaacggcugcuucaagaucuaccacaagugcgacaacgccugcaucgggagcauccggaacggcaccuacgaccacgacguguaccgcgacgaggcccugaacaaccgguuccagaucaagggggucgagcucaaguccggcuacaaggacuggauccuguggaucagcuucgccaccuccugcuuccugcucugcguggcgcugcugggcuucaucaugugggccugccagaaggggaacauccgcugcaacaucugcaucuga

SEQ ID NO: 73504 - RNA, 1701 nt, Artificial Sequence
  derived and/or modified CDS sequence (opt1) from hemagglutinin__InfluenzaA__AFN19497
augaagaccaucaucgcccugagcuacauccucugccugguguucgcccagaagcugcccgagaacgacaacuccaccgcgacgcucugccugggccaccacgccgucccgaacgggaccaucgugaagaccaucaccaacgaccagaucgaggugacgaacgccaccgagcugguccagagcuccagcaccggcgagaucugcaacagcccccaccagauccucgacggggagaacugcacccugaucgacgcccugcucggcgacccccagugcgacggguuccagaacaagaagugggaccuguucguggagcgcagcaaggcccacuccaacugcuaccccuacgacgugccggacuacgcgagccugcggucccucgucgccagcuccggcacgcuggaguucaacaacgagagcuucaacuggaccggcgugacccagaacgggaccuccagcgccugcauccgccgguccaacaacagcuucuucucccgccugaacuggcucacgcaccugaacuucaaguaccccgcccugaacgugaccaugcccaacaacgagcaguucgacaagcucuacaucuggggcguccaccaccccgggaccgacaaggaccagaucuuccuguacgcgcaggccagcggccggaucaccguguccacgaagcgcagccagcaggccgugaucccgaacaucgggagccggccccgcguccggaacauccccucccgcgugagcaucuacuggaccaucgugaagcccggcgacauccugcucaucaacuccaccggcaaccugaucgccccgcggggguacuucaagauccgcagcggcaaguccagcaucaugcgguccgacgcccccaucgggaagugcaacagcacgugcaucacccccaacggcuccauccccaacgacaagccguuccagaacgucaaccgcaucaccuacggcgcgugcccccgguacgugaagcagaacacccugaagcucgccaccgggaugcgcaacgugcccgagaagcagacgcggggcaucuucggggccaucgccggcuucaucgagaacgggugggagggcauggucgacggcugguacggguuccgccaccagaacagcgagggccgggggcaggccgcggaccugaaguccacccaggccgccaucgaccagaucaacggcaagcugaaccgccucaucgggaagaccaacgagaaguuccaccagaucgagaaggaguucagcgagguggagggccggauccaggaccuggagaaguacguggaggacaccaagaucgaccugugguccuacaacgccgagcuccuggucgcccuggagaaccagcacacgaucgaccucaccgacagcgagaugaacaagcuguucgagaagaccaagaagcagcugcgcgagaacgcggaggacaugggcaacgggugcuucaagaucuaccacaagugcgacaacgccugcaucggcuccauccgcaacgggaccuacgaccacgacguguaccgggacgaggcccucaacaaccgcuuccagaucaagggcguggagcugaaguccggguacaaggacuggauccuguggaucuccuucgccaucagcugcuuccuccugugcgucgcccugcucggcuucaucaugugggcgugccagaagggcaacauccggugcaacaucugcaucuga

SEQ ID NO: 73505 - RNA, 1701 nt, Artificial Sequence; identical to SEQ ID NO: 73455
  derived and/or modified CDS sequence (opt1) from hemagglutinin__InfluenzaA__AFN19499

SEQ ID NO: 73506 - RNA, 1701 nt, Artificial Sequence; identical to SEQ ID NO: 73454
  derived and/or modified CDS sequence (opt1) from hemagglutinin__InfluenzaA__AFN19501

SEQ ID NO: 73507 - RNA, 1701 nt, Artificial Sequence; identical to SEQ ID NO: 71006
  derived and/or modified CDS sequence (opt1) from hemagglutinin__InfluenzaA__AFN19503

SEQ ID NO: 73508 - RNA, 1701 nt, Artificial Sequence; identical to SEQ ID NO: 73455
  derived and/or modified CDS sequence (opt1) from hemagglutinin__InfluenzaA__AFN19507

SEQ ID NO: 73509 - RNA, 1701 nt, Artificial Sequence; identical to SEQ ID NO: 73454
  derived and/or modified CDS sequence (opt1) from hemagglutinin__InfluenzaA__AFN19509

SEQ ID NO: 73510 - RNA, 1701 nt, Artificial Sequence; identical to SEQ ID NO: 73455
  derived and/or modified CDS sequence (opt1) from hemagglutinin__InfluenzaA__AFN19513

SEQ ID NO: 73511 - RNA, 1701 nt, Artificial Sequence; identical to SEQ ID NO: 73454
  derived and/or modified CDS sequence (opt1) from hemagglutinin__InfluenzaA__AFN19515

SEQ ID NO: 73512 - RNA, 1701 nt, Artificial Sequence; identical to SEQ ID NO: 73455
  derived and/or modified CDS sequence (opt1) from hemagglutinin__InfluenzaA__AFN19517

SEQ ID NO: 73513 - RNA, 1701 nt, Artificial Sequence; identical to SEQ ID NO: 73455
  derived and/or modified CDS sequence (opt1) from hemagglutinin__InfluenzaA__AFN19519

SEQ ID NO: 73514 - RNA, 1701 nt, Artificial Sequence; identical to SEQ ID NO: 73098
  derived and/or modified CDS sequence (opt1) from hemagglutinin__InfluenzaA__AFN19521

SEQ ID NO: 73515 - RNA, 1701 nt, Artificial Sequence; identical to SEQ ID NO: 73454
  derived and/or modified CDS sequence (opt1) from hemagglutinin__InfluenzaA__AFN19523

SEQ ID NO: 73516 - RNA, 1701 nt, Artificial Sequence
  derived and/or modified CDS sequence (opt1) from hemagglutinin__InfluenzaA__AFN19527
augaagaccaucaucgcccugagcuacacccucugccugguguucgcccagaagcugcccggcaacgacaacuccacggcgacccucugccuggggcaccacgccgucccgaacggcaccaucgugaagaccaucacgaacgaccagaucgaggugaccaacgccaccgagcugguccagaacagcuccaucggggagaucugcgacagcccccaccagauccucgacggcgagaacugcacccugaucgacgcccugcucggggacccccagugcgacggcuuccagaacaagaagugggaccuguucguggagcgcuccaaggccuacagcaacugcuaccccuacgacgugccggacuacgcgucccugcggagccucgucgccuccagcggcacgcuggaguucaacaacgaguccuucaacuggaccggggugacccagaacggcaccagcuccgccugcauccgccggagcaacuccagcuucuucucccgccugaacuggcucacgcaccugaacuucaaguaccccgcccugaacgugaccaugcccaacaacgagcaguucgacaagcucuacaucuggggcguccaccaccccgggaccgacaaggaccagaucuuccuguacgcgcagagcuccgggcggaucaccgugagcacgaagcgcagccagcaggccgugaucccgaacaucggcucccggccccgcauccggaacauccccagccgcaucuccaucuacuggaccaucgucaagcccggcgacauccugcucaucaacagcaccgggaaccugaucgccccgcggggcuacuucaagauccgcuccggcaagagcuccaucaugcggagcgacgcccccaucgggaagugcaacuccgagugcaucacccccaacggcagcauccccaacgacaagccguuccagaacgugaaccgcaucacguacggggccugcccccgguacgugaagcaguccacccugaagcucgcgaccggcaugcgcaacguccccgagaagcagacccgggggaucuucggcgccaucgccggguucaucgagaacggcugggagggcaugguggacgggugguacggcuuccgccaccagaacagcgaggggcggggccaggccgccgaccugaaguccacgcaggcggccaucgaccagaucaacgggaagcugaaccgccucaucggcaagaccaacgagaaguuccaccagaucgagaaggaguucagcgagguggagggccggauccaggaccuggagaaguacgucgaggacaccaagaucgaccugugguccuacaacgccgagcuccugguggcccuggagaaccagcacaccaucgaccucacggacagcgagaugaacaagcuguucgagaagaccaagaagcagcugcgcgagaacgccgaggacauggggaacggcugcuucaagaucuaccacaagugcgacaacgcgugcaucggguccauccgcaacggcaccuacgaccacgacguguaccgggacgaggcccucaacaaccgcuuccagaucaagggggucgagcucaagagcggcuacaaggacuggauccuguggaucuccuucgccaucagcugcuuccugcugugcguggcccugcucggcuucaucaugugggccugccagaaggggaacauccggugcaacaucugcaucuga

SEQ ID NO: 73517 - RNA, 1701 nt, Artificial Sequence
  derived and/or modified CDS sequence (opt1) from hemagglutinin__InfluenzaA__AFN19529
augaagaccaucaucgcccugagcuacauccucugccugguguucgcccagaagcugcccggcaacgacaacuccaccgcgacgcucugccuggggcaccacgccgucccgaacggcaccaucgugaagaccaucaccaacgaccagaucgaggugacgaacgccaccgagcugguccagaacagcuccaucggggagaucugcgacagcccccaccagauccucgacggcgagaacugcacccugaucgacgcccugcucggggacccccagugcgacggcuuccagaacaagaagugggaccuguucguggagcgcuccaaggccuacagcaacugcuaccccuacgacgugccggacuacgcgucccugcggagccucgucgccuccagcggcacccuggaguucaacaacgaguccuucaacuggacgggggugacccagaacggcaccagcuccgccugcauccgccggagcaacuccagcuucuucucccgccugaacuggcucacccaccugaacuucaaguaccccgcccugaacgugacgaugcccaacaacgagcaguucgacaagcucuacaucuggggcguccaccaccccgggaccgacaaggaccagaucuuccuguacgcgcagagcuccgggcggaucaccgugagcaccaagcgcagccagcaggccgugaucccgaacaucggcucccggccccgcauccggaacauccccagccgcaucuccaucuacuggacgaucgucaagcccggcgacauccugcucaucaacagcaccgggaaccugaucgccccgcggggcuacuucaagauccgcuccggcaagagcuccaucaugcggagcgacgcccccaucgggaagugcaacuccgagugcaucacccccaacggcagcauccccaacgacaagccguuccagaacgugaaccgcaucaccuacggggccugcccccgguacgugaagcaguccacgcugaagcucgcgaccggcaugcgcaacguccccgagaagcagacccgggggaucuucggcgccaucgccggguucaucgagaacggcugggagggcaugguggacgggugguacggcuuccgccaccagaacagcgaggggcggggccaggccgccgaccugaaguccacccaggcggccaucgaccagaucaacgggaagcugaaccgccucaucggcaagacgaacgagaaguuccaccagaucgagaaggaguucagcgagguggagggccggauccaggaccuggagaaguacgucgaggacaccaagaucgaccugugguccuacaacgccgagcuccugguggcccuggagaaccagcacaccaucgaccucaccgacagcgagaugaacaagcuguucgagaagacgaagaagcagcugcgcgagaacgccgaggacauggggaacggcugcuucaagaucuaccacaagugcgacaacgcgugcaucggguccauccgcaacggcaccuacgaccacgacguguaccgggacgaggcccucaacaaccgcuuccagaucaagggggucgagcucaagagcggcuacaaggacuggauccuguggaucuccuucgccaucagcugcuuccugcugugcguggcccugcucggcuucaucaugugggccugccagaaggggaacauccggugcaacaucugcaucuga

SEQ ID NO: 73518 - RNA, 1701 nt, Artificial Sequence; identical to SEQ ID NO: 73098
  derived and/or modified CDS sequence (opt1) from hemagglutinin__InfluenzaA__AFN19531

SEQ ID NO: 73519 - RNA, 1701 nt, Artificial Sequence; identical to SEQ ID NO: 73517
  derived and/or modified CDS sequence (opt1) from hemagglutinin__InfluenzaA__AFN19533

SEQ ID NO: 73520 - RNA, 1701 nt, Artificial Sequence
  derived and/or modified CDS sequence (opt1) from hemagglutinin__InfluenzaA__AFN19535
augaagaccaucaucgcccugagcuacauccucugccugguguucgcccagaagauccccggcaacgacaacuccaccgcgacgcugugccucgggcaccacgccgucccgaacggcaccaucgugaagaccaucaccaacgaccagaucgaggugacgaacgccaccgagcugguccagagcuccagcaccggggagaucugcgacagcccccaccagauccuggacggcgagaacugcacccucaucgacgcccugcugggggacccccagugcgacggcuuccagaacaagaagugggaccucuucguggagcgcuccaaggccuacuccaacugcuaccccuacgacgugccggacuacgcgagccugcggucccuggucgccagcuccggcacgcucgaguucaacaacgagagcuucaacuggaccggggugacccagaacggcaccuccagcgccugcauccgccgguccaacagcuccuucuucagccgccugaacuggcugacgcaccucaacuucaaguaccccgcccugaacgugaccaugcccaacaacgagcaguucgacaagcuguacaucuggggcguccaccaccccgggaccgacaaggaccagaucuuccucuacgcgcaguccagcgggcggaucaccgugagcacgaagcgcucccagcaggccgugaucccgaacaucggcagccggccccgcauccggaacauccccucccgcaucagcaucuacuggaccaucgucaagcccggcgacauccugcugaucaacuccaccgggaaccucaucgccccgcggggcuacuucaagauccgcagcgggaaguccagcaucaugcgguccgacgcccccaucggcaagugcaacagcgagugcaucacccccaacggcuccauccccaacgacaagccguuccagaacgugaaccgcaucacguacggggccugcccccgguacgugaagcagagcacccugaagcuggcgaccggcaugcgcaacguccccgagaagcagacccgggggaucuucggcgccaucgccggguucaucgagaacggcugggagggcaugguggacgggugguacggcuuccgccaccagaacuccgaggggcggggccaggccgccgaccucaagagcacgcaggcggccaucgaccagaucaacgggaagcugaaccgccugaucggcaagaccaacgagaaguuccaccagaucgagaaggaguucuccgagguggagggccggauccaggaccucgagaaguacgucgaggacaccaagaucgaccuguggagcuacaacgccgagcugcucguggcccuggagaaccagcacaccaucgaccugacggacuccgagaugaacaagcuguucgagaagaccaagaagcagcuccgcgagaacgccgaggacauggggaacggcugcuucaagaucuaccacaagugcgacaacgcgugcaucgggagcauccgcaacggcaccuacaaccacgacguguaccgggacgaggcccugaacaaccgcuuccagaucaagggggucgagcucaaguccggcuacaaggacuggauccuguggaucagcuucgccaucagcugcuuccugcucugcguggcccugcugggcuucaucaugugggccugccagaaggggaacauccggugcaacaucugcaucuga

SEQ ID NO: 73521 - RNA, 1701 nt, Artificial Sequence; identical to SEQ ID NO: 73098
  derived and/or modified CDS sequence (opt1) from hemagglutinin__InfluenzaA__AFN19537

SEQ ID NO: 73522 - RNA, 1701 nt, Artificial Sequence; identical to SEQ ID NO: 73098
  derived and/or modified CDS sequence (opt1) from hemagglutinin__InfluenzaA__AFN19539

SEQ ID NO: 73523 - RNA, 1701 nt, Artificial Sequence; identical to SEQ ID NO: 73098
  derived and/or modified CDS sequence (opt1) from hemagglutinin__InfluenzaA__AFN19543

SEQ ID NO: 73524 - RNA, 1701 nt, Artificial Sequence
  derived and/or modified CDS sequence (opt1) from hemagglutinin__InfluenzaA__AFN19545
augaagaccaucaucgcccugagcuacauccucugccugguguucgcccagaagcugcccggcuccgacaacagcaccgcgacgcucugccuggggcaccacgccgucccgaacggcaccaucgugaagaccaucaccaacgaccgcaucgaggugacgaacgccaccgagcugguccagaacuccagcaucggggagaucugcgacagcccccaccagauccucgacggcgagaacugcacccugaucgacgcccugcucggggacccccagugcgacggcuucaagaacaagaagugggaccuguucguggagcggagcaaggccuacuccaacugcuaccccuacgacgugccggacuacgcgagccugcgcucccucgucgccagcuccggcacccuggaguucaacaacgagagcuucaacuggacgggggugacccagaacggcaccuccagcgccugcauccggcgcuccaacaacagcuucuucucccggcugaacuggcucacccaccugaacuucaaguaccccgcccugaacgugacgaugcccaacaacgagcaguucgacaagcucuacaucuggggcguccaccaccccgggaccgacaaggaccagaucuuccuguacgcgcagagcuccgggcgcaucaccgugagcaccaagcggagccagcaggccgugaucccgaacaucggcucccgcccccggauccgcaacauccccagccggaucuccaucuacuggacgaucgucaagcccggcgacauccugcucaucaacagcaccgggaaccugaucgccccgcgcggcuacuucaagauccaguccgggaaguccuccaucaugcggagcgacgcccccaucggcaagugcaaguccgagugcaucacccccaacggcagcauccccaacgacaagccguuccagaacgugaaccgcaucaccuacggggccugcccccgguacgugaagcaguccacgcugaagcucgcgaccggcaugcgcaacguccccgagaagcagacccgggggaucuucggcgccaucgccggguucaucgagaacggcugggagggcaugguggacgggugguacggcuuccgccaccagaacagcgaggggcggggccaggccgccgaccugaaguccacccaggcggccaucgaccagaucaacgggaagcugaaccgccucaucggcaagacgaacgagaaguuccaccagaucgagaaggaguucagcgagguggagggccggauccaggaccuggagaaguacgucgaggacaccaagaucgaccugugguccuacaacgccgagcuccugguggcccuggagaaccagcacaccaucgaccucaccgacagcgagaugaacaagcuguucgagaagacgaagaagcagcugcgcgagaacgccgaggacauggggaacggcugcuucaagaucuaccacaagugcgacaacgcgugcaucggguccauccgcaacggcaccuacgaccacgacguguaccgggacgaggcccucaacaaccgcuuccagaucaagggggucgagcucaagagcggcuacaaggacuggauccuguggaucuccuucgccaucagcugcuuccugcugugcguggcccugcucggcuucaucaugugggccugccagaaggggaacauccggugcaacaucugcaucuga

SEQ ID NO: 73525 - RNA, 1701 nt, Artificial Sequence; identical to SEQ ID NO: 73098
  derived and/or modified CDS sequence (opt1) from hemagglutinin__InfluenzaA__AFN19547

SEQ ID NO: 73526 - RNA, 1701 nt, Artificial Sequence
  derived and/or modified CDS sequence (opt1) from hemagglutinin__InfluenzaA__AFN19549
augaagaccaucaucgcccugagcuacauccucugccugguguucgcccagaagcugcccggcaacgacaacuccaccgcgacgcucugccuggggcaccacgccgucccgaacggcaccaucgugaagaccaucaccaacgaccagaucgaggugacgaacgccaccgagcugguccagagcuccagcaagggggagaucugcaacagcccccaccagauccucgacggcgggaacugcacccugaucgacgcccugcucggcgacccccagugcgacggcuuccagaacaagaagugggaccuguucguggagcgcuccaaggcccacuccaacugcuaccccuacgacgugccggacuacgcgagccugcggucccucgucgccagcuccgggacccuggaguucaacaacgagagcuucaacuggacgggcgugacccagaacgggaccuccagcgccugcaugcgccgguccaacaacagcuucuucucccgccugaacuggcucacccaccugaacuucaaguaccccgcccugaacgugacgaugcccaacaacgagcaguucgacaagcucuacaucuggggcguccaccaccccgggaccgacaaggaccagaucuuccuguacgcgcaggccagcggccggaucaccguguccaccaagcgcagccagcaggccgugaucccgaacaucggcagccggccccgcguccggaacauccccucccgcgugagcaucuacuggacgaucgugaagcccggggacauccugcucaucaacuccaccggcaaccugaucgccccgcggggguacuucaagauccgcagcggcaaguccagcaucaugcgguccgacgcccccaucggcaagugcaacagcgcgugcaucacccccaacggguccauccccaacgacaagccguuccagaacgucaaccgcaucaccuacggcgccugcccccgguacgugaagcagaacacgcugaagcucgccaccgggaugcgcaacgugcccgagaagcagacccggggcaucuucggggccaucgccggcuucaucgagaacggcugggaggggauggucgacggcugguacggguuccgccaccagaacagcgagggccgggggcaggcggccgaccugaaguccacccaggccgccaucgaccagaucaacggcaagcugaaccgccucaucggcaagacgaacgagaaguuccaccagaucgagaaggaguucagcgagguggaggggcggauccaggacaucgagaaguacguggaggacaccaagaucgaccugugguccuacaacgccgagcugcucgucgcgcuggagaaccagcacaccaucgaccugaccgacagcgagaugaacaagcuguucgagaagacgaagaagcagcuccgcgagaacgccgaggacaugggcaacgggugcuucaagaucuaccacaagugcgacaacgccugcaucggcuccauccgcaacgggaccuacgaccacgacguguaccgggacgaggcccugaacaaccgcuuccagaucaagggcguggagcucaagagcggcuacaaggacuggauccuguggaucuccuucgccaucagcugcuuccugcucugcgucgcgcugcugggguucaucaugugggccugccagaagggcaacauccggugcaacaucugcaucuga

SEQ ID NO: 73527 - RNA, 1701 nt, Artificial Sequence
  derived and/or modified CDS sequence (opt1) from hemagglutinin__InfluenzaA__AFN19551
augaagaccaucaucgcccugagcuacauccucugccugguguucgcccagaagauccccggcaacgacaacuccaccgcgacgcugugccucgggcaccacgccgucccgaacggcaccaucgugaagaccaucaccaacgaccagaucgaggugacgaacgccaccgagcugguccagagcuccagcaccggggagaucugcgacagcccccaccagauccuggacggcgagaacugcacccucaucgacgcccugcugggggacccccacugcgacggcuuccagaacaagaagugggaccucuucguggagcgcuccaaggccuacuccaacugcuaccccuacgacgugccggacuacgcgagccugcggucccuggucgccagcuccggcacgcucgaguucaacaacgagagcuucaacuggaccggggugacccagaacggcaccuccagcgccugcauccgccgguccaacagcuccuucuucagccgccugaacuggcugacgcaccucaacuucaaguaccccgcccugaacgugaccaugcccaacaacgagcaguucgacaagcuguacaucuggggcguccaccaccccgggaccgacaaggaccagaucuuccucuacgcgcaguccagcgggcggaucaccgugagcacgaagcgcucccagcaggccgugaucccgaacaucggcagccggccccgcauccggaacauccccucccgcaucagcaucuacuggaccaucgucaagcccggcgacauccugcugaucaacuccaccgggaaccucaucgccccgcggggcuacuucaagauccgcagcgggaaguccagcaucaugcgguccgacgcccccaucggcaagugcaacagcgagugcaucacccccaacggcuccauccccaacgacaagccguuccagaacgugaaccgcaucacguacggggccugcccccgguacgugaagcagagcacccugaagcuggcgaccggcaugcgcaacguccccgagaagcagacccgggggaucuucggcgccaucgccggguucaucgagaacggcugggagggcaugguggacgggugguacggcuuccgccaccagaacuccgaggggcggggccaggccgccgaccucaagagcacgcaggcggccaucgaccagaucaacgggaagcugaaccgccugaucggcaagaccaacgagaaguuccaccagaucgagaaggaguucuccgagguggagggccggauccaggaccucgagaaguacgucgaggacaccaagaucgaccuguggagcuacaacgccgagcugcucguggcccuggagaaccagcacaccaucgaccugacggacuccgagaugaacaagcuguucgagaagaccaagaagcagcuccgcgagaacgccgaggacauggggaacggcugcuucaagaucuaccacaagugcgacaacgcgugcaucgggagcauccgcaacggcaccuacaaccacgacguguaccgggacgaggcccugaacaaccgcuuccagaucaagggggucgagcucaaguccggcuacaaggacuggauccuguggaucagcuucgccaucagcugcuuccugcucugcguggcccugcugggcuucaucaugugggccugccagaaggggaacauccggugcaacaucugcaucuga

SEQ ID NO: 73528 - RNA, 1701 nt, Artificial Sequence; identical to SEQ ID NO: 73477
  derived and/or modified CDS sequence (opt1) from hemagglutinin__InfluenzaA__AFN19553

SEQ ID NO: 73529 - RNA, 1701 nt, Artificial Sequence; identical to SEQ ID NO: 73477
  derived and/or modified CDS sequence (opt1) from hemagglutinin__InfluenzaA__AFN19555

SEQ ID NO: 73530 - RNA, 1701 nt, Artificial Sequence; identical to SEQ ID NO: 73098
  derived and/or modified CDS sequence (opt1) from hemagglutinin__InfluenzaA__AFN19557

SEQ ID NO: 73531 - RNA, 1701 nt, Artificial Sequence; identical to SEQ ID NO: 73477
  derived and/or modified CDS sequence (opt1) from hemagglutinin__InfluenzaA__AFN19559

SEQ ID NO: 73532 - RNA, 1701 nt, Artificial Sequence; identical to SEQ ID NO: 73485
  derived and/or modified CDS sequence (opt1) from hemagglutinin__InfluenzaA__AFN19561

SEQ ID NO: 73533 - RNA, 1701 nt, Artificial Sequence
  derived and/or modified CDS sequence (opt1) from hemagglutinin__InfluenzaA__AFN19563
augaagaccaucaucgcccugagcuacauccucugccugguguucgcccagaagcugcccggcaacgacaacuccaccgcgacgcucugccuggggcaccacgccgucccgaacggcaccaucgugaagaccaucaccaacgaccgcaucgaggugacgaacgccaccgagcugguccagaacagcuccaucggggagaucugcgacagcccccaccagauccucgacggcgagaacugcacccugaucgacgcccugcucggggacccccagugcgacggcuuccagaacaagaagugggaccuguucguggagcgguccaaggccuacagcaacugcuaccccuacgacgugccggacuacgcgucccugcgcagccucgucgccuccagcggcacccuggaguucaacaacgaguccuucaacuggacgggggugacccagaacggcaccagcuccgccugcauccggcgcagcaacaacuccuucuucagccggcugaacuggcucacccaccugaacuucaaguaccccgcccugaacgugacgaugcccaacaacgagcaguucgacaagcucuacaucuggggcguccaccaccccgggaccgacaaggaccagaucuuccuguacgcgcaguccagcgggcgcaucaccguguccaccaagcggagccagcaggccgugaucccgaacaucggcagccgcccccggauccgcaacauccccucccggaucagcaucuacuggacgaucgucaagcccggcgacauccugcucaucaacuccaccgggaaccugaucgccccgcgcggcuacuucaagauccggagcgggaaguccagcaucaugcgcuccgacgcccccaucggcaagugcaagagcgagugcaucacccccaacggcuccauccccaacgacaagccguuccagaacgugaaccggaucaccuacggggccugcccccgcuacgugaagcagagcacgcugaagcucgcgaccggcaugcggaacguccccgagaagcagacccgcgggaucuucggcgccaucgccggguucaucgagaacggcugggagggcaugguggacgggugguacggcuuccggcaccagaacuccgaggggcgcggccaggccgccgaccucaagagcacccaggcggccaucgaccagaucaacgggaagcugaaccggcugaucggcaagacgaacgagaaguuccaccagaucgagaaggaguucuccgagguggagggccgcauccaggaccuggagaaguacgucgaggacaccaagaucgaccuguggagcuacaacgccgagcuccugguggcccuggagaaccagcacaccaucgaccucaccgacuccgagaugaacaagcuguucgagaagacgaagaagcagcugcgcgagaacgccgaggacauggggaacggcugcuucaagaucuaccacaagugcgacaacgcgugcaucgggagcauccggaacggcaccuacgaccacgacguguaccgcgacgaggcccucaacaaccgguuccagaucaagggggucgagcugaaguccggcuacaaggacuggauccuguggaucagcuucgccaccuccugcuuccuccugugcguggcccugcucggcuucaucaugugggccugccagaaggggaacauccgcugcaacaucugcaucuga

SEQ ID NO: 73534 - RNA, 1701 nt, Artificial Sequence; identical to SEQ ID NO: 73455
  derived and/or modified CDS sequence (opt1) from hemagglutinin__InfluenzaA__AFN19565

SEQ ID NO: 73535 - RNA, 1701 nt, Artificial Sequence
  derived and/or modified CDS sequence (opt1) from hemagglutinin__InfluenzaA__AFN19567
augaagaccaucaucgcccugagcuacauccucugccugguguucgcccagaagauccccggcaacgacaacuccaccgcgacgcugugccucgggcaccacgccgucccgaacggcaccaucgugaagaccaucaccaacgaccgcaucgaggugacgaacgccaccgagcugguccagaacagcuccaucggggagaucugcgacagcccccaccagauccuggacggcgagaacugcacccucaucgacgcccugcugggggacccccagugcgacggcuuccagaacaagaagugggaccucuucguggagcgguccaaggccuacagcaacugcuaccccuacgacgugccggacuacgcgucccugcgcagccuggucgccuccagcggcacccucgaguucaacaacgaguccuucaacuggacgggggugacccagaacggcaccagcuccgccugcauccggcgcagcaacaacuccuucuucagccggcugaacuggcugacccaccucaacuucaaguaccccgcccugaacgugacgaugcccaacaacgagcaguucgacaagcuguacaucuggggcguccaccaccccgggaccgacaaggaccagaucuuccucuacgcgcaguccagcgggcgcaucaccguguccaccaagcggagccagcaggccgugaucccgaacaucggcagccgcccccggauccgcaacauccccucccggaucagcaucuacuggacgaucgucaagcccggcgacauccugcugaucaacuccaccgggaaccucaucgccccgcgcggcuacuucaagauccggagcgggaaguccagcaucaugcgcuccgacgcccccaucggcaagugcaagagcgagugcaucacccccaacggcuccauccccaacgacaagccguuccagaacgugaaccggaucaccuacggggccugcccccgcuacgugaagcagagcacgcugaagcuggcgaccggcaugcggaacguccccgagaagcagacccgcgggaucuucggcgccaucgccggguucaucgagaacggcugggagggcaugguggacgggugguacggcuuccggcaccagaacuccgaggggcgcggccaggccgccgaccucaagagcacccaggcggccaucgaccagaucaacgggaagcugaaccggcugaucggcaagacgaacgagaaguuccaccagaucgagaaggaguucuccgagguggagggccgcauccaggaccucgagaaguacgucgaggacaccaagaucgaccuguggagcuacaacgccgagcugcucguggcccuggagaaccagcacaccaucgaccugaccgacuccgagaugaacaagcuguucgagaagacgaagaagcagcuccgcgagaacgccgaggacauggggaacggcugcuucaagaucuaccacaagugcgacaacgcgugcaucgggagcauccggaacggcaccuacgaccacgacguguaccgcgacgaggcccugaacaaccgguuccagaucaagggggucgagcucaaguccggcuacaaggacuggauccuguggaucagcuucgccaucuccugcuuccugcucugcguggcccugcugggcuucaucaugugggccugccagaaggggaacauccgcugcaacaucugcaucuga

SEQ ID NO: 73536 - RNA, 1701 nt, Artificial Sequence; identical to SEQ ID NO: 73098
  derived and/or modified CDS sequence (opt1) from hemagglutinin__InfluenzaA__AFN19569

SEQ ID NO: 73537 - RNA, 1701 nt, Artificial Sequence
  derived and/or modified CDS sequence (opt1) from hemagglutinin__InfluenzaA__AFN19571
augaagaccaucaucgcccugagcuacauccucugccugguguucgcccagaagcugcccggcaacgacaacuccaccgcgacgcucugccuggggcaccacgccgucccgaacggcaccaucgugaagaccaucaccaacgaccagaucgaggugacgaacgccaccgagcugguccagagcuccagcaccggggagaucugcgacagcccccaccagauccucgacggcgagaacugcacccugaucgacgcccugcucggggacccccagugcgacggcuuccagaacaagaagugggaccuguucguggagcgcagcaaggccuacuccaacugcuaccccuacgacgugccggacuacgcgagccugcggucccucgucgccagcuccggcacgcuggaguucaacaacgagagcuucaacuggaccggggugacccagaacggcaccuccagcgccugcauccgccgguccaacagcuccuucuucagccgccugaacuggcucacgcaccugaacuucaaguaccccgcccugaacgugaccaugcccaacaacgagcaguucgacaagcucuacaucuggggcguccaccaccccgggaccgacaaggaccagaucuuccuguacucccagagcagcgggcggaucaccguguccacgaagcgcagccagcaggcggugaucccgaacaucggcucccggccccgcauccggaacauccccagccgcaucuccaucuacuggaccaucgucaagcccggcgacauccugcucaucaacagcaccgggaaccugaucgccccgcggggcuacuuccgcauccgguccgggaaguccuccaucaugcgcagcgacgcccccaucggcaagugcaacuccgagugcaucacccccaacggcagcauccccaacgacaagccguuccagaacgugaaccggaucacguacgggcccugcccccgcuacgugaagcaguccacccugaagcucgccaccggcaugcggaacguccccgagaagcagacccgcgggaucuucggcgccaucgcgggguucaucgagaacggcugggagggcaugguggacgggugguacggcuaccggcaccagaacagcgaggggcgcggccaggccgccgaccugaaguccacgcaggccgccaucgaccagaucaacgggaagcugaaccggcucaucggcaagaccaacgagaaguuccaccagaucgagaaggaguucagcgagguggagggccgcauccaggaccuggagaaguacgucgaggacaccaagaucgaccuguggaccuacaacgcggagcuccugguggcccuggagaaccagcacacgaucgaccucaccgacuccgagaugaacaagcuguucgagaagaccaagaagcagcugcgcgagaacgccgaggacauggggaacggcugcuucaagaucuaccacaagugcgacaacgccugcaucgggagcauccggaacggcaccuacaaccacgacguguaccgcgacgaggcccucaacaaccgguuccagaucaagggggucgagcugaaguccggcuacaaggacuggauccuguggaucagcuucgcgaucagcugcuuccuccugugcguggcccugcucggcuucaucaugugggccugccagaaggggaacauccgcugcaacaucugcaucuga

SEQ ID NO: 73538 - RNA, 1701 nt, Artificial Sequence
  derived and/or modified CDS sequence (opt1) from hemagglutinin__InfluenzaA__AFN19573
augaagaccaucaucgcccugagcuacauccucugccugguguucgcccagaagcugcccggcaacgacaacuccaccgcgacgcucugccuggggcaccacgccgucccgaacggcaccaucgugaagaccaucaccaacgaccagaucgaggugacgaacgccaccgagcugguccagagcuccagcaccgggaagaucugcgacagcccccaccagauccucgacggcaagaacugcacccugaucgacgcccugcucggggacccccagugcgacggcuuccagaacaagaagugggaccuguucguggagcgcagcaaggccuacuccaacugcuaccccuacgacgugccggacuacgcgagccugcggucccucgucgccagcuccggcacgcuggaguucaacaacgagagcuucaacuggaccggggugacccagaacggcaccuccagcgccugcauccgccgguccaagaacagcuucuucucccgccugaacuggcucacgcaccugaacuucaaguacagcgcccugaacgugaccaugcccaacaaggagcaguucgacaagcucuacaucuggggcguccaccaccccgggaccgacaaggaccagaucucccuguacgcgcaggccagcgggcggaucaccgugagcacgaagcgcucccagcagaccgugauccccaacaucggcagccggccgcgcguccggaacauccccucccgcaucagcaucuacuggaccaucgugaagcccggcgacauccugcucaucaacuccaccgggaaccugaucgcgccccggggcuacuucaagaugcagagcgggaaguccagcaucaugcgcuccgacgccccgaucggcaagugcaacagcgagugcaucacgcccaacggcuccauccccaacgacaagcccuuccagaacgugaaccggaucaccuacggggccugcccgcgcuacgucaagcagaacacccugaagcucgccaccggcaugcggaacgugcccgagaagcagacgcgcgggaucuucggcgccaucgccggguucaucgagaacggcugggagggcaugguggacgggugguacggcuuccggcaccagaacagcgaggggcgcggccaggccgccgaccugaaguccacccaggcggccaucgaccagaucaacgggaagcugaaccggcucaucggcaagaccaacgagaaguuccaccagaucgagaaggaguucagcgaggucgagggccgcauccaggaccuggagaaguacguggaggacaccaagaucgaccugugguccuacaacgccgagcuccugguggcccuggagaaccagcacacgaucgaccucaccgacagcgagaugaacaagcuguucgagaagaccaagaagcagcugcgggagaacgccgaggacauggggaacggcugcuucaagaucuaccacaagugcgacaacgcgugcaucggguccauccgcaacggcaccuacgaccacgacgucuaccgcgacgaggcccucaacaaccgguuccagaucaaggggguggagcugaaguccggcuacaaggacuggauccuguggaucuccuucgccaucagcugcuuccuccugugcguggcccugcucggcuucaucaugugggccugccagaaggggaacauccgcugcaacaucugcaucuga

SEQ ID NO: 73539 - RNA, 1701 nt, Artificial Sequence
  derived and/or modified CDS sequence (opt1) from hemagglutinin__InfluenzaA__AFN19575
augaagaccaucaucgcccugagcuacauccucugccugguguucgcccagaagcugcccggcaacgacaacuccaccgcgacgcucugccuggggcaccacgccgucccgaacggcaccaucgugaagaccaucaccaacgaccagaucgaggugacgaacgccaccgagcugguccagagcuccagcaccggggagaucugcgacaacccccaccagauccucgacggcgagaacugcacccugaucgacgcccugcucggggacccccagugcgacggcuuccagaacaagaagugggaccuguucguggagcgcuccaaggccuacagcaacugcuaccccuacgacgugccggacuacgcgucccugcggagccucgucgccuccagcggcacgcuggaguucaacaacgaguccuucaacuggaccggggugacccagaacggcaccagcuccgccugcauccgccggagcaacaacuccuucuucagccgccugaacuggcucacgcaccugaacuucaaguaccccgcccugaacgugaccaugcccaacaacgagcaguucgacaagcucuacaucuggggcguccaccaccccgggaccgacaaggaccagaucuuccuguacgcgcaguccagcgggcggaucaccguguccacgaagcgcagccagcaggccgugaucccgaacaucggcagccggccccgcguccggaacauccccucccgcaucagcaucuacuggaccaucgugaagcccggcgacauccugcucaucaacuccaccgggaaccugaucgccccgcggggcuacuucaagauccgcagcgggaaguccagcaucaugcgguccgacgcccccaucggcaagugcaacagcgagugcaucacccccaacggcuccauccccaacgacaagccguuccagaacgugaaccgcaucacguacggggccugcccccgguacgucaagcagagcacccugaagcucgcgaccggcaugcgcaacgugcccgagaagcagacccgggggaucuucggcgccaucgccggguucaucgagaacggcugggagggcaugguggacgggugguacggcuuccgccaccagaacuccgaggggcggggccaggccgccgaccucaagagcacgcaggcggccaucgaccagaucaacgggaagcugaaccgccugaucggcaagaccaacgagaaguuccaccagaucgagaaggaguucuccgaggucgagggccggauccaggaccuggagaaguacguggaggacaccaagaucgaccuguggagcuacaacgccgagcuccugguggcccuggagaaccagcacaccaucgaccucacggacuccgagaugaacaagcuguucgagaagaccaagaagcagcugcgcgagaacgccgaggacauggggaacggcugcuucaagaucuaccacaagugcgacaacgcgugcaucgggagcauccgcaacggcaccuacgaccacgacgucuaccgggacgaggcccucaacaaccgcuuccagaucaaggggguggagcugaaguccggcuacaaggacuggauccuguggaucagcuucgccaucuccugcuuccuccugugcguggcccugcucggcuucaucaugugggccugccagaaggggaacauccggugcaacaucugcaucuga

SEQ ID NO: 73540 - RNA, 1701 nt, Artificial Sequence; identical to SEQ ID NO: 73454
  derived and/or modified CDS sequence (opt1) from hemagglutinin__InfluenzaA__AFN19577

SEQ ID NO: 73541 - RNA, 1701 nt, Artificial Sequence; identical to SEQ ID NO: 73454
  derived and/or modified CDS sequence (opt1) from hemagglutinin__InfluenzaA__AFN19579

SEQ ID NO: 73542 - RNA, 1701 nt, Artificial Sequence; identical to SEQ ID NO: 73454
  derived and/or modified CDS sequence (opt1) from hemagglutinin__InfluenzaA__AFN19581

SEQ ID NO: 73543 - RNA, 1701 nt, Artificial Sequence; identical to SEQ ID NO: 73454
  derived and/or modified CDS sequence (opt1) from hemagglutinin__InfluenzaA__AFN19583

SEQ ID NO: 73544 - RNA, 1701 nt, Artificial Sequence
  derived and/or modified CDS sequence (opt1) from hemagglutinin__InfluenzaA__AFN19587
augaagaccaucaucgcccugagcuacauccucugccugguguucgcccagaagcugcccgagaacgacaacuccaccgcgacgcucugccugggccaccacgccgucccgaacgggaccaucgugaagaccaucaccaacgaccagaucgaggugacgaacgccaccgagcugguccagagcuccagcaccggcgagaucugcgacagcccccaccagauccucgacggggugaacugcacccugaucgacgcccugcucggcgacccccagugcgacggguuccagaacaagaagugggaccuguucguggagcgcagcaaggccuacuccaacugcuaccccuacgacgucccggacuacgcgagccugcggucccucguggccagcuccggcacgcuggaguucaacaacgagagcuucaacuggaccggcgugacccagaacgggaccuccagcgccugcauccgccgguccaacagcuccuucuucagccgccugaacuggcucacgcaccugaacuucaaguaccccgcccugaacgucaccaugcccaacaacgagcaguucgacaagcucuacaucuggggcgugcaccaccccgggaccgacaaggaccagaucuuccuguacgcgcaguccagcggccggaucaccgugagcacgaagcgcucccagcaggccgucaucccgaacaucgggagccggccccgcauccggaacauccccucccgcaucagcaucuacuggaccaucgugaagcccggcgacauccugcucaucaacuccaccggcaaccugaucgccccgcggggguacuucaagauccgcagcggcaaguccagcaucaugcgguccgacgcccccaucgggaagugcaacagcgagugcaucacccccaacggcuccauccccaacgacaagccguuccagaacgugaaccgcaucacguacggcgccugcccccgguacgucaagcagagcacccugaagcucgcgaccgggaugcgcaacgugcccgagaagcagacccggggcaucuucggggccaucgccggcuucaucgagaacgggugggagggcaugguggacggcugguacggguuccgccaccagaacuccgagggccgggggcaggccgccgaccugaaguccacgcaggcggccaucgaccagaucaacggcaagcugaaccgccucaucgggaagaccaacgagaaguuccaccagaucgagaaggaguucuccgaggucgagggccggauccaggaccuggagaaguacguggaggacaccaagaucgaccuguggagcuacaacgccgagcuccugguggcccuggagaaccagcacaccaucgaccucacggacuccgagaugaacaagcuguucgagaagaccaagaagcagcugcgcgagaacgccgaggacaugggcaacgggugcuucaagaucuaccacgagugcgacaacgcgugcaucggcagcauccgcaacgggaccuacaaccacgacgucuaccgggacgaggcccucaacaaccgcuuccagaucaagggcguggagcugaaguccggguacaaggacuggauccuguggaucagcuucgccaucagcugcuuccuccugugcguggcccugcucggcuucaucaugugggccugccagaagggcaacauccggugcaacaucugcaucuga

SEQ ID NO: 73545 - RNA, 1701 nt, Artificial Sequence; identical to SEQ ID NO: 73454
  derived and/or modified CDS sequence (opt1) from hemagglutinin__InfluenzaA__AFN19589

SEQ ID NO: 73546 - RNA, 1701 nt, Artificial Sequence
  derived and/or modified CDS sequence (opt1) from hemagglutinin__InfluenzaA__AFN19591
augaagaccaucaucgcccugagcuacauccucugccugguguucgcccagaagcugcccggcaacgacaacuccaccgcgacgcucugccuggggcaccacgccgucccgaacggcaccaucgugaagaccaucaccaacgaccagaucgaggugacgaacgccaccgagcugguccagaacagcuccaucggggagaucugcgacagcccccaccagauccucgacggcgagaacugcacccugaucgacgcccugcucggggacccccagugcgacggcuuccagaacaagaagugggaccuguucguggagcgcuccaaggccuacagcaacugcuaccccuacgacgugccggacuacgcgucccugcggagccucgucgccuccagcggcacccuggaguucaacaacgaguccuucaacuggacgggggugacccagaacggcaccagcuccgccugcaugcgccggagcaacuccagcuucuucucccgccugaacuggcucacccaccugaacuucaaguaccccgcccugaacgugacgaugcccaacaacgagcaguucgacaagcucuacaucuggggcguccaccaccccgggaccgacaaggaccagaucuuccuguacgcgcagagcuccgggcggaucaccgugagcaccaagcgcagccagcaggccgugaucccgaacaucggcucccggccccgcauccggaacauccccagccgcaucuccaucuacuggacgaucgucaagcccggcgacauccugcucaucaacagcaccgggaaccugaucgccccgcggggcuacuucaagauccgcuccggcaagagcuccaucaugcggagcgacgcccccaucgggaagugcaacuccgagugcaucacccccaacggcagcauccccaacgacaagccguuccagaacgugaaccgcaucaccuacggggccugcccccgguacgugaagcaguccacgcugaagcucgcgaccggcaugcgcaacguccccgagaagcagacccgggggaucuucggcgccaucgccggguucaucgagaacggcugggagggcaugguggacgggugguacggcuuccgccaccagaacagcgaggggcggggccaggccgccgaccugaaguccacccaggcggccaucgaccagaucaacgggaagcugaaccgccucaucggcaagacgaacgagaaguuccaccagaucgagaaggaguucagcgagguggagggccggauccaggaccuggagaaguacgucgaggacaccaagaucgaccugugguccuacaacgccgagcuccugguggcccuggagaaccagcacaccaucgaccucaccgacagcgagaugaacaagcuguucgagaagacgaagaagcagcugcgcgagaacgccgaggacauggggaacggcugcuucaagaucuaccacaagugcgacaacgcgugcaucggguccauccgcaacggcaccuacgaccacgacguguaccgggacgaggcccucaacaaccgcuuccagaucaagggggucgagcucaagagcggcuacaaggacuggauccuguggaucuccuucgccaucagcugcuuccugcugugcguggcccugcucggcuucaucaugugggccugccagaacgggaacauccggugcaacaucugcaucuga

SEQ ID NO: 73547 - RNA, 1701 nt, Artificial Sequence; identical to SEQ ID NO: 73454
  derived and/or modified CDS sequence (opt1) from hemagglutinin__InfluenzaA__AFN19593

SEQ ID NO: 73548 - RNA, 1701 nt, Artificial Sequence; identical to SEQ ID NO: 73455
  derived and/or modified CDS sequence (opt1) from hemagglutinin__InfluenzaA__AFN19595

SEQ ID NO: 73549 - RNA, 1701 nt, Artificial Sequence; identical to SEQ ID NO: 73455
  derived and/or modified CDS sequence (opt1) from hemagglutinin__InfluenzaA__AFN19599

SEQ ID NO: 73550 - RNA, 1701 nt, Artificial Sequence; identical to SEQ ID NO: 73517
  derived and/or modified CDS sequence (opt1) from hemagglutinin__InfluenzaA__AFN19601

SEQ ID NO: 73551 - RNA, 1701 nt, Artificial Sequence; identical to SEQ ID NO: 73098
  derived and/or modified CDS sequence (opt1) from hemagglutinin__InfluenzaA__AFN19607

SEQ ID NO: 73552 - RNA, 1701 nt, Artificial Sequence; identical to SEQ ID NO: 73454
  derived and/or modified CDS sequence (opt1) from hemagglutinin__InfluenzaA__AFN19609

SEQ ID NO: 73553 - RNA, 1701 nt, Artificial Sequence
  derived and/or modified CDS sequence (opt1) from hemagglutinin__InfluenzaA__AFN19611
augaagaccaucaucgcccugagcuacauccucugccugguguucgcccagaagcugcccggcaacgacaacuccaccgcgacgcucugccuggggcaccacgccgucccgaacggcaccaucgugaagaccaucaccaacgaccagaucgaggugacgaacgccaccgagcugguccagaacagcuccaucggggagaucugcgacagcccccaccagauccucgacggcgagaacugcacccugaucgacgcccugcucggggacccccagugcgacggcuuccagaacaagaagugggaccuguucguggagcgcuccaaggccuacagcaacugcuaccccuacgacgugccggacuacgcgucccugcggagccucgucgccuccagcggcacccuggaguucaacaacgaguccuucaacuggacgggggugacccagaacggcaccagcuccgccugcauccgccggagcaacaacuccuucuucagccgccugaacuggcucacccaccugaacuucaaguaccccgcccugaacgugacgaugcccaacaacgagcaguucgacaagcucuacaucuggggcguccaccaccccgggaccgacaaggaccagaucuuccuguacgcgcaguccagcgggcggaucaccguguccaccaagcgcagccagcaggccgugaucccgaacaucggcagccggccccgcauccggaacauccccucccgcaucagcaucuacuggacgaucgucgagcccggcgacauccugcucaucaacuccaccgggaaccugaucgccccgcggggcuacuucaagauccgcagcgggaaguccagcaucaugcgguccgacgcccccaucggcaagugcaacagcgagugcaucacccccaacggcuccauccccaacgacaagccguuccagaacgugaaccgcaucaccuacggggccugcccccgguacgugaagcagagcacgcugaagcucgcgaccggcaugcgcaacguccccgagaagcagacccgggggaucuucggcgccaucgccggguucaucgagaacggcugggagggcaugguggacgggugguacggcuuccgccaccagaacuccgaggggcggggccaggccgccgaccucaagagcacccaggcggccaucgaccagaucaacgggaagcugaaccgccugaucggcaagacgaacgagaaguuccaccagaucgagaaggaguucuccgagguggagggccggauccaggaccuggagaaguacgucgaggacaccaagaucgaccuguggagcuacaacgccgagcuccugguggcccuggagaaccagcacaccaucgaccucaccgacuccgagaugaacaagcuguucgagaagacgaagaagcagcugcgcgagaacgccgaggacauggggaacggcugcuucaagaucuaccacaagugcgacaacgcgugcaucgggagcauccgcaacggcaccuacgaccacgacguguaccgggacgaggcccucaacaaccgcuuccagaucaagggggucgagcugaaguccggcuacaaggacuggauccuguggaucagcuucgccaucuccugcuuccuccugugcguggcccugcucggcuucaucaugugggccugccagaaggggaacauccggugcaacaucugcaucuga

SEQ ID NO: 73554 - RNA, 1701 nt, Artificial Sequence; identical to SEQ ID NO: 73477
  derived and/or modified CDS sequence (opt1) from hemagglutinin__InfluenzaA__AFN19613

SEQ ID NO: 73555 - RNA, 1701 nt, Artificial Sequence; identical to SEQ ID NO: 73455
  derived and/or modified CDS sequence (opt1) from hemagglutinin__InfluenzaA__AFN19617

SEQ ID NO: 73556 - RNA, 1701 nt, Artificial Sequence
  derived and/or modified CDS sequence (opt1) from hemagglutinin__InfluenzaA__AFN19619
augaagaccaucaucgcccugagccacauccucugccugguguucgcccagaagcugcccggcaacgacaacuccaccgcgacgcucugccuggggcaccacgccgucccgaacggcaccaucgugaagaccaucaccaacgaccagaucgaggugacgaacgccaccgagcugguccagagcuccagcaccggggagaucugcgacagcccccaccagauccucgacggcgagaacugcacccugaucgacgcccugcucggggacccccagugcgacggcuuccagaacaagaagugggaccuguucguggagcgcagcaaggccuacuccaacugcuaccccuacgacgugccggacuacgcgagccugcggucccucgucgccagcuccggcacgcuggaguucaacaacgagagcuucaacuggaccggggugacccagaacggcaccuccagcgccugcauccgccgguccaacagcuccuucuucagccgccugaacuggcucacgcaccugaacuucaaguaccccgcccugaacgugaccaugcccaacaacgagcaguucgacaagcucuacaucuggggcguccaccaccccgggaccgacaaggaccagaucuuccuguacgcgcaguccagcgggcggaucaccgugagcacgaagcgcucccagcaggccgugaucccgaacaucggcagcaagccccggauccgcaacauccccucccggaucagcaucuacuggaccaucgucaagcccggcgacauccugcucaucaacuccaccgggaaccugaucgccccgcgcggcuacuucaagauccggagcgggaaguccagcaucaugcgcuccgacgcccccaucggcaagugcaacagcgagugcaucacccccaacggcuccauccccaacgacaagccguuccagaacgugaaccggaucacguacggggccugcccccgcuacgugaagcagagcacccugaagcucgcgaccggcaugcggaacguccccgagaagcagacccgcgggaucuucggcgccaucgccggguucaucgagaacggcugggagggcaugguggacgggugguacggcuuccggcaccagaacuccgaggggcgcggccaggccgccgaccugaaguccacgcaggcggccaucgaccagaucaacgggaagcugaaccggcucaucggcaagaccaacgagaaguuccaccagaucgagaaggaguucuccgagguggagggccgcauccaggaccuggagaaguacgucgaggacaccaagaucgaccuguggagcuacaacgccgagcuccugguggcccuggagaaccagcacaccaucgaccucacggacuccgagaugaacaagcuguucgagaagaccaagaagcagcugcgggagaacgccgaggacauggggaacggcugcuucaagaucuaccacaagugcgacaacgcgugcaucgggagcauccgcaacggcaccuacaaccacgacguguaccgcgacgaggcccucaacaaccgguuccagaucaagggggucgagcugaaguccggcuacaaggacuggauccuguggaucagcuucgccaucagcugcuuccuccugugcguggugcugcucggcuucaucaugugggccugccagaaggggaacauccgcugcaacaucugcaucuga

SEQ ID NO: 73557 - RNA, 1701 nt, Artificial Sequence; identical to SEQ ID NO: 73517
  derived and/or modified CDS sequence (opt1) from hemagglutinin__InfluenzaA__AFN19623

SEQ ID NO: 73558 - RNA, 1701 nt, Artificial Sequence; identical to SEQ ID NO: 73454
  derived and/or modified CDS sequence (opt1) from hemagglutinin__InfluenzaA__AFN19629

SEQ ID NO: 73559 - RNA, 1701 nt, Artificial Sequence
  derived and/or modified CDS sequence (opt1) from hemagglutinin__InfluenzaA__AFN19631
augaagaccaucaucgcccugagcuacauccucugccugguguucgcccagaagcugcccgagaacgacuacuccaccgcgacgcucugccugggccaccacgccgucccgaacgggaccaucgugaagaccaucaccaacgaccagaucgaggugacgaacgccaccgagcugguccagagcuccagcaccggcgagaucugcgacagcccccaccagauccucgacgggaucaacugcacccugaucgacgcccugcucggcgacccccagugcgacggguuccagaacaagaagugggaccuguucguggagcgcagcaaggccuacuccaacugcuaccccuacgacgugccggacuacgcgagccugcggucccucgucgccagcuccggcacgcuggaguucaacaacgagagcuucaacuggaccggcgugacccagaacgggaccuccagcgccugcauccgccgguccacgagcuccuucuucagccgccugaacuggcucacccaccugaacuucaaguaccccgcccugaacgugaccaugcccaacaacgagcaguucgacaagcucuacaucuggggcguccaccaccccgggaccgacaaggaccagaucuuccuguacgcgcagccguccggccggaucacggugagcaccaagcgcagccagcaggccgugauccccaacaucgggucccggccccgcauccggaacauccccagccgcaucuccaucuacuggaccaucgucaagccgggcgacauccugcucaucaacagcaccggcaaccugaucgcgccccggggguacuucaagauccgcuccggcaagagcuccaucaugcggagcgacgcccccaucgggaagugcaacuccgagugcaucacgcccaacggcagcaucccgaacgacaagcccuuccagaacgugaaccgcaucaccuacggcgccugcccccgguacgugaagcaguccacccugaagcucgccaccgggaugcgcaacguccccgagaagcagacgcggggcaucuucggggccaucgccggcuucaucgagaacgggugggagggcaugguggacggcugguacggguuccgccaccagaacagcgagggccgggggcaggccgccgaccugaaguccacccaggcggccaucgaccagaucaacggcaagcugaaccgccucaucgggaagaccaacgagaaguuccaccagaucgagaaggaguucagcgagguggagggccggauccaggaccuggagaaguacgucgaggacaccaagaucgaccugugguccuacaacgccgagcuccugguggcccuggagaaccagcacacgaucgaccucaccgacagcgagaugaacaagcuguucgagaagaccaagaagcagcugcgcgagaacgccgaggacaugggcaacgggugcuucaagaucuaccacaagugcgacaacgcgugcaucggcuccauccgcaacgggaccuacaaccacgacguguaccgggacgaggcccucaacaaccgcuuccagaucaagggcgucgagcugaaguccggguacaaggacuggauccuguggaucuccuucgccaucagcugcuuccuccugugcguggcccugcucggcuucaucaugugggccugccagaagggcaacauccggugcaacaucugcaucuga

SEQ ID NO: 73560 - RNA, 1701 nt, Artificial Sequence
  derived and/or modified CDS sequence (opt1) from hemagglutinin__InfluenzaA__AFN19633
augaagaccaucaucgcccugagcuacauccucugccugguguucgcccagaagcugcccggcaacgacaacuccaccgcgacgcucugccuggggcaccacgccgucccgaacggcaccaucgugaagaccaucaccaacgaccagaucgaggugacgaacgccaccgagcugguccagagcuccagcaccggggagaucugcgacagcccccaccagauccucgacggcgagaacugcacccugaucgacgcccugcucggggacccccagugcgacggcuuccagaacaagaagugggaccuguucguggagcgcagcaaggccuacuccaacugcuaccccuacgacgugccggacuacgcgagccugcggucccucgucgccagcuccggcacgcuggaguucaacaacgagagcuucaacuggaccggggugacccagaacggcaccuccagcgccugcauccgccgguccaacagcuccuucuucagccgccugaacuggcucacgcaccugaacuucaaguaccccgcccugaacgugaccaugcccaacaacgagcaguucgacaagcucuacaucuggggcguccaccaccccgggaccgacaaggaccagaucuuccuguacgcgcaguccagcgggcggaucaccaucagcacgaagcgcucccagcaggccgugaucccgaacaucggcagccggccccgcauccggaacauccccucccgcaucagcaucuacuggaccaucgugaagcccggcgacauccugcucaucaacuccaccgggaaccugaucgccccgcggggcuacuucaagauccgcagcgggaaguccagcaucaugcgguccgacgcccccaucggcaagugcaacagcgagugcaucacccccaacggcuccauccccaacgacaagccguuccagaacgucaaccgcaucacguacggggccugcccccgguacgugaagcagagcacccugaagcucgcgaccggcaugcgcaacgugcccgagaagcagacccgggggaucuucggcgccaucgccggguucaucgagaacggcugggagggcauggucgacgggugguacggcuuccgccaccagaacuccgaggggcggggccaggccgccgaccugaaguccacgcaggcggccaucgaccagaucaacgggaagcugaaccgccucaucggcaagaccaacgagaaguuccaccagaucgagaaggaguucuccgagguggagggccggauccaggaccuggagaaguacguggaggacaccaagaucgaccuguggagcuacaacgccgagcuccuggucgcccuggagaaccagcacaccaucgaccucacggacuccgagaugaacaagcuguucgagaagaccaagaagcagcugcgcgagaacgccgaggacauggggaacggcugcuucaagaucuaccacaagugcgacaacgcgugcaucgggagcauccgcaacggcaccuacaaccacgacguguaccgggacgaggcccucaacaaccgcuuccagaucaaggggguggagcugaaguccggcuacaaggacuggauccuguggaucagcuucgccaucagcugcuuccuccugugcgucgcccugcucggcuucaucaugugggccugccagaaggggaacauccggugcaacaucugcaucuga

SEQ ID NO: 73561 - RNA, 1701 nt, Artificial Sequence
  derived and/or modified CDS sequence (opt1) from hemagglutinin__InfluenzaA__AFN19635
augaagaccaucaucgcccugagcuacauccucugccugguguucgcccagaagcugcccgagaacgacaacuccaccgcgacgcucugccugggccaccacgccgucccgaacgggaccaucgugaagaccaucaccaacgaccagaucgaggugacgaacgccaccgagcugguccagagcuccagcaccggcgagaucugcgacagcccccaccagauccucgacgggaucaacugcacccugaucgacgcccugcucggcgacccccagugcgacggguuccagaacaagaagugggaccuguucguggagcgcagcaaggccuacuccaacugcuaccccuacgacgugccggacuacgcgagccugcggucccucgucgccagcuccggcacgcuggaguucaacaacgagagcuucaacuggaccggcgugacccagaacgggaccuccagcgccugcauccgccgguccaacagcuccuucuucagccgccugaacuggcucacgcaccugaacuucaaguaccccgcccugaacgugaccaugcccaacaacgagcaguucgacaagcucuacaucuggggcguccaccaccccgggaccgacaaggaccagaucuuccuguacgcgcagccguccggccggaucaccgugagcacgaagcgcagccagcaggccgugauccccaacaucgggucccggccccgcauccggaacauccccagccgcaucuccaucuacuggaccaucgucaagccgggcgacauccugcucaucaacagcaccggcaaccugaucgcgccccggggguacuucaagauccgcuccggcaagagcuccaucaugcggagcgacgcccccaucgggaagugcaacuccgagugcaucacccccaacggcagcaucccgaacgacaagcccuuccagaacgugaaccgcaucacguacggcgccugcccccgguacgugaagcaguccacccugaagcucgccaccgggaugcgcaacguccccgagaagcagacccggggcaucuucggggccaucgccggcuucaucgagaacgggugggagggcaugguggacggcugguacggguuccgccaccagaacagcgagggccgggggcaggccgccgaccugaaguccacgcaggcggccaucgaccagaucaacggcaagcugaaccgccucaucgggaagaccaacgagaaguuccaccagaucgagaaggaguucagcgagguggagggccggauccaggaccuggagaaguacgucgaggacaccaagaucgaccugugguccuacaacgccgagcuccugguggcccuggagaaccagcacaccaucgaccucacggacagcgagaugaacaagcuguucgagaagaccaagaagcagcugcgcgagaacgccgaggacaugggcaacgggugcuucaagaucuaccacaagugcgacaacgcgugcaucggcuccauccgcaacgggaccuacaaccacgacguguaccgggacgaggcccucaacaaccgcuuccagaucaagggcgucgagcugaaguccggguacaaggacuggauccuguggaucuccuucgccaucagcugcuuccuccugugcguggcccugcucggcuucaucaugugggccugccagaagggcaacauccggugcaacaucugcaucuga

SEQ ID NO: 73562 - RNA, 1701 nt, Artificial Sequence; identical to SEQ ID NO: 73561
  derived and/or modified CDS sequence (opt1) from hemagglutinin__InfluenzaA__AFN19637

SEQ ID NO: 73563 - RNA, 1701 nt, Artificial Sequence; identical to SEQ ID NO: 73098
  derived and/or modified CDS sequence (opt1) from hemagglutinin__InfluenzaA__AFN19639

SEQ ID NO: 73564 - RNA, 1701 nt, Artificial Sequence; identical to SEQ ID NO: 73517
  derived and/or modified CDS sequence (opt1) from hemagglutinin__InfluenzaA__AFN19641

SEQ ID NO: 73565 - RNA, 1701 nt, Artificial Sequence; identical to SEQ ID NO: 73561
  derived and/or modified CDS sequence (opt1) from hemagglutinin__InfluenzaA__AFN19643

SEQ ID NO: 73566 - RNA, 1701 nt, Artificial Sequence; identical to SEQ ID NO: 73098
  derived and/or modified CDS sequence (opt1) from hemagglutinin__InfluenzaA__AFN19645

SEQ ID NO: 73567 - RNA, 1701 nt, Artificial Sequence
  derived and/or modified CDS sequence (opt1) from hemagglutinin__InfluenzaA__AFN19647
augaagaccaucaucgcccugagcuacauccucugccugguguucgcccagaagcugcccgagaacgacaacuccaccgcgacgcucugccugggccaccacgccgucccgaacgggaccaucgugaagaccaucaccaacgaccagaucgaggugacgaacgccaccgagcugguccagagcuccagcaccggcgagaucugcgacagcccccaccagauccucgacggggugaacugcacccugaucgacgcccugcucggcgacccccagugcgacggguuccagaacaagaagugggaccuguucguggagcgcagcaaggccuacuccaacugcuaccccuacgacgucccggacuacgcgagccugaagucccucguggccagcuccggcacgcuggaguucaacaacgagagcuucaacuggaccggcgugacccagaacgggaccuccagcgccugcauccggcgcuccaacagcuccuucuucagccggcugaacuggcucacgcaccugaacuucaaguaccccgcccugaacgucaccaugcccaacaacgagcaguucgacaagcucuacaucuggggcgugcaccaccccgggaccgacaaggaccagaucuuccuguacgcgcaguccagcggccgcaucaccgugagcacgaagcggucccagcaggccgucaucccgaacaucgggagccgcccccggauccgcaacauccccucccggaucagcaucuacuggaccaucgugaagcccggcgacauccugcucaucaacuccaccggcaaccugaucgccccgcgcggguacuucaagauccagagcggcaaguccagcaucaugcgguccgacgcccccaucgggaagugcaacagcgagugcaucacccccaacggcuccauccccaacgacaagccguuccagaacgugaaccgcaucacguacggcgccugcccccgguacgucaagcagagcacccugaagcucgcgaccgggaugcgcaacgugcccgagaagcagacccggggcaucuucggggccaucgccggcuucaucgagaacgggugggagggcaugguggacggcugguacggguuccgccaccagaacuccgagggccgggggcaggccgccgaccugaaguccacgcaggcggccaucgaccagaucaacggcaagcugaaccgccucaucgggaagaccaacgagaaguuccaccagaucgagaaggaguucuccgaggucgagggccggauccaggaccuggagaaguacguggaggacaccaagaucgaccuguggagcuacaacgccgagcuccugguggcccuggagaaccagcacaccaucgaccucacggacuccgagaugaacaagcuguucgagaagaccaagaagcagcugcgcgagaacgccgaggacaugggcaacgggugcuucaagaucuaccacaagugcgacaacgcgugcaucggcagcauccggaacgggaccuacaaccacgacgucuaccgcgacgaggcccucaacaaccgcuuccagaucaagggcguggagcugaaguccggguacaaggacuggauccuguggaucagcuucgccaucagcugcuuccuccugugcguggcccugcucggcuucaucaugugggccugccagaagggcaacauccggugcaacaucugcaucuga

SEQ ID NO: 73568 - RNA, 1701 nt, Artificial Sequence
  derived and/or modified CDS sequence (opt1) from hemagglutinin__InfluenzaA__AFN19649
augaagaccaucaucgcccugagcuacauccucugccugguguucgcccagaagcugcccggcaacgacaacuccaccgcgacgcucugccuggggcaccacgccgucccgaacggcaccaucgugaagaccaucaccaacgaccagaucgaggugacgaacgccaccgagcugguccagaacagcuccaucagcgagaucugcgacagcccccaccagauccucgacggggagaacugcacccugaucgacgcccugcucggcgacccccagugcgacggguuccagaacaagaagugggaccuguucguggagcgcagcaaggccuacuccaacugcuaccccuacgacgugccggacuacgcgagccugcggucccucgucgccagcuccggcacccuggaguucaacaacgagagcuucaacuggacgggcgugacccagaacgggaccuccagcgccugcauccgccgguccaacagcuccuucuucagccgccugaacuggcucacccaccugaacuucaaguaccccgcccugaacgugacgaugcccaacaacgagcaguucgacaagcucuacaucuggggcguccaccaccccgggaccgacaaggaccagaucuuccuguacgcgcaguccagcggccggaucaccgugagcaccaagcgcucccagcaggccgugaucccgaacaucgggagccggccccgcauccggaacauccccucccgcaucagcaucuacuggacgaucgucaagcccggcgacauccugcucaucaacuccaccggcaaccugaucgccccgcggggguacuucaagauccgcagcggcaaguccagcaucaugcgguccgacgcccccaucgggaagugcaacagcgagugcaucacccccaacggcuccauccccaacgacaagccguuccagaacgugaaccgcaucaccuacggcgccugcccccgguacgugaagcagagcacgcugaagcucgcgaccgggaugcgcaacguccccgagaagcagacccggggcaucuucggggccaucgccggcuucaucgagaacgggugggagggcaugauggacggcugguacggguuccgccaccagaacuccgagggccgggggcaggccgccgaccugaaguccacccaggcggccaucgaccagaucaacggcaagcugaaccgccucaucgggaagacgaacgagaaguuccaccagaucgagaaggaguucuccgagguggagggccggauccaggaccuggagaaguacguggaggacaccaagaucgaccuguggagcuacaacgccgagcuccuggucgcccuggagaaccagcacaccaucgaccucaccgacuccgagaugaacaagcuguucgagaagacgaagaagcagcugcgcgagaacgccgaggacaugggcaacgggugcuucaagaucuaccacaagugcgacaacgcgugcaucggcagcauccgcaacgggaccuacgaccacgacguguaccgggacgaggcccucaacaaccgcuuccagaucaagggcguggagcugaaguccggguacaaggacuggauccuguggaucagcuucgccaucagcugcuuccuccugugcgucgcccugcucggcuucaucaugugggccugccagaagggcaacauccggugcaacaucugcaucuga

SEQ ID NO: 73569 - RNA, 1701 nt, Artificial Sequence; identical to SEQ ID NO: 73561
  derived and/or modified CDS sequence (opt1) from hemagglutinin__InfluenzaA__AFN19653

SEQ ID NO: 73570 - RNA, 1701 nt, Artificial Sequence; identical to SEQ ID NO: 73477
  derived and/or modified CDS sequence (opt1) from hemagglutinin__InfluenzaA__AFN19663

SEQ ID NO: 73571 - RNA, 1701 nt, Artificial Sequence; identical to SEQ ID NO: 73485
  derived and/or modified CDS sequence (opt1) from hemagglutinin__InfluenzaA__AFN19665

SEQ ID NO: 73572 - RNA, 1701 nt, Artificial Sequence
  derived and/or modified CDS sequence (opt1) from hemagglutinin__InfluenzaA__AFN19667
augaagaccaucaucgcccugagcuacauccucugccugguguucgcccagaagcugcccggcaacgacaacuccaccgcgacgcucugccuggggcaccacgccgucccgaacggcaccaucgugaagaccaucaccaacgaccagaucgaggugacgaacgccaccgagcugguccagaacagcuccaucggggagaucugcgacagcccccaccagauccucgacggcgagaacugcacccugaucgacgcccugcucggggacccccagugcgacggcuuccagaacaagaagugggaccuguucguggagcgcuccaaggccuacagcaacugcuaccccuacgacgugccggacuacgcgucccugcggagccucgucgccuccagcggcacccuggaguucaacaacgaguccuucaacuggacgggggugacccagaacggcaccagcuccgccugcaugcgccggagcaacuccagcuucuucucccgccugaacuggcucacccaccugaacuucaaguaccccgcccugaacgugacgaugcccaacaacgagcaguucgacaagcucuacaucuggggcguccaccaccccgggaccgacaaggaccagaucuuccuguacgcgcagagcuccgggcggaucaccgugagcaccaagcgcagccagcaggccgugaucccgaacaucggcucccggccccgcauccggaacauccccagccgcaucuccaucuacuggacgaucgucaagcccggcgacauccugcucaucaacagcaccgggaaccugaucgccccgcggggcuacuucaagauccgcuccggcaagagcuccaucaugcggagcgacgcccccaucgggaagugcaacuccgagugcaucacccccaacggcagcauccccaacgacaagccguuccagaacgugaaccgcaucaccuacggggccugcccccgguacgugaagcaguccacgcugaagcucgcgaccggcaugcgcaacguccccgagaagcagacccgggggaucuucggcgccaucgccggguucaucgagaacggcugggagggcaugguggacgggugguacggcuuccgccaccagaacagcgaggggcggggccaggccgccgaccugaaguccacccaggcggccaucgaccagaucaacgggaagcugaaccgccucaucggcaagacgaacgagaaguuccaccagaucgagaaggaguucagcgagguggagggccggauccaggaccuggagaaguacgucgaggacaccaagaucgaccugugguccuacaacgccgagcuccugguggcccuggagaaccagcacaccaucgaccucaccgacagcgagaugaacaagcuguucgagaagacgaagaagcagcugcgcgagaacgccgaggacauggggaacggcugcuucaagaucuaccacaagugcgacaacgcgugcaucggguccauccgcaacggcaccuacgaccacgacguguaccgggacgaggcccucaacaaccgcuuccagaucaagggggucgagcucaagagcggcuacaaggacuggauccuguggaucuccuucgccaucagcugcuuccugcugugcguggcccugcucggcuucaucaugugggccugccagaaggggaacauccggugcaacaucugcaucuga

SEQ ID NO: 73573 - RNA, 1701 nt, Artificial Sequence
  derived and/or modified CDS sequence (opt1) from hemagglutinin__InfluenzaA__AFN19669
augaagaccaucaucgcccugagcuacauccucugcaugguguucgcccagaagcugcccggcaacgacaacuccaccgcgacgcugugccucgggcaccacgccgucccgaacggcaccaucgugaagaccaucaccaacgaccagaucgaggugacgaacgccaccgagcugguccagaacagcuccaucggggagaucugcgacagcccccaccagauccuggacggcgagaacugcacccucaucgacgcccugcugggggacccccagugcgacggcuuccagaacaagaagugggaccucuucguggagcgcuccaaggccuacagcaacugcuaccccuacgacgugccgaacuacgcgucccugcggagccuggucgccuccagcggcacccucgaguucaacaacgaguccuucaacuggacgggggugacccagaacggcaccagcuccgccugcaugcgccggagcaacuccagcuucuucucccgccugaacuggcugacccaccucaacuucaaguaccccgcccugaacgugacgaugcccaacaacgagcaguucgacaagcuguacaucuggggcguccaccaccccgggaccgacaaggaccagaucuuccucuacgcgcagagcuccgggcggaucaccgugagcaccaagcgcagccagcaggccgugaucccgaacaucggcucccggccccgcauccggaacauccccagccgcaucuccaucuacuggacgaucgucaagcccggcgacauccugcugaucaacagcaccgggaaccucaucgccccgcggggcuacuucaagauccgcuccggcaagagcuccaucaugcggagcgacgcccccaucgggaagugcaacuccgagugcaucacccccaacggcagcauccccaacgacaagccguuccagaacgugaaccgcaucaccuacggggccugcccccgguacgugaagcaguccacgcugaagcuggcgaccggcaugcgcaacguccccgagaagcagacccgggggaucuucggcgccaucgccggguucaucgagaacggcugggagggcaugguggacgggugguacggcuuccgccaccagaacagcgaggggcggggccaggccgccgaccucaaguccacccaggcggccaucgaccagaucaacgggaagcugaaccgccugaucggcaagacgaacgagaaguuccaccagaucgagaaggaguucagcgagguggagggccggauccaggaccucgagaaguacgucgaggacaccaagaucgaccugugguccuacaacgccgagcugcucguggcccuggagaaccagcacaccaucgaccugaccgacagcgagaugaacaagcuguucgagaagacgaagaagcagcuccgcgagaacgccgaggacauggggaacggcugcuucaagaucuaccacaagugcgacaacgcgugcaucggguccauccgcaacggcaccuacgaccacgacguguaccgggacgaggcccugaacaaccgcuuccagaucaagggggucgagcucaagagcggcuacaaggacuggauccuguggaucuccuucgccaucagcugcuuccugcucugcguggcccugcugggcuucaucaugugggccugccagaaggggaacauccggugcaacaucugcaucuga

SEQ ID NO: 73574 - RNA, 1701 nt, Artificial Sequence
  derived and/or modified CDS sequence (opt1) from hemagglutinin__InfluenzaA__AFN19671
augaagaccaucaucgcccugagcuacauccucugccugguguucgcccagaagcugcccggcaacgacaacuccaccgcgacgcucugccuggggcaccacgccgucccgaacggcaccaucgugaagaccaucaccaacgaccgcaucgaggugacgaacgccaccgagcugguccagaacagcuccaucggggagaucugcgacagcccccaccagauccucgacggcgagaacugcacccugaucgacgcccugcucggggacccccagugcgacggcuuccagaacaagaagugggaccuguucguggagcgguccaaggccuacagcaacugcuaccccuacgacgugccggacuacgcgucccugcgcagccucgucgccuccagcggcacccuggaguucaacaacgaguccuucaacuggacgggggugacccagaacggcaccagcuccgccugcauccggcgcagcaacaacuccuucuucagccggcugaacuggcucacccaccugaacuucaaguaccccgcccugaacgugacgaugcccaacaacgagcaguucgacaagcucuacaucuggggcguccaccaccccgggaccgacaaggaccagaucuuccuguacgcgcaguccagcgggcgcaucaccguguccaccaagcggagccagcaggccgugaucccgaacaucggcagccgcccccggauccgcaacauccccucccggaucagcaucuacuggacgaucgucaagcccggcgacauccugcucaucaacuccaccgggaaccugaucgccccgcgcggcuacuucaagauccggagcgggaaguccagcaucaugcgcuccgacgcccccaucggcaagugcaagagcgagugcaucacccccaacggcuccauccccaacgacaagccguuccagaacgugaaccggaucaccuacggggccugcccccgcuacgugaagcagagcacgcugaagcucgcgaccggcaugcggaacguccccgagaagcagacccgcgggaucuucggcgccaucgccggguucaucgagaacggcugggagggcaugguggacgggugguacggcuuccggcaccagaacuccgaggggcgcggccaggccgccgaccucaagagcacccaggcggccaucgaccagaucaacgggaagcugaaccggcugaucggcaagacgaacgagaaguuccaccagaucgagaaggaguucuccgagguggagggccgcauccaggaccuggagaaguacgucgaggacaccaagaucgaccuguggagcuacaacgccgagcuccugguggcccuggagaaccagcacaccaucgaccucaccgacuccgagaugaacaagcuguucgagaagacgaagaagcagcugcgcgagaacgccgaggacauggggaacggcugcuucaagaucuaccacaagugcgacaacgcgugcaucgagagcauccggaacgggaccuacgaccacgacguguaccgcgacgaggcccucaacaaccgguuccagaucaagggcgucgagcugaaguccggguacaaggacuggauccuguggaucagcuucgccaucuccugcuuccuccugugcguggcccugcucggcuucaucaugugggccugccagaagggcaacauccgcugcaacaucugcaucuga

SEQ ID NO: 73575 - RNA, 1701 nt, Artificial Sequence; identical to SEQ ID NO: 73098
  derived and/or modified CDS sequence (opt1) from hemagglutinin__InfluenzaA__AFN19674

SEQ ID NO: 73576 - RNA, 1701 nt, Artificial Sequence; identical to SEQ ID NO: 73098
  derived and/or modified CDS sequence (opt1) from hemagglutinin__InfluenzaA__AFN19676

SEQ ID NO: 73577 - RNA, 1701 nt, Artificial Sequence; identical to SEQ ID NO: 73485
  derived and/or modified CDS sequence (opt1) from hemagglutinin__InfluenzaA__AFN19678

SEQ ID NO: 73578 - RNA, 1701 nt, Artificial Sequence
  derived and/or modified CDS sequence (opt1) from hemagglutinin__InfluenzaA__AFN19682
augaagaccaucaucgcccugagcuacauccucugccugguguucgcccagaagcugcccggcaacgacaacuccaccgcgacgcucugccuggggcaccacgccgucccgaacggcaccaucgugaagaccaucaccaacgaccagaucgaggugacgaacgccaccgagcugguccagaacagcuccaucggggagaucugcgacagcccccaccagauccucgacggcgagaacugcacccugaucgacgcccugcucggggacccccagugcgacggcuuccagaacaagaagugggaccuguucguggagcgcuccaaggccuacagcaacugcuaccccuacgacgugccgaacuacgcgucccugcggagccucgucgccuccagcggcacccuggaguucaacaacgaguccuucaacuggacgggggugacccagaacggcaccagcuccgccugcaugcgccggagcaacuccagcuucuucucccgccugaacuggcucacccaccugaacuucaaguaccccgcccugaacgugacgaugcccaacaacgagcaguucgacaagcucuacaucuggggcguccaccaccccgggaccgacaaggaccagaucuuccuguacgcgcagagcuccgggcggaucaccgugagcaccaagcgcagccagcaggccgugaucccgaacaucggcucccggccccgcauccggaacauccccagccgcaucuccaucuacuggacgaucgucaagcccggcgacauccugcucaucaacagcaccgggaaccugaucgccccgcggggcuacuucaagauccgcuccggcaagagcuccaucaugcggagcgacgcccccaucgggaagugcaacuccgagugcaucacccccaacggcagcauccccaacgacaagccguuccagaacgugaaccgcaucaccuacggggccugcccccgguacgugaagcaguccacgcugaagcucgcgaccggcaugcgcaacguccccgagaagcagacccgggggaucuucggcgccaucgccggguucaucgagaacggcugggagggcaugguggacgggugguacggcuuccgccaccagaacagcgaggggcggggccaggccgccgaccugaaguccacccaggcggccaucgaccagaucaacgggaagcugaaccgccucaucggcaagacgaacgagaaguuccaccagaucgagaaggaguucagcgagguggagggccggauccaggaccuggagaaguacgucgaggacaccaagaucgaccugugguccuacaacgccgagcuccugguggcccuggagaaccagcacaccaucgaccucaccgacagcgagaugaacaagcuguucgagaagacgaagaagcagcugcgcgagaacgccgaggacauggggaacggcugcuucaagaucuaccacaagugcgacaacgcgugcaucggguccauccgcaacggcaccuacgaccacgacguguaccgggacgaggcccucaacaaccgcuuccagaucaagggggucgagcucaagagcggcuacaaggacuggauccuguggaucuccuucgccaucagcugcuuccugcugugcguggcccugcucggcuucaucaugugggccugccagaaggggaacaucaagugcaacaucugcaucuga

SEQ ID NO: 73579 - RNA, 1701 nt, Artificial Sequence
  derived and/or modified CDS sequence (opt1) from hemagglutinin__InfluenzaA__AFN19684
augaagaccaucaucgcccugagcuacauccucugccuggccuucgcgcagaagcugcccggcaacgacaacuccaccgccacgcucugccuggggcaccacgccgugccgaacggcaccaucgucaagaccaucaccaacgaccagaucgaggugacgaacgccaccgagcuggugcagagcuccagcaccggggagaucugcgacagcccccaccagauccucgacggcgagaacugcacccugaucgacgcccugcucggggacccccagugcgacggcuuccagaacaagaagugggaccuguucgucgagcgcagcaaggcguacuccaacugcuaccccuacgacgugccggacuacgccagccugcggucccucguggccagcuccggcacgcuggaguucaacaacgagagcuucaacuggaccggggucacccagaacggcaccuccagcgccugcauccgcggguccaacagcuccuucuucagccggcugaacuggcucacgcaccugaacuucaaguaccccgcgcugaacgugaccaugcccaacaacgagcaguucgacaagcucuacaucuggggcgugcaccaccccgggaccgacaaggaccagaucuuccuguacgcccaguccagcggccgcaucaccgucagcacgaagcggucccagcaggccgugaucccgaacaucggcagccgcccccggauccgcaacauccccucccggaucagcaucuacuggaccaucgugaagcccggggacauccugcucaucaacuccaccggcaaccugaucgccccgcgcggguacuucaagauccggagcggcaaguccagcaucaugcgcuccgacgcccccaucggcaagugcaacagcgagugcaucacccccaacggguccauccccaacgacaagccguuccagaacgucaaccggaucacguacggcgcgugcccccgcuacgugaagcagagcacccugaagcucgccaccgggaugcggaacgugcccgagaagcagacccgcggcaucuucggggccaucgccggcuucaucgagaacggcugggaggggauggucgacggcugguacggguuccggcaccagaacuccgagggccgcgggcaggccgcggaccugaaguccacgcaggccgccaucgaccagaucaacggcaagcugaaccggcucaucggcaagaccaacgagaaguuccaccagaucgagaaggaguucuccgagguggaggggcgcauccaggaccuggagaaguacguggaggacaccaagaucgaccuguggagcuacaacgccgagcuccuggucgcccuggagaaccagcacaccaucgaccucacggacuccgagaugaacaagcuguucgagaagaccaagaagcagcugcgggagaacgcggaggacaugggcaacgggugcuucaagaucuaccacaagugcgacaacgccugcaucggcagcauccgcaacgggaccuacaaccacaacguguaccgcgacgaggcccucaacaaccgguuccagaucaagggcguggagcugaaguccggcuacaaggacuggauccuguggaucagcuucgccaucagcugcuuccuccugugcgucgcccugcucggguucaucaugugggcgugccagaagggcaacauccgcugcaacaucugcaucuga

SEQ ID NO: 73580 - RNA, 1701 nt, Artificial Sequence
  derived and/or modified CDS sequence (opt1) from hemagglutinin__InfluenzaA__AFN19686
augaagaccaucaucgcccugagcuacauccucugccuggccuucgcgcagaagcugcccggcaacgacaacuccaccgccacgcucugccuggggcaccacgccgugccgaacggcaccaucgucaagaccaucaccaacgaccagaucgaggugacgaacgccaccgagcuggugcagagcuccagcaccggggagaucugcgacagcccccaccagauccucgacggcgagaacugcacccugaucgacgcccugcucggggacccccagugcgacggcuuccagaacaagaagugggaccuguucgucgagcgcagcaaggcguacuccaacugcuaccccuacgacgugccggacuacgccagccugcggucccucguggccagcuccggcacgcuggaguucaacaacgagagcuucaacuggaccggggucacccagaacggcaccuccagcgccugcauccgccgguccaacagcuccuucuucagccgccugaacuggcucacgcaccugaacuucaaguaccccgcgcugaacgugaccaugcccaacaacgagcaguucgacaagcucuacaucuggggcgugcaccaccccgggaccgacaaggaccagaucuuccuguacgcccaguccagcgggcggaucaccgucagcacgaagcgcucccagcaggccgugaucccgaacaucggcagccggccccgcauccggaacauccccucccgcaucagcaucuacuggaccaucgugaagcccggcgacauccugcucaucaacuccaccgggaaccugaucgccccgcggggcuacuucaagauccgcagcgggaaguccagcaucaugcgguccgacgcccccaucggcaagugcaacagcgagugcaucacccccaacggcuccauccccaacgacaagccguuccagaacgucaaccgcaucacguacggggcgugcccccgguacgugaagcagagcacccugaagcucgccaccggcaugcgcaacauccccgagaagcagacccgggggaucuucggcgccaucgccggguucaucgagaacggcugggagggcaugguggacgggugguacggcuuccgccaccagaacuccgaggggcggggccaggccgcggaccugaaguccacgcaggccgccaucgaccagaucaacgggaagcugaaccgccucaucggcaagaccaacgagaaguuccaccagaucgagaaggaguucuccgaggucgagggccggauccaggaccuggagaaguacguggaggacaccaagaucgaccuguggagcuacaacgccgagcuccugguggcccuggagaaccagcacaccaucgaccucacggacuccgagaugaacaagcuguucgagaagaccaagaagcagcugcgcgagaacgcggaggacauggggaacggcugcuucaagaucuaccacaagugcgacaacgccugcaucgggagcauccgcaacggcaccuacaaccacaacgucuaccgggacgaggcccucaacaaccgcuuccagaucaaggggguggagcugaaguccggcuacaaggacuggauccuguggaucagcuucgccaucagcugcuuccuccugugcguggcccugcucggcuucaucaugugggcgugccagaaggggaacauccggugcaacaucugcaucuga

SEQ ID NO: 73581 - RNA, 1701 nt, Artificial Sequence
  derived and/or modified CDS sequence (opt1) from hemagglutinin__InfluenzaA__AFN19688
augaagaccaucaucgcccugagcuacauccucugccugguguucgcccaggagcugcccggcaacgacaacuccaccgcgacgcucugccuggggcaccacgccgucccgaacggcaccaucgugaagaccaucaccaacgaccagaucgaggugacgaacgccaccgagcugguccagagcuccagcaccggggagaucugcgacagcccccaccagauccucgacggcgagaacugcacccugaucgacgcccugcucggggacccccagugcgacggcuuccagaacaagaagugggaccuguucguggagcgcagcaaggccuacuccaacugcuaccccuacgacgugccggacuacgcgagccugcggucccucgucgccagcuccggcacgcuggaguucaacaacgagagcuucaacuggaccggggugacccagaacggcaccuccagcgccugcauccgccgguccaacagcuccuucuucagccgccugaacuggcucacgcaccugaacuucaaguaccccgcccugaacgugaccaugcccaacaacgagcaguucgacaagcucuacaucuggggcguccaccaccccgggaccgacaaggaccagaucuuccuguacgcgcaguccagcgggcggaucaccgugagcacgaagcgcucccagcaggccgugaucccgaacaucggcagccggccccgcauccggaacauccccucccgcaucagcaucuacuggaccaucgucaagcccggcgacauccugcucaucaacuccaccgggaaccugaucgccccgcggggcuacuucaagauccgcagcgggaaguccagcaucaugcgguccgacgcccccaucggcaagugcaacagcgagugcaucacccccaacggcuccauccccaacgacaagccguuccagaacgugaaccgcaucacguacggggccugcccccgguacgugaagcagagcacccugaagcucgcgaccggcaugcgcaacguccccgagaagcagacccgggggaucuucggcgccaucgccggguucaucgagaacggcugggagggcaugguggacgggugguacggcuuccgccaccagaacuccgaggggcggggccaggccgccgaccugaaguccacgcaggcggccaucgaccagaucaacgggaagcugaaccgccucaucggcaagaccaacgagaaguuccaccagaucgagaaggaguucuccgagguggagggccggauccaggaccuggagaaguacgucgaggacaccaagaucgaccuguggagcuacaacgccgagcuccugguggcccuggagaaccagcacaccaucgaccucacggacuccgagaugaacaagcuguucgagaagaccaagaagcagcugcgcgagaacgccgaggacauggggaacggcugcuucaagaucuaccacaagugcgacaacgcgugcaucgggagcauccgcaacggcaccuacaaccacgacguguaccgggacgaggcccucaacaaccgcuuccagaucaagggggucgagcugaaguccggcuacaaggacuggauccuguggaucagcuucgccaucagcugcuuccuccugugcguggcccugcucggcuucaucaugugggccugccagaaggggaacauccggugcaacaucugcaucuga

SEQ ID NO: 73582 - RNA, 1701 nt, Artificial Sequence
  derived and/or modified CDS sequence (opt1) from hemagglutinin__InfluenzaA__AFN19690
augaagaccaccaucgcccugagcuacauccucugccugguguucgcccagaagcugcccggcaacgacaacuccacggcgacccucugccuggggcaccacgccgucccgaacggcaccaucgugaagaccaucacgaacgaccgcaucgaggugaccaacgccaccgagcugguccagaacagcuccaucggggagaucugcgacagcccccaccagauccucgacggcgagaacugcacccugaucgacgcccugcucggggacccccagugcgacggcuuccagaacaagaagugggaccuguucguggagcgguccaaggccuacagcaacugcuaccccuacgacgugccggacuacgcgucccugcgcagccucgucgccuccagcggcacgcuggaguucaacaacgaguccuucaacuggaccggggugacccagaacggcaccagcuccgccugcauccggcgcagcaacaacuccuucuucagccggcugaacuggcucacgcaccugaacuucaaguaccccgcccugaacgugaccaugcccaacaacgagcaguucgacaagcucuacaucuggggcguccaccaccccgggaccgacaaggaccagaucuuccuguacgcgcaguccagcgggcgcaucaccguguccacgaagcggagccagcaggccgugaucccgaacaucggcagccgcccccggauccgcaacauccccucccggaucagcaucuacuggaccaucgucaagcccggcgacauccugcucaucaacuccaccgggaaccugaucgccccgcgcggcuacuucaagauccggagcgggaaguccagcaucaugcgcuccgacgcccccaucggcaagugcaagagcgagugcaucacccccaacggcuccauccccaacgacaagccguuccagaacgugaaccggaucacguacggggccugcccccgcuacgugaagcagagcacccugaagcucgcgaccggcaugcggaacguccccgagaagcagacccgcgggaucuucggcgccaucgccggguucaucgagaacggcugggagggcaugguggacgggugguacggcuuccggcaccagaacuccgaggggcgcggccaggccgccgaccucaagagcacgcaggcggccaucgaccagaucaacgggaagcugaaccggcugaucggcaagaccaacgagaaguuccaccagaucgagaaggaguucuccgagguggagggccgcauccaggaccuggagaaguacgucgaggacaccaagaucgaccuguggagcuacaacgccgagcuccugguggcccuggagaaccagcacaccaucgaccucacggacuccgagaugaacaagcuguucgagaagaccaagaagcagcugcgcgagaacgccgaggacauggggaacggcugcuucaagaucuaccacaagugcgacaacgcgugcaucgggagcauccggaacggcaccuacgaccacgacguguaccgcgacgaggcccucaacaaccgguuccagaucaagggggucgaccugaaguccggcuacaaggacuggauccuguggaucagcuucgccaucuccugcuuccuccugugcguggcccugcucggcuucaucaugugggccugccagaaggggaacauccgcugcaacaucugcaucuga

SEQ ID NO: 73583 - RNA, 1701 nt, Artificial Sequence
  derived and/or modified CDS sequence (opt1) from hemagglutinin__InfluenzaA__AFN19692
augaagaccaucaucgcccugagcuacauccucugccugguguucgcccagaagauccccggcaacgacaacuccaccgcgacgcugugccucgggcaccacgccgucccgaacggcaccaucgugaagaccaucaccaacgaccagaucgaggugacgaacgccaccgagcugguccagagcuccagcaccggggagaucugcgacagcccccaccagauccuggacggcgagaacugcacccucaucgacgcccugcugggggacccccagugcgacggcuuccagaacaagaagugggaccucuucguggagcgcagcaaggccuacuccaacugcuaccccuacgacgugccggacuacgcgagccugcggucccuggucgccagcuccggcacgcucgaguucaacaacgagagcuucaacuggaccggggugacccagaacggcaccuccagcgccugcauccgccgguccgacagcuccuucuucagccgccugaacuggcugacgcaccucaacuucaaguaccccgcccugaacgugaccaugcccaacaacgagcaguucgacaagcuguacaucuggggcguccaccaccccgggaccgacaaggaccagaucuuccucuacgcgcaggccuccgggcggaucaccgugagcacgaagcgcagccagcaggccgugaucccgaacaucggcucccggccccgcauccggaacauccccagccgcaucuccaucuacuggaccaucgucaagcccggcgacauccugcugaucaacagcaccgggaaccucaucgccccgcggggcuacuucaagauccgcuccgggaaguccuccaucaugcggagcgacgcccccaucggcaagugcaacuccgagugcaucacccccaacggcagcauccccaacgacaagccguuccagaacgugaaccgcaucacguacggggcgugcccccgguacgugaagcagaacacccugaagcuggccaccggcaugcgcaacguccccgagaagcagacccgggggaucuucggcgccaucgccggguucaucgagaacggcugggagggcaugguggacgggugguacggcuuccgccaccagaacuccgaggggcggggccaggccgcggaccucaagagcacgcaggccgccaucgaccagaucaacgggaagcugaaccgccugaucggcaagaccaacgagaaguuccaccagaucgagaaggaguucuccgagguggagggccggauccaggaccucgagaaguacgucgaggacaccaagaucgaccuguggagcuacaacgccgagcugcucguggcccuggagaaccagcacaccaucgaccugacggacuccgagaugaacaagcuguucgagaagaccaagaagcagcuccgcgagaacgcggaggacauggggaacggcugcuucaagaucuaccacaagugcgacaacgccugcaucgggagcauccgcaacggcaccuacaaccacgacguguaccgggacgaggcccugaacaaccgcuuccagaucaagggggucgagcucaaguccggcuacaaggacuggauccuguggaucagcuucgccaucuccugcuuccugcucugcguggcccugcugggcuucaucaugugggcgugccagaaggggaacauccggugcaacaucugcaucuga

SEQ ID NO: 73584 - RNA, 1701 nt, Artificial Sequence
  derived and/or modified CDS sequence (opt1) from hemagglutinin__InfluenzaA__AFN19694
augaagaccaucaucgcccugagcuacauccucugccugguguucgcccagaagcugcccggcaacgacaacuccaccgcgacgcucugccuggggcaccacgccgucccgaacggcaccaucgugaagaccaucaccaacgaccgcaucgaggugacgaacgccaccgagcugguccagaacagccccaucggggagaucugcgacagcccccaccagauccucgacggcgagaacugcacccugaucgacgcccugcucggggacccccagugcgacggcuuccagaacaagaagugggaccuguucguggagcggagcaaggccuacuccaacugcuacccguacgacgugcccgacuacgcgagccugcgcucccucgucgccagcuccggcacccuggaguucaacaacgagagcuucaacuggacgggggugacccagaacggcaccuccagcgccugcauccggcgcuccaacaacagcuucuucucccggcugaacuggcucacccaccugaacuucaaguaccccgcccugaacgugacgaugcccaacaacgagcaguucgacaagcucuacaucuggggcguccaccacccggggaccgacaaggaccagaucuuccuguacgcgcagagcuccgggcgcaucaccgugagcaccaagcggucccagcaggccgugauccccaacaucggcagccgcccccggauccgcaacauccccagccggaucuccaucuacuggacgaucgucaagccgggcgacauccugcucaucaacagcaccgggaaccugaucgcgccccgcggcuacuucaagauccgguccgggaaguccuccaucaugcgcagcgacgcccccaucggcaagugcaaguccgagugcaucacccccaacggcagcaucccgaacgacaagcccuuccagaacgugaaccggaucaccuacggggccugcccccgcuacgugaagcaguccacgcugaagcucgccaccggcaugcggaacguccccgagaagcagacccgcgggaucuucggcgccaucgccggguucaucgagaacggcugggagggcaugguggacgggugguacggcuuccggcaccagaacagcgaggggcgcggccaggccgccgaccugaaguccacccaggcggccaucgaccagaucaacgggaagcugaaccggcucaucggcaagacgaacgagaaguuccaccagaucgagaaggaguucagcgagguggagggccgcauccaggaccuggagaaguacgucgaggacaccaagaucgaccugugguccuacaacgccgagcuccugguggcccuggagaaccagcacaccaucgaccucaccgacagcgagaugaacaagcuguucgagaagacgaagaagcagcugcgcgagaacgccgaggacauggggaacggcugcuucaagaucuaccacaagugcgacaacgcgugcaucggguccauccggaacggcaccuacgaccacgacguguaccgcgacgaggcccucaacaaccgguuccagaucaagggggucgagcucaagagcggcuacaaggacuggauccuguggaucuccuucgccaucagcugcuuccugcugugcguggcccugcucggcuucaucaugugggccugccagaaggggaacauccgcugcaacaucugcaucuga

SEQ ID NO: 73585 - RNA, 1701 nt, Artificial Sequence
  derived and/or modified CDS sequence (opt1) from hemagglutinin__InfluenzaA__AFN19700
augaagaccaucaucgcccugagcuacauccucugccugguguucgcccagaagcugcccggcaacgacaacuccaccgcgacgcucugccuggggcaccacgccgucccgaacggcaccaucgugaagaccaucaccaacgaccagaucgaggugacgaacgccaccgagcugguccagaacagcuccaucggggagaucugcgacagcccccaccagauccucgacggcgagaacugcacccugaucgacgcccugcucggggacccccagugcgacggcuuccagaacaagaagugggaccuguucguggagcgcuccaaggccuacagcaacugcuaccccuacgacgugccggacuacgcgucccugcggagccucgucgccuccagcggcacccuggaguucaacaacgagcgcuucaacugguccggggugacgcagaacggcaccagcuccgccugcaugcggcgcagcaacuccagcuucuucucccggcugaacuggcucacccaccugaacuucaaguaccccgcccugaacgugaccaugcccaacaacgagcaguucgacaagcucuacaucuggggcguccaccaccccgggacggacaaggaccagaucuuccuguacgcgcagagcuccgggcgcaucaccgugagcaccaagcggagccagcaggccgugaucccgaacaucggcucccgcccccggauccgcaacauccccagccggaucuccaucuacuggaccaucgucaagcccggcgacauccugcucaucaacagcacggggaaccugaucgccccgcgcggcuacuucaagauccgguccggcaagagcuccaucaugcgcagcgacgcccccaucgggaagugcaacuccgagugcaucacccccaacggcagcauccccaacgacaagccguuccagaacgugaaccggaucaccuacggggccugcccccgcuacgugaagcaguccacccugaagcucgcgacgggcaugcggaacguccccgagaagcagacccgcgggaucuucggcgccaucgccggguucaucgagaacggcugggagggcaugguggacgggugguacggcuuccggcaccagaacagcgaggggcgcggccaggccgccgaccugaaguccacccaggcggccaucgaccagaucaacgggaagcugaaccggcucaucggcaagaccaacgagaaguuccaccagaucgagaaggaguucagcgagguggagggccgcauccaggaccuggagaaguacgucgaggacacgaagaucgaccugugguccuacaacgccgagcuccugguggcccuggagaaccagcacaccaucgaccucaccgacagcgagaugaacaagcuguucgagaagaccaagaagcagcugcgcgagaacgccgaggacauggggaacggcugcuucaagaucuaccacaagugcgacaacgcgugcaucggguccauccggaacggcacguacgaccacgacguguaccgcgacgaggcccucaacaaccgguuccagaucaagggggucgagcucaagagcggcuacaaggacuggauccuguggaucuccuucgccaucagcugcuuccugcugugcguggcccugcucggcuucaucaugugggccugccagaaggggaacauccgcugcaacaucugcaucuga

SEQ ID NO: 73586 - RNA, 1701 nt, Artificial Sequence
  derived and/or modified CDS sequence (opt1) from hemagglutinin__InfluenzaA__AFN19702
augaagaccaucaucgcccugagcuacauccucugccugguguucgcccagaagcugcccggcaacgacaacuccaccgcgacgcucugccuggggcaccacgccgucccgaacggcaccaucgugaagaccaucaccaacgaccgcaucgaggugacgaacgccaccgagcugguccagaacagcuccaucggggagaucugcgacagcccccaccagauccucgacggcgagaacugcacccugaucgacgcccugcucggggacccccagugcgacggcuuccagaacaagaagugggaccuguucguggagcggggcaaggccuacuccaacugcuaccccuacgacgugccggacuacgcgagccugcgcucccucgucgccagcuccgggacccuggaguucaacaacgagagcuucaacuggacgggcgugacccagaacgggaccuccagcgccugcauccggcgcuccaacaacagcuucuucucccggcugaacuggcucacccaccugaacuucaaguaccccgcccugaacgugacgaugcccaacaacgagcaguucgacaagcucuacaucuggggcguccaccaccccgggaccgacaaggaccagaucuuccuguacgcgcagagcuccggccgcaucaccgugagcaccaagcggucccagcaggccgugaucccgaacaucggcagccgcccccggauccgcaacauccccagccggaucuccaucuacuggacgaucgucaagcccggggacauccugcucaucaacagcaccggcaaccugaucgccccgcgcggguacuucaagauccgguccggcaagagcuccaucaugcgcagcgacgcccccaucggcaagugcaaguccgagugcaucacccccaacgggagcauccccaacgacaagccguuccagaacgugaaccggaucaccuacggcgccugcccccgcuacgugaagcaguccacgcugaagcucgcgaccgggaugcggaacguccccgagaagcagacccgcggcaucuucggggccaucgccggcuucaucgagaacggcugggaggggaugguggacggcugguacggguuccggcaccagaacagcgagggccgcgggcaggccgccgaccugaaguccacccaggcggccaucgaccagaucaacggcaagcugaaccggcucaucggcaagacgaacgagaaguuccaccagaucgagaaggaguucagcgagguggaggggcgcauccaggaccuggagaaguacgucgaggacaccaagaucgaccugugguccuacaacgccgagcuccugguggcccuggagaaccagcacaccaucgaccucaccgacagcgagaugaacaagcuguucgagaagacgaagaagcagcugcgcgagaacgccgaggacaugggcaacgggugcuucaagaucuaccacaagugcgacaacgcgugcaucggcuccauccggaacgggaccuacgaccacgacguguaccgcgacgaggcccucaacaaccgguuccagaucaagggcgucgagcucaagagcggcuacaaggacuggauccuguggaucuccuucgccaucagcugcuuccugcugugcguggcccugcucggguucaucaugugggccugccagaagggcaacauccgcugcaacaucugcaucuga

SEQ ID NO: 73587 - RNA, 1701 nt, Artificial Sequence; identical to SEQ ID NO: 70839
  derived and/or modified CDS sequence (opt1) from hemagglutinin__InfluenzaA__AFN19709

SEQ ID NO: 73588 - RNA, 1701 nt, Artificial Sequence
  derived and/or modified CDS sequence (opt1) from hemagglutinin__InfluenzaA__AFN19719
augaaggccauccuggugguccuccuguacaccuucgccaccgcgaacgccgacacgcugugcaucggcuaccacgccaacaacagcaccgacaccguggacaccgugcucgagaagaacgucacggugacccacuccgugaaccugcuggaggacaagcacaacgggaagcucugcaagcugcgcggcgucgcgccccugcaccucgggaagugcaacaucgccggcuggauccuggggaacccggagugcgagagccuguccaccgccagcuccuggagcuacaucguggagaccuccagcuccgacaacggcacgugcuaccccggcgacuucaucgacuacgaggagcuccgggagcagcugagcuccgugagcuccuucgagcgcuucgagaucuuccccaagaccagcuccuggcccaaccacgacagcaacaagggggucaccgccgccugcccgcacgccggcgcgaaguccuucuacaagaaccugaucuggcucgugaagaaggggaacagcuaccccaagcuguccaagagcuacaucaacgacaagggcaaggaggugcugguccucugggggauccaccaccccagcaccacggccgaccagcagucccuguaccagaacgccgacaccuacguguucgugggcaccagccgguacuccaagaaguucaagcccgagaucgccauccgcccgaagguccgggaccaggagggccgcaugaacuacuacuggacccugguggagcccggggacaagaucacguucgaggccaccggcaaccucguggucccccgguacgcguucgccauggagcgcaacgccgggagcggcaucaucaucuccgacacccccgugcacgacugcaacaccacgugccagaccccgaagggcgccaucaacaccagccugcccuuccagaacauccaccccaucaccaucgggaagugccccaaguacgugaaguccacgaagcugcggcucgccaccggccugcgcaacgucccgagcauccagucccgggggcuguucggcgcgaucgccggguucaucgagggcggcuggaccgggaugguggacggcugguacggguaccaccaccagaacgagcagggcagcggguacgccgccgaccucaaguccacccagaacgccaucgacaagaucacgaacaaggugaacagcgucaucgagaagaugaacacccaguucaccgcggugggcaaggaguucaaccaccuggagaagcgcaucgagaaccugaacaagaaggucgacgacggcuuccucgacaucuggaccuacaacgccgagcugcuggugcuccuggagaacgagcggacgcuggacuaccacgacuccaacgugaagaaccucuacgagaagguccgcacccagcugaagaacaacgccaaggagaucgggaacggcugcuucgaguucuaccacaagugcgacaacacgugcauggagagcgugaagaacgggaccuacgacuaccccaaguacuccgaggaggccaagcugaaccgggaggagaucgacggcgugaagcucgagagcacccgcgucuaccagauccuggccaucuacuccaccguggcgagcucccuggugcucgucgugagccugggggccaucagcuucuggaugugcuccaacggcagccugcagugccggaucugcaucuga

SEQ ID NO: 73589 - RNA, 1701 nt, Artificial Sequence; identical to SEQ ID NO: 70459
  derived and/or modified CDS sequence (opt1) from hemagglutinin__InfluenzaA__AFN19730

SEQ ID NO: 73590 - RNA, 1701 nt, Artificial Sequence; identical to SEQ ID NO: 70839
  derived and/or modified CDS sequence (opt1) from hemagglutinin__InfluenzaA__AFN19736

SEQ ID NO: 73591 - RNA, 1701 nt, Artificial Sequence
  derived and/or modified CDS sequence (opt1) from hemagglutinin__InfluenzaA__AFN19748
augaaggccauccuggugguccuccuguacaccuucgccaccgcgaacgccgacacgcugugcaucggcuaccacgccaacaacagcaccgacaccguggacaccgugcucgagaagaacgucacggugacccacuccgugaaccugcuggaggacaagcacaacgggaagcucugcaagcugcgcggcgucgcgccccugcaccucgggaagugcaacaucgccggcuggauccuggggaacccggagugcgagagccuguccaccgccagcuccuggagcuacaucguggagaccuccagcuccgacaacggcacgugcuaccccggcgacuucaucgacuacgaggagcuccgggagcagcugagcuccgugagcuccuucgagcgcuucgagaucuuccccaagaccagcuccuggcccaaccacgacagcaacaagggggucaccgccgccugcccgcacgccggcgcgaaguccuucuacaagaaccugaucuggcucgugaagaccgggaacagcuaccccaagcuguccaagagcuacaucaacgacaagggcaaggaggugcugguccucugggggauccaccaccccagcacgaccgccgaccagcagucccuguaccagaacgccgacaccuacguguucgugggcaccagccgguacuccaagaaguucaagcccgagaucgccauccgcccgaagguccgggaccaggagggccgcaugaacuacuacuggacgcugguggagcccggggacaagaucaccuucgaggccaccggcaaccucguggucccccgguacgcguucgccauggagcgcaacgccgggagcggcaucaucaucuccgacacccccgugcacgacugcaacacgaccugccagaccccgaagggcgccaucaacaccagccugcccuuccagaacauccaccccaucacgaucgggaagugccccaaguacgugaaguccaccaagcugcggcucgccaccggccugcgcaacgucccgagcauccagucccgggggcuguucggcgcgaucgccggguucaucgagggcggcuggaccgggaugguggacggcugguacggguaccaccaccagaacgagcagggcagcggguacgccgccgaccucaaguccacgcagaacgccaucgacaagaucaccaacaaggugaacagcgucaucgagaagaugaacacccaguucaccgcggugggcaaggaguucaaccaccuggagaagcgcaucgagaaccugaacaagaaggucgacgacggcuuccucgacaucuggacguacaacgccgagcugcuggugcuccuggagaacgagcggacccuggacuaccacgacuccaacgugaagaaccucuacgagaagguccgcaaccagcugaagaacaacgccaaggagaccgggaacggcugcuucgaguucuaccacaagugcgacaacacgugcauggagagcgugaagaacgggaccuacgacuaccccaaguacuccgaggaggccaagcugaaccgggaggagaucgacggcgugaagcucgagagcacccgcaucuaccagauccuggccaucuacuccaccgucgcgagcucccuggugcucguggucagccugggggccaucagcuucuggaugugcuccaacggcagccugcagugccggaucugcaucuga

SEQ ID NO: 73592 - RNA, 1701 nt, Artificial Sequence; identical to SEQ ID NO: 70848
  derived and/or modified CDS sequence (opt1) from hemagglutinin__InfluenzaA__AFN19757

SEQ ID NO: 73593 - RNA, 1701 nt, Artificial Sequence; identical to SEQ ID NO: 70839
  derived and/or modified CDS sequence (opt1) from hemagglutinin__InfluenzaA__AFN19768

SEQ ID NO: 73594 - RNA, 1701 nt, Artificial Sequence
  derived and/or modified CDS sequence (opt1) from hemagglutinin__InfluenzaA__AFN19781
augaaggccauccuggugguccuccuguacaccuucgccaccgcgaacgccgacacgcugugcaucggcuaccacgccaacaacagcaccgacaccguggacaccgugcucgagaagaacgucacggugacccacuccgugaaccugcuggaggacaagcacaacgggaagcucugcaagcugcgcggcgucgcgccccugcaccucgggaagugcaacaucgccggcuggauccuggggaacccggagugcgagagccuguccaccgccagcuccuggagcuacaucguggagaccuccagcuccgacaacggcacgugcuaccccggcgacuucaucgacuacgaggagcuccgggagcagcugagcuccgugagcuccuucgagcgcuucgagaucuuccccaagaccagcuccuggcccaaccacgacagcaacaagggggucaccgccgccugcccgcacgccggcgcgaaguccuucuacaagaaccugaucuggcucgugaagaaggggaacagcuaccccaagcuguccaagagcuacaucaacgacaagggcaaggaggugcugguccucugggggauccaccaccccagcaccacggccgaccagcagucccuguaccagaacgccgacaccuacguguucgugggcaccagccgguacuccaagaaguucaagcccgagaucgccauccgcccgaagguccgggaccaggagggccgcaugaacuacuacuggacccugguggagcccggggacaagaucacguucgaggccaccggcaaccucguggucccccgguacgcguucgccguggagcgcaacgccgggagcggcaucaucaucuccgacacccccgugcacgacugcaacaccacgugccagaccccgaagggcgccaucaacaccagccugcccuuccagaacauccaccccaucaccaucgggaagugccccaaguacgucaaguccacgaagcugcggcucgccaccggccugcgcaacgugccgagcauccagucccgggggcuguucggcgcgaucgccggguucaucgagggcggcuggaccgggaugguggacggcugguacggguaccaccaccagaacgagcagggcagcggguacgccgccgaccucaaguccacccagaacgccaucgacaagaucacgaacaaggucaacagcgugaucgagaagaugaacacccaguucaccgcggucggcaaggaguucaaccaccuggagaagcgcaucgagaaccugaacaagaagguggacgacggcuuccucgacaucuggaccuacaacgccgagcugcuggugcuccuggagaacgagcggacgcuggacuaccacgacuccaacgucaagaaccucuacgagaaggugcgcaaccagcugaagaacaacgccaaggagaucgggaacggcugcuucgaguucuaccacaagugcgacaacacgugcauggagagcgugaagaacgggaccuacgacuaccccaaguacuccgaggaggccaagcugaaccgggaggagaucgacggcgucaagcucgagagcacccgcaucuaccagauccuggccaucuacuccaccguggcgagcucccuggugcucgucgugagccugggggccaucagcuucuggaugugcuccaacggcagccugcagugccggaucugcaucuga

SEQ ID NO: 73595 - RNA, 1701 nt, Artificial Sequence
  derived and/or modified CDS sequence (opt1) from hemagglutinin__InfluenzaA__AFN19791
augaaggccauccuggugguccuccuguacaccuucgccaucgcgaacgccgacacccugugcaucggcuaccacgccaacaacagcacggacaccguggacaccgugcucgagaagaacgucaccgugacgcacuccgugaaccugcuggaggacaagcacaacgggaagcucugcaagcugcgcggcgucgcgccccugcaccucgggaagugcaacaucgccggcuggauccuggggaacccggagugcgagagccuguccaccgccagcuccuggagcuacaucguggagaccuccagcuccgacaacgggaccugcuaccccggcgacuucaucaacuacgaggagcuccgggagcagcugagcuccgugagcuccuucgagcgcuucgagaucuuccccaagacgagcuccuggcccaaccacgacagcaacaagggggucaccgccgccugcccgcacgccggcgcgaaguccuucuacaagaaccugaucuggcucgugaagaaggggaacagcuaccccaagcuguccaagagcuacaucaacgacaagggcaaggaggugcugguccucugggggauccaccaccccagcaccuccgccgaccagcagagccuguaccagaacgccgacgccuacguguucgugggcaccuccaaguacagcaagaaguucaagcccgagaucgccguccggccgaaggugcgcgaccaggagggccggaugaacuacuacuggacgcugguggagcccggggacaagaucaccuucgaggcgaccggcaaccuccuggucccccgcuacgccuucgccauggagcggaacgccggguccggcaucaucaucagcgacacccccgugcacgacugcaacacgaccugccagaccccggagggcgccaucaacaccucccugcccuuccagaacauccaccccaucacgaucgggaagugccccaaguacgucaagagcaccaagcuccgccuggcgaccggccugcggaacgugccguccauccagagccgcggccucuucggcgccaucgccggguucaucgagggcggcuggaccgggaugguggacggcugguacggguaccaccaccagaacgagcagggcuccggguacgccgccgaccucaagagcacgcagaacgcgaucgacaagaucaccaacaaggugaacuccgucaucgagaagaugaacacccaguucaccgccgugggcaaggaguucaaccaccuggagaagcggaucgagaaccugaacaagaaggucgacgacggcuuccuggacaucuggacguacaacgccgagcugcucgugcugcuggagaacgagcgcacccucgacuaccacgacagcaacgugaagaaccuguacgagaagguccggucccagcugaagaacaacgccaaggagaucgggaacggcugcuucgaguucuaccacaagugcgacaacacgugcauggagagcgugaagaacgggaccuacgacuaccccaaguacuccgaggaggccaagcucaaccgcgaggagaucgacggcgugaagcuggagagcacccggaucuaccagauccuggcgaucuacuccaccgucgccagcagccucgugcugaucgugucccugggggccaucagcuucuggaugugcuccaacggcagccuccagugccgcaucugcaucuga

SEQ ID NO: 73596 - RNA, 1701 nt, Artificial Sequence; identical to SEQ ID NO: 70839
  derived and/or modified CDS sequence (opt1) from hemagglutinin__InfluenzaA__AFN19806

SEQ ID NO: 73597 - RNA, 1701 nt, Artificial Sequence
  derived and/or modified CDS sequence (opt1) from hemagglutinin__InfluenzaA__AFN19808
augaaggccauccuggugguccuccuguacaccuucgccaccgcgaacgccgacacgcugugcaucggcuaccacgccaacaacagcaccgacaccguggacaccgugcucgagaagaacgucacggugacccacuccgugaaccugcuggaggacaagcacaacgggaagcucugcaagcugcgcggcgucgcgccccugcaccucgggaagugcaacaucgccggcuggauccuggggaacccggagugcgagagccuguccaccgccaacagcugguccuacaucguggagaccagcuccagcgacaacggcacgugcuaccccggcgacuucaucgacuacgaggagcuccgggagcagcuguccagcguguccagcuucgagcgcuucgagaucuuccccaagaccaacuccuggcccaaccacgacagcaacaagggggucaccgccgccugcccgcacgccggcgcgaaguccuucuacaagaaccugaucuggcucgugaagaaggggaacagcuaccccaagcuguccaagagcuacaucaacgacaagggcaaggaggugcugguccucugggggauccaccaccccuccaccagcgccgaccagcagagccuguaccagaacgccgacgccuacguguucgugggcacgucccgguacagcaagaaguucaagcccgagaucgccauccgcccgaagguccgggaccaggagggccgcaugaacuacuacuggacccugguggagcccggggacaagaucaccuucgaggcgaccggcaaccucguggucccccgguacgccuucgccauggagcgcaacgccggguccggcaucaucaucagcgacacgcccgcccacgacugcaacacgaccugccagaccccgaagggcgcgaucaacaccucccugcccuuccagaacauccaccccaucaccaucgggaagugccccaaguacgugaacagcaccaagcugcggcucgccaccggccugcgcaacgugccguccauccagagccgggggcuguucggcgccaucgccggguucaucgagggcggcuggacggggauggucgacggcugguacggguaccaccaccagaacgagcagggcuccggguacgccgcggaccucaagagcacccagaacgccaucgacaagaucaccaacaaggugaacuccgugaucgagaagaugaacacccaguucacggccgucggcaaggaguucaaccaccuggagaagcgcaucgagaaccugaacaagaagguggacgacggcuuccucgacaucuggaccuacaacgccgagcugcugguccuccuggagaacgagcggacccuggacuaccacgacagcaacgugaagaaccucuacgagaaggugcgcucccagcugaagaacaacgccaaggagaucgggaacggcugcuucgaguucuaccacaagugcgacaacacgugcauggagagcgucaagaacgggaccuacgacuaccccaaguacuccgaggaggcgaagcugaaccgggaggagaucgacggcgugaagcucgagagcacccgcaucuaccagauccuggccaucuacuccaccguggccagcucccugguccucguggugagccugggggccaucagcuucuggaugugcuccaacggcagccugcagugccggaucugcaucuga

SEQ ID NO: 73598 - RNA, 1701 nt, Artificial Sequence; identical to SEQ ID NO: 70848
  derived and/or modified CDS sequence (opt1) from hemagglutinin__InfluenzaA__AFN19814

SEQ ID NO: 73599 - RNA, 1701 nt, Artificial Sequence
  derived and/or modified CDS sequence (opt1) from hemagglutinin__InfluenzaA__AFN19816
augaaggccauccuggugguccuccuguacaccuucgccaccgcgaacgccgacacgcugugcaucggcuaccacgccaacaacagcaccgacaccguggacaccgugcucgagaagaacgucacggugacccacuccgugaaccugcuggaggacaagcacaacgggaagcucugcaagcugcgcggcgucgcgccccugcaccucgggaagugcaacaucgccggcuggauccuggggaacccggagugcgagagccuguccaccgccagcuccuggagcuacaucguggagaccuccagcuccgacaacggcacgugcuaccccggcgacuucaucgacuacgaggagcuccgggagcagcugagcuccgugagcuccuucgagcgcuucgagaucuuccccaagaccagcuccuggcccaaccacgacagcaacaagggggucaccgccgccugcccgcacgccggcgcgaagggguucuacaagaaccugaucuggcucgugaagaagggcaacuccuaccccaagcugagcaaguccuacaucaacgacaaggggaaggaggugcugguccucuggggcauccaccaccccagcaccacggccgaccagcagagccuguaccagaacgccgacaccuacguguucgugggcaccucccgguacagcaagaaguucaagcccgagaucgccauccgcccgaagguccgggaccaggaggggcgcaugaacuacuacuggacccugguggagcccggcgacaagaucacguucgaggccaccgggaaccucguggucccccgguacgcguucgccauggagcgcgacgccggcuccggcaucaucaucagcgacacccccgugcacgacugcaacaccacgugccagaccccgaagggggccaucaacaccucccugcccuuccagaacauccaccccaucaccaucggcaagugccccaaguacgucaagagcacgaagcugcggcucgccaccgggcugcgcaacgugccguccauccagagccggggccuguucggggcgaucgccggcuucaucgagggcggguggaccggcaugguggacgggugguacggcuaccaccaccagaacgagcagggguccggcuacgccgccgaccucaagagcacccagaacgccaucgacaagaucacgaacaaggugaacuccgucaucgagaagaugaacacccaguucaccgcggugggcaaggaguucaaccaccuggagaagcgcaucgagaaccugaacaagaaggucgacgacggguuccucgacaucuggaccuacaacgccgagcugcuggugcuccuggagaacgagcggacgcuggacuaccacgacagcaacgugaagaaccucuacgagaagguccgcaaccagcugaagaacaacgccaaggagaucggcaacgggugcuucgaguucuaccacaagugcgacaacacgugcauggaguccgugaagaacggcaccuacgacuaccccaaguacagcgaggaggccaagcugaaccgggaggagaucgacggggugaagcucgaguccacccgcaucuaccagauccuggccaucuacagcaccgucgcguccagccuggugcucguggucucccugggcgccaucagcuucuggaugugcagcaacggcucccugcagugccggaucugcaucuga

SEQ ID NO: 73600 - RNA, 1701 nt, Artificial Sequence
  derived and/or modified CDS sequence (opt1) from hemagglutinin__InfluenzaA__AFN19821
augaaggccauccuggugguccuccuguacaccuucgccaccgcgaacgccgacacgcugugcaucggcuaccacgccaacaacagcaccgacaccguggacaccgugcucgagaagaacgucacggugacccacuccgugaaccugcuggaggacaagcacaacgggaagcucugcaagcugcgcggcgucgcgccccugcaccucgggaagugcaacaucgccggcuggauccuggggaacccggagugcgagagccuguccaccgccagcuccuggagcuacaucguggagaccuccagcuccgacaacggcacgugcuaccccggcgacuucaucgacuacgaggagcuccgggagcagcugagcuccgugagcuccuucgagcgcuucgagaucuuccccaagaccagcuccuggcccaaccacgacagcaacaagggggucaccgccgccugcccgcacgccggcgcgaaguccuucuacaagaaccugaucuggcucgugaagaaggggaacagcuaccccaagcuguccaagagcuacaucaacgacaagggcaaggaggugcugguccucugggggauccaccaccccagcaccacggccgaccagcagucccuguaccagaacgccgacaccuacguguucgugggcaccagccgguacuccaagaagcugaagcccgagaucgccauccgcccgaagguccgggaccaggagggccgcaugaacuacuacuggacccucguggagcccgggggcaagaucacguucgaggccaccgggaaccugguggucccccgguacgcguucgccauggagcgcaacgccggcagcggcaucaucaucuccgacacccccgugcacgacugcaacaccacgugccagaccccgaagggggccaucaacaccagccugcccuuccagaacauccaccccaucaccaucggcaagugccccaaguacgugaaguccacgaagcuccggcuggccaccgggcugcgcaacgucccgagcauccagucccggggccucuucggggcgaucgccggcuucaucgagggcggguggaccggcaugguggacgggugguacggcuaccaccaccagaacgagcaggggagcggcuacgccgccgaccugaaguccacccagaacgccaucgacaagaucacgaacaaggugaacagcgucaucgagaagaugaacacccaguucaccgcggugggcaaggaguucaaccaccuggagaagcgcaucgagaaccucaacaagaaggucgacgacggguuccuggacaucuggaccuacaacgccgagcugcucgugcugcuggagaacgagcggacgcucgacuaccacgacuccaacgugaagaaccuguacgagaagguccgcaaccagcugaagaacaacgccaaggagaucggcaacgggugcuucgaguucuaccacaagugcgacaacacgugcauggagagcgugaagaacggcaccuacgacuaccccaaguacuccgaggaggccaagcucaaccgggaggagaucgacggggugaagcuggagagcacccgcaucuaccagauccuggccaucuacuccaccgucgcgagcucccucgugcugguggucagccugggcgccaucagcuucuggaugugcuccaacggcagccuccagugccggaucugcaucuga

SEQ ID NO: 73601 - RNA, 1701 nt, Artificial Sequence; identical to SEQ ID NO: 70459
  derived and/or modified CDS sequence (opt1) from hemagglutinin__InfluenzaA__AFN19831

SEQ ID NO: 73602 - RNA, 1701 nt, Artificial Sequence
  derived and/or modified CDS sequence (opt1) from hemagglutinin__InfluenzaA__AFN19849
augaaggccauccuggugguccuccuguacaccuucgccaccgcgaacgccgacacgcugugcaucggcuaccacgccaacaacagcaccgacaccguggacaccgugcucgagaagaacgucacggugacccacuccgugaaccugcuggaggacaagcacaacgggaagcucugcaagcugcgcggcgucgcgccccugcaccucgggaagugcgacaucgccggcuggauccuggggaacccggagugcgagagccuguccaccgccagcuccuggagcuacaucguggagaccuccagcuccgacaacggcacgugcuaccccggcgacuucaucaacuacgaggagcuccgggagcagcugagcuccgugagcuccuucgagcgcuucgagaucuuccccaagaccagcuccuggcccaaccacgacagcaacaagggggucaccgccgccugcccgcaggccggcgcgaaguccuucuacaagaaccugaucuggcucgugaagaaggggaacagcuaccccaagcuguccaagagcuacaucaacgacaagggcaaggaggugcugguccucugggggauccaccaccccagcaccuccgccgaccagcagagccuguaccagaacgccgacgccuacguguucgugggcacguccaaguacagcaagaaguucaagcccgagaucgccguccggccgaaggugcgcgaccaggagggccggaugaacuacuacuggacccugguggagcccggggacaagaucaccuucgaggcgaccggcaaccuccuggucccccgcuacgccuucgccauggagcggaacgccggguccggcaucaucaucagcgacacgcccgugcacgacugcaacacgaccugccagaccccgaagggcgccaucaacaccucccugcccuuccagaacauccaccccaucaccaucgggaagugccccaaguacgucaagagcaccaagcuccgccuggcgaccggccugcggaacgugccguccauccagagccgcgggcuguucggcgccaucgccggguucaucgagggcggcuggacggggaugguggacggcugguacggguaccaccaccagaacgcccagggcuccggguacgccgcggaccucaagagcacccagaacgccaucgacaagaucaccaacaaggugaacuccgucaucgagaagaugaacacccaguucacggccgugggcaaggaguucaaccaccuggagaagcggaucgagaaccucaacaagaaggucgacgacggcuuccuggacaucuggaccuacaacgccgagcugcucgugcugcuggagaacgagcgcacccucgacuaccacgacagcaacgugaagaaccuguacgagaagguccggucccagcugaagaacaacgccaaggagaucggggacggcugcuucgaguucuaccacaagugcgacaacacgugcauggagagcgugaagaacgggaccuacgacuaccccaaguacuccgaggaggcgaagcucaaccgcgaggagaucgacggcgugaagcuggagagcacccggaucuaccagauccuggccaucuacuccaccgucgccagcagccucgugcugguggucucccugggggccaucagcuucuggaugugcuccaacggcagccuccagugccgcaucugcaucuga

SEQ ID NO: 73603 - RNA, 1701 nt, Artificial Sequence
  derived and/or modified CDS sequence (opt1) from hemagglutinin__InfluenzaA__AFN19865
augaaggccauccuggugguccuccuguacaccuucgccaccgcgaacgccgacacgcugugcaucggcuaccacgccaacaacagcaccgacaccguggacaccgugcucgagaagaacgucacggugacccacuccgugaaccugcuggaggacaagcacaacgggaagcucugcaagcugcgcggcgucgcgccccugcaccucgggaagugcaacaucgccggcuggauccuggggaacccggagugcgagagccuguccaccgccagcuccuggagcuacaucguggagaccuccagcuccgacaacggcacgugcuaccccggcgacuucaucgacuacgaggagcuccgggagcagcugagcuccgugagcuccuucgagcgcuucgagaucuuccccaagaccagcuccuggcccaaccacgacagcaacaagggggucaccgccgccugcccgcacgccggcgcgaaguccuucuacaagaaccugaucuggcucgugaagaaggggaacagcuaccccaagcuguccaagagcuacaucaacgacaagggcaaggaggugcugguccucugggggauccaccaccccagcaccacggccgaccagcagucccuguaccagaacgccgacgccuacguguucgugggcaccagccgguacuccaagaaguucaagcccgagaucgccauccgcccgaagguccgggaccaggagggccgcaugaacuacuacuggacccugguggagcccggggacaagaucaccuucgaggcgacgggcaaccucguggucccccgguacgccuucgccauggagcgcaacgccgggagcggcaucaucaucuccgacacccuggugcacgacugcaacacgaccugccagacccccaagggcgccaucaacaccagccugccguuccagaacauccaccccaucaccaucgggaagugccccaaguacgugaaguccaccaagcuccggcuggcgacgggccugcgcaacguccccagcauccagucccggggccucuucggggccaucgccggguucaucgagggcggcuggaccgggaugguggacggcugguacggguaccaccaccagaacgagcagggcagcggguacgccgccgaccugaaguccacccagaacgcgaucgacaagaucaccaacaaggugaacagcgucaucgagaagaugaacacgcaguucaccgccgugggcaaggaguucaaccaccuggagaagcgcaucgagaaccucaacaagaaggucgacgacggcuuccuggacaucuggaccuacaacgccgagcugcucgugcugcuggagaacgagcggacccucgacuaccacgacuccaacgugaagaaccuguacgagaagguccgcaaccagcugaagaacaacgccaaggagaucgggaacggcugcuucgaguucuaccacaagugcgacaacacgugcauggagagcgugaagaacgggaccuacgacuacccgaaguacuccgaggaggccaagcucaaccgggaggagaucgacggcgugaagcuggagagcacccgcaucuaccagauccuggcgaucuacuccaccgucgccagcucccucgugcugguggucagccugggggccaucagcuucuggaugugcuccaacggcagccuccagugccggaucugcaucuga

SEQ ID NO: 73604 - RNA, 1701 nt, Artificial Sequence
  derived and/or modified CDS sequence (opt1) from hemagglutinin__InfluenzaA__AFN19875
augaaggccauccuggugguccuccuguacaccuucgccaccgcgaacgccgacacgcugugcaucggcuaccacgccaacaacagcaccgacaccguggacaccgugcucgagaagaacgucacggugacccacuccgugaaccugcuggaggacaagcacaacgggaagcucugcaagcugcgcggcgucgcgccccugcaccucgggaagugcaacaucgccggcuggauccuggggaacccggagugcgagagccuguccaccgccagcuccuggagcuacaucguggagaccuccagcuccgacaacggcacgugcuaccccggcgacuucaucaacuacgaggagcuccgggagcagcugagcuccgugagcuccuucgagcgcuucgagaucuuccccaagaccagcuccuggcccaaccacgacagcaacaagggggucaccgccgccugcccgcacgccggcgagaaguccuucuacaagaaccugaucuggcucgugaagaaggggaacagcuaccccaagcuguccaagagcuacaucaacgacaagggcaaggaggugcugguccucugggggauccaccaccccagcaccuccgcggaccagcagagccuguaccagaacgccgacgccuacguguucgugggcacguccaaguacagcaagaaguucaagcccgagaucgccguccggccgaaggugcgcgaccaggagggccggaugaacuacuacuggacccugguggagcccggggacaagaucaccuucgaggccaccggcaaccuccuggucccccgcuacgcguucgccauggagcggaacgccggguccggcaucaucaucagcgacacgcccgugcacgacugcaacacgaccugccagaccccgaagggcgccaucaacaccucccugcccuuccagaacauccaccccaucaccaucgggaagugccccaaguacgucaagagcaccaagcuccgccuggccaccggccugcggaacgugccguccauccagagccgcgggcuguucggcgcgaucgccggguucaucgagggcggcuggacggggaugguggacggcugguacggguaccaccaccagaacgagcagggcuccggguacgccgccgaccucaagagcacccagaacgccaucgacaagaucaccaacaaggugaacuccgucaucgagaagaugaacacccaguucacggcggugggcaaggaguucaaccaccuggagaagcggaucgagaaccucaacaagaaggucgacgacggcuuccuggacaucuggaccuacaacgccgagcugcucgugcugcuggagaacgagcgcacccucgacuaccacgacagcaacgugaagaaccuguacgagaagguccggucccagcugaagaacaacgccaaggagaucgggaacggcugcuucgaguucuaccacaagugcgacaacacgugcauggagagcgugaagaacgggaccuacgacuaccccaaguacuccgaggaggccaagcucaaccgcgaggagaucgacggcgugaagcuggagagcacccggaucuaccagauccuggccaucuacuccaccgucgcgagcagccucgugcugguggucucccugggggccaucagcuucuggaugugcuccaacggcagccuccagugccgcaucugcaucuga

SEQ ID NO: 73605 - RNA, 1701 nt, Artificial Sequence
  derived and/or modified CDS sequence (opt1) from hemagglutinin__InfluenzaA__AFN19895
augaaggccauccuggugguccuccuguacaccuucgccaccgcgaacgccgacacgcugugcaucggcuaccacgccaacaacagcaccgacaccguggacaccgugcucgagaagaacgucacggugacccacuccgugaaccugcuggaggacaagcacaacgggaagcucugcaagcugcgcggcgucgcgccccugcaccucgggaagugcaacaucgccggcuggauccuggggaacccggagugcgagagccuguccaccgccagcuccuggagcuacaucguggagaccuccagcuccgacaacggcacgugcuaccccggcgacuucaucgacuacgaggagcuccgggagcagcugagcuccgugagcuccuucgagcgcuucgagaucuuccccaagaccagcuccuggcccaaccacgacagcaacaagggggucaccgccgccugcccgcacgccggcgcgaaguccuucuacaagaaccugaucuggcucgugaagaaggggaacagcuaccccaagaucuccaagagcuacaucaacgacaagggcaaggaggugcugguccugugggggauccaccaccccagcaccacggccgaccagcagucccucuaccagaacgccgacaccuacguguucgugggcaccagccgguacuccaagaaguucaagcccgagaucgccauccgcccgaagguccgggaccaggagggccgcaugaacuacuacuggacccugguggagcccggggacaagaucacguucgaggccaccggcaaccugguggucccccgguacgcguucgccauggagcgcaacgccgggagcggcaucaucaucuccgacacccccgugcacgacugcaacaccacgugccagaccccgaagggcgccaucaacaccagccuccccuuccagaacauccaccccaucaccaucgggcggugccccaaguacgugaaguccacgaagcugcgccuggccaccggccuccggaacgucccgagcauccagucccgcgggcuguucggcgcgaucgccggguucaucgagggcggcuggaccgggaugguggacggcugguacggguaccaccaccagaacgagcagggcagcggguacgccgccgaccugaaguccacccagaacgccaucgacaagaucacgaacaaggugaacagcgucaucgagaagaugaacacccaguucaccgcggugggcaaggaguucaaccaccucgagaagcggaucgagaaccugaacaagaaggucgacgacggcuuccuggacaucuggaccuacaacgccgagcuccuggugcugcucgagaacgagcgcacgcuggacuaccacgacuccaacgugaagaaccuguacgagaagguccggaaccagcucaagaacaacgccaaggagaccgggaacggcugcuucgaguucuaccacaagugcgacaacacgugcauggagagcgugaagaacgggaccuacgacuaccccaaguacuccgaggaggccaagcugaaccgcgaggugaucgacggcgucaagcuggagagcacccggaucuaccagauccucgccaucuacuccaccguggcgagcucccuggugcuggucgugagccucggggccaucagcuucuggaugugcuccaacggcagccugcagugccgcaucugcaucuga

SEQ ID NO: 73606 - RNA, 1701 nt, Artificial Sequence
  derived and/or modified CDS sequence (opt1) from hemagglutinin__InfluenzaA__AFN19905
augaaggccauccuggugguccuccuguacaccuucgccaccgcgaacgccgacacgcugugcaucggcuaccacgccaacaacagcaccgacaccguggacaccgugcucgagaagaacgucacggugacccacuccgugaaccugcuggaggacaagcacaacgggaagcucugcaagcugcgcggcgucgcgccccugcaccucgggaagugcaacaucgccggcuggauccuggggaacccggagugcgagagccuguccaccgccagcuccuggagcuacaucguggagaccuccagcuccgacaacggcacgugcuaccccggcgacuucaucgacuacgaggagcuccgggagcagcugagcuccgugagcuccuucgagcgcuucgagaucuuccccaagaccagcuccuggcccaaccacgacagcaacaagggggucaccgccgccugcccgcacgccggcgcgaagggguucuacaagaaccugaucuggcucgugaagaagggcaacuccuaccccaagcugagcaaguccuacaucaacgacaaggggaaggaggugcugguccucuggggcauccaccaccccagcaccacggccgaccagcagagccuguaccagaacgccgacaccuacguguucgugggcaccucccgguacagcaagaaguucaagcccgagaucgccauccgcccgaagguccgggaccaggaggggcgcaugaacuacuacuggacccugguggagcccggcgacaagaucacguucgaggccaccgggaaccucguggucccccgguacgcguucgccauggagcgcaacgccggcuccggcaucaucaucagcgacacccccgugcacgacugcaacaccacgugccagaccccgaagggggccaucaacaccucccugcccuuccagaacauccaccccaucaccaucggcaagugccccaaguacgucaagagcacgaagcugcggcucgccaccgggcugcgcaacgugccguccauccagagccggggccuguucggggcgaucgccggcuucaucgagggcggguggaccggcaugguggacgggugguacggcuaccaccaccagaacgagcagggguccggcuacgccgccgaccucaagagcacccagaacgccguggacaagaucacgaacaaggucaacuccgugaucgagaagaugaacacccaguucaccgcggucggcaaggaguucaaccaccuggagaagcgcaucgagaaccugaacaagaagguggacgacggguuccucgacaucuggaccuacaacgccgagcugcuggugcuccuggagaacgagcggacgcuggacuaccacgacagcaacgucaagaaccucuacgagaaggugcgcaaccagcugaagaacaacgccaaggagaucggcaacgggugcuucgaguucuaccacaagugcgacaacacgugcauggaguccgugaagaacggcaccuacgacuaccccaaguacagcgaggaggccaagcugaaccgggagaagaucgacggggucaagcucgaguccacccgcaucuaccagauccuggccaucuacagcaccguggcguccagccuggugcucaucgucucccugggcgccaucagcuucuggaugugcagcaacggcucccugcagugccggaucugcaucuga

SEQ ID NO: 73607 - RNA, 1701 nt, Artificial Sequence
  derived and/or modified CDS sequence (opt1) from hemagglutinin__InfluenzaA__AFN19915
augaaggccauccuggugguccuccuguacaccuucgccaccgcgaacgccgacacgcugugcaucggcuaccacgccaacaacagcaccgacaccguggacaccgugcucgagaagaacgucacggugacccacuccgugaaccugcuggaggacaagcacaacgggaagcucugcaagcugcgcggcgucgcgccccugcaccucgggaagugcaacaucgccggcuggauccuggggaacccggagugcgagagccuguccaccgccagcuccuggagcuacaucguggagaccuccagcuccgacaacggcacgugcuaccccggcgacuucaucaacuacgaggagcuccgggagcagcugagcuccgugagcuccuucgagcgcuucgagaucuuccccaagaccagcuccuggcccaaccacgacagcaacaagggggucaccgccgccugcccgcaggccggcgcgaaguccuucuacaagaaccugaucuggcucgugaagaaggggaacagcuaccccaagcuguccagcagcuacaucaacgacaagggcaaggaggugcugguccucugggggauccaccaccccuccaccagcgccgaccagcagucccuguaccagaacgccgacgccuacguguucgugggcacgagcgaguacuccaagaaguucaagcccgagaucgccguccggccgaaggugcgcgaccaggagggccggaugaacuacuacuggacccugguggagcccggggacaagaucaccuucgaggcgaccggcaaccuccuggucccccgcuacgccuucgccauggagcggaacgccgggagcggcaucaucaucuccgacacgcccgugcacgacugcaacacgaccugccagaccccgaagggcgccaucaacaccagccugcccuuccagaacauccaccccaucaccaucgggaagugccccaaguacgugaaguccaccaagcuccgccuggcgaccggccugcggaacgucccgagcauccagucccgcggccucuucggggccaucgccggguucaucgagggcggcuggacggggaugguggacggcugguacggguaccaccaccagaacgcccagggcagcggguacgccgcggaccugaaguccacccagaacgccaucgacaagaucaccaacaaggugaacagcgucaucgagaagaugaacacccaguucacggccgugggcaaggaguucaaccaccuggagaagcggaucgagaaccucaacaagaaggucgacgacggcuuccuggacaucuggaccuacaacgccgagcugcucgugcugcuggagaacgagcgcacccucgacuaccacgacuccaacgugaagaaccuguacgagaagguccggagccagcugaagaacaacgccaaggagaucgggaacggcugcuucgaguucuaccacaagugcgacaacacgugcauggaguccgugaagaacgggaccuacgacuaccccaaguacagcgaggaggcgaagcucaaccgcgaggagaucgacggcgugaagcuggaguccacccggaucuaccagauccuggccaucuacagcaccgucgccagcucccucgugcugguggucagccugggggccaucuccuucuggaugugcagcaacggcucccuccagugccgcaucugcaucuga

SEQ ID NO: 73608 - RNA, 1701 nt, Artificial Sequence
  derived and/or modified CDS sequence (opt1) from hemagglutinin__InfluenzaA__AFN19922
augaaggccauccugguggucgugcucuacaccuucgccaccgcgaacgccgacacgcugugcaucggcuaccacgccaacaacagcaccgacaccguggacaccguccuggagaagaacgugacggugacccacuccgucaaccuccuggaggacaagcacaacgggaagcugugcaagcuccgcggcguggcgccccugcaccuggggaagugcaacaucgccggcuggauccucgggaacccggagugcgagagccuguccaccgccagcuccuggagcuacaucguggagaccuccagcuccgacaacggcacgugcuaccccggcgacuucaucgacuacgaggagcugcgggagcagcucagcuccgucagcuccuucgagcgcuucgagaucuuccccaagaccagcuccuggcccaaccacgacagcaacaagggggugaccgccgccugcccgcacgccggcgcgaagggguucuacaagaaccugaucuggcuggugaagaagggcaacuccuaccccaagcucagccgguccuacaucaacgacaaggggaaggagguccuggugcuguggggcauccaccaccccagcaccacggccgaccagcagagccucuaccagaacgccgacaccuacguguucgucggcaccucccgcuacagcaagaaguucaagcccgagaucgccauccggccgaaggugcgcgaccaggaggggcggaugaacuacuacuggacccugguggagcccggcgacaagaucacguucgaggccaccgggaaccuggucgugccccgcuacgcguucgccauggagcggaacgccggcuccggcaucaucaucagcgacacccccgcccaggacugcaacaccacgugccagaccccgaagggggccaucaacaccucccuccccuuccagaacauccaccccaucaccaucggcaagugccccaaguacgucaagagcacgaagcugcgccuggcgaccgggcuccggaacgugccguccauccagagccgcggccuguucggggccaucgccggcuucaucgagggcggguggaccggcaugguggacgggugguacggcuaccaccaccagaacgagcagggguccggcuacgccgccgaccucaagagcacccagaacgcgaucgacaagaucacgaacaaggugaacuccgucaucgagaagaugaacacccaguucaccgccgugggcaaggaguucaaccaccuggagaagcggaucgagaaccugaacaagaaggucgacgacggguuccuggacaucuggaccuacaacgccgagcuccuggugcugcucgagaacgagcgcacgcuggacuaccacgacagcaacgugaagaaccuguacgagaagguccggaaccagcucaagaacaacgccaaggagaucggcaacgggugcuucgaguucuaccacaagugcgacaacacgugcauggaguccgugaagaacggcaccuacgacuaccccaaguacagcgaggaggccaagcugaaccgcgaggagaucgacggggugaagcuggaguccacccggaucuaccagauccucgcgaucuacagcaccgucgccuccagccuggugcugguggucucccucggcgccaucagcuucuggaugugcagcaacggcucccugcagugccgcaucugcaucuga

SEQ ID NO: 73609 - RNA, 1701 nt, Artificial Sequence; identical to SEQ ID NO: 70478
  derived and/or modified CDS sequence (opt1) from hemagglutinin__InfluenzaA__AFN19931

SEQ ID NO: 73610 - RNA, 1701 nt, Artificial Sequence
  derived and/or modified CDS sequence (opt1) from hemagglutinin__InfluenzaA__AFN19941
augaaggccauccuggugguccuccuguacaccuucgccaccgcgaacgccgacacgcugugcaucggcuaccacgccaacaacagcaccgacaccguggacaccgugcucgagaagaacgucacggugacccacuccgugaaccugcuggaggacaagcacaacgggaagcucugcaagcugcgcggcgucgcgccccugcaccucgggaagugcaacaucgccggcuggauccuggggaacccggagugcgagagccuguccaccgcgagcuccuggagcuacaucguggagaccuccaucagcgacaacggcacgugcuaccccggcgacuucaucaacuacgaggagcuccgggagcagcuguccagcguguccagcuucgagcgcuucgagaucuuccccaagaccuccagcuggcccaaccacgacuccaacaagggggucaccgccgccugcccgcaggccggcgccaagagcuucuacaagaaccugaucuggcucgugaagaaggggaacuccuaccccaagcugagcaaguccuacaucaacgacaagggcaaggaggugcugguccucugggggauccaccaccccagcaccagcgccgaccagcagucccuguaccagaacgccgacgccuacguguucgugggcacgagcaaguacuccaagaaguucaagcccgagaucgccguccggccgaaggugcgcgaccaggagggccggaugaacuacuacuggacccugguggagcccggggacaagaucaccuucgaggcgaccggcaaccuccuggucccccgcuacgccuucgccauggagcggaacgccgggagcggcaucaucaucuccgacacgcccgugcacgacugcaacacgaccugccagaccccgaagggcgccaucaacaccagccugcccuuccagaacauccaccccaucaccaucgggaagugccccaaguacgugaaguccaccaagcuccgccuggcgaccggccugcggaacgucccgagcauccagucccgcggccucuucggggccaucgccggguucaucgagggcggcuggacggggaugguggacggcugguacggguaccaccaccagaacgcccagggcagcggguacgccgcggaccugaaguccacccagaacgccaucgacaagaucaccaacaaggugaacagcgucaucgagaagaugaacacccaguucacggccgugggcaaggaguucaaccaccuggagaagcggaucgagaaccucaacaagaaggucgacgacggcuuccuggacaucuggaccuacaacgccgagcugcucgugcugcuggagaacgagcgcacccucgacuaccacgacuccaacgugaagaaccuguacgagaagguccggagccagcugaagaacaacgccaaggagaucgggaacggcugcuucgaguucuaccacaagugcgacaacacgugcauggaguccgugaagaacgggaccuacgacuaccccaaguacagcgaggaggcgaagcucaaccgcgaggagaucgacggcgugaagcuggaguccacccggaucuaccagauccuggccaucuacagcaccgucgccuccagccucgugcugguggucagccugggggccaucuccuucuggaugugcagcaacggcucccuccagugccgcaucugcaucuga

SEQ ID NO: 73611 - RNA, 1701 nt, Artificial Sequence
  derived and/or modified CDS sequence (opt1) from hemagglutinin__InfluenzaA__AFN19951
augaaggccauccuggugguccuccuguacaccuucgccaccgcgaacgccgacacgcugugcaucggcuaccacgccaacaacagcaccgacaccguggacaccgugcucgagaagaacgucacggugacccacuccgugaaccugcuggaggacaagcacaacgggaagcucugcaagcugcgcggcgucgcgccccugcaccucgggaagugcaacaucgccggcuggauccuggggaacccggagugcgagagccuguccaccgccagcuccuggagcuacaucguggagaccuccagcuccgacaacggcacgugcuaccccggcgacuucaucgacuacgaggagcuccgggagcagcugagcuccgugagcuccuucgagcgcuucgagaucuuccccaagaccagcuccuggcccaaccacgacagcaacaagggggucaccgccgccugcccgcacgccggcgcgaaguccuucuacaagaaccugaucuggcucgugaagaaggggaacagcuaccccaagcuguccaagagcuacaucaacgacaagggcaaggaggugcugguccucugggggauccaccaccccagcaccacggccgaccagcagucccuguaccagaacgccgacaccuacguguucgugggcaccagccgguacuccaagaaguucaagcccgagaucgccauccgcccgaagguccgggaccaggagggccgcaugaacuacuacuggacccugguggagcccggggacaagaucacguucgaggccaccggcaaccucguggucccccgguacgcguucgccauggagcgcaacgccgggagcggcaucaucaucuccgacacccccgugcacgacugcaacaccacgugccagaccccgaagggcgccaucaacaccagccugcccuuccagaacauccaccccaucaccaucgggaagugccccaaguacgugaaguccacgaagcugcggcucgccaccggccugcgcaacgucccgagcauccagucccgggggcuguucggcgcgaucgccggguucaucgagggcggcuggaccgggaugguggacggcugguacggguaccaccaccagaacgagcagggcagcggguacgccgccgaccucaaguccacccagaacgccaucgacaagaucacgaacaaggugaacagcgucaucgagaagaugaacacccaguucaccgcggugggcaaggaguucaaccaccuggagaagcgcaucgagaaccugaacaagaaggucgacgacggcuuccucgacaucuggaccuacaacgccgagcugcuggugcuccuggagaacgagcggacgcuggacuaccacgacuccaacgugaagaaccucuacgagaagguccgcaaccagcugaagaacaacgccaaggagaccgggaacggcugcuucgaguucuaccacaagugcgacaacacgugcauggagagcgugaagaacgggaccuacgacuaccccaaguacuccgaggaggccaagcugaaccgggaggagaucgacggcgugaagcucgagagcacccgcaucuaccagauccuggccaucuacuccaccgcggccagcucccugguccucguggugagccugggggccaucagcuucuggaugugcuccaacggcagccugcagugccggaucugcaucuga

SEQ ID NO: 73612 - RNA, 1701 nt, Artificial Sequence; identical to SEQ ID NO: 70839
  derived and/or modified CDS sequence (opt1) from hemagglutinin__InfluenzaA__AFN19966

SEQ ID NO: 73613 - RNA, 1701 nt, Artificial Sequence
  derived and/or modified CDS sequence (opt1) from hemagglutinin__InfluenzaA__AFN19972
augaaggccauccuggugguccuccuguacaccuucgccaccgcgaacgccgacacgcugugcaucggcuaccacgccaacaacagcaccgacaccguggacaccgugcucgagaagaacgucacggugacccacuccgugaaccugcuggaggacaagcacaacgggaagcucugcaagcugcgcggcgucgcgccccugcaccucgggaagugcaacaucgccggcuggauccuggggaacccggagugcgagagccuguccaccgccagcuccuggagcuacaucguggagaccuccagcuccgacaacggcacgugcuaccccggcgacuucaucgacaacgaggagcuccgggagcagcugagcuccgugagcuccuucgagcgcuucgagaucuuccccaagaccagcuccuggcccaaccacgacagcaacaagggggucaccgccgccugcccgcacgccggcgcgaaguccuucuacaagaaccugaucuggcucgugaagaaggggaacagcuaccccaagcuguccaagagcuacaucaacgacaagggcaaggaggugcugguccucugggggauccaccaccccagcaccacggccgaccagcagucccuguaccagaacgccgacaccuacguguucgugggcaccagccgguacuccaagaaguucaagcccgagaucgccauccgcccgaagguccgggaccaggagggccgcaugaacuacuacuggacccugguggagcccggggacaagaucacguucgaggccaccggcaaccucguggucccccgguacgcguucgccauggagcgcaacgccgggagcggcaucaucaucuccgacacccccgugcacgacugcaacaccacgugccagaccccgaagggcgccaucaacaccagccugcccuuccagaacauccaccccaucaccaucgggaagugccccaaguacgugaaguccacgaagcugcggcucgccaccggccugcgcaacgucccgagcauccagucccgggggcuguucggcgcgaucgccggguucaucgagggcggcuggaccgggaugguggacggcugguacggguaccaccaccagaacgagcagggcagcggguacgccgccgaccucaaguccacccagaacgccaucgacaagaucacgaacaaggugaacagcgucaucgagaagaugaacacccaguucaccgcggugggcaaggaguucaaccaccuggagaagcgcaucgagaaccugaacaagaaggucgacgacggcuuccucgacaucuggaccuacaacgccgagcugcuggugcuccuggagaacgagcggacgcuggacuaccacgacuccaacgugaagaaccucuacgagaagguccgcaaccagcugaagaacaacgccaaggagaucgggaacggcugcuucgaguucuaccacaagugcgacaacacgugcauggagagcgugaagaacgggaccuacgacuaccccaaguacuccgaggaggccaagcugaaccgggaggagaucgacggcgugaagcucgagagcacccgcgucuaccagauccuggccaucuacuccaccguggcgagcucccuggugcucgucgugagccugggggccaucagcuucuggaugugcuccaacggcagccugcagugccggaucugcaucuga

SEQ ID NO: 73614 - RNA, 1701 nt, Artificial Sequence
  derived and/or modified CDS sequence (opt1) from hemagglutinin__InfluenzaA__AFN19978
augaaggccauccugguggucaugcucuacaccuucgccaccgcgaacgccgacacgcugugcaucggcuaccacgccaacaacagcaccgacaccguggacaccgugcuggagaagaacgucacggugacccacuccgugaaccuccuggaggacaagcacaacgggaagcugugcaagcuccgcggcgucgcgccccugcaccuggggaagugcaacaucgccggcuggauccucgggaacccggagugcgagagccuguccaccgccagcuccuggagcuacaucguggagaccuccagcuccgacaacggcacgugcuaccccggcgacuucaucgacuacgaggagcugcgggagcagcucagcuccgugagcuccuucgagcgcuucgagaucuuccccaagaccagcuccuggcccaaccacgacagcaacaagggggucaccgccgccugcccgcacgccggcgcgaagggguucuacaagaaccugaucuggcuggugaagaagggcaacuccuaccccaagcucagcaaguccuacaucaacgacaaggggaaggaggugcugguccuguggggcauccaccaccccagcaccacggccgaccagcagagccucuaccagaacgccgacaccuacguguucgugggcaccucccgguacagcaagaaguucaagcccgagaucgccauccgcccgaagguccgggaccaggaggggcgcaugaacuacuacuggacccugguggagcccggcgacaagaucacguucgaggccaccgggaaccugguggucccccgguacgcguucgccauggagcgcaacgccggcuccggcaucaucaucagcgacacccccgugcacgacugcaacaccacgugccagaccccgaagggggccaucaacaccucccuccccuuccagaacauccaccccaucaccaucggcaagugccccaaguacgucaagagcacgaagcugcggcuggccaccgggcuccgcaacgugccguccauccagagccggggccuguucggggcgaucgccggcuucaucgagggcggguggaccggcaugguggacgggugguacggcuaccaccaccagaacgagcagggguccggcuacgccgccgaccucaagagcacccagaacgccaucgacaagaucacgaacaaggugaacuccgucaucgagaagaugaacacccaguucaccgcggugggcaaggaguucaaccaccuggagaagcgcaucgagaaccugaacaagaaggucgacgacggguuccuggacaucuggaccuacaacgccgagcuccuggugcugcucgagaacgagcggacgcuggacuaccacgacagcaacgugaagaaccuguacgagaagguccgcaaccagcucaagaacaacgccaaggagaucggcaacgggugcuucgaguucuaccacaagugcgacaacacgugcauggaguccgugaagaacggcaccuacgacuaccccaaguacagcgaggaggccaagcugaaccgggagaagaucgacggggugaagcuggaguccacccgcaucuaccagauccucgccaucuacagcaccgucgcguccagccuggugcugguggucucccucggcgccaucagcuucuggaugugcagcaacggcucccugcagugccggaucugcaucuga

SEQ ID NO: 73615 - RNA, 1701 nt, Artificial Sequence; identical to SEQ ID NO: 70839
  derived and/or modified CDS sequence (opt1) from hemagglutinin__InfluenzaA__AFN19983

SEQ ID NO: 73616 - RNA, 1701 nt, Artificial Sequence
  derived and/or modified CDS sequence (opt1) from hemagglutinin__InfluenzaA__AFN19993
augaaggccauccuggugguccuccuguacaccguggccaccacgaacgcggacacccugugcaucggcuaccacgccaacaacagcaccgacaccguggacacgguccucgagaagaacgugaccgugacccacuccgucaaccugcuggaggacaagcacaacgggaagcucugcaagcugcgcggcguggcgccccugcaccucgggaagugcaacaucgccggcuggauccuggggaacccggagugcgagagccuguccaccgccagcuccuggagcuacaucguggagacguccagcuccgacaacgggaccugcuaccccggcgacuucaucgacuacgaggagcuccgggagcagcugagcuccgucagcuccuucgagcgcuucgagaucuuccccaagaccagcuccuggcccaaccacgacagcaacaagggcgugaccgccgccugcccgcacgccggcgccaagggguucuacaagaaccugaucuggcucgugaagaagggcaacuccuaccccaagcugagcaaguccuacaucaacgacaaggggaaggagguccuggugcucuggggcauccaccaccccagcacgaccgcggaccagcagagccuguaccagaacgccgacaccuacguguucgucggcaccucccgguacagcaagaaguucaagcccgagaucgccauccgcccgaaggugcgggaccaggaggggcgcaugaacuacuacuggacgcugguggagcccggcgacaagaucaccuucgaggccaccgggaaccucgucgugccccgguacgccuucgcgauggagcgcaacgccggcuccggcaucaucaucagcgacacccccgugcacgacugcaacacgaccugccagaccccgaagggggccaucaacaccucccugcccuuccagaacauccaccccaucacgaucggcaagugccccaaguacgucaagagcaccaagcugcggcucgccaccgggcugcgcaacgugccguccauccagagccggggccuguucggggccaucgcgggcuucaucgagggcggguggaccggcaugguggacgggugguacggcuaccaccaccagaacgagcagggguccggcuacgccgccgaccucaagagcacgcagaacgccaucgacaagaucaccaacaaggucaacuccgugaucgagaagaugaacacccaguucaccgccgucggcaaggaguucaaccaccuggagaagcgcaucgagaaccugaacaagaagguggacgacggguuccucgacaucuggacguacaacgcggagcugcuggugcuccuggagaacgagcggacccuggacuaccacgacagcaacgucaagaaccucuacgagaaggugcgcaaccagcugaagaacaacgccaaggagaucggcaacgggugcuucgaguucuaccacaagugcgacaacacgugcauggaguccgugaagaacggcaccuacgacuaccccaaguacagcgaggaggccaagcugaaccgggaggagaucgacggggucaagcucgaguccacccgcaucuaccagauccuggccaucuacagcaccguggccuccagccuggugcucgucgugucccugggcgcgaucagcuucuggaugugcagcaacggcucccugcagugccggaucugcaucuga

SEQ ID NO: 73617 - RNA, 1701 nt, Artificial Sequence; identical to SEQ ID NO: 70839
  derived and/or modified CDS sequence (opt1) from hemagglutinin__InfluenzaA__AFN20000

SEQ ID NO: 73618 - RNA, 1701 nt, Artificial Sequence; identical to SEQ ID NO: 70846
  derived and/or modified CDS sequence (opt1) from hemagglutinin__InfluenzaA__AFN20006

SEQ ID NO: 73619 - RNA, 1701 nt, Artificial Sequence; identical to SEQ ID NO: 70478
  derived and/or modified CDS sequence (opt1) from hemagglutinin__InfluenzaA__AFN20012

SEQ ID NO: 73620 - RNA, 1701 nt, Artificial Sequence
  derived and/or modified CDS sequence (opt1) from hemagglutinin__InfluenzaA__AFN20018
augaaggccauccuggugguccuccuguacaccuucgccaccgcgaacgccgacacgcugugcaucggcuaccacgccaacaacagcaccgacaccguggacaccgugcucgagaagaacgucacggugacccacuccgugaaccugcuggaggacaagcacaacgggaagcucugcaagcugcgcggcgucgcgccccugcaccucgggaagugcaacaucgccggcuggauccuggggaacccggagugcgagagccuguccaccgccagcuccuggagcuacaucguggagaccuccagcuccgacaacggcacgugcuaccccggcgacuucaucaacuacgaggagcuccgggagcagcugagcuccgugagcuccuucgagcgcuucgagaucuuccccaagaccagcuccuggcccaaccacgacagcaacaagggggucaccgccgccugcccgcaggccggcgcgaaguccuucuacaagaaccugaucuggcucgugaagaaggggaacagcuaccccaagcuguccaacagcuacaucaacgacaagggcaaggaggugcugguccucugggggauccaccaccccagcaccuccgccgaccagcagagccuguaccagaacgccgacgccuacguguucgugggcacguccaaguacagcaagaaguucaagcccgagaucgccguccggccgaaggugcgcgaccaggagggccggaugaacuacuacuggacccugguggagcccggggacaagaucaccuucgaggcgaccggcaaccuccuggucccccgcuacgccuucgccauggagcggaacgccggguccggcaucaucaucagcgacacgcccgugcacgacugcaacacgaccugccagaccccgaagggcgccaucaacaccucccugcccuuccagaacauccaccccaucaccaucgggaagugccccaaguacgucaagagcaccaagcuccgccuggcgaccggccugcggaacgugccguccauccagagccgcgggcuguucggcgccaucgccggguucaucgagggcggcuggacggggaugguggacggcugguacggguaccaccaccagaacgcccagggcuccggguacgccgcggaccucaagagcacccagaacgccaucgacaagaucaccaacaaggugaacuccgucaucgagaagaugaacacccaguucacggccgugggcaaggaguucaaccaccuggagaagcggaucgagaaccucaacaagaaggucgacgacggcuuccuggacaucuggaccuacaacgccgagcugcucgugcugcuggagaacgagcgcacccucgacuaccacgacagcaacgugaagaaccuguacgagaagguccggucccagcugaagaacaacgccaaggagaucgggaacggcugcuucgaguucuaccacaagugcgacaacacgugcauggagagcgugaagaacgggaccuacgacuaccccaaguacuccgaggaggcgaagcucaaccgcgaggagaucgacggcgugaagcuggagagcacccggaucuaccagauccuggccaucuacuccaccgucgccagcagccucgugcugguggucucccugggggccaucagcuucuggaugugcuccaacggcagccuccagugccgcaucugcaucuga

SEQ ID NO: 73621 - RNA, 1701 nt, Artificial Sequence; identical to SEQ ID NO: 70848
  derived and/or modified CDS sequence (opt1) from hemagglutinin__InfluenzaA__AFN20019

SEQ ID NO: 73622 - RNA, 1701 nt, Artificial Sequence; identical to SEQ ID NO: 70478
  derived and/or modified CDS sequence (opt1) from hemagglutinin__InfluenzaA__AFN20021

SEQ ID NO: 73623 - RNA, 1701 nt, Artificial Sequence; identical to SEQ ID NO: 70848
  derived and/or modified CDS sequence (opt1) from hemagglutinin__InfluenzaA__AFN20034

SEQ ID NO: 73624 - RNA, 1701 nt, Artificial Sequence; identical to SEQ ID NO: 70839
  derived and/or modified CDS sequence (opt1) from hemagglutinin__InfluenzaA__AFN20040

SEQ ID NO: 73625 - RNA, 1701 nt, Artificial Sequence; identical to SEQ ID NO: 73611
  derived and/or modified CDS sequence (opt1) from hemagglutinin__InfluenzaA__AFN20046

SEQ ID NO: 73626 - RNA, 1701 nt, Artificial Sequence; identical to SEQ ID NO: 70848
  derived and/or modified CDS sequence (opt1) from hemagglutinin__InfluenzaA__AFN20052

SEQ ID NO: 73627 - RNA, 1701 nt, Artificial Sequence; identical to SEQ ID NO: 70848
  derived and/or modified CDS sequence (opt1) from hemagglutinin__InfluenzaA__AFN20061

SEQ ID NO: 73628 - RNA, 1701 nt, Artificial Sequence
  derived and/or modified CDS sequence (opt1) from hemagglutinin__InfluenzaA__AFN20076
augaaggccauccuggugguccuccuguacaccuucgccaccgcgaacgccgacacgcugugcaucggcuaccacgccaacaacagcaccgacaccguggacaccgugcucgagaagaacgucacggugacccacuccgugaaccugcuggaggacaagcacaacgggaagcucugcaagcugcgcggcgucgcgccccugcaccucgggaagugcaacaucgccggcuggauccuggggaacccggacugcgagagccuguccaccgccagcuccuggagcuacaucguggagaccuccagcuccgacaacggcacgugcuaccccggcgacuucaucgacuacgaggagcuccgggagcagcugagcuccgugagcuccuucgagcgcuucgagaucuuccccaagaccagcuccuggcccaaccacgacagcaacaagggggucaccgccgccugcccgcacgccggcgcgaaguccuucuacaagaaccugaucuggcucgugaagaaggggaacagcuaccccaagcuguccaagagcuacaucaacgacaagggcaaggaggugcugguccucugggggauccaccaccccagcaccacggccgaccagcagucccuguaccagaacgccgacaccuacguguucgugggcaccagccgguacuccaagaaguucaagcccgagaucgccauccgcccgaagguccgggaccaggagggccgcaugaacuacuacuggacccugguggagcccggggacaagaucacguucgaggccaccggcaaccucguggucccccgguacgcguucgccauggagcgcaacgccgggagcggcaucaucaucuccgacacccccgugcacgacugcaacaccacgugccagaccccgaagggcgccaucaacaccagccugcccuuccagaacauccaccccaucaccaucgggaagugccccaaguacgugaaguccacgaagcugcggcucgccaccggccugcgcaacgucccgagcauccagucccgggggcuguucggcgcgaucgccggguucaucgagggcggcuggaccgggaugguggacggcugguacggguaccaccaccagaacgagcagggcagcggguacgccgccgaccucaaguccacccagaacgccaucgacaagaucacgaacaaggugaacagcgucaucgagaagaugaacacccaguucaccgcggugggcaaggaguucaaccaccuggagaagcgcaucgagaaccugaacaagaaggucgacgacggcuuccucgacaucuggaccuacaacgccgagcugcuggugcuccuggagaacgagcggacgcuggacuaccacgacuccaacgugaagaaccucuacgagaagguccgcaaccagcugaagaacaacgccaaggagaccgggaacggcugcuucgaguucuaccacaagugcgacaacacgugcauggagagcgugaagaacgggaccuacgacuaccccaaguacuccgaggaggccaagcugaaccgggaggagaucgacggcgugaagcucgagagcacccgcaucuaccagauccuggccaucuacuccaccgucgcgagcucccuggugcucguggucagccugggggccaucagcuucuggaugugcuccaacggcagccugcagugccggaucugcaucuga

SEQ ID NO: 73629 - RNA, 1701 nt, Artificial Sequence
  derived and/or modified CDS sequence (opt1) from hemagglutinin__InfluenzaA__AFN20081
augaaggccauccuggugguccuccuguacaccuucgccaccgcgaacgccgacacgcugugcaucggcuaccacgccaacaacagcaccgacaccguggacaccgugcucgagaagaacgucacggugacccacuccgugaaccugcuggaggacaagcacaacgggaagcucugcaagcugcgcggcgucgcgccccugcaccucgggaagugcaacaucgccggcuggauccuggggaacccggagugcgagagccuguccaccgccagcuccuggagcuacaucguggagaccuccagcuccgacaacggcacgugcuaccccggcgacuucaucgacuacgaggagcuccgggagcagcugagcuccgugagcuccuucgagcgcuucgagaucuuccccaagaccagcuccuggcccaaccacgacagcaacaagggggucaccgccgccugcccgcacgccggcgcgaaguccuucuacaagaaccugaucuggcucgugaagaaggggaacagcuaccccaagaucuccaagagcuacaucaacgacaagggcaaggaggugcugguccugugggggauccaccaccccagcaccacggccgaccagcagucccucuaccagaacgccgacaccuacguguucgugggcaccagccgguacuccaagaaguucaagcccgagaucgccauccgcccgaagguccgggaccaggagggccgcaugaacuacuacuggacccugguggagcccggggacaagaucacguucgaggccaccggcaaccuggugaucccccgguacgcguucgccauggagcgcaacgccgggagcggcaucaucaucuccgacacccccguccacgacugcaacaccacgugccagaccccgaagggcgccaucaacaccagccuccccuuccagaacauccaccccaucaccaucgggcggugccccaaguacgugaaguccacgaagcugcgccuggccaccggccuccggaacgugccgagcauccagucccgcgggcuguucggcgcgaucgccggguucaucgagggcggcuggaccgggauggucgacggcugguacggguaccaccaccagaacgagcagggcagcggguacgccgccgaccugaaguccacccagaacgccaucgacaagaucacgaacaaggugaacagcgugaucgagaagaugaacacccaguucaccgcggucggcaaggaguucaaccaccucgagaagcggaucgagaaccugaacaagaagguggacgacggcuuccuggacaucuggaccuacaacgccgagcuccugguccugcucgagaacgagcgcacgcuggacuaccacgacuccaacgugaagaaccuguacgagaaggugcggaaccagcucaagaacaacgccaaggagaccgggaacggcugcuucgaguucuaccacaagugcgacaacacgugcauggagagcgucaagaacgggaccuacgacuaccccaaguacuccgaggaggccaagcugaaccgcgaggugaucgacggcgugaagcuggagagcacccggaucuaccagauccucgccaucuacuccaccgucgcgagcucccuggugcugguggucagccucggggccaucagcuucuggaugugcuccaacggcagccugcagugccgcaucugcaucuga

SEQ ID NO: 73630 - RNA, 1701 nt, Artificial Sequence; identical to SEQ ID NO: 70848
  derived and/or modified CDS sequence (opt1) from hemagglutinin__InfluenzaA__AFN20092

SEQ ID NO: 73631 - RNA, 1701 nt, Artificial Sequence; identical to SEQ ID NO: 73610
  derived and/or modified CDS sequence (opt1) from hemagglutinin__InfluenzaA__AFN20099

SEQ ID NO: 73632 - RNA, 1701 nt, Artificial Sequence
  derived and/or modified CDS sequence (opt1) from hemagglutinin__InfluenzaA__AFN20112
augaaggccauccuggugguccuccuguacaccuucgccaccgcgaacgccgacacgcugugcaucggcuaccacgccaacaacagcaccgacaccguggacaccgugcucgagaagaacgucacggugacccacuccgugaaccugcuggaggacaagcacaacgggaagcucugcaagcugcgcggcgucgcgccccugcaccucgggaagugcaacaucgccggcuggauccuggggaacccggagugcaagagccuguccaccgcgagcuccuggagcuacaucguggagaccuccagcuccgacaacggcacgugcuaccccggcgacuucaucgacuacgaggagcuccgggagcagcugagcuccgugagcuccuucgagcgcuucgagaucuuccccaagaccagcuccuggcccaaccacaacccgaacaagggggucaccgccgccugcccccacgccggcgccaagagcuucuacaagaaccugaucuggcucgugaagaacgggaacuccuaccccaagcugaacaccagcuacaucaacgacaagggcaaggaggugcugguccucugggggauccaccaccccuccacgagcgccgaccagcagagccuguaccagaacgccgacgccuacgccuucgugggcaccucccgguacagcaagaaguucaagccggagaucgcgauccgccccaaggugcgggaccaggagggccgcaugaacuacuacuggacccuggucgagcccggggacaagaucaccuucgaggccacgggcaaccucguggugccccgguacgccuucgccauggagcgcaacgccggguccggcaucaucaucagcgacaccuccguccacgacugcaacacgaccugccagaccccgaagggcgcgaucaacaccagccugcccuuccagaacgugcaccccaucaccaucgggaagugccccaaguacgugaaguccaccaagcugcggcucgccacgggccugcgcaacgucccgagcauccagucccgggggcuguucggcgccaucgccggguucaucgagggcggcuggaccgggaugguggacggcugguacggguaccaccaccagaacgagcagggcagcggguacgccgcggaccucaaguccacccagaacgccuucgacaagaucaccaacaaggugaacagcgucaucgagaagaugaacacgcaguucaccgccgugggcaaggaguucaaccaccuggagaagcgcaucgagaaccugaacaagaaggucgacgacggcuuccucgacaucuggaccuacaacgccgagcugcuggugcuccuggagaacgagcggacccuggacuaccacgacuccaacgugaagaaccucuacgagaagguccgcagccagcugaagacgaacgccaaggagaucgggaacggcugcuucgaguucuaccacaagugcgacaacacgugcauggaguccgugaagaacgggaccuacgacuaccccaaguacagcgaggaggcgaagcugaaccgggaggagaucgacggcgugaagcucgaguccacccgcaucuaccagauccuggccaucuacagcaccgucgccuccagccuggugcucguggucagccugggggccaucuccuucuggaugugcagcaacggcucccugcagugccggaucugcaucuga

SEQ ID NO: 73633 - RNA, 1701 nt, Artificial Sequence
  derived and/or modified CDS sequence (opt1) from hemagglutinin__InfluenzaA__AFN87924
augaaggccauccuggugguccuccuguacaccuucgccaccgcgaacgccgacacgcugugcaucggcuaccacgccaacaacagcaccgacaccguggacaccgugcucgagaagaacgucacggugacccacuccgugaaccugcuggaggacaagcacaacgggaagcucugcaagcugcgcggcgucgcgccccugcaccucgggaagugcaacaucgccggcuggauccuggggaacccggagugcgagagccuguccaccgcgagcuccuggagcuacaucguggagaccuccagcuccgacaacggcacgugcuaccccggcgacuucaucgacuacgaggagcuccgggagcagcugagcuccgugagcuccuucgagcgcuucgagaucuuccccaagaccagcuccuggcccaaccacgacccgaacaagggggucaccgccgccugcccccacgccggcgccaagagcuucuacaagaaccugaucuggcucgugaagaaggggaacuccuaccccaagcugagcaccuccuacaucaacgacaagcggaaggaggugcugguccucuggggcauccaccaccccagcacgagcgccgaccagcagucccuguaccagaacgccgacgccuacgccuucguggggaccagccgcuacuccaagaaguucaagccggagaucgcgauccggcccaaggugcgcgaccaggagggccggaugaacuacuacuggacccuggucgagcccggcgacaagaucaccuucgaggccacggggaaccucguggugccccgcuacgccuucgccauggagcggaacgccggcagcgggaucaucaucuccgacaccagcguccacgacugcaacacgaccugccagaccccgaagggcgcgaucaacaccucccugcccuuccagaacgugcaccccaucaccaucggcaagugccccaaguacgucaagagcaccaagcugcgccucgccacggggcugcggaacgugccguccauccagagccgcggccuguucggggccaucgccggcuucaucgagggcggguggaccggcaugguggacgggugguacggcuaccaccaccagaacgagcagggguccggcuacgccgcggaccucaagagcacccagaacgccuucgacaagaucaccaacaaggugaacuccgucaucgagaagaugaacacgcaguucaccgccguggggaaggaguucaaccaccuggagaagcggaucgagaaccugaacaagaaggucgacgacggcuuccucgacaucuggaccuacaacgccgagcugcuggugcuccuggagaacgagcgcacccuggacuaccacgacagcaacgugaagaaccucuacgagaagguccggucccagcugaagaacaacgccaaggagaucggcaacgggugcuucgaguucuaccacaagugcgacaacacgugcauggagagcgugaagaacggcaccuacgacuaccccaaguacuccgaggaggcgaagcugaaccgcgaggagaucgacggggugaagcucgagagcacccggaucuaccagauccuggccaucuacuccaccgucgccagcagccuggugcucguggucucccugggcgccaucagcuucuggaugugcuccaacgggagccugcagugccgcaucugcaucuga

SEQ ID NO: 73634 - RNA, 1701 nt, Artificial Sequence; identical to SEQ ID NO: 66693
  derived and/or modified CDS sequence (opt1) from hemagglutinin__InfluenzaA__AFN87926

SEQ ID NO: 73635 - RNA, 1701 nt, Artificial Sequence
  derived and/or modified CDS sequence (opt1) from hemagglutinin__InfluenzaA__AFN87927
augaaggccauccuggugguccuccuguacaccuucgccaccgcgaacgccgacacgcugugcaucggcuaccacgccaacaacagcaccgacaccguggacaccgugcucgagaagaacgucacggugacccacuccgugaaccugcuggaggacaagcacaacgggaagcucugcaagcugcgcggcgucgcgccccugcaccucgggaagugcaacaucgccggcuggauccuggggaacccggagugcgagagccuguccaccgccagcuccuggagcuacaucguggagaccuccagcuccgacaacggcacgugcuaccccggcgacuucaucgacuacgaggagcuccgggagcagcugagcuccgugagcuccuucgagcgcuucgagaucuuccccaagaccagcuccuggcccaaccacgacagcaacaagggggucaccgccgccugcccgcacgccggcgcgaaguccuucuacaagaaccugaucuggcucgugaagaaggggaacagcuaccccaagcuguccaagagcuacaucaacgacaagcggaaggaggugcugguccucuggggcauccaccaccccagcaccuccgccgaccagcagagccuguaccagaacgccgacgccuacguguucguggggacgucccgcuacagcaagaaguucaagcccgagaucgccauccggccgaagguccgcgaccaggagggccggaugaacuacuacuggacccugguggagcccggcgacaagaucaccuucgaggcgaccgggaaccucguggucccccgcuacgccuucgccauggagcggaacgccggcuccgggaucaucaucagcggcacgcccgugcacgacugcaacacgaccugccagaccccgaagggcgccaucaacaccucccugcccuuccagaacauccaccccaucaccaucgggaagugccccaaguacgucaagagcaccaagcugcgccucgcgaccggccugcggaacgugccguccauccagagccgcgggcuguucggcgccaucgccggguucaucgagggcggcuggacggggaugguggacggcugguacggguaccaccaccagaacgagcagggcuccggguacgccgccgaccucaagagcacccagaacgcgaucgacaagaucaccaaccgggugaacuccgucaucgagaagaugaacacccaguucacggccgugggcaaggaguucaaccaccuggagaagcgcaucgagaaccugaacaagaaggucgacgacggcuuccucgacaucuggaccuacaacgccgagcugcuggugcuccuggagaacgagcggacccuggacuaccacgacagcaacgugaagaaccucuacgagaagguccgcucccagcugaagaacaacgccaaggagaucgggaacggcugcuucgaguucuaccacaagugcgacaacacgugcauggagagcgugaagaacgggaccuacgacuaccccaaguacuccgaggaggccaagcugaaccgggaggagaucgacggcgugaagcucgagagcacccgcaucuaccagauccuggcgaucuacuccaccgucgccagcagccuggugcucguggucucccugggggccaucagcuucuggaugugcuccaacggcagccugcagugccggaucugcaucuga

SEQ ID NO: 73636 - RNA, 1701 nt, Artificial Sequence
  derived and/or modified CDS sequence (opt1) from hemagglutinin__InfluenzaA__AFN87928
augaaggccauccuggugguccuccuguacaccuucgccaccgcgaacgccgacacgcugugcaucggcuaccacgccaacaacagcaccgacaccguggacaccgugcucgagaagaacgucacggugacccacuccgugaaccugcuggaggacaagcacaacgggaagcucugcaagcugcgcggcgucgcgccccugcaccucgggaagugcaacaucgccggcuggauccuggggaacccggagugcgagagccuguccaccgccagcuccuggagcuacaucguggagaccuccagcuccgacaacggcacgugcuaccccggcgacuucaucgacuacgaggagcuccgggagcagcugagcuccgugagcuccuucgagcgcuucgagaucuuccccaagaccagcuccuggcccaaccacgacagcaacaagggggucaccgccgccugcccgcacgccggcgcgaaguccuucuacaagaaccugaucuggcucgugaagaaggggaacagcuaccccaagcuguccaagagcuacaucaacgacaagggcaaggaggugcugguccucugggggauccaccaccccagcaccuccgccgaccagcagagccuguaccagaacgccgacgccuacguguucgugggcacgucccgguacagcaagaaguucaagcccgagaucgccauccgcccgaagguccgggaccgcgagggccggaugaacuacuacuggacccugguggagcccggggacaagaucaccuucgaggcgaccggcaaccucguggucccccgcuacgccuucgccauggagcggaacgccggguccggcaucaucaucagcgacacgcccgugcacgacugcaacacgaccugccagaccccgaagggcgccaucaacaccucccugcccuuccagaacauccaccccaucaccaucgggaagugccccaaguacgucaagagcaccaagcugcgccucgcgaccggccugcggaacgugccguccauccagagccgcgggcuguucggcgccaucgccggguucaucgagggcggcuggacggggaugguggacggcugguacggguaccaccaccagaacgagcagggcuccggguacgccgccgaccucaagagcacccagaacgcgaucgacaagaucaccaacaaggugaacuccgucaucgagaagaugaacacccaguucacggccgugggcaaggaguucaaccaccuggagaagcggaucgagaaccugaacaagaaggucgacgacggcuuccucgacaucuggaccuacaacgccgagcugcuggugcuccuggagaacgagcgcacccuggacuaccacgacagcaacgugaagaaccucuacgagaagguccggucccagcugaagaacaacgccaaggagaucgggaacggcugcuucgaguucuaccacaagugcgacaacacgugcauggagagcgugaagaacgggaccuacgacuaccccaaguacuccgaggaggccaagcugaaccgcgaggagaucgacggcgugaagcucgagagcacccggaucuaccagauccuggcgaucuacuccaccgucgccagcagccuggugcucgccgugucccugggggccaucagcuucuggaugugcuccaacggcagccugcagugccgcaucugcaucuga

SEQ ID NO: 73637 - RNA, 1701 nt, Artificial Sequence; identical to SEQ ID NO: 67857
  derived and/or modified CDS sequence (opt1) from hemagglutinin__InfluenzaA__AFN87929

SEQ ID NO: 73638 - RNA, 1701 nt, Artificial Sequence; identical to SEQ ID NO: 67857
  derived and/or modified CDS sequence (opt1) from hemagglutinin__InfluenzaA__AFN87930

SEQ ID NO: 73639 - RNA, 1701 nt, Artificial Sequence
  derived and/or modified CDS sequence (opt1) from hemagglutinin__InfluenzaA__AFN87931
augaaggccauccuggugguccuccuguacaccuucgccaccgcgaacgccgacacgcugugcaucggcuaccacgccaacaacagcaccgacaccguggacaccgugcucgagaagaacgucacggugacccacuccgugaaccugcuggaggagaagcacaacgggaagcucugcaagcugcgcggcgucgcgccccugcaccucgggaagugcaacaucgccggcuggauccuggggaacccggagugcgagagccuguccaccgccagcuccuggagcuacaucguggagaccuccagcuccgacaacggcacgugcuaccccggcgacuucaucgacuacgaggagcuccgggagcagcugagcuccgugagcuccuucgagcgcuucgagaucuuccccaagaccagcuccuggcccaaccacgacagcaacaagggggucaccgccgccugcccgcacgccggcgcgaaguccuucuacaagaaccugaucuggcucgugaagaaggggaacagcuaccccaagcuguccaagagcuacaucaacgacaagggcaaggaggugcugguccucugggggauccaccaccccagcaccuccgccgaccagcagagcaucuaccagaacgccgacgccuacguguucgugggcacgucccgguacagcaagaaguucaagcccgagaucgccauccgcccgaagguccgggaccaggagggccgcaugaacuacuacuggacccugguggagcccggggacaagaucaccuucgaggcgaccggcaaccugguggucccccgguacgccuucacgauggagcgcaacgccggguccggcaucaucaucagcgacacccccgugcacgacugcaacacgaccugccagaccccgaagggcgccaucaacaccucccuccccuuccagaacauccaccccaucaccaucgggaagugccccaaguacgucaagagcaccaagcugcggcuggccacgggccuccgcaacgugccguccauccagagccgggggcuguucggcgcgaucgccggguucaucgagggcggcuggaccgggaugguggacggcugguacggguaccaccaccagaacgagcagggcuccggguacgccgccgaccucaagagcacccagaacgccaucgacaagaucaccaacaaggugaacuccgucaucgagaagaugaacacgcaguucaccgcggugggcaaggaguucaaccaccuggagaagcgcaucgagaaccugaacaagaaggucgacgacggcuuccuggacaucuggaccuacaacgccgagcuccuggugcugcucgagaacgagcggacccuggacuaccacgacagcaacgugaagaaccuguacgagaagguccgcucccagcucaagaacaacgccaaggagaucgggaacggcugcuucgaguucuaccacaagugcgacaacacgugcauggagagcgugaagaacgggaccuacgacuaccccaaguacuccgaggaggccaagcugaaccgggaggagaucgacggcgugaagcuggagagcacccgcaucuaccagauccucgccaucuacuccaccgucgcgagcagccuggugcugguggucucccucggggccaucagcuucuggaugugcuccaacggcagccugcagugccggaucugcaucuga

SEQ ID NO: 73640 - RNA, 1701 nt, Artificial Sequence
  derived and/or modified CDS sequence (opt1) from hemagglutinin__InfluenzaA__AFN87932
auggaggccauccuggugguccuccuguacaccuucgccaccgcgaacgccgacacgcugugcaucggcuaccacgccaacaacagcaccgacaccguggacaccgugcucgagaagaacgucacggugacccacuccgugaaccugcuggaggacaagcacaacgggaagcucugcaagcugcgcggcgucgcgccccugcaccucgggaagugcaacaucgccggcuggauccuggggaacccggagugcgagagccuguccaccgccagcuccuggagcuacaucguggagaccuccagcuccgacaacggcacgugcuaccccggcgacuucaucgacuacgaggagcuccgggagcagcugagcuccgugagcuccuucgagcgcuucgagaucuuccccaagaccagcuccuggcccaaccacgacagcaacaagggggucaccgccgccugcccgcacgccggcgcgaaguccuucuacaagaaccugaucuggcucgugaagaaggggaacagcuaccccaagcuguccaagagcuacaucaacgacaagggcaaggaggugcugguccucugggggauccaccaccccagcaccuccgccgaccagcagagccuguaccagaacgccgacgccuacguguucgugggcuccagccgguacuccaagaaguucaagcccgagaucgccauccgcccgaagguccgggaccgcgagggccggaugaacuacuacuggacgcugguggagcccggggacaagaucaccuucgaggcgaccggcaaccucguggucccccgcuacgccuucgccauggagcggaacgccgggagcggcaucaucaucuccgacacccccgugcacgacugcaacacgaccugccagaccccgaagggcgccaucaacaccagccugcccuuccacaacauccaccccaucacgaucgggaagugccccaaguacgugaaguccaccaagcugcgccucgcgaccggccugcggaacgucccgagcauccagucccgcgggcuguucggcgccaucgccggguucaucgagggcggcuggaccgggaugguggacggcugguacggguaccaccaccagaacgagcagggcagcggguacgccgccgaccucaaguccacgcagaacgcgaucgacgagaucaccaacaaggugaacagcgucaucgagaagaugaacacccaguucaccgccgugggcaaggaguucaaccaccuggagaagcggaucgagaaccugaacaagaaggucgacgacggcuuccucgacaucuggacguacaacgccgagcugcuggugcuccuggagaacgagcgcacccuggacuaccacgacuccaacgugaagaaccucuacgagaagguccggagccagcugaagaacaacgccaaggagaucgggaacggcugcuucgaguucuaccacaagugcgacaacacgugcauggaguccgugaagaacgggaccuacgacuaccccaaguacagcgaggaggccaagcugaaccgcgaggagaucgacggcgugaagcucgaguccacccggaucuaccagauccuggcgaucuacagcaccgucgccagcucccuggugcucguggucagccugggggccaucuccuucuggaugugcagcaacggcucccugcagugccgcaucugcaucuga

SEQ ID NO: 73641 - RNA, 1701 nt, Artificial Sequence; identical to SEQ ID NO: 67857
  derived and/or modified CDS sequence (opt1) from hemagglutinin__InfluenzaA__AFN87933

SEQ ID NO: 73642 - RNA, 1701 nt, Artificial Sequence
  derived and/or modified CDS sequence (opt1) from hemagglutinin__InfluenzaA__AFN87934
augaaggccauccugguggucaugcucuacaccuucgccaccgcgaacgccgacacgcugugcaucggcuaccacgccaacaacagcaccgacaccguggacaccgugcuggagaagaacgucacggugacccacuccgugaaccuccuggaggacaagcacaacgggaagcugugcaagcuccgcggcgucgcgccccugcagcuggggaagugcaacaucgccggcuggauccucgggaacccggagugcgagagccuguccaccgccagcuccuggagcuacaucguggagaccuccagcuccgacaacggcacgugcuaccccggcgacuucaucgacuacgaggagcugcgggagcagcucagcuccgugagcuccuucgagcgcuucgagaucuuccccaagaccagcuccuggcccaaccacgacagcaacaagggggucaccgccgccugcccgcacgccggcgcgaagggguucuacaagaaccugaucuggcuggugaagaagggcaacuccuaccccaagcucagcaaguccuacaucaacgacaaggggaaggaggugcugguccuguggggcauccaccaccccagcaccagcgccgaccagcagucccucuaccagaacgccgacacguacguguucgugggcaccagccgguacuccaagaaguucaagcccgagaucgccauccgcccgaagguccgggaccaggaggggcgcaugaacuacuacuggacccugguggagcccggcgacaagaucaccuucgaggccacggggaaccugguggucccccgguacgcguucgccauggagcgcaacgccggcagcggcaucaucaucuccgacacccccgugcacgacugcaacacgaccugccagaccccgaagggggccaucaacaccagccuccccuuccagaacauccaccccaucaccaucggcaagugccccaaguacgugaaguccaccaagcugcggcuggccacggggcuccgcaacgucccgagcauccagucccggggccuguucggggcgaucgccggcuucaucgagggcggguggaccggcaugguggacgggugguacggcuaccaccaccagaacgagcaggggagcggcuacgccgccgaccugaaguccacccagaacgccaucgacaagaucaccaacaaggugaacagcgucaucgagaagaugaacacgcaguucaccgcggugggcaaggaguucaaccaccucgagaagcgcaucgagaaccugaacaagaaggucgacgacggguuccuggacaucuggaccuacaacgccgagcuccuggugcugcucgagaacgagcggacccuggacuaccacgacuccaacgugaagaaccuguacgagaagguccgcagccagcucaagaacaacgccaaggagaucggcaacgggugcuucgaguucuaccacaagugcgacaacacgugcauggaguccgugaagaacggcaccuacgacuaccccaaguacagcgaggaggccaagcugaaccgggaggagaucgacggggugaagcuggaguccacccgcaucuaccagauccucgccaucuacagcaccgucgcguccagccuggugcugguggucagccucggcgccaucuccuucuggaugugcagcaacggcucccugcagugccggaucugcaucuga

SEQ ID NO: 73643 - RNA, 1701 nt, Artificial Sequence
  derived and/or modified CDS sequence (opt1) from hemagglutinin__InfluenzaA__AFN87936
augaaggccauccuggugguccuccuguacaccuucgccaccgcgaacgccgacacgcugugcaucggcuaccacgccaacaacagcaccgacaccguggacaccgugcucgagaagaacgucacggugacccacuccgugaaccugcuggaggacaagcacaacgggaagcucugcaagcugcgcggcgucgcgccccugcaccucgggaagugcaacaucgccggcuggauccuggggaacccggagugcgagagccuguccaccgccagcuccuggagcuacaucguggagaccuccaucagcgacaacggcacgugcuaccccggcgacuucaucgacuacgaggagcuccgggagcagcuguccagcguguccagcuucgagcgcuucgagaucuuccccaagaccuccagcuggcccaaccacgacccgaacaagggggucaccgccgccugcccccacgccggcgcgaaguccuucuacaagaaccugaucuggcucgugaagaaggggaacagcuaccccaagcuguccaccagcuacaucaacgacaagggcaaggaggugcugguccucugggggauccaccaccccuccacgagcgccgaccagcagagccuguaccagaacgccgacgccuacgccuucgugggcaccucccgguacagcaagaaguucaagccggagaucgcgauccgccccaaggugcgggaccaggagggccgcaugaacuacuacuggacccuggucgagcccggggacaagaucaccuucgaggccacgggcaaccucguggugccccgguacgccuucgccauggagcgcaacgccggguccggcaucaucaucagcgacaccuccguccacgacugcaacacgaccugccagaccccgaagggcgcgaucaacaccagccugcccuuccagaacgugcaccccaucaccaucgggaagugccccaaguacgugaaguccaccaagcugcggcucgccacgggccugcgcaucgucccgagcauccagucccgggggcuguucggcgccaucgccggguucaucgagggcggcuggaccgggaugguggacggcugguacggguaccaccaccagaacgagcagggcagcggguacgccgcggaccucaaguccacccagaacgccuucgacaagaucaccaacaaggugaacagcgucaucgagaagaugaacacgcaguucaccgccgugggcaaggaguucaaccaccuggagaagcgcaucgagaaccugaacaagaaggucgacgacggcuuccucgacaucuggaccuacaacgccgagcugcuggugcuccuggagaacgagcggacccuggacuaccacgacuccaacgugaagaaccucuacgagaagguccgcagccagcugaagaacaacgccaaggagaucgggaacggcugcuucgaguucuaccacaagugcgacaacacgugcauggaguccgugaagaacgggaccuacgacuaccccaaguacagcgaggaggcgaagcugaaccgggaggagaucgacggcgugaagcucgaguccacccgcaucuaccagauccuggccaucuacagcaccgucgccuccagccuggugcucguggucagccugggggccaucuccuucuggaugugcagcaacggcucccugcagugccggaucugcaucuga

SEQ ID NO: 73644 - RNA, 1701 nt, Artificial Sequence
  derived and/or modified CDS sequence (opt1) from hemagglutinin__InfluenzaA__AFN87938
augaaggccauccuggugguccuccuguacaccuucgccaccgcgaacgccgacacgcugugcaucggcuaccacgccaacaacagcaccgacaccguggacaccgugcucgagaagaacgucacggugacccacuccgugaaccugcuggaggacaagcacaacgggaagcucugcaagcugcgcggcgucgcgccccugcaccucgggaagugcaacaucgccggcuggauccuggggaacccggagugcgagagccuguccaccgcgagcuccuggagcuacaucguggagaccuccagcuccgacaacggcacgugcuaccccggcgacuucaucgacuacgaggagcuccgggagcagcugagcuccgugagcuccuucgagcgcuucgagaucuuccccaagaccagcuccuggcccaaccacgacccgaacaagggggucaccgccgccugcccccacgccggcgccaagagcuucuacaagaaccugaucuggcucgugaagaaggggaacuccuaccccaagcugagcaaguccuacaucaacgacaagggcaaggaggugcugguccucugggggauccaccaccccagcaccagcgccgaccagcagucccuguaccagaacgccgacgccuacguguucgugggcacgagccgguacuccaagaaguucaagccggagaucgccauccgccccaagguccgggaccaggagggccgcaugaacuacuacuggacccugguggagcccggggacaagaucaccuucgaggcgaccggcaaccucguggucccccgguacgccuucgccauggagcgcaacgccgggagcggcaucaucaucuccgacacgccggugcacgacugcaacacgaccugccagaccagcaagggcgccaucaacaccucccugcccuuccagaacauccaccccaucaccaucgggaagugccccaaguacgucaagagcaccaagcugcggcucgcgaccggccugcgcaacgugccguccauccagagccgggggcuguucggcgccaucgccggguucaucgagggcggcuggacggggaugguggacggcugguacggguaccaccaccagaacgagcagggcuccggguacgccgccgaccucaagagcacccagaacgcgaucgacgagaucaccaacaaggugaacuccgucaucgagaagaugaacacccaguucacggccgugggcaaggaguucaaccaccuggagaagcgcaucgagaaccugaacaagaaggucgacgacggcuuccucgacaucuggaccuacaacgccgagcugcuggugcuccuggagaacgagcggacccuggacuaccacgacagcaacgugaagaaccucuacgagaagguccgcaaccagcugaagaacaacgccaaggagaucgggaacggcugcuucgaguucuaccacaagugcgacaacacgugcauggaguccgugaagaacgggaccuacgacuaccccaaguacagcgaggaggccaagcugaaccgggaggagaucgacggcgugaagcucgaguccacccgcaucuaccagauccuggcgaucuacagcaccgucgccuccagccuggugcucguggucagccugggggccaucuccuucuggaugugcagcaacggcucccugcagugccggaucugcaucuga

SEQ ID NO: 73645 - RNA, 1701 nt, Artificial Sequence
  derived and/or modified CDS sequence (opt1) from hemagglutinin__InfluenzaA__AFN87939
augaaggccauccuggugguccuccuguacaccuucgccaccgcgaacgccgacacgcugugcaucggcuaccacgccaacaacagcaccgacaccguggacaccgugcucgagaagaacgucacggugacccacuccgugaaccugcuggaggacaagcacaacgggaagcucugcaagcugcgcggcgucgcgccccugcaccucgggaagugcaacaucgccggcuggauccuggggaacccggagugcgagagccuguccaccgcgagcuccuggagcuacaucguggagaccuccagcuccgacaacggcacgugcuaccccggcgacuucaucgacuacgaggagcuccgggagcagcugagcuccgugagcuccuucgagcgcuucgagaucuuccccaagaccagcuccuggcccaaccacgacccgaacaagggggucaccgccgccugcccccacgccggcgccaagagcuucuacaagaaccugaucuggcucgugaagaaggggaacuccuaccccaagcugagcaccuccuacaucaacgacaagggcaaggaggugcugguccucugggggauccaccaccccagcacgagcgccgaccagcagucccuguaccagaacgccgacgccuacgccuucgugggcaccagccgguacuccaagaaguucaagccggagaucgcgauccgccccaaggugcgggaccaggagggccgcaugaacuacuacuggacccuggucgagcccggggacaagaucaccuucgaggccacgggcaaccucguggugccccgguacgccuucgccauggagcgcaacgccgggagcggcaucaucaucuccgacaccagcguccacgacugcaacacgaccugccagaccccgaagggcgcgaucaacaccucccugcccuuccagaacgugcaccccaucaccaucgggaagugccccaaguacgucaagagcaccaagcugcggcucgccacgggccugcgcaacgugccguccauccagagccgggggcuguucggcgccaucgccggguucaucgagggcggcuggaccgggaugguggacggcugguacggguaccaccaccagaacgagcagggcuccggguacgccgcggaccucaagagcacccagaacgccaucgacgagaucaccaacaaggugaacuccgucaucgagaagaugaacacgcaguucaccgccgugggcaaggaguucaaccaccuggagaagcgcaucgagaaccugaacaagaaggucgacgacggcuuccucgacaucuggaccuacaacgccgagcugcuggugcuccuggagaacgagcggacccuggacuaccacgacagcaacgugaagaaccucuacgagaagguccgcucccagcugaagaacaacgccaaggagaucgggaacggcugcuucgaguucuaccacaagugcgacaacacgugcauggagagcgugaagaacgggaccuacgacuaccccaaguacuccgaggaggcgaagcugaaccgggaggagaucgacggcgugaagcucgagagcacccgcaucuaccagauccuggccaucuacuccaccgucgccagcagccuggugcucguggucucccugggggccaucagcuucuggaugugcuccaacggcagccugcagugccggaucugcaucuga

SEQ ID NO: 73646 - RNA, 1701 nt, Artificial Sequence
  derived and/or modified CDS sequence (opt1) from hemagglutinin__InfluenzaA__AFN87941
augaaggccauccuggugguccuccuguacaccuucgccaccgcgaacgccgacacgcugugcaucggcuaccacgccaacaacagcaccgacaccguggacaccgugcucgagaagaacgucacggugacccacuccgugaaccugcuggaggacaagcacaacgggaagcucugcaagcugcgcggcgucgcgccccugcaccucgggaagugcaacaucgccggcuggauccuggggaacccggagugcgagagccuguccaccgcgagcuccuggagcuacaucguggagaccuccagcuccgacaacggcacgugcuaccccggcgacuucaucgacuacgaggagcuccgggagcagcugagcuccgugagcuccuucgagcgcuucgagaucuuccccaagaccagcuccuggcccaaccacgacccgaacaagggggucaccgccgccugcccccacgccggcgccaagagcuucuacaagaaccugaucuggcucgugaagaaggggaacuccuaccccaagcugagcaaguccuacaucaacgacaagggcaaggaggugcugguccucugggggauccaccaccccagcaccagcgccgaccagcagucccuguaccagaacgccgacgccuacguguucgugggcacgagccgguacuccaagaaguucaagccggagaucgccauccgccccaagguccgggaccaggagggccgcaugaacuacuacuggacccugguggagcccggggacaagaucaccuucgaggcgaccggcaaccucguggucccccgguacgccuucgccauggagcgcaacgccgggagcggcaucaucaucuccgacacgccggugcacgacugcaacacgaccugccagacccccaagggcgccaucaacaccagccugcccuuccagaacauccaccccaucaccaucgggaagugcccgaaguacgugaaguccaccaagcugcggcucgcgaccggccugcgcaacguccccagcauccagucccgggggcuguucggcgccaucgccggguucaucgagggcggcuggacggggaugguggacggcugguacggguaccaccaccagaacgagcagggcagcggguacgccgccgaccucaaguccacccagaacgcgaucgacgagaucaccaacaaggugaacagcgucaucgagaagaugaacacccaguucacggccgugggcaaggaguucaaccaccuggagaagcgcaucgagaaccugaacaagaaggucgacgacggcuuccucgacaucuggaccuacaacgccgagcugcuggugcuccuggagaacgagcggacccuggacuaccacgacuccaacgugaagaaccucuacgagaagguccgcaaccagcugaagaacaacgccaaggagaucgggaacggcugcuucgaguucuaccacaagugcgacaacacgugcauggagagcgugaagaacgggaccuacgacuaccccaaguacuccgaggaggccaagcugaaccgggaggagaucgacggcgugaagcucgagagcacccgcaucuaccagauccuggcgaucuacuccaccgucgccagcucccuggugcucguggucagccugggggccaucagcuucuggaugugcuccaacggcagccugcagugccggaucugcaucuga

SEQ ID NO: 73647 - RNA, 1701 nt, Artificial Sequence
  derived and/or modified CDS sequence (opt1) from hemagglutinin__InfluenzaA__AFN87943
augaaggccauccuggugguccuccuguacaccuucgccaccgcgaacgccgacacgcugugcaucggcuaccacgccaacaacagcaccgacaccguggacaccgugcucgagaagaacgucacggugacccacuccgugaaccugcuggaggacaagcacaacgggaagcucugcaagcugcgcggcgucgcgccccugcaccucgggaagugcaacaucgccggcuggauccuggggaacccggagugcgagagccuguccaccgccagcuccuggagcuacaucguggagaccuccaucagcgacaacggcacgugcuaccccggcgacuucaucgacuacgaggagcuccgggagcagcuguccagcguguccagcuucgagcgcuucgagaucuuccccaagaccuccagcuggcccaaccacgacccgaacaagggggucaccgccgccugcccccacgccggcgcgaaguccuucuacaagaaccugaucuggcucgugaagaaggggaacagcuaccccaagcuguccaccagcuacaucaacgacaagggcaaggaggugcugguccucugggggauccaccaccccuccacgagcgccgaccagcagagccuguaccagaacgccgacgccuacgccuucgugggcaccucccgguacagcaagaaguucaagccggagaucgcgauccgccccaaggugcgggaccaggagggccgcaugaacuacuacuggacccuggucgagcccggggacaagaucaccuucgaggccacgggcaaccucguggugccccgguacgccuucgccauggagcgcaacgccggguccggcaucaucaucagcgacaccuccguccacgacugcaacacgaccugccagaccccgaagggcgcgaucaacaccagccugcccuuccagaacgugcaccccaucaccaucgggaagugccccaaguacgugaaguccaccaagcugcggcucgccacgggccugcgcaacgucccgagcauccagucccgggggcuguucggcgccaucgccggguucaucgagggcggcuggaccgggaugguggacggcugguacggguaccaccaccagaacgagcagggcagcggguacgccgcggaccucaaguccacccagaacgccaucgacgagaucaccaacaaggugaacagcgucaucgagaagaugaacacgcaguucaccgccgugggcaaggaguucaaccaccuggagaagcgcaucgagaaccugaacaagaaggucgacgacggcuuccucgacaucuggaccuacaacgccgagcugcuggugcuccuggagaacgagcggacccuggacuaccacgacuccaacgugaagaaccucuacgagaagguccgcagccagcugaagaacaacgccaaggagaucgggaacggcugcuucgaguucuaccacaagugcgacaacacgugcauggaguccgugaagaacgggaccuacgacuaccccaaguacagcgaggaggcgaagcugaaccgggaggagaucgacggcgugaagcucgaguccacccgcaucuaccagauccuggccaucuacagcaccgucgccuccagccuggugcucguggucagccugggggccaucuccuucuggaugugcagcaacggcucccugcagugccggaucugcaucuga

SEQ ID NO: 73648 - RNA, 1701 nt, Artificial Sequence
  derived and/or modified CDS sequence (opt1) from hemagglutinin__InfluenzaA__AFN87945
augaaggccauccuggugguccuccuguacaccuucgccaccgcgaacgccgacacgcugugcaucggcuaccacgccaacaacagcaccgacaccguggacaccgugcucgagaagaacgucacggugacccacuccgugaaccugcuggaggacaagcacgacgggaagcucugcaagcugcgcggcgucgcgccccugcaccucgggaagugcaacaucgccggcuggauccuggggaacccggagugcgagagccuguccaccgccagcuccuggagcuacaucguggagaccuccagcuccgacaacggcacgugcuaccccggcgacuucaucgacuacgaggagcuccgggagcagcugagcuccgugagcuccuucgagcgcuucgagaucuuccccaagaccagcuccuggcccaaccacgacagcaacaagggggucaccgccgccugcccgcacgccggcgcgaaguccuucuacaagaaccugaucuggcucgugaagaaggggaacagcuaccccaagcugucccagagcuacaucaacgacaagggcaaggaggugcugguccucugggggauccaccaccccagcaccuccgccgaccagcagagccuguaccagaacgccgacgccuacguguucgugggcacgucccgguacagcaagaaguucaagcccgagaucgccauccgcccgaagguccgggaccaggagggccgcaugaacuacuacuggacccugguggagcccggggacaagaucaccuucgaggcgaccggcaaccucguggucccccgguacgccuucgccauggagcgcaacgccggguccggcaucaucaucagcgacacgcccgugcacgacugcaacacgaccugccagaccccgaagggcgccaucaacaccucccugcccuuccagaacauccaccccaucaccaucgggaagugccccaaguacgucaagagcaccaagcugcggcucgcgaccggccugcgcaacgugccguccauccagagccgggggcuguucggcgccaucgccggguucaucgagggcggcuggacggggaugguggacggcugguacggguaccaccaccagaacgagcagggcuccggguacgccgccgaccucaagagcacccagaacgcgaucgacaagaucaccaacaaggugaacuccgucaucgagaagaugaacacccaguucacggccgugggcaaggaguucaaccaccuggagaagcgcaucgagaaccugaacaagaaggucgacgacggcuuccucgacaucuggaccuacaacgccgagcugcuggugcuccuggagaacgagcggacccuggacuaccacgacagcaacgugaagaaccucuacgagaagguccgcucccagcugaagaacaacgccaaggagaucgggaacggcugcuucgaguucuaccacaagugcgacaacacgugcauggagagcgugaagaacgggaccuacgacuaccccaaguacuccgaggaggccaagcugaaccgggaggagaucgacggcgugaagcucgagagcacccgcaucuaccagauccuggcgaucuacuccaccgucgccagcagccuggugcucguggucucccugggggccaucagcuucuggaugugcuccaacggcagccugcagugccggaucugcaucuga

SEQ ID NO: 73649 - RNA, 1701 nt, Artificial Sequence
  derived and/or modified CDS sequence (opt1) from hemagglutinin__InfluenzaA__AFN87947
augaaggccauccuggugguccuccuguacaccuucgccaccgcgaacgccgacacgcugugcaucggcuaccacgccaacaacagcaccgacaccguggacaccgugcucgagaagaacgucacggugacccacuccgugaaccugcuggaggacaagcacaacgggaagcucugcaagcugcgcggcgucgcgccccugcaccucgggaagugcaacaucgccggcuggauccuggggaacccggagugcgagagccuguccaccgcgagcuccuggagcuacaucguggagaccuccagcuccgacaacggcacgugcuaccccggcgacuucaucgacuacgaggagcuccgggagcagcugagcuccgugagcuccuucgagcgcuucgagaucuuccccaagaccagcuccuggcccaaccacgacccgaacaagggggucaccgccgccugcccccacgccggcgccaagagcuucuacaagaaccugaucuggcucgugaagaaggggaacuccuaccccaagcugagcaccuccuacaucaacgacaagggcaaggaggugcugguccucugggggauccaccaccccagcacgagcgccgaccagcagucccuguaccagaacgccgacgccuacgccuucgugggcaccagccgguacuccaagaaguucaagccggagaucgcgauccgccccaaggugcgggaccaggagggccgcaugaacuacuacuggacccuggucgagcccggggacaagaucaccuucgaggccacgggcaaccucguggugccccgguacgccuucgccauggagcgcaacgccgggagcggcaucaucaucuccgacaccagcguccacgacugcaacacgaccugccagaccccgaagggcgcgaucaacaccucccugcccuuccagaacgugcaccccaucaccaucgggaagugccccaaguacgucaagagcaccaagcugcggcucgccacgggccugcgcaacgugccguccauccagagccgggggcuguucggcgccaucgccggguucaucgagggcggcuggaccgggaugguggacggcugguacggguaccaccaccagaacgagcagggcuccggguacgccgcggaccucaagagcacccagaacgccuucgacgagaucaccaacaaggugaacuccgucaucgagaagaugaacacgcaguucaccgccgugggcaaggaguucaaccaccuggagaagcgcaucgagaaccugaacaagaaggucgacgacggcuuccucgacaucuggaccuacaacgccgagcugcuggugcuccuggagaacgagcggacccuggacuaccacgacagcaacgugaagaaccucuacgagaagguccgcucccagcugaagaacaacgccaaggagaucgggaacggcugcuucgaguucuaccacaagugcgacaacacgugcauggagagcgugaagaacgggaccuacgacuaccccaaguacuccgaggaggcgaagcugaaccgggaggagaucgacggcgugaagcucgagagcacccgcaucuaccagauccuggccaucuacuccaccgucgccagcagccuggugcucguggucucccugggggccaucagcuucuggaugugcuccaacggcagccugcagugccggaucugcaucuga

SEQ ID NO: 73650 - RNA, 1701 nt, Artificial Sequence
  derived and/or modified CDS sequence (opt1) from hemagglutinin__InfluenzaA__AFN87949
augaaggccauccugguggucaugcucuacaccuucgccaccgcgaacgccgacacgcugugcaucggcuaccacgccaacaacagcaccgacaccguggacaccgugcuggagaagaacgucacggugacccacuccgugaaccuccuggaggacaagcacaacgggaagcugugcaagcuccgcggcgucgcgccccugcaccuggggaagugcaacaucgccggcuggauccucgggaacccggagugcgagagccuguccaccgccagcuccuggagcuacaucguggagaccuccagcuccgacaacggcacgugcuaccccggcgacuucaucgacuacgaggagcugcgggagcagcucagcuccgugagcuccuucgagcgcuucgagaucuuccccaagaccagcuccuggcccaaccacgacagcaacaagggggucaccgccgccugcccgcacgccggcgcgaagggguucuacaagaaccugaucuggcuggugaagaagggcaacuccuaccccaagcucagcaaguccuacaucaacgacaaggggaaggaggugcugguccuguggggcauccaccaccccagcaccagcgccgaccagcagucccucuaccagaacgccgacacguacguguucgugggcaccagccgguacuccaagaaguucaagcccgagaucgccauccgcccgaagguccgggaccaggaggggcgcaugaacuacuacuggacccugguggagcccggcgacaagaucaccuucgaggccacggggaaccugguggucccccgguacgcguucgccauggagcgcaacgccggcagcggcaucaucaucuccgacacccccgugcacgacugcaacacgaccugccagaccccgaagggggccaucaacaccagccuccccuuccagaacauccaccccaucaccaucggcaagugccccaaguacgugaaguccaccaagcugcggcuggccacggggcuccgcaacgucccgagcauccagucccggggccuguucggggcgaucgccggcuucaucgagggcggguggaccggcaugguggacgggugguacggcuaccaccaccagaacgagcaggggagcggcuacgccgccgaccugaaguccacccagaacgccaucgacaagaucaccaacaaggugaacagcgucaucgagaagaugaacacgcaguucaccgcggugggcaaggaguucaaccaccucgagaagcgcaucgagaaccugaacaagaaggucgacgacggguuccuggacaucuggaccuacaacgccgagcuccuggugcugcucgagaacgagcggacccuggacuaccacgacuccaacgugaagaaccuguacgagaagguccgcagccagcucaagaacaacgccaaggagaucggcaacgggugcuucgaguucuaccacaagugcgacaacacgugcauggaguccgugaagaacggcaccuacgacuaccccaaguacagcgaggaggccaagcugaaccgggaggagaucgacggggugaagcuggaguccacccgcaucuaccagauccucgccaucuacagcaccgucgcguccagccuggugcugguggucagccucggcgccaucuccuucuggaugugcagcaacggcucccugcagugccggaucugcaucuga

SEQ ID NO: 73651 - RNA, 1701 nt, Artificial Sequence; identical to SEQ ID NO: 70964
  derived and/or modified CDS sequence (opt1) from hemagglutinin__InfluenzaA__AFN87951

SEQ ID NO: 73652 - RNA, 1701 nt, Artificial Sequence
  derived and/or modified CDS sequence (opt1) from hemagglutinin__InfluenzaA__AFN87953
augaaggccauccuggugguccuccuguacaccuucgccaccgcgaacgccgacacgcugugcaucggcuaccacgccaacaacagcaccgacaccguggacaccgugcucgagaagaacgucacggugacccacuccgccaaccugcuggaggacaagcacaacgggaagcucugcaagcugcgcggcguggcgccccugcaccucgggaagugcaacaucgccggcuggauccuggggaacccggagugcgagagccuguccaccgccagcuccuggagcuacaucgucgagaccuccagcuccgacaacggcacgugcuaccccggcgacuucaucgacuacgaggagcuccgggagcagcugagcuccgugagcuccuucgagcgcuucgagaucuuccccaagaccagcuccuggcccaaccacgaccugaacaagggggugaccgccgccugcccgcacgcgggcgccaagagcuucuacaagaaccucaucuggcuggucaagaaggggaacuccuaccccaagcugagcaaguccuacaucaacgacaagggcaaggaggugcucgugcugugggggauccaccaccccagcaccagcgccgaccagcagucccuguaccagaacgccgacgccuacgucuucgugggcacgagccgguacuccaagaaguucaagcccgagaucgcgauccgcccgaaggugcgggaccaggagggccgcaugaacuacuacuggacccucgucgagcccggggacaagaucaccuucgaggccaccggcaaccugguggugccccgguacgccuucgccauggagcgcaacgccgggagcggcaucaucaucuccgacacgcccguccacgacugcaacacgaccugccagaccccgaagggcgcgaucaacaccagccugcccuuccagaacauccaccccaucaccaucgggaagugccccaaguacgugaaguccaccaagcuccggcuggccaccggccugcgcaacgugccgagcauccagucccggggccucuucggggccaucgccggguucaucgagggcggcuggacggggauggucgacggcugguacggguaccaccaccagaacgagcagggcagcggguacgccgcggaccugaaguccacccagaacgccaucgacgagaucaccaacaaggugaacagcgugaucgagaagaugaacacccaguucacggccgucggcaaggaguucaaccaccuggagaagcgcaucgagaaccucaacaagaagguggacgacggcuuccuggacaucuggaccuacaacgccgagcugcucguccugcuggagaacgagcggacccucgacuaccacgacuccaacgugaagaaccuguacgagaaggugcgcagccagcugaagaacaacgccaaggagaucgggaacggcugcuucgaguucuaccacaagugcgacaacacgugcauggaguccgucaagaacgggaccuacgacuaccccaaguacagcgaggaggcgaagcucaaccgggaggagaucgacggcgugaagcuggaguccacccgcaucuaccagauccuggccaucuacagcaccguggccuccagccucguccugguggugagccugggggccaucuccuucuggaugugcagcaacggcucccuccagugccggaucugcaucuga

SEQ ID NO: 73653 - RNA, 1701 nt, Artificial Sequence
  derived and/or modified CDS sequence (opt1) from hemagglutinin__InfluenzaA__AFN87955
augaaggccauccugguggucaugcucuacaccuucgccaccgcgaacgccgacacgcugugcaucggcuaccacgccaacaacagcaccgacaccguggacaccgugcuggagaagaacgucacggugacccacuccgugaaccuccuggaggacaagcacaacgggaagcugugcaagcuccgcggcgucgcgccccugcaccuggggaagugcaacaucgccggcuggauccucgggaacccggagugcgagagccuguccaccgccagcuccuggagcuacaucguggagaccuccagcuccgacaacggcacgugcuaccccggcgacuucaucgacuacgaggagcugcgggagcagcucagcuccgugagcuccuucgagcgcuucgagaucuuccccaagaccagcuccuggcccaaccacgacagcaacaagggggucaccgccgccugcccgcacgccggcgcgaagggguucuacaagaaccugaucuggcuggugaagaagggcaacuccuaccccaagcucagcaaguccuacaucaacgacaaggggaaggaggugcugguccuguggggcauccaccaccccagcaccacggccgaccagcagagccucuaccagaacgccgacaccuacguguucgugggcaccucccgguacagcaagaaguucaagcccgagaucgccauccgcccgaagguccgggaccaggaggggcgcaugaacuacuacuggacccugguggagcccggcgacaagaucacguucgaggccaccgggaaccugguggucccccgguacgcguucgccauggagcgcaacgccggcuccggcaucaucaucagcgacacccccgugcacgacugcaacaccacgugccagaccccgaagggggccaucaacaccucccuccccuuccagaacauccaccccaucaccaucggcaagugccccaaguacgucaagagcacgaagcugcggcuggccaccgggcuccgcaacgugccguccauccagagccggggccuguucggggcgaucgccggcuucaucgagggcggguggaccggcaugguggacgggugguacggcuaccaccaccagaacgagcagggguccggcuacgccgccgaccucaagagcacccagaacgccaucgacgagaucacgaacaaggugaacuccgucaucgagaagaugaacacccaguucaccgcggugggcaaggaguucaaccaccuggagaagcgcaucgagaaccugaacaagaaggucgacgacggguuccuggacaucuggaccuacaacgccgagcuccuggugcugcucgagaacgagcggacgcuggacuaccacgacagcaacgugaagaaccuguacgagaagguccgcucccagcucaagaacaacgccaaggagaucggcaacgggugcuucgaguucuaccacaagugcgacaacacgugcauggagagcgugaagaacggcaccuacgacuaccccaaguacuccgaggaggccaagcugaaccgggaggagaucgacggggugaagcuggagagcacccgcaucuaccagauccucgccaucuacuccaccgucgcgagcucccuggugcugguggucagccucggcgccaucagcuucuggaugugcuccaacggcagccugcagugccggaucugcaucuga

SEQ ID NO: 73654 - RNA, 1701 nt, Artificial Sequence
  derived and/or modified CDS sequence (opt1) from hemagglutinin__InfluenzaA__AFN87957
augaaggccauccuggugguccuccuguacaccuucgccaccgcgaacgccgacacgcugugcaucggcuaccacgccaacaacagcaccgacaccguggacaccgugcucgagaagaacgucacggugacccacuccgugaaccugcuggaggacaagcacaacgggaagcucugcaagcugcgcggcgucgcgccccugcaccucgggaagugcaacaucgccggcuggauccuggggaacccggagugcgagagccuguccaccgccagcuccuggagcuacaucguggagaccuccaucagcgacaacggcacgugcuaccccggcgacuucaucgacuacgaggagcuccgggagcagcuguccagcguguccagcuucgagcgcuucgagaucuuccccaagaccuccagcuggcccaaccacgacccgaacaagggggucaccgccgccugcccccacgccggcgcgaaguccuucuacaagaaccugaucuggcucgugaagaaggggaacagcuaccccaagcuguccaccagcuacaucaacgacaagggcaaggaggugcugguccucugggggauccaccaccccuccacgagcgccgaccagcagagccuguaccagaacgccgacgccuacgccuucgugggcaccucccgguacagcaagaaguucaagccggagaucgcgauccgccccaaggugcgggaccaggagggccgcaugaacuacuacuggacccuggucgagcccggggacaagaucaccuucgaggccacgggcaaccucguggugccccgguacgccuucgccauggagcgcaacgccggguccggcaucaucaucagcgacaccuccguccacgacugcaacacgaccugccagaccccgaagggcgcgaucaacaccagccugcccuuccagaacgugcaccccaucaccaucgggaagugccccaaguacgugaaguccaccaagcugcggcucgccacgggccugcgcaacgucccgagcauccagucccgggggcuguucggcgccaucgccggguucaucgagggcggcuggaccgggaugguggacggcugguacggguaccaccaccagaacgagcagggcagcggguacgccgcggaccucaaguccacccagaacgccuucgacgagaucaccaacaaggugaacagcgucaucgagaagaugaacacgcaguucaccgccgugggcaaggaguucaaccaccuggagaagcgcaucgagaaccugaacaagaaggucgacgacggcuuccucgacaucuggaccuacaacgccgagcugcuggugcuccuggagaacgagcggacccuggacuaccacgacuccaacgugaagaaccucuacgagaagguccgcagccagcugaagaacaacgccaaggagaucgggaacggcugcuucgaguucuaccacaagugcgacaacaagugcauggaguccgugaagaacgggacguacgacuaccccaaguacagcgaggaggcgaagcugaaccgggaggagaucgacggcgugaagcucgaguccacccgcaucuaccagauccuggccaucuacagcaccgucgccuccagccuggugcucguggucagccugggggccaucuccuucuggaugugcagcaacggcucccugcagugccggaucugcaucuga

SEQ ID NO: 73655 - RNA, 1701 nt, Artificial Sequence
  derived and/or modified CDS sequence (opt1) from hemagglutinin__InfluenzaA__AFN87959
augaaggccauccugguggucaugcucuacaccuucgccaccgcgaacgccgacacgcugugcaucggcuaccacgccaacaacagcaccgacaccguggacaccgugcuggagaagaacgucacggugacccacuccgugaaccuccuggaggacaagcacaacgggaagcugugcaagcuccgcggcgucgcgccccugcaccuggggaagugcaacaucgccggcuggauccucgggaacccggagugcgagagccuguccaccgccagcuccuggagcuacaucguggagaccuccagcuccgacaacggcacgugcuaccccggcgacuucaucgacuacgaggagcugcgggagcagcucagcuccgugagcuccuucgagcgcuucgagaucuuccccaagaccagcuccuggcccaaccacgacagcaacaagggggucaccgccgccugcccgcacgccggcgcgaagggguucuacaagaaccugaucuggcuggugaagaagggcaacuccuaccccaagcucagcaaguccuacaucaacgacaaggggaaggaggugcugguccuguggggcauccaccaccccagcaccagcgccgaccagcagucccucuaccagaacgccgacacguacguguucgugggcaccagccgguacuccaagaaguucaagcccgagaucgccauccgcccgaagguccgggaccaggaggggcgcaugaacuacuacuggacccugguggagcccggcgacaagaucaccuucgaggccacggggaaccugguggucccccgguacgcguucgccauggagcgcaacgccggcagcggcaucaucaucuccgacacccccgugcacgacugcaacacgaccugccagaccccgaagggggccaucaacaccagccuccccuuccagaacauccaccccaucaccaucggcaagugccccaaguacgugaaguccaccaagcugcggcuggccacggggcuccgcaacgucccgagcauccagucccggggccuguucggggcgaucgccggcuucaucgagggcggguggaccggcaugguggacgggugguacggcuaccaccaccagaacgagcaggggagcggcuacgccgccgaccugaaguccacccagaacgccaucgacaagaucaccaacaaggugaacagcgucaucgagaagaugaacacgcaguucaccgcggugggcaaggaguucaaccaccucgagaagcgcaucgagaaccugaacaagaaggucgacgacggguuccuggacaucuggaccuacaacgccgagcuccuggugcugcucgagaacgagcggacccuggacuaccacgacuccaacgugaagaaccuguacgagaagguccgcaaccagcucaagaacaacgccaaggagaucggcaacgggugcuucgaguucuaccacaagugcgacaacacgugcauggagagcgugaagaacggcaccuacgacuaccccaaguacuccgaggaggccaagcugaaccgggaggagaucgacggggugaagcuggagagcacccgcaucuaccagauccucgccaucuacuccaccgucgcgagcucccuggugcugguggucagccucggcgccaucagcuucuggaugugcuccaacggcagccugcagugccggaucugcaucuga

SEQ ID NO: 73656 - RNA, 1701 nt, Artificial Sequence; identical to SEQ ID NO: 67178
  derived and/or modified CDS sequence (opt1) from hemagglutinin__InfluenzaA__AFN87961

SEQ ID NO: 73657 - RNA, 1698 nt, Artificial Sequence
  derived and/or modified CDS sequence (opt1) from hemagglutinin__InfluenzaA__AFO64802
augaaggccaagcugcucgugcugcugugcaccuucaccgccacguacgcggacaccaucugcaucggcuaccacgccaacaacagcaccgacaccgucgacacggugcucgagaagaacgugaccgucacccacuccgugaaccugcuggaggacagccacaacgggaagcucugccugcugaagggcaucgcgccccuccagcuggggaacugcuccguggccggcuggauccuggggaacccggagugcgagcuccugaucagcaaggaguccuggagcuacaucgucgagacccccaaccccgagaacggcacgugcuaccccggcuacuucgccgacuacgaggagcugcgcgagcagcucuccagcguguccagcuucgagcgguucgagaucuucccgaaggaguccagcuggcccaaccacaccgugaccggggucuccgccagcugcucccacaacggcaagagcuccuucuaccgcaaccugcuguggcucaccgugaagaacgggcuguaccccaaccugagcaaguccuacgugaacaacaagggcaaggagguccucgugcuguggggcgugcaccaccccagcaacauccgggaccagcgcgccaucuaccacacggagaacgccuacgucagcgugguguccagccacuacucccggcgcuucaccccggagaucgccaagcggcccaagguccgcgaccaggaggggcggaucaacuacuacuggacccugcucgagcccggcgacaccaucaucuucgaggcgaacgggaaccugaucgcccccugguacgccuucgcccugagccgcggcuucggguccggcaucaucacgagcaacgccccgauggacgagugcgacgcgaagugccagacgccccagggcgccaucaacuccagccuccccuuccagaacgugcaccccgugaccaucggggagugcccgaaguacguccgguccgccaagcugcgcauggugaccggccugcggaacauccccagcauccagucccgcggccucuucggggccaucgccggguucaucgagggcggcuggaccgggaugaucgacggcugguacggguaccaccaccagaacgagcagggcagcggguacgcggccgaccagaaguccacccagaacgccaucaacggcaucaccaacaaggugaacagcgucaucgagaagaugaacacccaguucacggccgugggcaaggaguucaacaagcuggagcggcgcauggagaaccugaacaagaaggucgacgacggguuccucgacaucuggaccuacaacgccgagcugcuggugcuccuggagaacgagcggacccuggacuuccacgacuccaacgugaagaaccucuacgagaaggucaagagccagcugaagaacaacgcgaaggagaucggcaacgggugcuucgaguucuaccacaagugcaacaacgagugcauggaguccgugaagaacggcaccuacgacuaccccaaguacagcgaggaguccaagcugaaccgcgagaagaucgacggggugaagcucgagagcaugggcgucuaccagauccuggccaucuacagcacgguggccuccagccuggugcuccuggucucccugggcgccaucagcuucuggaugugcuccaacgggagccuccagugccggaucugcaucuga

SEQ ID NO: 73658 - RNA, 1701 nt, Artificial Sequence
  derived and/or modified CDS sequence (opt1) from hemagglutinin__InfluenzaA__AFO64813
augaaggccaagcugcucgugcugcugugcgccuucaccgcgaccgacgccgacacgaucugcaucggcuaccacgccaacaacagcaccgacaccgucgacaccgugcucgagaagaacgugacggucacccacuccgugaaccugcuggaggacagccacaacgggaagcucugccgccugaagggcaucgcgccccugcagcucgggaacugcuccaucgccggcuggauccuggggaacccggagugcgagagccuguucuccaagaaguccuggagcuacaucgccgagacccccaacagcgagaacgggaccugcuaccccggcuacuucgccgacuacgaggagcuccgggagcagcuguccagcguguccagcuucgagcgcuucgagaucuuccccaaggaguccagcuggccgaaccacacggucaccaagggggugaccgccuccugcagccacaagggccgguccagcuucuaccgcaaccugcucuggcugaccgagaagaacggguccuaccccaaccugagcaagagcuacgugaacaacaaggagaaggagguccucgugcuguggggcgugcaccaccccuccaacauccgggaccagcgcgccaucuaccacacggagaacgcguacgucagcgugguguccagccacuacaaccggcgcuucacccccgagaucgccaagcggccgaagguccgcgaccaggaggggcggaucaacuacuacuggacccugcucgagcccggcgacaccaucaucuucgaggccaacggcaaccugaucgcccccugguacgccuucgcgcugucccgcggguucggcagcgggaucaucacguccaacgccagcauggacgagugcgacgccaagugccagacgccccagggcgccaucaacuccagccucccguuccagaacgugcaccccgugaccaucggcgagugccccaaguacguccgguccaccaagcugcgcauggugaccgggcugcggaacauccccagcauccagucccgcggccucuucggggccaucgcgggcuucaucgagggcggcuggaccggcaugaucgacgggugguacggcuaccaccaccagaacgagcaggggagcggcuacgccgccgaccagaaguccacccagaacgccaucaacgggaucaccaacaaggugaacagcgucaucgagaagaugaacacgcaguucaccgccgugggcaaggaguucaacaagcuggagcggcgcauggagaaccugaacaagaagguggacgacggcuuccucgacaucuggaccuacaacgcggagcugcugguccuccuggagaacgagcggacccuggacuuccacgacuccaacgugaagaaccucuacgagaaggucaagagccagcugaagaacaacgccaaggagaucgggaacggcugcuucgaguucuaccacaagugcaacaacgagugcauggaguccgugaagaacgggacguacgacuacccgaaguacagcgaggagagcaagcugaaccgcgagaagaucgacggcgugaagcucgaguccaugggggucuaccagauccuggccaucuacagcaccguggccuccagccuggugcuccuggucucccugggcgccaucagcuucuggaugugcuccaacggcagccuccagugccggaucugcaucuga

SEQ ID NO: 73659 - RNA, 1701 nt, Artificial Sequence
  derived and/or modified CDS sequence (opt1) from hemagglutinin__InfluenzaA__AFO64824
augaaggccauccugcucgugcugcugugcgccuucaccgcgaccgacgccgacacgaucugcaucggcuaccacgccaacaacagcaccgacaccgucgacaccgugcucgagaagaacgugacggucacccacuccgugaaccugcuggaggacagccacaacgggaagcucugccgccugaagggcaucgcgccccugcagcucgggaacugcuccaucgccggcuggauccuggggaacccggagugcgagagccuguucuccaagaaguccuggagcuacaucgccgagacccccaacagcgagaacgggaccugcuaccccggcuacuucgccgacuacgaggagcuccgggagcagcuguccagcguguccagcuucgagcgcuucgagaucuuccccaaggaguccagcuggccgaaccacacggucaccaagggcgugaccgccuccugcagccacaagggccgguccagcuucuaccgcaaccugcucuggcugaccgagaagaacgggcuguaccccaaccucuccaagagcuacgugaacaacaaggagaaggagguccuggugcuguggggcgugcaccaccccagcaacaucggggaccagcgggccaucuaccacacggagaacgcguacgucuccguggugagcucccacuacaaccgccgguucacccccgagaucgccaagcgcccgaagguccggggccaggagggccgcaucaacuacuacuggacccuccuggagcccggggacaccaucaucuucgaggccaacggcaaccugaucgcccccugguacgccuucgcgcucagccggggguucggcuccggcaucaucacgagcaacgccuccauggacgagugcgacgccaagugccagacgccccagggggccaucaacagcucccugccguuccagaacgugcaccccgugaccaucggcgagugccccaaguacguccgcagcaccaagcugaagauggugaccgggcuccggaacauccccuccauccagagccgcggccuguucggggccaucgcgggcuucaucgagggcggguggaccggcaugaucgacgggugguacggcuaccaccaccagaacgagcagggguccggcuacgccgccgaccagaaguccacccagaacgccaucaacggcaucaccaacaaggugaacagcgucaucgagaagaugaacacgcaguucaccgccguggggaaggaguucaacaagcuggagaagcggauggagaaccucaacaagaagguggacgacggcuuccuggacaucuggaccuacaacgcggagcugcucguccugcuggagaacgagcgcacccucgacuuccacgacagcaacgugaagaaccuguacgagaaggucaagaaccagcugaagaacaacgccaaggagaucgggaacggcugcuucgaguucuaccacaagugcaacaacgagugcauggaguccgugaagaacgggacguacgacuacccgaaguacagcgaggaguccaagcucaaccgggagaagaucgacggcgugaagcuggagagcaugggcgucuaccagauccuggccaucuacagcaccguggccuccagccucgugcugcuggucucccucggggccaucagcuucuggaugugcuccaacggcagccugcagugccgcaucugcaucuga

SEQ ID NO: 73660 - RNA, 1701 nt, Artificial Sequence
  derived and/or modified CDS sequence (opt1) from hemagglutinin__InfluenzaA__AFO64835
augaaggccaagcugcucgugcugcugugcgccuucaccgcgaccuacgccgacacgaucugcaucggcuaccacgccaacaacagcaccgacaccgucgacaccgugcucgagaagaacgugacggucacccacuccgugaaccugcuggaggacagccacaacgggaagcucugccgccugaagggcaucgcgccccugcagcucgggaacugcuccguggccggcuggauccuggggaacccggagugcgagagccuguucuccaaggagagcugguccuacaucgccgagacccccgaccccgagaacgggaccugcuaccccggcuacuucgccgacuacgaggagcuccgggagcagcugagcuccgucagcuccuucgagcgcuucgagaucuucccgaaggagagcuccuggcccaaccacacggugaccaagggcgugaccgccagcugcucccacaacggcaagagcuccuucuaccggaaccugcucuggcugaccaagaagaacgggcuguaccccaaccucagcaaguccuacgucaacaacaaggagaaggaggugcuggugcuguggggcguccaccaccccagcaacaucggggagcagcgcgccaucuaccacacggagaacgcguacgugagcguggucuccagccacuacucccggcgcuucaccccggagaucgccaagcggcccaaggugcgcgaccaggagggccggaucaacuacuacuggacccuccuggagcccggcgacaccaucaucuucgaggccaacgggaaccugaucgcccccugguacgccuucgcgcucagccgcggcuucggguccggcaucaucacgagcaacgccuccauggacgagugcgacgccaagugccagaccccgcagggcgccaucaacagcucccugcccuuccagaacgugcaccccgucaccaucggggagugccccaaguacgugcggagcaccaagcugcgcauggugacgggccuccggaacaucccguccauccagagccgcgggcuguucggcgccaucgcgggguucaucgagggcggcuggaccgggaugaucgacggcugguacggguaccaccaccagaacgagcagggcuccggguacgccgccgaccagaaguccacccagaacgccaucaacggcaucaccaacaaggucaacagcgugaucgagaagaugaacacgcaguucaccgccgugggcaaggaguucaacaagcuggagcggcgcauggagaaccucaacaagaaggucgacgacggguuccuggacaucuggaccuacaacgcggagcugcucgugcugcuggagaacgagcggacccucgacuuccacgacagcaacgucaagaaccuguacgagaaggugaagaaccagcugaagaacaacgccaaggagaucggcaacgggugcuucgaguucuaccacaagugcaacaacgagugcauggaguccgugaagaacggcacguacgacuaccccaaguacagcgaggaguccaagcucaaccgcgagaagaucgacggggucaagcuggagagcaugggcguguaccagauccuggccaucuacagcaccguggccuccagccucguccugcuggugucccucggcgccaucagcuucuggaugugcuccaacgggagccugcagugccggaucugcaucuga

SEQ ID NO: 73661 - RNA, 1701 nt, Artificial Sequence
  derived and/or modified CDS sequence (opt1) from hemagglutinin__InfluenzaA__AFO64846
augaaggccaagcugcucgugcugcugugcgccuucaccgcgaccuacgccgacacgaucugcaucggcuaccacgccaacaacagcaccgacaccgucgacaccgugcucgagaagaacgugacggucacccacuccgugaaccugcuggaggacagccacaacgggaagcucugccgccugaagggcaucgcgccccugcagcucgggaacugcuccguggccggcuggauccuggggaacccggagugcgagagccuguucaccaaggaguccuggagcuacaucgccgagacccccaaccccgagaacggcacgugcuaccccggcuacuucgccgacuacgaggagcuccgggagcagcuguccagcgucuccagcuucgagcgcuucgagaucuucccgaaggaguccagcuggcccaaccacaccgugaccaagggggugaccgccuccugcagccacaacggcaaguccagcuucuaccggaaccugcucuggcugacggagaagaacgggcuguaccccaaccucuccaagagcuacgucaacaacaaggagaaggaggugcuggugcuguggggcguccaccaccccuccaacaugggggaccagcgcgccaucuaccacaccgagaacgcguacgugagcguggucagcucccacuacagccggcgcuucaccccggagaucgccaagcggcccaaggugcgcggccaggagggccggaucaacuacuacuggacccuccuggagcccggggacacgaucaucuucgaggccaacggcaaccugaucgcgccccgcuacgccuucgcccucucccggggguucggcagcggcaucaucaccuccaacgccagcauggacgagugcgacgccaagugccagaccccgcagggggccaucaacuccagccugcccuuccagaacgugcaccccgucaccaucggcgagugccccaaguacgugcgcuccacgaagcugcggauggugaccgggcuccgcaacaucccgagcauccagucccggggccuguucggggccaucgcgggcuucaucgagggcggguggaccggcaugaucgacgggugguacggcuaccaccaccagaacgagcaggggagcggcuacgccgccgaccagaaguccacccagaacgccaucaacggcaucacgaacaaggucaacagcgugaucgagaagaugaacacccaguucaccgccguggggaaggaguucaacaagcuggagcgccggauggagaaccucaacaagaaggucgacgacggcuuccuggacaucuggaccuacaacgcggagcugcucgugcugcuggagaacgagcgcacgcucgacuuccacgacuccaacgucaagaaccuguacgagaaggucaagagccagcugaagaacaacgccaaggagaucgggaacggcugcuucgaguucuaccacaagugcaacaacgagugcauggaguccgugaagaacgggaccuacgacuaccccaaguacagcgaggaguccaagcucaaccgggagaagaucgacggcgugaagcuggagagcaugggcguguaccagauccuggccaucuacagcaccguggccuccagccucguccugcuggugucccucggggccaucagcuucuggaugugcuccaacggcagccugcagugccgcaucugcaucuga

SEQ ID NO: 73662 - RNA, 1701 nt, Artificial Sequence
  derived and/or modified CDS sequence (opt1) from hemagglutinin__InfluenzaA__AFO64857
augaaggccaagcugcucgugcugcugugcgccuucaccgcgaccuacgccgacacgaucugcaucggcuaccacgccaacaacagcaccgacaccgucgacaccgugcucgagaagaacgugacggucacccacuccgugaaccugcuggaggacagccacaacgggaagcucugccgccugaagggcaccgcgccccugcagcucgggaacugcuccguggccggcuggauccuggggaacccggagugcgagagccuguucuccaaggagagcugguccuacaucgccgagacccccaaccccgagaacggcacgugcuaccccggcuacuucgccgacuacgaggagcuccgggagcagcugagcuccgucagcuccuucgagcgcuucgagaucuucccgaaggagagcuccuggcccaaccacaccgugaccaagggggugaccgccagcugcucccacaacggcaagagcuccuucuacaagaaccugcucuggcugacggagaagaacgggcuguaccccaaccucagcaaguccuacgucaacaacaaggagaaggaggugcuggugcuguggggcguccaccaccccagcaacaucggggaccagcgggccaucuaccacaccgagaacgcguacgugagcguggucuccagccacuacucccgccgguucaccccggagaucgccaagcgccccaaggugcggggccaggagggccgcaucaacuacuacuggacccuccuggagcccggggacacgaucaucuucgaggccaacggcaaccugaucgcccccugguacgccuucgcgcucagccggggguucggcuccggcaucaucaccagcaccgccuccaugggggagugcgacgccaagugccagaccccgcagggcgccaucaacagcucccugcccuuccagaacgugcaccccgucacgaucggggagugccccaaguacgugcgcagcaccaagcugcggauggugaccggccuccgcaacaucccguccauccagagccgggggcuguucggcgccaucgcgggcuucaucgagggcggguggaccgggaugaucgacggcugguacggguaccaccaccagaacgagcagggcuccggcuacgccgccgaccagaaguccacgcagaacgccaucgacgggaucaccaacaaggucaacagcgugaucgagaagaugaacacccaguucaccgccgugggcaaggaguucaacaagcuggagcgccggauggagaaccucaacaagaaggucgacgacggguuccuggacaucuggacguacaacgcggagcugcucgugcugcuggagaacggccgcacccucgacuuccacgacagcaacgucaagaaccuguacgagaaggugaagaaccagcugaagaacaacgccaaggagaucgggaacggcugcuucgaguucuaccacaagugcaacaacgagugcauggaguccgugaagaacggcaccuacgacuaccccaaguacagcgaggaguccaagcucaaccgggagaagaucgacggggucaagcuggagagcaugggcguguaccagauccuggccaucuacagcaccguggccuccagccucguccugcuggugucccucggggccaucagcuucuggaugugcuccaacggcagccugcagugccgcaucugcaucuga

SEQ ID NO: 73663 - RNA, 1701 nt, Artificial Sequence
  derived and/or modified CDS sequence (opt1) from hemagglutinin__InfluenzaA__AFO64868
augaaggugaagcugcucguccugcugugcgccuucaccgccaccuacgcggacacgaucugcaucggcuaccacgccaacaacagcaccgacaccguggacaccgugcucgagaagaacgucacggugacccacuccgugaaccugcuggaggacagccacaacgggaagcucugccgccugaagggcaccgcgccccugcagcucgggaacugcuccgucgccggcuggauccuggggaacccggagugcgagagccuguucuccaaggagagcugguccuacaucgccgagacccccaaccccgagaacggcacgugcuaccccggcugcuucgccgacuacgaggagcuccgggagcagcugagcuccgugagcuccuucgagcgcuucgagaucuucccgaaggagagcuccuggcccaaccacaccgugaccaagggggucaccgccagcugcucccacaacggcaagagcuccuucuacaagaaccugcucuggcugacggagaagaacgggcuguaccccaaccucagcaaguccuacgugaacaacaaggagaaggaggugcugguccuguggggcgugcaccaccccagcaacauccgggaccagcgcgccaucuaccacaccgagaacgccuacgugagcgucguguccagccacuacucccggcgcuucaccccggagaucgcgaagcggcccaaggugcgcgggcaggagggccggaucaacuacuacuggacccuccuggagcccggcgacacgaucaucuucgaggccaacgggaaccugaucgcccccugguacgccuucgcccucagccgcggcuucggguccggcaucaucaccagcaacgcguccaugggcgagugcgacgccaagugccagaccccgcagggggccaucaacagcucccugcccuuccagaacguccaccccgugaccaucggcgagugccccaaguacgugcggagcacgaagcugcgcauggucaccgggcuccggaacaucccguccauccagagccgcggccuguucggggccaucgccggcuucaucgagggcggguggaccggcaugaucgacgggugguacggcuaccaccaccagaacgagcagggguccggcuacgcggccgaccagaaguccacccagaacgccaucgacggcaucacgaacaaggugaacagcgugaucgagaagaugaacacccaguucaccgccgucgggaaggaguucaacaagcuggagcggcgcauggagaaccucaacaagaagguggacgacggcuuccuggacaucuggaccuacaacgccgagcugcucguccugcuggagaacgagcggacgcucgacuuccacgacagcaacgugaagaaccuguacgagaaggugaagaaccagcugaagaacaacgcgaaggagaucgggaacggcugcuucgaguucuaccacaagugcaacaacgagugcauggaguccgucaagaacgggaccuacgacuaccccaaguacagcgaggaguccaagcucaaccgcgagaagaucgacggcgugaagcuggagagcaugggcguguaccagauccuggccaucuacagcaccgucgccuccagccucgugcugcuggugucccucggggccaucagcuucuggaugugcuccaacggcagccugcagugccggaucugcaucuga

SEQ ID NO: 73664 - RNA, 1698 nt, Artificial Sequence
  derived and/or modified CDS sequence (opt1) from hemagglutinin__InfluenzaA__AFO64879
augaaggccaagcugcucgugcugcugugcaccuucaccgccacguacgcggacaccaucugcaucggcuaccacgccaacaacagcaccgacaccgucgacacggugcucgagaagaacgugaccgucacccacuccgugaaccugcuggaggacagccacaacgggaagcucugccugcugaagggcaucgcgccccuccagcuggggaacugcuccguggccggcuggauccuggggaacccggagugcgagagccucaucuucaaggaguccuggagcuacaucgucgagacccccaaccccgagaacggcacgugcuaccccggcuacuucgccgacuacgaggagcugcgcgagcagcuguccagcguguccagcuucgagcgguucgagaucuucccgaaggaguccagcuggcccaaccacaccgugaccggggucuccgccagcugcucccacaacggcaagagcuccuucuaccgcaaccuccuguggcugaccgagaagaacgggcucuaccccaaccugagcaaguccuacgugaacaacaaggagaaggaggugcugguccucuggggcgugcaccaccccagcaacauccgggaccagcgcgccaucuaccacacggagaacgccuacgugagcgucguguccagccacuacucccggcgcuucaccccggagaucgccaagcggcccaaggugcgcgggcaggagggccggaucaacuacuacuggacccugcuggagcccggcgacaccaucaucuucgaggcgaacgggaaccucaucgcccccugguacgccuucgcccugagccgcggcuucggguccggcaucaucacgagcaacgccccgauggacgagugcgacgcgaagugccagacgccccagggcgccaucaacuccagccugcccuuccagaacguccaccccgugaccaucggggagugcccgaaguacgugcgguccgccaagcuccgcauggucaccggccugcggaacauccccagcauccagucccgcgggcuguucggcgccaucgccggguucaucgagggcggcuggaccgggaugaucgacggcugguacggguaccaccaccagaacgagcagggcagcggguacgcggccgaccagaaguccacccagaacgccaucaacggcaucaccaacaaggugaacagcgugaucgagaagaugaacacccaguucacggccgucggcaaggaguucaacaagcucgagcggcgcauggagaaccugaacaagaagguggacgacggguuccuggacaucuggaccuacaacgccgagcuccugguccugcucgagaacgagcggacccuggacuuccacgacuccaacgugaagaaccuguacgagaaggucaagagccagcucaagaacaacgcgaaggagaucggcaacgggugcuucgaguucuaccacaagugcaacaacgagugcauggaguccgugaagaacggcaccuacgacuaccccaaguacagcgaggaguccaagcugaaccgcgagaagaucgacggggugaagcuggagagcaugggcguguaccagauccucgccaucuacagcacggucgccuccagccuggugcugcucgugucccugggcgccaucagcuucuggaugugcuccaacgggagccugcagugccggaucugcaucuga

SEQ ID NO: 73665 - RNA, 1698 nt, Artificial Sequence
  derived and/or modified CDS sequence (opt1) from hemagglutinin__InfluenzaA__AFO64890
augaaggccaagcugcucgugcugcugugcaccuucaccgccacguacgcggacaccaucugcaucggcuaccacgccaacaacagcaccgacaccgucgacacggugcucgagaagaacgugaccgucacccacuccgugaaccugcuggaggacagccacaacgggaagcucugccugcugaagggcaucgcgccccuccagcuggggaacugcuccguggccggcuggauccuggggaacccggagugcgagagccucaucuccaaggagagcugguccuacaucgucgagacccccaaccccgagaacggcacgugcuaccccggcuacuucgccgacuacgaggagcugcgcgagcagcugagcuccgugagcuccuucgagcgguucgagaucuucccgaaggagagcuccuggcccaaccacaccgugaccggggucagcgccuccugcagccacaacggcaaguccagcuucuaccgcaaccuccuguggcugaccgagaagaacgggcucuaccccaaccuguccaagagcuacgugaacaacaaggagaaggaggugcugguccucuggggcgugcaccaccccagcaacauccgggaccagcgcgccaucuaccacacggagaacgccuacguguccgucgugagcucccacuacagccggcgcuucaccccggagaucgccaagcggcccaaggugcgcgggcaggagggccggaucaacuacuacuggacccugcuggagcccggcgacaccaucaucuucgaggcgaacgggaaccucaucgcccccugguacgccuucgcccugucccgcggcuucgggagcggcaucaucacguccaacgccccgauggacgagugcgacgucaagugccagacgccccagggcgcgaucaacagcucccugcccuuccagaacgugcaccccgugaccaucggggagugcccgaaguacguccggagcgccaagcuccgcauggugaccggccugcggaacauccccuccauccagagccgcgggcuguucggcgccaucgccggguucaucgagggcggcuggaccgggaugaucgacggcugguacggguaccaccaccagaacgagcagggcuccggguacgccgcggaccagaaguccacccagaacgccaucaacggcaucaccaacaaggugaacagcgucaucgagaagaugaacacccaguucacggccgugggcaaggaguucaacaagcucgagcggcgcauggagaaccugaacaagaaggucgacgacggguuccuggacaucuggaccuacaacgccgagcuccuggugcugcucgagaacgagcggacccuggacuuccacgacagcaacgugaagaaccuguacgagaaggucaagucccagcucaagaacaacgccaaggagaucggcaacgggugcuucgaguucuaccacaagugcaacaacgagugcauggagagcgugaagaacggcaccuacgacuaccccaaguacuccgaggagagcaagcugaaccgcgagaagaucgacggggugaagcuggagagcaugggcgucuaccagauccucgcgaucuacuccacgguggccagcucccuggugcugcucgucagccugggcgccaucuccuucuggaugugcagcaacgggucccugcagugccggaucugcaucuga

SEQ ID NO: 73666 - RNA, 1701 nt, Artificial Sequence
  derived and/or modified CDS sequence (opt1) from hemagglutinin__InfluenzaA__AFO64901
augaaggccaagcugcucgugcugcugugcgccuucaccgcgaccuacgccgacacgaucugcaucggcuaccacgccaacaacagcaccgacaccgucgacaccgugcucgagaagaacgugacggucacccacuccgugaaccugcuggaggacagccacaacgggaagcucugccgccugaagggcaccgcgccccugcagcucgggaacugcuccaucgccggcuggauccuggggaacccggagugcgagagccuguucuccaaggagagcugguccuacaucgccgagacccccaaccccgagaacggcacgugcuaccccggcuacuucgccgacuacgaggagcuccgggagcagcugagcuccgugagcuccuucgagcgcuucgagaucuucccgaaggagagcuccuggcccaaccacaccgucaccaagggggugaccgccagcugcucccacaacggcaagagcuccuucuacaagaaccugcucuggcugacggagaagaacgggcuguaccccaaccucagcaaguccuacgugaacaacaagaagaaggagguccuggugcuguggggcgugcaccaccccagcaacaucggggaccagcgggccaucuaccacaccgagaacgcguacgucagcgugguguccagccacuacucccgccgguucaccccggagaucgccaagcgccccaagguccggaaccaggagggccgcaucaacuacuacuggacccuccuggagcccggcgacacgaucaucuucgaggccaacgggaaccugaucgcccccugguacgccuucgcgcucagccggggcuucgaguccgggaucaucaccagcaacgccuccaugggcgagugcgacgccaagugccagaccccgcagggcgccaucaacagcucccugcccuuccagaacgugcaccccgugaccaucggggagugccccaaguacguccgcagcacgaagcugcggauggugaccggccuccgcaacaucccguccauccagagccgggggcuguucggcgccaucgcgggguucaucgagggcggcuggaccgggaugaucgacggcugguacggguaccaccaccagaacgagcagggcuccggguacgccgccgaccagaaguccacccagaacgccaucaacggcaucacgaacaaggugaacagcaucaucgagaagaugaacacccaguucaccgccgucggcaaggaguucaacaagcuggagcgccggauggagaaccucaacaagaagguggacgacggguuccuggacaucuggaccuacaacgcggagcugcucgugcugcuggagaacgagcgcacgcucgacuuccacgacagcaacgucaagaaccuguacgagaaggugaagaaccagcugaagaacaacgccaaggagaucggcaacgggugcuucgaguucuaccacaagugcaacaacgagugcauggaguccgucaagaacggcaccuacgacuaccccaaguacagcaaggaguccaagcucaaccgggagaagaucgacggggugaagcuggagagcaugggcguguaccagauccuggccaucuacagcaccgucgccuccagccucgugcugcuggugucccucggcgccaucagcuucuggaugugcuccaacgggagccugcagugccgcaucugcaucuga

SEQ ID NO: 73667 - RNA, 1698 nt, Artificial Sequence
  derived and/or modified CDS sequence (opt1) from hemagglutinin__InfluenzaA__AFO65016
augaaggccaagcugcucgugcugcugugcaccuucaccgccacguacgcggacaccaucugcaucggcuaccacgccaacaacagcaccgacaccgucgacacggugcucgagaagaacgugaccgucacccacuccgugaaccugcuggaggacagccacaacgggaagcucugccugcugaagggcaucgcgccccuccagcuggggaacugcuccguggccggcuggauccuggggaacccggagugcgagagccucaucuccaaggagagcugguccuacaucgucgagacccccaaccccgagaacggcacgugcuaccccggcuacuucgccgacuacgaggagcugcgcgagcagcugagcuccgugagcuccuucgagcgguucgagaucuucccgaaggagagcuccuggcccaaccacaccgugaccggggucagcgccuccugcagccacaacggcaaguccagcuucuaccgcaaccuccuguggcugaccaagaagaacgggcucuaccccaaccuguccaagagcuacgugaacaacaaggagaaggaggugcugguccucuggggcgugcaccaccccagcaacaucggggaccagcggacgaucuaccacaccgagaacgccuacguguccgucgugagcucccacuacagccgccgguucaccccggagaucgccaagcgccccaaggugcgggaccaggagggccgcaucaacuacuacuggacccugcuggagcccggcgacacgaucaucuucgaggccaacgggaaccucaucgcgcccugguacgccuucgcccugucccggggcuucgggagcggcaucaucaccuccaacgccccgauggacgagugcgacgccaagugccagacgccccagggcgcgaucaacagcucccugcccuuccagaacguccaccccaucaccaucggggagugcccgaaguacgugcgcagcgccaagcuccggauggugaccggccugcgcaacauccccuccauccagagccgggggcuguucggcgccaucgccggguucaucgagggcggcuggaccgggaugaucgacggcugguacggguaccaccaccagaacgagcagggcuccggguacgccgcggaccagaaguccacccagaacgccaucaacggcaucaccaacaaggucaacagcgugaucgagaagaugaacacgcaguucaccgccgugggcaaggaguucaacaaccucgagcgccggauggagaaccugaacaagaaggucgacgacggguuccuggacaucuggaccuacaacgccgagcuccuggugcugcucgagaacgagcgcacccuggacuuccacgacagcaacgucaagaaccuguacgagaaggugaagucccagcucaagaacaacgccaaggagaucggcaacgggugcuucgaguucuaccacaagugcaacaacgagugcauggagagcgugaagaacggcacguacgacuaccccaaguacuccgaggagagcaagcugaaccgggagaagaucgacggggucaagcuggagagcaugggcguguaccagauccucgcgaucuacuccaccguggccagcucccugguccugcucgugagccugggcgccaucuccuucuggaugugcagcaacgggucccugcagugccgcaucugcaucuga

SEQ ID NO: 73668 - RNA, 1698 nt, Artificial Sequence; identical to SEQ ID NO: 66139
  derived and/or modified CDS sequence (opt1) from hemagglutinin__InfluenzaA__AFO65027

SEQ ID NO: 73669 - RNA, 1698 nt, Artificial Sequence
  derived and/or modified CDS sequence (opt1) from hemagglutinin__InfluenzaA__AFO65038
augaaggccaagcugcucgugcugcugugcaccuucaccgccacguacgcggacaccaucugcaucggcuaccacgccaacaacagcaccgacaccgucgacacggugcucgagaagaacgugaccgucacccacuccgugaaccugcuggaggacagccacaacgggaagcucugccugcugaagggcaucgcgccccuccagcuggggaacugcuccguggccggcuggauccuggggaacccggagugcgagcuccugaucagcaaggaguccuggagcuacaucgucgagacccccaaccccgagaacggcacgugcuaccccggcuacuucgccgacuacgaggagcugcgcgagcagcucuccagcguguccagcuucgagcgguucgagaucuucccgaaggaguccagcuggcccaaccacaccgugaccggggucuccgccagcugcucccacaacggcaagagcuccuucuaccgcaaccugcuguggcucaccgggaagaacggccuguaccccaaccugagcauguccuacgugaacaacaaggagaaggaggugcucguccuguggggcgugcaccacccgcccaacaucgggaaccagcgggcccuguaccacacggagaacgccuacgugagcgucgugagcucccacuacagccgccgguucacccccgagaucgccaagcgccccaaggugcgggaccaggagggccgcaucaacuacuacuggacccuccuggagcccggggacaccaucaucuucgaggcgaacggcaaccugaucgccccgugguacgccuucgcccucucccggggguucggcagcggcaucaucacguccaacgcccccauggacgagugcgacgcgaagugccagacgccccagggggccaucaacagcucccugcccuuccagaacguccacccggugaccaucggcgagugccccaaguacgugcgcagcgccaagcugcggauggucaccgggcuccgcaacauccccuccauccagagccggggccuguucggggccaucgccggcuucaucgagggcggguggaccggcaugguggacgggugguacggcuaccaccaccagaacgagcagggguccggcuacgcggccgaccagaaguccacccagaacgccaucaacggcaucaccaacaaggugaacagcgucaucgagaagaugaacacccaguucacggccguggggaaggaguucaacaagcuggagcgccggauggagaaccucaacaagaaggucgacgacggcuuccuggacaucuggaccuacaacgccgagcugcucgugcugcuggagaacgagcgcacccucgacuuccacgacagcaacgugaagaaccuguacgagaaggucaagucccagcugaagaacaacgcgaaggagaucgggaacggcugcuucgaguucuaccacaagugcaacaacgagugcauggagagcgugaagaacgggaccuacgacuaccccaaguacuccgaggagagcaagcucaaccgggagaagaucgacggcgugaagcuggaguccaugggcgucuaccagauccuggccaucuacagcacgguggccagcucccucgugcugcuggucagccucggggccaucuccuucuggaugugcagcaacggcucccugcagugccgcaucugcaucuga

SEQ ID NO: 73670 - RNA, 1698 nt, Artificial Sequence
  derived and/or modified CDS sequence (opt1) from hemagglutinin__InfluenzaA__AFO66136
augaaggugaagcugcucguccugcugugcaccuucaccgccacguacgccgacaccaucugcaucggcuaccacgcgaacaacagcaccgacaccguggacacggugcucgagaagaacgucaccgugacccacuccgugaaccugcuggaggacagccacaacgggaagcucugccugcugaagggcaucgcgccccuccagcuggggaacugcuccgucgccggcuggauccuggggaacccggagugcgagcuccugaucagcaaggaguccuggagcuacaucguggagacccccaaccccgagaacggcacgugcuaccccggcuacuucgccgacuacgaggagcugcgcgagcagcucuccagcguguccagcuucgagcgguucgagaucuucccgaaggaguccagcuggcccaaccacaccgucaccgggguguccgccagcugcucccacaacggcaagagcuccuucuaccgcaaccugcuguggcucaccgggaagaacggccuguaccccaaccugagcaaguccuacgccaacaacaaggagaaggaggugcucguccuguggggcgugcaccacccgcccaacaucgggaaccagcgggcccuguaccacacggagaacgccuacgugagcgucgugagcucccacuacagccgccgguucacccccgagaucgccaagcgccccaaggugcgggaccaggagggccgcaucaacuacuacuggacccuccuggagcccggggacaccaucaucuucgaggcgaacggcaaccugaucgccccgcgguacgccuucgcccucucccgcggguucggcagcggcaucaucacguccaacgcccccauggacgagugcgacgcgaagugccagacgccccagggggccaucaacagcucccugcccuuccagaacguccacccggugaccaucggcgagugccccaaguacgugcggagcgccaagcugcgcauggucaccgggcuccggaacauccccuccauccagagccgcggccuguucggggccaucgccggcuucaucgagggcggguggaccggcaugguggacgggugguacggcuaccaccaccagaacgagcagggguccggcuacgcggccgaccagaaguccacccagaacgccaucaacggcaucaccaacaaggugaacagcgucaucgagaagaugaacacccaguucacggccguggggaaggaguucaacaagcuggagcggcgcauggagaaccucaacaagaaggucgacgacggcuuccuggacaucuggaccuacaacgccgagcugcucgugcugcuggagaacgagcggacccucgacuuccacgacagcaacgugaagaaccuguacgagaaggucaagucccagcugaagaacaacgcgaaggagaucgggaacggcugcuucgaguucuaccacaagugcaacaacgagugcauggagagcgugaagaacgggaccuacgacuaccccaaguacuccgaggagagcaagcucaaccgcgagaagaucgacggcgugaagcuggaguccaugggcgucuaccagauccuggccaucuacagcacgguggccagcucccucgugcugcuggucagccucggggccaucuccuucuggaugugcagcaacggcucccugcagugccggaucugcaucuga

SEQ ID NO: 73671 - RNA, 1701 nt, Artificial Sequence
  derived and/or modified CDS sequence (opt1) from hemagglutinin__InfluenzaA__AFO66147
augaaggccaagcugcucgugcugcugugcgccuucaccaccacguacgcggacaccaucugcaucggcuaccacgccaacaacagcaccgacaccgucgacacggugcucgagaagaacgugaccgucacccacuccgugaaccugcuggaggacagccacaacgggaagcucugccgccugaagggcaccgcgccccugcagcucgggaacugcuccaucgccggcuggauccuggggaacccggagugcgagagccuguucuccaaggagagcugguccuacaucgccgagacgcccaaccccaagaacgggaccugcuaccccggcuacuucgccgacuacgaggagcuccgggagcagcugagcuccgugagcuccuucgagcgcuucgagaucuucccgaaggacagcuccuggcccaaccacaccgucaccaagggcgugacggccagcugcucccacaacggcaagagcuccuucuacaagaaccugcucuggcugaccgggaagaacggccuguaccccaaccucagcaaguccuacgugaacaagaaggggaaggagguccuggugcuguggggcgugcaccaccccagcaacaugggcgaccagcgggccaucuaccacaaggagaacgccuacgucagcgugcucuccagccacuacucccgccgguucaccccggagaucgcgaagcgccccaaggugcgggaccaggaggggcgcaucaacuacuacuggacccugcuggagcccggcgacacgaucaucuucgaggccaacgggaaccucaucgcccccugguacgccuucgcccugagccggggcuucggcuccgggaucaucaucagcaacgcguccaugggcgagugcgacgccaagugccagaccccgcagggggccaucaacagcucccugcccuuccagaacguccaccccgugaccaucggcgagugccccaaguacgugcgcagcaccaagcuccggauggucacggggcugcgcaacgugccguccauccagagccggggccuguucggcgccaucgccggguucaucgagggcggguggaccggcaugaucgacgggugguacggcuaccaccaccagaacgagcagggcuccggguacgcggccgaccagaaguccacccagaacgccaucaacggcaucaccaacaaggugaacagcaucaucgagaagaugaacacgcaguucaccgccgucgggaaggaguucaacaagcucgagcgccggauggagaaccugaacaagaagguggacgacggcuuccuggacaucuggaccuacaacgccgagcuccuggugcugcucgagaacgagcgcacccuggacuuccacgacagcaacgucaagaaccuguacgagaaggugaagaaccagcucaagaacaacgcgaaggagaucgggaacggcugcuucgaguucuaccacaagugcaacaacgagugcauggaguccgucaagaacggcacguacgacuaccccaaguacagcaaggaguccaagcugaaccgggagaagaucgacggggugaagcuggagagcaugggcguguaccagauccucgccaucuacagcaccgucgccuccagccuggugcugcucgugucccugggggccaucagcuucuggaugugcuccaacggcagccugcagugccgcaucugcaucuga

SEQ ID NO: 73672 - RNA, 1698 nt, Artificial Sequence
  derived and/or modified CDS sequence (opt1) from hemagglutinin__InfluenzaA__AFO66158
augaaggccaagcugcucgugcugcugugcaccuucaccgccacguacgcggacaccaucugcaucggcuaccacgccaacaacagcaccgacaccgucgacacggugcucgagaagaacgugaccgucacccacuccgugaaccugcuggaggacagccacaacgggaagcucugccugcugaagggcaucgcgccccuccagcuggggaacugcuccguggccggcuggauccuggggaacccggagugcgagcuccugaucagcaagggcuccuggagcuacaucgucgagacccccaaccccgagaacggcacgugcuaccccggguacuucgccgacuacgaggagcugcgcgagcagcucuccagcguguccagcuucgagcgguucgagaucuucccgaagggcuccagcuggcccaaccacaccgugaccggggucuccgccagcugcucccacaacggcaagagcuccuucuaccgcaaccugcuguggcucaccgggaagaacggccuguaccccaaccugagcauguccuacgugaacaacaaggagaaggaggugcucguccuguggggcgugcaccacccgcccaacaucgggaaccagcgggcccuguaccacacggagaacgccuacgugagcgucgugagcucccacuacagccgccgguucacccccgagaucgccaagcgccccaaggugcgggaccaggagggccgcaucaacuacuacuggacccuccuggagcccggggacaccaucaucuucgaggcgaacggcaaccugaucgccccgugguacgccuucgcccucucccggggcuucgggagcggcaucaucacguccaacgcccccaugggggagugcgacgcgaagugccagacgccccagggcgccaucaacagcucccugcccuuccagaacguccacccggugaccaucggggagugccccaaguacgugcgcagcgccaagcugcggauggucaccggccuccgcaacauccccuccauccagagccggggccuguucggggccaucgccggcuucaucgagggcggguggaccgggaugguggacggcugguacggcuaccaccaccagaacgagcagggguccggcuacgcggccgaccagaaguccacccagaacgccaucaacgggaucaccaacaaggugaacagcgucaucgagaagaugaacacccaguucacggccgugggcaaggaguucaacaagcuggagcgccggauggagaaccucaacaagaaggucgacgacggguuccuggacaucuggaccuacaacgccgagcugcucgugcugcuggagaacgagcgcacccucgacuuccacgacagcaacgugaagaaccuguacgagaaggucaagucccagcugaagaacaacgcgaaggagaucggcaacggcugcuucgaguucuaccacaagugcaacaacgagugcauggagagcgugaagaacgggaccuacgacuaccccaaguacuccgaggagagcaagcucaaccgggagaagaucgacggcgugaagcuggaguccaugggggucuaccagauccuggccaucuacagcacgguggccagcucccucgugcugcuggucagccucggcgccaucuccuucuggaugugcagcaacggcucccugcagugccgcaucugcaucuga

SEQ ID NO: 73673 - RNA, 1698 nt, Artificial Sequence
  derived and/or modified CDS sequence (opt1) from hemagglutinin__InfluenzaA__AFO66169
augaaggugaagcugcucguccugcugugcaccuucaccgccacguacgccgacaccaucugcaucggcuaccacgcgaacaacagcaccgacaccguggacacggugcucgagaagaacgucaccgugacccacuccgugaaccugcuggaggacagccacaacgggaagcucugccugcugaagggcaucgcgccccuccagcuggggaacugcuccgucgccggcuggauccuggggaacccggagugcgagcuccugaucagcaaggaguccuggagcuacaucguggagaccuccaaccccgagaacggcacgugcuaccccggcuacuucaccgacuacgaggagcugcgcgagcagcucagcuccgugagcuccuucgagcgguucgagaucuuccccaaggagagcuccuggccgaaccacaccgucaccggggugagcgccuccugcagccacaacggcaaguccagcuucuacaagaaccugcuguggcucacggggaagaacggccuguaccccaaccuguccaagagcuacgccaacaacaaggagaaggaggugcucguccuguggggcgugcaccacccgcccaacaucggggaccagcgcgcccuguaccacaccgagaacgccuacgugagcgucguguccagccacuacucccggcgcuucacccccgagaucgccaagcggcccaaggugcgcgaccaggagggccggaucaacuacuacuggacccuccuggagcccggggacacgaucaucuucgaggccaacggcaaccugaucgcgccccgcuacgccuucgcccucagccggggguucggcuccggcaucaucaccagcaacgccccgauggacgagugcgacgccaagugccagacgccccacggggcgaucaacuccagccugcccuuccagaacguccaccccgugaccaucggcgagugcccgaaguacgugcgcuccgccaagcugcggauggucaccgggcuccgcaacauccccagcauccagucccggggccuguucggggccaucgccggcuucaucgagggcggguggaccggcaugguggacgggugguacggcuaccaccaccagaacgagcaggggagcggcuacgccgcggaccagaaguccacccagaacgccaucaacggcaucaccaacaaggugaacagcgucaucgagaagaugaacacgcaguucaccgccguggggaaggaguucaacaagcuggagcgccggauggagaaccucaacaagaaggucgacgacggcuucaucgacaucuggaccuacaacgccgagcugcuggugcuccuggagaacgagcgcacccuggacuuccacgacuccaacgugaagaaccucuacgagaaggucaagagccagcugaagaacaacgccaaggagaucgggaacggcugcuucgaguucuaccacaagugcaacgacgagugcauggaguccgugaagaacgggacguacgacuaccccaaguacagcgaggaguccaagcugaaccgggagaagaucgacggcgugaagcucgagagcaugggcgucuaccagauccuggcgaucuacagcaccguggccuccagccuggugcuccuggucucccugggggccaucagcuucuggaugugcuccaacggcagccuccagugccgcaucugcaucuga

SEQ ID NO: 73674 - RNA, 1698 nt, Artificial Sequence
  derived and/or modified CDS sequence (opt1) from hemagglutinin__InfluenzaA__AFO66180
augaaggccaagcugcucgugcugcugugcaccuucaccgccacguacgcggacaccaucugcaucggcuaccacgccaacaacagcaccgacaccgucgacacggugcucgagaagaacgugaccgucacccacuccgugaaccugcuggaggacagccacaacgggaagcucugccugcugaagggcaucgcgccccuccagcuggggaacugcuccguggccggcuggauccuggggaacccggagugcgagcuccugaucagcaaggaguccuggagcuacaucgucgagacccccaaccccgagaacggcacgugcuaccccggcuacuucgccgacuacgaggagcugcgcgagcagcucuccagcguguccagcuucgagcgguucgagaucuucccgaagggguccagcuggcccaaccacaccgugaccggcgucuccgccagcugcucccacaacggcaagagcuccuucuaccgcaaccugcuguggcucaccgggaagaacgggcuguaccccaaccugagcauguccuacgugaacaacaaggagaaggaggugcucguccuguggggcgugcaccacccgcccaacaucggcgaccagcgggcccuguaccacacggagaacgccuacgugagcgucgugagcucccacuacagccgccgguucacccccgagaucgccaagcgccccaaggugcggaaccaggaggggcgcaucaacuacuacuggacccuccuggagcccggcgacaccaucaucuucgaggcgaacgggaaccugaucgccccgugguacgccuucgcccucucccggggcuucggcagcgggaucaucacguccaacgcccccaugggcgagugcgacgcgaagugccagacgccccagggggccaucaacagcucccugcccuuccagaacguccacccggugaccaucggcgagugccccaaguacgugcgcagcgccaagcugcggauggucaccgggcuccgcaacauccccuccauccagagccggggccuguucggcgccaucgccggguucaucgagggcggguggaccggcaugguggacgggugguacggcuaccaccaccagaacgagcagggcuccggguacgcggccgaccagaaguccacccagaacgccaucaacggcaucaccaacaaggugaacagcgucaucgagaagaugaacacccaguucacggccguggggaaggaguucaacaagcuggagcgccggauggagaaccucaacaagaaggucgacgacggcuuccuggacaucuggaccuacaacgccgagcugcucgugcugcuggagaacgagcgcacccucgacuuccacgacagcaacgugaagaaccuguacgagaaggucaagucccagcugaagaacaacgcgaaggagaucgggaacggcugcuucgaguucuaccacaagugcaacaacgagugcauggagagcgugaagaacggcaccuacgacuaccccaaguacuccgaggagagcaagcucaaccgggagaagaucgacggggugaagcuggaguccaugggcgucuaccagauccuggccaucuacagcacgguggccagcucccucgugcugcuggucagccucggggccaucuccuucuggaugugcagcaacggcucccugcagugccgcaucugcaucuga

SEQ ID NO: 73675 - RNA, 1698 nt, Artificial Sequence
  derived and/or modified CDS sequence (opt1) from hemagglutinin__InfluenzaA__AFO66191
augaaggccaagcugcucgugcugcugugcaccuucaccgccacguacgcggacaccaucugcaucggcuaccacgccaacaacagcaccgacaccgucgacacggugcucgagaagaacgugaccgucacccacuccgugaaccugcuggaggacagccacaacgggaagcucugccugcugaagggcaucgcgccccuccagcuggggaacugcuccguggccggcuggauccuggggaacccggagugcgagcuccugaucagcaaggaguccuggagcuacaucgucgagacccccaaccccgagaacggcacgugcuaccccggcuacuucgccgacuacgaggagcugcgcgagcagcucuccagcguguccagcuucgagcgguucgagaucuucccgaagggguccagcuggcccaaccacaccgugaccggcgucuccgccagcugcucccacaacggcaagagcuccuucuaccgcaaccugcuguggcucaccgggaagaacgggcuguaccccaaccugagcauguccuacgugaacaacaaggagaaggaggugcucguccuguggggcgugcaccacccgcccaacaucggcaaccagcgggcccuguaccacacggagaacgccuacgugagcgucgugagcucccacuacagccgccgguucacccccgagaucgccaagcgccccaaggugcgggaccaggaggggcgcaucaacuacuacuggacccuccuggagcccggcgacaccaucaucuucgaggcgaacgggaaccugaucgccccgugguacgccuucgcccucucccggggcuucggcagcgggaucaucacguccaacgcccccauggacgagugcgacgcgaagugccagacgccccagggcgccaucaacagcucccugcccuuccagaacguccacccggugaccaucggggagugccccaaguacgugcgcagcgccaagcugcggauggucaccggccuccgcaacauccccuccauccagagccgggggcuguucggcgccaucgccggcuucaucgagggcggguggaccgggaugguggacggcugguacggguaccaccaccagaacgagcagggcuccggcuacgcggccgaccagaaguccacccagaacgccaucaacgggaucaccaacaaggugaacagcgucaucgagaagaugaacacccaguucacggccgugggcaaggaguucaacaagcuggagcgccggauggagaaccucaacaagaaggucgacgacggguuccuggacaucuggaccuacaacgccgagcugcucgugcugcuggagaacgagcgcacccucgacuuccacgacagcaacgugaagaaccuguacgagaaggucaagucccagcugaagaacaacgcgaaggagaucggcaacgggugcuucgaguucuaccacaagugcaacaacgagugcauggagagcgugaagaacggcaccuacgacuaccccaaguacuccgaggagagcaagcucaaccgggagaagaucgacggcgugaagcuggaguccaugggggucuaccagauccuggccaucuacagcacgguggccagcucccucgugcugcuggucagccucggcgccaucuccuucuggaugugcagcaacgggucccugcagugccgcaucugcaucuga

SEQ ID NO: 73676 - RNA, 1698 nt, Artificial Sequence; identical to SEQ ID NO: 64536
  derived and/or modified CDS sequence (opt1) from hemagglutinin__InfluenzaA__AFO66202

SEQ ID NO: 73677 - RNA, 1698 nt, Artificial Sequence
  derived and/or modified CDS sequence (opt1) from hemagglutinin__InfluenzaA__AFO66213
augaaggugaagcugcucguccugcugugcaccuucaccgccacguacgccgacaccaucugcaucggcuaccacgcgaacaacagcaccgacaccguggacacggugcucgagaagaacgucaccgugacccacuccgugaaccugcuggaggacagccacaacgggaagcucugccugcugaagggcaucgcgccccuccagcuggggaacugcuccgucgccggcuggauccuggggaacccggagugcgagcuccugaucagcaaggaguccuggagcuacaucguggagacccccaaccccgagaacggcacgugcuaccccggcuacuucgccgacuacgaggagcugcgcgagcagcucuccagcguguccagcuucgagcgguucgagaucuucccgaaggaguccagcuggcccaaccacaccgucaccgggguguccgccagcugcucccacaacggcaagagcuccuucuaccgcaaccugcuguggcucaccgggaagaacggccuguaccccaaccugagcaaguccuacgccaacaacaagaagaaggaggugcucguccuguggggcgugcaccacccgcccaacaucgggaaccagcgggcccuguaccacacggagaacgccuacgugagcgucgugagcucccacuacagccgccgguucacccccgagaucgccaagcgccccaaggugcgggaccaggagggccgcaucaacuacuacuggacccuccuggagcccggggacaccaucaucuucgaggcgaacggcaaccugaucgccccgcgguacgccuucgcccucucccgcggguucggcagcggcaucaucacguccaacgcccccauggacgagugcgacgcgaagugccagacgccccagggggccaucaacagcucccugcccuuccagaacguccacccggugaccaucggcgagugccccaaguacgugcggagcgccaagcugcgcauggucaccgggcuccggaacauccccuccauccagagccgcggccuguucggggccaucgccggcuucaucgagggcggguggaccggcaugguggacgggugguacggcuaccaccaccagaacgagcagggguccggcuacgcggccgaccagaaguccacccagaacgccaucaacggcaucaccaacaaggugaacagcgucaucgagaagaugaacacccaguucacggccguggggaaggaguucaacaagcuggagcggcgcauggagaaccucaacaagaaggucgacgacggcuuccuggacaucuggaccuacaacgccgagcugcucgugcugcuggagaacgagcggacccucgacuuccacgacagcaacgugaagaaccuguacgagaaggucaagucccagcugaagaacaacgcgaaggagaucgggaacggcugcuucgaguucuaccacaagugcaacgacgagugcauggagagcgugaagaacgggaccuacgacuaccccaaguacuccgaggagagcaagcucaaccgcgagaagaucgacggcgugaagcuggaguccaugggcgucuaccagauccuggccaucuacagcacgguggccagcucccucgugcugcuggucagccucggggccaucuccuucuggaugugcagcaacggcucccugcagugccggaucugcaucuga

SEQ ID NO: 73678 - RNA, 1698 nt, Artificial Sequence
  derived and/or modified CDS sequence (opt1) from hemagglutinin__InfluenzaA__AFO66224
augaaggugaagcugcucguccugcugugcaccuucaccgccacguacgccgacaccaucugcaucggcuaccacgcgaacaacagcaccgacaccguggacacggugcucgagaagaacgucaccgugacccacuccgugaaccugcuggaggacagccacaacgggaagcucugccugcugaagggcaucgcgccccuccagcuggggaacugcuccgucgccggcuggauccuggggaacccggagugcgagcuccugaucagcaaggaguccuggagcuacaucguggagacccccaaccccgagaacggcacgugcuaccccggcuacuucgccgacuacgaggagcugcgcgagcagcucuccagcguguccagcuucgagcgguucgagaucuucccgaaggaguccagcuggcccaaccacaccgucaccgggguguccgccagcugcucccacaacggcaagagcuccuucuaccgcaaccugcuguggcucaccgggaagaacggccuguaccccaaccugagcaaguccuacgccaacaacaaggagaaggaggugcucguccuguggggcgugcaccacccgcccaacaucgggaaccagcgggcccuguaccacacggagaacgccuacgugagcgucgugagcucccacuacagccgccgguucacccccgagaucgccaagcgccccaaggugcgggaccaggagggccgcaucaacuacuacuggacccuccuggagcccggggacaccaucaucuucgaggcgaacggcaaccugaucgccccgcgguacgccuucgcccucucccgcggguucggcagcggcaucaucacguccaacgcccccauggacgagugcgacgcgaagugccagacgccccagggggccaucaacagcucccugcccuuccagaacguccacccggugaccaucggcgagugccccaaguacgugcggagcgccaagcugcgcauggucaccgggcuccggaacauccccuccauccagagccgcggccuguucggggccaucgccggcuucaucgagggcggguggaccggcaugguggacgggugguacggcuaccaccaccagaacgagcagggguccggcuacgcggccgaccagaaguccacccagaacgccaucaacggcaucaccaacaaggugaacagcgucaucgagaagaugaacacccaguucacggccguggggaaggaguucaacaagcuggagcggcgcauggagaaccucaacaagaaggucgacgacggcuuccuggacaucuggaccuacaacgccgagcugcucgugcugcuggagaacgagcggacccucgacuuccacgacagcaacgugaagaaccuguacgagaaggucaagucccagcugaagaacaacgcgaaggagaucgggaacggcugcuucgaguucuaccacaagugcaacgacgagugcauggagagcgugaagaacgggaccuacgacuaccccaaguacuccgaggagagcaagcucaaccgcgagaagaucgacggcgugaagcuggaguccaugggcgucuaccagauccuggccaucuacagcacgguggccagcucccucgugcugcuggucagccucggggccaucuccuucuggaugugcagcaacggcucccugcagugccggaucugcaucuga

SEQ ID NO: 73679 - RNA, 1698 nt, Artificial Sequence
  derived and/or modified CDS sequence (opt1) from hemagglutinin__InfluenzaA__AFO66235
augaaggugaagcugcucguccugcugugcaccuucaccgccacguacgccgacaccaucugcaucggcuaccacgcgaacaacagcaccgacaccguggacacggugcucgagaagaacgucaccgugacccacuccgugaaccugcuggaggacagccacaacgggaagcucugccugcugaagggcaucgcgccccuccagcuggggaacugcuccgucgccggcuggauccuggggaacccggagugcgagcuccugaucagcaaggaguccuggagcuacaucguggagaagcccaaccccgagaacgggaccugcuaccccggccacuucgccgacuacgaggagcugcgcgagcagcucuccagcguguccagcuucgagcgguucgagaucuucccgaaggaguccagcuggcccaaccacacggucaccgggguguccgccagcugcucccacaacggcaagagcuccuucuacaagaaccugcuguggcucaccgggaagaacggccuguaccccaaccugagcaaguccuacgccaacaacaaggagaaggaggugcucguccuguggggcgugcaccacccgcccaacaucggcgugcagcgcgcccuguaccacaccgagaacgccuacgucagcguggugagcucccacuacagccggaaguucacgcccgagaucgccaagcgccccaagguccgggaccaggagggccgcaucaacuacuacuggacccuccuggagcccggggacaccaucaucuucgaggcgaacggcaaccugaucgccccgcgguacgccuucgcccucucccgcggguucggcagcggcaucaucaacuccaacgcccccauggacgagugcgacgcgaagugccagacgccccagggggccaucaacagcucccugcccuuccagaacgugcacccggugaccaucggcgagugccccaaguacguccggagcgccaagcugcgcauggugaccgggcuccggaacauccccuccauccagagccgcggccuguucggggccaucgccggcuucaucgagggcggguggaccggcaugguggacgggugguacggcuaccaccaccagaacgagcagggguccggcuacgcggccgaccagaaguccacccagaacgccaucaacggcaucacgaacaaggucaacagcgugaucgagaagaugaacacccaguucaccgccgucgggaaggaguucaacaagcuggagcggcgcauggagaaccucaacaagaagguggacgacggcuucaucgacaucuggaccuacaacgccgagcugcuggugcuccuggagaacgagcggacgcuggacuuccacgacagcaacgucaagaaccucuacgagaaggugaagucccagcugaagaacaacgcgaaggagaucgggaacggcugcuucgaguucuaccacaagugcaacgacgagugcauggagagcgugaagaacgggaccuacgacuaccccaaguacuccgaggagagcaagcugaaccgcgagaagaucgacggcgucaagcucgaguccaugggcguguaccagauccuggccaucuacagcaccguggccagcucccugguccuccuggugagccugggggccaucuccuucuggaugugcagcaacggcucccuccagugccggaucugcaucuga

SEQ ID NO: 73680 - RNA, 1698 nt, Artificial Sequence
  derived and/or modified CDS sequence (opt1) from hemagglutinin__InfluenzaA__AFO66246
augaaggugaagcugcucguccugcugugcaccuucaccgccacguacgccgacaccaucugcaucggcuaccacgcgaacaacagcaccgacaccguggacacggugcucgagaagaacgucaccgugacccacuccgugaaccugcuggaggacagccacaacgggaagcucugccugcugaagggcaucgcgccccuccagcuggggaacugcuccgucgccggcuggauccuggggaacccggagugcgagcuccugaucagcaaggaguccuggagcuacaucguggagaagcccaaccccgagaacgggaccugcuaccccggccacuucgccgacuacgaggagcugcgcgagcagcucuccagcguguccagcuucgagcgguucgagaucuucccgaaggaguccagcuggcccaaccacacggucaccgggguguccgccagcugcucccacaacggcaagagcuccuucuacaagaaccugcuguggcucaccgggaagaacggccuguaccccaaccugagcaaguccuacgccaacaacaaggagaaggaggugcucguccuguggggcgugcaccacccgcccaacaucggcaaccagcgcgcccuguaccacaccgagaacgccuacgugagcgucgugagcucccacuacagccggaaguucacgcccgagaucgccaagcgccccaaggugcgggaccaggagggccgcaucaacuacuacuggacccuccuggagcccggggacaccaucaucuucgaggcgaacggcaaccugaucgccccgcgguacgccuucgcccucucccgcggguucggcagcggcaucaucaacuccaacgcccccauggacgagugcgacgcggagugccagacgccccagggggccaucaacagcucccugcccuuccagaacguccacccggugaccaucggcgagugccccaaguacgugcggagcgccaagcugcgcauggucaccgggcuccggaacauccccuccauccagagccgcggccuguucggggccaucgccggcuucaucgagggcggguggaccggcaugguggacgggugguacggcuaccaccaccagaacgagcagggguccggcuacgcggccgaccagaaguccacccagaacgccaucaacggcaucacgaacaaggugaacagcgucaucgagaagaugaacacccaguucaccgccguggggaaggaguucaacaagcuggagcggcgcauggagaaccucaacaagaaggucgacgacggcuucaucgacaucuggaccuacaacgccgagcugcuggugcuccuggagaacgagcggacgcuggacuuccacgacagcaacgugaagaaccucuacgagaaggucaagucccagcugaagaacaacgcgaaggagaucgggaacggcugcuucgaguucuaccacaagugcaacgacgagugcauggagagcgugaagaacgggaccuacgacuaccccaaguacuccgaggagagcaagcugaaccgcgagaagaucgacggcgugaagcucgaguccaugggcgucuaccagauccuggccaucuacagcaccguggccagcucccuggugcuccuggucagccugggggccaucuccuucuggaugugcagcaacggcucccuccagugccggaucugcaucuga

SEQ ID NO: 73681 - RNA, 1701 nt, Artificial Sequence
  derived and/or modified CDS sequence (opt1) from hemagglutinin__InfluenzaA__AFP33324
augaaggccaagcugcucgugcugcugugcaccuucaccgccacguacgcggacaccaucugcaucggcuaccacgccaacaacagcaccgacaccgucgacacggugcucgagaagaacgugaccgucacccacuccgugaaccugcuggaggacagccacaacgggaagcucugccgccugaagggcaccgcgccccugcagcucgggaacugcuccaucgccggcuggauccuggggaacccggagugcgagagccuguucuccaaggagagcugguccuacaucgccgagacgcccaaccccaagaacgggaccugcuaccccggcuacuucgccgacuacgaggagcuccgggagcagcugagcuccgugagcuccuucgagcgcuucgagaucuucccgaaggacagcuccuggcccaaccacaccgucaccaagggcgugacggccagcugcucccacaacggcaagagcuccuucuacaagaaccugcucuggcugaccgggaagaacggccuguaccccaaccucagcaaguccuacgugaacaagaaggggaaggagguccuggugcuguggggcgugcaccaccccagcaacaugggcgaccagcgggccaucuaccacaaggagaacgccuacgucagcgugcucuccagccacuacucccgccgguucaccccggagaucgcgaagcgccccaaggugcgggaccaggaggggcgcaucaacuacuacuggacccugcuggagcccggcgacacgaucaucuucgaggccaacgggaaccucaucgcccccugguacgccuucgcccugagccggggcuucggcuccgggaucaucaucagcaacgcguccaugggcgagugcgacgccaagugccagaccccgcagggggccaucaacagcucccugcccuuccagaacguccaccccgugaccaucggcgagugccccaaguacgugcgcagcaccaagcuccggauggucacggggcugcgcaacgugccguccauccagagccggggccuguucggcgccaucgccggguucaucgagggcggguggaccggcaugaucgacgggugguacggcuaccaccaccagaacgagcagggcuccggguacgcggccgaccagaaguccacccagaacgccaucaacggcaucaccaacaaggugaacagcaucaucgagaagaugaacacgcaguucaccgccgucgggaaggaguucaacaagcucgagcgccggauggagaaccugaacaagaagguggacgacggcuuccuggacaucuggaccuacaacgccgagcuccuggugcugcucgagaacgagcgcacccuggacuuccacgacagcaacgucaagaaccuguacgagaaggugaagacgcagcucaagaacaacgcgaaggagaucgggaacggcugcuucgaguucuaccacaagugcaacaacgagugcauggaguccgucaagaacggcaccuacgacuaccccaaguacagcaaggaguccaagcugaaccgggagaagaucgacggggugaagcuggagagcaugggcguguaccagauccucgccaucuacagcaccgucgccuccagccuggugcugcucgugucccugggggccaucagcuucuggaugugcuccaacggcagccugcagugccgcaucugcaucuga

SEQ ID NO: 73682 - RNA, 1698 nt, Artificial Sequence
  derived and/or modified CDS sequence (opt1) from hemagglutinin__InfluenzaA__AFP33325
augaaggugaagcugcucguccugcugugcaccuucaccgccacguacgccgacaccaucugcaucggcuaccacgcgaacaacagcaccgacaccguggacacggugcucgagaagaacgucaccgugacccacuccgugaaccugcuggaggacagccacaacgggaagcucugccugcugaagggcaucgcgccccuccagcuggggaacugcuccgucgccggcuggauccuggggaacccggagugcgagcuccugauccccaaggagagcugguccuacaucguggagacccccaaccccgagaacggcacgugcuacccgggcuacuucgccgacuacgaggagcugcgcgagcagcucagcuccgugagcuccuucgagcgguucgagaucuuccccaaggagagcuccuggcccagccacaccgucaccgggguguccgccagcugcucccacaacggcaagagcuccuucuaccgcaaccugcuguggcucaccgggaagaacggccuguaccccaaccugagcaaguccuacagcaacaacaaggagaaggaggugcucguccuguggggcgugcaccacccgcccaacaucggggaccagcgggcccuguaccacacggagaacgccuacgugagcgucguguccagccacuacucccgccgguucacccccgagaucgccaagcgccccaaggugcggggccaggaggggcgcaucaacuacuacuggacccuccuggagccgggcgacaccaucaucuucgaggccaacgggaaccugaucgcgcccugguacgccuucgcccucagccggggcuucggcuccgggaucaucacgagcaacgcccccauggacgagugcgacgccaagugccagacgccccagggcgcgaucaacuccagccugccguuccagaacguccaccccgugaccaucggggagugccccaaguacgugcgcuccgccaagcugcggauggucaccggccuccgcaacauccccagcauccagucccgggggcuguucggcgccaucgccggcuucaucgagggcggguggaccgggaugguggacggcugguacggguaccaccaccagaacgagcagggcagcggcuacgccgcggaccagaaguccacccagaacgccaucaacgggaucaccaacaaggugaacagcgucaucgagaagaugaacacccaguucacggccgugggcaaggaguucaacaagcuggagcgccggauggagaaccucaacaagaaggucgacgacggguuccuggacaucuggaccuacaacgccgagcugcucgugcugcuggagaacgagcgcacccucgacuuccacgacuccaacgugaagaaccuguacgagaaggucaagagccagcugaagaacaacgccaaggagaucggcaacgggugcuucgaguucuaccacaagugcaacgacgagugcauggaguccgugaagaacggcaccuacgacuacccgaaguacagcgaggaguccaagcucaaccgggagaagaucgacggcgugaagcuggagagcaugggggucuaccagauccuggcgaucuacagcacgguggccuccagccucgugcugcuggucucccucggcgccaucagcuucuggaugugcuccaacgggagccugcagugccgcaucugcaucuga

SEQ ID NO: 73683 - RNA, 1701 nt, Artificial Sequence
  derived and/or modified CDS sequence (opt1) from hemagglutinin__InfluenzaA__AFQ32573
augaagaccaucaucgcccugagcuacauccucugccugguguucgcccagaagcugcccggcaacgacaacuccaccgcgacgcucugccuggggcaccacgccgucccgaacggcaccaucgugaagaccaucaccaacgaccagaucgaggugacgaacgccaccgagcugguccagagcuccagcaccggggagaucugcaacagcccccaccagauccucgacggcgagaacugcacccugaucgacgcccugcucggggacccccagugcgacggcuuccagaacaagaagugggaccuguucguggagcgcagcaaggcccacuccaacugcuaccccuacgacgugccggacuacgcgagccugcggucccucgucgccagcuccggcacgcuggaguucaacaacgagagcuucaacuggaccggggugacccagaacggcaccuccagcgccugcauccgccgguccaacaacagcuucuucucccgccugaacuggcucacgcaccugaacuucaaguaccccgcccugaacgugaccaugcccaacaacgagcaguucgacaagcucuacaucuggggcguccaccaccccgggaccgacaaggaccagaucuuccuguacgcgcaggccagcgggcggaucaccguguccacgaagcgcagccagcaggccgugaucccgaacaucggcagccggccccgcguccggaacauccccucccgcgugagcaucuacuggaccaucgugaagcccggcgacauccugcucaucaacuccaccgggaaccugaucgccccgcggggcuacuucaagauccgcagcgggaaguccagcaucaugcgguccgacgcccccaucggcaagugcaacagcgcgugcaucacccccaacggcuccauccccaacgacaagccguuccagaacgucaaccgcaucacguacggggccugcccccgguacgugaagcagaacacccugaagcucgccaccggcaugcgcaacgugcccgagaagcagacccgggggaucuucggcgccaucgccggguucaucgagaacggcugggagggcauggucgacgggugguacggcuuccgccaccagaacagcgaggggcggggccaggcggccgaccugaaguccacgcaggccgccaucgaccagaucaacgggaagcugaaccgccucaucggcaagaccaacgagaaguuccaccagaucgagaaggaguucagcgagguggagggccggauccaggaccuggagaaguacgugggggacaccaagaucgaccugugguccuacaacgccgagcuccuggucgcgcuggagaaccagcacaccaucgaccucacggacagcgagaugaacaagcuguucgagaagaccaagaagcagcugcgcgagaacgccgaggacaugggcaacgggugcuucaagaucuaccacaagugcgacaacgccugcaucggcuccauccgcaacgggaccuacgaccacgacguguaccgggacgaggcccucaacaaccgcuuccagaucaagggcguggagcugaaguccggcuacaaggacuggauccuguggaucuccuucgccaucagcugcuuccuccugugcgucgcgcugcucggguucaucaugugggccugccagaagggcaacauccggugcaacaucugcaucuga

SEQ ID NO: 73684 - RNA, 1701 nt, Artificial Sequence
  derived and/or modified CDS sequence (opt1) from hemagglutinin__InfluenzaA__AFQ37281
augaaggccauccuggugguccuccuguacaccuucgccaccacgaacgcggacacccugugcaucggcuaccacgccaacaacagcaccgacaccguggacacggugcucgagaagaacgucaccgugacccacuccgugaaccugcuggaggacaagcacaacgggaagcucugcaagcugcgcggcgucgcgccccugcaccucgggaagugcaacaucgccggcuggauccuggggaacccggagugcgagagccuguccaccgccagcuccuggagcuacaucguggagacguccagcuccgacaacgggaccugcuaccccggcgacuucaucgacuacgaggagcuccgggagcagcugagcuccgugagcuccuucgagcgcuucgagaucuuccccaagaccagcuccuggcccaaccacgacagcaacaagggcgucaccgccgccugcccgcacgccggcgccaaguccuucuacaagaaccugaucuggcucgugaagaaggggaacagcuaccccaagcuguccaagagcuacaucaacgacaagggcaaggaggugcugguccucugggggauccaccaccccagcacguccaccgaccagcagagccuguaccagaacgcggacgccuacguguucgugggcaccucccgguacagcaagaaguucaagcccgagaucgccauccgcccgaagguccgggaccgcgagggccggaugaacuacuacuggacccugguggagcccggggacaagaucacguucgaggccaccggcaaccucguggucccccgcuacgccuucgcgauggagcggaacgccggguccggcaucaucaucagcgacacccccgcccacgacugcaacaccacgugccagaccccgaagggcgccaucaacaccucccugcccuuccagaacgugcaccccaucaccaucgggaagugccccaaguacgucaagagcacgaagcugcgccucgccaccggccugcggaacgugccguccauccagagccgcgggcuguucggcgcgaucgccggguucaucgagggcggcuggaccgggaugguggacggcugguacggguaccaccaccagaacgagcagggcuccggguacgccgccgaccucaagagcacccagaacgccaucgacaagaucacgaacaaggugaacuccgucaucgagaagaugaacacccaguucaccgcggugggcaaggaguucaaccaccuggagaagcggaucgagaaccugaacaagaaggucgacgacggcuuccucgacaucuggaccuacaacgccgagcugcuggugcuccuggagaacgagcgcacgcuggacuaccacgacagcaacgugaagaaccucuacgagaagguccggucccagcugaagaacaacgccaaggagaucgggaacggcugcuucgaguucuaccacaagugcgacgacaagugcauggagagcgugaagaacgggaccuacgacuaccccaaguacuccgaggaggccaagcugaaccgcgaggagaucgacggcgugaagcucgagagcacccggaucuaccagauccuggccaucuacuccaccgcggccagcagccugguccucguggugucccugggggccaucagcuucuggaugugcuccaacggcagccugcagugccgcaucugcaucuga

SEQ ID NO: 73685 - RNA, 1707 nt, Artificial Sequence
  derived and/or modified CDS sequence (opt1) from hemagglutinin__InfluenzaA__AFQ55689
augaacacccagauccuggcccucaucgccugcaugcugaucggcgcgaagggggacaagaucugccugggccaccacgccguggccaacgggaccaaggucaacacgcucaccgagcgcggcaucgagguggugaacgccaccgagaccgucgagacggccaacaccaagaagaucugcacccaggggaagcggcccaccgaccugggccagugcggccugcucgggacgcugaucggcccgccccagugcgaccaguuccuggaguucgacgcggaccucaucaucgagcgccgggaggggaccgacgugugcuaccccggcaaguucaccaacgaggagagccugcgccagauccugcggggguccggcggcaucgacaaggagagcaugggguucaccuacuccggcauccgcacgaacggggccaccagcgccugccggcgcuccggcagcuccuucuacgccgagaugaaguggcuccugagcaacuccgacaacgcggccuucccccagaugaccaagagcuaccggaacccgcgcaacaagcccgcccugaucaucuggggcgugcaccacuccgggagcgccaccgagcagacgaagcucuacggcuccgggaacaagcugaucaccgucggcagcuccaaguaccagcagagcuucacccccucccccggggcccggccccaggugaacggccagagcggccgcaucgacuuccacuggcugcuccuggacccgaacgacaccgugacguucaccuucaacggggcguucaucgcccccgaccgggccuccuucuuccgcggcgagagcaucgggguccagagcgacgugccccuggacuccggcugcgagggggacugcuuccacaacggcggcaccaucgugagcucccucccguuccagaacaucaacccccggaccgucgggaagugcccccgcuacgugaagcagacgagccugcugcucgccaccggcaugcggaacgugcccgagaacccgaaggaccgcaagucccggcaccgccggacccgcgggcuguucggcgccaucgcgggguucaucgagaacggcugggagggccugaucgacgggugguacggcuuccgccaccagaacgcccagggggagggcaccgccgccgacuacaagagcacgcaguccgccaucgaccagaucaccggcaagcucaaccggcugaucgacaagaccaaccagcaguucgagcugaucgacaacgaguucagcgagaucgagcagcagaucgggaacgucaucaacuggacccgcgacuccaugacggagguguggagcuacaacgcggagcuccugguggccauggagaaccagcacaccaucgaccuggccgacuccgagaugaacaagcucuacgagcggguccgcaagcagcugcgggagaacgccgaggaggacggcaccgggugcuucgagaucuuccacaagugcgacgaccagugcauggagagcauccgcaacaacaccuacgaccacacgcaguaccgggccgagucccugcagaaccgcauccagaucgaccccgugaagcucagcuccggcuacaaggacaucauccugugguucagcuucggggcguccugcuuccugcuccuggccaucgccaugggccugguguucaucugcaucaagaacggcaacaugcggugcaccaucugcaucuga

SEQ ID NO: 73686 - RNA, 1701 nt, Artificial Sequence; identical to SEQ ID NO: 72210
  derived and/or modified CDS sequence (opt1) from hemagglutinin__InfluenzaA__AFR68153

SEQ ID NO: 73687 - RNA, 1701 nt, Artificial Sequence
  derived and/or modified CDS sequence (opt1) from hemagglutinin__InfluenzaA__AFR68163
augaaggccacccuggugguccuccuguacaccuucgccacggcgaacgccgacacccugugcaucggcuaccacgccaacaacagcaccgacaccguggacacggugcucgagaagaacgucaccgugacccacuccgccaaccugcuggaggacaagcacaacgggaagcucugcaagcugcgcggcguggcgccccugcaccucgggaagugcaacaucgccggcuggauccuggggaacccggagugcgagacccugagcacggccuccagcugguccuacaucgucgagaccagcuccagcgacaacgggaccugcuaccccggcgacuucaucgacuacgaggagcuccgggagcagcuguccagcguguccagcuucgagcgcuucgagaucuuccccaagaccuccagcuggcccaaccacgacuccaacaagggcgugacggccgccugcccgcacgcgggcgccaagggguucuacaagaaccugaucuggcucgucaagaagggcaacagcuaccccaagcuguccaagagcuacaucaacgacaaggggaaggaggugcuggugcucuggggcauccaccaccccuccaccaccgccgaccagcagagccuguaccagaacgccgacaccuacgucuucgugggcacgagccgguacuccaagaaguucaagcccgagaucgccauccgcccgaaggugcgggaccaggaggggcgcaugaacuacuacuggacccuggucgagcccggcgacaagaucaccuucgaggcgaccgggaaccucguggugccccgguacgccuucgccauggagcgcgacgccggcagcggcaucaucaucuccgacacgcccguccacgacugcaacacgaccugccagaccccgaagggggccaucaacaccagccugcccuuccagaacauccaccccaucaccaucggcaagugccccaaguacgugaaguccaccaagcugcggcucgcgaccgggcugcgcaacgugccgagcauccagucccggggccuguucggggccaucgccggcuucaucgagggcggguggacgggcauggucgacgggugguacggcuaccaccaccagaacgagcaggggagcggcuacgccgccgaccucaaguccacccagaacgcgaucgacaagaucaccaacaaggugaacagcgugaucgagaagaugaacacccaguucacggccgucggcaaggaguucaaccaccuggagaagcgcaucgagaaccugaacaagaagguggacgacggguuccucgacaucuggaccuacaacgccgagcugcugguccuccuggagaacgagcggacccuggacuaccacgacuccaacgugaagaaccucuacgagaaggugcgcaaccagcugaagaacaacgccaaggagaucggcaacgggugcuucgaguucuaccacaagugcgacaacacgugcauggagagcgucaagaacggcaccuacgacuaccccaaguacuccgaggaggccaagcugaaccgggaggagaucgacggggugaagcucgagagcacccgcaucuaccagauccuggcgaucuacuccaccgccgccagcucccuggugcucgucgugagccugggcgccaucuccuucuggaugugcagcaacggcagccugcagugccggaucugcaucuga

SEQ ID NO: 73688 - RNA, 1701 nt, Artificial Sequence
  derived and/or modified CDS sequence (opt1) from hemagglutinin__InfluenzaA__AFR68173
augaagaccaucaucgcccugagcuacauccucugccugguguucgcccagaagcugcccggcaacgacaacuccaccgcgacgcucugccuggggcaccacgccgucccgaacggcaccaucgugaagaccaucaccaacgaccagaucgaggugacgaacgccaccgagcugguccagagcuccagcaccggggagaucugcgacagcccccaccagauccucgacggcgagaacugcacccugaucgacgcccugcucggggacccccagugcgacggcuuccagaacaagaagugggaccuguucguggagcgcagcaaggccuacuccaacugcuaccccuacgacgugccggacuacgcgagccugcggucccucgucgccagcuccggcacgcuggaguucaacaacgagagcuucaacuggaccggggugacccagaacggcaccuccagcgccugcauccgccgguccaacagcuccuucuucagccgccugaacuggcucacgcaccugaacuucaaguaccccgcccugaacgugaccaugcccaacaacgagcaguucgacaagcucuacaucuggggcguccaccaccccgggaccgacaaggaccagaucuuccuguacgcgcaggccuccgggcggaucaccgugagcacgaagcgcagccagcaguccgugaucccgaacaucggcagccggccccgcauccggaacauccccucccgcaucagcaucuacuggaccaucgucaagcccggcgacauccugcucaucaacuccaccgggaaccugaucgccccgcggggcuacuucaagauccgcagcgggaaguccagcaucaugcgguccgacgcccccaucggcaagugcaacagcgagugcaucacccccaacggcuccauccccaacgacaagccguuccagaacgugaaccgcaucacguacggggccugcccccgguacgugaagcagaacacccugaagcucgcgaccggcaugcgcaacguccccgagaagcagacccgggggaucuucggcgccaucgccggguucaucgagaacggcugggagggcaugguggacgggugguacggcuuccgccaccagaacagcgaggggcggggccaggccgccgaccugaaguccacgcaggcggccaucgaccagaucaacgggaagcugaaccgccucaucggcaagaccaacgagaaguuccaccagaucgagaaggaguucagcgagguggagggccggauccaggaccuggagaaguacgucgaggacaccaagaucgaccugugguccuacaacgccgagcuccugguggcccuggagaaccagcacaccaucgaccucacggacagcgagaugaacaagcuguucgagaagaccaagaagcagcugcgcgagaacgccgaggacauggggaacggcugcuucaagaucuaccacaagugcgacaacgcgugcaucggguccauccgcaacggcaccuacaaccacgacguguaccgggacgaggcccucaacaaccgcuuccagaucaagggggucgagcugaaguccggcuacaaggacuggauccuguggaucuccuucgccaucagcugcuuccuccugugcguggcccugcucggcuucaucaugugggccugccagaaggggaacauccggugcaacaucugcaucuga

SEQ ID NO: 73689 - RNA, 1701 nt, Artificial Sequence; identical to SEQ ID NO: 66693
  derived and/or modified CDS sequence (opt1) from hemagglutinin__InfluenzaA__AFR84675

SEQ ID NO: 73690 - RNA, 1701 nt, Artificial Sequence; identical to SEQ ID NO: 67046
  derived and/or modified CDS sequence (opt1) from hemagglutinin__InfluenzaA__AFR84685

SEQ ID NO: 73691 - RNA, 1701 nt, Artificial Sequence; identical to SEQ ID NO: 66873
  derived and/or modified CDS sequence (opt1) from hemagglutinin__InfluenzaA__AFR84694

SEQ ID NO: 73692 - RNA, 1701 nt, Artificial Sequence; identical to SEQ ID NO: 66680
  derived and/or modified CDS sequence (opt1) from hemagglutinin__InfluenzaA__AFR84704

SEQ ID NO: 73693 - RNA, 1701 nt, Artificial Sequence
  derived and/or modified CDS sequence (opt1) from hemagglutinin__InfluenzaA__AFR84714
augaaggccauccuggugguccuccuguacaccuucgccaccgcgaacgccgacacgcugugcaucggcuaccgcgccaacaacagcaccgacaccguggacaccgugcucgagaagaacgucacggugacccacuccgugaacauccuggaggacaagcacaacgggaagcugugcaagcuccggggcgucgcgccccugcaccuggggaagugcaacaucgccggcuggauccucgggaacccggagugcgagagccuguccaccgccagcuccuggagcuacaucguggagaccuccagcuccgacaacggcacgugcuaccccggcgacuucaucgacuacgaggagcugcgcgagcagcucagcuccgugagcuccuucgagcgguucgagaucuuccccaagaccagcuccuggcccaaccacgacagcaacaagggggucaccgccgccugcccgcacgccggcgcgaaguccuucuacaagaaccugaucuggcuggugaagaaggggaacagcuaccccaagcucuccaagagcuacaucaacgacaagggcaaggaggugcugguccugugggggauccaccaccccagcaccuccgccgaccagcagagccucuaccagaacgccgacgccuacguguucgugggcuccagccgcuacuccaagaaguucaagcccgagaucgccauccggccgaagguccgcgaccaggagggccggaugaacuacuacuggacgcugguggagcccggggacaagaucaccuucgaggcgaccggcaaccugguggucccccgcuacgccuucgccauggagcggaacgccgggagcggcaucaucaucuccgacacccccgugcacgacugcaacacgaccugccagaccccgaagggcgccaucaacaccagccuccccuuccagaacauccaccccaucacgaucgggaagugccccaaguacgugaaguccaccaagcugcgccuggcgaccggccuccggaacgucccgagcauccagucccgcgggcuguucggcgccaucgccggguucaucgagggcggcuggaccgggaugguggacggcugguacggguaccaccaccagaacgagcagggcagcggguacgccgccgaccugaaguccacgcagaacgcgaucgacgagaucaccaacaaggugaacagcgucaucgagaagaugaacacccaguucaccgccgugggcaaggaguucaaccaccucgagaagcggaucgagaaccugaacaagaaggucgacgacggcuuccuggacaucuggacguacaacgccgagcuccuggugcugcucgagaacgagcgcacccuggacuaccacgacuccaacgugaagaaccuguacgagaagguccggagccagcucaagaacaacgccaaggagaucgggaacggcugcuucgaguucuaccacaagugcgacaacacgugcauggaguccgugaagaacgggaccuacgacuaccccaaguacagcgaggaggccaagcugaaccgcgaggagaucgacggcgugaagcuggaguccacccggaucuaccagauccucgcgaucuacagcaccgucgccagcucccuggugcugguggucagccucggggccaucuccuucuggaugugcagcaacggcucccugcagugccgcaucugcaucuga

SEQ ID NO: 73694 - RNA, 1701 nt, Artificial Sequence; identical to SEQ ID NO: 66873
  derived and/or modified CDS sequence (opt1) from hemagglutinin__InfluenzaA__AFR84724

SEQ ID NO: 73695 - RNA, 1701 nt, Artificial Sequence; identical to SEQ ID NO: 66873
  derived and/or modified CDS sequence (opt1) from hemagglutinin__InfluenzaA__AFR84734

SEQ ID NO: 73696 - RNA, 1701 nt, Artificial Sequence; identical to SEQ ID NO: 66873
  derived and/or modified CDS sequence (opt1) from hemagglutinin__InfluenzaA__AFR84754

SEQ ID NO: 73697 - RNA, 1701 nt, Artificial Sequence; identical to SEQ ID NO: 66873
  derived and/or modified CDS sequence (opt1) from hemagglutinin__InfluenzaA__AFR84764

SEQ ID NO: 73698 - RNA, 1701 nt, Artificial Sequence; identical to SEQ ID NO: 66873
  derived and/or modified CDS sequence (opt1) from hemagglutinin__InfluenzaA__AFR84774

SEQ ID NO: 73699 - RNA, 1701 nt, Artificial Sequence
  derived and/or modified CDS sequence (opt1) from hemagglutinin__InfluenzaA__AFR84784
augaaggccauccuggugggccuccuguacaccuucgccaccgcgaacgccgacacgcugugcaucggguaccacgccaacaacagcaccgacaccgucgacaccgugcucgagaagaacgugacggucacccacuccgugaacauccuggaggacaagcacaacggcaagcugugcaagcuccgcgggguggcgccccugcaccugggcaagugcaacaucgccggguggauccucggcaacccggagugcgagagccuguccaccgccagcuccuggagcuacaucgucgagaccuccagcuccgacaacggcacgugcuaccccggggacuucaucgacuacgaggagcugcgggagcagcucagcuccgugagcuccuucgagcgcuucgagaucuuccccaagaccagcuccuggcccaaccacgacagcaacaagggcgugaccgccgccugcccgcacgccggggcgaaguccuucuacaagaaccugaucuggcuggucaagaagggcaacagcuaccccaagcucuccaagagcuacaucaacgacaaggggaaggaggugcuggugcuguggggcauccaccaccccagcaccuccgccgaccagcagagccucuaccagaacgccgacgccuacgucuucgugggcuccagccgguacuccaagaaguucaagcccgagaucgccauccgcccgaaggugcgggaccaggaggggcgcaugaacuacuacuggacgcuggucgagcccggcgacaagaucaccuucgaggcgaccgggaaccugguggugccccgguacgccuucgccauggagcgcaacgccggcagcggcaucaucaucuccgacacccccguccacgacugcaacacgaccugccagaccccgaagggggccaucaacaccagccuccccuuccagaacauccaccccaucacgaucggcaagugccccaaguacgugaaguccaccaagcugcggcuggcgaccgggcuccgcaacgugccgagcauccagucccggggccuguucggggccaucgccggcuucaucgagggcggguggaccggcauggucgacgggugguacggcuaccaccaccagaacgagcaggggagcggcuacgccgccgaccugaaguccacgcagaacgcgaucgacgagaucaccaacaaggugaacagcgugaucgagaagaugaacacccaguucaccgccgucggcaaggaguucaaccaccucgagaagcgcaucgagaaccugaacaagaagguggacgacggguuccuggacaucuggacguacaacgccgagcuccugguccugcucgagaacgagcggacccuggacuaccacgacuccaacgugaagaaccuguacgagaaggugcgcagccagcucaagaacaacgccaaggagaucggcaacgggugcuucgaguucuaccacaagugcgacaacacgugcauggaguccgucaagaacggcaccuacgacuaccccaaguacagcgaggaggccaagcugaaccgggaggagaucgacggggugaagcuggaguccacccgcaucuaccagauccucgcgaucuacagcaccguggccagcucccuggcccuggucgugagccucggcgccaucuccuucuggaugugcagcaacggcucccugcagugccggaucugcaucuga

SEQ ID NO: 73700 - RNA, 1701 nt, Artificial Sequence; identical to SEQ ID NO: 66873
  derived and/or modified CDS sequence (opt1) from hemagglutinin__InfluenzaA__AFR84794

SEQ ID NO: 73701 - RNA, 1701 nt, Artificial Sequence; identical to SEQ ID NO: 66693
  derived and/or modified CDS sequence (opt1) from hemagglutinin__InfluenzaA__AFR84804

SEQ ID NO: 73702 - RNA, 1701 nt, Artificial Sequence; identical to SEQ ID NO: 66873
  derived and/or modified CDS sequence (opt1) from hemagglutinin__InfluenzaA__AFR84814

SEQ ID NO: 73703 - RNA, 1701 nt, Artificial Sequence; identical to SEQ ID NO: 66693
  derived and/or modified CDS sequence (opt1) from hemagglutinin__InfluenzaA__AFR84824

SEQ ID NO: 73704 - RNA, 1701 nt, Artificial Sequence; identical to SEQ ID NO: 66719
  derived and/or modified CDS sequence (opt1) from hemagglutinin__InfluenzaA__AFR84834

SEQ ID NO: 73705 - RNA, 1701 nt, Artificial Sequence; identical to SEQ ID NO: 71893
  derived and/or modified CDS sequence (opt1) from hemagglutinin__InfluenzaA__AFR84844

SEQ ID NO: 73706 - RNA, 1701 nt, Artificial Sequence; identical to SEQ ID NO: 66935
  derived and/or modified CDS sequence (opt1) from hemagglutinin__InfluenzaA__AFR84854

SEQ ID NO: 73707 - RNA, 1701 nt, Artificial Sequence; identical to SEQ ID NO: 66693
  derived and/or modified CDS sequence (opt1) from hemagglutinin__InfluenzaA__AFR84864

SEQ ID NO: 73708 - RNA, 1701 nt, Artificial Sequence; identical to SEQ ID NO: 66873
  derived and/or modified CDS sequence (opt1) from hemagglutinin__InfluenzaA__AFR84874

SEQ ID NO: 73709 - RNA, 1701 nt, Artificial Sequence; identical to SEQ ID NO: 66680
  derived and/or modified CDS sequence (opt1) from hemagglutinin__InfluenzaA__AFR84893

SEQ ID NO: 73710 - RNA, 1701 nt, Artificial Sequence; identical to SEQ ID NO: 66680
  derived and/or modified CDS sequence (opt1) from hemagglutinin__InfluenzaA__AFR84903

SEQ ID NO: 73711 - RNA, 1701 nt, Artificial Sequence; identical to SEQ ID NO: 66680
  derived and/or modified CDS sequence (opt1) from hemagglutinin__InfluenzaA__AFR84913

SEQ ID NO: 73712 - RNA, 1701 nt, Artificial Sequence; identical to SEQ ID NO: 66680
  derived and/or modified CDS sequence (opt1) from hemagglutinin__InfluenzaA__AFR84923

SEQ ID NO: 73713 - RNA, 1689 nt, Artificial Sequence
  derived and/or modified CDS sequence (opt1) from hemagglutinin__InfluenzaA__AFV53205
auggccaucaucuaccugauccuccuguucgccaccgugcgcggcgaccagaucugcaucggguaccacgcgaacaacagcaccgagaaggucgacacgauccuggagcggaacgugaccgugacccacgccaaggacauccucgagaagacccacaacggcaagcugugcaagcugaacgggaucccgccccucgagcugggcgacugcuccaucgccggguggcugcucggcaaccccgagugcgaccgccugcugcggguccccgaguggagcuacaucauggagaaggagaacccccgcuacucccucugcuacccgggcagccugaacgacuacgaggagcugaagcaccuccuguccagcgugcggcacuucgagaaggugcgcauccugcccaaggaccgguggacgcagcacaccaccaccggggacuccaaggccugcgccgucagcggcaagcccuccuucuuccgcaacaugguguggcucacgaagaaggggcccgacuacccgguggcgaagggcagcuacaacaacaccuccggggagcagaugcugaucaucuggggcguccaccaccccaucgacgaggccgagcagcgggagcuguaccagaaggugggcaccuacgugagcgccuccaccagcacgcucaacaagcgcuccauccccgagaucgccgcgcggcccgaggucaacgggcugcgcagccggauggaguucuccuggacccugcucgacgugugggacaccaucaacuucgagagcaccggcaaccugaucgccccggaguacggguucaagaucuccaagcgcggcagcagcggcaucaugaagacggaggggacccugggcaacugcgagaccaagugccagacgccccucggggccaucaacaccacccugcccuuccacaacgugcacccccugaccaucggcgagugcccgaaguacgucaaguccgagaagcucgugcuggccaccgggcugcggaacgugccccagaucgagagccgcggccucuucggcgccaucgcgggguucaucgagggcggguggcagggcauggucgacgggugguacggcuaccaccacuccaacgaccagggcagcggguacgccgccgacaaggaguccacgcagaaggccuucgacgagaucaccaacaaggugaacagcgugaucgagaagaugaacacccaguucgaggccgucggcaaggaguucaacaaccuggagaagcggcuggagaaccucaacaagaagauggaggacggguuccuggacguguggaccuacaacgcggagcugcucgugcugauggagaacgagcgcacgcuggacuuccacgacuccaacgucaagaaccucuacgagaaggugcggaugcagcugcgcgacaacgucaaggagcugggcaacgggugcuucgaguucuaccacaagugcgacgacgagugcaucaacagcgugaagaacggcaccuacgacuaccccaaguacgaggaggaguccaagcucaagcggaacgagaucaagggcgugaagcugagcuccaugggggucuaccagauccuggccaucuacgccaccguggccggcagccucucccuggccaucaugauggcggggaucagcuucuggaugugcuccaacggcagccugcagugccgcaucugcaucuga

SEQ ID NO: 73714 - RNA, 1689 nt, Artificial Sequence
  derived and/or modified CDS sequence (opt1) from hemagglutinin__InfluenzaA__AFV53216
auggccaucaucuaccugauccuccuguucaccgccgugcgcggcgaccagaucugcaucggguaccacgcgaacaacagcaccgagaaggucgacacgauccuggagcggaacgugaccgugacccacgccaaggacauccucgagaagacccacaacggcaagcugugcaagcugaacgggaucccgccccucgagcugggcgacugcuccaucgccggguggcugcucggcaaccccgagugcgaccgccugcugagcguccccgagugguccuacaucauggagaaggagaacccccgggacggccucugcuacccggggagcuucaacgacuacgaggagcugaagcaccuccuguccagcgugaagcacuucgagaaggugaagauccugcccaaggaccgcuggacgcagcacaccaccaccggcgggucccgggccugcgccgucagcggcaaccccuccuucuuccgcaacaugguguggcugacggagaaggggagcaacuaccccguggcgaagggcuccuacaacaacaccagcggcgagcagaugcucaucaucuggggcguccaccacccgaacgacgagaccgagcagcggacccuguaccagaacguggggacguacguguccgucgggaccagcacccugaacaagcgcuccacccccgacaucgccacgcggcccaaggugaacggccagggcgggcgcauggaguucagcuggacccuccuggacaugugggacaccaucaacuucgaguccaccggcaaccugaucgcccccgaguacggguucaagaucagcaagcggggcuccagcgggaucaugaagacggagggcacccucggcaacugcgagaccaagugccagaccccgcugggggccaucaacacgacccugcccuuccacaacgugcacccccucaccaucggcgagugccccaaguacgucaagagcgagaagcuggugcuggcgaccgggcuccgcaacgugccgcagaucgagucccggggccuguucggggccaucgccggcuucaucgagggcggguggcagggcauggucgacgggugguacggcuaccaccacagcaacgaccagggguccggcuacgccgccgacaaggagagcacgcagaaggcguucgacggcaucaccaacaaggugaacuccgugaucgagaagaugaacacccaguucgaggccgucgagaaggaguucagcaaccuggagcgccggcucgagaaccugaacaagaagauggaggacggguuccuggacguguggaccuacaacgccgagcuccuggugcugauggagaacgagcgcacgcucgacuuccacgacuccaacgucaagaaccuguacgacaaggugcggaugcagcugcgcgacaacgucaaggagcucggcaacgggugcuucgaguucuaccacaagugcgacgacgagugcaugaacagcgugaagaacggcaccuacgacuaccccaaguacgaggaggaguccaagcugaaccggaacgagaucaagggcgugaagcugagcuccauggggaucuaccagauccucgccaucuacgccaccgucgcgggcagccugucccuggccaucaugauggccgggaucagcuucuggaugugcuccaacggcagccuccagugccgcaucugcaucuga

SEQ ID NO: 73715 - RNA, 1689 nt, Artificial Sequence
  derived and/or modified CDS sequence (opt1) from hemagglutinin__InfluenzaA__AFV53227
augaucaucaucuaccugauccuccuguucaccgccgugcgcggcgaccagaucugcaucggguaccacgccaacaacagcaccgagaaggucgacacgauccuggagcggaacgugaccgugacccacgcgaaggacauccucgagaagacccacaacggcaagcugugcaagcugaacgggaucccgccccucgagcugggcgacugcuccaucgccggguggcugcucggcaaccccgagugcgaccgccugcugcggguccccgaguggagcuacaucauggagaaggagaacccccgcuacucccucugcuacccgggcagcuucaacgacuacgaggagcugaagcaccuccuguccagcgugaagcacuucgagaaggugaagauccugcccaaggacggguggacgcagcacaagaccgacggcggguccaaggccugcgccgucagcggcaaggccuccuucuuccggaacaugguguggcugaccaaggaggggcccaacuaccagguggcgaagcgcagcuacaacaacaccuccggcgagcagaugcucaucaucuggggcguccaccaccccaaggacgaggccgagcagaucgcccuguaccagaagguggggacguacgugagcgccuccaccagcacccugaacaagcgguccaccccggagaucgcggcccgccccgaggucaacggccucgggagccggauggaguucuccuggacgcugcuggacgugugggacaccaucaacuucgagagcaccggcaaccucguggcccccgaguacggcuucaagaucuccaagcgcgggagcagcggcaucaugaagaccgaggggacgcugggcaacugcgagaccaagugccagacgccccugggggccaucaacaccacccucccguuccacaacguccacccccugaccaucggcgagugccccaaguacgugaaguccgagaagcuggugcucgccaccggccugcggaacgucccccagaucgagagccgcgggcuguucggcgcgaucgccggguucaucgagggcggguggcagggcaugguggacggcugguacggguaccaccacuccaacgaccagggcagcggguacgccgccgacaaggaguccacccagaaggccuucgaccggaucacgaacaaggugaacagcgucaucgagaagaugaacauccaguucgaggcggugggcaaggaguucuccaaccucgagaagcgccuggagaaccugaacaagaagauggaggacggguuccucgacguguggaccuacaacgccgagcugcugguccucauggagaacgagcggacccuggacuuccacgacagcaacgugaagaaccuguacgacaagguccgcaugcagcuccgggacaacgugaaggagcugggcaacggcugcuucgaguucuaccacaagugcgacgacgagugcaugaacuccgugaagaacgggaccuacgacuacccgaaguacgaggaggagagcaagcugaagcgcaacgagaucaagggcgucaagcucuccagcauggggguguaccagauccuggccaucuacgccacgguggccggcucccugagccucgcgaucaugaucgccggcaucuccuucuggaugugcagcaacgggucccugcagugccgggucugcaucuga

SEQ ID NO: 73716 - RNA, 1689 nt, Artificial Sequence
  derived and/or modified CDS sequence (opt1) from hemagglutinin__InfluenzaA__AFV53238
auggccaucaucuaccugauccuccuguucaccgccgugcgcggcgaccagaucugcaucggguaccacgcgaacaacagcaccgagaaggucgacacgauccuggagcggaacgugaccgugacccacgccaaggacauccucgagaagacccacaacggcaagcugugcaagcugaacgggaucccgccccucgagcugggcgacugcuccaucgccggguggcugcucggcaaccccgagugcgaccgccugcugcggguccccgaguggagcuacaucauggagaaggagaacccccgcuacucccucugcuacccgggcagcuucaacgacuacgaggagcugaagcaccuccuguccagcgugaagcacuucgagaaggugaagauccugcccaaggaccgguggacgcagcacaccaccaccgggggcuccauggccugcgccgucagcgggaagcccuccuucuuccgcaacaugguguggcugacgaccaagggccccaacuacccgguggcgcaggggagcuacaacaacaccuccggcgagcagaugcucaucaucuggggcguccaccaccccaacgacgaggccgagcagcgggcccuguaccagaagguggggaccuacgugagcgccuccacgagcacccuguacaagcgcuccauccccgagaucgcggcccggcccaaggucaacggccucgggagccgcauggaguucuccuggacccugcuggacaugugggacaccaucaacuucgagagcacgggcaaccucguggccccggaguacggcuucaagaucuccaagcgggggagcagcggcaucaugaagaccgaggggacccuggagaacugcgagaccaagugccagacgccccugggcgccaucaacaccacccuccccuuccacaacgugcacccccugaccaucggggagugcccgaaguacgucaaguccgagaagcuggugcucgccacgggccugcgcaacgugccccagaucgagagccggggccuguucggggcgaucgccggcuucaucgagggcggguggcaggggauggucgacggcugguacggcuaccaccacuccaacgaccaggggagcggcuacgccgccgacaaggaguccacccagaaggccuucgacgggaucaccaacaaggugaacagcgugaucgagaagaugaacacccaguucgaggcggucggcaaggaguucuccaaccucgagaagcgccuggagaaccugaacaagaagauggaggacggguuccucgacguguggacguacaacgccgagcugcuggugcucauggagaacgagcggacccuggacuuccacgacagcaacgucaagaaccuguacgacaaggugcgcaugcagcuccgggacaacgucaaggagcugggcaacggcugcuucgaguucuaccacaagugcgacaacgagugcauggacuccgugaagaacgggaccuacgacuaccccaaguacgaggaggagagcaagcugaaccgcaacgagaucaagggcgugaagcucuccagcaugggggucuaccagauccuggccaucuacgccaccguggccggcucccugagccucgcgaucaugauggccggcaucuccuucuggaugugcagcaacgggucccugcagugccggaucugcaucuga

SEQ ID NO: 73717 - RNA, 1689 nt, Artificial Sequence
  derived and/or modified CDS sequence (opt1) from hemagglutinin__InfluenzaA__AFV53249
auggccaucaucuaccugauccuccuguucgccaccgugcgcggcgaccagaucugcaucggguaccacgcgaacaacagcaccgagacggucgacaccauccuggagcggaacgugaccgugacccacgccaaggacauccucgagaagacgcacaacggcaagcugugcaagcugaacgggaucccgccccucgagcugggcgacugcuccaucgccggguggcugcucggcaaccccgagugcgaccgccugcugcggguccccgaguggagcuacaucauggagaaggagaacccccgcuacucccucugcuacccgggcagccugaacgacuacgaggagcugaagcaccuccuguccagcgugaagcacuucgagaaggugcggauccugcccaaggaccgcuggaccaaccacaccaccaccgggggcuccaaggccugcgccgucagcggggagcccuccuucuuccggaacaugguguggcucacgaagaagggccccaacuacccgguggcgaaggggagcuacaacaacaccuccggcgagcagaugcugaucaucuggggcguccaccaccccaacgacgaggccgagcagcgcgcccuguaccagaagguggggaccuacgugagcgccuccacgagcacccucuacaagcgguccauccccgagaucgcggcccgccccaaggucaacggccuggggagccggauggaguucuccuggacccugcucaacgugugggacaccaucaacuucgagagcacgggcaaccugguggccccggaguacggcuucaagaucuccaagcgcgggcggagcggcaucaugaagaccgaggggacccugggcaacugcgagaccaagugccagacgccccucggggccaucaacaccacccugcccuuccacaacguccacccccugaccaucggcgagugcccgaaguacgucaagagcgagaagcucgugcuggccacgggccugcgcaacgugccccagaucgagucccggggccucuucggggcgaucgccggguucaucgagggcggguggcagggcaugguggacggcugguacggguaccaccacagcaacgaccagggcuccggguacgccgccgacaaggagagcacccagaaggccuucgacggcaucaccaacaaggugaacuccgucaucgagaagaugaacacccaguucgaggcgguggggaaggaguucaacaaccuggagaagcgccuggagaaccucaacaagaagauggaggacggcuuccuggacguguggacguacaacgccgagcugcucguccugauggagaacgagcggacccuggacuuccacgacagcaacgugaagaaccucuacgagaagguccgcaugcagcugcgggacaacgugaaggagcugggcaacgggugcuucgaguucuaccacaagugcgacgacgagugcaugaacuccgugaagaacggcaccuacgacuaccccaaguacgaggaggagagcaagcucaagcgcaacgagaucaagggggucaagcuguccagcaugggcguguaccagauccuggccaucuacgccaccguggccggcucccucagccuggcgaucauggucgccgggaucuccuucuggaugugcagcaacggcucccugcagugccggaucugcaucuga

SEQ ID NO: 73718 - RNA, 1698 nt, Artificial Sequence
  derived and/or modified CDS sequence (opt1) from hemagglutinin__InfluenzaA__AFV53260
augaaggccaagcugcucauccugcugugcgcccucagcgcgaccgacgccgacaccaucugcaucggcuaccacgccaacaacuccacggacaccguggacaccguccuggagaagaacgugaccgugacgcacagcgucaaccugcucgaggacucccacaacgggaagcugugccgccugaagggcaaggcgccccuccagcuggggaacugcaacaucgccggcugggugcuggggaacccggagugcgagagccuccuguccaaccggagcugguccuacaucgccgagacccccaacagcgagaacgggaccugcuaccccggcgacuucgccgacuacgaggagcugcgcgagcagcucuccagcguguccagcuucgagcgguucgagaucuuccccaaggagcgcuccuggccgaaccacaccacgcgcggggucaccgccgccugcccccacgcgaugaaguccagcuucuacaagaaccugguguggcugaccgaggccaacggcagcuaccccaaccucucccggagcuacgugaacaaccaggagaaggagguccuggugcuguggggcgugcaccaccccuccaacaucgaggaccagcggacccucuaccgcaaggacaacgccuacgucagcguggugagcuccaacuacaaccggcgcuucacgccggagaucgccaagcggcccaagguccgcggccagagcgggcggaucaacuacuacuggacccugcuggagcccggcgacaccaucaucuucgaggccaccggcaaccucaucgcgcccugguacgccuucgcccugucccgcgggccgggcagcgggaucaucacguccaacgcgccccuggacgagugcgacaccaagugccagacgccccagggcgccaucaacagcucccuccccuuccagaacauccacccggugaccaucggcgagugccccaaguacgugcggagcaccaagcugcgcauggucaccgggcugcggaacauccccuccuuccagagccgcggccucuucggggccaucgccggcuucaucgagggcggguggaccggcaugauggacgggugguacggcuaccaccaccagaacgagcagggguccggcuacgccgccgaccagaaguccacccagaacgccaucaacgggaucacgaacaaggugaacagcgugaucgagaagaugaacacccaguucaccgcggucggcaaggaguucaacaagcuggagaagcggauggagaaccugaacaagaagguggacgacggcuuccucgacaucuggaccuacaacgccgagcugcuggugcuccuggagaacgagcgcacgcuggacuuccacgacagcaacgucaagaaccucuacgagaaggugaagaaccagcugcggaacaacgccaaggagcuggggaacggcugcuucgaguucuaccacaagugcgacaacgagugcauggaguccgucaagaacgggaccuacgacuaccccaaguacagcgaggaguccaagcucaaccgcgagaagaucgacggcgugaagcuggagagcauggggguguaccgcauccuggccaucuacuccaccgucgccagcagccucgugcugcuggugucccucggcgcgaucagcuucuggaugugcuccaacggcagccugcagugccggaucugcaucuga

SEQ ID NO: 73719 - RNA, 1689 nt, Artificial Sequence
  derived and/or modified CDS sequence (opt1) from hemagglutinin__InfluenzaA__AFV53271
auggccaucaccuaccugauccuccuguucaccgccgugcgcggcgaccagaucugcaucggguaccacgcgaacaacagcacggagaaggucgacaccauccuggagcggaacgugaccgugacccacgccaaggacauccucgagaagacgcacaacggcaagcugugcaagcugaacgggaucccgccccucgagcugggcgacugcuccaucgccggguggcugcucggcaaccccgagugcgaccgcuuccugcggguccccgaguggagcuacaucauggagaaggagaacccccgcuacucccugugcuacccgggcagcuucaacgacuacgaggagcucaagcaccuccuguccagcgugaagcacuucgagaaggugaagauccugcccaaggacggguggacccagcacaccaccacgggcggguccauggccugcgccgucagcggcaagcccuccuucuuccggaacaugguguggcugaccgagaaggggcagaacuaccccguggcgaagggcagcuacaacaacaccuccggcgagcagaugcugaucaucuggggcguccaccacccgaacgacgaggccgagcagcgcgcccucuaccagaagguggggaccuacgugagcgccuccacgagcacccugaacaagcgguccacccccgagaucgcggcccgccccaaggucaacgggcugggcagccggauggaguucuccuggacccuccuggacaugugggacacgaucaacuucgagagcaccggcaaccugguggcccccgaguacggguucaagaucuccaagcgcggcagcagcgggaucaugaagaccgagggcacccucgagaacugcgagacgaagugccagaccccgcugggggccaucaacaccacccugcccuuccacaacgugcacccccucacgaucggcgagugccccaaguacgucaaguccgagaagcuggugcuggccaccggccuccggaacaucccgcagaucgagagccgcgggcuguucggcgcgaucgccggguucaucgagggcggguggcagggcaugguggacggcugguacggguaccaccacuccaacgaccagggcagcggguacgccgccgacaaggaguccacccagaaggccuucgacggcaucaccaacaaggucaacagcgugaucgagaagaugaacacgcaguucgaggcgguggggaaggaguucuccaaccuggagaagcggcucgagaaccugaacaagaagauggaggacggcuuccuggacgucuggaccuacaacgccgagcuccuggugcugauggagaacgagcgcacccucgacuuccacgacagcaacgugaagaaccuguacgacaagguccggaugcagcugcgcgacaacgugaaggagcucggcaacgggugcuucgaguucuaccacaagugcgacaacgagugcauggacuccgucaagaacggcaccuacgacuaccccaaguacgaggaggagagcaagcugaaccggaacgagaucaagggggugaagcuguccagcaugggcguguaccagauccucgccaucuacgccacggucgccggcucccugagccuggcgaucaugauggccgggaucuccuucuggaugugcagcaacggcucccuccagugccgcaucugcaucuga

SEQ ID NO: 73720 - RNA, 1689 nt, Artificial Sequence
  derived and/or modified CDS sequence (opt1) from hemagglutinin__InfluenzaA__AFV53282
auggccaucaucuaccugauccuccuguucaccgccgugcgcggcgaccagaucugcaucggguaccacgcgaacaacagcaccgagaaggucgacacgauccuggagcggaacgugaccgugacccacgccaaggacauccucgagaagacccacaacggcaagcugugcaagcugaacgggaucccgccccucgagcugggcgacugcuccaucgccggguggcugcucggcaaccccgagugcgaccgccugcugagcguccccgagugguccuacaucauggagaaggagaacccccgggacggccucugcuacccggggagcuucaacgacuacgaggagcugaagcaccuccuguccagcgugaagcacuucgagaaggugaagauccugcccaaggaccgcuggacgcagcacaccaccaccggcgggucccgggccugcgccgucagcggcaaccccuccuucuuccgcaacaugguguggcugacgaagaaggggaccaacuaccccguggcgaagggcagcuacaacaacaccuccggcgagcagaugcucaucaucuggggcguccaccacccgaacgacgagaccgagcagcggacgcuguaccagaacguggggaccuacgugagcgucgggaccuccacccugaacaagcgcagcacgcccgagaucgccacccggcccaaggugaacggccucggcucccgcauggaguucagcuggacccugcuggacaugugggacaccaucaacuucgaguccacggggaaccucaucgcccccgaguacggcuucaagaucagcaagcggggguccagcggcaucaugaagaccgaggggacccuggagaacugcgagaccaagugccagacgccgcugggcgccaucaacaccacccuccccuuccacaacgugcacccccugaccaucggcgagugccccaaguacgucaagcuggagaagcucgugcuggcgacggggcugcgcaacgugccgcagaucgagagccggggccucuucggggccaucgccggcuucaucgagggcggguggcagggcauggucgacgggugguacggcuaccaccacuccaacgaccaggggagcggcuacgccgccgacaaggaguccacccagaaggcguucgacgugaucaccaacaaggugaacagcgucaucgagaagaugaacacccaguucgaggccguggggaaggaguucuccaaccuggagcgccggcuggagaaccucaacaagaagauggaggacggcuuccuggacguguggacguacaacgccgagcugcucguccugauggagaacgagcgcacccuggacuuccacgacagcaacgugaagaaccucuacgacaagguccggaugcagcugcgcgacaacgugaaggagcugggcaacgggugcuucgaguucuaccacaagugcgacgacgagugcaugaacuccgugaagaacggcaccuacgacuaccccaaguacgaggaggagagcaagcucaaccggaacgagaucaagggggucaagcuguccagcaugggcguguaccagauccuggccaucuacgccaccguggcgggcucccucagccuggccaucaugauggccgggaucuccuucuggaugugcagcaacggcucccugcagugccgcaucugcaucuga

SEQ ID NO: 73721 - RNA, 1689 nt, Artificial Sequence
  derived and/or modified CDS sequence (opt1) from hemagglutinin__InfluenzaA__AFV53293
auggccaucaucuaccugauccuccuguucaccagcgugcgcggcgaccagaucugcaucggguaccacgccaacaacuccaccgagaaggucgacacgauccuggagcggaacgugaccgugacccacgcgaagaacauccucgagaagacccacaacggcaagcugugcaagcugaacgggaucccgccccucgagcugggcgacugcagcaucgccggguggcugcucggcaaccccgagugcgaccgccugcugcggguccccgagugguccuacaucauggagaaggagaaccccaaguacagccucugcuacccgggcuccuucaacgacuacgaggagcugaagcaccuccugagcuccgugaagcacuucgagaaggugaagauccugcccaaggacggguggacgcagcacaccaccaacggcgggagccgcgccugcgccgucuccggcaaccccagcuucuuccggaacaugguguggcugaccaagaaggggcccaacuacccgguggccaagggcuccuacaacaacacgagcggcgagcagaugcucaucaucuggggcguccaccaccccaacgacgaggcggagcagcgcgcccuguaccaggagguggggaccuacguguccgccagcaccuccacccugaacaagcggagcacgcccgagaucgccgcgcgccccaaggucaacgggcucggcucccggauggaguucagcuggacccugcuggacaugugggacaccaucaacuucgaguccaccggcaaccucguggccccggaguacggguucaagaucagcaagcgcggcagcuccggggugaugaagacggagggcacccuggagaacugcgagaccaagugccagacgccccugggggccaucaacaccacccuccccuuccacaacguccacccccugaccaucggcgagugcccgaaguacgucaagagcgagaagcuggugcucgccaccggccugcggaacgugccccagaucgagucccgcgggcuguucggcgccaucgcgggguucaucgagggcggguggcagggcaugguggacggcugguacggguaccaccacagcaacgaccagggcuccggguacgccgccgacaaggagagcacgcagaaggccuucgacggcaucaccaacaaggugaacuccgucaucgagaagaugaacacccaguucgaggccguggggaaggaguucagcaaccucgagaagcggcuggagaaccugaacaagaagauggaggacggcuuccucgacguguggaccuacaacgcggagcugcugguccucauggagaacgagcgcacgcuggacuuccacgacuccaacgugaagaaccuguacgacaagguccggaugcagcuccgcgacaacgugaaggagcugggcaacgggugcuucgaguucuaccacaagugcgacgacgagugcauggacagcgugaagaacggcaccuacgacuaccccaaguacgaggaggaguccaagcugaaccggaacgagaucaagggggucaagcucagcuccaugggcguguaccagauccuggccaucuacgccaccguggccggcagccugucccucgccaucaugauggcggggaucagcuucuggaugugcuccaacggcagccugcagugccgcaucugcaucuga

SEQ ID NO: 73722 - RNA, 1689 nt, Artificial Sequence
  derived and/or modified CDS sequence (opt1) from hemagglutinin__InfluenzaA__AFV53304
auggccaucaucuaccugauccuccuguucaccgccgugcgcggcgaccagaucugcaucggguaccacgcgaacaacagcaccgagaaggucgacacgauccuggagcagaacgugaccgugacccacgccaaggacauccucgagaagacccacaacggcaagcugugcaagcugaacgggaucccgccccucgagcugggcgacugcuccaucgccggguggcugcucggcaaccccgagugcgaccggcugcugagcguccccgagugguccuacaucauggagaaggagaacccccgcgacggccucugcuacccggggagcuucaacgacuacgaggagcugaagcaccuccuguccagcgugaagcacuucgagaaggugaagauccugcccaaggaccgguggacgcagcacaccaccaccggcgggucccgcgccugcgccgucagcggcaaccccuccuucuuccggaacaugguguggcugacgaagaaggagagcaacuaccccguggcgaagggguccuacaacaacaccagcggcgagcagaugcucaucaucuggggcguccaccacccgaacgacgagaccgagcagcgcacccuguaccagaacguggggacguacguguccgucggcaccagcacccugaacaagcgguccacccccaacaucgccacgcgccccaaggugaacgggcucggcagccggauggaguucuccuggacccugcuggacaugugggacaccaucaacuucgagagcaccggcaaccucaucgcccccgaguacggguucaagaucuccaagcgcggcagcagcgggaucaugaagacggagggcacccuggagaacugcgagaccaagugccagaccccgcugggggccaucaacacgacccuccccuuccacaacgugcacccccugaccaucggcgagugccccaaguacgucaaguccgagaagcuggugcucgcgaccggccugcggaacgugccgcagaucgagagccgcgggcuguucggcgccaucgccggguucaucgagggcggguggcagggcauggucgacggcugguacggguaccaccacuccaacgaccagggcagcggguacgccgccgacaaggaguccacgcagaaggcguucgacggcaucaccaacaaggugaacagcgugaucgagaagaugaacacccaguucgaggccgucgggaaggaguucuccaaccucgagcggcgccuggagaaccugaacaagaagauggaggacggcuuccucgacguguggaccuacaacgccgagcugcuggugcucauggagaacgagcggacgcuggacuuccacgacagcaacgucaagaaccuguacgacaaggugcgcaugcagcuccgggacaacgucaaggagcugggcaacgggugcuucgaguucuaccacaagugcgacgacgagugcaugaacuccgugaagaacggcaccuacgacuaccccaaguacgaggaggagagcaagcugaaccgcaacgagaucaagggggugaagcucuccagcaugggcgucuaccagauccuggccaucuacgccaccguggcgggcucccugagccucgccaucaugauggccgggaucuccuucuggaugugcagcaacggcucccugcagugccggaucugcaucuga

SEQ ID NO: 73723 - RNA, 1689 nt, Artificial Sequence
  derived and/or modified CDS sequence (opt1) from hemagglutinin__InfluenzaA__AFV53314
auggccaucaucuaccugauccuccuguucaccgccgugcgcggcgacaagaucugcaucggguaccacgcgaacaacagcaccgagacggucgacaccauccuggagcggaacgugaccgugacccacgccaaggacauccucgagaagacgcacaacggcaagcugugcaagcugaacgggaucccgccccucgagcugggcgacugcuccaucgccggguggcugcucggcaaccccgagugcgaccgccugcugagcguccccgagugguccuacaucauggagaaggagaacccccggaacggccucugcuacccggggaacuucaacgacuacgaggagcugaagcaccuccugagcuccgugaagcacuucgagaaggugaagauccugcccaaggaccgcuggacccagcacaccaccacgggcgggagccaggccugcgccgucuccggcaaccccagcuucuuccggaacaugguguggcugaccgagaaggaguccaacuaccccguggcgaaggggagcuacaacaacaccuccggcgagcagaugcucaucaucuggggcguccaccacccgaucgacgagaccgagcagcgcacgcuguaccagaacguggggaccuacgugagcgucggcaccuccacccugaacaagcggagcacgcccgagaucgccaagcgccccaaggugaacgggcucggcucccggauggaguucagcuggacccugcuggacaugugggacaccaucaccuucgaguccacgggcaaccucaucgcccccgaguacggguucaagaucagcaagcgcggcuccagcgggaucaugaagaccgagggcacccuggagaacugcgagaccaagugccagacgccgcugggggccaucaacaccacccuccccuuccacaacgugcacccccugaccaucggcgagugccccaaguacgucaagagcgagaagcuggugcucgcgacgggccugcggaacgugccgcagaucgagucccgcgggcuguucggcgccaucgccggguucaucgagggcggguggcagggcauggucgacggcugguacggguaccaccacagcaacgaccagggcuccggguacgccgccgacaaggagagcacccagaaggcguucgacggcaucaccaacaaggugaacgccgugaucgagaagaucaacacccaguucgaggccgucgggaaggaguucuccaaccucgagcggcgccuggagaaccugaacaagaagauggaggacggcuuccucgacguguggacguacaacgccgagcugcuggugcucauggagaacgagcggacccuggacuuccacgacagcaacgucaagaaccuguacgacaaggugcgcaugcagcuccgggacaacgucaaggagcugggcaacgggugcuucgaguucuaccacaagugcgacgacgagugcaugaacuccgugaagaacggcaccuacgacuaccccaaguacgaggaggagagcaagcugaaccgcaacgagaucaagggggugaagcucuccagcaugggcgucuaccagauccuggccaucuacgcgaccguggccggcucccugagccucgccaucaugauggccgggaucuccuucuggaugugcagcaacggcucccugcagugccggaucugcaucuga

SEQ ID NO: 73724 - RNA, 1689 nt, Artificial Sequence
  derived and/or modified CDS sequence (opt1) from hemagglutinin__InfluenzaA__AFV53325
auggccaucaucuaccugauccuccuguucaccgccgugcgcggcgaccagaucugcaucggguaccacgcgaacaacagcaccgagaaggucgacacgauccuggagcggaacgugaccgugacccacgccaaggacauccucgagaagacccacaacggcaagcugugcaagcugaacgggaucccgccccucgagcugggcgacugcuccaucgccggguggcugcucggcaaccccgagugcgaccgccugcugagcguccccgagugguccuacaucauggagaaggagaacccccgggacggccucugcuacccggggagcuucaacgacuacgaggagcugaagcaccuccuguccagcgugaagcacuucgagaaggugaagauccugcccaaggaccgcuggacgcagcacaccaccaccggcgggucccgggccugcgccgucagcggcaaccccuccuucuuccgcaacaugguguggcugacgaagaaggggagcaacuacaccguggcgaagggcuccuacaacaacaccagcggcgagcagaugcucaucaucuggggcguccaccaccccaacgacgagaccgagcagcggacgcuguaccagaacguggggaccuacguguccgucagcaccuccacccugaacaagcgcagcacgccggagaucgccacccggcccaaggugaacgggcucggcucccgcauggaguucagcuggacccugcuggacaugugggacaccaucaacuucgaguccacgggcaaccucaucgcccccgaguacggguucaagaucagcaagcggggcagcuccgggaucaugaagaccgagggcacccuggagaacugcgagaccaagugccagacgccccugggggccaucaacaccacccucccguuccacaacgugcacccccugaccaucggcgagugccccaaguacgucaagagcgagaagcuggugcucgcgacgggccugcgcaacgugccccagaucgagucccgggggcuguucggcgccaucgccggguucaucgagggcggguggcagggcauggucgacggcugguacggguaccaccacagcaacgaccagggcuccggguacgccgccgacaaggagagcacccagaaggcguucgacggcaucaccaacaaggugaacuccgugaucgagaagaugaacacccaguucgaggccgucgggaaggaguucagcaaccucgagcgccggcuggagaaccugaacaagaagauggaggacggcuuccucgacguguggacguacaacgccgagcugcuggugcucauggagaacgagcgcacccuggacuuccacgacuccaacgucaagaaccuguacgacaaggugcggaugcagcuccgcgacaacgucaaggagcugggcaacgggugcuucgaguucuaccacaagugcgacgacgagugcaugaacagcgugaagaacggcaccuacgacuacccgaaguacgaggaggaguccaagcugaaccggaacgagaucaagggggugaagcucagcuccaugggcgucuaccagauccuggccaucuacgccaccguggcgggcagccugucccucgccaucaugauggccgggaucagcuucuggaugugcuccaacggcagccugcagugccgcaucugcaucuga

SEQ ID NO: 73725 - RNA, 1689 nt, Artificial Sequence
  derived and/or modified CDS sequence (opt1) from hemagglutinin__InfluenzaA__AFV53336
auggccaucaucuaccugauccuccuguucaccgccgugcgcggcgaccagaucugcaucggguaccacgcgaacaacagcaccgagaaggucgacacgauccuggagcggaacgugaccgugacccacgccaaggacauccucgagaagacccacaacggcaagcugugcaagcugaacgggaucccgccccucgagcugggcgacugcuccaucgccggguggcugcucggcaaccccgagugcgaccgccugcugcggguccccgaguggagcuacaucauggagaaggagaacccccgcuacucccucugcuacccgggcagcuucaacgacuacgaggagcugaagcaccuccucuccagcgugaagcaccuggagaaggugaagauccugcccaaggacggguggacgcagcacgagaccgacggcggguccaaggccugcgccgucagcggcaagcccuccuucuuccggaacaugguguggcucaccaagaaggggcccaacuacccgguggcgaagcgcagcuacaacaacaccuccggcgagcagaugcugaucaucuggggcguccaccaccccaacgacgaggccgagcagcgggcccuguaccagaagguggggacguacgugagcgccuccaccagcacccucaacaagcgcuccacccccgagaucgcggcccggcccgaggucagcggccuggggucccgcauggaguucagcuggacgcugcucgacgugugggacaccaucuccuucgagagcaccggcaaccugguggccccggaguacggcuucaagaucagcaagcggggguccagcggcaucaugaagaccgaggggacgcugggcaacugcgagaccaagugccagacgccccucggggccaucaacaccacccugcccuuccacaacguccacccccugaccaucggcgagugcccgaaguacgugaaguccgagaagcucgugcuggccaccggccugcgcaacgucccccagaucgagagccgggggcuguucggcgcgaucgccggguucaucgagggcggguggcagggcaugguggacggcugguacggguaccaccacuccaacgaccagggcagcggguacgccgccgacaaggaguccacccagaaggccuucgaccgcaucacgaacaaggugaacagcgucaucgagaagaugaacacccaguucgaggcggugggcaaggaguucuccaaccuggagaagcggcuggagaaccucaacaagaagauggaggacggguuccuggacguguggaccuacaacgccgagcugcucguccugauggagaacgagcgcauccuggacuuccacgacagcaacgugaagaaccucuacgacaagguccggaugcagcugcgcgacaacgugaaggagcugggcaacggcugcuucgaguucuaccacaagugcgacgacgagugcaugaacuccgugaagaacgggaccuacgacuaccccaaguacgaggaggagagcaagcucaagcggaacgagaucaagggcgucaagcuguccagcauggggguguaccagauccuggccaucuacgccacgguggccggcucccucagccuggcgaucaugaucgccggcaucuccuucuggaugugcagcaacgggucccugcagugccgcaucugcaucuga

SEQ ID NO: 73726 - RNA, 1701 nt, Artificial Sequence
  derived and/or modified CDS sequence (opt1) from hemagglutinin__InfluenzaA__AFV68720
augaagaccaucaucgcccugagcuacauccucugccugguguucgcccagaagcugcccggcaacgacaacuccaccgcgacgcucugccuggggcaccacgccgucccgaacggcaccaucgugaagaccaucaccaacgaccagaucgaggugacgaacgccaccgagcugguccagagcuccagcaccggggagaucugcgacagcccccaccagauccucgacggcgagaacugcacccugaucgacgcccugcucggggacccccagugcgacggcuuccagaacaagaagugggaccuguucguggagcgcagcaaggccuacuccaacugcuaccccuacgacgugccggacuacgcgagccugcggucccucgucgccagcuccggcacgcuggaguucaacaacgagagcuucaacuggaccggggugacccagaacggcaccuccagcgccugcauccgccgguccgacagcuccuucuucagccgccugaacuggcucacgcaccugaacuucaaguaccccgcccugaacgugaccaugcccaacaacgagcaguucgacaagcucuacaucuggggcguccaccaccccgggaccgacaaggaccagaucuuccuguacgcgcaggccuccgggcggaucaccgugagcacgaagcgcagccagcaggccgugaucccgaacaucggcucccggccccgcauccggaacauccccagccgcaucuccaucuacuggaccaucgucaagcccggcgacauccugcucaucaacagcaccgggaaccugaucgccccgcggggcuacuucaagauccgcuccgggaaguccuccaucaugcggagcgacgcccccaucggcaagugcaacuccgagugcaucacccccaacggcagcauccccaacgacaagccguuccagaacgugaaccgcaucacguacggggcgugcccccgguacgugaagcagaacacccugaagcucgccaccggcaugcgcaacguccccgagaagcagacccgggggaucuucggcgccaucgccggguucaucgagaacggcugggagggcaugguggacgggugguacggcuuccgccaccagaacuccgaggggcggggccaggccgcggaccucaagagcacgcaggccgccaucgaccagaucaacgggaagcugaaccgccugaucggcaagaccaacgagaaguuccaccagaucgagaaggaguucuccgagguggagggccggauccaggaccuggagaaguacgucgaggacaccaagaucgaccuguggagcuacaacgccgagcuccugguggcccuggagaaccagcacaccaucgaccucacggacuccgagaugaacaagcuguucgagaagaccaagaagcagcugcgcgagaacgcggaggacauggggaacggcugcuucaagaucuaccacaagugcgacaacgccugcaucgggagcauccgcaacggcaccuacaaccacgacguguaccgggacgaggcccucaacaaccgcuuccagaucaagggggucgagcugaaguccggcuacaaggacuggauccuguggaucagcuucgccaucuccugcuuccuccugugcguggcccugcucggcuucaucaugugggcgugccagaaggggaacauccggugcaacaucugcaucuga

SEQ ID NO: 73727 - RNA, 1701 nt, Artificial Sequence; identical to SEQ ID NO: 66693
  derived and/or modified CDS sequence (opt1) from hemagglutinin__InfluenzaA__AFX96347

SEQ ID NO: 73728 - RNA, 1701 nt, Artificial Sequence
  derived and/or modified CDS sequence (opt1) from hemagglutinin__InfluenzaA__AFX96359
augaaggccauccuggugguccuccuguacaccuucgccaccgcgaacgccgacacgcugugcaucggcuaccacgccaacaacagcaccgacaccguggacaccgugcucgagaagaacgucacggugacccacuccgugaaccugcuggaggacaagcacaacgggaagcucugcaagcugcgcggcgucgcgccccugcaccucgggaagugcaacaucgccggcuggauccuggggaacccggagugcgagagccuguccaccgccagcuccuggagcuacaucguggagaccuccagcuccgacaacggcacgugcuaccccggcgacuucaucgacuacgaggagcuccgggagcagcugagcuccgugagcuccuucgagcgcuucgagaucuuccccaagaccagcuccuggcccaaccacgacagcaacaagggggucaccgccgccugcccgcacgccggcgcgaaguccuucuacaagaaccugaucuggcucgugaagaaggggaacagcuaccccaagcuguccaagagcuacaucaacgacaagggcaaggaggugcugguccucugggggauccaccaccccagcaccuccgccgaccagcagagccuguaccagaacgccgacacguacguguucgugggcaccucccgguacagcaagaaguucaagcccgagaucgccauccgcccgaagguccgggaccaggagggccgcaugaacuacuacuggacccugguggagcccggggacaagaucaccuucgaggccacgggcaaccucguggucccccgguacgcguucgccauggagcgcaacgccggguccggcaucaucaucagcgacacccccgugcacgacugcaacacgaccugccagaccccgaagggcgccaucaacaccucccugcccuuccagaacauccaccccaucaccaucgggaagugccccaaguacgucaagagcaccaagcugcggcucgccacgggccugcgcaacgugccguccauccagagccgggggcuguucggcgcgaucgccggguucaucgagggcggcuggaccgggaugguggacggcugguacggguaccaccaccagaacgagcagggcuccggguacgccgccgaccucaagagcacccagaacgccaucgacgagaucaccaacaaggugaacuccgucaucgagaagaugaacacgcaguucaccgcggugggcaaggaguucaaccaccuggagaagcgcaucgagaaccugaacaagaagaucgacgacggcuuccucgacaucuggaccuacaacgccgagcugcugguccuccuggagaacgagcggacccuggacuaccacgacagcaacgugaagaaccucuacgagaaggugcgcucccagcugaagaacaacgccaaggagaucgggaacggcugcuucgaguucuaccacaagugcgacaacacgugcauggagagcgucaagaacgggaccuacgacuaccccaaguacuccgaggaggccaagcugaaccgggaggagaucaacggcgugaagcucgagagcacccgcaucuaccagauccuggccaucuacuccaccguggcgagcagccugguccucguggugucccugggggccaucagcuucuggaugugcuccaacggcagccugcagugccggaucugcaucuga

SEQ ID NO: 73729 - RNA, 1701 nt, Artificial Sequence
  derived and/or modified CDS sequence (opt1) from hemagglutinin__InfluenzaA__AFX96366
augaaggccauccuggugguccuccuguacaccuucgccaccgcgaacgccgacacgcugugcaucggcuaccacgccaacaacagcaccgacaccguggacaccgugcucgagaagaacgucacggugacccacuccgugaaccugcuggaggacaagcacaacgggaagcucugcaagcugcgcggcgucgcgccccugcaccucgggaagugcaacaucgccggcuggauccuggggaacccggagugcgagagccuguccaccgccagcuccuggagcuacaucguggagaccuccagcuccgacaacggcacgugcuaccccggcgacuucaucgacuacgaggagcuccgggagcagcugagcuccgugagcuccuucgagcgcuucgagaucuuccccaagaccagcuccuggcccaaccacgacagcaacaagggggucaccgccgccugcccgcacgccggcgcgaaguccuucuacaagaaccugaucuggcucgugaagaaggggaacagcuaccccaagcuguccaagagcuacaucaacgaccggggcaaggaggugcugguccucugggggauccaccaccccagcaccuccgccgaccagcagagccuguaccagaacgccgacgccuacguguucgugggcacgucccgcuacagcaagaaguucaagcccgagaucgccauccggccgaagguccgcgaccaggagggccggaugaacuacuacuggacccugguggagcccggggacaagaucaccuucgaggcgaccggcaaccucguggucccccgcuacgccuucgccauggagcggaacgccggguccggcaucaucaucagcgacacgcccgugcacgacugcaacacgaccugccagaccccgaagggcgccaucaacaccucccugcccuuccagaacauccaccccaucaccaucgggaagugccccaaguacgucaagagcaccaagcugcgccucgcgaccggccugcggaacgugccguccauccagagccgcgggcuguucggcgccaucgccggguucaucgagggcggcuggacggggaugguggacggcugguacggguaccaccaccagaacgagcagggcuccggguacgccgccgaccucaagagcacccagaacgcgaucgacaagaucaccaacaaggugaacuccgucaucgagaagaugaacacccaguucacggccgugggcaaggaguucaaccagcuggagaagcggaucgagaaccugaacaagaaggucgacgacggcuuccucgacaucuggaccuacaacgccgagcugcuggugcuccuggagaacgagcgcacccuggacuaccacgacagcaacgugaagaaccucuacgagaagguccggucccagcugaagaacaacgccaaggagaucgggaacggcugcuucgaguucuaccacaagugcgacaacacgugcauggagagcgugaagaacgggaccuacgacuaccccaaguacuccgaggaggccaagcugaaccgcgaggagaucgacggcgugaagcucgagagcacccggaucuaccagauccuggcgaucuacuccaccgucgccagcagccuggugcucguggucucccugggggccaucagcuucuggaugugcuccaacggcagccugcagugccgcaucugcaucuga

SEQ ID NO: 73730 - RNA, 1701 nt, Artificial Sequence; identical to SEQ ID NO: 68193
  derived and/or modified CDS sequence (opt1) from hemagglutinin__InfluenzaA__AFX96383

SEQ ID NO: 73731 - RNA, 1701 nt, Artificial Sequence; identical to SEQ ID NO: 66693
  derived and/or modified CDS sequence (opt1) from hemagglutinin__InfluenzaA__AFX96398

SEQ ID NO: 73732 - RNA, 1701 nt, Artificial Sequence; identical to SEQ ID NO: 66693
  derived and/or modified CDS sequence (opt1) from hemagglutinin__InfluenzaA__AFX96408

SEQ ID NO: 73733 - RNA, 1701 nt, Artificial Sequence; identical to SEQ ID NO: 66693
  derived and/or modified CDS sequence (opt1) from hemagglutinin__InfluenzaA__AFX96418

SEQ ID NO: 73734 - RNA, 1701 nt, Artificial Sequence; identical to SEQ ID NO: 66693
  derived and/or modified CDS sequence (opt1) from hemagglutinin__InfluenzaA__AFX96428

SEQ ID NO: 73735 - RNA, 1701 nt, Artificial Sequence; identical to SEQ ID NO: 66693
  derived and/or modified CDS sequence (opt1) from hemagglutinin__InfluenzaA__AFX96438

SEQ ID NO: 73736 - RNA, 1701 nt, Artificial Sequence; identical to SEQ ID NO: 66693
  derived and/or modified CDS sequence (opt1) from hemagglutinin__InfluenzaA__AFX96448

SEQ ID NO: 73737 - RNA, 1701 nt, Artificial Sequence; identical to SEQ ID NO: 66693
  derived and/or modified CDS sequence (opt1) from hemagglutinin__InfluenzaA__AFX96458

SEQ ID NO: 73738 - RNA, 1701 nt, Artificial Sequence; identical to SEQ ID NO: 66693
  derived and/or modified CDS sequence (opt1) from hemagglutinin__InfluenzaA__AFX96468

SEQ ID NO: 73739 - RNA, 1701 nt, Artificial Sequence; identical to SEQ ID NO: 66693
  derived and/or modified CDS sequence (opt1) from hemagglutinin__InfluenzaA__AFX96478

SEQ ID NO: 73740 - RNA, 1701 nt, Artificial Sequence; identical to SEQ ID NO: 66693
  derived and/or modified CDS sequence (opt1) from hemagglutinin__InfluenzaA__AFX96488

SEQ ID NO: 73741 - RNA, 1701 nt, Artificial Sequence
  derived and/or modified CDS sequence (opt1) from hemagglutinin__InfluenzaA__AFX96498
augaaggccauccuggugguccuccuguacaccuucgccaccgcgaacgccgacacgcugugcaucggcuaccacgccaacaacagcaccgacaccguggacaccgugcucgagaagaacgucacggugacccacuccgugaaccugcuggaggacaagcacaacgggaagcucugcaagcugcgcggcgucgcgccccugcaccucgggaagugcaacaucgccggcuggauccuggggaacccggagugcgagagccuguccaccgccagcuccuggagcuacaucguggagaccuccagcuccgacaacggcacgugcuaccccggcgacuucaucgacuacgaggagcuccgggagcagcugagcuccgugagcuccuucgagcgcuucgagaucuuccccaagaccagcuccuggcccaaccacgacagcaacaagggggucaccgccgccugcccgcacgccggcgcgaaguccuucuacaagaaccugaucuggcucgugaagaaggggaacagcuaccccaagaucuccaagagcuacaucaacgacaagggcaaggaggugcugguccugugggggauccaccaccccagcaccuccgccgaccagcagagccucuaccagaacgccgacgccuacguguucgugggcacgucccgguacagcaagaaguucaagcccgagaucgccauccgcccgaagguccgggaccaggagggccgcaugaacuacuacuggacccugguggagcccggggacaagaucaccuucgaggcgaccggcaaccugguggucccccgguacgccuucgccauggagcgcaacgccggguccggcaucaucaucagcgacacgcccgugcacgacugcaacacgaccugccagaccccgaagggcgccaucaacaccucccuccccuuccagaacauccaccccaucaccaucgggaagugccccaaguacgucaagagcaccaagcugcggcuggcgaccggccuccgcaacgugccguccauccagagccgggggcuguucggcgccaucgccggguucaucgagggcggcuggacggggaugguggacggcugguacggguaccaccaccagaacgagcagggcuccggguacgccgccgaccucaagagcacccagaacgcgaucgacgagaucaccaacaaggugaacuccgucaucgagaagaugaacacccaguucacggccgugggcaaggaguucaaccaccuggagaagcgcaucgagaaccugaacaagaaggucgacgacggcuuccuggacaucuggaccuacaacgccgagcuccuggugcugcucgagaacgagcggacccuggacuaccacgacagcaacgugaagaaccuguacgagaagguccgcucccagcucaagaacaacgccaaggagaucgggaacggcugcuucgaguucuaccacaagugcgacaacacgugcauggagagcgugaagaacgggaccuacgacuaccccaaguacuccgaggaggccaagcugaaccgggaggagaucgacggcgugaagcuggagagcacccgcaucuaccagauccucgcgaucuacuccaccgucgccagcagccuggugcugguggucucccucggggccaucagcuucuggaugugcuccaacggcagccugcagugccggaucugcaucuga

SEQ ID NO: 73742 - RNA, 1701 nt, Artificial Sequence; identical to SEQ ID NO: 66693
  derived and/or modified CDS sequence (opt1) from hemagglutinin__InfluenzaA__AFX96508

SEQ ID NO: 73743 - RNA, 1701 nt, Artificial Sequence; identical to SEQ ID NO: 68193
  derived and/or modified CDS sequence (opt1) from hemagglutinin__InfluenzaA__AFX96518

SEQ ID NO: 73744 - RNA, 1701 nt, Artificial Sequence; identical to SEQ ID NO: 66693
  derived and/or modified CDS sequence (opt1) from hemagglutinin__InfluenzaA__AFX96528

SEQ ID NO: 73745 - RNA, 1701 nt, Artificial Sequence; identical to SEQ ID NO: 68193
  derived and/or modified CDS sequence (opt1) from hemagglutinin__InfluenzaA__AFX96538

SEQ ID NO: 73746 - RNA, 1701 nt, Artificial Sequence
  derived and/or modified CDS sequence (opt1) from hemagglutinin__InfluenzaA__AFX96548
augaaggccauccuggugguccuccuguacaccuucgccaccgcgaacgccgacacgcugugcaucggcuaccacgccaacaacagcaccgacaccguggacaccgugcucgagaagaacgucacggugacccacuccgugaaccugcuggaggacaagcacaacgggaagcucugcaagcugcgcggcgucgcgccccugcaccucgggaagugcaacaucgccggcuggauccuggggaacccggagugcgagagccuguccaccgccagcuccuggagcuacaucguggagaccuccagcuccgacaacggcacgugcuaccccggcgacuucaucgacuacgaggagcuccgggagcagcugagcuccgugagcuccuucgagcgcuucgagaucuuccccaagaccagcuccuggcccaaccacgacagcaacaagggggucaccgccgccugcccgcacgccggcgcgaaguccuucuacaagaaccugaucuggcucgugaagaaggggaacagcuaccccaagcuguccaagagcuacaucaacgacaagggcaaggaggugcugguccucugggggauccaccaccccagcaccuccgccgaccagcagagccuguaccagaacgccgacacguacguguucgugggcaccucccgguacagcaagaaguucaagcccgagaucgccauccgcccgaagguccgggaccaggagggccgcaugaacuacuacuggacccugguggagcccggggacaagaucaccuucgaggccacgggcaaccucguggucccccgguacgcguucgccauggagcgcaacgccggguccggcaucaucaucagcgacacccccgugcacgacugcaacacgaccugccagaccccgaagggcgccaucaacaccucccugcccuuccagaacauccaccccaucaccaucgggaagugccccaaguacgucaagagcaccaagcugcggcucgccacgggccugcgcaacgugccguccauccagagccgggggcuguucggcgcgaucgccggguucaucgagggcggcuggaccgggaugguggacggcugguacggguaccaccaccagaacgagcagggcuccggguacgccgccgaccucaagagcacccagaacgccaucgacaagaucaccaacaaggugaacuccgucaucgagaagaugaacacgcaguucaccgcggugggcaaggaguucaaccaccuggagaagcgcaucgagaaccugaacaagaagaucgacgacggcuuccucgacaucuggaccuacaacgccgagcugcugguccuccuggagaacgagcggacccuggacuaccacgacagcaacgugaagaaccucuacgagaaggugcgcucccagcugaagaacaacgccaaggagaucgggaacggcugcuucgaguucuaccacaagugcgacaacacgugcauggagagcgucaagaacgggaccuacgacuaccccaaguacuccgaggaggccaagcugaaccgggaggagaucgacggcgugaagcucgagagcacccgcaucuaccagauccuggccaucuacuccaccguggcgagcagccugguccucguggugucccugggggccaucagcuucuggaugugcuccaacggcagccugcagugccggaucugcaucuga

SEQ ID NO: 73747 - RNA, 1701 nt, Artificial Sequence; identical to SEQ ID NO: 66693
  derived and/or modified CDS sequence (opt1) from hemagglutinin__InfluenzaA__AFX96558

SEQ ID NO: 73748 - RNA, 1701 nt, Artificial Sequence; identical to SEQ ID NO: 67853
  derived and/or modified CDS sequence (opt1) from hemagglutinin__InfluenzaA__AFX96568

SEQ ID NO: 73749 - RNA, 1701 nt, Artificial Sequence; identical to SEQ ID NO: 67853
  derived and/or modified CDS sequence (opt1) from hemagglutinin__InfluenzaA__AFX96578

SEQ ID NO: 73750 - RNA, 1701 nt, Artificial Sequence; identical to SEQ ID NO: 66693
  derived and/or modified CDS sequence (opt1) from hemagglutinin__InfluenzaA__AFX96588

SEQ ID NO: 73751 - RNA, 1701 nt, Artificial Sequence; identical to SEQ ID NO: 66693
  derived and/or modified CDS sequence (opt1) from hemagglutinin__InfluenzaA__AFX96598

SEQ ID NO: 73752 - RNA, 1701 nt, Artificial Sequence
  derived and/or modified CDS sequence (opt1) from hemagglutinin__InfluenzaA__AFX96608
augaaggccauccuggugguccuccuguacaccuucgccaccgcgaacgccgacacgcugugcaucggcuaccacgccaacaacagcaccgacaccguggacaccgugcucgagaagaacgucacggugacccacuccgugaaccugcuggaggacaagcacaacgggaagcucugcaagcugcgcggcgucgcgccccugcaccucgggaagugcaacaucgccggcuggauccuggggaacccggagugcgagagccuguccaccgccagcuccuggagcuacaucguggagaccuccagcuccgacaacggcacgugcuaccccggcgacuucaucgacuacgaggagcuccgggagcagcugagcuccgugagcuccuucgagcgcuucgagaucuuccccaagaccagcuccuggcccaaccacgacagcaacaagggggucaccgccgccugcccgcacgccggcgcgaaguccuucuacaagaaccugaucuggcucgugaagaaggggaacagcuaccccaagcuguccaagagcuacaucaacgacaagggcaaggaggugcugguccucugggggauccaccaccccagcaccuccgccgaccagcagagccuguaccagaacgccgacgccuacguguucgugggcacgucccgguacagcaagaaguucaagcccgagaucgccauccgcccgaagguccgggaccaggagggccgcaugaacuacuacuggacccugguggagcccggggacaagaucaccuucgaggcgaccggcaaccucguggucccccgguacgccuucgccauggagcgcaacgccggguccggcaucaucaucagcgacacgcccgugcacgacugcaacacgaccugccagaccccgaagggcgccaucaacaccucccugcccuuccagaacauccaccccaucaccaucgggaagugccccaaguacgucaagagcaccaagcugcggcucgcgaccggccugcgcaacgugccguccauccagagccgggggcuguucggcgccaucgccggguucaucgagggcggcuggacggggaugguggacggcugguacggguaccaccaccagaacgagcagggcuccggguacgccgccgaccucaagagcacccagaacgcgaucgacgagaucaccaacaaggugaacuccgucaucgagaagaugaacacccaguucacggccgugggcaaggaguucaaccaccuggagaagcgcaucgagaaccugaacaagaaggucgacgacggcuuccucgacaucuggaccuacaacgccgagcugcuggugcuccuggagaacgagcggacccuggacuaccacgacagcaacgugaagaaccucuacgagaagguccgcucccagcugaagaacaacgccaaggagaucgggaacggcugcuucgaguucuaccacaagugcgacaacacgugcauggagagcgugaagaacgggaccuacgacuaccccaaguacuccgaggaggccaagcugaaccgggagaagaucgacggcgugaagcucgagagcacccgcaucuaccagauccuggcgaucuacuccacccuggccagcagccucguccugguggugucccugggggccaucagcuucuggaugugcuccaacggcagccuccagugccggaucugcaucuga

SEQ ID NO: 73753 - RNA, 1701 nt, Artificial Sequence; identical to SEQ ID NO: 66693
  derived and/or modified CDS sequence (opt1) from hemagglutinin__InfluenzaA__AFX96618

SEQ ID NO: 73754 - RNA, 1701 nt, Artificial Sequence; identical to SEQ ID NO: 67853
  derived and/or modified CDS sequence (opt1) from hemagglutinin__InfluenzaA__AFX96628

SEQ ID NO: 73755 - RNA, 1701 nt, Artificial Sequence
  derived and/or modified CDS sequence (opt1) from hemagglutinin__InfluenzaA__AFX96638
augaaggccauccuggugguccuccuguacaccuucgccaccgcgaacgccgacacgcugugcaucggcuaccacgccaacaacagcaccgacaccguggacaccgugcucgagaagaacgucacggugacccacuccgugaaccugcuggaggacaagcacaacgggaagcucugcaagcugcgcggcgucgcgccccugcaccucgggaagugcaacaucgccggcuggauccuggggaacccggagugcgagagccuguccaccgccagcuccuggagcuacaucguggagaccuccagcuccgacaacggcacgugcuaccccggcgacuucaucaacuacgaggagcuccgggagcagcugagcuccgugagcuccuucgagcgcuucgagaucuuccccaagaccagcuccuggcccaaccacgacagcaacaagggggucaccgccgccugcccgcacgccggcgcgaaguccuucuacaagaaccugguguggcucgugaagaaggggaacagcuaccccaagcuguccaagagcuacaucaacgacaagggcaaggagguccuggugcucugggggauccaccaccccagcaccuccgccgaccagcagagccuguaccagaacgccgacgccuacguguucgucggcacgucccgguacagcaagaaguucaagcccgagaucgccauccgcccgaaggugcgggaccaggagggccgcaugaacuacuacuggacccugguggagcccggggacaagaucaccuucgaggcgaccggcaaccucauggucccccgguacgccuucgccauggagcgcaacgccggguccggcaucaucaucagcgacacgcccgugcacgacugcaacacgaccugccagaccccgaagggcgccaucaacaccucccugcccuuccagaacauccaccccaucaccaucgggaagugccccaaguacgucaagagcaccaagcugcggcucgcgaccggccugcgcaacgugccguccauccagagccgggggcuguucggcgccaucgccggguucaucgagggcggcuggacggggaugguggacggcugguacggguaccaccaccagaacgagcagggcuccggguacgccgccgaccucaagagcacccagaacgcgaucgacgagaucaccaacaaggugaacuccgucaucgagaagaugaacacccaguucacggccgugggcaaggaguucaaccaccuggagaagcgcaucgagaaccugaacaagaaggucgacgacggcuuccucgacaucuggaccuacaacgccgagcugcuggugcuccuggagaacgagcggacccuggacuaccacgacagcaacgugaagaaccucuacgagaagguccgcucccagcugaagaacaacgccaaggagaucgggaacggcugcuucgaguucuaccacaagugcgacaacacgugcauggagagcgugaagaacgggaccuacgacuaccccaaguacuccgaggaggccaagcugaaccgggaggagaucgacggcgugaagcucgagagcacccgcaucuaccagauccuggcgaucuacuccaccgucgccagcagccuggugcucguggucucccugggggccaucagcuucuggaugugcuccaacggcagccugcagugccggaucugcaucuga

SEQ ID NO: 73756 - RNA, 1701 nt, Artificial Sequence; identical to SEQ ID NO: 66693
  derived and/or modified CDS sequence (opt1) from hemagglutinin__InfluenzaA__AFX96648

SEQ ID NO: 73757 - RNA, 1701 nt, Artificial Sequence; identical to SEQ ID NO: 67853
  derived and/or modified CDS sequence (opt1) from hemagglutinin__InfluenzaA__AFX96658

SEQ ID NO: 73758 - RNA, 1701 nt, Artificial Sequence
  derived and/or modified CDS sequence (opt1) from hemagglutinin__InfluenzaA__AFX96668
augaaggccauccuggugguccuccuguacaccuucgccaccgcgaacgccgacacgcugugcaucggcuaccacgccaacaacagcaccgacaccguggacaccgugcucgagaagaacgucacggugacccacuccgugaaccugcuggaggacaagcacaacgggaagcucugcaagcugcgcggcgucgcgccccugcaccucgggaagugcaacaucgccggcuggauccuggggaacccggagugcgagagccuguccaccgccagcuccuggagcuacaucguggagaccuccagcuccgacaacggcacgugcuaccccggcgacuucaucgacuacgaggagcuccgggagcagcugagcuccgugagcuccuucgagcgcuucgagaucuuccccaagaccagcuccuggcccaaccacgacagcaacaagggggucaccgccgccugcccgcacgccggcgcgaaguccuucuacaagaaccugaucuggcucgugaagaaggggaacagcuaccccaagcuguccaagagcuacaucaacgacaagggcaaggaggugcugguccucugggggauccaccaccccagcaccuccgccgaccagcagagccuguaccagaacgccgacgccuacguguucgugggcacgucccgguacagcaagaaguucaagcccgagaucgccauccgcccgaagguccgggaccaggagggccgcaugaacuacuacuggacccugguggagcccggggacaagaucaccuucgaggcgaccggcaaccucguggucccccgguacgccuucgccauggagcgcaacgccggguccggcaucaucaucagcgacacgcccgugcacgacugcaacacgaccugccagaccccgaagggcgccaucaacaccucccugcccuuccagaacauccaccccaucaccaucgggaagugcagcaaguacgugaaguccaccaagcugcggcucgcgaccggccugcgcaacguccccagcauccagucccgggggcuguucggcgccaucgccggguucaucgagggcggcuggacggggaugguggacggcugguacggguaccaccaccagaacgagcagggcagcggguacgccgccgaccucaaguccacccagaacgcgaucgacgagaucaccaacaaggugaacagcgucaucgagaagaugaacacccaguucacggccgugggcaaggaguucaaccaccuggagaagcgcaucgagaaccugaacaagaaggucgacgacggcuuccucgacaucuggaccuacaacgccgagcugcuggugcuccuggagaacgagcggacccuggacuaccacgacuccaacgugaagaaccucuacgagaagguccgcagccagcugaagaacaacgccaaggagaucgggaacggcugcuucgaguucuaccacaagugcgacaacacgugcauggaguccgugaagaacgggaccuacgacuacccgaaguacagcgaggaggccaagcugaaccgggaggagaucgacggcgugaagcucgaguccacccgcaucuaccagauccuggcgaucuacagcaccgucgccagcucccuggugcucguggucagccugggggccaucuccuucuggaugugcagcaacggcucccugcagugccggaucugcaucuga

SEQ ID NO: 73759 - RNA, 1701 nt, Artificial Sequence
  derived and/or modified CDS sequence (opt1) from hemagglutinin__InfluenzaA__AFX96678
augaaggccauccuggugguccuccuguacaccuucgccaccgcgaacgccgacacgcugugcaucggcuaccacgccaacaacagcaccgacaccguggacaccgugcucgagaagaacgucacggugacccacuccgugaaccugcuggaggacaagcacaacgggaagcucugcaagcugcgcggcgucgcgccccugcaccucgggaagugcaacaucgccggcuggauccuggggaacccggagugcgagagccuguccaccgcgagcuccuggagcuacaucguggagaccuccagcuccgacaacggcacgugcuaccccggcgacuucaucgacuacgaggagcuccgggagcagcugagcuccgugagcuccuucgagcgcuucgagaucuuccccaagaccagcuccuggcccaaccacgacagcaacaagggggucaccgccgccugcucccacgccggcgccaagagcuucuacaagaaccugaucuggcucgugaagaaggggaacuccuacccgaagcugagcaagagcuacaucaacgacaagggcaaggaggugcugguccucugggggauccaccaccccuccaccagcgccgaccagcagucccuguaccagaacgccgacgccuacguguucgugggcacgagccgguacuccaagaaguucaagcccgagaucgccauccgccccaagguccgggaccaggagggccgcaugaacuacuacuggacccugguggagccgggggacaagaucaccuucgaggcgaccggcaaccucguggucccccgguacgccuucgccauggagcgcaacgccgggagcggcaucaucaucuccgacacgcccgugcacgacugcaacacgaccugccagacccccaagggcgccaucaacaccagccugccguuccagaacauccaccccaucaccaucgggaagugccccaaguacgugaaguccaccaagcugcggcucgcgaccggccugcgcaacguccccagcauccagucccgggggcuguucggcgccaucgccggguucaucgagggcggcuggacggggaugguggacggcugguacggguaccaccaccagaacgagcagggcagcggguacgccgccgaccucaaguccacccagaacgcgaucgacgagaucaccaacaaggugaacagcgucaucgagaagaugaacacccaguucacggccgugggcaaggaguucaaccaccuggagaagcgcaucgagaaccugaacaagaaggucgacgacggcuuccucgacaucuggaccuacaacgccgagcugcuggugcuccuggagaacgagcggacccuggacuaccacgacuccaacgugaagaaccucuacgagaagguccgcagccagcugaagaacaacgccaaggagaucgggaacggcugcuucgaguucuaccacaagugcgacaacacgugcauggaguccgugaagaacgggaccuacgacuacccgaaguacagcgaggaggccaagcugaaccgggaggagaucgacggcgugaagcucgaguccacccgcaucuaccagauccuggcgaucuacagcaccgucgccagcucccuggugcucguggucagccugggggccaucuccuucuggaugugcagcaacggcucccugcagugccggaucugcaucuga

SEQ ID NO: 73760 - RNA, 1701 nt, Artificial Sequence
  derived and/or modified CDS sequence (opt1) from hemagglutinin__InfluenzaA__AFX96688
augaaggccauccuggugguccuccuguacaccuucgccaccgcgaacgccgacacgcugugcaucggcuaccacgccaacaacagcaccgacaccguggacaccgugcucgagaagaacgucacggugacccacuccgugaaccugcuggaggacaagcacaacgggaagcucugcaagcugcgcggcgucgcgccccugcaccucgggaagugcaacaucgccggcuggauccuggggaacccggacugcgagagccuguccaccgccagcuccuggagcuacaucguggagaccuccagcuccgacaacggcacgugcuaccccggcgacuucaucgacuacgaggagcuccgggagcagcugagcuccgugagcuccuucgagcgcuucgagauguuccccaagaccagcuccuggcccaaccacgacagcaacaagggggucaccgccgccugcccgcacgccggcgcgaaguccuucuacaagaaccugaucuggcucgugaagaaggggaacagcuaccccaagcuguccaagagcuacaucaacgacaagggcaaggaggugcugguccucugggggauccaccaccccagcaccuccgccgaccagcagagccuguaccagaacgccgacgccuacguguucgugggcacgucccgguacagcaagaaguucaagcccgagaucgccauccgcccgaagguccgggaccaggagggccgcaugaacuacuacuggacccugguggagcccggggacaagaucaccuucgaggcgaccggcaaccucguggucccccgguacgccuucgccauggagcgcaacgacggguccggcaucaucaucagcgacacgcccgugcacgacugcaacacgaccugccagaccccgaagggcgccaucaacaccucccugcccuuccagaacauccaccccaucaccaucgggaagugccccaaguacgucaagagcaccaagcugcggcucgccaccggccugcgcaacgugccguccauccagagccgggggcuguucggcgcgaucgccggguucaucgagggcggcuggacggggaugguggacggcugguacggguaccaccaccagaacgagcagggcuccggguacgccgccgaccucaagagcacccagaacgccaucgacgagaucaccaacaaggugaacuccgucaucgagaagaugaacacccaguucacggcggugggcaaggaguucaaccaccuggagaagcgcaucgagaaccugaacaagaaggucgacgacggcuuccucgacaucuggaccuacaacgccgagcugcuggugcuccuggagaacgagcggacccuggacuaccacgacagcaacgugaagaaccucuacgagaagguccgcucccagcugaagaacaacgccaaggagaucgggaacggcugcuucgaguucuaccacaagugcgacaacacgugcauggagagcgugaagaacgggaccuacgacuaccccaaguacuccgaggaggccaagcugaaccgggaggagaucgacggcgugaagcucgagagcacccgcaucuaccagauccuggccaucuacuccaccgucgcgagcagccuggugcucguggucucccugggggccaucagcuucuggaugugcuccaacggcagccugcagugccggaucugcaucuga

SEQ ID NO: 73761 - RNA, 1701 nt, Artificial Sequence; identical to SEQ ID NO: 66693
  derived and/or modified CDS sequence (opt1) from hemagglutinin__InfluenzaA__AFX96698

SEQ ID NO: 73762 - RNA, 1701 nt, Artificial Sequence
  derived and/or modified CDS sequence (opt1) from hemagglutinin__InfluenzaA__AFX96718
augaaggccauccuggugguccuccuguacaccuucgccaccgcgaacgccgacacgcugugcaucggcuaccacgccaacaacagcaccgacaccguggacaccgugcucgagaagaacgucacggugacccacuccgugaaccugcuggaggacaagcacaacgggaagcucugcaagcugcgcggcgucgcgccccugcaccucgggaagugcaacaucgccggcuggauccuggggaacccggagugcgagagccuguccaccgccagcuccuggagcuacaucguggagaccuccagcuccgacaacggcacgugcuaccccggcgacuucaucgacuacgaggagcuccgggagcagcugagcuccgugagcuccuucgagcgcuucgagaucuuccccaagaccagcuccuggcccaaccacgacagcaacaagggggucaccgccgccugcccgcacgccggcgcgaaguccuucuacaagaaccugaucuggcucgugaagaaggggaacagcuaccccaagaucuccaagagcuacaucaacgacaagggcaaggaggugcugguccugugggggauccaccaccccagcaccuccgccgaccagcagagccucuaccagaacgccgacacguacguguucgugggcaccucccgguacagcaagaaguucaagcccgagaucgccauccgcccgaagguccgggaccaggagggccgcaugaacuacuacuggacccugguggagcccggggacaagaucaccuucgaggccacgggcaaccugguggucccccgguacgcguucgccauggagcgcaacgccggguccggcaucaucaucagcgacacccccgugcacgacugcaacacgaccugccagaccccgaagggcgccaucaacaccucccuccccuuccagaacauccaccccaucaccaucgggaagugccccaaguacgucaagagcaccaagcugcggcuggccacgggccuccgcaacgugccguccauccagagccgggggcuguucggcgcgaucgccggguucaucgagggcggcuggaccgggaugguggacggcugguacggguaccaccaccagaacgagcagggcuccggguacgccgccgaccucaagagcacccagaaggccaucgacgagaucaccaacaaggugaacuccgucaucgagaagaugaacacgcaguucaccgcggugggcaaggaguucaaccaccuggagaagcgcaucgagaaccugaacaagaagaucgacgacggcuuccuggacaucuggaccuacaacgccgagcuccugguccugcucgagaacgagcggacccuggacuaccacgacagcaacgugaagaaccuguacgagaaggugcgcucccagcucaagaacaacgccaaggagaucgggaacggcugcuucgaguucuaccacaagugcgacaacacgugcauggagagcgucaagaacgggaccuacgacuaccccaaguacuccgaggaggccaagcugaaccgggaggagaucgacggcgugaagcuggagagcacccgcaucuaccagauccucgccaucuacuccaccguggcgagcagccugguccugguggugucccucggggccaucagcuucuggaugugcuccaacggcagccugcagugccggaucugcaucuga

SEQ ID NO: 73763 - RNA, 1701 nt, Artificial Sequence; identical to SEQ ID NO: 73762
  derived and/or modified CDS sequence (opt1) from hemagglutinin__InfluenzaA__AFX96728

SEQ ID NO: 73764 - RNA, 1701 nt, Artificial Sequence; identical to SEQ ID NO: 67163
  derived and/or modified CDS sequence (opt1) from hemagglutinin__InfluenzaA__AFX96738

SEQ ID NO: 73765 - RNA, 1701 nt, Artificial Sequence
  derived and/or modified CDS sequence (opt1) from hemagglutinin__InfluenzaA__AFX96748
augaaggccauccuggugguccuccuguacaccaucgccaccgcgaacgccgacacgcugugcaucggcuaccacgccaacaacagcaccgacaccguggacaccgugaucgagaagaacgucacggugacccacuccgugaaccuccuggaggacaagcacaacgggaagcugugcaagcuccgcggcgucgcgccccugcaccuggggaagugcaacaucgccggcuggauccucgggaacccggagugcgagagccuguccaccgccagcuccuggagcuacaucguggagaccuccagcuccgacaacggcacgugcuaccccggcgacuucaucgacuacgaggagcugcgggagcagcucagcuccgugagcuccuucgagcgcuucgagauguuccccaagaccagcuccuggcccaaccacgacagcaacaagggggucaccgccgccugcccgcacgccggcgcgaaguccuucuacaagaaccugaucuggcuggugaagaaggggaacagcuaccccaagcucuccaagagcuacaucaacgacaagggcaaggaggugcugguccugugggggauccaccaccccagcaccuccgccgaccagcagagccucuaccagaacgccgacgccuacguguucgugggcacgucccgguacagcaagaaguucaagcccgagaucgccauccgcccgaagguccgggaccaggagggccgcaugaacuacuacuggacccugguggagcccggggacaagaucaccuucgaggcgaccggcaaccugguggucccccgguacgccuucgccauggagcgcaacgccggguccggcaucaucaucagcgacacgcccgugcacgacugcaacacgaccugccagaccccgaagggcgccaucaacaccucccuccccuuccagaacauccaccccaucaccaucgggaagugccccaaguacgucaagagcaccaagcugcggcuggcgaccggccuccgcaacgugccguccauccagagccgggggcuguucggcgccaucgccggguucaucgagggcggcuggacggggaugguggacggcugguacggguaccaccaccagaacgagcagggcuccggguacgccgccgaccucaagagcacccagaacgcgaucgacgagaucaccaacaaggugaacuccgucaucgagaagaugaacacccaguucacggccgugggcaaggaguucaaccaccuggagaagcgcaucgagaaccugaacaagaaggucgacgacggcuuccuggacaucuggaccuacaacgccgagcuccuggugcugcucgagaacgagcggacccuggacuaccacgacagcaacgugaagaaccuguacgagaagguccgcucccagcucaagaacaacgccaaggagaucgggaacggcugcuucgaguucuaccacaagugcgacaacacgugcauggagagcgugaagaacgggaccuacgacuaccccaaguacuccgaggaggccaagcugaaccgggaggagaucgacggcgugaagcuggagagcacccgcaucuaccagauccucgcgaucuacuccaccgucgccagcagccuggugcugguggucucccucggggccaucagcuucuggaugugcuccaacggcagccugcagugccggaucugcaucuga

SEQ ID NO: 73766 - RNA, 1701 nt, Artificial Sequence
  derived and/or modified CDS sequence (opt1) from hemagglutinin__InfluenzaA__AFX96758
augaaggccauccuggugguccuccuguacaccuucgccaccgcgaacgccgacacgcugugcaucggcuaccacgccaacaacagcaccgacaccguggacaccgugcucgagaagaacgucacggugacccacuccgugaaccugcuggaggacaagcacaacgggaagcucugcaagcugcgcggcgucgcgccccugcaccucgggaagugcaacaucgccggcuggauccuggggaacccggagugcgagagccuguccaccgccagcuccuggagcuacaucguggagaccuccagcuccgacaacggcacgugcuaccccggcgacuucaucgacuacgaggagcuccgggagcagcugagcuccgugagcuccuucgagcgcuucgagauguuccccaagaccagcuccuggcccaaccacgacagcaacaagggggucaccgccgccugcccgcacgccggcgcgaaguccuucuacaagaaccugaucuggcucgugaagaaggggaacagcuaccccaagcuguccaagagcuacaucaacgacaagggcaaggaggugcugguccucugggggauccaccaccccagcaccuccgccgaccagcagagccuguaccagaacgccgacacguacguguucgugggcaccucccgguacagcaagaaguucaagcccgagaucgccauccgcccgaagguccgggaccaggagggccgcaugaacuacuacuggacccugguggagcccggggacaagaucaccuucgaggccacgggcaaccucguggucccccgguacgcguucgccauggagcgcaacgccggguccggcaucaucaucagcgacacccccgugcacgacugcaacacgaccugccagaccccgaagggcgccaucaacaccucccugcccuuccagaacauccaccccaucaccaucgggaagugccccaaguacgucaagagcaccaagcugcggcucgccacgggccugcgcaacgugccguccauccagagccgggggcuguucggcgcgaucgccggguucaucgagggcggcuggaccgggaugguggacggcugguacggguaccaccaccagaacgagcagggcuccggguacgccgccgaccucaagagcacccagaacgccaucgacgagaucaccaacaaggugaacuccgucaucgagaagaugaacacgcaguucaccgcggugggcaaggaguucaaccaccuggagaagcgcaucgagaaccugaacaagaagaucgacgacggcuuccucgacaucuggaccuacaacgccgagcugcugguccuccuggagaacgagcggacccuggacuaccacgacagcaacgugaagaaccucuacgagaaggugcgcucccagcugaagaacaacgccaaggagaucgggaacggcugcuucgaguucuaccacaagugcgacaacacgugcauggagagcgucaagaacgggaccuacgacuaccccaaguacuccgaggaggccaagcugaaccgggaggagaucgacggcgugaagcucgagagcacccgcaucuaccagauccuggccaucuacuccaccguggcgagcagccugguccucguggugucccugggggccaucagcuucuggaugugcuccaacggcagccugcagugccggaucugcaucuga

SEQ ID NO: 73767 - RNA, 1701 nt, Artificial Sequence
  derived and/or modified CDS sequence (opt1) from hemagglutinin__InfluenzaA__AFX96768
augaaggccauccuggugguccuccuguacaccuucgccaccgcgaacgccgacacgcugugcaucggcuaccacgccaacaacagcaccgacaccguggacaccgugcucgagaagaacgucacggugacccacuccgugaaccugcuggaggacaagcacaacgggaagcucugcaagcugcgcggcgucgcgccccugcaccucgggaagugcaacaucgccggcuggauccuggggaacccggagugcgagagccuguccaccgcgaucagcugguccuacaucguggagaccagcuccagcgacaacggcacgugcuaccccggcgacuucaucgacuacgaggagcuccgggagcagcuguccagcguguccagcuucgagcgcuucgagaucuuccccaagaccuccagcuggcccaaccacgacuccaacaagggggucaccgccgccugcccgcacgccggcgccaagagcuucuacaagaaccugaucuggcucgugaagaaggggaacuccuaccccaagcugagcaaguccuacaucaacgacaagggcaaggaggugcugguccucugggggauccaccaccccagcaccagcgccgaccagcagucccuguaccagaacgccgacgccuacguguucgugggcacgagccgguacuccaagaaguucaagcccgagaucgccauccgcccgaagguccgggaccaggagggccgcaugaacuacuacuggacccugguggagcccggggacaagaucaccuucgaggcgaccggcaaccucguggucccccgguacgccuucgccauggagcgcaacgccgggagcggcaucaucaucuccgacacgcccgugcacgacugcaacacgaccugccagaccccgaagggcgccaucaacaccagccugcccuuccagaacauccaccccaucaccaucgggaagugccccaaguacgugaaguccaccaagcugcggcucgcgaccggccugcgcaacgucccgagcauccagucccgggggcuguucggcgccaucgccggguucaucgagggcggcuggacggggaugguggacggcugguacggguaccaccaccagaacgagcagggcagcggguacgccgccgaccucaaguccacccagaacgcgaucgacgagaucaccaacaaggugaacagcgucaucgagaagaugaacacccaguucacggccgugggcaaggaguucaaccaccuggagaagcgcaucgagaaccugaacaagaaggucgacgacggcuuccucgacaucuggaccuacaacgccgagcugcuggugcuccuggagaacgagcggacccuggacuaccacgacuccaacgugaagaaccucuacgagaagguccgcagccagcugaagaacaacgccaaggagaucgggaacggcugcuucgaguucuaccacaagugcgacaacacgugcauggaguccgugaagaacgggaccuacgacuaccccaaguacagcgaggaggccaagcugaaccgggaggagaucgacggcgugaagcucgaguccaccaagaucuaccagauccuggcgaucuacagcaccgucgccuccagccuggugcucguggucagccugggggccaucuccuucuggaugugcagcaacggcucccugcagugccgcaucugcaucuga

SEQ ID NO: 73768 - RNA, 1701 nt, Artificial Sequence
  derived and/or modified CDS sequence (opt1) from hemagglutinin__InfluenzaA__AFX96778
augaaggccauccuggugauccuccuguacaccuucgccaccgcgaacgccgacacgcugugcaucggcuaccacgccaacaacagcaccgacaccgucgacaccauccucgagaagaacgugacggugacccacuccgucaaccugcuggaggacaagcacaacgggaagcucugcaagcugcgcggcguggcgccccugcaccucgggaagugcaacaucgccggcuggauccuggggaacccggagugcgagagccuguccaccgccagcuccuggagcuacaucguggagaccuccagcuccgacaacggcacgugcuaccccggcgacuucaucgacuacgaggagcuccgggagcagcugagcuccgucagcuccuucgagcgcuucgagaucuuccccaagaccagcuccuggcccaaccacgacagcaacaagggggugaccgccgccugcccgcacgccggcgcgaaguccuucuacaagaaccugaucuggcucgugaagaaggggaacagcuaccccaagcuguccaagagcuacaucaacgacaagggcaaggagguccuggugcucugggggauccaccaccccagcaccuccgccgaccagcagagccuguaccagaacgccgacgccuacguguucgucggcacgucccgguacagcaagaaguucaagcccgagaucgccauccgcccgaaggugcgggaccaggagggccgcaugaacuacuacuggacccugguggagcccggggacaagaucaccuucgaggcgaccggcaaccucgucgugccccgguacgccuucgccauggagcgcaacgccggguccggcaucaucaucagcgacacgcccgugcacgacugcaacacgaccugccagaccccgaagggcgccaucaacaccucccugcccuuccagaacauccaccccaucaccaucgggaagugccccaaguacgucaagagcaccaagcugcggcucgcgaccggccugcgcaacgugccguccauccagagccgggggcuguucggcgccaucgccggguucaucgagggcggcuggacggggaugguggacggcugguacggguaccaccaccagaacgagcagggcuccggguacgccgccgaccucaagagcacccagaacgcgaucgacgagaucaccaacaaggucaacuccgugaucgagaagaugaacacccaguucacggccgugggcaaggaguucaaccaccuggagaagcgcaucgagaaccugaacaagaaggucgacgacggcuuccucgacaucuggaccuacaacgccgagcugcuggugcuccuggagaacgagcggacccuggacuaccacgacagcaacgucaagaaccucuacgagaaggugcgcucccagcugaagaacaacgccaaggagaucgggaacggcugcuucgaguucuaccacaagugcgacaacacgugcauggagagcgugaagaacgggaccuacgacuaccccaaguacuccgaggaggccaagcugaaccgggaggagaucgacggcgucaagcucgagagcacccgcaucuaccagauccuggcgaucuacuccaccguggccagcagccuggugcucgucgugucccugggggccaucagcuucuggaugugcuccaacggcagccugcagugccggaucugcaucuga

SEQ ID NO: 73769 - RNA, 1701 nt, Artificial Sequence
  derived and/or modified CDS sequence (opt1) from hemagglutinin__InfluenzaA__AFX96788
augaaggccauccuggugguccuccuguacaccuucgccaccgcgaacgccgacacgcugugcaucggcuaccacgccaacaacagcaccgacaccguggacaccgugcucgagaagaacgucacggugacccacuccgugaaccugcuggaggacaagcacaacgggaagcucugcaagcugcgcggcgucgcgccccugcaccucgggaagugcaacaucgccggcuggauccuggggaacccggagugcgagagccuguccaccgccagcuccuggagcuacaucguggagaccuccagcuccgacaacggcacgugcuaccccggcgacuucaucgacuacgaggagcuccgggagcagcugagcuccgugagcuccuucgagcgcuucgagaucuuccccaagaccagcuccuggcccaaccacgacagcaacaagggggucaccgccgccugcccgcacgccggcgcgaaguccuucuacaagaaccugaucuggcucgugaagaaggggaacagcuaccccaagcuguccaagagcuacaucaacgacaagggcaaggaggugcugguccucugggggauccaccaccccagcaccuccgccgaccagcagagccuguaccagaacgccgacgccuacguguucgugggcacgucccgguacagcaagaaguucaagcccgagaucgccauccgcccgaagguccgggaccaggagggccgcaugaacuacuacuggacccugguggagcccggggacaagaucaccuucgaggcgaccggcaaccucguggucccccgguacgccuucgccauggagaagaacgccggguccggcaucaucaucagcgacacgcccgugcacgacugcaacacgaccugccagaccccgaagggcgccaucaacaccucccugcccuuccagaacauccaccccaucaccaucgggaagugccccaaguacgucaagagcaccaagcugcgccucgcgaccggccugcggaacgugccguccauccagagccgcgggcuguucggcgccaucgccggguucaucgagggcggcuggacggggaugguggacggcugguacggguaccaccaccagaacgagcagggcuccggguacgccgccgaccucaagagcacccagaacgcgaucgacaagaucaccaacaaggugaacuccgucaucgagaagaugaacacccaguucacggccgugggcaaggaguucaaccaccuggagaagcggaucgagaaccugaacaagaaggucgacgacggcuuccucgacaucuggaccuacaacgccgagcugcuggugcuccuggagaacgagcgcacccuggacuaccacgacagcaacgugaagaaccucuacgagaagguccggucccagcugaagaacaacgccaaggagaucgggaacggcugcuucgaguucuaccacaagugcgacaacacgugcauggagagcgugaagaacgggaccuacgacuaccccaaguacuccgaggaggccaagcugaaccgcgaggagaucgacggcgugaagcucgagagcacccggaucuaccagauccuggcgaucuacuccaccgucgccagcagccuggugcucguggucucccugggggccaucagcuucuggaugugcuccaacggcagccugcagugccgcaucugcaucuga

SEQ ID NO: 73770 - RNA, 1701 nt, Artificial Sequence; identical to SEQ ID NO: 73769
  derived and/or modified CDS sequence (opt1) from hemagglutinin__InfluenzaA__AFX96798

SEQ ID NO: 73771 - RNA, 1701 nt, Artificial Sequence; identical to SEQ ID NO: 67853
  derived and/or modified CDS sequence (opt1) from hemagglutinin__InfluenzaA__AFX96808

SEQ ID NO: 73772 - RNA, 1701 nt, Artificial Sequence; identical to SEQ ID NO: 70933
  derived and/or modified CDS sequence (opt1) from hemagglutinin__InfluenzaA__AFX96818

SEQ ID NO: 73773 - RNA, 1701 nt, Artificial Sequence; identical to SEQ ID NO: 73769
  derived and/or modified CDS sequence (opt1) from hemagglutinin__InfluenzaA__AFX96828

SEQ ID NO: 73774 - RNA, 1701 nt, Artificial Sequence; identical to SEQ ID NO: 69290
  derived and/or modified CDS sequence (opt1) from hemagglutinin__InfluenzaA__AFX96838

SEQ ID NO: 73775 - RNA, 1701 nt, Artificial Sequence
  derived and/or modified CDS sequence (opt1) from hemagglutinin__InfluenzaA__AFX96856
augaaggccauccuggugguccuccuguacaccuucgccaccgcgaacgccgacacgcugugcaucggcuaccacgccaacaacagcaccgacaccguggacaccgugcucgagaagaacgucacggugacccacuccgugaaccugcuggaggacaagcacaacgggaagcucugcaagcugcgcggcgucgcgccccugcaccucgggaagugcaacaucgccggcuggauccuggggaacccggagugcgagagccuguccaccgccagcuccuggagcuacaucguggagaccuccagcuccgacaacggcacgugcuaccccggcgacuucaucgacuacgaggagcuccgggagcagcugagcuccgugagcuccuucgagcgcuucgagaucuuccccaagaccagcuccuggcccaaccacgacagcaacaagggggucaccgccgccugcacccacgccggcgcgaaguccuucuacaagaaccugaucuggcucgugaagaaggggaacagcuacccgaagcuguccaagagcuacaucaacgacaagggcaaggaggugcugguccucugggggauccaccaccccagcacguccgccgaccagcagagccuguaccagaacgccgacgccuacguguucgugggcaccucccgguacagcaagaaguucaagcccgagaucgccauccgccccaagguccgggaccaggagggccgcaugaacuacuacuggacccugguggagccgggggacaagaucaccuucgaggcgacgggcaaccucguggucccccgguacgccuucgccauggagcgcaacgccggguccggcaucaucaucagcgacacccccgugcacgacugcaacacgaccugccagacccccaagggcgccaucaacaccucccugccguuccagaacauccaccccaucaccaucgggaagugccccaaguacgucaagagcaccaagcugcggcucgcgacgggccugcgcaacgugcccuccauccagagccgggggcuguucggcgccaucgccggguucaucgagggcggcuggaccgggaugguggacggcugguacggguaccaccaccagaacgagcagggcuccggguacgccgccgaccucaagagcacccagaacgcgaucgacgagaucaccaacaaggugaacuccgucaucgagaagaugaacacgcaguucaccgccgugggcaaggaguucaaccaccuggagaagcgcaucgagaaccugaacaagaaggucgacgacggcuuccucgacaucuggaccuacaacgccgagcugcuggugcuccuggagaacgagcggacccuggacuaccacgacagcaacgugaagaaccucuacgagaagguccgcucccagcugaagaacaacgccaaggagaucgggaacggcugcuucgaguucuaccacaagugcgacaacacgugcauggagagcgugaagaacgggaccuacgacuacccgaaguacuccgaggaggccaagcugaaccgggaggagaucgacggcgugaagcucgagagcacccgcaucuaccagauccuggcgaucuacuccaccgucgccagcagccuggugcucguggucucccugggggccaucagcuucuggaugugcuccaacggcagccugcagugccggaucugcaucuga

SEQ ID NO: 73776 - RNA, 1701 nt, Artificial Sequence; identical to SEQ ID NO: 73758
  derived and/or modified CDS sequence (opt1) from hemagglutinin__InfluenzaA__AFX96904

SEQ ID NO: 73777 - RNA, 1701 nt, Artificial Sequence; identical to SEQ ID NO: 68193
  derived and/or modified CDS sequence (opt1) from hemagglutinin__InfluenzaA__AFX96914

SEQ ID NO: 73778 - RNA, 1701 nt, Artificial Sequence
  derived and/or modified CDS sequence (opt1) from hemagglutinin__InfluenzaA__AFX96924
augaaggccauccuggugguccuccuguacaccuucgccaccgcgaacgccgacacgcugugcaucggcuaccacgccaacaacagcaccgacaccguggacaccgugcucgagaagaacgucacggugacccacuccgugaaccugcuggaggacaagcacaacgggaagcucugcaagcugcgcggcgucgcgccccugcaccucgggaagugcaacaucgccggcuggauccuggggaacccggagugcgagagccuguccaccgccagcuccuggagcuacaucguggagaccuccagcuccgacaacggcacgugcuaccccggcgacuucaucgacuacgaggagcuccgggagcagcugagcuccgugagcuccuucgagcgcuucgagaucuuccccaagaccagcuccuggcccaaccacgacagcaacaagggggucaccgccgccugcccgcacgccggcgcgaaguccuucuacaagaaccugaucuggcucgugaagaaggggaacagcuaccccaagcuguccaagagcuacaucaacgacaagggcaaggaggugcugguccucugggggauccaccaccccagcaccuccgccgaccagcagagccuguaccagaacgccgacgccuacguguucgugggcacgucccgguacagcaagcgcuucaagcccgagaucgccauccggccgaagguccgcgaccaggagggccggaugaacuacuacuggacccugguggagcccggggacaagaucaccuucgaggcgaccggcaaccucguggucccccgcuacgccuucgccauggagcggaacgccggguccggcaucaucaucagcgacacgcccgugcacgacugcaacacgaccugccagaccccgaagggcgccaucaacaccucccugcccuuccagaacauccaccccaucaccaucgggaagugccccaaguacgucaagagcaccaagcugcgccucgcgaccggccugcggaacgugccguccauccagagccgcgggcuguucggcgccaucgccggguucaucgagggcggcuggacggggaugguggacggcugguacggguaccaccaccagaacgagcagggcuccggguacgccgccgaccucaagagcacccagaacgcgaucgacgagaucaccaacaaggugaacuccgucaucgagaagaugaacacccaguucacggccgugggcaaggaguucaaccaccuggagaagcggaucgagaaccugaacaagaaggucgacgacggcuuccucgacaucuggaccuacaacgccgagcugcuggugcuccuggagaacgagcgcacccuggacuaccacgacagcaacgugaagaaccucuacgagaagguccggucccagcugaagaacaacgccaaggagaucgggaacggcugcuucgaguucuaccacaagugcgacaacacgugcauggagagcgugaagaacgggaccuacgacuaccccaaguacuccgaggaggccaagcugaaccgcgaggagaucgacggcgugaagcucgagagcacccggaucuaccagauccuggcgaucuacuccaccgucgccagcagccuggugcucguggucucccugggggccaucagcuucuggaugugcuccaacggcagccugcagugccgcaucugcaucuga

SEQ ID NO: 73779 - RNA, 1701 nt, Artificial Sequence; identical to SEQ ID NO: 66693
  derived and/or modified CDS sequence (opt1) from hemagglutinin__InfluenzaA__AFX96934

SEQ ID NO: 73780 - RNA, 1701 nt, Artificial Sequence
  derived and/or modified CDS sequence (opt1) from hemagglutinin__InfluenzaA__AFY24097
augaaggccauccuggugguccuccuguacaccuucgccaccgcgaacgccgacacgcugugcaucggcuaccacgccgacaacagcaccgacaccguggacaccgugcucgagaagaacgucacggugacccacuccguggaccugcuggaggacaagcacaacgggaagcucugcaagcugcgcggcgucgcgccccugcaccucgggaagugcaacaucgccggcuggauccuggggaacccggagugcgagagccuguccaccgccagcuccuggagcuacaucguggagaccuccagcuccgacaacggcacgugcuaccccggcgacuucaucgacuacgaggagcuccgggagcagcugagcuccgugagcuccuucgagcgcuucgagaucuuccccaagaccagcuccuggcccaaccacgacagcaacaagggggucaccgccgccugcccgcacgccggcgcgaaguccuucuacaagaaccugaucuggcucgugaagaaggggaacagcuaccccaagcugaacaaguccuacaucaacgacaagggcaaggaggugcugguccucugggggauccaccaccccagcaccagcacggaccagcagucccuguaccagaacgccgacgccuacguguucgugggcaccagccgguacuccaagaaguucaagcccgagaucgccauccgcccgaagguccgggaccaggagggccgcaugaacuacuacuggacccugguggagcccggggacaagaucaccuucgaggccacgggcaaccucguggucccccgguacgcguucgccauggagcgcaacgccgggagcggcaucaucaucuccgacacccccgugcacgacugcaacacgaccugccagaccccgaagggcgccaucaacaccagccugcccuuccagaacauccaccccaucaccaucgggaagugccccaaguacgugaaguccaccaagcugcggcucgccacgggccugcgcaacgucccgagcauccagucccgggggcuguucggcgcgaucgccggguucaucgagggcggcuggaccgggaugguggacggcugguacggguaccaccaccagaacgagcagggcagcggguacgccgccgaccucaaguccacccagaacgccaucgacgagaucaccaacaaggugaacagcgucaucgagaagaugaacacgcaguucaccgcggugggcaaggaguucaaccaccuggagaagcgcaucgagaaccugaacaagaaggucgacgacggcuuccucgacaucuggaccuacaacgccgagcugcuggugcuccuggagaacgagcggacccuggacuaccacgacuccaacgugaagaaccucuacgagaagguccgcagccagcugaagaacaacgccaaggagaucgggaacggcugcuucgaguucuaccacaagugcgacaacacgugcauggaguccgugaagaacgggaccuacgacuaccccaaguacagcgaggaggccaagcugaaccgggaggagaucgacggcgugaagcucgaguccacccgcaucuaccagauccuggccaucuacagcaccgucgcguccagccuggugcucguggucagccugggggccaucuccuucuggaugugcagcaacggcucccugcagugccggaucugcaucuga

SEQ ID NO: 73781 - RNA, 1701 nt, Artificial Sequence; identical to SEQ ID NO: 64654
  derived and/or modified CDS sequence (opt1) from hemagglutinin__InfluenzaA__AFY24162

SEQ ID NO: 73782 - RNA, 1701 nt, Artificial Sequence
  derived and/or modified CDS sequence (opt1) from hemagglutinin__InfluenzaA__AFY24195
augaagaccaucaucgcccugagcuacauccucugccugguguucgcccagaagcugcccggcaacgacaacuccaccgcgacgcucugccuggggcaccacgccgucccgaacggcaccaucgugaagaccaucaccaacgaccagaucgaggugacgaacgccaccgagcugguccagagcuccagcaccgggggcaucugcgacagcccccaccagauccucgacggggagaacugcacccugaucgacgcccugcucggcgacccccagugcgacggcuuccagaacaagaagugggaccuguucguggagcgcagcaaggccuacuccaacugcuaccccuacgacgugccggacuacgcgagccugcggucccucgucgccagcuccgggacgcuggaguucaacaacgagagcuucaacuggaccggcgugacccagaacgggaccuccagcgccugcaagcgccgguccaacaacagcuucuucucccgccugaacuggcucacgcaccugaaguucaaguaccccgcccugaacgugaccaugcccaacaacgagaaguucgacaagcucuacaucuggggcguccaccaccccgggaccgacaacgaccagaucuuccuguacgcgcaggccagcggccggaucaccguguccacgaagcgcagccagcagaccgugaucccgaacaucggcagccggccccgcauccggaacauccccucccgcaucagcaucuacuggaccaucgucaagcccggggacauccugcucaucaacuccaccggcaaccugaucgccccgcggggguacuucaagauccgcagcggcaaguccagcaucaugcgguccgacgcccccaucggcaagugcaacagcgagugcaucacgcccaacggguccauccccaacgacaagccguuccagaacgugaaccgcaucaccuacggcgccugcccccgguacgugaagcagaacacccugaagcucgcgaccgggaugcgcaacguccccgagaagcagacgcggggcaucuucggggccaucgccggcuucaucgagaacggcugggaggggaugguggacggcugguacggguuccgccaccagaacagcgagggcaucgggcaggccgccgaccugaaguccacccaggcggccaucaaccagaucaacggcaagcugaaccggcucaucggcaagaccaacgagaaguuccaccagaucgagaaggaguucagcgagguggaggggcgcauccaggaccuggagaaguacgucgaggacaccaagaucgaccugugguccuacaacgccgagcuccugguggcccuggagaaccagcacacgaucgaccucaccgacagcgagaugaacaagcuguucgagcggaccaagaagcagcugcgcgagaacgccgaggacaugggcaacgggugcuucaagaucuaccacaagugcgacaacgcgugcaucggcuccauccgcaacgggaccuacgaccacgacguguaccgggacgaggcccucaacaaccgcuuccagaucaagggcgucgagcugaaguccggcuacaaggacuggauccuguggaucuccuucgccaucagcugcuuccuccugugcguggcccugcucggguucaucaugugggccugccagaagggcaacauccggugcaacaucugcaucuga

SEQ ID NO: 73783 - RNA, 1701 nt, Artificial Sequence; identical to SEQ ID NO: 64209
  derived and/or modified CDS sequence (opt1) from hemagglutinin__InfluenzaA__AFY24217

SEQ ID NO: 73784 - RNA, 1701 nt, Artificial Sequence
  derived and/or modified CDS sequence (opt1) from hemagglutinin__InfluenzaA__AGB08294
augaaggccauccuggugguccuccuguacaccuucgccaccgcgaacgccgacacgcugugcaucggcuaccacgccaacaacagcaccgacaccguggacaccgugcucgagaagaacgucacggugacccacuccgugaaccugcuggaggacaagcacaacgggaagcucugcaagcugcgcggcgucgcgccccugcaccucgggaagugcaacaucgccggcuggauccuggggaacccggagugcgagagccuguccaccgccagcuccuggagcuacaucguggagaccuccagcuccgacaacggcacgugcuaccccggcgacuucaucaacuacgaggagcuccgggagcagcugagcuccgugagcuccuucgagcgcuucgagaucuuccccaagaccagcuccuggcccaaccacgacagcaacaagggggucaccgccgccugcccgcaggccggcgcgaaguccuucuacaagaaccugaucuggcucgugaagaaggggaacagcuaccccaagcugaucaaguccuacaucaacgacaagggcaaggaggugcugguccucugggggauccaccaccccagcaccagcgccgaccagcagucccuguaccagaacgccgacgccuacguguucgugggcacgagcaaguacuccaagaaguucaagcccgagaucgccguccggccgaaggugcgcgaccaggagggccggaugaacuacuacuggacccugguggagcccggggacaagaucaccuucgaggcgaccggcaaccuccuggucccccgcuacgccuucgugauggagcggaacgccgggagcggcaucaucaucuccgacacgcccgugcacgacugcaacacgaccugccagaccccgaagggcgccaucaacaccagccugcccuuccagaacauccaccccaucaccaucgggaagugccccaaguacgucaaguccaccaagcuccgccuggccaccggccugcggaacaucccgagcauccagucccgcggccucuucggggcgaucgccggguucaucgagggcggcuggacggggaugguggacggcugguacggguaccaccaccagaacgcccagggcagcggguacgccgccgaccugaaguccacccagaacgcgaucgacaagaucaccaacaaggugaacagcgucaucgagaagaugaacacccaguucacggccgugggcaaggaguucaaccaccuggagaagcggaucgagaaccucaacaagaaggucgacgacggcuuccuggacaucuggaccuacaacgccgagcugcucgugcugcuggagaacgagcgcacccucgacuaccacgacuccaacgugaagaaccuguacgagaagguccggagccagcugaagaacaacgccaaggagaucgggaacggcugcuucgaguucuaccacaagugcgacaacacgugcauggaguccgugaagaacgggaccuacgacuacccccgcuacagcgaggaggccaagcucaaccgggaggagaucgacggcgugaagcuggaguccacccgcaucuaccagauccuggcgaucuacagcaccgucgccuccagccucgugcugguggucagccugggggccaucuccuucuggaugugcagcaacggcucccuccagugccggaucugcaucuga

SEQ ID NO: 73785 - RNA, 1701 nt, Artificial Sequence
  derived and/or modified CDS sequence (opt1) from hemagglutinin__InfluenzaA__AGB08295
augaaggccauccuggugguccuccuguacaccuucgccaccgcgaacgccgacacgcugugcaucggcuaccacgccaacaacagcaccgacaccguggacaccgugaucgagaagaacgucacggugacccacuccgugaaccuccuggaggacaagcacaacgggaagcugugcaagcuccgcggcgucgcgccccugcaccuggggaagugcaacaucgccggcuggauccucgggaacccggagugcgagagccuguccaccgccagcuccuggagcuacaucguggagaccuccagcuccgacaacggcacgugcuaccccggcgacuucaucaacuacgaggagcugcgggagcagcucagcuccgugagcuccuucgagcgcuucgagaucuuccccaagaccagcuccuggcccaaccacgacagcaacaagggggucaccgccgccugcccgcacgccggcgcgaaguccuucuacaagaaccugaucuggcuggugaagaaggggaacagcuaccccaagcucuccaagagcuacaucaacgacaagcggaaggaggugcugguccuguggggcauccaccaccccagcaccacggccgaccagcagucccucuaccagaacgccgacgccuacguguucguggggaccagccgcuacuccaagaaguucaagcccgagaucgccauccggccgaagguccgcgaccaggagggccggaugaacuacuacuggacccugguggagcccggcgacaagaucaccuucgaggcgacggggaaccugguggucccccgcuacgccuucgccauggagcggaccgccggcagcgggaucaucaucuccgacacccccgugcacgacugcaacaccacgugccagaccccgaagggcgccaucaacaccagccuccccuuccagaacauccaccccaucaccaucggcaagugccccaaguacgugaaguccacgaagcugcgccuggcgaccgggcuccggaacaucccgagcauccagucccgcggccuguucggggccaucgccggcuucaucgagggcggguggaccggcauggucgacgggugguacggcuaccaccaccagaacgagcaggggagcggcuacgccgccgaccugaaguccacccagaacgcgaucgacaagaucacgaacaaggugaacagcgugaucgagaagaugaacacccaguucaccgccgucgggaaggaguucaaccaccucgagaagcggaucgagaaccugaacaagaagguggacgacggcuuccuggacaucuggaccuacaacgccgagcuccugguccugcucgagaacgagcgcacgcuggacuaccacgacuccaacgugaagaaccuguacgagaaggugcggaaccagcucaagaacaacgccaaggagaucggcaacgggugcuucgaguucuaccacaagugcgacaacacgugcauggagagcgucaagaacggcaccuacgacuaccccaaguacuccgaggaggccaagcugaaccgcgaggagaucgacggggugaagcuggagagcacccggaucuaccagauccucgcgaucuacuccaccguggccagcucccugguccugguggugagccucggcgccaucagcuucuggaugugcuccaacgggagccugcagugccgcaucugcaucuga

SEQ ID NO: 73786 - RNA, 1701 nt, Artificial Sequence
  derived and/or modified CDS sequence (opt1) from hemagglutinin__InfluenzaA__AGB08296
augaaggccauccuggugguccuccuguacaccuucgccaccgcgaacgccgacacgcugugcaucggcuaccacgccaacaacagcaccgacaccguggacaccgugcucgagaagaacgucacggugacccacuccgugaaccugcuggaggacaagcacaacgggaagcucugcaagcugcgcggcgucgcgccccugcaccucgggaagugcaacaucgccggcuggauccuggggaacccggagugcgagagccuguccaccgccagcuccuggagcuacaucguggagaccuccagcuccgacaacggcacgugcuaccccggcgacuucaucaacuacgaggagcuccgggagcagcugagcuccgugagcuccuucgagcgcuucgagaucuuccccaagaccagcuccuggcccaaccacgacagcaacaagggggucaccgccgccugcccgcacgccggcgcgaaguccuucuacaagaaccugaucuggcucgugaagaaggggaacagcuaccccaagcuguccaagagcuacaucaacgacaagggcaaggaggugcugguccucugggggauccaccaccccagcaccacggccgaccagcagucccuguaccagaacgccgacgccuacguguucgugggcaccagccgguacuccaagaaguucaagcccgagaucgccauccgcccgaagguccggggccaggaggggcgcaugaacuacuacuggacccugguggagcccggcgacaagaucaccuucgaggcgacggggaaccucguggucccccgguacgccuucgccauggagcgcaccgccggcagcggcaucaucaucuccgacacccccgugcacgacugcaacaccacgugccagaccccgaagggggccaucaacaccagccugcccuuccagaacauccaccccaucaccaucggcaagugccccaaguacgugaaguccacgaagcugcggcucgcgaccgggcugcgcaacgucccgagcauccagucccggggccuguucggggccaucgccggcuucaucgagggcggguggaccggcaugguggacgggugguacggcuaccaccaccagaacgagcaggggagcggcuacgccgccgaccucaaguccacccagaacgcgaucgacaagaucacgaacaaggugaacagcgucaucgagaagaugaacacccaguucaccgccgugggcaaggaguucaaccaccuggagaagcgcaucgagaaccugaacaagaaggucgacgacggguuccucgacaucuggaccuacaacgccgagcugcuggugcuccuggagaacgagcggacgcuggacuaccacgacuccaacgugaagaaccucuacgagaagguccgcaaccagcugaagaacaacgccaaggagaucggcaacgggugcuucgaguucuaccacaagugcgacaacacgugcauggagagcgugaagaacggcaccuacgacuaccccaaguacuccgaggaggccaagcugaaccgggaggagaucgacggggugaagcucgagagcacccgcaucuaccagauccuggcgaucuacuccaccgucgccagcucccuggugcucguggucagccugggcgccaucagcuucuggaugugcuccaacggcagccugcagugccggaucugcaucuga

SEQ ID NO: 73787 - RNA, 1701 nt, Artificial Sequence
  derived and/or modified CDS sequence (opt1) from hemagglutinin__InfluenzaA__AGB08297
augaaggccauccuggugguccuccuguacaccuucgccaccgcgaacgccgacacgcugugcaucggcuaccacgccaacaacagcaccgacaccguggacaccgugcucgagaagaacgucacggugacccacuccgugaaccugcuggaggacaagcacaacgggaagcucugcaagcugcgcggcgucgcgccccugcaccucgggaagugcaacaucgccggcuggauccuggggaacccggagugcgagagccuguccaccgccagcuccuggagcuacaucguggagaccuccagcuccgacaacggcacgugcuaccccggcgacuucaucaacuacgaggagcuccgggagcagcugagcuccgugagcuccuucgagcgcuucgagaucuuccccaagaccagcuccuggcccaaccacgacagcaacaagggggucaccgccgccugcccgcacgccggcgcgaaguccuucuacaagaaccugaucuggcucgugaagaaggggaacagcuaccccaagcuguccgagagcuacaucaacgacaagggcaaggaggugcugguccucugggggauccaccaccccagcaccacggccgaccagcagucccuguaccagaacgccgacgccuacguguucgugggcaccagccgguacuccaagaaguucaagcccgagaucgccauccgcccgaagguccgggaccaggagggccgcaugaacuacuacuggacccugguggagcccggggacaagaucaccuucgaggcgacgggcaaccucguggucccccgguacgccuucgccauggagcgcaccgccgggagcggcaucaucaucuccgacacccccgugcacgacugcaacaccacgugccagaccccgaagggcgccaucaacaccagccugcccuuccagaacauccaccccaucaccaucgggaagugccccaaguacgugaaguccacgaagcugcggcucgcgaccggccugcgcaacgucccgagcauccagucccgggggcuguucggcgccaucgccggguucaucgagggcggcuggaccgggaugguggacggcugguacggguaccaccaccagaacgagcagggcagcggguacgccgccgaccucaaguccacccagaacgcgaucgacaagaucacgaacaaggugaacagcgucaucgagaagaugaacacccaguucaccgccgugggcaaggaguucaaccaccuggagaagcgcaucgagaaccugaacaagaaggucgacgacggcuuccucgacaucuggaccuacaacgccgagcugcuggugcuccuggagaacgagcggacgcuggacuaccacgacuccaacgugaagaaccucuacgagaagguccgcaaccagcugaagaacaacgccaaggagaucgggaacggcugcuucgaguucuaccacaagugcgacaacacgugcauggagagcgugaagaacgggaccuacgacuaccccaaguacuccgaggaggccaagcugaaccgggaggagaucgacggcgugaagcucgagagcacccgcaucuaccagauccuggcgaucuacuccaccgucgccagcucccuggugcucguggucagccugggggccaucagcuucuggaugugcuccaacggcagccugcagugccggaucugcaucuga

SEQ ID NO: 73788 - RNA, 1701 nt, Artificial Sequence
  derived and/or modified CDS sequence (opt1) from hemagglutinin__InfluenzaA__AGB08298
augaaggccauccuggugguccuccuguacaccuucgccaccgcgaacgccgacacgcugugcaucggcuaccacgccaacaacagcaccgacaccguggacaccgugcucgagaagaacgucacggugacccacuccgugaaccugcuggaggacaagcacaacgggaagcucugcaagcugcgcggcaucgcgccccugcaccucgggaagugcaacaucgccggcuggauccuggggaacccggagugcgagagccuguccaccgccagcuccuggagcuacaucgucgagaccuccagcuccgacaacggcacgugcuaccccggcgacuucaucaacuacgaggagcuccgggagcagcugagcuccgugagcuccuucgagcgcuucgagaucuuccccaagaccagcuccuggcccaaccacgacagcaacaagggggugaccgccgccugcccgcacgccggcgcgaaguccuucuacaagaaccugaucuggcucgucaagaaggggaacagcuacccccggcuguccaagagcuacaucaacgacaagggcaaggaggugcuggugcucugggggauccaccaccccagcaccacggccgaccagcagucccuguaccagaacgccgacgccuacgucuucgugggcaccagccgcuacuccaagaaguucaagcccgagaucgccauccggccgaaggugcgcgaccaggagggccggaugaacuacuacuggacccuggucgagcccggggacaagaucaccuucgaggcgacgggcaaccucguggugccccgcuacgccuucgccauggagcggaccgccgggagcggcaucaucaucuccgacacccccguccacgacugcaacaccacgugccagaccccgaagggcgccaucaacaccagccugcccuuccagaacauccaccccaucaccaucgggaagugccccaaguacgugaaguccacgaagcugcgccucgcgaccggccugcggaacgugccgagcauccagucccgcgggcuguucggcgccaucgccggguucaucgagggcggcuggaccgggauggucgacggcugguacggguaccaccaccagaacgagcagggcagcggguacgccgccgaccucaaguccacccagaacgcgaucgacaagaucacgaacaaggugaacagcgugaucgagaagaugaacacccaguucaccgccgucggcaaggaguucaaccagcuggagaagcggaucgagaaccugaacaagaagguggacgacggcuuccucgacaucuggaccuacaacgccgagcugcugguccuccuggagaacgagcgcacgcuggacuaccacgacuccaacgugaagaaccucuacgagaaggugcggaaccagcugaagaacaacgccaaggagaucgggaacggcugcuucgaguucuaccacaagugcgacaacacgugcauggagagcgucaagaacgggaccuacgacuaccccaaguacuccgaggaggccaagcugaaccgcgaggagaucgacggcgugaagcucgagagcacccggaucuaccagauccuggcgaucuacuccaccguggccagcucccugguccucguggugagccugggggccaucagcuucuggaugugcuccaacggcagccugcagugccgcaucugcaucuga

SEQ ID NO: 73789 - RNA, 1701 nt, Artificial Sequence
  derived and/or modified CDS sequence (opt1) from hemagglutinin__InfluenzaA__AGB08301
augaagaccaucaucgcccugagcuacauccucugccugguguucgcccaggagcugcccggcaacgacgacuccaccgcgacgcucugccuggggcaccacgccgucccgaacggcaccaucgugaagaccaucaccaacgaccagaucgaggugacgaacgccaccgagcugguccagagcuccagcaccggggagaucugcaacagcccccaccagauccucgacggcgagaacugcacccugaucgacgcccugcucggggacccccagugcgacggcuuccagaacaagaagugggaccuguucguggagcgcagcaaggcccacuccaacugcuaccccuacgacgugccggacuacgcgagccugcggucccucgucgccagcuccggcacgcuggaguucaacaacgagagcuucaacuggaccggggugacccagaacggcaccuccagcgccugcauccgccgguccaacaacagcuucuucucccgccugaacuggcucacgcaccugaacuucaaguaccccgcccugaacgugaccaugcccaacaacgagcaguucgacaagcucuacaucuggggcguccaccaccccgggaccgacaaggaccagaucuuccuguacgcgcaggccagcgggcggaucaccguguccacgaagcgcagccagcaggccgugaucccgaacaucggcagccggccccgcguccggaacauccccucccgcgugagcaucuacuggaccguggucaagcccggcgacauccugcucaucaacuccaccgggaaccugaucgccccgcggggcuacuucaagauccgcagcgggaaguccagcaucaugcgguccgacgcccccaucggcaagugcaacagcgcgugcaucacccccaacggcuccauccccaacgacaagccguuccagaacgugaaccgcaucacguacggggccugcccccgguacgugaagcagaacacccugaagcucgccaccggcaugcgcaacguccccgagaagcagacccgggggaucuucggcgccaucgccggguucaucgagaacggcugggagggcaugguggacgggugguacggcuuccgccaccagaacagcgaggggcggggccaggcggccgaccugaaguccacgcaggccgccaucgaccagaucaacgggaagcugaaccgccucaucggcaagaccaacgagaaguuccaccagaucgagaaggaguucagcgagguggagggccggauccaggaccuggagaaguacgucgaggacaccaagaucgaccugugguccuacaacgccgagcuccugguggcgcuggagaaccagcacaccaucgaccucacggacagcgagaugaacaagcuguucgagaagaccaagaagcagcugcgcgagaacgccgaggacauggggaacggcugcuucaagaucuaccacaagugcgacaacgccugcaucggguccauccgcaacggcaccuacgaccacaacguguaccgggacgaggcccucaacaaccgcuuccagaucaagggggucgagcugaaguccggcuacaaggacuggauccuguggaucuccuucgccaucagcugcuuccuccugugcguggcgcugcucggcuucaucaugugggccugccagaaggggaacauccggugcaacaucugcaucuga

SEQ ID NO: 73790 - RNA, 1701 nt, Artificial Sequence
  derived and/or modified CDS sequence (opt1) from hemagglutinin__InfluenzaA__AGB08343
augaagaccaucaucgcccugagcuacaucuucugccucgugcuggcccaggaccugcccggcaacgacaacuccaccgcgacgcucugccuggggcaccacgccgucccgaacggcacccuggugaagaccaucaccaacgaccagaucgaggugacgaacgccaccgagcucguccagagcuccagcaccgggcgcaucugcaacaacccccaccggauccuggacggcaucaacugcacccugaucgacgcccuccugggggacccccacugcgacggcuuccagaacaagaagugggaccuguucguggagcgcuccaaggccuucagcaacugcuaccccuacgacgugccggacuacgcgucccuccggagccuggucgccuccagcggcacgcuggaguucaucaacgagggguucaacuggaccggcgugacccagaacgggggcuccuacgccugcaagcgcgggcccgacaacggcuucuucagccggcucaacuggcuguacaaguccgagagcaccuaccccgugcugaacgucacgaugcccaacaacgacaacuucgacaagcucuacaucuggggcgugcaccacccguccaccgacaaggagcagaccaaccuguacgugcaggccagcgggcgcgucaccguguccacgaagcggagccagcagaccaucauccccaacgugggcucccgccccuggguccgggggcugagcagccgcaucuccaucuacuggaccaucgugaagcccggcgacauccucgugaucaacagcaacggcaaccugaucgcgccgcggggguacuucaagauccgcaacggcaaguccagcaucaugcgguccgacgcccccaucgggaccugcagcuccgagugcaucacgcccaacggcagcauccccaacgacaagccguuccagaacgucaacaagaucaccuacggggccugccccaaguacgugaagcagaacacccugaagcucgccaccggcaugcgcaacgugcccgagaagcagacgcggggcaucuucggggccaucgcgggcuucaucgagaacgggugggagggcaugaucgacgggugguacggcuuccgccaccagaacuccgagggcaccgggcaggccgccgaccucaagagcacccaggccgccaucgaccagaucaacggcaagcugaaccgggucaucgagaagaccaacgagaaguuccaccagaucgagaaggaguucuccgagguggaggggcgcauccaggaccucgagaaguacguggaggacacgaagaucgaccuguggagcuacaacgcggagcugcucgucgcccuggagaaccagcacaccaucgaccugaccgacuccgagaugaacaagcuguucgagaagacccggcgccagcugcgggagaacgccgaggacaugggcaacgggugcuucaagaucuaccacaagugcgacaacgccugcaucggcagcauccgcaacggcacguacgaccacgacguguaccgcgacgaggcccugaacaaccgguuccagaucaagggggucgagcucaaguccggcuacaaggacuggauccuguggaucagcuucgcgaucuccugcuuccugcucugcguggugcugcugggguucaucaugugggccugccagaagggcaacauccgcugcaacaucugcaucuga

SEQ ID NO: 73791 - RNA, 1701 nt, Artificial Sequence
  derived and/or modified CDS sequence (opt1) from hemagglutinin__InfluenzaA__AGB08362
augaagaccaucaucgcccugagcuacaucuucugccucgcccugggccaggaccugcccgggaacgacaacuccaccgcgacgcucugccugggccaccacgccgugccgaacgggacccuggucaagaccaucaccgacgaccagaucgaggugacgaacgccaccgagcucgugcagagcuccagcaccggcaagaucugcaacaacccccaccgcauccuggacgggaucaacugcacccugaucgacgcccuccugggcgacccccacugcgacgucuuccaggacgagacgugggaccuguucguggagcgguccaaggccuucagcaacugcuaccccuacgacgugccggacuacgcgucccuccgcagccuggucgccuccagcggcacccuggaguucaucaccgagggguucaccuggacgggcgugacccagaacgggggcuccaacgccugcaagcgggggcccggcagcggcuucuucucccgccucaacuggcugaccaagagcggguccaccuaccccgugcugaacgucacgaugcccaacaacgacaacuucgacaagcucuacaucuggggcgugcaccacccgagcaccaaccaggagcagaccucccuguacgugcaggccagcgggcgggucaccguguccacgcgccggagccagcagaccaucauccccaacaucggcagccgccccugggugcggggccuguccagccgcaucuccaucuacuggaccaucgucaagcccggggacgugcucgugaucaacagcaacggcaaccugaucgcgccgcggggguacuucaagaugcgcaccggcaaguccagcaucaugcgguccgacgcccccaucgacacgugcaucagcgagugcaucacccccaacggguccauccccaacgacaagccguuccagaacgucaacaagaucaccuacggcgccugccccaaguacgugaagcagaacacccugaagcucgccacgggcaugcgcaacgugcccgagaagcagacccgggggcuguucggcgccaucgcgggguucaucgagaacggcugggaggggaugaucgacggcugguacggcuuccgccaccagaacagcgaggggaccggccaggccgccgaccugaaguccacccaggccgccaucgaccagaucaacgggaagcucaaccgggucaucgagaagacgaacgagaaguuccaccagaucgagaaggaguucagcgagguggagggccgcauccaggaccuggagaaguacguggaggacaccaagaucgaccugugguccuacaacgcggagcuccuggucgcccuggagaaccagcacaccaucgaccucaccgacagcgagaugaacaagcuguucgacaagacgcggcgccagcugcgggagaacgccgaggacauggggaacggcugcuucaagaucuaccacaagugcgacaacgccugcaucgaguccauccgcaacggcaccuacgaccacgacguguaccgcgacgaggcccucaacaaccgguuccagaucaagggggucgagcucaagagcggcuacaaggacuggauccuguggaucuccuucgcgaucagcugcuuccugcugugcguggugcugcucggguucaucaugugggccugccagcgcggcaacauccggugcaacaucugcaucuga

SEQ ID NO: 73792 - RNA, 1701 nt, Artificial Sequence; identical to SEQ ID NO: 70846
  derived and/or modified CDS sequence (opt1) from hemagglutinin__InfluenzaA__AGB12986

SEQ ID NO: 73793 - RNA, 1701 nt, Artificial Sequence; identical to SEQ ID NO: 71110
  derived and/or modified CDS sequence (opt1) from hemagglutinin__InfluenzaA__AGB13006

SEQ ID NO: 73794 - RNA, 1701 nt, Artificial Sequence
  derived and/or modified CDS sequence (opt1) from hemagglutinin__InfluenzaA__AGB13016
augaaggccauccuggugguccuccuguacaccaucgccaccgcgaacgccgacacgcugugcaucggcuaccacgccaacaacagcaccgacaccguggacaccgugcucgagaagaacgucacggugacccacuccgugaaccugcuggaggacaagcacaacgggaagcucugcaagcugcgcggcgucgcgccccugcaccucgggaagugcaacaucgccggcuggauccuggggaacccggagugcgagagccuguccaccgccagcuccuggagcuacaucguggagaccuccagcuccgacaacggcacgugcuaccccggcgacuucaucaacuacgaggagcuccgggagcagcugagcuccgugagcuccuucgagcgcuucgagaucuuccccaagaccagcuccuggcccaaccacgacagcaacaagggggucaccgccgccugcccgcacgccggcgcgaaguccuucuacaagaaccugaucuggcucgugaagaaggggaacagcuaccccaagcuguccaagagcuacaucaacgacaagggcaaggaggugcugguccucugggggauccaccaccccagcaccacggccgaccagcagucccuguaccagaacgccgacgccuacguguucgugggcaccagccgguacuccaagaaguucaagcccgagaucgccauccgcccgaagguccgggaccaggagggccgcaugaacuacuacuggacccugguggagcccggggacaagaucaccuucgaggcgaucggcaaccucguggucccccgguacgccuucgccauggagaagaacgccgggagcggcaucaucaucuccgacacgcccgugcacgacugcaacacgaccugccagaccccgaagggcgccaucaacaccagccugcccuuccagaacauccaccccaucaccaucgggaagugccccaaguacgugaaguccaccaagcugcgccucgcgaccggccugcggaacgucccgagcauccagucccgcgggcuguucggcgccaucgccggguucaucgagggcggcuggacggggaugguggacggcugguacggguaccaccaccagaacgagcagggcagcggguacgccgccgaccucaaguccacccagaacgcgaucgacaagaucaccaacaaggugaacagcgucaucgagaagaugaacacccaguucacggccgugggcaaggaguucaaccaccuggagaagcggaucgagaaccugaacaagaaggucgacgacggcuuccucgacaucuggaccuacaacgccgagcugcuggugcuccuggagaacgagcgcacccuggacuaccacgacuccaacgugaagaaccucuacgagaagguccggaaccagcugaagaacaacgccaaggagaucgggaacggcugcuucgaguucuaccacaagugcgacaacacgugcauggagagcgugaagaacgggaccuacgacuaccccaaguacuccgaggaggccaagcugaaccgcgaggagaucgacggcgugaagcucgagagcgcgcgggucuaccagauccuggccaucuacuccaccguggccagcucccuggugcucgucgugagccugggggccaucagcuucuggaugugcuccaacggcagccugcagugccgcaucugcaucuga

SEQ ID NO: 73795 - RNA, 1701 nt, Artificial Sequence; identical to SEQ ID NO: 70891
  derived and/or modified CDS sequence (opt1) from hemagglutinin__InfluenzaA__AGB13026

SEQ ID NO: 73796 - RNA, 1701 nt, Artificial Sequence; identical to SEQ ID NO: 70833
  derived and/or modified CDS sequence (opt1) from hemagglutinin__InfluenzaA__AGB13036

SEQ ID NO: 73797 - RNA, 1701 nt, Artificial Sequence
  derived and/or modified CDS sequence (opt1) from hemagglutinin__InfluenzaA__AGB13048
augaaggccauccuggugguccuccuguacaccuucgccaccgcgaacgccgacacgcugugcaucggcuaccacgccaacaacagcaccgacaccguggacaccgugcucgagaagaacgucacggugacccacuccgugaaccugcuggaggacaagcacaacgggaagcucugcaagcugcgcggcgucgcgccccugcaccucgggaagugcaacaucgccggcuggauccuggggaacccggagugcgagagccuguccaccgccagcuccuggagcuacaucguggagaccuccagcuccgacaacggcacgugcuaccccggcgacuucaucaacuacgaggagcuccgggagcagcugagcuccgugagcuccuucgagcgcuucgagaucuuccccaagaccagcuccuggcccaaccacgacagcaacaagggggucaccgccgccugcccgcacgccggcgcgaaguccuucuacaagaaccugaucuggcucgugaagaaggggaacagcuaccccaagcuguccaagagcuacaucaacgacaagggcaaggaggugcugguccucugggggauccaccaccccagcaccacggccgaccagcagucccuguaccagaacgccgacgccuacguguucgugggcaccagccgguacuccaagaaguucaagcccgagaucgccauccgcccgaagguccgggaccaggagggccgcaugaacuacuacuggacccugguggagcccggggacaagaucaccuucgaggcgacgggcaaccucguggucccccgguacgccuucgccauggagcgcaacgccgggagcggcaucaucaucuccgacacccccgugcacgacugcaacacgaccugccagaccccgaagggcgccaucaacaccagccugcccuuccagaacauccaccccaucaccaucgggaagugccccaaguacgugaaguccaccaagcugcggcucgcgacgggccugcgcaacgucccgagcauccagucccgggggcuguucggcgccaucgccggguucaucgagggcggcuggaccgggaugguggacggcugguacggguaccaccaccagaacgagcagggcagcggguacgccgccgaccucaaguccacccagaacgcgaucgacaagaucaccaacaaggugaacagcgucaucgagaagaugaacacgcaguucaccgccgugggcaaggaguucaaccaccuggagaagcgcaucgagaaccugaacaagaaggucgacgacggcuuccucgacaucuggaccuacaacgccgagcugcuggugcuccuggagaacgagcggacccuggacuaccacgacuccaacgugaagaaccucuacgagaagguccgcaaccagcugaagaacaacgccaaggagaucgggaacggcugcuucgaguucuaccacaagugcgacaacacgugcaucgagagcgugaagaacgggaccuacgacuaccccaaguacuccgaggaggccaagcugaaccgggaggagaucgacggcgugaagcucgagagcacccgcaucuaccagauccuggcgaucuacuccaccgucgccagcucccuggugcucguggucagccugggggccaucagcuucuggaugugcuccaacggcagccugcagugccggaucugcaucuga

SEQ ID NO: 73798 - RNA, 1701 nt, Artificial Sequence
  derived and/or modified CDS sequence (opt1) from hemagglutinin__InfluenzaA__AGB13066
augaaggccauccuggugguccuccuguacaccuucgccaccgcgaacgccgacacgcugugcaucggcuaccacgccaacaacagcaccgacaccguggacaccgugcucgagaagaacgucacggugacccacuccgugaaccugcuggaggacaagcacaacgggaagcucugcaagcugcgcggcgucgcgccccugcaccucgggaagugcaacaucgccggcuggauccuggggaacccggagugcgagagccuguccaccgccagcuccuggagcuacaucguggagaccuccagcuccgacaacggcacgugcuaccccggcgacuucaucgacuacgaggagcuccgggagcagcugagcuccgugagcuccuucgagcgcuucgagaucuuccccaagaccagcuccuggcccaaccacgacagcaacaagggggucaccgccgccugcccgcacgccggcgcgaaguccuucuacaagaaccugaucuggcucgugaagaaggggaacagcuaccccaagcuguccaagagcuacaucaacgacaagggcaaggaggugcugguccucugggggauccaccaccccagcaccuccgccgaccagcagagccuguaccagaacgccgacgccuacguguucgugggcacgucccgguacagcaagaaguucaagcccgagaucgccauccgcccgaagguccgggaccaggagggccgcaugaacuacuacuggacccugguggagcccggggacaagaucaccuucgaggcgaccggcaaccucguggucccccgguacgccuucgccauggagcgcaacgccggguccggcaucaucaucagcgacacgcccgugcacgacugcaacacgaccugccagaccccgaagggcgccaucaacaccucccugcccuuccagaacauccaccccaucaccaucgggaagugccccaaguacgugaagggcaccaagcugcggcucgcgaccgggcugcgcaacgucccgagcauccagucccggggccuguucggggccaucgccggcuucaucgagggcggguggacgggcaugguggacgggugguacggcuaccaccaccagaacgagcaggggagcggcuacgccgccgaccucaaguccacccagcacgcgaucgacgagaucaccaacaaggugaacagcgucaucgagaagaugaacacccaguucacggccgugggcaaggaguucaaccaccuggagaagcgcaucgagaaccugaacaagaaggucgacgacggguuccucgacaucuggaccuacaacgccgagcugcuggugcuccuggagaacgagcggacccuggacuaccacgacuccaacgugaagaaccucuacgagaagguccgcagccagcugaagaacaacgccaaggagaucggcaacgggugcuucgaguucuaccacaagugcgacaacacgugcauggaguccgugaagaacggcaccuacgacuaccccaaguacagcgaggaggccaagcugaaccgggaggagaucgacggggugaagcucgaguccacccgcaucuaccagauccuggcgaucuacagcaccgucgccuccagccuggugcucguggucagccugggcgccaucuccuucuggaugugcagcaacggcucccugcagugccggaucugcaucuga

SEQ ID NO: 73799 - RNA, 1701 nt, Artificial Sequence; identical to SEQ ID NO: 70933
  derived and/or modified CDS sequence (opt1) from hemagglutinin__InfluenzaA__AGB13082

SEQ ID NO: 73800 - RNA, 1701 nt, Artificial Sequence; identical to SEQ ID NO: 70833
  derived and/or modified CDS sequence (opt1) from hemagglutinin__InfluenzaA__AGB13105

SEQ ID NO: 73801 - RNA, 1701 nt, Artificial Sequence; identical to SEQ ID NO: 70891
  derived and/or modified CDS sequence (opt1) from hemagglutinin__InfluenzaA__AGB13125

SEQ ID NO: 73802 - RNA, 1701 nt, Artificial Sequence; identical to SEQ ID NO: 70891
  derived and/or modified CDS sequence (opt1) from hemagglutinin__InfluenzaA__AGB13130

SEQ ID NO: 73803 - RNA, 1701 nt, Artificial Sequence
  derived and/or modified CDS sequence (opt1) from hemagglutinin__InfluenzaA__AGB13140
augaaggccauccuggugguccuccuguacaccuucgccaccgcgaacgccgacacgcugugcaucggcuaccacgccaacaacagcaccgacaccguggacaccgugcucgagaagaacgucacggugacccacuccgugaaccugcuggaggacaagcacaacgggaagcucugcaagcugcgcggcgucgcgccccugcaccucgggaagugcaacaucgccggcuggauccuggggaacccggagugcgagagccuguccaccgcgagccucugguccuacaucguggagaccagcuccagcgacaacggcacgugcuaccccggcgacuucaucgacuacgaggagcugcgggagcagcuguccagcguguccagcuucgagcgcuucgagaucuuccccaagaccuccagcuggcccaaccacgacuccaacaagggggucaccgccgccugcccgcacgccggcgccaagagcuucuacaagaaccucaucuggcuggugaagaaggggaacuccuaccccaagcugagcaaguccuacaucaacgacaagggcaaggaggugcucguccugugggggauccaccaccccagcaccacggccgaccagcagagccuguaccagaacgccgacaccuacguguucgugggcaccucccgguacagcaagaaguucaagcccgagaucgccauccgcccgaagguccgggaccaggagggccgcaugaacuacuacuggacccucguggagcccggggacaagaucacguucgaggccaccggcaaccugguggucccccgguacgcguucgccauggagcgcaacgccggguccggcaucaucaucagcgacacccccgugcacgacugcaacaccacgugccagaccccgaagggcgccaucaacaccucccugcccuuccagaacauccaccccaucaccaucgggaagugccccaaguacgucaagagcacgaagcuccggcuggccaccggccugcgcaacgugccguccauccagagccgggggcuguucggcgcgaucgccggguucaucgagggcggcuggaccgggaugguggacggcugguacggguaccaccaccagaacgagcagggcuccggguacgccgccgaccucaagagcacccagaacgccaucgacaagaucacgaacaaggugaacuccgucaucgagaagaugaacacccaguucaccgcggugggcaaggaguucaaccaccuggagaagcgcaucgagaaccucaacaagaaggucgacgacggcuuccuggacaucuggaccuacaacgccgagcugcucgugcugcuggagaacgagcggacgcucgacuaccacgacagcaacgugaagaaccuguacgagaagguccgcaaccagcugaagaacaacgccaaggagaucgggaacggcugcuucgaguucuaccacaagugcgacaacacgugcauggaguccgugaagaacgggaccuacgacuaccccaaguacagcgaggaggccaagcucaaccgggaggagaucgacggcgugaagcuggaguccacccgcaucuaccagauccuggccaucuacagcaccgucgcguccagccucgugcugguggucucccugggggccaucagcuucuggaugugcagcaacggcucccuccagugccggaucugcaucuga

SEQ ID NO: 73804 - RNA, 1701 nt, Artificial Sequence
  derived and/or modified CDS sequence (opt1) from hemagglutinin__InfluenzaA__AGB13159
augaaggccauccugguggucaugcucuacaccuucgccaccgcgaacgccgacacgcugugcaucggcuaccacgccaacaacagcaccgacaccguggacaccgugcuggagaagaacgucacggugacccacuccgugaaccuccuggaggacaagcacaacgggaagcugugcaagcuccgcggcgucgccagccugcaccuggggaagugcaacaucgccggcuggauccucgggaaccccgagugcgagucccugagcaccgcguccagcugguccuacaucguggagaccagcuccagcgacaacggcacgugcuacccgggcgacuucaucgacuacgaggagcugcgggagcagcucuccagcguguccagcuucgagcgcuucgagaucuuccccaagaccuccagcuggcccaaccacgacuccaacaagggggucaccgccgccugcccccacgccggcgcgaagggguucuacaagaaccugaucuggcuggugaagaagggcaacagcuacccgaagcucuccaagagcuacaucaacgacaaggggaaggaggugcugguccuguggggcauccaccaccccagcaccacggccgaccagcagucccucuaccagaacgccgacaccuacguguucgugggcaccagccgguacuccaagaaguucaagcccgagaucgccauccgccccaagguccgggaccaggaggggcgcaugaacuacuacuggacccugguggagccgggcgacaagaucacguucgaggccaccgggaaccugguggucccccgguacgcguucgccauggagcgcaacgccggcagcggcaucaucaucuccgacacccccgugcacgacugcaacaccacgugccagacccccaagggggccaucaacaccagccucccguuccagaacauccaccccaucaccaucggcaagugccccaaguacgugaaguccacgaagcugcggcuggccaccgggcuccgcaacguccccagcauccagucccggggccuguucggggcgaucgccggcuucaucgagggcggguggaccggcaugguggacgggugguacggcuaccaccaccagaacgagcaggggagcggcuacgccgccgaccugaaguccacccagaacgccaucgacaagaucacgaacaaggugaacagcgucaucgagaagaugaacacccaguucaccgcggugggcaaggaguucaaccaccucgagaagcgcaucgagaaccugaacaagaaggucgacgacggguuccuggacaucuggaccuacaacgccgagcuccuggugcugcucgagaacgagcggacgcuggacuaccacgacuccaacgugaagaaccuguacgagaagguccgcaaccagcucaagaacaacgccaaggagaucggcaacgggugcuucgaguucuaccacaagugcgacaacacgugcauggagagcgugaagaacggcaccuacgacuacccgaaguacuccgaggaggccaagcugaaccgggaggagaucgacggggugaagcuggagagcacccgcaucuaccagauccucgccaucuacuccaccgucgcgagcucccuggugcugguggucagccucggcgccaucagcuucuggaugugcuccaacggcagccugcagugccggaucugcaucuga

SEQ ID NO: 73805 - RNA, 1701 nt, Artificial Sequence; identical to SEQ ID NO: 70848
  derived and/or modified CDS sequence (opt1) from hemagglutinin__InfluenzaA__AGB13170

SEQ ID NO: 73806 - RNA, 1701 nt, Artificial Sequence
  derived and/or modified CDS sequence (opt1) from hemagglutinin__InfluenzaA__AGB13180
augaaggccauccuggugguccuccuguacaccuucgccaccgcgaacgccgacacgcugugcaucggcuaccacgccaacaacagcaccgacaccguggacaccgugcucgagaagaacgucacggugacccacuccgugaaccugcuggaggacaagcacaacgggaagcucugcaagcugcgcggcgucgcgccccugcaccucgggaagugcaacaucgccggcuggauccuggggaacccggagugcgagagccuguccaccgccagcuccuggagcuacaucguggagaccuccagcuccgacaacggcacgugcuaccccggcgacuucaucaacuacgaggagcuccgggagcagcugagcuccgugagcuccuucgagcgcuucgagaucuuccccaagaccagcuccuggcccaaccacgacagcaacaagggggucaccgccgccugcccgcacgccggcgcgaaguccuucuacaagaaccugaucuggcucgugaagaaggggaacagcuaccccaagcuguccaagagcuacaucaacgacaagggcaaggaggugcugguccucugggggauccaccaccccagcaccacggccgaccagcagucccuguaccagaacgccgacgccuacguguucgugggcaccagccgguacuccaagaaguucaagcccgagaucgccauccgcccgaagguccgggaccaggagggccgcaugaacuacuacuggacccugguggagcccggggacaagaucaccuucgaggcgacgggcaaccucguggucccccgguacgccuucgccauggagcgcaacgccgggagcggcaucaucaucuccgacaccagcgugcacgacugcaacacgaccugccagacccccaagggcgccaucaacaccucccugccguuccagaacauccaccccaucaccaucgggaagugccccaaguacgucaagagcaccaagcugcggcucgcgacgggccugcgcaacgugcccuccauccagagccgggggcuguucggcgccaucgccggguucaucgagggcggcuggaccgggaugguggacggcugguacggguaccaccaccagaacgagcagggcuccggguacgccgccgaccucaagagcacccagaacgcgaucgacaagaucaccaacaaggugaacuccgucaucgagaagaugaacacgcaguucaccgccgugggcaaggaguucaaccaccuggagaagcgcaucgagaaccugaacaagaaggucgacgacggcuuccucgacaucuggaccuacaacgccgagcugcuggugcuccuggagaacgagcggacccuggacuaccacgacagcaacgugaagaaccucuacgagaagguccgcaaccagcugaagaacaacgccaaggagaucgggaacggcugcuucgaguucuaccacaagugcgacaacacgugcauggaguccgugaagaacgggaccuacgacuacccgaaguacagcgaggaggccaagcugaaccgggaggagaucgacggcgugaagcucgaguccacccgcaucuaccagauccuggcgaucuacagcaccgucgccuccagccuggugcucguggucagccugggggccaucuccuucuggaugugcagcaacggcucccugcagugccggaucugcaucuga

SEQ ID NO: 73807 - RNA, 1701 nt, Artificial Sequence; identical to SEQ ID NO: 70891
  derived and/or modified CDS sequence (opt1) from hemagglutinin__InfluenzaA__AGB13190

SEQ ID NO: 73808 - RNA, 1701 nt, Artificial Sequence
  derived and/or modified CDS sequence (opt1) from hemagglutinin__InfluenzaA__AGB13200
augaaggccauccuggugguccuccuguacaccuucgccaccgcgaacgccgacacgcugugcaucggcuaccacgccaacaacagcaccgacaccguggacaccgugcucgagaagaacgucacggugacccacuccgugaaccugcuggaggacaagcacaacgggaagcucugcaagcugcgcggcgucgcgccccugcaccucgggaagugcaacaucgccggcuggauccuggggaacccggagugcgagagccuguccaccgccagcuccuggagcuacaucguggagaccuccagcuccgacaacggcacgugcuaccccggcgacuucaucaacuacgaggagcuccgggagcagcugagcuccgugagcuccuucgagcgcuucgagaucuuccccaagaccagcuccuggcccaaccacgacagcaacaagggggucaccgccgccugcccgcacgccggcgugaaguccuucuacaagaaccugaucuggcucgugaagaaggggaacagcuaccccaagcuguccaagagcuacaucaacgacaagggcaaggagguccuggugcucugggggauccaccaccccagcaccacgaccgaccagcagucccuguaccagaacgcggacgccuacguguucgucggcaccagcaaguacuccaagaaguucaagcccgagaucgccauccggccgaaggugcgcgaccaggagggccggaugaacuacuacuggacccugguggagcccggggacaagaucacguucgaggccaccggcaaccucgucgugccccgcuacgccuucgcgauggagcggaacgccgggagcggcaucaucaucuccgacacccccgugcacgacugcaacaccacgugccagaccccgaagggcgccaucaacaccagccugcccuuccagaacauccaccccaucaccaucgggaagugccccaaguacgucaaguccacgaagcugcgccucgccaccggccugcggaacgugccgagcauccagucccgcgggcuguucggcgccaucgcgggguucaucgagggcggcuggaccgggaugguggacggcugguacggguaccaccaccagaacgagcagggcagcggguacgccgccgaccucaaguccacccagaacgccaucgacaagaucacgaacaaggucaacagcgugaucgagaagaugaacacccaguucaccgccgucggcaaggaguucaaccaccuggagaagcggaucgagaaccugaacaagaagguggacgacggcuuccucgacaucuggaccuacaacgcggagcugcuggugcuccuggagaacgagcgcacgcuggacuaccacgacuccaacgucaagaaccucuacgagaaggugcggaaccagcugaagaacaacgccaaggagaucgggaacggcugcuucgaguucuaccacaagugcgacaacacgugcauggagagcgugaagaacgggaccuacgacuaccccaaguacuccgaggaggccaagcugaaccgcgaggagaucgacggcgucaagcucgagagcacccggaucuaccagauccuggccaucuacuccaccguggccagcucccuggugcucgucgugagccugggggcgaucagcuucuggaugugcuccaacggcagccugcagugccgcaucugcaucuga

SEQ ID NO: 73809 - RNA, 1701 nt, Artificial Sequence
  derived and/or modified CDS sequence (opt1) from hemagglutinin__InfluenzaA__AGB13210
augaaggccacccuggugguccuccuguacaccuucgccacggcgaacgccgacacccugugcaucggcuaccacgccaacaacagcaccgacaccguggacacggugcucgagaagaacgucaccgugacccacuccgugaaccugcuggaggacaagcacaacgggaagcucugcaagcugcgcggcgucgcgccccugcaccucgggaagugcaacaucgccggcuggauccuggggaacccggagugcgagagccuguccaccgccagcuccuggagcuacaucguggagacguccagcuccgacaacgggaccugcuaccccggcgacuucaucaacuacgaggagcuccgggagcagcugagcuccgugagcuccuucgagcgcuucgagaucuuccccaagaccagcuccuggcccaaccacgacagcaacaagggggucaccgccgccugcccgcacgccggcgcgaaguccuucuacaagaaccugaucuggcucgugaagaaggggaacagcuaccccaagcuguccaagagcuacaucaacgacaagggcaaggaggugcugguccucugggggauccaccaccccagcacguccgccgaccagcagagccuguaccagaacgccgacgccuacguguucgugggcaccuccaaguacagcaagaaguucaagcccgagaucgccguccggccgaaggugcgcgaccaggagggccggaugaacuacuacuggacccugguggagcccggggacaagaucaccuucgaggcgacgggcaaccuccuggucccccgcuacgccuucgccauggagcggaacgccggguccggcaucaucaucagcgacacccccgugcacgacugcaacacgaccugccagaccccgaagggcgccaucaacaccucccugcccuuccagaacauccaccccaucaccaucgggaagugccccaaguacgucaagagcaccaagcuccgccuggcgacgggccugcggaacgugccguccauccagagccgcggccucuucggcgccaucgccggguucaucgagggcggcuggaccgggaugguggacggcugguacggguaccaccaccagaacgagcagggcuccggguacgccgccgaccucaagagcacccagaacgcgaucgacaagaucaccaacaaggugaacuccgucaucgagaagaugaacacgcaguucaccgccgugggcaaggaguucaaccaccuggagaagcggaucgagaaccugaacaagaaggucgacgacggcuuccuggacaucuggaccuacaacgccgagcugcucgugcugcuggagaacgagcgcacccucgacuaccacgacagcaacgugaagaaccuguacgagaagguccggucccagcugaagaacaacgccaaggagaucgggaacggcugcuucgaguucuaccacaagugcgacaacacgugcauggagagcgugaagaacgggaccuacgacuaccccaaguacuccgaggaggccaagcucaaccgcgaggagaucgacggcgugaagcuggagagcacccggaucuaccagauccuggcgaucuacuccaccgucgccagcagccucgugcugguggucucccugggggccaucagcuucuggaugugcuccaacggcagccuccagugccgcaucugcaucuga

SEQ ID NO: 73810 - RNA, 1701 nt, Artificial Sequence
  derived and/or modified CDS sequence (opt1) from hemagglutinin__InfluenzaA__AGB13220
augaaggccauccuggugguccuccuguacaccuucgccaccgcgaacgccgacacgcugugcaucggcuaccacgccaacaacagcaccgacaccguggacaccgugcucgagaagaacgucacggugacccacuccgugaaccugcuggaggacaagcacaacgggaagcucugcaagcugcgcggcgucgcgccccugcaccucgggaagugcaacaucgccggcuggauccuggggaacccggagugcgagagccuguccaccgcgagcuccuggagcuacaucguggagaccuccaucagcgacaacggcacgugcuaccccggcgacuucaucaacuacgaggagcuccgggagcagcuguccagcguguccagcuucgagcgcuucgagaucuuccccaagaccuccagcuggcccaaccacgacuccaacaagggggucaccgccgccugcccgcacgccggcgccaagagcuucuacaagaaccugaucuggcucgugaagaaggggaacuccuaccccaagcugagcaaguccuacaucaacgacaagggcaaggaggugcugguccucugggggauccaccaccccagcaccacggccgaccagcagagccuguaccagaacgccgacgccuacguguucgugggcaccuccaaguacagcaagaaguucaagcccgagaucgccauccggccgaagguccgcgaccaggagggccggaugaacuacuacuggacccugguggagcccggggacaagaucaccuucgaggcgacgggcaaccucguggucccccgcuacgccuucgccauggagcggaacgccggguccggcaucaucaucagcgacacccccgugcacgacugcaacacgaccugccagaccccgaagggcgccaucaacaccucccugcccuuccagaacauccaccccaucaccaucgggaagugccccaaguacgucaagagcaccaagcugcgccucgcgacgggccugcggaacgugccguccauccagagccgcgggcuguucggcgccaucgccggguucaucgagggcggcuggaccgggaugguggacggcugguacggguaccaccaccagaacgagcagggcuccggguacgccgccgaccucaagagcacccagaacgcgaucgacaagaucaccaacaaggugaacuccgucaucgagaagaugaacacgcaguucaccgccgugggcaaggaguucaaccaccuggagaagcggaucgagaaccugaacaagaaggucgacgacggcuuccucgacaucuggaccuacaacgccgagcugcuggugcuccuggagaacgagcgcacccuggacuaccacgacagcaacgugaagaaccucuacgagaagguccggaaccagcugaagaacaacgccaaggagaucgggaacggcugcuucgaguucuaccacaagugcgacaacacgugcauggaguccgugaagaacgggaccuacgacuaccccaaguacagcgaggaggccaagcugaaccgcgaggagaucgacggcgugaagcucgaguccacccggaucuaccagauccuggcgaucuacagcaccgucgccuccagccuggugcucguggucucccugggggccaucagcuucuggaugugcagcaacggcucccugcagugccgcaucugcaucuga

SEQ ID NO: 73811 - RNA, 1701 nt, Artificial Sequence
  derived and/or modified CDS sequence (opt1) from hemagglutinin__InfluenzaA__AGB13230
augaaggccauccuggugguccuccuguacaccuucgccaccgcgaacgccgacacgcugugcaucggcuaccacgccaacaacagcaccgacaccguggacaccgugcucgagaagaacgucacggugacccacuccgugaaccugcuggaggacaaccacaacgggaagcucugcaagcugcgcggcgucgcgccccugcaccucgggaagugcaacaucgccggcuggauccuggggaacccggagugcgagagccuguccaccgccagcuccuggagcuacaucguggagaccuccagcuccgacaacggcacgugcuaccccggcgacuucaucaacuacgaggagcuccgggagcagcugagcuccgugagcuccuucgagcgcuucgagaucuuccccaagaccagcuccuggcccaaccacgacagcaacaagggggucaccgccgccugcccgcacgccggcgcgaaguccuucuacaagaaccugaucuggcucgugaagaaggggaacagcuaccccaagcuguccaagagcuacaucaacgacaagggcaaggaggugcugguccucugggggauccaccaccccagcaccacggccgaccagcagucccuguaccagaacgccgacgccuacguguucgugggcaccagccgguacuccaagaaguucaagcccgagaucgccauccgcccgaagguccgggaccaggagggccgcaugaacuacuacuggacccugguggagcccggggacaagaucaccuucgaggcgacgggcaaccucguggucccccgguacgccuucgccauggagcgcaacgccgggagcggcaucaucaucuccgacacccccgugcacgacugcaacacgaccugccagaccccgaagggcgccaucaacaccagccugcccuuccagaacauccaccccaucaccaucgggaagugccccaaguacgugaaguccaccaagcugcggcucgcgacgggccugcgcaacgucccgagcauccagucccgggggcuguucggcgccaucgccggguucaucgagggcggcuggaccgggaugguggacggcugguacggguaccaccaccagaacgagcagggcagcggguacgccgccgaccucaaguccacccagaacgcgaucgacaagaucaccaacaaggugaacagcgucaucgagaagaugaacacgcaguucaccgccgugggcaaggaguucaaccgccuggagaagcggaucgagaaccugaacaagaaggucgacgacggcuuccucgacaucuggaccuacaacgccgagcugcuggugcuccuggagaacgagcgcacccuggacuaccacgacuccaacgugaagaaccucuacgagaagguccggaaccagcugaagaacaacgccaaggagaucgggaacggcugcuucgaguucuaccacaagugcgacaacacgugcauggagagcgugaagaacgggaccuacgacuaccccaaguacuccgaggaggccaagcugaaccgcgaggagaucgacggcgugaagcucgagagcacccggaucuaccagauccuggcgaucuacuccaccgucgccagcucccuggugcucguggucagccugggggccaucagcuucuggaugugcuccaacggcagccugcagugccgcaucugcaucuga

SEQ ID NO: 73812 - RNA, 1701 nt, Artificial Sequence; identical to SEQ ID NO: 70891
  derived and/or modified CDS sequence (opt1) from hemagglutinin__InfluenzaA__AGB13240

SEQ ID NO: 73813 - RNA, 1701 nt, Artificial Sequence; identical to SEQ ID NO: 70891
  derived and/or modified CDS sequence (opt1) from hemagglutinin__InfluenzaA__AGB13250

SEQ ID NO: 73814 - RNA, 1701 nt, Artificial Sequence
  derived and/or modified CDS sequence (opt1) from hemagglutinin__InfluenzaA__AGB13260
augaaggccauccuggugguccuccuguacaccuucgccaccgcgaacgccgacacgcugugcaucggcuaccacgccaacaacagcaccgacaccguggacaccgugcucgagaagaacgucacggugacccacuccgugaaccugcuggaggacaagcacaacgggaagcucugcaagcugcgcggcgucgcgccccugcaccucgggaagugcaacaucgccggcuggauccuggggaacccggagugcgagagccuguccaccgccagcuccuggagcuacaucguggagaccuccagcuccgacaacggcacgugcuaccccggcgacuucaucgacuacgaggagcuccgggagcagcugagcuccgugagcuccuucgagcgcuucgagaucuuccccaagaccagcuccuggcccaaccacgacagcaacaagggggucaccaccgccugcccgcacgccggcuccaagagcuucuacaagaaccugaucuggcucgugaagaaggggaacuccuaccccaagcugagcaagagcuacaucaacgacaagggcaaggaggugcugguccucugggggauccaccacccgcccacguccgccgaccagcagagccuguaccagaacgcggacgccuacguguucgugggcaccucccgguacagcaagaaguucaagcccgagaucgccauccgccccaagguccgggaccaggagggccgcaugaacuacuacuggacccugguggagcccggggacaagaucaccuucgaggccacgggcaaccucguggucccccgguacgccuucgcgauggagcgcaacgccggguccggcaucaucaucagcgacaccccggugcacgacugcaacacgaccugccagacccccaagggcgccaucaacaccucccugcccuuccagaacgugcaccccaucaccaucgggaagugcccgaaguacgucaagagcaccaagcugcggcucgccacgggccugcgcaacgugcccuccauccagagccgggggcuguucggcgccaucgcgggguucaucgagggcggcuggaccgggaugguggacggcugguacggguaccaccaccagaacgagcagggcuccggguacgccgccgaccucaagagcacccagaacgccaucgacgagaucaccaacaaggucaacuccgugaucgagaagaugaacacgcaguucaccgccgucggcaaggaguucaaccaccuggagaagcgcaucgagaaccugaacaagaagguggacgacggcuuccucgacaucuggaccuacaacgcggagcugcuggugcuccuggagaacgagcggacccuggacuaccacgacagcaacgucaagaaccucuacgagaaggugcgcucccagcugaagaacaacgccaaggagaucgggaacggcugcuucgaguucuaccacaagugcgacaacacgugcauggagagcaucaagaacgggaccuacgacuaccccaaguacuccgaggaggccaagcugaaccgggaggagaucgacggcgugaagcucgagagcacccgcaucuaccagauccuggccaucuacuccaccgucgccagcagccuggugcucguggucucccugggggcgaucagcuucuggaugugcuccaacggcagccugcagugccggaucugcaucuga

SEQ ID NO: 73815 - RNA, 1701 nt, Artificial Sequence
  derived and/or modified CDS sequence (opt1) from hemagglutinin__InfluenzaA__AGB13270
augaaggccauccuggugguccuccuguacaccuucgccaccgcgaacgccgacacgcugugcaucggcuaccacgccaacaacagcaccgacaccguggacaccgugcucgagaagaacgucacggugacccacuccgugaaccugcuggaggacaagcacaacgggaagcucugcaagcugcgcggcgucgcgccccugcaccucgggaagugcaacaucgccggcuggauccuggggaacccggagugcgagagccuguccaccgccagcuccuggagcuacaucguggagaccuccagcuccgacaacggcacgugcuaccccggcgacuucaucaacuacgaggagcuccgggagcagcugagcuccgugagcuccuucgagcgcuucgagaucuuccccaagaccagcuccuggcccaaccacgacagcaacaagggggucaccgccgccugcccgcacgccggcgcgaaguccuucuacaagaaccugaucuggcucgugaagaaggggaacagcuaccccaagcuguccaagagcuacaucaacgacaagggcaaggaggugcugguccucugggggauccaccaccccagcaccuccgccgaccagcagagccuguaccagaacgccgacgccuacguguucgugggcacguccaaguacagcaagaaguucaagcccgagaucgccguccggccgaaggugcgcgaccaggagggccggaugaacuacuacuggacccugguggagcccggggacaagaucaccuucgaggcgaccggcaaccuccuggucccccgcuacgccuucgccauggagcggaacgccggguccggcaucaucaucagcgacacgcccgugcacgacugcaacacgaccugccagaccccgaagggcgccaucaacaccucccugcccuuccagaacauccaccccaucaccaucgggaagugccccaaguacgucaagagcaccaagcuccgccuggcgaccggccugcggaacgugccguccauccagagccgcgggcuguucggcgccaucgccggguucaucgagggcggcuggacggggaugguggacggcugguacggguaccaccaccagaacgagcagggcuccggguacgccgccgaccucaagagcacccagaacgcgaucgacaagaucaccaacaaggugaacuccgucaucgagaagaugaacacccaguucacggccgugggcaaggaguucaaccaccuggagaagcggaucgagaaccucaacaagaaggucgacgacggcuuccuggacaucuggaccuacaacgccgagcugcucgugcugcuggagaacgagcgcacccucgacuaccacgacagcaacgugaagaaccuguacgagaagguccggucccagcugaagaacaacgccaaggagaucgggaacggcugcuucgaguucuaccacaagugcgacaacacgugcauggagagcgugaagaacgggaccuacgacuaccccaaguacuccgaggaggccaagcucaaccgcgagaagaucgacggcgugaagcuggagagcacccggaucuaccagauccuggcgaucuacuccaccgucgccagcagccucgugcugguggucucccugggggccaucagcuucuggaugugcuccaacggcagccuccagugccgcaucugcaucuga

SEQ ID NO: 73816 - RNA, 1701 nt, Artificial Sequence
  derived and/or modified CDS sequence (opt1) from hemagglutinin__InfluenzaA__AGB13280
augaaggccauccuggugguccuccuguacaccuucgccaccgcgaacgccgacacgcugugcaucggcuaccacgccaacaacagcaccgacaccguggacaccgugcucgagaagaacgucacggugacccacuccgugaaccugcuggaggacaagcacaacgggaagcucugcaagcugcgcggcgucgcgccccugcaccucgggaagugcaacaucgccggcuggauccuggggaacccggagugcgagagccuguccaccgccagcuccuggagcuacaucguggagaccuccagcuccgacaacggcacgugcuaccccggcgacuucaucaacuacgaggagcuccgggagcagcugagcuccgugagcuccuucgagcgcuucgagaucuuccccaagaccagcuccuggcccaaccacgacagcaacaagggggucaccgccgccugcccgcacgccggcgcgaaguccuucuacaagaaccugaucuggcucgugaagaaggggaacagcuaccccaagcuguccaagagcuacaucaacgacaagggcaaggaggugcugguccucugggggauccaccaccccagcaccaacgccgaccagcagucccuguaccagaacgccgacgccuacguguucgugggcacgagcaaguacuccaagaaguucaagcccgagaucgccguccggccgaaggugcgcgaccaggagggccggaugaacuacuacuggacccugguggagcccggggacaagaucaccuucgaggcgaccggcaaccuccuggucccccgcuacgccuucgccauggagcggaacgccgggagcggcaucaucaucuccgacacgcccgugcacgacugcaacacgaccugccagaccccgaagggcgccaucaacaccagccugcccuuccagaacauccaccccaucaccaucgggaagugccccaaguacgugaaguccaccaagcuccgccuggcgaccggccugcggaacgucccgagcauccagucccgcggccucuucggggccaucgccggguucaucgagggcggcuggacggggaugguggacggcugguacggguaccaccaccagaacggccaggggagcggcuacgccgccgaccugaaguccacccagaacgcgaucgacaagaucaccaacaaggugaacagcgucaucgagaagaugaacacccaguucacggccgugggcaaggaguucaaccaccuggagaagcggaucgagaaccucaacaagaaggucgacgacggguuccuggacaucuggaccuacaacgccgagcugcucgugcugcuggagaacgagcgcacccucgacuaccacgacuccaacgugaagaaccuguacgagaagguccggagccagcugaagaacaacgccaaggagaucggcaacgggugcuucgaguucuaccacaagugcgacaacacgugcauggaguccgugaagaacggcaccuacgacuaccccaaguacagcgaggaggccaagcucaaccgcgaggagaucgacggggugaagcuggaguccacccggaucuaccagauccuggcgaucuacagcaccgucgccuccagccucgugcugguggucagccugggcgccaucuccuucuggaugugcagcaacggcucccuccagugccgcaucugcaucuga

SEQ ID NO: 73817 - RNA, 1701 nt, Artificial Sequence
  derived and/or modified CDS sequence (opt1) from hemagglutinin__InfluenzaA__AGB13290
augaaggccauccuggugguccuccuguacaccuucgccaccgcgaacgccgacacgcugugcaucggcuaccacgccaacaacagcaccgacaccguggacaccgugcucgagaagaacgucacggugacccacuccgugaaccugcuggaggucaagcacaacgggaagcucugcaagcugcgcggcguggcgccccugcaccucgggaagugcaacaucgccggcuggauccuggggaacccggagugcgagagccuguccaccgccagcuccuggagcuacaucguggagaccuccagcuccgacaacggcacgugcuaccccggcgacuucaucaacuacgaggagcuccgggagcagcugagcuccgucagcuccuucgagcgcuucgagaucuuccccaagaccagcuccuggcccaaccacgacagcaacaagggggugaccgccgccugcccgcacgccggcgcgaaguccuucuacaagaaccugaucuggcucgugaagaaggggaacagcuaccccaagcuguccaagagcuacaucaacgacaagggcaaggagguccuggugcucugggggauccaccaccccagcaccacggccgaccagcagucccuguaccagaacgccgacgccuacguguucgucggcaccagccgguacuccaagaaguucaagcccgagaucgccauccgcccgaaggugcgggaccaggagggccgcaugaacuacuacuggacccugguggagcccggggacaagaucaccuucgaggcgacgggcaaccucgucgugccccgguacgccuucgccauggagcgcaacgccgggagcggcaucaucaucuccgacacccccgugcacgacugcaacacgaccugccagaccccgaagggcgccaucaacaccagccugcccuuccagaacauccaccccaucaccaucgggaagugccccaaguacgucaaguccaccaagcugcggcucgcgacgggccugcgcaacgugccgagcauccagucccgggggcuguucggcgccaucgccggguucaucgagggcggcuggaccgggaugguggacggcugguacggguaccaccaccagaacgagcagggcagcggguacgccgccgaccucaaguccacccagaacgcgaucgacaagaucaccaacaaggucaacagcgugaucgagaagaugaacacgcaguucaccgccgucggcaaggaguucaaccaccuggagaagcgcaucgagaaccugaacaagaagguggacgacggcuuccucgacaucuggaccuacaacgccgagcugcuggugcuccuggagaacgagcggacccuggacuaccacgacuccaacgucaagaaccucuacgagaaggugcgcaaccagcugaagaacaacgccaaggagaucgggaacggcugcuucgaguucuaccacaagugcgacaacacgugcauggagagcgugaagaacgggaccuacgacuaccccaaguacuccgaggaggccaagcugaaccgggaggagaucgacggcgucaagcucgagagcacccgcaucuaccagauccuggcgaucuacuccaccguggccagcucccuggugcucgucgugagccugggggccaucagcuucuggaugugcuccaacggcagccugcagugccggaucugcaucuga

SEQ ID NO: 73818 - RNA, 1701 nt, Artificial Sequence; identical to SEQ ID NO: 70891
  derived and/or modified CDS sequence (opt1) from hemagglutinin__InfluenzaA__AGB13300

SEQ ID NO: 73819 - RNA, 1701 nt, Artificial Sequence
  derived and/or modified CDS sequence (opt1) from hemagglutinin__InfluenzaA__AGB13310
augaaggccauccuggugguccuccuguacaccuucgccaccgcgaacgccgacacgcugugcaucggcuaccacgccaacaacagcaccgacaccguggacaccgugcucgagaagaacgucacggugacccacuccgugaaccugcuggaggacaagcacaacgggaagcucugcaagcugcgcggcgucgcgccccugcaccucgggaagugcaacaucgccggcuggauccuggggaacccggagugcgagagccuguccaccgccagcuccuggagcuacaucguggagaccuccagcuccgacaacggcacgugcuaccccggcgacuucaucgacuacgaggagcuccgggagcagcugagcuccgugagcuccuucgagcgcuucgagaucuuccccaagaccagcuccuggcccaaccacgacagcaacaagggggucaccgccgccugcccgcacgccggcgcgaaguccuucuacaagaaccugaucuggcucgugaagaaggggaacagcuaccccaagcuguccaagagcuacaucaacgacaagggcaaggaggugcugguccucuggggcgugcaccaccccagcaccuccgccgaccagcagagccuguaccagaacgccgacgccuacguguucgucgggacgucccgguacagcaagaaguucaagcccgagaucgccauccgcccgaaggugcgggaccaggagggccgcaugaacuacuacuggacccugguggagcccggggacaagaucaccuucgaggcgaccggcaaccucgucgugccccgguacgccuucgccauggagcgcaacgccggguccggcaucaucaucagcgacacgcccgugcacgacugcaacacgaccugccagaccccgaagggcgccaucaacaccucccugcccuuccagaacauccaccccaucaccaucgggaagugccccaaguacgucaagagcaccaagcugcggcucgcgaccggccugcgcaacgugccguccauccagagccgggggcuguucggcgccaucgccggguucaucgagggcggcuggacggggaugguggacggcugguacggguaccaccaccagaacgagcagggcuccggguacgccgccgaccucaagagcacccagcacgcgaucgacgagaucaccaacaaggucaacuccgugaucgagaagaugaacacccaguucacggccgucggcaaggaguucaaccaccuggagaagcgcaucgagaaccugaacaagaagguggacgacggcuuccucgacaucuggaccuacaacgccgagcugcuggugcuccuggagaacgagcggacccuggacuaccacgacagcaacgucaagaaccucuacgagaaggugcgcucccagcugaagaacaacgccaaggagaucgggaacggcugcuucgaguucuaccacaagugcgacaacacgugcauggagagcgugaagaacgggaccuacgacuaccccaaguacuccgaggaggccaagcugaaccgggaggagaucgacggcgucaagcucgagagcacccgcaucuaccagauccuggcgaucuacuccaccguggccagcagccuggugcucgucgugucccugggggccaucagcuucuggaugugcuccaacggcagccugcagugccggaucugcaucuga

SEQ ID NO: 73820 - RNA, 1701 nt, Artificial Sequence
  derived and/or modified CDS sequence (opt1) from hemagglutinin__InfluenzaA__AGB13320
augaaggccauccuggugguccuccuguacaccaucgccaccgcgaacgccgacacgcugugcaucggcuaccacgccaacaacagcaccgacaccguggacaccgugcucgagaagaacgucacggugacccacuccgugaaccugcuggaggacaagcacaacgggaagcucugcaagcugcgcggcgucgcgccccugcaccucgggaagugcaacaucgccggcuggauccuggggaacccggagugcgagagccuguccaccgccagcuccuggagcuacaucguggagaccuccagcuccgacaacggcacgugcuaccccggcgacuucaucaacuacgaggagcuccgggagcagcugagcuccgugagcuccuucgagcgcuucgagaucuuccccaagaccagcuccuggcccaaccacgacagcaacaagggggucaccgccgccugcccgcacgccggcgcgaaguccuucuacaagaaccugaucuggcucgugaagaaggggaacagcuaccccaagcuguccaagagcuacaucaacgacaagggcaaggaggugcugguccucugggggauccaccaccccagcaccacggccgaccagcagucccuguaccagaacgccgacgccuacguguucgugggcaccagccgguacuccaagaaguucaagcccgagaucgccauccgcccgaagguccgggaccaggagggccgcaugaacuacuacuggacccugguggagcccggggacaagaucaccuucgaggcgacgggcaaccucguggucccccgguacgccuucgccauggagaagaacgccgggagcggcaucaucaucuccgacacccccgugcacgacugcaacacgaccugccagaccccgaagggcgccaucaacaccagccugcccuuccagaacauccaccccaucaccaucgggaagugccccaaguacgugaaguccaccaagcugcgccucgcgacgggccugcggaacgucccgagcauccagucccgcgggcuguucggcgccaucgccggguucaucgagggcggcuggaccgggaugguggacggcugguacggguaccaccaccagaacgagcagggcagcggguacgccgccgaccucaaguccacccagaacgcgaucgacaagaucaccaacaaggugaacagcgucaucgagaagaugaacacgcaguucaccgccgugggcaaggaguucaaccaccuggagaagcggaucgagaaccugaacaagaaggucgacgacggcuuccucgacaucuggaccuacaacgccgagcugcuggugcuccuggagaacgagcgcacccuggacuaccacgacuccaacgugaagaaccucuacgagaagguccggaaccagcugaagaacaacgccaaggagaucgggaacggcugcuucgaguucuaccacaagugcgacaacacgugcauggagagcgugaagaacgggaccuacgacuaccccaaguacuccgaggaggccaagcugaaccgcgaggagaucgacggcgugaagcucgagagcgcgcgggucuaccagauccuggccaucuacuccaccguggccagcucccuggugcucgucgugagccugggggccaucagcuucuggaugugcuccaacggcagccugcagugccgcaucugcaucuga

SEQ ID NO: 73821 - RNA, 1701 nt, Artificial Sequence
  derived and/or modified CDS sequence (opt1) from hemagglutinin__InfluenzaA__AGB13330
augaaggccauccugguggucaugcucuacaccuucgccaccgcgaacgccgacacgcugugcaucggcuaccacgccaacaacagcaccgacaccguggacaccgugcuggagaagaacgucacggugacccacuccgugaaccuccuggaggacaagcacaacgggaagcugugcaagcuccgcggcgucgcgccccugcaccuggggaagugcaacaucgccggcuggauccucgggaacccggagugcgagagccuguccaccgccagcuccuggagcuacaucguggagaccuccagcuccgacaacggcacgugcuaccccggcgacuucaucgacuacgaggagcugcgggagcagcucagcuccgugagcuccuucgagcgcuucgagaucuuccccaagaccagcuccuggcccaaccacgacagcaacaagggggucaccgccgccugcccgcacgccggcgcgaagggguucuacaagaaccugaucuggcuggugaagaagggcaacuccuaccccaagcucagcaaguccuacagcaacgacaaggggaaggaggugcugguccuguggggcauccaccaccccagcaccacggccgaccagcagucccucuaccagaacgccgacaccuacguguucgugggcaccagccgguacuccaagaaguucaagcccgagaucgccauccgcccgaagguccgggaccaggaggggcgcaugaacuacuacuggacccugguggagcccggcgacaagaucacguucgaggccaccgggaaccugguggucccccgguacgcguucgccauggagcgcaacgccggcagcggcaucaucaucuccgacacccccgugcacgacugcaacaccacgugccagaccccgaagggggccaucaacaccagccuccccuuccagaacauccaccccaucaccaucggcaagugccccaaguacgugaaguccacgaagcugcggcuggccaccgggcuccgcaacgucccgagcauccagucccggggccuguucggggcgaucgccggcuucaucgagggcggguggaccggcaugguggacgggugguacggcuaccaccaccagaacgagcaggggagcggcuacgccgccgaccugaaguccacccagaacgccaucgacaagaucacgaacaaggugaacagcgucaucgagaagaugaacacccaguucaccgcggugggcaaggaguucaaccaccucgagaagcgcaucgagaaccugaacaagaaggucgacgacggguuccuggacaucuggaccuacaacgccgagcuccuggugcugcucgagaacgagcggacgcuggacuaccacgacuccaacgugaagaaccuguacgagaagguccgcaaccagcucaagaacaacgccaaggagaucggcaacgggugcuucgaguucuaccacaagugcgacaacacgugcauggagagcgugaagaacggcaccuacgacuaccccaaguacuccgaggaggccaagcugaaccgggaggagaucgacggggugaagcuggagagcacccgcaucuaccagauccucgccaucuacuccaccgucgcgagcucccuggugcugguggucagccucggcgccaucagcuucuggaugugcuccaacggcagccugcagugccggaucugcaucuga

SEQ ID NO: 73822 - RNA, 1701 nt, Artificial Sequence; identical to SEQ ID NO: 70891
  derived and/or modified CDS sequence (opt1) from hemagglutinin__InfluenzaA__AGB13340

SEQ ID NO: 73823 - RNA, 1701 nt, Artificial Sequence
  derived and/or modified CDS sequence (opt1) from hemagglutinin__InfluenzaA__AGB13350
augaaggccauccuggugguccuccuguacaccuucgccaccgcgaacgccgacacgcugugcaucggcuaccacgccaacaacagcaccgagaccguggacaccgugcucgagaagaacgucacggugacccacuccgugaaccugcuggaggacaagcacaacgggaagcucugcaagcugcgcggcgucgcgccccugcaccucgggaagugcaacaucgccggcuggauccuggggaacccggagugcgagagccuguccaccgccagcuccuggagcuacaucguggagaccuccagcuccgacaacggcacgugcuaccccggcgacuucaucaacuacgaggagcuccgggagcagcugagcuccgugagcuccuucgagcgcuucgagaucuuccccaagaccagcuccuggcccaaccacgacagcaacaagggggucaccgccgccugcccgcaggccggcgcgaaguccuucuacaagaaccugaucuggcucgugaagaaggggaacagcuaccccaagcuguccaagagcuacaucaacgacaagggcaaggaggugcugguccucugggggauccaccaccccagcaccuccgccgaccagcagagccuguaccagaacgccgacgccuacguguucgugggcacguccaaguacagcaagaaguucaagcccgagaucgccguccggccgaaggugcgcgaccaggagggccggaugaacuacuacuggacccugguggagcccggggacaagaucaccuucgaggcgaccggcaaccuccuggucccccgcuacgccuucgccauggagcggaacgccggguccggcaucaucaucagcgacacgcccgugcacgacugcaacacgaccugccagaccccgaagggcgccaucaacaccucccugcccuuccagaacauccaccccaucaccaucgggaagugccccaaguacgucaagagcaccaagcuccgccuggcgaccggccugcggaacgugccguccauccagagccgcgggcuguucggcgccaucgccggguucaucgagggcggcuggacggggaugguggacggcugguacggguaccaccaccagaacgcccagggcuccggguacgccgcggaccucaagagcacccagaacgccaucgacaagaucaccaacaaggugaacuccgucaucgagaagaugaacacccaguucacggccgugggcaaggaguucaaccaccuggagaagcggaucgagaaccucaacaagaaggucgacgacggcuuccuggacaucuggaccuacaacgccgagcugcucgugcugcuggagaacgagcgcacccucgacuaccacgacagcaacgugaagaaccuguacgagaagguccggucccagcugaagaacaacgccaaggagaucgggaacggcugcuucgaguucuaccacaagugcgacaacacgugcauggagagcgugaagaacgggaccuacgacuaccccaaguacuccgaggaggcgaagcucaaccgcgaggagaucgacggcgugaagcuggagagcacccggaucuaccagauccuggccaucuacuccaccgucgccagcagccucgugcugguggucucccugggggccaucagcuucuggaugugcuccaacggcagccuccagugccgcaucugcaucuga

SEQ ID NO: 73824 - RNA, 1701 nt, Artificial Sequence
  derived and/or modified CDS sequence (opt1) from hemagglutinin__InfluenzaA__AGB13360
augaaggccauccuggugguccuccuguacaccuucgccaccgcgaacgccgacacgcugugcaucggcuaccacgccaacaacagcaccgacaccguggacaccgugcucgagaagaacgucacggugacccacuccgugaaccugcuggaggacaagcacaacgggaagcucugcaagcugcgcggcgucgcgccccugcaccucgggaagugcaacaucgccggcuggauccuggggaacccggagugcgagagccuguccaccgccagcuccuggagcuacaucguggagaccuccagcuccgacaacggcacgugcuaccccggcgacuucaucaacuacgaggagcuccgggagcagcugagcuccgugagcuccuucgagcgcuucgagaucuuccccaagaccagcuccuggcccaaccacgacagcaacaagggggucaccgccgccugcccgcacgccggcgcgaaguccuucuacaagaaccugaucuggcucgugaagaaggggaacagcuaccccaagcuguccaagagcuacaucaacgacaagggcaaggaggugcugguccucugggggauccaccaccccagcaccuccgccgaccagcagagccuguaccagaacgccgacgccuacguguucgugggcacguccaaguacagcaagaaguucaagcccgagaucgccguccggccgaaggugcgcgaccaggagggccggaugaacuacuacuggacccugguggagcccggggacaagaucaccuucgaggcgaccggcaaccuccuggucccccgcuacgccuucgccauggagcggaacgccggguccggcaucaucaucagcgacacgcccgugcacgacugcaacacgaccugccagaccccgaagggcgccaucaacaccucccugcccuuccagaacauccaccccaucaccaucgggaagugccccaaguacgucaagagcaccaagcuccgccuggcgaccggccugcggaacgugccguccauccagagccgcgggcuguucggcgccaucgccggguucaucgagggcggcuggacggggaugguggacggcugguacggguaccaccaccagaacgagcagggcuccggguacgccgccgaccucaagagcacccagaacgcgaucgacaagaucaccaacaaggugaacuccgucaucgagaagaugaacacccaguucacggccgugggcaaggaguucaaccaccuggagaagcggaucgagaaccucaacaagaaggucgacgacggcuuccuggacaucuggaccuacaacgccgagaugcuggugcuccuggagaacgagaagacccuggacuaccacgacagcaacgugaagaaccucuacgagaagguccgcucccagcugaagaacaacgccaaggagaucgggaacggcugcuucgaguucuaccacaagugcgacaacacgugcauggagagcgugaagaacgggaccuacgacuaccccaaguacuccgaggaggccaagcugaaccgggaggagaucgacggcgugaagcucgagagcacccgcaucuaccagauccuggcgaucuacuccaccgucgccagcagccuggugcucguggucucccugggggccaucagcuucuggaugugcuccaacggcagccugcagugccggaucugcaucuga

SEQ ID NO: 73825 - RNA, 1701 nt, Artificial Sequence
  derived and/or modified CDS sequence (opt1) from hemagglutinin__InfluenzaA__AGB13380
augaaggccauccuggugguccuccuguacaccuucgccaccgcgaaggccgacacgcugugcaucggcuaccacgccaacaacagcaccgacaccguggacaccgugcucgagaagaacgucacggugacccacuccgugaaccugcuggaggacaagcacaacgggaagcucugcaagcugcgcggcgucgcgccccugcaccucgggaagugcaacaucgccggcuggauccuggggaacccggagugcgagagccuguccaccgccagcuccuggagcuacaucguggagaccuccagcuccgacaacggcacgugcuaccccggcgacuucaucaacuacgaggagcuccgggagcagcugagcuccgugagcuccuucgagcgcuucgagaucuuccccaagaccagcuccuggcccaaccacgacagcaacaagggggucaccgccgccugcccgcacgccggcgcgaaguccuucuacaagaaccugaucuggcucgugaagaaggggaacagcuaccccaagcuguccaagagcuacaucaacgacaagggcaaggaggugcugguccucugggggauccaccaccccagcaccacggccgaccagcagucccuguaccagaacgccgacgccuacguguucgugggcaccagccgguacuccaagaaguucaagcccgagaucgccauccgcccgaagguccgggaccaggagggccgcaugaacuacuacuggacccugguggagcccggggacaagaucaccuucgaggcgacgggcaaccucguggucccccgguacgccuucgccauggagcgcaaccccgggagcggcaucaucaucuccgacaccccggugcacgacugcaacacgaccugccagacccccaagggcgccaucaacaccagccugcccuuccagaacauccaccccaucaccaucgggaagugcccgaaguacgugaaguccaccaagcugcggcucgccacgggccugcgcaacguccccagcauccagucccgggggcuguucggcgcgaucgccggguucaucgagggcggcuggaccgggaugguggacggcugguacggguaccaccaccagaacgagcagggcagcggguacgccgccgaccucaaguccacccagaacgccaucgacaagaucaccaacaaggugaacagcgucaucgagaagaugaacacgcaguucaccgcggugggcaaggaguucaaccaccuggagaagcgcaucgagaaccugaacaagaaggucgacgacggcuuccucgacaucuggaccuacaacgccgagcugcuggugcuccuggagaacgagcggacccuggacuaccacgacuccaacgugaagaaccucuacgagaagguccgcaaccagcugaagaacaacgccaaggagaucgggaacggcugcuucgaguucuaccacaagugcgacaacacgugcauggagagcgugaagaacgggaccuacgacuaccccaaguacuccgaggaggccaagcugaaccgggaggagaucgacggcgugaagcucgagagcacccgcaucuaccagauccuggccaucuacuccaccgucgcgagcucccuggugcucguggucagccugggggccaucagcuucuggaugugcuccaacggcagccugcagugccggaucugcaucuga

SEQ ID NO: 73826 - RNA, 1701 nt, Artificial Sequence; identical to SEQ ID NO: 70459
  derived and/or modified CDS sequence (opt1) from hemagglutinin__InfluenzaA__AGB13390

SEQ ID NO: 73827 - RNA, 1701 nt, Artificial Sequence; identical to SEQ ID NO: 71066
  derived and/or modified CDS sequence (opt1) from hemagglutinin__InfluenzaA__AGB13400

SEQ ID NO: 73828 - RNA, 1701 nt, Artificial Sequence; identical to SEQ ID NO: 70459
  derived and/or modified CDS sequence (opt1) from hemagglutinin__InfluenzaA__AGB13410

SEQ ID NO: 73829 - RNA, 1701 nt, Artificial Sequence; identical to SEQ ID NO: 70478
  derived and/or modified CDS sequence (opt1) from hemagglutinin__InfluenzaA__AGB13420

SEQ ID NO: 73830 - RNA, 1701 nt, Artificial Sequence
  derived and/or modified CDS sequence (opt1) from hemagglutinin__InfluenzaA__AGB13430
augaaggccauccuggugguccuccuguacaccuucgccaccgcgaacgccgacacgcugugcaucggcuaccacgccaacaacagcaccgacaccguggacaccgugcucgagaagaacgucacggugacccacuccgugaaccugcuggaggacaagcacaacgggaagcucugcaagcugcgcggcgucgcgccccugcaccucgggaagugcaacaucgccggcuggauccuggggaacccggagugcgagagccuguccaccgccagcuccuggagcuacaucguggagaccuccagcuccgacaacggcacgugcuaccccggcgacuucaucgacuacgaggagcuccgggagcagcugagcuccgugagcuccuucgagcgcuucgagauguuccccaagaccagcuccuggcccaaccacgacagcaacaagggggucaccaccgccugcccgcacgccggcgccaaguccuucuacaagaaccugaucuggcucgugaagaaggggaacagcuaccccaagcuguccaagagcuacaucaacgacaagggcaaggaggugcugguccucugggggauccaccacccgcccacgagcgcggaccagcagucccuguaccagaacgccgacgccuacguguucgugggcaccagccgguacuccaagaaguucaagcccgagaucgccauccgccccaagguccgggaccaggagggccgcaugaacuacuacuggacccugguggagcccggggacaagaucaccuucgaggccacgggcaaccucguggucccccgguacgcguucgccauggagcgcaacgccgggagcggcaucaucaucuccgacaccccggugcacgacugcaacacgaccugccagacccccaagggcgccaucaacaccagccugcccuuccagaacauccaccccaucaccaucgggaagugcccgaaguacgugaaguccaccaagcugcggcucgccacgggccugcgcaacguccccagcauccagucccgggggcuguucggcgcgaucgccggguucaucgagggcggcuggaccgggaugguggacggcugguacggguaccaccaccagaacgagcagggcagcggguacgccgccgaccucaaguccacccagaacgccaucgacggcaucaccaacaaggugaacagcgucaucgagaagaugaacacgcaguucaccgcggugggcaaggaguucaaccaccuggagaagcgcaucgagaaccugaacaagaaggucgacgacggguuccucgacaucuggaccuacaacgccgagcugcuggugcuccuggagaacgagcggacccuggacuaccacgacuccaacgugaagaaccucuacgagaagguccgcagccagcugaagaacaacgccaaggagaucggcaacgggugcuucgaguucuaccacaagugcgacaacacgugcauggaguccgugaagaacggcaccuacgacuaccccaaguacagcgaggaggccaagcugaaccgggaggagaucgacggggugaagcucgaguccaccaugaucuaccagauccuggccaucuacagcaccgucgcguccagccuggugcucguggucagccugggcgccaucuccuucuggaugugcagcaacggcucccugcagugccgcaucugcaucuga

SEQ ID NO: 73831 - RNA, 1701 nt, Artificial Sequence; identical to SEQ ID NO: 71066
  derived and/or modified CDS sequence (opt1) from hemagglutinin__InfluenzaA__AGB13440

SEQ ID NO: 73832 - RNA, 1701 nt, Artificial Sequence; identical to SEQ ID NO: 70478
  derived and/or modified CDS sequence (opt1) from hemagglutinin__InfluenzaA__AGB13450

SEQ ID NO: 73833 - RNA, 1701 nt, Artificial Sequence; identical to SEQ ID NO: 70459
  derived and/or modified CDS sequence (opt1) from hemagglutinin__InfluenzaA__AGB13460

SEQ ID NO: 73834 - RNA, 1701 nt, Artificial Sequence; identical to SEQ ID NO: 70891
  derived and/or modified CDS sequence (opt1) from hemagglutinin__InfluenzaA__AGB13470

SEQ ID NO: 73835 - RNA, 1701 nt, Artificial Sequence; identical to SEQ ID NO: 70478
  derived and/or modified CDS sequence (opt1) from hemagglutinin__InfluenzaA__AGB13480

SEQ ID NO: 73836 - RNA, 1701 nt, Artificial Sequence; identical to SEQ ID NO: 70891
  derived and/or modified CDS sequence (opt1) from hemagglutinin__InfluenzaA__AGB13490

SEQ ID NO: 73837 - RNA, 1701 nt, Artificial Sequence
  derived and/or modified CDS sequence (opt1) from hemagglutinin__InfluenzaA__AGB13500
augaaggccauccuggugguccuccuguacaccuucgccaccgcgaacgccgacacgcugugcaucggcuaccacgccaacaacagcaccgacaccguggacaccgugcucgagaagaacgucacggugacccacuccgugaaccugcuggaggacaagcacaacgggaagcucugcaagcugcgcggcgucgcgccccugcaccucgggaagugcaacaucgccggcuggauccuggggaacccggagugcgagagccuguccaccgccagcuccuggagcuacaucguggagaccuccagcuccgacaacggcacgugcuaccccggcaacuucaucgacuacgaggagcuccgggagcagcugagcuccgugagcuccuucgagcgcuucgagaucuuccccaagaccagcuccuggcccgaccacgacagcaacaagggggucaccgccgccugcccgcacgccggcgcgaagggguucuacaagaaccugaucuggcucgugaagaagggcaacuccuaccccaagcugagcaaguccuacaucaacgacaaggggaaggaggugcugguccucuggggcauccaccaccccagcaccagcgccgaccagcagucccuguaccagaacgccgacgccuacguguucgugggcacgagccgguacuccaagaaguucaagcccgagaucgccauccgcccgaagguccgggaccaggaggggcgcaugaacuacuacuggacccugguggagcccggcgacaagaucaccuucgaggcgaccgggaaccucguggcgccccgguacgccuucgccauggagcgcaacgccggcagcggcaucaucaucuccgacacgcccguccacgacugcaacacgaccugccagaccccgaagggggccaucaacaccagccugcccuuccagaacauccaccccaucaccaucggcaagugccccaaguacgugaaguccaccaagcugcggcucgccaccgggcugcgcaacgugccgagcauccagucccggggccuguucggggccaucgccggcuucaucgagggcggguggacgggcauggucgacgggugguacggcuaccaccaccagaacgagcaggggagcggcuacgccgcggaccucaaguccacccagaacgccaucgacaagaucaccaacaaggugaacagcgugaucgagaagaugaacacccaguucacggccgucggcaaggaguucaaccaccuggagaagcgcaucgagaaccugaacaagaagguggacgacggguuccucgacaucuggaccuacaacgccgagcugcugguccuccuggagaacgagcggacccuggacuaccacgacuccaacgugaagaaccucuacgagaaggugcgcagccagcugaagaacaacgccaaggagaucggcaacgggugcuucgaguucuaccacaagugcgacaacacgugcauggaguccgucaagaacggcaccuacgacuaccccaaguacagcgaggaggcgaagcugaaccgggaggagaucgacggggugaagcucgaguccacccgcaucuaccagauccuggccaucuacagcaccguggccuccagccugguccucguggugagccugggcgccaucuccuucuggaugugcagcaacggcucccugcagugccggaucugcaucuga

SEQ ID NO: 73838 - RNA, 1701 nt, Artificial Sequence; identical to SEQ ID NO: 71096
  derived and/or modified CDS sequence (opt1) from hemagglutinin__InfluenzaA__AGB13520

SEQ ID NO: 73839 - RNA, 1701 nt, Artificial Sequence
  derived and/or modified CDS sequence (opt1) from hemagglutinin__InfluenzaA__AGB13530
augaaggccauccuggugguccuccuguacaccuucgccaccgcgaacgccgacacgcugugcaucggcuaccacgccaacaacagcaccgacaccguggacaccgugcucgagaagaacgucacggugacccacuccgugaaccugcuggaggacaagcacaacgggaagcucugcaagcugcgcggcgucgcgccccugcaccucgggaagugcaacaucgccggcuggauccuggggaacccggagugcgagagccuguccaccgccagcuccuggagcuacaucguggagaccuccagcuccgacaacggcacgugcuaccccggcgacuucaucgacuacgaggagcuccgggagcagcugagcuccgugagcuccuucgagcgcuucgagaucuuccccaagaccagcuccuggcccaaccacgacagcaacaagggggucaccgccgccugcccgcacgccggcgcgaaguccuucuacaagaaccugaucuggcucgugaagaaggggaacagcuaccccaagcugaacaaguccuacaucaacgacaagggcaaggaggugcugguccucugggggauccaccaccccagcaccacggccgaccagcagagccuguaccagaacgccgacgccuacguguucgugggcaccucccgguacagcaagaaguucaagcccgagaucgccauccgcccgaagguccgggaccaggagggccgcaugaacuacuacuggacccugguggagcccggggacaagaucaccuucgaggcgacgggcaaccucguggucccccgguacgccuucgccauggagcgcaacgccggguccggcaucaucaucagcgacacccccgugcacgacugcaacacgaccugccagaccccgaagggcgccaucaacaccucccugcccuuccagaacauccaccccaucaccaucgggaagugccccaaguacgucaagagcaccaagcugcggcucgcgacgggccugcgcaacgugccguccauccagagccgggggcuguucggcgccaucgccggguucaucgagggcggcuggaccgggaugguggacggcugguacggguaccaccaccagaacgagcagggcuccggguacgccgccgaccucaagagcacccagaacgcgaucgacaagaucaccaacaaggugaacuccgucaucgagaagaugaacacgcaguucaccgccgugggcaaggaguucaaccaccuggagaagcgcaucgagaaccugaacaagaaggucgacgacggcuuccucgacaucuggaccuacaacgccgagcugcuggugcuccuggagaacgagcggacccuggacuaccacgacagcaacgugaagaaccucuacgagaagguccgcaaccagcugaagaacaacgccaaggagaucgggaacggcugcuucgaguucuaccacaagugcgacaacacgugcauggaguccgugaagaacgggaccuacgacuaccccaaguacagcgaggaggccaagcugaaccgggaggagaucaacggcgugaagcucgaguccacccgcaucuaccagauccuggcgaucuacagcaccgucgccuccagccuggugcucguggucucccugggggccaucagcuucuggaugugcagcaacggcucccugcagugccggaucugcaucuga

SEQ ID NO: 73840 - RNA, 1701 nt, Artificial Sequence; identical to SEQ ID NO: 71110
  derived and/or modified CDS sequence (opt1) from hemagglutinin__InfluenzaA__AGB13540

SEQ ID NO: 73841 - RNA, 1701 nt, Artificial Sequence; identical to SEQ ID NO: 71074
  derived and/or modified CDS sequence (opt1) from hemagglutinin__InfluenzaA__AGB13550

SEQ ID NO: 73842 - RNA, 1701 nt, Artificial Sequence; identical to SEQ ID NO: 71074
  derived and/or modified CDS sequence (opt1) from hemagglutinin__InfluenzaA__AGB13560

SEQ ID NO: 73843 - RNA, 1701 nt, Artificial Sequence; identical to SEQ ID NO: 70891
  derived and/or modified CDS sequence (opt1) from hemagglutinin__InfluenzaA__AGB13570

SEQ ID NO: 73844 - RNA, 1701 nt, Artificial Sequence
  derived and/or modified CDS sequence (opt1) from hemagglutinin__InfluenzaA__AGB13580
augaaggccauccuggugguccuccuguacaccuucgccaccgcgaacgccgacacgcugugcaucggcuaccacgccaacaacagcaccgacaccguggacaccgugcucgagaagaacgucacggugacccacuccgugaaccugcuggaggacaagcacaacgggaagcucugcaagcugcgcggcgucgcgccccugcaccucgggaagugcaacaucgccggcuggauccuggggaacccggagugcgagagccuguccaccgccagcuccuggagcuacaucguggagaccuccagcuccgacaacggcacgugcuaccccggcgacuucaucaacuacgaggagcuccgggagcagcugagcuccgugagcuccuucgagcgcuucgagaucuuccccaagaccagcuccuggcccaaccacgacagcaacaagggggucaccgccgccugcccgcacgccggcgcgaaguccuucuacaagaaccugaucuggcucgugaagaaggggaacagcuaccccaagcuguccaagagcuacaucaacgacaagggcaaggaggugcugguccucugggggauccaccaccccagcaccacggccgaccagcagucccuguaccagaacgccgacgccuacguguucgugggcaccagccgguacuccaagaaguucaagcccgagaucgccauccgcccgaagguccgggaccaggagggccgcaugaacuacuacuggacccugguggagcccggggacaagaucaccuucgaggcgacgggcaaccucguggucccccgguacgccuucgccauggagcgcaacgccgggagcggcaucaucaucuccgacacccccgugcacgacugcaacacgaccugccagaccccgaagggcgccaucaacaccagccugcccuuccagaacauccaccccaucaccaucgggaagugccccaaguacgugaaguccaccaagcugcggcucgcgacgggccugcgcaacgucccgagcauccagucccgggggcuguucggcgccaucgccggguucaucgagggcggcuggaccgggaugguggacggcugguacggguaccaccaccagaacgagcagggcagcggguacgccgccgaccucaaguccacccagaacgcgaucgacaagaucaccaacaaggugaacagcgucaucgagaagaugaacacgcaguucaccgccgugggcaaggaguucaaccaccuggagaagcgcaucgagaaccugaacaagaaggucgacgacggcuuccucgacaucuggaccuacaacgccgagcugcuggugcuccuggagaacgagcggacccuggacuaccacgacuccaacgugaagaaccucuacgagaagguccgcaaccagcugaagaacaacgccaaggagaucgggaacggcugcuucgaguucuaccacaagugcaacaacacgugcauggagagcgugaagaacgggaccuacgacuaccccaaguacuccgaggaggccaagcugaaccgggaggagaucgacggcgugaagcucgagagcacccgcaucuaccagauccuggcgaucuacuccaccgucgccagcucccuggugcucguggucagccugggggccaucagcuucuggaugugcuccaacggcagccugcagugccggaucugcaucuga

SEQ ID NO: 73845 - RNA, 1701 nt, Artificial Sequence
  derived and/or modified CDS sequence (opt1) from hemagglutinin__InfluenzaA__AGB13590
augaaggccauccuggugguccuccuguacaccuucgccaccgcgaacgccgacacgcugugcaucggcuaccacgccaacaacagcaccgacaccguggacaccgugcucgagaagaacgucacggugacccacuccgugaaccugcuggaggacaagcacaacgggaagcucugcaagcugcgcggcgucgcgccccugcaccucgggaagugcaacaucgccggcuggauccuggggaacccggagugcgagagccuguccaccgccagcuccuggagcuacaucguggagaccuccagcuccgacaacggcacgugcuaccccggcgacuucaucaacuacgaggagcuccgggagcagcugagcuccgugagcuccuucgagcgcuucgagaucuuccccaagaccagcuccuggcccaaccacgacagcaacaagggggucaccgccgccugcccgcacgccggcgcgaaguccuucuacaagaaccugaucuggcucgugaagaaggggaacagcuaccccaagcugucccagagcuacaucaacgacaagggcaaggaggugcugguccucugggggauccaccaccccagcaccacggccgaccagcagucccuguaccagaacgccgacgccuacguguucgugggcaccagccgguacuccaagaaguucaagcccgagaucgccauccgcccgaagguccgggaccaggagggccgcaugaacuacuacuggacccugguggagcccggggacaagaucaccuucgaggcgacgggcaaccucguggucccccgguacgccuucgccauggagcgcaacgccgggagcggcaucaucaucuccgacacccccgugcacgacugcaacacgaccugccagaccccgaagggcgccaucaacaccagccugcccuuccagaacauccaccccaucaccaucgggaagugccccaaguacgugaaguccaccaagcugcggcucgcgacgggccugcgcaacgucccgagcauccagucccgggggcuguucggcgccaucgccggguucaucgagggcggcuggaccgggaugguggacggcugguacggguaccaccaccagaacgagcagggcagcggguacgccgccgaccucaaguccacccagaacgcgaucgacaagaucaccaacaaggugaacagcgucaucgagaagaugaacacgcaguucaccgccgugggcaaggaguucaaccaccuggagaagcgcaucgagaaccugaacaagaaggucgacgacggcuuccucgacaucuggaccuacaacgccgagcugcuggugcuccuggagaacgagcggacccuggacuaccacgacuccaacgugaagaaccucuacgagaagguccgcaaccagcugaagaacaacgccaaggagaucgggaacggcugcuucgaguucuaccacaagugcgacaacacgugcauggagagcgugaagaacgggaccuacgacuaccccaaguacuccgaggaggccaagcugaaccgggaggagaucgacggcgugaagcucgagagcacccgcaucuaccagauccuggcgaucuacuccaccgucgccagcucccuggugcucguggucagccugggggccaucagcuucuggaugugcuccaacggcagccugcagugccggaucugcaucuga

SEQ ID NO: 73846 - RNA, 1701 nt, Artificial Sequence
  derived and/or modified CDS sequence (opt1) from hemagglutinin__InfluenzaA__AGB13600
augaaggccauccuggugguccuccuguacaccuucgccaccgcgaacgccgacacgcugugcaucggcuaccacgccaacaacagcaccgacaccguggacaccgugcucgagaagaacgucacggugacccacuccgugaaccugcuggaggacaagcacaacgggaagcucugcaagcugcgcggcgucgcgccccugcaccucgggaagugcaacaucgccggcuggauccuggggaacccggagugcgagagccuguccaccgccagcuccuggagcuacaucguggagaccuccagcuccgacaacggcacgugcuaccccggcgacuucaucaacuacgaggagcuccgggagcagcugagcuccgugagcuccuucgagcgcuucgagaucuuccccaagaccagcuccuggcccaaccacgacagcaacaagggggucaccgccgccugcccgcacgccggcgcgaaguccuucuacaagaaccugaucuggcucgugaagaaggggaacagcuaccccaagcugaacaaguccuacaucaacgacaagggcaaggaggugcugguccucugggggauccaccaccccagcaccacggccgaccagcagagccuguaccagaacgccgacgccuacguguucgugggcaccucccgguacagcaagaaguucaagcccgagaucgccauccgcccgaagguccgggaccaggagggccgcaugaacuacuacuggacccugguggagcccggggacaagaucaccuucgaggcgacgggcaaccucguggucccccgguacgccuucgccauggagcgcaacgccggguccggcaucaucaucagcgacacccccgugcacgacugcaacacgaccugccagaccccgaagggcgccaucaacaccucccugcccuuccagaacauccaccccaucaccaucgggaagugccccaaguacgucaagagcaccaagcugcggcucgcgacgggccugcgcaacgugccguccauccagagccgggggcuguucggcgccaucgccggguucaucgagggcggcuggaccgggaugguggacggcugguacggguaccaccaccagaacgagcagggcuccggguacgccgccgaccucaagagcacccagaacgcgaucgacaagaucaccaacaaggugaacuccgucaucgagaagaugaacacgcaguucaccgccgugggcaaggaguucaaccaccuggagaagcgcaucgagaaccugaacaagaaggucgacgacggcuuccucgacaucuggaccuacaacgccgagcugcuggugcuccuggagaacgagcggacccuggacuaccacgacagcaacgugaagaaccucuacgagaagguccgcaaccagcugaagaacaacgccaaggagaucgggaacggcugcuucgaguucuaccacaagugcgacaacacgugcauggaguccgugaagaacgggaccuacgacuaccccaaguacagcgaggaggccaagcugaaccgggaggagaucgacggcgugaagcucgaguccacccgcaucuaccagauccuggcgaucuacagcaccgucgccuccagccuggugcucguggucucccugggggccaucagcuucuggaugugcagcaacggcucccugcagugccggaucugcaucuga

SEQ ID NO: 73847 - RNA, 1701 nt, Artificial Sequence; identical to SEQ ID NO: 70891
  derived and/or modified CDS sequence (opt1) from hemagglutinin__InfluenzaA__AGB13610

SEQ ID NO: 73848 - RNA, 1701 nt, Artificial Sequence; identical to SEQ ID NO: 71110
  derived and/or modified CDS sequence (opt1) from hemagglutinin__InfluenzaA__AGB13620

SEQ ID NO: 73849 - RNA, 1701 nt, Artificial Sequence; identical to SEQ ID NO: 70478
  derived and/or modified CDS sequence (opt1) from hemagglutinin__InfluenzaA__AGB13630

SEQ ID NO: 73850 - RNA, 1701 nt, Artificial Sequence
  derived and/or modified CDS sequence (opt1) from hemagglutinin__InfluenzaA__AGB13640
augaaggccauccuggugguccuccuguacaccuucgccaccgcgaacgccgacacgcugugcaucggcuaccacgccaacaacagcaccgacaccguggacaccgugcucgagaagaacgucacggugacccacuccgugaaccugcuggaggacaagcacaacgggaagcucugcaagcugcgcggcgucgcgccccugcaccucgggaagugcaacaucgccggcuggauccuggggaacccggagugcgagagccuguccaccgccagcuccuggagcuacaucguggagaccuccagcuccgacaacggcacgugcuaccccggcgacuucaucgacuacgaggagcuccgggagcagcugagcuccgugagcuccuucgagcgcuucgagaucuuccccaagaccagcuccuggcccaaccacgacagcaacaagggggucaccaccgccugcccgcacgccggcgccaaguccuucuacaagaaccugaucuggcucgugaagaaggggaacagcuaccccaagcuguccaagagcuacaucaacgacaagggcaaggaggugcugguccucugggggauccaccacccgcccacgagcgcggaccagcagucccuguaccagaacgccgacgccuacguguucgugggcaccagccgguacuccaagaaguucaagcccgagaucgccauccgccccaagguccgggaccaggagggccgcaugaacuacuacuggacccugguggagcccggggacaagaucaccuucgaggccacgggcaaccucguggucccccgguacgcguucgccauggagcgcaacgccgggagcggcaucaucaucuccgacaccccggugcacgacugcaacacgaccugccagacccccaagggcgccaucaacaccagccugcccuuccagaacauccaccccaucaccaucgggaagugcccgaaguacgugaaguccaccaagcugcggcucgccacgggccugcgcaacguccccagcauccagucccgggggcuguucggcgcgaucgccggguucaucgagggcggcuggaccgggaugguggacggcugguacggguaccaccaccagaacgagcagggcagcggguacgccgccgaccucaaguccacccagaacgccaucgacggcaucaccaacaaggugaacagcgucaucgagaagaugaacacgcaguucaccgcggugggcaaggaguucaaccaccuggagaagcgcaucgagaaccugaacaagaaggucgacgacggguuccucgacaucuggaccuacaacgccgagcugcuggugcuccuggagaacgagcggacccuggacuaccacgacuccaacgugaagaaccucuacgagaagguccgcagccagcugaagaacaacgccaaggagaucggcaacgggugcuucgaguucuaccacaagugcgacaacacgugcauggaguccgugaagaacggcaccuacgacuaccccaaguacagcgaggaggccaagcugaaccgggaggagaucgacggggugaagcucgaguccaccaugaucuaccagauccuggccaucuacagcaccgucgcguccagccuggugcucaucgugagccugggcgccaucuccuucuggaugugcagcaacggcucccugcagugccgcaucugcaucuga

SEQ ID NO: 73851 - RNA, 1701 nt, Artificial Sequence
  derived and/or modified CDS sequence (opt1) from hemagglutinin__InfluenzaA__AGB13650
augaaggccauccuggugguccuccuguacaccuucgccaccgcgaacgccgacacgcugugcaucggcuaccacgccaacaacagcaccgacaccguggacaccgugcucgagaagaacgucacggugacccacuccgugaaccugcuggaggacaagcacaacgggaagcucugcaagcugcgcggcgucgcgccccugcaccucgggaagugcaacaucgccggcuggauccuggggaacccggagugcgagagccuguccaccgccagcuccuggagcuacaucguggagaccuccagcuccgacaacggcacgugcuaccccggcgacuucaucgacuacgaggagcuccgggagcagcugagcuccgugagcuccuucgagcgcuucgagaucuuccccaagaccagcuccuggcccaaccacgacagcaacaagggggucaccaccgccugcccgcacgccggcgccaaguccuucuacaagaaccugaucuggcucgugaagaaggggaacagcuaccccaagcuguccaagagcuacaucaacgacaagggcaaggaggugcugguccucugggggauccaccacccgcccacgagcgcggaccagcagucccuguaccagaacgccgacgccuacguguucgugggcaccagccgguacuccaagaaguucaagcccgagaucgccauccgccccaagguccgggaccaggagggccgcaugaacuacuacuggacccugguggagcccggggacaagaucaccuucgaggccacgggcaaccucguggucccccgguacgcguucgccauggagcgcaacgccgggagcggcaucaucaucuccgacaccccggugcacgacugcaacacgaccugccagacccccaagggcgccaucaacaccagccugcccuuccagaacauccaccccaucaccaucgggaagugcccgaaguacgugaaguccaccaagcugcggcucgccacgggccugcgcaacguccccagcauccagucccgggggcuguucggcgcgaucgccggguucaucgagggcggcuggaccgggaugguggacggcugguacggguaccaccaccagaacgagcagggcagcggguacgccgccgaccucaaguccacccagaacgccaucgacggcaucaccaacaaggugaacagcgucaucgagaagaugaacacgcaguucaccgcggugggcaaggaguucaaccaccuggagaagcgcaucgagaaccugaacaagaaggucgacgacggguuccucgacaucuggaccuacaacgccgagcugcugauccuccuggagaacgagcggacccuggacuaccacgacuccaacgugaagaaccucuacgagaaggugcgcagccagcugaagaacaacgccaaggagaucggcaacgggugcuucgaguucuaccacaagugcgacaacacgugcauggaguccgucaagaacggcaccuacgacuaccccaaguacagcgaggaggccaagcugaaccgggaggagaucgacggggugaagcucgaguccaccaugaucuaccagauccuggccaucuacagcaccguggcguccagccugguccucaucgugagccugggcgccaucuccuucuggaugugcagcaacggcucccugcagugccgcaucugcaucuga

SEQ ID NO: 73852 - RNA, 1701 nt, Artificial Sequence; identical to SEQ ID NO: 70848
  derived and/or modified CDS sequence (opt1) from hemagglutinin__InfluenzaA__AGB13660

SEQ ID NO: 73853 - RNA, 1701 nt, Artificial Sequence; identical to SEQ ID NO: 70459
  derived and/or modified CDS sequence (opt1) from hemagglutinin__InfluenzaA__AGB13721

SEQ ID NO: 73854 - RNA, 1701 nt, Artificial Sequence; identical to SEQ ID NO: 70891
  derived and/or modified CDS sequence (opt1) from hemagglutinin__InfluenzaA__AGB13731

SEQ ID NO: 73855 - RNA, 1701 nt, Artificial Sequence
  derived and/or modified CDS sequence (opt1) from hemagglutinin__InfluenzaA__AGB51356
augaaggccauccugcucgugcugcugugcaccuucgccgcgaccaacgccgacacgcucugcaucggcuaccacgccaacaacagcaccgacaccgucgacaccgugcuggagaagaacgugacggucacccacuccgugaaccugcucgaggaccgccacaacgggaagcugugcaagcugggcgggaucgcgccccuccaccugggcaagugcaacaucgccggguggcugcucggcaacccggagugcgagcugcugcucaccgugagcuccuggagcuacaucgucgagaccuccaacagcgacaacggcacgugcuaccccggggacuucaucaacuacgaggagcugcgggagcagcuguccagcguguccagcuucgagcgcuucgagaucuuccccaagaccuccagcuggcccaaccacgagaccaaccggggcgugaccgccgccugcccguacgccggggccaacuccuucuaccgcaaccucaucuggcuggucgagaagggcaacagcuaccccaagcuguccaagagcuacgugaacaacaaggggaaggaggugcucguccuguggggcauccaccacccgcccacguccaccgaccagcagagccuguaccagaacgcggacgccuacguguucgugggcuccagcaaguacaaccggaaguucaagcccgagaucgccgcccgccccaagguccgggggcaggccggccgcaugaacuacuacuggacccucaucgagcccggggacaccaucacguucgaggcgaccggcaaccugguggugccccgguacgccuucgccaugaaccgcggcagcggguccggcaucaucaucagcgacgccccgguccacgacugcaacaccaagugccagacccccaagggggccaucaacacgucccugcccuuccagaacauccaccccgugaccaucggcgagugcccgaaguacgucaagagcaccaagcuccggauggcgaccgggcugcgcaacauccccuccauccagagccggggccuguucggcgccaucgccggguucaucgagggcggguggacgggcaugaucgacgggugguacggcuaccaccaccagaacgagcagggcuccggguacgccgccgaccagcgcagcacccagaacgcgaucgacggcaucaccaacaaggugaacuccgugaucgagaagaugaacacccaguucacggccguggggaaggaguucaaccaccucgagaagcggaucgagaaccugaacaagaaggucgacgacggcuuccuggacaucuggaccuacaacgccgagcuccuggugcugcucgagaacgagcgcacccuggacuuccacgacagcaacgucaagaaccuguacgagaaggugcggucccagcuccgcaacaacgccaaggagaucgggaacggcugcuucgaguucuaccacaagugcgacgacacgugcauggagagcgugaagaacggcaccuacgacuaccccaaguacuccgaggagagcaagcugaaccgggaggagaucgacggggucaagcuggaguccacccgcaucuaccagauccucgccaucuacagcaccguggcguccagccuggugcugcucgucucccugggcgccaucagcuucuggaugugcagcaacgggucccugcagugccggaucugcaucuga

SEQ ID NO: 73856 - RNA, 1701 nt, Artificial Sequence
  derived and/or modified CDS sequence (opt1) from hemagglutinin__InfluenzaA__AGB97269
augaaggccauccuggugguccuccuguacaccuucgccaccgcgaacgccgacacgcugugcaucggcuaccacgccaacaacagcaccgacaccguggacaccgugcucgagaagaacaucacggucacccacuccgugaaccugcuggaggacaagcacaacgggaagcucugcaagcugcgcggcguggcgccccugcaccucgggaagugcaacaucgccggcuggauccuggggaacccggagugcgagacccugagcaccgccuccagcugguccuacaucgucgagacgagcuccagcgacaacgggaccugcuaccccggcgacuucaucgacuacgaggagcuccgggagcagcuguccagcguguccagcuucgagcgcuucgagaucuuccccaagaccuccagcuggcccaaccacgacuccaacaagggcgugaccgccgccugcccgcacgccggcgcgaagggguucuacaagaaccugaucuggcucgucaagaagggcaacagcuaccccaagcuguccaagagcuacaucaacgacaaggggaaggaggugcuggugcucuggggcauccaccaccccuccacgaccgccgaccagcagagccuguaccagaacgccgacaccuacgucuucgugggcaccagccgguacuccaagaaguucaagcccgagaucgccauccgcccgaaggugcgggaccaggaggggcgcaugaacuacuacuggacgcuggucgagcccggcgacaagaucaccuucgaggccaccgggaaccucguggugccccgguacgcguucgccauggagcgcgacgccggcagcggcaucaucaucuccgacacccccguccacgacugcaacacgaccugccagaccccgaagggggccaucaacaccagccugcccuuccagaacauccaccccaucacgaucggcaagugccccaaguacgugaaguccaccaagcugcggcucgccaccgggcugcgcaacgugccgagcauccagucccggggccuguucggggcgaucgccggcuucaucgagggcggguggaccggcauggucgacgggugguacggcuaccaccaccagaacgagcaggggagcggcuacgccgccgaccucaaguccacgcagaacgccaucgacaagaucaccaacaaggugaacagcgugaucgagaagaugaacacccaguucaccgcggucggcaaggaguucaaccaccuggagaagcgcaucgagaaccugaacaagaagguggacgacggguuccucgacaucuggacguacaacgccgagcugcugguccuccuggagaacgagcggacccuggacuaccacgacuccaacgugaagaaccucuacgagaaggugcgcaaccagcugaagaacaacgccaaggagaucggcaacgggugcuucgaguucuaccacaagugcgacaacacgugcauggagagcgucaagaacggcaccuacgacuaccccaaguacuccgaggaggccaagcugaaccgggaggagaucgacggggugaagcucgagagcacccgcaucuaccagauccuggccaucuacuccaccgcggccagcucccuggugcucgucgugagccugggcgccaucuccuucuggaugugcagcaacggcagccugcagugccggaucugcaucuga

SEQ ID NO: 73857 - RNA, 1701 nt, Artificial Sequence; identical to SEQ ID NO: 72210
  derived and/or modified CDS sequence (opt1) from hemagglutinin__InfluenzaA__AGB97273

SEQ ID NO: 73858 - RNA, 1701 nt, Artificial Sequence
  derived and/or modified CDS sequence (opt1) from hemagglutinin__InfluenzaA__AGB97288
augaagaccaucaucgcccugggcuacauccucugccugguguucgcccagaagcugcccgggaacgacaacagcaccgcgacgcucugccugggccaccacgccgucccgaacgggaccaucgugaagaccaucaccaacgaccgcaucgaggugacgaacgccaccgagcugguccagaacuccagcaucggcgagaucugcgacagcccccaccagauccucgacgggaagaacugcacccugaucgacgcccugcucggcgacccccagugcgacggcuuccagaacaagaagugggaccuguucaucgagcggagcaaggccuacuccaacugcuaccccuacgacgugccggacuacgcgagccugcgcucccucguggccagcuccgggacccuggaguucaacaacgagagcuucaacuggacgggcgucacccagaacgggaccuccagcgccugcauccggcgcuccaacagcuccuucuucagccggcugaacuggcucacccaccugaacuucaaguaccccgcccugaacgugacgaugcccaacaacgagcaguucgacaagcucuacaucuggggcgugcaccaccccgggaccgacaaggaccagaucuuccuguacgcgaaguccagcggccgcaucaccgucuccaccaagcggagccagcaggccgugaucccgaacaucggcagccgcccccggauccgcaacauccccucccggaucagcaucuacuggacgaucgugaagcccggggacauccugcucaucaacuccaccggcaaccugaucgccccgcgcggguacuucaagauccggagcggcaaguccagcaucaugcgcuccgacgcccccaucggcaagugcaagagcgagugcaucacccccaacggguccauccccaacgacaagccguuccagaacgucaaccggaucaccuacggcgccugcccccgcuacgugaagcagagcacgcugaagcucgcgaccgggaugcggaacgugcccgagaagcagacccgcggcaucuucggggccaucgccggcuucaucgagaacggcugggaggggauggucgacggcugguacggguuccggcaccagaacuccgagggccgcgggcaggccgccgaccugaaguccacccaggcggccaucgaccagaucaacggcaagcugaaccggcucaucggcaagacgaacgagaaguuccaccagaucgagaaggaguucuccgagguggaggggcgcauccaggaccuggagaaguacguggaggacaccaagaucgaccuguggagcuacaacgccgagcuccuggucgcccuggagaaccagcacaccaucgaccucaccgacuccgagaugaacaagcuguucgagaagacgaagaagcagcugcgcgagaacgccgaggacaugggcaacgggugcuucaagaucuaccacaagugcgacaacgcgugcaucggcagcauccggaacgggaccuacgaccacaacguguaccgcgacgaggcccucaacaaccgguuccagaucaagggcguggagcugaaguccggcuacaaggacuggauccuguggaucagcuucgccaucuccugcuuccuccugugcgucgcccugcucggguucaucaugugggccugccagaagggcaacauccgcugcaacaucugcaucuga

SEQ ID NO: 73859 - RNA, 1701 nt, Artificial Sequence
  derived and/or modified CDS sequence (opt1) from hemagglutinin__InfluenzaA__AGB97292
augaagaccaucaucgcccugagcuacauccucugccugguguucgcccaggagcugcccggcaacgacgacuccaccgcgacgcucugccuggggcaccacgccgucccgaacggcaccaucgugaagaccaucaccaacgaccagaucgaggugacgaacgccaccgagcugguccagagcuccagcaccggggagaucugcaacagcccccaccagauccucgacggcgagaacugcacccugaucgacgcccugcucggggacccccagugcgacggcuuccagaacaagaagugggaccuguucguggagcgcagcaaggcccacuccaacugcuaccccuacgacgugccggacuacgcgagccugcggucccucgucgccagcuccggcacgcuggaguucaacaacgagagcuucaacuggaccggggugacccagaacggcaccuccagcgccugcauccgccgguccaacaacagcuucuucucccgccugaacuggcucacgcaccugaacuucaaguaccccgcccugaacgugaccaugcccaacaacgagcaguucgacaagcucuacaucuggggcguccaccaccccgggaccgacaaggaccagaucuuccuguacgcgcaggccagcgggcggaucaccguguccacgaagcgcagccagcaggccgugaucccgaacaucggcagccggccccgcguccggaacauccccucccgcgugagcaucuacuggaccaucgugaagcccggcgacauccugcucaucaacuccaccgggaaccugaucgccccgcggggcuacuucaagauccgcagcgggaaguccagcaucaugcgguccgacgcccccaucggcaagugcaacagcgcgugcaucacccccaacggcuccauccccaacgacaagccguuccagaacgucaaccgcaucacguacggggccugcccccgguacgugaagcagaacacccugaagcucgccaccggcaugcgcaacgugcccgagaagcagacccgggggaucuucggcgccaucgccggguucaucgagaacggcugggagggcauggucgacgggugguacggcuuccgccaccagaacagcgaggggcggggccaggcggccgaccugaaguccacgcaggccgccaucgaccagaucaacgggaagcugaaccgccucaucggcaagaccaacgagaaguuccaccagaucgagaaggaguucagcgagguggagggccggauccaggaccuggagaaguacguggaggacaccaagaucgaccugugguccuacaacgccgagcuccuggucgcgcuggagaaccagcacaccaucgaccucacggacagcgagaugaacaagcuguucgagaagaccaagaagcagcugcgcgagaacgccgaggacauggggaacggcugcuucaagaucuaccacaagugcgacaacgccugcaucggguccauccgcaacggcaccuacgaccacgacguguaccgggacgaggcccucaacaaccgcuuccagaucaaggggguggagcugaaguccggcuacaaggacuggauccuguggaucuccuucgccaucagcugcuuccuccugugcgucgcgcugcucggcuucaucaugugggccugccagaaggggaacauccggugcaacaucugcaucuga

SEQ ID NO: 73860 - RNA, 1701 nt, Artificial Sequence
  derived and/or modified CDS sequence (opt1) from hemagglutinin__InfluenzaA__AGB97300
augaagaccaucaucgcccugagcuacauccucugccugguguucgcccagaagcugcccggcaacgacaacuccaccgcgacgcucugccuggggcaccacgccgucccgaacggcaccaucgugaagaccaucaccaacgaccgcaucgaggugacgaacgccaccgagcugguccagaacagcuccaucggggagaucugcgacagcccccaccagauccucgacggcgagaacugcacccugaucgacgcccugcucggggacccccagugcgacggcuuccagaacaagaagugggaccuguucguggagcgguccaaggccuacagcaacugcuaccccuacgacgugccggacuacgcgucccugcgcagccucgucgccuccagcggcacccuggaguucaacaacgaguccuucaacuggacgggggugacccagaacggcaccagcuccgccugcauccggcgcagcaacuccagcuucuucucccggcugaacuggcucacccaccugaacuucaaguaccccgcccugaacgugacgaugcccaacaacgagcaguucgacaagcucuacaucuggggcguccaccaccccgggaccgacaaggaccagaucuuccuguacgcgcagagcuccgggcgcaucaccgugagcaccaagcggagccagcaggccgugaucccgaacaucggcucccgcccccggauccgcaacauccccagccggaucuccaucuacuggacgaucgucaagcccggcgacauccugcucaucaacagcaccgggaaccugaucgccccgcgcggcuacuucaagauccgguccggcaagagcuccaucaugcgcagcgacgcccccaucgggaagugcaaguccgagugcaucacccccaacggcagcauccccaacgacaagccguuccagaacgugaaccggaucaccuacggggccugcccccgcuacgugaagcaguccacgcugaagcucgcgaccggcaugcggaacguccccgagaagcagacccgcgggaucuucggcgccaucgccggguucaucgagaacggcugggagggcaugguggacgggugguacggcuuccggcaccagaacagcgaggggcgcggccaggccgccgaccugaaguccacccaggcggccaucgaccagaucaacgggaagcugaaccggcucaucggcaagacgaacgagaaguuccaccagaucgagaaggaguucagcgagguggagggccgcauccaggaccuggagaaguacgucgaggacaccaagaucgaccugugguccuacaacgccgagcuccugguggcccuggagaaccagcacaccaucgaccucaccgacagcgagaugaacaagcuguucgagaagacgcgcaagcagcugcgggagaacgccgaggacauggggaacggcugcuucaagaucuaccacaagugcgacaacgcgugcaucggguccauccgcaacggcaccuacgaccacgacguguaccgggacgaggcccucaacaaccgcuuccagaucaagggggucgagcucaagagcggcuacaaggacuggauccuguggaucuccuucgccaucagcugcuuccugcugugcguggcccugcucggcuucaucaugugggccugccagaaggggaacauccggugcaacaucugcaucuga

SEQ ID NO: 73861 - RNA, 1701 nt, Artificial Sequence
  derived and/or modified CDS sequence (opt1) from hemagglutinin__InfluenzaA__AGE89267
augaaggccauccugaucgugcuccuguacaccuucgccaccgcgaacgccgacacgcugugcaucggcuaccacgccaacaacagcaccgacaccgucgacaccgugcucgagaagaacgugacggucacccacuccguggaccugcuggaggacaagcacaacgggaagcucugcaagcugcgcggcguggcgccccugcaccucgggaagugcaacaucgccggcuggauccuggggaacccggagugcgagagccuguccaccgccagcuccuggagcuacaucgucgagaccuccagcuccgacaacggcacgugcuaccccggcgacuucaucgacuacgaggagcuccgggagcagcugagcuccgugagcuccuucgagcgcuucgagaucuuccccaagaccagcuccuggcccaaccacgacagcaacaagggggugaccgccgccugcccgcacgccggcgagaaguccuucuacaagaaccugaucuggcucgucaagaaggggaacagcuaccccaagcugaacaaguccuacaucaacgacaagggcaaggaggugcuggugcucugggggauccaccaccccagcaccagcacggaccagcagucccuguaccagaacgcggacgccuacgucuucgugggcaccagccgguacuccaagaaguucaagcccgagaucgccauccgcccgaaggugcgggaccaggagggccgcaugaacuacuacuggacccuggucgagcccggggacaagaucaccuucgaggccacgggcaaccucguggugccccgguacgccuucgcgauggagcgcaacgccgggagcggcaucaucaucuccgacacccccauccacgacugcaacacgaccugccagaccccgaagggcgccaucaacaccagccugcccuuccagaacauccaccccaucaccaucgggaagugccccaaguacgucaaguccaccaagcugcggcucgccacgggccugcgcaacgugccgagcauccagucccgggggcuguucggcgccaucgcgggguucaucgagggcggcuggaccgggaugguggacggcugguacggguaccaccaccagaacgagcagggcagcggguacgccgccgaccucaaguccacccagaacgccaucgacgagaucaccaacaaggucaacagcgugaucgagaagaugaacacgcaguucaccgccgugggcaaggaguucaaccaccuggagaagcgcaucgagaaccugaacaagaaggucgacgacggcuuccucgacaucuggaccuacaacgcggagcugcuggugcuccuggagaacgagcggacccuggacuaccacgacuccaacgucaagaaccucuacgagaaggucaagagccagcugaagaacaacgccaaggagaucgggaacggcugcuucgaguucuaccacaagugcgacaacacgugcauggaguccgugaagaacgggaccuacgacuaccccaaguacagcgaggaggccaagcugaaccgcgagaagaucgacggcgugaagcucgaguccacccggaucuaccagauccuggccaucuacagcaccguggccuccagccuggugcucgucgugagccugggggcgaucuccuucuggaugugcagcaacggcucccugcagugccgcaucugcaucuga

SEQ ID NO: 73862 - RNA, 1701 nt, Artificial Sequence
  derived and/or modified CDS sequence (opt1) from hemagglutinin__InfluenzaA__AGE89277
augaaggccauccugaucgugcuccuguacaccuucgccaccgcgaacgccgacacgcugugcaucggcuaccacgccaacaacagcaccgacaccgucgacaccgugcucgagaagaacgugacggucacccacuccguggaccugcuggaggacaagcacaacgggaagcucugcaagcugcgcggcguggcgccccugcaccucgggaagugcaacaucgccggcuggauccuggggaacccggagugcgagagccuguccaccgccagcuccuggagcuacaucgucgagaccuccagcuccgacaacggcacgugcuaccccggcgacuucaucgacuacgaggagcuccgggagcagcugaacagcguguccagcuucgagcgcuucgagaucuuccccaagaccuccagcuggcccaaccacgacuccaacaagggggugaccgccgccugcccgcacgccggcgagaaguccuucuacaagaaccugaucuggcucgucaagaaggggaacagcuaccccaagcugaacaagagcuacaucaacgacaagggcaaggaggugcuggugcucugggggauccaccaccccuccaccagcacggaccagcagagccuguaccagaacgcggacgccuacgucuucgugggcaccucccgguacagcaagaaguucaagcccgagaucgccauccgcccgaaggugcgggaccaggagggccgcaugaacuacuacuggacccuggucgagcccggggacaagaucaccuucgaggccacgggcaaccucguggugccccgguacgccuucgcgauggagcgcaacgccggguccggcaucaucaucagcgacacccccauccacgacugcaacacgaccugccagaccccgaagggcgccaucaacaccucccugcccuuccagaacauccaccccaucaccaucgggaagugccccaaguacgucaagagcaccaagcugcggcucgccacgggccugcgcaacgugccguccauccagagccgggggcuguucggcgccaucgcgggguucaucgagggcggcuggaccgggaugguggacggcugguacggguaccaccaccagaacgagcagggcuccggguacgccgccgaccucaagagcacccagaacgccaucgacgagaucaccaacaaggucaacuccgugaucgagaagaugaacacgcaguucaccgccgugggcaaggaguucaaccaccuggagaagcgcaucgagaaccugaacaagaaggucgacgacggcuuccucgacaucuggaccuacaacgcggagcugcuggugcuccuggagaacgagcggacccuggacuaccacgacagcaacgucaagaaccucuacgagaaggugaagucccagcugaagaacaacgccaaggagaucgggaacggcugcuucgaguucuaccacaagugcgacaacacgugcauggagagcgugaagaacgggaccuacgacuaccccaaguacuccgaggaggccaagcugaaccgcgagaagaucgacggcgucaagcucgagagcacccggaucuaccagauccuggccaucuacuccaccguggccagcucccuggugcucgucgugagccugggggcgaucagcuucuggaugugcuccaacggcagccugcagugccgcaucugcaucuga

SEQ ID NO: 73863 - RNA, 1701 nt, Artificial Sequence; identical to SEQ ID NO: 72380
  derived and/or modified CDS sequence (opt1) from hemagglutinin__InfluenzaA__AGE89287

SEQ ID NO: 73864 - RNA, 1701 nt, Artificial Sequence
  derived and/or modified CDS sequence (opt1) from hemagglutinin__InfluenzaA__AGE89298
augaaggccauccuggugguccuccuguacaccuucgccaccgcgaacgccgacacgcugugcaucggcuaccacgccaacaacagcaccgacaccguggacaccgugcucgagaagaacgucacggugacccacuccgugaaccugcuggaggacaagcacaacgggaagcucugcaagcugcgcggcgucgcgccccugcaccucgggaagugcaacaucgccggcuggauccuggggaacccggagugcgagagccuguccaccgccagcuccuggagcuacaucguggagaccuccagcuccgacaacggcacgugcuaccccggcgacuucaucgacuacgaggagcuccgggagcagcugagcuccgugagcuccuucgagcgcuucgagaucuuccccaagaccagcuccuggcccaaccacgacagcaacaagggggucaccgccgccugcccgcacgccggcgcgaagggguucuacaagaaccugaucuggcucgugaagaagggcaacuccuaccccaagcugagcaaguccuacaucaacgacaaggggaaggaggugcugguccucuggggcauccaccaccccagcaccacggccgaccagcagagccuguaccagaacgccgacaccuacguguucgugggcaccucccgguacagcaagaaguucaagcccgagaucgccauccgcccgaagguccgggaccaggaggggcgcaugaacuacuacuggacccugguggagcccggcgacaagaucacguucgaggccaccgggaaccucguggucccccgguacgcguucgccauggagcgcaacgccggcuccggcaucaucaucagcgacacccccgugcacgacugcaacaccacgugccagaccccgaagggggccaucaacaccucccugcccuuccagaacauccaccccaucaccaucggcaagugccccaaguacgucaagagcacgaagcugcggcucgccaccgggcugcgcaacgugccguccauccagagccggggccuguucggggcgaucgccggcuucaucgagggcggguggaccggcaugguggacgggugguacggcuaccaccaccagaacgagcagggguccggcuacgccgccgaccucaagagcacccagaacgccaucgacaagaucacgaacaaggugaacuccgucaucgagaagaugaacacccaguucaccgcggugggcaaggaguucaaccaccuggagaagcgcaucgagaaccugaacaagaaggucgacgacggguuccucgacaucuggaccuacaacgccgagcugcuggugcuccuggagaacgagcggacgcuggacuaccacgacagcaacgugaagaaccucuacgagaagguccgcaaccagcugaagaacaacgccaaggagaucggcaacgggugcuucgaguucuaccacaagugcgacaacacgugcauggaguccgugaagaacggcaccuacgacuaccccaaguacagcgaggaggccaagcugaaccgggaggagaucgacggggugaagcucgaguccacccgcaucuaccagauccuggccaucuacagcaccgucgcguccagccugauccucguggugucccugggcgccaucagcuucuggaugugcagcaacggcucccugcagugccggaucugcaucuga

SEQ ID NO: 73865 - RNA, 1701 nt, Artificial Sequence; identical to SEQ ID NO: 70933
  derived and/or modified CDS sequence (opt1) from hemagglutinin__InfluenzaA__AGE89308

SEQ ID NO: 73866 - RNA, 1701 nt, Artificial Sequence; identical to SEQ ID NO: 72375
  derived and/or modified CDS sequence (opt1) from hemagglutinin__InfluenzaA__AGE89318

SEQ ID NO: 73867 - RNA, 1701 nt, Artificial Sequence
  derived and/or modified CDS sequence (opt1) from hemagglutinin__InfluenzaA__AGE89329
augaagaccaucaucgcccugagcuacauccucugccugguguucgcccagaagcugcccggcaacgacgacuccaccgcgacgcucugccuggggcaccacgccgucccgaacggcaccaucgugaagaccaucaccaacgaccagaucgaggugacgaacgccaccgagcugguccagagcuccagcaccggggagaucugcaacagcccccaccagauccucgacggcgagaacugcacccugaucgacgcccugcucggggacccccagugcgacggcuuccagaacaagaagugggaccuguucguggagcgcagcaaggcccacuccaacugcuaccccuacgacgugccggacuacgcgagccugcggucccucgucgccagcuccggcacgcuggaguucaacaacgagagcuucaacuggaccggggugacccagaacggcaccuccagcgccugcauccgccgguccaacaacagcuucuucucccgccugaacuggcucacgcaccugaacuucaaguaccccgcccugaacgugaccaugcccaacaacgagcaguucgacaagcucuacaucuggggcguccaccaccccgggaccgacaaggaccagaucuuccuguacgcgcaggccagcgggcggaucaccguguccacgaagcgcagccagcaggccgugaucccgaacaucggcagccggccccgcguccggaacauccccucccgcgugagcaucuacuggaccaucgugaagcccggcgacauccugcucaucaacuccaccgggaaccugaucgccccgcggggcuacuucaagauccgcagcgggaaguccagcaucaugcgguccgacgcccccaucggcaagugcaacagcgcgugcaucacccccaacggcuccauccccaacgacaagccguuccagaacgucaaccgcaucacguacggggccugcccccgguacgugaagcagaacacccugaagcucgccaccggcaugcgcaacgugcccgagaagcagacccgggggaucuucggcgccaucgccggguucaucgagaacggcugggagggcauggucgacgggugguacggcuuccgccaccagaacagcgaggggcggggccaggcggccgaccugaaguccacgcaggccgccaucgaccagaucaacgggaagcugaaccgccucaucggcaagaccaacgagaaguuccaccagaucgagaaggaguucagcgagguggagggccggauccaggaccuggagaaguacguggaggacaccaagaucgaccugugguccuacaacgccgagcuccuggucgcgcuggagaaccagcacaccaucgaccucacggacagcgagaugaacaagcuguucgagaagaccaagaagcagcugcgcgagaacgccgaggacauggggaacggcugcuucaagaucuaccacaagugcgacaacgccugcaucggguccauccgcaacggcaccuacgaccacgacguguaccgggacgaggcccucaacaaccgcuuccagaucaaggggguggagcugaaguccggcuacaaggacuggauccuguggaucuccuucgccaucagcugcuuccuccugugcgucgcgcugcucggcuucaucaugugggccugccagaaggggaacauccggugcaacaucugcaucuga

SEQ ID NO: 73868 - RNA, 1701 nt, Artificial Sequence; identical to SEQ ID NO: 70478
  derived and/or modified CDS sequence (opt1) from hemagglutinin__InfluenzaA__AGE89340

SEQ ID NO: 73869 - RNA, 1701 nt, Artificial Sequence; identical to SEQ ID NO: 72378
  derived and/or modified CDS sequence (opt1) from hemagglutinin__InfluenzaA__AGE89350

SEQ ID NO: 73870 - RNA, 1701 nt, Artificial Sequence
  derived and/or modified CDS sequence (opt1) from hemagglutinin__InfluenzaA__AGE89361
augaaggccauccuggugguccuccuguacaccuucgccaccgcgaacgccgacacgcugugcaucggcuaccacgccaacaacagcaccgacaccguggacaccgugcucgagaagaacgucacggugacccacuccgugaaccugcuggaggacaagcacaacgggaagcucugcaagcugcgcggcgucgcgccccugcaccucgggaagugcaacaucgccggcuggauccuggggaacccggagugcgagagccuguccaccgccagcuccuggagcuacaucguggagaccuccagcuccgacaacggcacgugcuaccccggcgacuucaucaacuacgaggagcuccgggagcagcugagcuccgugagcuccuucgagcgcuucgagaucuuccccaagaccagcuccuggcccaaccacgacagcaacaagggggucaccgccgccugcccgcacgccggcgcgaaguccuucuacaagaaccugaucuggcucgugaagaaggggaacagcuaccccaagcuguccaagagcuacaucaacgacaagggcaaggaggugcugguccucugggggauccaccaccccagcaccacgaccgaccagcagucccuguaccagaacgccgacgccuacguguucgugggcaccagccgguacuccaagaaguucaagcccgagaucgccauccgcccgaagguccgggaccaggagggccgcaugaacuacuacuggacccugguggagcccggggacaagaucacguucgaggccaccggcaaccucguggucccccgguacgcguucgccauggagcgcaacgccgggagcggcaucaucaucuccgacacccccgugcacgacugcaacaccacgugccagaccccgaagggcgccaucaacaccagccugcccuuccagaacauccaccccaucaccaucgggaagugccccaaguacgugaaguccacgaagcugcggcucgccaccggccugcgcaacgucccgagcauccagucccgggggcuguucggcgcgaucgccggguucaucgagggcggcuggaccgggaugguggacggcugguacggguaccaccaccagaacgagcagggcagcggguacgccgccgaccucaaguccacccagaacgccaucgacaagaucacgaacaaggugaacagcgucaucgagaagaugaacacccaguucaccgcggugggcaaggaguucaaccaccuggagaagcgcaucgagaaccugaacaagaaggucgacgacggcuuccucgacaucuggaccuacaacgccgagcugcuggugcuccuggagaacgagcggacgcuggacuaccacgacuccaacgugaagaaccucuacgagaagguccgcaaccagcugaagaacaacgccaaggagaucgggaacggcugcuucgaguucuaccacaagugcgacaacacgugcauggagagcgugaagaacgggaccuacgacuaccccaaguacuccgaggaggccaagcugaaccgggaggagaucgacggcgugaagcucgagagcacccgcaucuaccagauccuggccaucuacuccaccgucgcgagcucccuggugcucguggucagccugggggccaucagcuucuggaugugcuccaacggcagccugcagugccggaucugcaucuga

SEQ ID NO: 73871 - RNA, 1701 nt, Artificial Sequence; identical to SEQ ID NO: 72375
  derived and/or modified CDS sequence (opt1) from hemagglutinin__InfluenzaA__AGE89371

SEQ ID NO: 73872 - RNA, 1701 nt, Artificial Sequence
  derived and/or modified CDS sequence (opt1) from hemagglutinin__InfluenzaA__AGE89382
augaaggccauccuggugguccuccuguacaccuucgccaccgcgaacgccgacacgcugugcaucggcuaccacgccaacaacagcaccgacaccguggacaccgugcucgagaagaacgucacggugacccacuccgugaaccugcuggaggacaagcacaacgggaagcucugcaagcugcgcggcgucgcgccccugcaccucgggaagugcaacaucgccggcuggauccuggggaacccggagugcgagagccuguccaccgccagcuccuggagcuacaucguggagaccuccagcuccgacaacggcacgugcuaccccggcgacuucaucaacuacgaggagcuccgggagcagcugagcuccgugagcuccuucgagcgcuucgagaucuuccccaagaccagcuccuggcccaaccacgacagcaacaagggggucaccgccgccugcccgcacgccggcgcgaaguccuucuacaagaaccugaucuggcucgugaagaaggggaacagcuaccccaagcuguccaagagcuacaucaacgacaagggcaaggaggugcugguccucugggggauccaccaccccagcaccuccgccgaccagcagagccuguaccagaacgccgacgccuacguguucgugggcacguccaaguacagcaagaaguucaagcccgagaucgccguccggccgaaggugcgcgaccaggagggccggaugaacuacuacuggacccuggugaagcccggggacaagaucaccuucgaggcgaccggcaaccuccuggucccccgcuacgccuucgccauggagcggaacgccggguccggcaucaucaucagcgacacgcccgugcacgacugcaacacgaccugccagaccccgaagggcgccaucaacaccucccugcccuuccagaacauccaccccaucaccaucgggaagugccccaaguacgucaagagcaccaagcuccgccuggcgaccggccugcggaacgugccguccauccagagccgcgggcuguucggcgccaucgccggguucaucgagggcggcuggacggggaugguggacggcugguacggguaccaccaccagaacgagcagggcuccggguacgccgccgaccucaagagcacccagaacgcgaucgacaagaucaccaacaaggugaacuccgucaucgagaagaugaacacccaguucacggccgugggcaaggaguucaaccaccuggagaagcggaucgagaaccucaacaagaaggucgacgacggcuuccuggacaucuggaccuacaacgccgagcugcucgugcugcuggagaacgagcgcacccucgacuaccacgacagcaacgugaagaaccuguacgagaagguccggucccagcugaagaacaacgccaaggagaucgggaacggcugcuucgaguucuaccacaagugcgacaacacgugcauggagagcgugaagaacgggaccuacgacuaccccaaguacuccgaggaggccaagcucaaccgcgaggagaucgacggcgugaagcuggagagcacccggaucuaccagauccuggcgaucuacuccaccgucgccagcagccucgugcugguggucucccugggggccaucagcuucuggaugugcuccaacggcagccuccagugccgcaucugcaucuga

SEQ ID NO: 73873 - RNA, 1701 nt, Artificial Sequence
  derived and/or modified CDS sequence (opt1) from hemagglutinin__InfluenzaA__AGE89392
augaagaccaucaucgcccugagcuacauccucugccugguguucgcccaggagcugcccggcaacgacaacuccaccgcgacgcucugccuggggcaccacgccgucccgaacggcaccaucgugaagaccaucaccaacgaccagaucgaggugacgaacgccaccgagcugguccagagcuccagcaccggggagaucugcaacagcccccaccagauccucgacggcgagaacugcacccugaucgacgcccugcucggggacccccagugcgacggcuuccagaacaagaagugggaccuguucguggagcgcagcaaggcccacuccaacugcuaccccuacgacgugccggacuacgcgagccugcggucccucgucgccagcuccggcacgcuggaguucaacaacgagagcuucaacuggaccggggugacccagaacggcaccuccagcgccugcauccgccgguccaacaacagcuucuucucccgccugaacuggcucacgcaccugaacuucaaguaccccgcccugaacgugaccaugcccaacaacgagcaguucgacaagcucuacaucuggggcguccaccaccccgggaccgacaaggaccagaucuuccuguacgcgcaggccagcgggcggaucaccguguccacgaagcgcagccagcaggccgugaucccgaacaucggcagccggccccgcguccggaacauccccucccgcgugagcaucuacuggaccaucgugaagcccggcgacauccugcucaucaacuccaccgggaaccugaucgccccgcggggcuacuucaagauccgcagcgggaaguccagcaucaugcgguccgacgcccccaucggcaagugcaacagcgcgugcaucacccccaacggcuccauccccaacgacaagccguuccagaacgucaaccgcaucacguacggggccugcccccgguacgugaagcagaacacccugaagcucgccaccggcaugcgcaacgugcccgagaagcagacccgggggaucuucggcgccaucgccggguucaucgagaacggcugggagggcauggucgacgggugguacggcuuccgccaccagaacagcgaggggcggggccaggcggccgaccugaaguccacgcaggccgccaucgaccagaucaacgggaagcugaaccgccucaucggcaagaccaacgagaaguuccaccagaucgagaaggaguucagcgagguggagggccggauccaggaccuggagaaguacguggaggacaccaagaucgaccugugguccuacaacgccgagcuccuggucgcgcuggagaaccagcacaccaucgaccucacggacagcgagaugaacaagcuguucgagaagaccaagaagcagcugcgcgagaacgccgaggacauggggaacggcugcuucaagaucuaccacaagugcgacaacgccugcaucggguccauccgcaacggcaccuacgaccacgacguguaccgggacgaggcccucaacaaccgcuuccagaucaaggggguggagcugaaguccggcuacaaggacuggauccuguggaucuccuucgccaucagcugcuuccuccugugcgucgcgcugcucggcuucaucaugugggccugccagaaggggaacauccggugcaacaucugcaucuga

SEQ ID NO: 73874 - RNA, 1701 nt, Artificial Sequence; identical to SEQ ID NO: 73861
  derived and/or modified CDS sequence (opt1) from hemagglutinin__InfluenzaA__AGE89422

SEQ ID NO: 73875 - RNA, 1701 nt, Artificial Sequence; identical to SEQ ID NO: 72358
  derived and/or modified CDS sequence (opt1) from hemagglutinin__InfluenzaA__AGE89719

SEQ ID NO: 73876 - RNA, 1701 nt, Artificial Sequence
  derived and/or modified CDS sequence (opt1) from hemagglutinin__InfluenzaA__AGE89730
augaaggccauccuggugguccuccuguacaccuucgccaccgcgaacgccgacacgcugugcaucggcuaccacgccaacaacagcaccgacaccguggacaccgugcucgagaagaacgucacggugacccacuccgugaaccugcuggaggacaagcacaacgggaagcucugcaagcugcgcggcgucgcgccccugcaccucgggaagugcaacaucgccggcuggauccuggggaacccggagugcgagagccuguccaccgccagcuccuggagcuacaucguggagaccuccagcuccgacaacggcacgugcuaccccggcgacuucaucaacuacgaggagcuccgggagcagcugagcuccgugagcuccuucgagcgcuucgagaucuuccccaagaccagcuccuggcccaaccacgacagcaacaagggggucaccgccgccugcccgcacgccggcgcgaaguccuucuacaagaaccugaucuggcucgugaagaaggggaacagcuaccccaagcuguccaagagcuacaucaacgacaagggcaaggaggugcugguccucugggggauccaccaccccagcaccuccgccgaccagcagagccuguaccagaacgccgacgccuacguguucgugggcacguccaaguacagcaagaaguucaagcccgagaucgccguccggccgaaggugcgcgaccaggagggccggaugaacuacuacuggacccugguggagcccggggacaagaucaccuucgaggcgaccggcaaccuccuggucccccgcuacgccuucgccauggagcggaacgccggguccggcaucaucaucagcgacacgcccgugcacgacugcaacacgaccugccagaccccgaagggcgccaucaacaccucccugcccuuccagaacauccaccccaucaccaucgggaagugccccaaguacgucaagagcaccaagcuccgccuggcgaccggccugcggaacgugccguccauccagagccgcgggcuguucggcgccaucgccggguucaucgagggcggcuggacggggaugguggacggcugguacggguaccaccaccagaacggccagggguccggcuacgccgccgaccucaagagcacccagaacgcgaucgacaagaucaccaacaaggugaacuccgucaucgagaagaugaacacccaguucacggccgugggcaaggaguucaaccaccuggagaagcggaucgagaaccucaacaagaaggucgacgacggguuccuggacaucuggaccuacaacgccgagcugcucgugcugcuggagaacgagcgcacccucgacuaccacgacagcaacgugaagaaccuguacgagaagguccggucccagcugaagaacaacgccaaggagaucggcaacgggugcuucgaguucuaccacaagugcgacaacacgugcauggagagcgugaagaacggcaccuacgacuaccccaaguacuccgaggaggccaagcucaaccgcgaggagaucgacggggugaagcuggagagcacccggaucuaccagauccuggcgaucuacuccaccgucgccagcagccucgugcugguggucucccugggcgccaucagcuucuggaugugcuccaacggcagccuccagugccgcaucugcaucuga

SEQ ID NO: 73877 - RNA, 1701 nt, Artificial Sequence; identical to SEQ ID NO: 72375
  derived and/or modified CDS sequence (opt1) from hemagglutinin__InfluenzaA__AGE89740

SEQ ID NO: 73878 - RNA, 1701 nt, Artificial Sequence
  derived and/or modified CDS sequence (opt1) from hemagglutinin__InfluenzaA__AGE89751
augaagaccaucaucgcccugagcuacauccucugccugguguucgcccagaagcugcccggcaacgacaacuccaccgcgacgcucugccuggggcaccacgccgucccgaacggcaccaucgugaagaccaucaccaacgaccagaucgaggugacgaacgccaccgagcugguccagagcuccagcgccggggagaucugcgacagcccccaccacauccucgacggcgagaacugcacccugaucgacgcccugcucggggacccccagugcgacggcuuccagaacaagaagugggaccuguucguggagcgcucccgggcguacuccaacugcuaccccuacgacgugccggacuacgccagccugcgcucccucgucgccagcuccggcacccuggaguucaacaacgagagcuucaacuggacgggggugacccagaacggcaccuccagcgccugcauccggcgcuccaacaacagcuucuucucccggcugaacuggcucacccaccugaacuucaaguaccccgcgcugaacgugacgaugcccaacaacgagcaguucgacaagcucuacaucuggggcguccaccaccccgggaccgacaaggaccagaucuuccuguacgcccaggccagcgggcgcaucaccguguccaccaagcggagccagcaggccgugaucccgaacaucggcagccgcccccggguccgcaacauccccucccggaucagcaucuacuggacgaucgugaagcccggcgacauccugcucaucaacuccaccgggaaccugaucgccccgcgcggcuacuucaagauccggagcgggaaguccagcaucaugcgcuccgacgcgcccaucggcaagugcaacagcgagugcaucacccccaacggcuccauccccaacgacaagccguuccagaacgugaaccggaucaccuacggggccugcccccgcuacgucaagcagagcacgcugaagcucgccaccggcaugcggaacgugcccgagaagcagacccgcgggaucuucggcgccaucgccggguucaucgagaacggcugggagggcaugauggacgggugguacggcuuccggcaccagaacuccgaggggcgcggccaggcggccgaccucaagagcacccaggccgccaucgaccagaucaacgggaagcugaaccggcucaucggcaagacgaacgagaaguuccaccagaucgagaaggaguucuccgagguggagggccgcauccaggaccuggagaaguacgucgaggacaccaagaucgaccuguggagcuacaacgccgagcuccugguggcgauggagaaccagcacaccaucgaccugaccgacuccgagaugaacaagcuguucgagaagacgaagaagcagcugcgcgagaacgccgaggacauggggaacggcugcuucaagaucuaccacaagugcgacaacgccugcaucgggagcauccggaacggcaccuacgaccacgacguguaccgcgacgaggcccuguccaaccgguuccagaucaagggggucgagcucaagagcggcuacaaggacuggauccuguggaucuccuucgccaucagcugcuuccugcucugcguggcgcugcugggcuucaucaugugggccugccagaaggggaacauccgcugcaacaucugcaucuga

SEQ ID NO: 73879 - RNA, 1701 nt, Artificial Sequence; identical to SEQ ID NO: 72378
  derived and/or modified CDS sequence (opt1) from hemagglutinin__InfluenzaA__AGE89762

SEQ ID NO: 73880 - RNA, 1701 nt, Artificial Sequence
  derived and/or modified CDS sequence (opt1) from hemagglutinin__InfluenzaA__AGF44891
augaaggccauccuggugguccuccuguacaccuucgccaccgcgaacgccgacacgcugugcaucggcuaccacgccaacaacagcaccgacaccguggacaccgugcucgagaagaacgucacggugacccacuccgugaaccugcuggaggacaagcacaacgggaagcucugcaagcugcgcggcgucgcgccccugcaccucgggaagugcaacaucgccggcuggauccuggggaacccggagugcgagagccuguccaccgccagcuccuggagcuacaucguggagaccuccagcuccgacaacggcacgugcuaccccggcgacuucaucaacuacgaggagcuccgggagcagcugagcuccgugagcuccuucgagcgcuucgagaucuuccccaagaccagcuccuggcccaaccacgacagcaacaagggggucaccgccgccugcccgcacgccggcgcgaaguccuucuacaagaaccugaucuggcucgugaagaaggggaacagcuaccccaagcuguccaagagcuacaucaacgacaagggcaaggaggugcugguccucugggggauccaccaccccagcaccacggccgaccagcagucccuguaccagaacgccgacgccuacguguucgugggcaccagccgguacuccaagaaguucaagcccgagaucgccauccgcccgaagguccgggaccaggagggccgcaugaacuacuacuggacccugaucgagcccggggacaagaucaccuucgaggcgacgggcaaccucguggugccccgguacgccuucgccauggagcgcaacgccgggagcggcaucaucaucuccgacacccccguccacgacugcaacacgaccugccagaccccggagggcgccaucaacaccagccugcccuuccagaacauccaccccaucaccaucgggaagugccccaaguacgugaaguccaccaagcugcggcucgcgacgggccugcgcaacgugccgagcauccagucccgggggcuguucggcgccaucgccggguucaucgagggcggcuggaccgggauggucgacggcugguacggguaccaccaccagaacgagcagggcagcggguacgccgccgaccucaaguccacccagaacgcgguggacaagaucaccaacaaggugaacagcgucaucgagaagaugaacacgcaguucaccgccgugggcaaggaguucaaccaccuggagaagcgcaucgagaaccugaacaagaaggucgacgacggcuuccucgacaucuggaccuacaacgccgagcugcuggugcuccuggagaacgagcggacccuggacuaccacgacuccaacgugaagaaccucuacgagaagguccgcaaccagcugaagaacaacgccaaggagaucgggaacggcugcuucgaguucuaccacaagugcgacaacacgugcauggagagcgugaagaacgggaccuacgacuaccccaaguacuccgaggaggccaagcugaaccgggagaagaucgacggcgugaagcucgagagcacccgcaucuaccagauccuggcgaucuacuccaccgucgccagcucccuggugcucguggucagccugggggccaucagcuucuggaugugcuccaacggcagccugcagugccggaucugcaucuga

SEQ ID NO: 73881 - RNA, 1701 nt, Artificial Sequence; identical to SEQ ID NO: 73880
  derived and/or modified CDS sequence (opt1) from hemagglutinin__InfluenzaA__AGF44892

SEQ ID NO: 73882 - RNA, 1701 nt, Artificial Sequence
  derived and/or modified CDS sequence (opt1) from hemagglutinin__InfluenzaA__AGF44895
augaagaccaucaucgcccugagcuacauccucugccugguguucgcccagaagcugcccggcaacgacaacuccaccgcgacgcucugccuggggcaccacgccgucccgaacggcaccaucgugaagaccaucaccaacgaccgcaucgaggugacgaacgccaccgagcugguccagaacagcuccaucggggagaucugcgacagcccccaccagauccucgacggcgagaacugcacccugaucgacgcccugcucggggacccccagugcgacggcuuccagaacaagaagugggaccuguucguggagcgguccaaggccuacagcaacugcuaccccuacgacgugccggacuacgcgucccugcgcagccucgucgccuccagcggcacccuggaguucaacaacgaguccuucaacuggacgggggugacccagaacggcaccagcuccgccugcauccggcgcagcaacuccagcuucuucucccggcugaacuggcucacccaccugaacuucaaguaccccgcccugaacgugacgaugcccaacaacgagcaguucgacaagcucuacaucuggggcguccaccaccccgggaccgacaaggaccagaucuuccuguacgcgcagagcuccgggcgcaucaccgugagcaccaagcggagccagcaggccgugaucccgaacaucggcucccgcccccggauccgcaacauccccagccggaucuccaucuacuggacgaucgucaagcccggcgacauccugcucaucaacagcaccgggaaccugaucgccccgcgcggcuacuucaagauccgguccggcaagagcuccaucaugcgcagcgacgcccccaucgggaagugcaaguccgagugcaucacccccaacggcagcauccccaacgacaagccguuccagaacgugaaccggaucaccuacggggccugcccccgcuacgugaagcaguccacgcugaagcucgcgaccggcaugcggaacguccccgagaagcagacccgcgggaucuucggcgccaucgccggguucaucgagaacggcugggagggcaugguggacgggugguacggcuuccggcaccagaacagcgaggggcgcggccaggccgccgaccugaaguccacccaggcggccaucgaccagaucaacgggaagcugaaccggcucaucggcaagacgaacgagaaguuccaccagaucgagaaggaguucagcgagguggagggccgcauccaggaccuggagaaguacgucgaggacaccaagaucgaccugugguccuacaacgccgagcuccugguggcccuggagaaccagcacaccaucgaccucaccgacagcgagaugaacaagcuguucgagaagacgaagaagcagcugcgcgagaacgccgaggacauggggaacggcugcuucaagaucuaccacaagugcgacaacgcgugcaucggguccauccggaacggcaccuacgaccacaacguguaccgcgacgaggcccucaacaaccgguuccagaucaagggggucgagcucaagagcggcuacaaggacuggauccuguggaucuccuucgccaucagcugcuuccugcugugcguggcccugcucggcuucaucaugugggccugccagaaggggaacauccgcugcaacaucugcaucuga

SEQ ID NO: 73883 - RNA, 1701 nt, Artificial Sequence; identical to SEQ ID NO: 73859
  derived and/or modified CDS sequence (opt1) from hemagglutinin__InfluenzaA__AGF44896

SEQ ID NO: 73884 - RNA, 1701 nt, Artificial Sequence
  derived and/or modified CDS sequence (opt1) from hemagglutinin__InfluenzaA__AGF44897
augaagaccaucaucgcccugagcuacauccucugccugguguucgcccaggagcugcccggcaacgacgacuccaccgcgacgcucugccuggggcaccacgccgucccgaacggcaccaucgugaagaccaucaccaacgaccagaucgaggugacgaacgccaccgagcugguccagagcuccagcaccggggagaucugcaacagcccccaccagauccucgacggcgagaacugcacccugaucgacgcccugcucggggacccccagugcgacggcuuccagaacaagaagugggaccuguucguggagcgcagcaaggcccacuccaacugcuaccccuacgacgugccggacuacgcgagccugcggucccucgucgccagcuccggcacgcuggaguucaacaacgagagcuucaacuggaccggggugacccagaacggcaccuccagcgccugcaugcgccgguccaacaacagcuucuucucccgccugaacuggcucacgcaccugaacuucaaguaccccgcccugaacgugaccaugcccaacaacgagcaguucgacaagcucuacaucuggggcguccaccaccccgggaccgacaaggaccagaucuuccuguacgcgcaggccagcgggcggaucaccguguccacgaagcgcagccagcaggccgugaucccgaacaucggcagccggccccgcguccggaacauccccucccgcgugagcaucuacuggaccaucgugaagcccggcgacauccugcucaucaacuccaccgggaaccugaucgccccgcggggcuacuucaagauccagagcgggaaguccagcaucaugcgcuccgacgcccccaucggcaagugcaacagcgcgugcaucacccccaacggcuccauccccaacgacaagccguuccagaacgucaaccggaucacguacggggccugcccccgcuacgugaagcagaacacccugaagcucgccaccggcaugcggaacgugcccgagaagcagacccgcgggaucuucggcgccaucgccggguucaucgagaacggcugggagggcauggucgacgggugguacggcuuccggcaccagaacagcgaggggcgcggccaggcggccgaccugaaguccacgcaggccgccaucgaccagaucaacgggaagcugaaccggcucaucggcaagaccaacgagaaguuccaccagaucgagaaggaguucagcgagguggagggccgcauccaggaccuggagaaguacguggaggacaccaagaucgaccugugguccuacaacgccgagcuccuggucgcgcuggagaaccagcacaccaucgaccucacggacagcgagaugaacaagcuguucgagaagaccaagaagcagcugcgggagaacgccgaggacauggggaacggcugcuucaagaucuaccacaagugcgacaacgccugcaucggguccauccgcaacggcaccuacgaccacgacguguaccgcgacgaggcccucaacaaccgguuccagaucaaggggguggagcugaaguccggcuacaaggacuggauccuguggaucuccuucgccaucagcugcuuccuccugugcgucgcgcugcucggcuucaucaugugggccugccagaaggggaacauccgcugcaacaucugcaucuga

SEQ ID NO: 73885 - RNA, 1701 nt, Artificial Sequence; identical to SEQ ID NO: 73882
  derived and/or modified CDS sequence (opt1) from hemagglutinin__InfluenzaA__AGF44900

SEQ ID NO: 73886 - RNA, 1701 nt, Artificial Sequence; identical to SEQ ID NO: 73882
  derived and/or modified CDS sequence (opt1) from hemagglutinin__InfluenzaA__AGF44901

SEQ ID NO: 73887 - RNA, 1701 nt, Artificial Sequence; identical to SEQ ID NO: 73882
  derived and/or modified CDS sequence (opt1) from hemagglutinin__InfluenzaA__AGF44902

SEQ ID NO: 73888 - RNA, 1701 nt, Artificial Sequence; identical to SEQ ID NO: 73882
  derived and/or modified CDS sequence (opt1) from hemagglutinin__InfluenzaA__AGF44903

SEQ ID NO: 73889 - RNA, 1701 nt, Artificial Sequence; identical to SEQ ID NO: 73882
  derived and/or modified CDS sequence (opt1) from hemagglutinin__InfluenzaA__AGF44904

SEQ ID NO: 73890 - RNA, 1701 nt, Artificial Sequence
  derived and/or modified CDS sequence (opt1) from hemagglutinin__InfluenzaA__AGF44905
augaagaccaucaucgcccugagcuacauccucugccugguguucgcccagaagcugcccggcaacgacaacuccaccgcgacgcucugccuggggcaccacgccgucccgaacggcaccaucgugaagaccaucaccaacgaccgcaucgaggugacgaacgccaccgagcugguccagaacagcuccaucggggagaucugcgacagcccccaccagauccucgacggcgagaacugcacccugaucgacgcccugcucggggacccccagugcgacggcuuccagaacaagaagugggaccuguucguggagcgguccaaggccuacagcaacugcuaccccuacgacgugccggacuacgcgucccugcgcagccucgucgccuccagcggcacccuggaguucaacaacgaguccuucaacuggacgggggugacccagaacggcaccagcuccgccugcauccggcgcagcaacuccagcuucuucucccggcugaacuggcucacccaccugaacuucaaguaccccgcccugaacgugacgaugcccaacaacgagcaguucgacaagcucuacaucuggggcguccaccaccccgggaccgacaaggaccagaucuuccuguacgcgcagagcuccgggcgcaucaccgugagcaccaagcggagccagcaggccgugaucccgaacaucggcucccgcccccggauccgcaacauccccagccggaucuccaucuacuggacgaucgucaagcccggcgacauccugcucaucaacagcaccgggaaccugaucgccccgcgcggcuacuucaagauccgguccggcaagagcuccaucaugcgcagcgacgcccccaucgggaagugcaaguccgagugcaucacccccaacggcagcauccccaacgacaagccguuccagaacgugaaccggaacaccuacggggccugcccccgcuacgugaagcaguccacgcugaagcucgcgaccggcaugcggaacguccccgagaagcagacccgcgggaucuucggcgccaucgccggguucaucgagaacggcugggagggcaugguggacgggugguacggcuuccggcaccagaacagcgaggggcgcggccaggccgccgaccugaaguccacccaggcggccaucgaccagaucaacgggaagcugaaccggcucaucggcaagacgaacgagaaguuccaccagaucgagaaggaguucagcgagguggagggccgcauccaggaccuggagaaguacgucgaggacaccaagaucgaccugugguccuacaacgccgagcuccugguggcccuggagaaccagcacaccaucgaccucaccgacagcgagaugaacaagcuguucgagaagacgaagaagcagcugcgcgagaacgccgaggacauggggaacggcugcuucaagaucuaccacaagugcgacaacgcgugcaucggguccauccggaacggcaccuacgaccacaacguguaccgcgacgaggcccucaacaaccgguuccagaucaagggggucgagcucaagagcggcuacaaggacuggauccuguggaucuccuucgccaucagcugcuuccugcugugcguggcccugcucggcuucaucaugugggccugccagaaggggaacauccgcugcaacaucugcaucuga

SEQ ID NO: 73891 - RNA, 1701 nt, Artificial Sequence; identical to SEQ ID NO: 73882
  derived and/or modified CDS sequence (opt1) from hemagglutinin__InfluenzaA__AGF44906

SEQ ID NO: 73892 - RNA, 1701 nt, Artificial Sequence
  derived and/or modified CDS sequence (opt1) from hemagglutinin__InfluenzaA__AGF44908
augaagaccaucaucgcccugagcuacauccucugccugguguucgcccagaagcugcccggcaacgacaacuccaccgcgacgcucugccuggggcaccacgccgucccgaacggcaccaucgugaagaccaucaccaacgaccgcaucgaggugacgaacgccaccgagcugguccagaacagcuccaucggggagaucugcgacagcccccaccagauccucgacggcgagaacugcacccugaucgacgcccugcucggggacccccagugcgacggcuuccagaacaagaagugggaccuguucguggagcgguccaaggccuacagcaacugcuaccccuacgacgugccggacuacgcgucccugcgcagccucgucgccuccagcggcacccuggaguucaacaacgaguccuucaacugggccggggugacgcagaacggcaccagcuccgccugcauccgggggagcaacuccagcuucuucucccgccugaacuggcucacccaccugaacuucaaguaccccgcgcugaacgugaccaugcccaacaacgagcaguucgacaagcucuacaucuggggcguccaccaccccgggacggacaaggaccagaucuuccuguacgcccagagcuccggccggaucaccgugagcaccaagcgcagccagcaggccgugaucccgaacaucggcucccggccccgcauccggaacauccccagccgcaucuccaucuacuggaccaucgucaagcccggggacauccugcucaucaacagcacgggcaaccugaucgccccgcggggguacuucaagauccgcuccggcaagagcuccaucaugcggagcgacgcccccaucggcaagugcaaguccgagugcaucacccccaacgggagcauccccaacgacaagccguuccagaacgugaaccgcaucaccuacggcgcgugcccccgguacgugaagcaguccacccugaagcucgccacggggaugcgcaacguccccgagaagcagacccggggcaucuucggggccaucgccggcuucaucgagaacggcugggaggggaugauggacggcugguacggguuccgccaccagaacagcgagggccgggggcaggccgcggaccugaaguccacccaggccgccaucgaccagaucaacggcaagcugaaccgccucaucggcaagaccaacgagaaguuccaccagaucgagaaggaguucagcgagguggaggggcggauccaggaccuggagaaguacguggaggacacgaagaucgaccugugguccuacaacgccgagcuccuggucgcccuggagaaccagcacaccaucgaccucaccgacagcgagaugaacaagcuguucgagaagaccaagaagcagcugcgcgagaacgcggaggacaugggcaacgggugcuucaagaucuaccacaagugcgacaacgccugcaucggcuccauccgcaacgggacguacgaccacgacguguaccgggacgaggcccucaacaaccgcuuccagaucaagggcguggagcucaagagcggcuacaaggacuggauccuguggaucuccuucgccaucagcugcuuccugcugugcgucgcccugcucggguucaucaugugggcgugccagaagggcaacauccggugcaacaucugcaucuga

SEQ ID NO: 73893 - RNA, 1701 nt, Artificial Sequence; identical to SEQ ID NO: 73882
  derived and/or modified CDS sequence (opt1) from hemagglutinin__InfluenzaA__AGF44909

SEQ ID NO: 73894 - RNA, 1701 nt, Artificial Sequence; identical to SEQ ID NO: 73882
  derived and/or modified CDS sequence (opt1) from hemagglutinin__InfluenzaA__AGF44910

SEQ ID NO: 73895 - RNA, 1701 nt, Artificial Sequence
  derived and/or modified CDS sequence (opt1) from hemagglutinin__InfluenzaA__AGF44911
augaagaccaucaucgcccugagcuacauccucugccugguguucgcccagaagcugcccggcaacgacaacuccaccgcgacgcucugccuggggcaccacgccgucccgaacggcaccaucgugaagaccaucaccaacgaccgcaucgaggugacgaacgccaccgagcugguccagaacagcuccaucggggagaucugcgacagcccccaccagauccucgacggcgagaacugcacccugaucgacgcccugcucggggacccccagugcgacggcuuccagaacaagaagugggaccuguucguggagcgguccaaggccuacagcaacugcuaccccuacgacgugccggacuacgcgucccugcgcagccucgucgccuccagcggcacccuggaguucaacaacgaguccuucaacugggccggggugacgcagaacggcaccagcuccgccugcauccgggggagcaacuccagcuucuucucccgccugaacuggcucacccaccugaacuucaaguaccccgcgcugaacgugaccaugcccaacaacgagcaguucgacaagcucuacaucuggggcguccaccaccccgggacggacaaggaccagaucuuccuguacgcccagagcuccggccggaucaccgugagcaccaagcgcagccagcaggccgugaucccgaacaucggcucccggccccgcauccggaacauccccagccgcaucuccaucuacuggaccaucgucaagcccggggacauccugcucaucaacagcacgggcaaccugaucgccccgcggggguacuucaagauccgcuccggcaagagcuccaucaugcggagcgacgcccccaucggcaagugcaaguccgagugcaucacccccaacgggagcauccccaacgacaagccguuccagaacgugaaccgcaucaccuacggcgcgugcccccgguacgugaagcaguccacccugaagcucgccacggggaugcgcaacguccccgagaagcagacccggggcaucuucggggccaucgccggcuucaucgagaacggcugggaggggaugguggacggcugguacggguuccgccaccagaacagcgagggccgggggcaggccgcggaccugaaguccacccaggccgccaucgaccagaucaacggcaagcugaaccgccucaucggcaagaccaacgagaaguuccaccagaucgagaaggaguucagcgagguggaggggcggauccaggaccuggagaaguacgucgaggacacgaagaucgaccugugguccuacaacgccgagcuccugguggcccuggagaaccagcacaccaucgaccucaccgacagcgagaugaacaagcuguucgagaagaccaagaagcagcugcgcgagaacgcggaggacaugggcaacgggugcuucaagaucuaccacaagugcgacaacgccugcaucggcuccauccgcaacgggacguacgaccacgacguguaccgggacgaggcccucaacaaccgcuuccagaucaagggcgucgagcucaagagcggcuacaaggacuggauccuguggaucuccuucgccaccagcugcuuccugcugugcguggcccugcucggguucaucaugugggcgugccagaagggcaacauccggugcaacaucugcaucuga

SEQ ID NO: 73896 - RNA, 1701 nt, Artificial Sequence; identical to SEQ ID NO: 73882
  derived and/or modified CDS sequence (opt1) from hemagglutinin__InfluenzaA__AGF44912

SEQ ID NO: 73897 - RNA, 1701 nt, Artificial Sequence; identical to SEQ ID NO: 73882
  derived and/or modified CDS sequence (opt1) from hemagglutinin__InfluenzaA__AGF44913

SEQ ID NO: 73898 - RNA, 1701 nt, Artificial Sequence
  derived and/or modified CDS sequence (opt1) from hemagglutinin__InfluenzaA__AGF44914
augaagaccaucaucgcccugagcuacauccucugccugguguucgcccagaagcugcccggcaacgacaacuccaccgcgacgcucugccuggggcaccacgccgucccgaacggcaccaucgugaagaccaucaccaacgaccgcaucgaggugacgaacgccaccgagcugguccagaacagcuccaucggggagaucugcgacagcccccaccagauccucgacggcgagaacugcacccugaucgacgcccugcucggggacccccagugcgacggcuuccagaacaagaagugggaccuguucguggagcgguccaaggccuacagcaacugcuaccccuacgacgugccggacuacgcgucccugcgcagccucgucgccuccagcggcacccuggaguucaacaacgaguccuucaacuggacgggggugacccagaacggcaccagcuccgccugcauccggcgcagcaacuccagcuucuucucccggcugaacuggcucacccaccugaacuucaaguaccccgcccugaacgugacgaugcccaacaacgagcaguucgacaagcucuacaucuggggcguccaccaccccgggaccgacaaggaccagaucuuccuguacgcgcagagcuccgggcgcaucaccgugagcaccaagcggagccagcaggccgugaucccgaacaucggcucccgcccccggauccgcaacauccccagccggaucuccaucuacuggacgaucgucaagcccggcgacauccugcucaucaacagcaccgggaaccugaucgccccgcgcggcuacuucaagauccgguccggcaagagcuccaucaugcgcagcgacgcccccaucgggaagugcaaguccgagugcaucacccccaacggcagcauccccaacgacaagccguuccagaacgugaacaagaucaccuacggggccugcccccgguacgugaagcaguccacgcugaagcucgcgaccggcaugcgcaacguccccgagaagcagacccgggggaucuucggcgccaucgccggguucaucgagaacggcugggagggcaugguggacgggugguacggcuuccgccaccagaacagcgaggggcggggccaggccgccgaccugaaguccacccaggcggccaucgaccagaucaacgggaagcugaaccgccucaucggcaagacgaacgagaaguuccaccagaucgagaaggaguucagcgagguggagggccggauccaggaccuggagaaguacgucgaggacaccaagaucgaccugugguccuacaacgccgagcuccugguggcccuggagaaccagcacaccaucgaccucaccgacagcgagaugaacaagcuguucgagaagacgaagaagcagcugcgcgagaacgccgaggacauggggaacggcugcuucaagaucuaccacaagugcgacaacgcgugcaucggguccauccgcaacggcaccuacgaccacaacguguaccgggacgaggcccucaacaaccgcuuccagaucaagggggucgagcucaagagcggcuacaaggacuggauccuguggaucuccuucgccaucagcugcuuccugcugugcguggcccugcucggcuucaucaugugggccugccagaaggggaacauccggugcaacaucugcaucuga

SEQ ID NO: 73899 - RNA, 1701 nt, Artificial Sequence; identical to SEQ ID NO: 73859
  derived and/or modified CDS sequence (opt1) from hemagglutinin__InfluenzaA__AGF44916

SEQ ID NO: 73900 - RNA, 1701 nt, Artificial Sequence
  derived and/or modified CDS sequence (opt1) from hemagglutinin__InfluenzaA__AGF44917
augaagaccaucaucgcccugagcuacauccucugccugguguucgcccagaagauccccggcaacgacaacuccaccgcgacgcugugccucgggcaccacgccgucccgaacggcaccaucgugaagaccaucaccaacgagcagaucgaggugacgaacgccaccgagcugguccagagcuccagcaccggggagaucugcaacagcccccaccagauccuggacggcgagaacugcacccucaucgacgcccugcugggggacccccagugcgacggcuuccagaacaagaagugggaccucuucguggagcgcuccaaggccuacuccaacugcuaccccuacgacgugccggacuacgcgagccugcggucccuggucgccagcuccggcacgcucgaguucaacaacgagagcuucaacuggaccggggugacccagaacggcaccuccagcgccugcauccgcggguccgacagcuccuucuucagccggcugaacuggcugacgcaccucaacuucaaguaccccgcccugaacgugaccaugcccaacaacgagcaguucgacaagcuguacaucuggggcguccaccaccccgggaccgacaaggaccagaucuuccucuacgcgcaggccuccggccgcaucaccgugagcacgaagcggagccagcaggccgugaucccgaacaucggcucccgcccccggauccgcaacauccccagccggaucuccaucuacuggaccaucgucaagcccggggacauccugcugaucaacagcaccggcaaccucaucgccccgcgcggguacuucaagauccgguccggcaagagcuccaucaugcgcagcgacgcccccaucggcaagugcaacuccgagugcaucacccccaacgggagcauccccaacgacaagccguuccagaacgugaaccggaucacguacggcgcgugcccccgcuacgugaagcagaacacccugaagcuggccaccgggaugcggaacguccccgagaagcagacccgcggcaucuucggggccaucgccggcuucaucgagaacggcugggaggggaugauggacggcugguacggguuccggcaccagaacuccgagggccgcgggcaggccgcggaccucaagagcacgcaggccgccaucgaccagaucaacggcaagcugaaccggcugaucggcaagaccaacgagaaguuccaccagaucgagaaggaguucuccgagguggaggggcgcauccaggaccucgagaaguacguggaggacaccaagaucgaccuguggagcuacaacgccgagcugcucgucgcccuggagaaccagcacaccaucgaccugacggacuccgagaugaacaagcuguucgagaagaccaagaagcagcuccgggagaacgcggaggacaugggcaacgggugcuucaagaucuaccacaagugcgacaacgccugcaucggcagcauccgcaacgggaccuacaaccacgacguguaccgcgacgaggcccugaacaaccgguuccagaucaagggcguggagcucaaguccggcuacaaggacuggauccuguggaucagcuucgccaucuccugcuuccugcucugcgucgcccugcugggguucaucaugugggcgugccagaagggcaacauccgcugcaacaucugcaucuga

SEQ ID NO: 73901 - RNA, 1701 nt, Artificial Sequence; identical to SEQ ID NO: 73859
  derived and/or modified CDS sequence (opt1) from hemagglutinin__InfluenzaA__AGF44918

SEQ ID NO: 73902 - RNA, 1701 nt, Artificial Sequence
  derived and/or modified CDS sequence (opt1) from hemagglutinin__InfluenzaA__AGF44919
augaagaccaucaucgcccugagcuacauccucugccugguguucgcccagaagcugcccggcaacgacaacuccaccgcgacgcucugccuggggcaccacgccgucccgaacggcaccaucgugaagaccaucaccaacgaccgcaucgaggugacgaacgccaccgagcugguccagaacagcuccaucggggagaucugcgacagcccccaccagauccucgacggcgagaacugcacccugaucgacgcccugcucggggacccccagugcgacggcuuccagaacaagaagugggaccuguucguggagcgguccaaggccuacagcaacugcuaccccuacgacgugccggacuacgcgucccugcgcagccucgucgccuccagcggcacccuggaguucaacaacgaguccuucaacugggccggggugacgcagaacggcaccagcuccgccugcauccgggggagcaacuccagcuucuucucccgccugaacuggcucacccaccugaacuucaaguaccccgcgcugaacgugaccaugcccaacaacgagcaguucgacaagcucuacaucuggggcguccaccaccccgggacggacaaggaccagaucuuccuguacgcccagagcuccggccggaucaccgugagcaccaagcgcagccagcaggccgugaucccgaacaucggcucccggccccgcauccggaacauccccagccgcaucuccaucuacuggaccaucgucaagcccggggacauccugcucaucaacagcacgggcaaccugaucgccccgcggggguacuucaagauccgcuccggcaagagcuccaucaugcggagcgacgcccccaucggcaagugcaaguccgagugcaucacccccaacgggagcauccccaacgacaagccguuccagaacgugaaccgcaucaccuacggcgcgugcccccgguacgugaagcaguccacccugaagcucgccacggggaugcgcaacguccccgagaagcagacccggggcaucuucggggccaucgccggcuucaucgagaacggcugggaggggaugguggacggcugguacggguuccgccaccagaacagcgagggccgggggcaggccgcggaccugaaguccacccaggccgccaucgaccagaucaacggcaagcugaaccgccucaucggcaagaccaacgagaaguuccaccagaucgagaaggaguucagcgagguggaggggcggauccaggaccuggagaaguacgucgaggacacgaagaucgaccugugguccuacaacgccgagcuccugguggcccuggagaaccagcacaccaucgaccucaccgacagcgagaugaacaagcuguucgagaagaccaagaagcagcugcgcgagaacgcggaggacaugggcaacgggugcuucaagaucuaccacaagugcgacaacgccugcaucggcuccauccgcaacgggacguacgaccacuacguguaccgggacgaggcccucaacaaccgcuuccagaucaagggcgucgagcucaagagcggcuacaaggacuggauccuguggaucuccuucgccaucagcugcuuccugcugugcguggcccugcucggguucaucaugugggcgugccagaagggcaacauccggugcaacaucugcaucuga

SEQ ID NO: 73903 - RNA, 1701 nt, Artificial Sequence; identical to SEQ ID NO: 73859
  derived and/or modified CDS sequence (opt1) from hemagglutinin__InfluenzaA__AGF44920

SEQ ID NO: 73904 - RNA, 1701 nt, Artificial Sequence; identical to SEQ ID NO: 73882
  derived and/or modified CDS sequence (opt1) from hemagglutinin__InfluenzaA__AGF44921

SEQ ID NO: 73905 - RNA, 1701 nt, Artificial Sequence
  derived and/or modified CDS sequence (opt1) from hemagglutinin__InfluenzaA__AGG13411
augaagaccaucaucgcccugagcuacauccucugccugguguucgcccaggagcugcccggcaacgacgacuccaccgcgacgcucugccuggggcaccacgccgucccgaacggcaccaucgugaagaccaucaccaacgaccgcaucgaggugacgaacgccaccgagcugguccagagcuccagcaccggggagaucugcaacagcccccaccagauccucgacggcgagaacugcacccugaucgacgcccugcucggggacccccagugcgacggcuuccagaacaagaagugggaccuguucguggagcggagcaaggcccacuccaacugcuaccccuacgacgugccggacuacgcgagccugcgcucccucgucgccagcuccggcacgcuggaguucaacaacgagagcuucaacuggaccggggugacccagaacggcaccuccagcgccugcauccggcgcuccaacaacagcuucuucucccggcugaacuggcucacgcaccugaacuucaaguaccccgcccugaacgugaccaugcccaacaacgagcaguucgacaagcucuacaucuggggcguccaccaccccgggaccgacaaggaccagaucuuccuguacgcgcaggccagcgggcgcaucaccguguccacgaagcggaaccagcagaccgugaucccgaacaucggcagccgcccccggguccgcaacauccccagccggguguccaucuacuggaccaucgugaagcccggcgacauccugcucaucaacagcaccgggaaccugaucgccccgcgcggcuacuucaagauccgguccgggaaguccuccaucaugcgcagcgacgcccccaucggcaagugcaacuccgccugcaucacgcccaacggcagcauccccaacgacaagccguuccagaacgucaaccggaucaccuacggggcgugcccccgcuacgugaagcagaacacccugaagcucgccaccggcaugcggaacgugcccgagaagcagacgcgcgggaucuucggcgccaucgccggguucaucgagaacggcugggagggcauggucgacgggugguacggcuuccggcaccagaacuccgaggggcgcggccaggccgcggaccucaagagcacccaggccgccaucgaccagaucaacgggaagcugaaccggcugaucggcaagaccaacgagaaguuccaccagaucgagaaggaguucuccgagguggagggccgcauccaggaccuggagaaguacguggaggacaccaagaucgaccuguggagcuacaacgccgagcuccuggucgcccuggagaaccagcacacgaucgaccucaccgacuccgagaugaacaagcuguucgagaagaccaagaagcagcugcgcgagaacgcggaggacauggggaacggcugcuucaagaucuaccacaagugcgacaacgccugcaucgggagcauccggaacggcaccuacgaccacgacguguaccgcgacgaggcccucaacaaccgguuccagaucaaggggguggagcugaaguccggcuacaaggacuggauccuguggaucagcuucgccaucuccugcuuccuccugugcgucgcccugcucggcuucaucaugugggcgugccagaaggggaacauccgcugcaacaucugcaucuga

SEQ ID NO: 73906 - RNA, 1701 nt, Artificial Sequence
  derived and/or modified CDS sequence (opt1) from hemagglutinin__InfluenzaA__AGG13447
augaagaccaucaucgcccugagcuacauccucugccugguguucgcccaggagcugcccggcaacgacgacuccaccgcgacgcucugccuggggcaccacgccgucccgaacggcaccaucgugaagaccaucaccaacgaccgcaucgaggugacgaacgccaccgagcugguccagagcuccagcaccggggagaucugcaacagcccccaccagauccucgacggcgagaacugcacccugaucgacgcccugcucggggacccccagugcgacggcuuccagaacaagaagugggaccuguucguggagcggagcaaggcccacuccaacugcuaccccuacgacgugccggacuacgcgagccugcgcucccucgucgccagcuccggcacgcuggaguucaacaacgagagcuucaacuggaccggggugacccagaacggcaccuccagcgccugcauccggcgcuccaacaacagcuucuucucccggcugaacuggcucacgcaccugaacuucaaguaccccgcccugaacgugaccaugcccaacaacgagcaguucgacaagcucuacaucuggggcguccaccaccccgggaccgacaaggaccagaucuuccuguacgcgcaggccagcgggcgcaucaccguguccacgaagcggagccagcagaccgugaucccgaacaucggcagccgcccccggguccgcaacauccccucccgggugagcaucuacuggaccaucgugaagcccggcgacauccugcucaucaacuccaccgggaaccugaucgccccgcgcggcuacuucaagauccggagcgggaaguccagcaucaugcgcuccgacgcccccaucggcaagugcaacagcgccugcaucacgcccaacggcuccauccccaacgacaagccguuccagaacgucaaccggaucaccuacggggcgugcccccgcuacgugaagcagaacacccugaagcucgccaccggcaugcggaacgugcccgagaagcagacgcgcgggaucuucggcgccaucgccggguucaucgagaacggcugggagggcauggucgacgggugguacggcuuccggcaccagaacagcgaggggcgcggccaggccgcggaccugaaguccacccaggccgccaucgaccagaucaacgggaagcugaaccggcucaucggcaagaccaacgagaaguuccaccagaucgagaaggaguucagcgagguggagggccgcauccaggaccuggagaaguacguggaggacaccaagaucgaccugugguccuacaacgccgagcuccuggucgcccuggagaaccagcacacgaucgaccucaccgacagcgagaugaacaagcuguucgagaagacccagaagcagcugcgcgagaacgcggaggacauggggaacggcugcuucaagaucuaccacaagugcgacaacgccugcaucggguccauccggaacggcaccuacgaccacgacguguaccgcgacgaggcccucaacaaccgguuccagaucaaggggguggagcugaaguccggcuacaaggacuggauccuguggaucuccuucgccaucagcugcuuccuccugugcgucgcccugcucggcuucaucaugugggcgugccagaaggggaacauccgcugcaacaucugcaucuga

SEQ ID NO: 73907 - RNA, 1701 nt, Artificial Sequence
  derived and/or modified CDS sequence (opt1) from hemagglutinin__InfluenzaA__AGG13459
augaagaccaucaucgcccugagcuacauccucugccugguguucgcccagaagcugcccggcaacgacaacuccaccgcgacgcucugccuggggcaccacgccgucccgaacggcaccaucgugaagaccaucaccaacgaccgcaucgaggugacgaacgccaccgagcugguccagaacagcuccaucggggagaucugcgacagcccccaccagauccucgacggcgagaacugcacccugaucgacgcccugcucggggacccccagugcgacggcuuccagaacaagaagugggaccuguucguggagcgguccaaggccuacagcaacugcuaccccuacgacgugccggacuacgcgucccugcgcagccucgucgccuccagcggcacccuggaguucaacaacgaguccuucaacuggacgggggugacccagaacggcaccagcuccgccugcauccggcgcagcaacuccagcuucuucucccggcugaacuggcucacccaccugaacuucaaguaccccgcccugaacgugacgaugcccaacaacgagcaguucgacaagcucuacaucuggggcguccaccaccccgggaccgacaaggaccagaucuuccuguacgcgcagagcuccgggcgcaucaccgugagcaccaagcggagccagcaggccgugaucccgaacaucggcucccgcccccggauccgcaacauccccagccggaucuccaucuacuggacgaucgucaagcccggcgacauccugcucaucaacagcaccgggaaccugaucgccccgcgcggcuacuucaagauccgguccggcaagagcuccaucaugcgcagcgacgcccccaucgggaagugcaaguccgagugcaucacccccaacggcagcauccccaacgacaagccguuccagaacgugaaccggaucaccuacggggccugcccccgcuacgugaagcaguccacgcugaagcucgcgaccggcaugcggaacguccccgagaagcagacccgcgggaucuucggcgccaucgccggguucaucgagaacggcugggagggcaugguggacgggugguacggcuuccggcaccagaacagcgaggggcgcggccaggccgccgaccugaaguccacccaggcggccaucgaccagaucaacgggaagcugaaccggcucaucggcaagacgaacgagaaguuccaccagaucgagaaggaguucagcgagguggagggccgcauccaggaccuggagaaguacgucgaggacaccaagaucgaccugugguccuacaacgccgagcuccugguggcccuggagaaccagcacaccaucgaccucaccgacagcgagaugaacaagcuguucgagaagacgaagaagcagcugcgcgagaacgccgaggacauggggaacggcugcuucaagaucuaccacaagugcgacaacgcgugcaucggguccauccggaacggcaccuacgaccacgacguguaccgcgacgaggcccucaacaaccgguuccagaucaagggggucgagcucaagagcggcuacaaggacuggauccuguggaucuccuucgccaucagcugcuuccugcugugcguggcccugcucggcuucaucaugugggccugccagaaggggaacauccgcugcaacaucugcaucuga

SEQ ID NO: 73908 - RNA, 1701 nt, Artificial Sequence
  derived and/or modified CDS sequence (opt1) from hemagglutinin__InfluenzaA__AGG13495
augaagaccaucaucgcccugagcuacauccucugccugguguucgcccagaagcugcccggcaacgacaacuccaccgcgacgcucugccuggggcaccacgccgucccgaacggcaccaucgugaagaccaucaccaacgaccagaucgaggugacgaacgccaccgagcugguccagagcuccagcaccggggagaucugcgacagcccccaccagauccucgacggcgagaacugcacccugaucgacgcccugcucggggacccccagugcgacggcuuccagaacaagaagugggaccuguucguggagcgcagcaaggccuacuccaacugcuaccccuacgacgugccggacuacgcgagccugcggucccucgucgccagcuccggcacgcuggaguucaacaacgagagcuucaacuggaccggggugacccagaacggcaccuccagcgccugcauccgccgguccgacagcuccuucuucagccgccugaacuggcucacgcaccugaacuucaaguaccccgcccugaacgugaccaugcccaacaacgagcaguucgacaagcucuacaucuggggcguccaccaccccgggaccgacaaggaccagaucuuccuguacgcgcaggccuccgggcggaucaccgugagcacgaagcgcagccagcaguccgugaucccgaacaucggcagccggccccgcauccggaacauccccucccgcaucagcaucuacuggaccaucgucaagcccggcgacauccugcucaucaacuccaccgggaaccugaucgccccgcggggcuacuucaagauccagagcgggaaguccagcaucaugcgcuccgacgcccccaucggcaagugcaacagcgagugcaucacccccaacggcuccauccccaacgacaagccguuccagaacgugaaccggaucacguacggggccugcccccgcuacgugaagcagaacacccugaagcucgcgaccggcaugcggaacguccccgagaagcagacccgcgggaucuucggcgccaucgccggguucaucgagaacggcugggagggcaugguggacgggugguacggcuuccggcaccagaacagcgaggggcgcggccaggccgccgaccugaaguccacgcaggcggccaucgaccagaucaacgggaagcugaaccggcucaucggcaagaccaacgagaaguuccaccagaucgagaaggaguucagcgagguggagggccgcauccaggaccuggagaaguacgucgaggacaccaagaucgaccugugguccuacaacgccgagcuccugguggcccuggagaaccagcacaccaucgaccucacggacagcgagaugaacaagcuguucgagaagaccaagaagcagcugcgggagaacgccgaggacauggggaacggcugcuucaagaucuaccacaagugcgacaacgcgugcaucggguccauccgcaacggcaccuacaaccacgacguguaccgcgacgaggcccucaacaaccgguuccagaucaagggggucgagcugaaguccggcuacaaggacuggauccuguggaucuccuucgccaucagcugcuuccuccugugcguggcccugcucggcuucaucaugugggccugccagaaggggaacauccgcugcaacaucugcaucuga

SEQ ID NO: 73909 - RNA, 1701 nt, Artificial Sequence; identical to SEQ ID NO: 73907
  derived and/or modified CDS sequence (opt1) from hemagglutinin__InfluenzaA__AGG13507

SEQ ID NO: 73910 - RNA, 1701 nt, Artificial Sequence
  derived and/or modified CDS sequence (opt1) from hemagglutinin__InfluenzaA__AGG13519
augaagaccaucaucgcccugagcuacauccucugccugguguucgcccagaagcugcccggcaacgacaacuccaccgcgacgcucugccuggggcaccacgccgucccgaacggcaccaucgugaagaccaucaccaacgaccagaucgaggugacgaacgccaccgagcugguccagagcuccagcaccggggagaucugcgacagcccccaccagauccucgacggcgagaacugcacccugaucgacgcccugcucggggacccccagugcgacggcuuccagaacaagaagugggaccuguucguggagcgcagcaaggccuacuccaacugcuaccccuacgacgugccggacuacgcgagccugcggucccucgucgccagcuccggcacgcuggaguucaacaacgagagcuucaacuggaccggggugacccagaacggcaccuccagcgccugcauccgccgguccgacagcuccuucuucagccgccugaacuggcucacgcaccugaacuucaaguaccccgcccugaacgugaccaugcccaacaacgagcaguucgacaagcucuacaucuggggcguccaccaccccgggaccgacaaggaccagaucuuccuguacgcgcaggccuccgggcggaucaccgugagcacgaagcgcagccagcaguccgugaucccgaacaucggcagccggccccgcauccggaacauccccucccgcaucagcaucuacuggaccaucgucaagcccggcgacauccugcucaucaacuccaccgggaaccugaucgccccgcggggcuacuucaagauccagagcgggaaguccagcaucaugcgcuccgacgcccccaucggcaagugcaacagcgagugcaucacccccaacggcuccauccccaacgacaagccguuccagaacgugaaccggaucacguacggggccugcccccgcuacgugaagcagaacacccugaagcucgcgaccggcaugcggaacguccccgagaagcagacccgcgggaucuucggcgccaucgccggguucaucgagaacggcugggagggcaugguggacgggugguacggcuuccggcaccagaacagcgaggggcgcggccaggccgccgaccugaaguccacgcaggcggccaucgaccagaucaacgggaagcugaaccggcucaucggcaagaccaacgagaaguuccaccagaucgagaaggaguucagcgagguggagggccgcguccaggaccuggagaaguacguggaggacaccaagaucgaccugugguccuacaacgccgagcuccugguggcccuggagaaccagcacaccaucgaccucacggacagcgagaugaacaagcuguucgagaagaccaagaagcagcugcgggagaacgccgaggacauggggaacggcugcuucaagaucuaccacaagugcgacaacgcgugcaucggguccauccgcaacggcaccuacaaccacgacgucuaccgcgacgaggcccucaacaaccgguuccagaucaaggggguggagcugaaguccggcuacaaggacuggauccuguggaucuccuucgccaucagcugcuuccuccugugcguggcccugcucggcuucaucaugugggccugccagaaggggaacauccgcugcaacaucugcaucuga

SEQ ID NO: 73911 - RNA, 1701 nt, Artificial Sequence; identical to SEQ ID NO: 73907
  derived and/or modified CDS sequence (opt1) from hemagglutinin__InfluenzaA__AGG13531

SEQ ID NO: 73912 - RNA, 1701 nt, Artificial Sequence
  derived and/or modified CDS sequence (opt1) from hemagglutinin__InfluenzaA__AGG13543
augaagaccaucaucgcccugagcuacauccucugccugguguucgcccagaagcugcccggcaacgacaacuccaccgcgacgcucugccuggggcaccacgccgucccgaacggcaccaucgugaagaccaucaccaacgaccgcaucgaggugacgaacgccaccgagcugguccagaacagcuccaucggggagaucugcgacagcccccaccagauccucgacggcgagaacugcacccugaucgacgcccugcucggggacccccagugcgacggcuuccagaacaagaagugggaccuguucguggagcgguccaaggccuacagcaacugcuaccccuacgacgugccggacuacgcgucccugcgcagccucgucgccuccagcggcacccuggaguucaacaacgaguccuucaacuggacgggggugacccagaacggcaccagcuccgccugcauccggcgcagcaacuccagcuucuucucccggcugaacuggcucacccaccugaacuucaaguaccccgcccugaacgugacgaugcccaacaacgagcaguucgacaagcucuacaucuggggcguccaccaccccgggaccgacaaggaccagaucuuccuguacgcgcagagcuccgggcgcaucaccgugagcaccaagcggagccagcaggccgugaucccgaacaucggcucccgcccccggauccgcaacauccccagccggaucuccaucuacuggacgaucgucaagcccggcgacauccugcucaucaacagcaccgggaaccugaucgccccgcgcggcuacuucaagauccgguccggcaagagcuccaucaugcgcagcgacgcccccaucgggaagugcaaguccgagugcaucacccccaacggcagcauccccaacgacaagccguuccagaacgugaaccggaucaccuacggggccugcccccgcuacgugaagcaguccacgcugaagcucgcgaccggcaugcggaacguccccgagaagcagacccgcgggaucuucggcgccaucgccggguucaucgagaacggcugggagggcaugguggacgggugguacggcuuccggcaccagaacagcgaggggcgcggccaggccgccgaccugaaguccacccaggcggccaucgaccagaucaacgggaagcugaaccggcucaucggcaagacgaacgagaaguuccaccagaucgagaaggaguucagcgagguggagggccgcauccaggacaucgagaaguacgucgaggacaccaagaucgaccugugguccuacaacgccgagcugcucguggcccuggagaaccagcacaccaucgaccugaccgacagcgagaugaacaagcuguucgagaagacgaagaagcagcuccgcgagaacgccgaggacauggggaacggcugcuucaagaucuaccacaagugcgacaacgcgugcaucggguccauccggaacggcaccuacgaccacaacguguaccgcgacgaggcccugaacaaccgguuccagaucaagggggucgagcucaagagcggcuacaaggacuggauccuguggaucuccuucgccaucagcugcuuccugcucugcguggcccugcugggcuucaucaugugggccugccagaaggggaacauccgcugcaacaucugcaucuga

SEQ ID NO: 73913 - RNA, 1701 nt, Artificial Sequence; identical to SEQ ID NO: 73907
  derived and/or modified CDS sequence (opt1) from hemagglutinin__InfluenzaA__AGG13555

SEQ ID NO: 73914 - RNA, 1701 nt, Artificial Sequence; identical to SEQ ID NO: 73907
  derived and/or modified CDS sequence (opt1) from hemagglutinin__InfluenzaA__AGG13567

SEQ ID NO: 73915 - RNA, 1701 nt, Artificial Sequence
  derived and/or modified CDS sequence (opt1) from hemagglutinin__InfluenzaA__AGG13591
augaagaccaucaucgcccugagcuacauccucugccugguguucgcccagaagcugcccggcaacgacaacuccaccgcgacgcucugccuggggcaccacgccgucccgaacggcaccaucgugaagaccaucaccaacgaccgcaucgaggugacgaacgccaccgagcugguccagaacagcuccaucggggagaucugcgacagcccccaccagauccucgacggcgagaacugcacccugaucgacgcccugcucggggacccccagugcgacggcuuccagaacaagaagugggaccuguucguggagcgguccaaggccuacagcaacugcuaccccuacgacgugccggacuacgcgucccugcgcagccucgucgccuccagcggcacccuggaguucaacaacgagaacuucaacuggacgggggugacccagaacggcaccuccagcgccugcauccggcgcuccaacagcuccuucuucagccggcugaacuggcucacccaccugaacuucaaguaccccgcccugaacgugacgaugcccaacaacgagcaguucgacaagcucuacaucuggggcguccaccaccccgggaccgacaaggaccagaucuuccuguacgcgcaguccagcgggcgcaucaccguguccaccaagcggagccagcaggccgugaucccgaacaucggcagccgcccccggauccgcaacauccccucccggaucagcaucuacuggacgaucgucaagcccggcgacauccugcucaucaacuccaccgggaaccugaucgccccgcgcggcuacuucaagauccggagcgggaaguccagcaucaugcgcuccgacgcccccaucggcaagugcaagagcgagugcaucacccccaacggcuccauccccaacgaccggccguuccagaacgugaaccgcaucaccuacggggccugcccccgguacgugaagcagagcacgcugaagcucgcgaccggcaugcgcaacguccccgagaagcagacccgggggaucuucggcgccaucgccggguucaucgagaacggcugggagggcaugguggacgggugguacggcuuccgccaccagaacuccgaggggcggggccaggccgccgaccucaagagcacccaggcggccaucgaccagaucaacgggaagcugaaccgccugaucggcaagacgaacgagaaguuccaccagaucgagaaggaguucuccgagguggagggccgcauccaggaccuggagaaguacgucgaggacaccaagaucgaccuguggagcuacaacgccgagcuccugguggcccuggagaaccagcacaccaucgaccucaccgacuccgagaugaacaagcuguucgagaagacgaagaagcagcugcgggagaacgccgaggacauggggaacggcugcuucaagaucuaccacaagugcgacaacgcgugcaucgggagcauccgcaacggcaccuacgaccacgacguguaccgggacgaggcccucaacaaccgcuuccagaucaagggggucgagcugaaguccggcuacaaggacuggauccuguggaucagcuucgccaucuccugcuuccuccugugcguggcccugcucggcuucaucaugugggccugccagaaggggaacauccggugcaacaucugcaucuga

SEQ ID NO: 73916 - RNA, 1701 nt, Artificial Sequence
  derived and/or modified CDS sequence (opt1) from hemagglutinin__InfluenzaA__AGG13615
augaagaccaucaucgcccugagcuacauccucugccugguguucgcccagaagauccccggcaacgacaacuccaccgcgacgcugugccucgggcaccacgccgucccgaacggcaccaucgugaagaccaucaccaacgaccgcaucgaggugacgaacgccaccgagcugguccagaacagcuccaucggggagaucugcgacagcccccaccagauccuggacggcgagaacugcacccucaucgacgcccugcugggggacccccagugcgacggcuuccagaacaagaagugggaccucuucguggagcgguccaaggccuacagcaacugcuaccccuacgacgugccggacuacgcgucccugcgcagccuggucgccuccagcggcacccucgaguucaacaacgaguccuucaacuggacgggggugacccagaacggcaccagcuccgccugcauccggcgcagcaacuccagcuucuucucccggcugaacuggcugacccaccucaacuucaaguaccccgcccugaacgugacgaugcccaacaacgagcaguucgacaagcuguacaucuggggcguccaccaccccgggaccgacaaggaccagaucuuccucuacgcgcagagcuccgggcgcaucaccgugagcaccaagcggagccagcaggccgugaucccgaacaucggcucccgcccccggauccgcaacauccccagccggaucuccaucuacuggacgaucgucaagcccggcgacauccugcugaucaacagcaccgggaaccucaucgccccgcgcggcuacuucaagauccgguccggcaagagcuccaucaugcgcagcgacgcccccaucgggaagugcaaguccgagugcaucacccccaacggcagcauccccuccgacaagccguuccagaacgugaaccggaucaccuacggggccugcccccgcuacgugaagcagagcacgcugaagcuggcgaccggcaugcggaacguccccgagaagcagacccgcgggaucuucggcgccaucgccggguucaucgagaacggcugggagggcaugguggacgggugguacggcuuccggcaccagaacuccgaggggcgcggccaggccgccgaccucaagagcacccaggcggccaucgaccagaucaacgggaagcugaaccggcugaucggcaagacgaacgagaaguuccaccagaucgagaaggaguucuccgagguggagggccgcauccaggaccucgagaaguacgucgaggacaccaagaucgaccuguggagcuacaacgccgagcugcucguggcccuggagaaccagcacaccaucgaccugaccgacuccgagaugaacaagcuguucgagaagacgaagaagcagcuccgcgagaacgccgaggacauggggaacggcugcuucaagaucuaccacaagugcgacaacgcgugcaucgggagcauccggaacggcaccuacgaccacgacguguaccgcgacgaggcccugaacaaccgguuccagaucaagggggucgagcucaaguccggcuacaaggacuggauccuguggaucagcuucgccaucagcugcuuccugcucugcguggcccugcugggcuucaucaugugggccugccagaaggggaacauccgcugcaacaucugcaucuga

SEQ ID NO: 73917 - RNA, 1701 nt, Artificial Sequence; identical to SEQ ID NO: 73915
  derived and/or modified CDS sequence (opt1) from hemagglutinin__InfluenzaA__AGG13627

SEQ ID NO: 73918 - RNA, 1701 nt, Artificial Sequence
  derived and/or modified CDS sequence (opt1) from hemagglutinin__InfluenzaA__AGG13639
augaagaccaucaucgcccugagcuacauccucugccugguguucgcccagaagcugcccggcaacgacaacuccaccgcgacgcucugccuggggcaccacgccgucccgaacggcaccaucgugaagaccaucaccaacgaccgcaucgaggugacgaacgccaccgagcugguccagaacagcuccaucggggagaucugcgacagcccccaccagauccucgacggcgagaacugcacccugaucgacgcccugcucggggacccccagugcgacggcuuccagaacaagaagugggaccuguucguggagcgguccaaggccuacagcaacugcuaccccuacgacgugccggacuacgcgucccugcgcagccucgucgccuccagcggcacccuggaguucaacaacgaguccuucaacugggccggggugacgcagaacggcaccagcuccgccugcauccgggggagcaacuccagcuucuucucccgccugaacuggcucacccaccugaacuucaaguaccccgcgcugaacgugaccaugcccaacaacgagcaguucgacaagcucuacaucuggggcguccaccaccccgggacgaacaaggaccagaucuuccuguacgcccagagcuccggccggaucaccgugagcaccaagcgcagccagcaggccgugaucccgaacaucggcucccggccccgcauccggaacauccccagccgcaucuccaucuacuggaccaucgucaagcccggggacauccugcucaucaacagcacgggcaaccugaucgccccgcggggguacuucaagauccgcuccggcaagagcuccaucaugcggagcgacgcccccaucggcaagugcaaguccgagugcaucacccccaacgggagcauccccaacgacaagccguuccagaacgugaaccgcaucaccuacggcgcgugcccccgguacgugaagcaguccacccugaagcucgccacggggaugcgcaacguccccgagaagcagacccggggcaucuucggggccaucgccggcuucaucgagaacggcugggaggggaugguggacggcugguacggguuccgccaccagaacagcgagggccgggggcaggccgcggaccugaaguccacccaggccgccaucgaccagaucaacggcaagcugaaccgccucaucggcaagaccaacgagaaguuccaccagaucgagaaggaguucagcgagguggaggggcggauccaggaccuggagaaguacgucgaggacacgaagaucgaccugugguccuacaacgccgagcuccugguggcccuggagaaccagcacaccaucgaccucaccgacagcgagaugaacaagcuguucgagaagaccaagaagcagcugcgcgagaacgcggaggacaugggcaacgggugcuucaagaucuaccacaagugcgacaacgccugcaucggcuccauccgcaacgggacguacgaccacgacguguaccgggacgaggcccucaacaaccgcuuccagaucaagggcgucgagcucaagagcggcuacaaggacuggauccuguggaucuccuucgccaucagcugcuuccugcugugcguggcccugcucggguucaucaugugggcgugccagaagggcaacauccggugcaacaucugcaucuga

SEQ ID NO: 73919 - RNA, 1701 nt, Artificial Sequence; identical to SEQ ID NO: 73908
  derived and/or modified CDS sequence (opt1) from hemagglutinin__InfluenzaA__AGG13651

SEQ ID NO: 73920 - RNA, 1701 nt, Artificial Sequence; identical to SEQ ID NO: 73907
  derived and/or modified CDS sequence (opt1) from hemagglutinin__InfluenzaA__AGG13663

SEQ ID NO: 73921 - RNA, 1701 nt, Artificial Sequence; identical to SEQ ID NO: 73908
  derived and/or modified CDS sequence (opt1) from hemagglutinin__InfluenzaA__AGG13675

SEQ ID NO: 73922 - RNA, 1701 nt, Artificial Sequence; identical to SEQ ID NO: 73907
  derived and/or modified CDS sequence (opt1) from hemagglutinin__InfluenzaA__AGG13687

SEQ ID NO: 73923 - RNA, 1701 nt, Artificial Sequence; identical to SEQ ID NO: 73908
  derived and/or modified CDS sequence (opt1) from hemagglutinin__InfluenzaA__AGG13711

SEQ ID NO: 73924 - RNA, 1701 nt, Artificial Sequence; identical to SEQ ID NO: 73907
  derived and/or modified CDS sequence (opt1) from hemagglutinin__InfluenzaA__AGG13723

SEQ ID NO: 73925 - RNA, 1701 nt, Artificial Sequence; identical to SEQ ID NO: 73907
  derived and/or modified CDS sequence (opt1) from hemagglutinin__InfluenzaA__AGG13735

SEQ ID NO: 73926 - RNA, 1701 nt, Artificial Sequence; identical to SEQ ID NO: 73907
  derived and/or modified CDS sequence (opt1) from hemagglutinin__InfluenzaA__AGG13747

SEQ ID NO: 73927 - RNA, 1701 nt, Artificial Sequence
  derived and/or modified CDS sequence (opt1) from hemagglutinin__InfluenzaA__AGG13759
augaagaccaucaucgcccugagcuacauccucugccugguguucgcccaggagcugcccggcaacgacgacuccaccgcgacgcucugccuggggcaccacgccgucccgaacggcaccaucgugaagaccaucaccaacgaccgcaucgaggugacgaacgccaccgagcugguccagagcuccagcaccggggagaucugcaacagcccccaccagauccucgacggcgagaacugcacccugaucgacgcccugcucggggacccccagugcgacggcuuccagaacaagaagugggaccuguucguggagcggagcaaggcccacuccaacugcuaccccuacgacgugccggacuacgcgagccugcgcucccucgucgccagcuccggcacgcuggaguucaacaacgagagcuucaacuggaccggggugacccagaacggcaccuccagcgccugcauccggcgcuccaacaacagcuucuucucccggcugaacuggcucacgcaccugaacuucaaguaccccgcccugaacgugaccaugcccaacaacgagcaguucgacaagcucuacaucuggggcguccaccaccccgggaccgacaaggaccagaucuuccuguacgcgcaggccagcgggcgcaucaccguguccacgaagcggagccagcagaccgugaucccgaacaucggcagccgcccccggguccgcaacauccccucccgggugagcaucuacuggaccaucgugaagcccggcgacauccugcucaucaacuccaccgggaaccugaucgccccgcgcggcuacuucaagauccggagcgggaaguccagcaucaugcgcuccgacgcccccaucggcaagugcaacagcgccugcaucacgcccaacggcuccauccccaacgacaagccguuccagaacgucaaccggaucaccuacggggcgugcccccgcuacgugaagcagaacacccugaagcucgccaccggcaugcggaacgugcccgagaagcagacgcgcgggaucuucggcgccaucgccggguucaucgagaacggcugggagggcauggucgacgggugguacggcuuccggcaccagaacagcgaggggcgcggccaggccgcggaccugaaguccacccaggccgccaucgaccagaucaacgggaagcugaaccggcucaucggcaagaccaacgagaaguuccaccagaucgagaaggaguucagcgagguggagggccgcauccaggaccuggagaaguacguggaggacaccaagaucgaccugugguccuacaacgccgagcuccuggucgcccuggagaaccagcacacgaucgaccucaccgacagcgagaugaacaagcuguucgagaagaccaagaagcagcugcgcgagaacgcggaggacauggggaacggcugcuucaagaucuaccacaagugcgacaacgccugcaucggguccauccggaacggcaccuacgaccacgacguguaccgcgacgaggcccucaacaaccgguuccagaucaaggggguggagcugaaguccggcuacaaggacuggauccuguggaucuccuucgccaucagcugcuuccuccugugcgucgcccugcucggcuucaucaugugggcgugccagaaggggaacauccgcugcaacaucugcaucuga

SEQ ID NO: 73928 - RNA, 1701 nt, Artificial Sequence
  derived and/or modified CDS sequence (opt1) from hemagglutinin__InfluenzaA__AGG13771
augaagaccaucaucgcccugagcuacauccucugccugguguucgcccagaagcugcccggcaacgacaacuccaccgcgacgcucugccuggggcaccacgccgucccgaacggcaccaucgugaagaccaucaccaacgaccagaucgaggugacgaacgccaccgagcugguccagagcuccagcaccggggagaucugcgacagcccccaccagauccucgacggcgagaacugcacccugaucgacgcccugcucggggacccccagugcgacggcuuccagaacaagaagugggaccuguucguggagcgcagcaaggccuacuccaacugcuaccccuacgacgugccggacuacgcgagccugcggucccucgucgccagcuccggcacgcuggaguucaacaacgagagcuucaacuggaccggggugacccagaacggcaccuccagcgccugcauccgccgguccgacagcuccuucuucagccgccugaacuggcucacgcaccugaacuucaaguaccccgcccugaacgugaccaugcccaacaacgagcaguucgacaagcucuacaucuggggcguccaccaccccgggaccgacaaggaccagaucuuccuguacgcgcaggccuccgggcggaucaccgugagcacgaagcgcagccagcaguccgugaucccgaacaucggcagccggccccgcauccggaacauccccucccgcaucagcaucuacuggaccaucgucaagcccggcgacauccugcucaucaacuccaccgggaaccugaucgccccgcggggcuacuucaagauccagagcgggaaguccagcaucaugcgcuccgacgcccccaucggcaagugcaacagcgagugcaucacccccaacggcuccauccccaacgacaagccguuccagaacgugaaccggaucacguacggggccugcccccgcuacgugaagcagaacacccugaagcucgcgaccggcaugcggaacguccccgagaagcagacccgcgggaucuucggcgccaucgccggguucaucgagaacggcugggagggcaugguggacgggugguacggcuuccggcaccagaacagcgaggggcgcggccaggccgccgaccugaaguccacgcaggcggccaucgaccagaucaacgggaagcugaaccggcucaucggcaagaccaacgagaaguuccaccagaucgagaaggaguucagcgagguggagggccgcauccaggaccuggagaaguacgucgaggacaacaagaucgaccugugguccuacaacgccgagcuccugguggcccuggagaaccagcacaccaucgaccucaccgacagcgagaugaacaagcuguucgagaagacgaagaagcagcugcgggagaacgccgaggacauggggaacggcugcuucaagaucuaccacaagugcgacaacgcgugcaucggguccauccgcaacggcaccuacaaccacgacguguaccgcgacgaggcccucaacaaccgguuccagaucaagggggucgagcugaaguccggcuacaaggacuggauccuguggaucuccuucgccaucagcugcuuccuccugugcguggcccugcucggcuucaucaugugggccugccagaaggggaacauccgcugcaacaucugcaucuga

SEQ ID NO: 73929 - RNA, 1701 nt, Artificial Sequence
  derived and/or modified CDS sequence (opt1) from hemagglutinin__InfluenzaA__AGG13783
augaagaccaucaucgcccugagcuacauccucugccugguguucgcccagaagcugcccggcaacgacaacuccaccgcgacgcucugccuggggcaccacgccgucccgaacggcaccaucgugaagaccaucaccaacgaccagaucgaggugacgaacgccaccgagcugguccagaacagcuccaugggggagaucugcgacagcccccaccagauccucgacggcgagaacugcacccugaucgacgcccugcucggggacccccagugcgacggcuuccagaacaagaagugggaccuguucguggagcgcuccaaggccuacagcaacugcuaccccuacgacgugccggacuacgcgucccugcggagccucgucgccuccagcggcacccuggaguucaacaacgaguccuucaacugggccggggugacgcagaacggcaccagcuccgccugcauccgcgggagcaacuccagcuucuucucccggcugaacuggcucacccaccugaacuucaaguaccccgcgcugaacgugaccaugcccaacaacgagcaguucgacaagcucuacaucuggggcguccaccaccccgggacggacaaggaccagaucuuccuguacgcccagagcuccggccgcaucaccgugagcaccaagcggagccagcaggccgugaucccgaacaucggcucccgcccccggauccgcaacguccccagccggaucuccaucuacuggaccaucgugaagcccggggacauccugcucaucaacagcacgggcaaccugaucgccccgcgcggguacuucaagauccgguccggcaagagcuccaucaugcgcagcgacgcccccaucggcaagugcaaguccgagugcaucacccccaacgggagcauccccaacgacaagccguuccagaacgugaaccggaucaccuacggcgcgugcccccgcuacgucaagcaguccacccugaagcucgccacggggaugcggaacgugcccgagaagcagacccgcggcaucuucggggccaucgccggcuucaucgagaacggcugggaggggaugguggacggcugguacggguuccggcaccagaacagcgagggccgcgggcaggccgcggaccugaaguccacccaggccgccaucgaccagaucaacggcaagcugaaccggcucaucggcaagaccaacgagaaguuccaccagaucgagaaggaguucagcgaggucgaggggcgcauccaggaccuggagaaguacguggaggacacgaagaucgaccugugguccuacaacgccgagcuccugguggcccuggagaaccagcacaccaucgaccucaccgacagcgagaugaacaagcuguucgagaagaccaagaagcagcugcgggagaacgcggaggacaugggcaacgggugcuucaagaucuaccacaagugcgacaacgccugcaucggcuccauccgcaacgggacguacgaccacgacgucuaccgcgacgaggcccucaacaaccgguuccagaucaagggcguggagcucaagagcggcuacaaggacuggauccuguggaucuccuucgccaucagcugcuuccugcugugcguggcccugcucggguucaucaugugggcgugccagaagggcaacauccgcugcaacaucugcaucuga

SEQ ID NO: 73930 - RNA, 1701 nt, Artificial Sequence; identical to SEQ ID NO: 73908
  derived and/or modified CDS sequence (opt1) from hemagglutinin__InfluenzaA__AGG13795

SEQ ID NO: 73931 - RNA, 1701 nt, Artificial Sequence; identical to SEQ ID NO: 73859
  derived and/or modified CDS sequence (opt1) from hemagglutinin__InfluenzaA__AGG13807

SEQ ID NO: 73932 - RNA, 1701 nt, Artificial Sequence; identical to SEQ ID NO: 73908
  derived and/or modified CDS sequence (opt1) from hemagglutinin__InfluenzaA__AGG13819

SEQ ID NO: 73933 - RNA, 1701 nt, Artificial Sequence; identical to SEQ ID NO: 73908
  derived and/or modified CDS sequence (opt1) from hemagglutinin__InfluenzaA__AGG13831

SEQ ID NO: 73934 - RNA, 1701 nt, Artificial Sequence; identical to SEQ ID NO: 73907
  derived and/or modified CDS sequence (opt1) from hemagglutinin__InfluenzaA__AGG13855

SEQ ID NO: 73935 - RNA, 1701 nt, Artificial Sequence
  derived and/or modified CDS sequence (opt1) from hemagglutinin__InfluenzaA__AGG13867
augaagaccaucaucgcccugagcuacauccucugccugguguucgcccagaagcugcccggcaacgacaacuccaccgcgacgcucugccuggggcaccacgccgucccgaacggcaccaucgugaagaccaucaccaacgaccgcaucgaggugacgaacgccaccgagcugguccagaacagcuccaucgggaagaucugcgacagcccccaccagauccucgacggcgagaacugcacccugauggacgcccugcucggggacccccagugcgacggcuuccagaacaagaagugggaccuguucguggagcgguccaaggccuacagcaacugcuaccccuacgacgugccggacuacgcgucccugcgcagccucgucgccuccagcggcacccuggaguucaacaacgaguccuucaacuggacgggggugacccagaacggcaccagcuccgccugcauccggcgcagcaacuccagcuucuucucccggcugaacuggcucacccaccugaacuucaaguaccccgcccugaacgugacgaugcccaacaacgagcaguucgacaagcucuacaucuggggcguccaccaccccgggaccgacaaggaccagaucuuccuguacgcgcagagcuccgggcgcaucaccgugagcaccaagcggagccagcaggccgugaucccgaacaucggcucccgcccccggauccgcaacauccccagccggaucuccaucuacuggacgaucgucaagcccggcgacauccugcucaucaacagcaccgggaaccugaucgccccgcgcggcuacuucaagauccgguccggcaagagcuccaucaugcgcagcgacgcccccaucgggaagugcaaguccgagugcaucacccccaacggcagcauccccaacgacaagccguuccagaacgugaaccggaucaccuacggggccugcccccgcuacgugaagcaguccacgcugaagcucgcgaccggcaugcggaacguccccgagaagcagacccgcgggaucuucggcgccaucgccggguucaucgagaacggcugggagggcaugguggacgggugguacggcuuccggcaccagaacagcgaggggcgcggccaggccgccgaccugaaguccacccaggcggccaucgaccagaucaacgggaagcugaaccggcucaucggcaagacgaacgagaaguuccaccagaucgagaaggaguucagcgagguggagggccgcauccaggaccuggagaaguacgucgaggacaccaagaucgaccugugguccuacaacgccgagcuccugguggcccuggagaaccagcacaccaucgaccucaccgacagcgagaugaacaagcuguucgagaagacgaagaagcagcugcgcgagaacgccgaggacauggggaacggcugcuucaagaucuaccacaagugcgacaacgcgugcaucggguccauccggaacggcaccuacgaccacaacguguaccgcgacgaggcccucaacaaccgguuccagaucaagggggucgagcucaagagcggcuacaaggacuggauccuguggaucuccuucgccaucagcugcuuccugcugugcguggcccugcucggcuucaucaugugggccugccagaaggggaacauccgcugcaacaucugcaucuga

SEQ ID NO: 73936 - RNA, 1701 nt, Artificial Sequence; identical to SEQ ID NO: 73907
  derived and/or modified CDS sequence (opt1) from hemagglutinin__InfluenzaA__AGG13879

SEQ ID NO: 73937 - RNA, 1701 nt, Artificial Sequence; identical to SEQ ID NO: 73907
  derived and/or modified CDS sequence (opt1) from hemagglutinin__InfluenzaA__AGG13891

SEQ ID NO: 73938 - RNA, 1701 nt, Artificial Sequence
  derived and/or modified CDS sequence (opt1) from hemagglutinin__InfluenzaA__AGG13903
augaagaccaucaucgcccugagcuacauccucugccugguguucgcccagaagcugcccggcaacgacaacuccaccgcgacgcucugccuggggcaccacgccgucccgaacggcaccaucgugaagaccaucaccaacgaccagaucgaggugacgaacgccaccgagcugguccagagcuccagcaccggggagaucugcgacagcccccaccagauccucgacggcgagaacugcacccugaucgacgcccugcucggggacccccagugcgacggcuuccagaacaagaagugggaccuguucguggagcgcagcaaggccuacuccaacugcuaccccuacgacgugccggacuacgcgagccugcggucccucgucgccagcuccggcacgcuggaguucaacaacgagagcuucaacuggaccggggugacccagaacggcaccuccagcgccugcauccgccgguccgacagcuccuucuucagccgccugaacuggcucacgcaccugaacuucaaguaccccgcccugaacgugaccaugcccaacaacgagcaguucgacaagcucuacaucuggggcguccaccaccccgggaccgacaaggaccagaucuuccuguacgcgcaggccuccgggcggaucaccgugagcacgaagcgcagccagcaguccgugcugccgaacaucggcagccggccccgcauccggaacauccccucccgcaucagcaucuacuggaccaucgucaagcccggcgacauccuccugaucaacuccaccgggaaccugaucgccccgcggggcuacuucaagauccagagcgggaaguccagcaucaugcgcuccgacgcccccaucggcaagugcaacagcgagugcaucacccccaacggcuccauccccaacgacaagccguuccagaacgugaaccggaucacguacggggccugcccccgcuacgugaagcagaacacccucaagcuggcgaccggcaugcggaacguccccgagaagcagacccgcgggaucuucggcgccaucgccggguucaucgagaacggcugggagggcaugguggacgggugguacggcuuccggcaccagaacagcgaggggcgcggccaggccgccgaccugaaguccacgcaggcggccaucgaccagaucaacgggaagcucaaccggcugaucggcaagaccaacgagaaguuccaccagaucgagaaggaguucagcgagguggagggccgcauccaggaccuggagaaguacgucgaggacaccaagaucgaccucugguccuacaacgccgagcugcugguggcccucgagaaccagcacaccaucgaccugacggacagcgagaugaacaagcuguucgagaagaccaagaagcagcuccgggagaacgccgaggacauggggaacggcugcuucaagaucuaccacaagugcgacaacgcgugcaucggguccauccgcaacggcaccuacaaccacgacguguaccgcgacgaggcccugaacaaccgguuccagaucaagggggucgagcugaaguccggcuacaaggacuggauccucuggaucuccuucgccaucagcugcuuccugcugugcguggcccuccugggcuucaucaugugggccugccagaaggggaacauccgcugcaacaucugcaucuga

SEQ ID NO: 73939 - RNA, 1701 nt, Artificial Sequence; identical to SEQ ID NO: 73907
  derived and/or modified CDS sequence (opt1) from hemagglutinin__InfluenzaA__AGG13927

SEQ ID NO: 73940 - RNA, 1701 nt, Artificial Sequence; identical to SEQ ID NO: 73915
  derived and/or modified CDS sequence (opt1) from hemagglutinin__InfluenzaA__AGG13939

SEQ ID NO: 73941 - RNA, 1701 nt, Artificial Sequence
  derived and/or modified CDS sequence (opt1) from hemagglutinin__InfluenzaA__AGG13962
augaaggccauccuggugguccuccuguacaccuucgccaccgcgaacgccgacacgcugugcaucggcuaccacgccaacaacagcaccgacaccguggacaccgugcucgagaagaacgucacggugacccacuccgugaaccugcuggaggacaagcacaacgggaagcucugcaagcugcgcggcgucgcgccccugcaccucgggaagugcaacaucgccggcuggauccuggggaacccggagugcgagagccuguccaccgccagcuccuggagcuacaucguggagaccuccagcuccgacaacggcacgugcuaccccggcgacuucaucaacuacgaggagcuccgggagcagcugagcuccgugagcuccuucgagggguucgagaucuuccccaagaccagcuccuggcccaaccacgacagcaacaagggcgucaccgccgccugcccgcacgccggggcgaaguccuucuacaagaaccugaucuggcucgugaagaagggcaacagcuaccccaagcuguccaagagcuacaucaacgacaaggggaaggaggugcugguccucuggggcauccaccaccccagcaccacggccgaccagcagucccuguaccagaacgccgacgccuacguguucgugggcaccagccgcuacuccaagaaguucaagcccgagaucgccauccggccgaagguccgcgaccaggaggggcggaugaacuacuacuggacccugaucgagcccggcgacaagaucaccuucgaggcgacggggaaccucguggugccccgcuacgccuucgccauggagcggaacgccgagagcggcaucaucaucuccgacacccccguccacgacugcaacacgaccugccagaccccggagggcgccaucaacaccagccugcccuuccagaacauccaccccaucaccaucgggaagugccccaaguacgugaaguccaccaagcugcgccucgcgacgggccugcggaacgugccgagcauccagucccgcgggcuguucggcgccaucgccggguucaucgagggcggcuggaccgggauggucgacggcugguacggguaccaccaccagaacgagcagggcagcggguacgccgccgaccucaaguccacccagaacgcgaucgacaagaucaccaacaaggugaacagcgugaucgagaagaugaacacgcaguucaccgccgucggcaaggaguucaaccaccuggagaagcggaucgagaaccugaacaagaagguggacgacggcuuccucgacaucuggaccuacaacgccgagcugcugguccuccuggagaacgagcgcacccuggacuaccacgacuccaacgugaagaaccucuacgagaaggugcggaaccagcugaagaacaacgccaaggagaucgggaacggcugcuucgaguucuaccacaagugcgacaacacgugcauggagagcgucaagaacgggaccuacgacuaccccaaguacuccgaggaggccaagcugaaccgcgagaagaucgacggcgugaagcucgagagcacccggaucuaccagauccuggcgaucuacuccaccguggccagcucccugguccucguggugagccugggggccaucagcuucuggaugugcuccaacggcagccugcagugccgcaucugcaucuga

SEQ ID NO: 73942 - RNA, 1701 nt, Artificial Sequence; identical to SEQ ID NO: 73907
  derived and/or modified CDS sequence (opt1) from hemagglutinin__InfluenzaA__AGG13973

SEQ ID NO: 73943 - RNA, 1701 nt, Artificial Sequence; identical to SEQ ID NO: 73907
  derived and/or modified CDS sequence (opt1) from hemagglutinin__InfluenzaA__AGG13985

SEQ ID NO: 73944 - RNA, 1701 nt, Artificial Sequence; identical to SEQ ID NO: 73907
  derived and/or modified CDS sequence (opt1) from hemagglutinin__InfluenzaA__AGG13997

SEQ ID NO: 73945 - RNA, 1701 nt, Artificial Sequence; identical to SEQ ID NO: 73907
  derived and/or modified CDS sequence (opt1) from hemagglutinin__InfluenzaA__AGG14009

SEQ ID NO: 73946 - RNA, 1701 nt, Artificial Sequence
  derived and/or modified CDS sequence (opt1) from hemagglutinin__InfluenzaA__AGG14021
augaagaccaucaucgcccugagcuacauccucugccugguguucgcccaggagcugcccggcaacgacgacuccaccgcgacgcucugccuggggcaccacgccgucccgaacggcaccaucgugaagaccaucaccaacgaccagaucgaggugacgaacgccaccgagcugguccagagcuccagcaccggggagaucugcaacagcccccaccagauccucgacggcgagaacugcacccugaucgacgcccugcucggggacccccagugcgacggcuuccagaacaagaagugggaccuguucguggagcgcagcaaggcccacuccaacugcuaccccuacgacgugccggacuacgcgagccugcggucccucgucgccagcuccggcacgcuggaguucaacaacgagagcuucaacuggaccggggugacccagaacggcaccuccagcgccugcauccgccgguccaacaacagcuucuucucccgccugaacuggcucacgcaccugaacuucaaguaccccgcccugaacgugaccaugcccaacaacgagcaguucgacaagcucuacaucuggggcguccaccaccccgggaccgacaaggaccagaucuuccuguacgcgcaggccagcgggcggaucaccguguccacgaagcgcagccagcaggccgugaucccgaacaucggcagccggccccgcguccggaacauccccucccgcgugagcaucuacuggaccaucgugaagcccggcgacauccugcucaucaacuccaccgggaaccugaucgccccgcggggcuacuucaagauccgcagcgggaaguccagcaucaugcgguccgacgcccccaucggcaagugcaacagcgcgugcaucacccccaacggcuccauccccaacgacaagccguuccagaacgucaaccgcaucacguacggggccugcccccgguacgugaagcagaacacccugaagcucgccaccggcaugcgcaacgugcccgagaagcagacccgggggaucuucggcgccaucgccggguucaucgagaacggcugggagggcauggucgacgggugguacggcuuccgccaccagaacagcgaggggcggggccaggcggccgaccugaaguccacgcaggccgccaucgaccagaucaacgggaagcugaaccgccucaucggcaagaccaacgagaaguuccaccagaucgagaaggaguucagcgagguggagggccggauccaggaccuggagaaguacguggaggacaccaagaucgaccugugguccuacaacgccgagcuccuggucgcgcuggagaaccagcacaccaucgaccucacggacagcgagaugaacaagcuguucgagaagaccaagaagcagcugcgcgagaacgccgaggacauggggaacggcugcuucaagaucuaccacaagugcgacaacgccugcaucggguccauccgcaacggcaccuacgaccacgacguguaccgggacgaggcccucaacaaccgcuuccagaucaaggggaucgagcugaaguccggcuacaaggacuggauccuguggaucuccuucgccaucagcugcuuccuccugugcguggcgcugcucggcuucaucaugugggccugccagaaggggaacauccggugcaacaucugcaucuga

SEQ ID NO: 73947 - RNA, 1701 nt, Artificial Sequence; identical to SEQ ID NO: 73908
  derived and/or modified CDS sequence (opt1) from hemagglutinin__InfluenzaA__AGG14033

SEQ ID NO: 73948 - RNA, 1701 nt, Artificial Sequence; identical to SEQ ID NO: 73927
  derived and/or modified CDS sequence (opt1) from hemagglutinin__InfluenzaA__AGG14318

SEQ ID NO: 73949 - RNA, 1701 nt, Artificial Sequence
  derived and/or modified CDS sequence (opt1) from hemagglutinin__InfluenzaA__AGG14330
augaagaccaucaucgcccugagcuacauccucugccugguguucgcccagaagcugcccggcaacgacaacuccaccgcgacgcucugccuggggcaccacgccgucccgaacggcaccaucgugaagaccaucaccaacgaccgcaucgaggugacgaacgccaccgagcugguccagaacagcuccaucggggagaucugcgacagcccccaccagauccucgacggcgagaacugcacccugaucgacgcccugcucggggacccccagugcgacggcuuccagaacaagaagugggaccuguucguggagcgguccaaggccuacagcaacugcuaccccuacgacgugccggacuacgcgucccugcgcagccucgucgccuccagcggcacccuggaguucaacaacgaguccuucaacuggacgggggugacccagaacggcaccagcuccgccugcauccggcgcagcaacuccagcuucuucucccggcugaacuggcucacccaccugaacuucaaguaccccgcccugaacgugacgaugcccaacaacgagcaguucgacaagcucuacaucuggggcguccaccaccccgggaccgacaaggaccagaucuuccuguacgcgcagagcuccgggcgcaucaccgugagcaccaagcggagccagcaggccgugaucccgaacaucggcucccgcccccggauccgcaacauccccagccggaucuccaucuacuggacgaucgucaagcccggcgacauccugcucaucaacagcaccgggaaccugaucgccccgcgcggcuacuucaagauccgguccggcaagagcuccaucauccgcagcgacgcccccaucgggaagugcaaguccgagugcaucacccccaacggcagcauccccaacgacaagccguuccagaacgugaaccggaucaccuacggggccugcccccgcuacgugaagcaguccacgcugaagcucgcgaccggcaugcggaacguccccgagaagcagacccgcgggaucuucggcgccaucgccggguucaucgagaacggcugggagggcaugguggacgggugguacggcuuccggcaccagaacagcgaggggcgcggccaggccgccgaccugaaguccacccaggcggccaucgaccagaucaacgggaagcugaaccggcucaucggcaagacgaacgagaaguuccaccagaucgagaaggaguucagcgagguggagggccgcauccaggaccuggagaaguacgucgaggacaccaagaucgaccugugguccuacaacgccgagcuccugguggcccuggagaaccagcacaccaucgaccucaccgacagcgagaugaacaagcuguucgagaagacgaagaagcagcugcgcgagaacgccgaggacauggggaacggcugcuucaagaucuaccacaagugcgacaacgcgugcaucggguccauccggaacggcaccuacgaccacgacguguaccgcgacgaggcccucaacaaccgguuccagaucaagggggucgagcucaagagcggcuacaaggacuggauccuguggaucuccuucgccaucagcugcuuccugcugugcguggcccugcucggcuucaucaugugggccugccagaaggggaacauccgcugcaacaucugcaucuga

SEQ ID NO: 73950 - RNA, 1701 nt, Artificial Sequence
  derived and/or modified CDS sequence (opt1) from hemagglutinin__InfluenzaA__AGG84179
augaagaccaucaucgcccugagcuacauccucugccugguguucgcccagaagcugcccggcaacgacaacuccaccgcgacgcucugccuggggcaccacgccgucccgaacggcaccaucgugaagaccaucaccaacgaccagaucgaggugacgaacgccaccgagcugguccagagcuccagcgccuccgagaucugcgacagcccccaccacauccucgacggggagaacugcacccugaucgacgcccugcucggcgacccccagugcgacggguuccagaacaagaagugggaccuguucguggagcgcucccgggcguacagcaacugcuaccccuacgacgugccggacuacgccucccugcgcagccucgucgccuccagcggcacccuggaguucaacaacgaguccuucaacuggacgggcgugacccagaacgggaccagcuccgccugcauccggcgcagcaacaacuccuucuucagccggcugaacuggcucacccaccugaacuucaaguaccccgcgcugaacgugacgaugcccaacaacgagcaguucgacaagcucuacaucuggggcguccaccaccccgggaccgacaaggaccagaucuuccuguacgcccaggccuccggccgcaucaccgugagcaccaagcggagccagcaggccgugaucccgaacaucgggucccgcccccggguccgcaacauccccagccggaucuccaucuacuggacgaucgugaagcccggcgacauccugcucaucaacagcaccggcaaccugaucgccccgcgcggguacuucaagauccgguccggcaagagcuccaucaugcgcagcgacgcgcccaucgggaagugcaacuccgagugcaucacccccaacggcagcauccccaacgacaagccguuccagaacgugaaccggaucaccuacggcgccugcccccgcuacgucaagcaguccacgcugaagcucgccaccgggaugcggaacgugcccgagaagcagacccgcggcaucuucggggccaucgccggcuucaucgagaacgggugggagggcaugauggacggcugguacggguuccggcaccagaacagcgagggccgcgggcaggcggccgaccugaaguccacccaggccgccaucgaccagaucaacggcaagcugaaccggcucaucgggaagacgaacgagaaguuccaccagaucgagaaggaguucagcgagguggagggccgcauccaggaccuggagaaguacgucgaggacaccaagaucgaccugugguccuacaacgccgagcuccugguggcgcuggagaaccagcacaccaucgaccucaccgacagcgagaugaacaagcuguucgagaagacgaagaagcagcugcgcgagaacgccgaggacaugggcaacgggugcuucaagaucuaccacaagugcgacaacgccugcaucggcuccauccggaacgggaccuacgaccacgacguguaccgcgacgaggcccucaacaaccgguuccagaucaagggcgucgagcucaagagcggguacaaggacuggauccuguggaucuccuucgccaucagcugcuuccugcugugcguggcgcugcucggcuucaucaugugggccugccagaagggcaacauccgcugcaacaucugcaucuga

SEQ ID NO: 73951 - RNA, 1704 nt, Artificial Sequence
  derived and/or modified CDS sequence (opt1) from hemagglutinin__InfluenzaA__AGI02564
auggagaagaucgugcugcuccuggccaucgucagccuggugaaguccgaccagaucugcaucggcuaccacgccaacaacagcaccgagcaggucgacaccaucauggagaagaacgugacggugacccacgcgcaggacauccucgagaagacccacaacgggaagcugugcgaccuggacggcgugaagccccucauccugcgcgacugcuccgucgccggguggcugcucggcaacccgaugugcgacgaguucaucaacgugcccgaguggagcuacaucguggagaaggccaaccccaccaacgaccugugcuaccccgggaacuucaacgacuacgaggagcugaagcaccuccugucccggaucaaccacuucgagaagauccagaucauccccaagagcuccuggagcggccacgaggccuccagcggcgucuccagcgccugcccguaccaggggacgcccuccuucuuccgcaacgugguguggcugaucaagaagaacaacaccuaccccaccaucaagcggagcuacaacaacaccaaccaggaggaccuccugauccuguggggcauccaccacuccaacgacgcggccgagcagacgaagcucuaccagaacccgaccaccuacaucagcgucgggaccuccacgcugaaccagcgccuggugcccaagaucgccacccggagcaaggugaacggccaguccgggcgcauggacuucuucuggaccauccucaagcccaacgacgccaucaacuucgagagcaacggcaacuucaucgcgcccgaguacgccuacaagaucgucaagaagggcgacagcgccaucaugaaguccgagguggaguacgggaacugcaacaccaagugccagacgccgaucggcgccaucaacagcuccaugcccuuccacaacauccacccccugaccaucggggagugccccaaguacgucaagagcaacaagcuggugcucgccaccggccugcggaacuccccgcugcgcgagcggcgccggaagcgcggccucuucggggcgaucgccggcuucaucgagggcggguggcaggggaugguggacggcugguacggcuaccaccacagcaacgagcagggguccggcuacgccgccgacaaggagagcacccagaaggccaucgacggggugacgaacaaggucaacuccaucaucgacaagaugaacacccaguucgaggcggugggccgggaguucaacaaccuggagcgccggaucgagaaccugaacaagaagauggaggacggguuccucgacguguggaccuacaacgccgagcugcugguccucauggagaacgagcgcacccuggacuuccacgacagcaacgugaagaaccuguacgacaagguccggcuccagcugcgcaacaacgccaaggagcugggcaacggcugcuucgaguucuaccacaagugcgacaacgagugcauggaguccgugcggaacgggacguacgacuacccccaguacagcgaggaggcccgccucaagcgggaggagaucuccggcgugaagcuggagagcaucgggaccuaccagauccuguccaucuacagcaccgucgccuccagccucgcgcuggccaucaugguggccggccugucccucuggaugugcagcaacgggagccugcagugccgcaucugcaucuga

SEQ ID NO: 73952 - RNA, 1707 nt, Artificial Sequence
  derived and/or modified CDS sequence (opt1) from hemagglutinin__InfluenzaA__AGI02565
auggagaagaucgugcugcuccuggccaucgucagccuggugaaguccgaccagaucugcaucggcuaccacgccaacaacagcaccgagcaggucgacaccaucauggagaagaacgugacggugacccacgcgcaggacauccucgagaagacccacaacgggaagcugugcgaccuggacggcgugaagccccucauccugcgcgacugcuccgucgccggguggcugcucggcaacccgaugugcgacgaguucaucaacgugcccgaguggagcuacaucguggagaaggccauccccgccaacgaccugugcuaccccggggacuucaacgacuacgaggagcugaagcaccuccugucccggaucaaccacuucgagaagauccagaucauccccaagagcuccuggagcaaccacgaggccucccugggcgucagcuccgcgugcccguaccucggcaagcccagcuucuuccgcaacgugguguggcugaucaagaagaacuccaccuaccccacgaucaagcggagcuacaacaacaccaaccaggaggaccugcucguccugugggggauccaccacccgaacgacgccgccgagcagaccaagcuguaccagaaccccaccacguacaucuccgugggcaccagcacccucaaccagcgccuggugcccaagaucgccacccgguccaaggucaacgggcagagcggccgcauggaguucuucuggacgauccugaagcccaacgacgcgaucaacuucgaguccaacgggaacuucaucgccccggaguacgccuacaagaucgugaagaagggcgacagcgccaucaugaaguccgagcucgaguacggcaacugcaacaccaagugccagacccccaugggggccaucaacagcagcaugcccuuccacaacauccacccccugaccaucggcgagugcccgaaguacgugaaguccaaccggcugguccucgcgacggggcugcgcaacagcccccagggcgagcggcgccggaagaagcgcggccuguucggggccaucgccggcuucaucgagggcggguggcaggggaugguggacggcugguacggcuaccaccacuccaacgagcaggggagcggcuacgccgccgacaaggaguccacccagaaggcgaucgacggggugaccaacaaggucaacagcaucaucgacaagaugaacacccaguucgaggccgugggccgggaguucaacaaccucgagcgccggaucgagaaccugaacaagaagauggaggacggguuccuggacguguggacguacaacgccgagcuccugguccugauggagaacgagcgcacccucgacuuccacgacuccaacgugaagaaccuguacgacaagguccggcugcagcuccgcgacaacgccaaggagcugggcaacggcugcuucgaguucuaccacaagugcgacaacgagugcauggagagcgugcggaacgggaccuacgacuacccccaguacuccgaggaggcccgccugaagcgggaggagaucagcggcgugaagcucgaguccaucgggaccuaccagauccugagcaucuacuccacggucgcgagcucccuggcccucgccaucaugguggccggccugagccuguggaugugcuccaacgggagccuccagugccgcaucugcaucuga

SEQ ID NO: 73953 - RNA, 1704 nt, Artificial Sequence
  derived and/or modified CDS sequence (opt1) from hemagglutinin__InfluenzaA__AGI02566
auggagaagaucgugcugcuccuggccaucgucagccuggugaaguccgaccagaucugcaucggcuaccacgccaacaacagcaccgagcaggucgacaccaucauggagaagaacgugacggugacccacgcgcaggacauccucgagaagacccacaacgggaagcugugcgaccuggacggcgugaagccccucauccugcgcgacugcuccgucgccggguggcugcucggcaacccgaugugcgacgaguucaucaacgugcccgaguggagcuacaucguggagaaggccaaccccgccaacgaccugugcuaccccgggaacuucaacgacuacgaggagcugaagcaccuccugucccggaucaaccacuucgagaagauccagaucauccccaagagcuccuggagcgaccacgaggccuccagcggcgucuccagcgcgugcccguaccagggcacccccuccuucuuccgcaacgugguguggcugaucaagaagaacaacacguaccccaccaucaagcggagcuacaacaacaccaaccaggagaaccuccugauccugugggggauccaccacuccaacgacgccgccgagcagaucaagcucuaccagaacccgaccacguacaucagcgucggcaccuccacccugaaccagcgccuggugcccaagaucgccacccggagcaaggugaacgggcaguccggccgcauggacuucuucuggacgauccucaagcccaacgacgcgaucaacuucgagagcaacgggaacuucaucgcccccgaguacgccuacaagaucgucaaggagggcgacagcgccaucaugaaguccgagguggaguacggcaacugcaacaccaagugccagaccccgaucggggccaucaacagcuccaugcccuuccacaacauccacccccugaccaucggcgagugccccaaguacgucaagagcaacaagcuggugcucgcgacggggcugcggaacuccccgcugcgcgagcggcgccggaagcgcggccucuucggcgccaucgccggguucaucgagggcggguggcagggcaugguggacgggugguacggcuaccaccacagcaacgagcagggcuccggguacgccgccgacaaggagagcacccagaaggcgaucgacggcgugaccaacaaggucaacuccaucaucgacaagaugaacacccaguucgaggccguggggcgggaguucaacaaccuggagcgccggaucgagaaccugaacaagaagauggaggacggcuuccucgacguguggacguacaacgccgagcugcugguccucauggagaacgagcgcacccuggacuuccacgacagcaacgugaagaaccuguacgacaagguccggcuccagcugcgcgacaacgccaaggagcuggggaacggcugcuucgaguucuaccacaagugcgacaacgagugcauggaguccgugcggaacggcaccuacgacuacccccaguacagcgaggaggcccgccucaagcgggaggagaucuccggggugaagcuggagagcaucggcaccuaccagauccuguccaucuacagcacggucgcguccagccucgcccuggccaucaugguggccgggcugucccucuggaugugcagcaacggcagccugcagugccgcaucugcaucuga

SEQ ID NO: 73954 - RNA, 1707 nt, Artificial Sequence
  derived and/or modified CDS sequence (opt1) from hemagglutinin__InfluenzaA__AGI02567
auggagaagaucgugcugcuccuggccaucgucagccuggugaaguccgaccagaucugcaucggcuaccacgccaacaacagcaccgagcaggucgacaccaucauggagaagaacgugacggugacccacgcgcaggacauccucgagaagacccacaacgggaagcugugcgaccuggacggcgugaagccccucauccugcgcgacugcuccgucgccggguggcugcucggcaacccgaugugcgacgaguuccugaacgugcccgaguggagcuacaucguggagaaggccaaccccgccaacgaccugugcuaccccgggaacuucaacgacuacgaggagcucaagcaccuccugucccggaucaaccacuucgagaagauccagaucauccccaagagcuccuggagcgaccacgaggccuccagcggcgucuccagcgcgugcccguaccagggccgcuccagcuucuuccggaacgugguguggcugaucaagaagaacaacgccuaccccaccaucaagcgcuccuacaacaacacgaaccaggaggaccugcugguccucugggggauccaccaccccaacgacgccgccgagcagacccggcuguaccagaacccgaccaccuacaucagcgugggcacguccacccugaaccagcgccucgugcccaagaucgcgacccggagcaaggucaacgggcaguccggccgcauggaguucuucuggaccauccugaagcccaacgacgccaucaacuucgagagcaacgggaacuucaucgcccccgaguacgccuacaagaucgugaagaagggcgacagcacgaucaugaaguccgagcuggaguacggcaacugcaacaccaagugccagaccccgaucggggccaucaacagcuccaugcccuuccacaacauccacccccucaccaucggcgagugccccaaguacgucaagagcaaccggcuggugcuggcgacggggcuccgcaacuccccgcagggcgagcggcgccggaagaagcgcggccuguucggggccaucgccggcuucaucgagggcggguggcaggggaugguggacggcugguacggcuaccaccacagcaacgagcagggguccggcuacgccgccgacaaggagagcacccagaaggcgaucgacggggugaccaacaaggucaacuccaucaucgacaagaugaacacccaguucgaggccgugggccgggaguucaacaaccuggagcgccggaucgagaaccucaacaagaagauggaggacggguuccuggacguguggacguacaacgccgagcugcucguccugauggagaacgagcgcacccuggacuuccacgacagcaacgugaagaaccucuacgacaagguccggcugcagcugcgcgacaacgccaaggagcucggcaacggcugcuucgaguucuaccaccggugcgacaacgagugcauggaguccgugcgcaacgggaccuacgacuacccccaguacagcgaggaggcccgccugaagcgggaggagaucuccggcgugaagcuggagagcaucgggaccuaccagauccucuccaucuacagcacggucgcguccagccuggcccuggccaucaugguggccggccucucccuguggaugugcagcaacgggagccugcagugccgcaucugcaucuga

SEQ ID NO: 73955 - RNA, 1704 nt, Artificial Sequence
  derived and/or modified CDS sequence (opt1) from hemagglutinin__InfluenzaA__AGI02568
auggagaagaucgugcugcuccuggccaucgucagccuggugaaguccgaccagaucugcaucggcuaccacgccaacaacagcaccgagcaggucgacaccaucauggagaagaacgugacggugacccacgcgcaggacauccucgagaagacccacaacgggaagcugugcgaccuggacggcgugaagccccucauccugcgcgacugcuccgucgccggguggcugcucggcaacccgaugugcgacgaguucaucaacgugcccgaguggagcuacaucguggagaaggccaaccccgccaacgaccugugcuaccccgggaacuucaacgacuacgaggagcugaagcaccuccugucccggaucaaccacuucgagaagauccagaucauccccaagagcuccuggagcgaccacgaggccuccagcggcgucuccagcgcgugcccguaccagggcacccccuccuucuuccgcaacgugguguggcugaucaagaagaacaacacguaccccaccaucaagcggagcuacaacaacaccaaccaggagaaccuccugauccugugggggauccaccacuccaacgacgccaccgagcagaucaagcucuaccagaacccgacgaccuacaucagcgucggcaccuccacccugaaccagcgccuggugcccaagaucgggacgcggagcaaggugaacggccaguccgggcgcauggacuucuucuggaccauccucaagcccaacgacgccaucaacuucgagagcaacggcaacuucaucgcccccgaguacgcguacaagaucgucaaggagggcgacagcgccaucaugaaguccgagguggaguacgggaacugcaacaccaagugccagaccccgaucggcgccaucaacagcuccaugcccuuccacaacauccacccccugacgaucggggagugccccaaguacgucaagagcaacaagcuggugcucgccaccggccugcggaacuccccgcugcgcgagcggcgccggaagcgcggccucuucggggccaucgcgggcuucaucgagggcggguggcaggggaugguggacggcugguacggcuaccaccacagcaacgagcagggguccggcuacgccgccgacaaggagagcacccagaaggccaucgacggggugaccaacaaggucaacuccaucaucgacaagaugaacacgcaguucgaggccgugggccgggaguucaacaaccuggagcgccggaucgagaaccugaacaagaagauggaggacggguuccucgacguguggaccuacaacgcggagcugcugguccucauggagaacgagcgcacccuggacuuccacgacagcaacgugaagaaccuguacgacaagguccggcuccagcugcgcgacaacgccaaggagcugggcaacggcugcuucgaguucuaccacaagugcgacaacgagugcauggaguccgugcggaacgggaccuacgacuacccccaguacagcgaggaggcccgccucaagcgggaggagaucuccggcgugaagcuggagagcauggggaucuaccagauccuguccaucuacagcacggucgccuccagccucgcccuggcgaucaugguggccggccugucccucuggaugugcagcaacgggagccugcagugccgcaucugcaucuga

SEQ ID NO: 73956 - RNA, 1683 nt, Artificial Sequence
  derived and/or modified CDS sequence (opt1) from hemagglutinin__InfluenzaA__AGI60301
augaacacccagauccugguguucgcccucaucgccaucauccccaccaacgcggacaagaucugccugggccaccacgccgucagcaacgggacgaaggugaacacccugaccgagcgcggcguggaggucgugaacgccaccgagacgguggagcggaccaacaucccgcgcaucugcuccaaggggaagcggaccgucgaccucggccagugcgggcugcugggcaccaucacgggcccgccccagugcgaccaguuccucgaguucagcgccgaccugaucaucgagcgccgggagggguccgacgugugcuaccccggcaaguucgugaacgaggaggcccugcgccagauccuccgggagagcgggggcaucgacaaggaggcgaugggguucaccuacuccggcauccgcaccaacggcgccaccagcgccugccggcgcuccgggagcuccuucuacgccgagaugaaguggcugcugagcaacacggacaacgcggccuucccgcagaugaccaaguccuacaagaacacccgcaagagccccgcccucaucgucuggggcauccaccacuccgugagcaccgccgagcagacgaagcuguacggguccggcaacaagcuggugaccgucggcagcuccaacuaccagcagagcuucgugcccucccccggggcccggccccaggugaacggcaucagcgggcggaucgacuuccacuggcucaugcugaaccccaacgacaccgucaccuucagcuucaacggcgcguucaucgcccccgaccgcgccuccuuccugcggggcaagagcauggggauccaguccggcguccagguggacgccaacugcgagggggacugcuaccacagcggcgggacgaucaucuccaaccuccccuuccagaacaucgacagccgcgccgugggcaagugcccgcgguacgugaagcagcgcucccugcugcucgcgaccgggaugaagaacgugcccgagauccccaagggccggggccuguucggggccaucgccggcuucaucgagaacgggugggagggccugaucgacgggugguacggcuuccgccaccagaacgcccagggcgaggggaccgccgcggacuacaagagcacccaguccgccaucgaccagaucacgggcaagcucaaccggcugaucgagaagaccaaccagcaguucgagcugaucgacaacgaguucaacgaggucgagaagcagaucgggaacgugaucaacuggacccgcgacagcaucaccgaggugugguccuacaacgccgagcuccuggucgccauggagaaccagcacacgaucgaccuggccgacagcgagauggacaagcucuacgagcgcgugaagcggcagcugcgcgagaacgcggaggaggacggcaccggcugcuucgagaucuuccacaagugcgacgacgacugcauggccuccauccggaacaacaccuacgaccacagcaaguaccgcgaggaggccaugcagaaccggauccagaucgaccccgucaagcuguccagcggguacaaggacgugauccucugguucuccuucggcgccagcugcuucauccugcuggcgaucgugauggggcucgucuucaucugcgugaagaacggcaacaugcgcugcaccaucugcaucuga

SEQ ID NO: 73957 - RNA, 1683 nt, Artificial Sequence
  derived and/or modified CDS sequence (opt1) from hemagglutinin__InfluenzaA__AGJ72861
augaacacccagauccugguguucgcccucaucgccaucauccccaccaacgcggacaagaucugccugggccaccacgccgucagcaacgggacgaaggugaacacccugaccgagcgcggcggggagguggucaacgccaccgagacgguggagcggaccaacaucccgcgcaucugcuccaagggcaagaagaccguggaccucgggcagggcggcccccgggggaccaucacgggcccgccccagugcgaccaguuccuggaguucagcgccgaccugaucauggagcgccgggagggguccgacgucugcuaccccggcaaguucgugaacgaggaggcccuccgccagauccugcgggagagcgggggcaucgacaaggaggcgaugggcuucaccuacuccgggauccgcaccaacggcgccaccagcgccugccggcgcuccgggagcuccuucuacgccgagaugaaguggcugcucagcaacacggacaacgcggccuucccccagaugaccaaguccuacaagaacacccgcaagagccccgcccugaucguguggggcauccaccacuccgucagcaccgccgagcagacgaagcuguacggcuccgggaacaagcucgugaccgugggcagcuccaacuaccagcagagcuucguccccuccccgggggcccggccccaggugaacggccagagcgggcggaucgacuuccacuggcugaugcugaaccccaacgacaccgugaccuucagcuucaacggcgcguucaucgcccccgaccgcgccuccuuccuccggggcaagagcauggggauccaguccggcguccagguggacgccaacugcgagggggacugcuaccacagcggcgggacgaucaucuccaaccugccguuccagaacaucgacagccgcgccgugggcaagugcccccgguacgucaagcagcgcucccugcuccuggcgaccggcaugaagaacgugcccgagauccccaaggggcggggccuguucggggccaucgccggcuucaucgagaacgggugggagggccucaucgacggcugguacggguuccgccaccagaacgcccagggcgaggggaccgccgcggacuacaagagcacccaguccgccaucgaccagaucacgggcaagcugaaccggcugaucgagaagaccaaccagcaguucgagcucaucgacaacgaguucaacgagguggagaagcagaucggcaacgucaucaacuggacccgcgacagcaucaccgaggugugguccuacaacgccgagcugcugguggccauggagaaccagcacacgaucgaccucgccgacagcgagauggacaagcuguacgagcgcgucaagcggcagcugcgcgagaacgcggaggaggacgggaccggcugcuucgagaucuuccacaagugcgacgacgacugcauggccuccauccggaacaacaccuacgaccacagcaaguaccgcgaggaggccaugcagaaccggauccagaucgacccggugaagcucuccagcggguacaaggacgucauccugugguucuccuucggcgccagcugcuucauccugcucgcgaucgugauggggcugguguucaucugcgucaagaacggcaacaugcgcugcaccaucugcaucuga

SEQ ID NO: 73958 - RNA, 1701 nt, Artificial Sequence
  derived and/or modified CDS sequence (opt1) from hemagglutinin__InfluenzaA__AGJ73327
augaaggccauccuggugguccuccuguacaccuucgccaccgcgaacgccgacacgcugugcaucggcuaccacgccaacaacagcaccgacaccguggacaccgugcucgagaagaacgucacggugacccacuccgugaaccugcuggaggacaagcacaacgggaagcucugcaagcugcgcggcgucgcgccccugcaccucgggaagugcaacaucgccggcuggauccuggggaacccggagugcgagagccuguccaccgccagcuccuggagcuacaucguggagaccuccagcuccgacaacggcacgugcuaccccggcgacuucaucaacuacgaggagcuccgggagcagcugagcuccgugagcuccuucgagcgcuucgagaucuuccccaagaccagcuccuggcccaaccacgacagcaacaagggggucaccgccgccugcccgcacgccggcgcgaaguccuucuacaagaaccugaucuggcucgugaagaaggggaacagcuaccccaagcuguccaagagcuacaucaacgacaagggcaaggaggugcugguccucugggggauccaccaccccagcaccacggccgaccaccagucccuguaccagaacgccgacgccuacguguucgugggcaccagccgguacuccaagaaguucaagcccgagaucgccauccgcccgaagguccgggaccaggagggccgcaugaacuacuacuggacccugaucgagcccggggacaagaucaccuucgaggcgacgggcaaccucguggugccccgguacgccuucgccauggagcgcaacgccgggagcggcaucaucauccccgacaccccgguccacgacugcaacacgaccugccagacccccaagggcgccaucaacaccucccugcccuuccagaacauccaccccaucaccaucgggaagugcccgaaguacgucaagagcaccaagcugcggcucgcgacgggccugcgcaacgugcccuccauccagagccgggggcuguucggcgccaucgccggguucaucgagggcggcuggaccgggaugguggacggcugguacggguaccaccaccagaacgagcagggcuccggguacgccgccgaccucaagagcacccagaacgcgaucgacaagaucaccaacaaggugaacuccgugaucgagaagaugaacacgcaguucaccgccgucggcaaggaguucaaccaccuggagaagcgcaucgagaaccugaacaagaagcucgacgacggcuuccuggacaucuggaccuacaacgccgagcugcucgugcugcuggagaacgagcggacccucgacuaccacgacagcaacgucaagaaccuguacgagaaggugcgcaaccagcugaagaacaacgccaaggagaucgggaacggcugcuucgaguucuaccacaagugcgacaacacgugcauggaguccgugaagaacgggaccuacgacuaccccaaguacagcgaggaggccaagcucaaccgggagaagaucgacggcgucaagcuggaguccacccgcaucuaccagauccuggcgaucuacagcaccguggccuccagccucgugcuggucgugucccugggggagaucagcuucuggaugugcagcaacggcucccuccagugccggaucugcaucuga

SEQ ID NO: 73959 - RNA, 1701 nt, Artificial Sequence
  derived and/or modified CDS sequence (opt1) from hemagglutinin__InfluenzaA__AGJ73329
augaaggccauccuggugguccuccuguacaccuucgccaccgcgaacgccgacacgcugugcaucggcuaccacgccaacaacagcaccgacaccguggacaccgugcucgagaagaacgucacggugacccacuccgugaaccugcuggaggacaagcacaacgggaagcucugcaagcugcgcggcgucgcgccccugcaccucgggaagugcaacaucgccggcuggauccuggggaacccggagugcgagagccuguccaccgccagcuccuggagcuacaucguggagaccuccagcuccgacaacggcacgugcuaccccggcgacuucaucgacuacgaggagcuccgggagcagcugagcuccgugagcuccuucgagcgcuucgagaucuuccccaagaccagcuccuggcccaaccacgacagcaacaagggggucaccgccgccugcccgcacgccggcgcgaagggguucuacaagaaccugaucuggcucgugaagaagggcaacuccuaccccaagcugagcaaguccuacaucaacgacaaggggaaggaggugcugguccucuggggcauccaccaccccagcaccacggccgaccagcagagccuguaccagaacgccgacaccuacguguucgugggcaccucccgguacagcaagaaguucaagcccgagaucgccauccgcccgaagguccgggaccaggaggggcgcaugaacuacuacuggacccugguggagcccggcgacaagaucacguucgaggccaccgggaaccucguggucccccgguacgcguucgccauggagcgcaacgccggcuccggcaucaucaucagcgacgcccccgugcacgacugcaacacgaccugccagaccccgaagggggccaucaacaccucccugcccuuccagaacauccaccccaucaccaucggcaagugccccaaguacgucaagagcaccaagcugcggcucgcgacggggcugcgcaacgugccguccauccagagccggggccuguucggggccaucgccggcuucaucgagggcggguggaccggcaugguggacgggugguacggcuaccaccaccagaacgagcagggguccggcuacgccgccgaccucaagagcacccagaacgcgaucgacaagaucaccaacaaggugaacuccgucaucgagaagaugaacacgcaguucaccgccgugggcaaggaguucaaccaccuggagaagcgcaucgagaaccugaacaagaaggucgacgacggguuccucgacaucuggaccuacaacgccgagcugcuggugcuccuggagaacgagcggacccuggacuaccacgacagcaacgugaagaaccucuacgagaagguccgcaaccagcugaagaacaacgccaaggagaucggcaacgggugcuucgaguucuaccacaagugcgacaacacgugcauggaguccgugaagaacggcaccuacgacuaccccaaguacagcgaggaggccaagcugaaccgggaggagaucgacggggugaagcucgaguccacccgcaucuaccagauccuggcgaucuacagcaccgucgccuccagccuggugcucguggucucccugggcgccaucagcuucuggaugugcagcaacggcucccugcagugccggaucugcaucuga

SEQ ID NO: 73960 - RNA, 1701 nt, Artificial Sequence
  derived and/or modified CDS sequence (opt1) from hemagglutinin__InfluenzaA__AGJ73331
augaaggccauccuggugguccuccuguacaccuucgccaccgcgaacgccgacacgcugugcaucggcuaccacgccaacaacagcaccgacaccguggacaccgugcucgagaagaacgucacggugacccacuccgugaaccugcuggaggacaagcacaacgggaagcucugcaagcugcgcggcgucgcgccccugcaccucgggaagugcaacaucgccggcuggauccuggggaacccggagugcgagagccuguccaccgccagcuccuggagcuacaucguggagaccuccagcuccgacaacggcacgugcuaccccggcgacuucaucgacuacgaggagcuccgggagcagcugagcuccgugagcuccuucgagcgcuucgagaucuuccccaagaccagcuccuggcccaaccacgacagcaacaagggggucaccaccgccugcccgcacgccggcgccaaguccuucuacaagaaccugaucuggcucgugaagaaggggaacagcuaccccaagcuguccaagagcuacaucaacgacaagggcaaggaggugcugguccucugggggauccaccacccgcccacgagcgcggaccagcagucccuguaccagaacgccgacgccuacguguucgugggcaccagccgguacuccaagaaguucaagcccgagaucgccauccgccccaagguccggggccaggaggggcgcaugaacuacuacuggacccugguggagcccggcgacaagaucaccuucgaggccacggggaaccucguggucccccgguacgcguucgccauggagcgcaacgccggcagcggcaucaucaucuccgacaccccggugcacgacugcaacacgaccugccagacccccaagggggccaucaacaccagccugcccuuccagaacauccaccccaucaccaucggcaagugcccgaaguacgugaaguccaccaagcugcggcucgccacggggcugcgcaacguccccagcauccagucccggggccuguucggggcgaucgccggcuucaucgagggcggguggaccggcaugguggacgggugguacggcuaccaccaccagaacgagcaggggagcggcuacgccgccgaccucaaguccacccagaacgccaucgacgagaucaccaacaaggugaacagcgucaucgagaagaugaacacgcaguucaccgcggugggcaaggaguucaaccaccuggagaagcgcaucgagaaccugaacaagaaggucgacgacggguuccucgacaucuggaccuacaacgccgagcugcuggugcuccuggagaacgagcggacccuggacuaccacgacuccaaggugaagaaccucuacgagaagguccgcagccagcugaagaacaacgccaaggagaucggcaacgggugcuucgaguucuaccacaagugcgacaacacgugcauggaguccgugaagaacggcaccuacgacuaccccaaguacagcgaggaggccaagcugaaccgggaggagaucgacggggugaagcucgaguccacccgcaucuaccagauccuggccaucuacagcaccgucgcguccagccuggugcucguggucagccugggcgccaucuccuucuggaugugcagcaacggcucccugcagugccggaucugcaucuga

SEQ ID NO: 73961 - RNA, 1701 nt, Artificial Sequence
  derived and/or modified CDS sequence (opt1) from hemagglutinin__InfluenzaA__AGJ73333
augaaggccauccuggugguccuccuguacaccuucgccaccgcgaacgccgacacgcugugcaucggcuaccacgccaacaacagcaccgacaccguggacaccgugcucgagaagaacgucacggugacccacuccgugaaccugcuggaggacaagcacaacgggaagcucugcaagcugcgcggcgucgcgccccugcaccucgggaagugcaacaucgccggcuggauccuggggaacccggagugcgagagccuguccaccgccagcuccuggagcuacaucguggagaccuccagcuccgacaacggcacgugcuaccccggcgacuucaucgacuacgaggagcuccgggagcagcugagcuccgugagcuccuucgagcgcuucgagaucuuccccaagaccagcuccuggcccaaccacgacagcaacaagggggucaccgccgccugcccgcacgccggcgcgaagggguucuacaagaaccugaucuggcucgugaagaagggcaacuccuaccccaagcugagcaaguccuacaucaacgacaaggggaaggaggugcugguccucuggggcauccaccaccccagcaccagcgccgaccagcagucccuguaccagaacgccgacacguacguguucgugggcaccagccgguacuccaagaaguucaagcccgagaucgccauccgcccgaagguccgggaccaggaggggcgcaugaacuacuacuggacccugguggagcccggcgacaagaucaccuucgaggccacggggaaccucguggucccccgguacgcguucgccauggagcgcaacgccggcagcggcaucaucaucuccgacacccccgugcacgacugcaacacgaccugccagaccccgaagggggccaucaacaccagccugcccuuccagaacauccaccccaucaccaucggcaagugccccaaguacgugaaguccaccaagcugcggcucgccacggggcugcgcaacgucccgagcauccagucccggggccuguucggggcgaucgccggcuucaucgagggcggguggaccggcaugguggacgggugguacggcuaccaccaccagaacgagcaggggagcggcuacgccgccgaccucaaguccacccagaacgccaucgacaagaucaccaacaaggugaacagcgucaucgagaagaugaacacgcaguucaccgcggugggcaaggaguucaaccaccuggagaagcgcaucgagaaccugaacaagaaggucgacgacggguuccucgacaucuggaccuacaacgccgagcugcuggugcuccuggagaacgagcggacccuggacuaccacgacuccaacgugaagaaccucuacgagaagguccgcaaccagcugaagaacaacgccaaggagaucggcaacgggugcuucgaguucuaccacaagugcgacaacacgugcauggagagcgugaagaacggcaccuacgacuaccccaaguacuccgaggaggccaagcugaaccgggaggagaucgacggggugaagcucgagagcacccgcaucuaccagauccuggccaucuacuccaccgucgcgagcucccuggugcucguggucagccugggcgccaucagcuucuggaugugcuccaacggcagccugcagugccggaucugcaucuga

SEQ ID NO: 73962 - RNA, 1701 nt, Artificial Sequence
  derived and/or modified CDS sequence (opt1) from hemagglutinin__InfluenzaA__AGJ73335
augaaggccauccuggugguccuccuguacaccuucgccaccgcgaacgccgacacgcugugcaucggcuaccacgccaacaacagcaccgacaccguggacaccgugcucgagaagaacgucacggugacccacuccgugaaccugcuggaggacaagcacaacgggaagcucugcaagcugcgcggcgucgcgccccugcaccucgggaagugcaacaucgccggcuggauccuggggaacccggagugcgagagccuguccaccgccagcuccuggagcuacaucguggagaccuccagcuccgacaacggcacgugcuaccccggcgacuucaucgacuacgaggagcuccgggagcagcugagcuccgugagcuccuucgagcgcuucgagaucuuccccaagaccagcuccuggcccaaccacgacagcaacaagggggucaccgccgccugcccgcacgccggcgcgaaguccuucuacaagaaccugaucuggcucgugaagaaggggaacagcuaccccaagcuguccaagagcuacaucaacgacaagggcaaggaggugcugguccucugggggauccaccaccccagcaccacggccgaccagcagucccuguaccagaacgccgacaccuacguguucgugggcaccagccgguacuccaagaaguucaagcccgagaucgccauccgcccgaagguccgggaccaggagggccgcaugaacuacuacuggacccugguggagccccgggacaagaucacguucgaggccaccgggaaccucguggucccccgcuacgcguucgccauggagcggaacgccggcagcgggaucaucaucuccgacacccccgugcacgacugcaacaccacgugccagaccccgaagggcgccaucaacaccagccugcccuuccagaacauccaccccaucaccaucggcaagugccccaaguacgugaaguccacgaagcugcgccucgccaccgggcugcggaacgucccgagcauccagucccgcggccuguucggggcgaucgccggcuucaucgagggcggguggaccggcaugguggacgggugguacggcuaccaccaccagaacgagcaggggagcggcuacgccgccgaccucaaguccacccagaacgccaucgacaagaucacgaacaaggugaacagcgucaucgagaagaugaacacccaguucaccgcgguggggaaggaguucaaccaccuggagaagcggaucgagaaccugaacaagaaggucgacgacggcuuccucgacaucuggaccuacaacgccgagcugcuggugcuccuggagaacgagcgcacgcuggacuaccacgacuccaacgugaagaaccucuacgagaagguccggaaccagcugaagaacaacgccaaggagaucggcaacgggugcuucgaguucuaccacaagugcgacaacacgugcauggagagcgugaagaacggcaccuacgacuaccccaaguacuccgaggaggccaagcugaaccgcgaggagaucgacggggugaagcucgagagcacccggaucuaccagauccuggccaucuacuccaccgucgcgagcucccuggugcucguggucagccugggcgccaucagcuucuggaugugcuccaacgggagccugcagugccgcaucugcaucuga

SEQ ID NO: 73963 - RNA, 1701 nt, Artificial Sequence; identical to SEQ ID NO: 70478
  derived and/or modified CDS sequence (opt1) from hemagglutinin__InfluenzaA__AGJ73337

SEQ ID NO: 73964 - RNA, 1701 nt, Artificial Sequence; identical to SEQ ID NO: 70478
  derived and/or modified CDS sequence (opt1) from hemagglutinin__InfluenzaA__AGJ73339

SEQ ID NO: 73965 - RNA, 1701 nt, Artificial Sequence; identical to SEQ ID NO: 70478
  derived and/or modified CDS sequence (opt1) from hemagglutinin__InfluenzaA__AGJ73341

SEQ ID NO: 73966 - RNA, 1701 nt, Artificial Sequence
  derived and/or modified CDS sequence (opt1) from hemagglutinin__InfluenzaA__AGJ73343
augaaggccauccuggugguccuccuguacaccuucgccaccgcgaacgccgacacgcugugcaucggcuaccacgccaacaacagcaccgacaccguggacaccgugcucgagaagaacgucacggugacccacuccgugaaccugcuggaggacaagcagaacgggaagcucugcaagcugcgcggcgucgcgccccugcaccucgggaagugcaacaucgccggcuggauccuggggaacccggagugcgagagccuguccaccgccagcuccuggagcuacaucguggagaccuccagcuccgacaacggcacgugcuaccccggcgacuucaucaacuacgaggagcuccgggagcagcugagcuccgugagcuccuucgagcgcuucgagaucuuccccaagaccagcuccuggcccaaccacgacagcaacaagggggucaccgccgccugcccgcacgccggcgcgaaguccuucuacaagaaccugaucuggcucgugaagaaggggaacagcuaccccaagcuguccaagagcuacaucaacgacaagggcaaggaggugcugguccucugggggauccaccaccccagcaccuccgccgaccagcagagccuguaccagaacgccgacgccuacguguucgugggcacguccaaguacagcaagaaguucaagcccgagaucgccguccggccgaaggugcgcgaccaggagggccggaugaacuacuacuggacccugguggagcccggggacaagaucaccuucgaggcgaccggcaaccuccuggucccccgcuacgccuucgccauggagcggaacgccggguccggcaucaucaucagcgacacgcccgugcacgacugcaacacgaccugccagaccccgaagggcgccaucaacaccucccugcccuuccagaacauccaccccaucaccaucgggaagugccccaaguacgucaagagcaccaagcuccgccuggcgaccggccugcggaacgugccguccauccagagccgcgggcuguucggcgccaucgccggguucaucgagggcggcuggacggggaugguggacggcugguacggguaccaccaccagaacgagcagggcuccggguacgccgccgaccucaagagcacccagaacgcgaucgacaagaucaccaacaaggugaacuccgucaucgagaagaugaacacccaguucacggccgugggcaaggaguucaaccaccuggagaagcggaucgagaaccucaacaagaaggucgacgacggcuuccuggacaucuggaccuacaacgccgagcugcucgugcugcuggagaacgagcgcacccucgacuaccacgacagcaacgugaagaaccuguacgagaagguccggucccagcugaagaacaacgccaaggagaucgggaacggcugcuucgaguucuaccacaagugcgacaacacgugcauggagagcgugaagaacgggaccuacgacuaccccaaguacuccgaggaggccaagcucaaccgcgaggagaucgacggcgugaagcuggagagcacccggaucuaccagauccuggcgaucuacuccaccgucgccagcagccucgugcugguggucucccugggggccaucagcuucuggaugugcuccaacggcagccuccagugccgcaucugcaucuga

SEQ ID NO: 73967 - RNA, 1701 nt, Artificial Sequence
  derived and/or modified CDS sequence (opt1) from hemagglutinin__InfluenzaA__AGJ73345
augaaggccauccuggugguccuccuguacaccuucgccaccgcgaacgccgacacgcugugcaucggcuaccacgccaacaacagcaccgacaccguggacaccgugcucgagaagaacgucacggugacccacuccgugaaccugcuggaggacaagcacaacgggaagcucugcaagcugcgcggcgucgcgccccugcaccucgggaagugcaacaucgccggcuggauccuggggaacccggagugcgagagccuguccaccgccagcuccuggagcuacaucguggagaccuccagcuccgacaacggcacgugcuaccccggcgacuucaucaacuacgaggagcuccgggagcagcugagcuccgugagcuccuucgagcgcuucgagaucuuccccaagaccagcuccuggcccaaccacgacagcaacaagggggucaccgccgccugcccgcacgccggcgcgaaguccuucuacaagaaccugaucuggcucgugaagaaggggaacagcuaccccaagcuguccaagagcuacaucaacgacaagggcaaggaggugcugguccucugggggauccaccaccccagcaccuccgccgaccagcagagccuguaccagaacgaggacgccuacguguucgugggcacguccaaguacagcaagaaguucaagcccgagaucgccguccggccgaaggugcgcgaccaggagggccggaugaacuacuacuggacccugguggagcccgggaacaagaucaccuucgaggccaccggcaaccuccuggucccccgcuacgcguucgccauggagcggaacgccggguccggcaucaucaucagcgacacgcccgugcacgacugcaacacgaccugccagaccccgaagggcgccaucaacaccucccugcccuuccagaacauccaccccaucaccaucgggaagugccccaaguacgucaagagcaccaagcuccgccuggccaccggccugcggaacgugccguccauccagagccgcgggcuguucggcgcgaucgccggguucaucgagggcggcuggacggggaugguggacggcugguacggguaccaccaccagaacgagcagggcuccggguacgccgccgaccucaagagcacccagaacgccaucgacaagaucaccaacaaggugaacuccgucaucgagaagaugaacacccaguucacggcggugggcaaggaguucaaccaccuggagaagcggaucgagaaccucaacaagaaggucgacgacggcuuccuggacaucuggaccuacaacgccgagcugcucgugcugcuggagaacgagcgcacccucgacuaccacgacagcaacgugaagaaccuguacgagaagguccggucccagcugaagaacaacgccaaggagaucgggaacggcugcuucgaguucuaccacaagugcgacaacacgugcauggagagcgugaagaacgggaccuacgacuaccccaaguacuccgaggaggccaagcucaaccgcgaggagaucgacggcgugaagcuggagagcacccggaucuaccagauccuggccaucuacuccaccgucgcgagcagccucgugcugguggucucccugggggccaucagcuucuggaugugcuccaacggcagccuccagugccgcaucugcaucuga

SEQ ID NO: 73968 - RNA, 1701 nt, Artificial Sequence; identical to SEQ ID NO: 71074
  derived and/or modified CDS sequence (opt1) from hemagglutinin__InfluenzaA__AGJ73347

SEQ ID NO: 73969 - RNA, 1701 nt, Artificial Sequence; identical to SEQ ID NO: 71074
  derived and/or modified CDS sequence (opt1) from hemagglutinin__InfluenzaA__AGJ73349

SEQ ID NO: 73970 - RNA, 1701 nt, Artificial Sequence
  derived and/or modified CDS sequence (opt1) from hemagglutinin__InfluenzaA__AGJ73351
augaaggccauccuggugguccuccuguacaccuucgccaccgcgaacgccgacacgcugugcaucggcuaccacgccaacaacagcaccgacaccguggacaccgugcucgagaagaacgucacggugacccacuccgugaaccugcuggaggacaagcacaacgggaagcucugcaagcugcgcggcgucgcgccccugcaccucgggaagugcaacaucgccggcuggauccuggggaacccggagugcgagagccuguccaccgccagcuccuggagcuacaucguggagaccuccagcuccgacaacggcacgugcuaccccggcgacuucaucgacuacgaggagcuccgggagcagcugagcuccgugagcuccuucgagcgcuucgagaucuuccccaagaccagcuccuggcccaaccacgacagcaacaagggggucaccgccgccugcccgcacgccggcgcgaagggguucuacaagaaccugaucuggcucgugaagaagggcaacuccuaccccaagcugagcaaguccuacaucaacgacaaggggaaggaggugcugguccucuggggcauccaccaccccagcaccacggccgaccagcagagccuguaccagaacgccgacaccuacguguucgugggcaccucccgguacagcaagaaguucaagcccgagaucgccauccgcccgaagaugcgggaccaggaggggcgcaugaacuacuacuggacccuggucgagcccggcgacaagaucacguucgaggccaccgggaaccucguggugccccgguacgcguucgccauggagcgcaacgccggcuccggcaucaucaucagcgacacccccguccacgacugcaacaccacgugccagaccccgaagggggccaucaacaccucccugcccuuccagaacauccaccccaucaccaucggcaagugccccaaguacgucaagagcacgaagcugcggcucgccaccgggcugcgcaacgugccguccauccagagccggggccuguucggggcgaucgccggcuucaucgagggcggguggaccggcaugguggacgggugguacggcuaccaccaccagaacgagcagggguccggcuacgccgccgaccucaagagcacccagaacgccaucgacaagaucacgaacaaggugaacuccgugaucgagaagaugaacacccaguucaccgcggucggcaaggaguucaaccaccuggagaagcgcaucgagaaccugaacaagaagguggacgacggguuccucgacaucuggaccuacaacgccgagcugcugguccuccuggagaacgagcggacgcuggacuaccacgacagcaacgugaagaaccucuacgagaaggugcgcaaccagcugaagaacaacgccaaggagaucggcaacgggugcuucgaguucuaccacaagugcgacaacacgugcauggaguccgucaagaacggcaccuacgacuaccccaaguacagcgaggaggccaagcugaaccgggaggagaucgacggggugaagcucgaguccacccgcaucuaccagauccuggccaucuacagcaccguggcguccagccugguccucguggugucccugggcgccaucagcuucuggaugugcagcaacggcucccugcagugccggaucugcaucuga

SEQ ID NO: 73971 - RNA, 1701 nt, Artificial Sequence
  derived and/or modified CDS sequence (opt1) from hemagglutinin__InfluenzaA__AGJ73353
augaaggccauccuggugguccuccuguacaccuucgccaccgcgaacgccgacacgcugugcaucggcuaccacgccaacaacagcaccgacaccguggacaccgugcucgagaagaacgucacggugacccacuccgugaaccugcuggaggacaagcacaacgggaagcucugcaagcugcgcggcgucgcgccccugcaccucgggaagugcaacaucgccggcuggauccuggggaacccggagugcgagagccuguccaccgccagcuccuggagcuacaucguggagaccuccagcuccgacaacggcacgugcuaccccggcgacuucaucaacuacgaggagcuccgggagcagcugagcuccgugagcuccuucgagcgcuucgagaucuuccccaagaccagcuccuggcccaaccacgacagcaacaagggggucaccgccgccugcccgcacgccggcgcgaaguccuucuacaagaaccugaucuggcucgugaagaaggggaacagcuaccccaagcuguccaagagcuacaucaacgacaagggcaaggaggugcugguccucugggggauccaccaccccagcaccuccgccgaccagcagagccuguaccagaacgccgacgccuacguguucgugggcacguccaaguacagcaagaaguucaagcccgagaucgccguccggccgaaggugcgcgaccaggagggccggaugaacuacuacuggacccugguggagcccggggacaagaucaccuucgaggcgaccggcaaccuccuggucccccgcuacgccuucgccauggagcggaacgccggguccggcaucaucaucagcgacacgcccgugcacgacugcaacacgaccugccagaccccgaagggcgccaucaacaccucccugcccuuccagagcauccaccccaucaccaucgggaagugccccaaguacgugaaguccaccaagcuccgccuggcgaccggccugcggaacgucccgagcauccagucccgcggccucuucggggccaucgccggguucaucgagggcggcuggacggggaugguggacggcugguacggguaccaccaccagaacgagcagggcagcggguacgccgccgaccugaaguccacccagaacgcgaucgacaagaucaccaacaaggugaacagcgucaucgagaagaugaacacccaguucacggccgugggcaaggaguucaaccaccuggagaagcggaucgagaaccucaacaagaaggucgacgacggcuuccuggacaucuggaccuacaacgccgagcugcucgugcugcuggagaacgagcgcacccucgacuaccacgacuccaacgugaagaaccuguacgagaagguccggagccagcugaagaacaacgccaaggagaucgggaacggcugcuucgaguucuaccacaagugcgacaacacgugcauggaguccgugaagaacgggaccuacgacuaccccaaguacagcgaggaggccaagcucaaccgcgaggagaucgacggcgugaagcuggaguccacccggaucuaccagauccuggcgaucuacagcaccgucgccagcucccucgugcugguggucagccugggggccaucuccuucuggaugugcagcaacggcucccuccagugccgcaucugcaucuga

SEQ ID NO: 73972 - RNA, 1701 nt, Artificial Sequence
  derived and/or modified CDS sequence (opt1) from hemagglutinin__InfluenzaA__AGJ73355
augaaggccauccuggugguccuccuguacaccuucgccaccgcgaacgccgacacgcugugcaucggcuaccacgccaacaacagcaccgacaccguggacaccgugcucgagaagaacgucacggugacccacuccgugaaccugcuggaggacaagcacaacgggaagcucugcaagcugcgcggcgucgcgccccugcaccucgggaagugcaacaucgccggcuggauccuggggaacccggagugcgagagccuguccaccgccagcuccuggagcuacaucguggagaccuccagcuccgacaacggcacgugcuaccccggcgacuucaucgacuacgaggagcuccgggagcagcugagcuccgugagcuccuucgagcgcuucgagaucuuccccaagaccagcuccuggcccaaccacgacagcaacaagggggucaccgccgccugcccgcacgccggcgcgaagggguucuacaagaaccugaucuggcucgugaagaagggcaacuccuaccccaagcugagcaaguccuacaucaacgacaaggggaaggaggugcugguccucuggggcauccaccaccccagcaccacggccgaccagcagagccuguaccagaacgccgacaccuacguguucgugggcaccucccgguacagcaagaaguucaagcccgagaucgccauccgcccgaagguccgggaccaggaggggcgcaugaacuacuacuggacccugguggagcccggcgacaagaucacguucgaggccaccgggaaccucguggucccccgguacgcguucgccauggagcgcaacgccggcuccggcaucaucaucagcgacacccccgugcacgacugcaacaccacgugccagaccccgaagggggccaucaacaccucccugcccuuccagaacauccaccccaucaccaucggcaagugccccaaguacgucaagagcacgaagcugcggcucgccaccgggcugcgcaacgugccguccauccagagccggggccuguucggggcgaucgccggcuucaucgagggcggguggaccggcaugguggacgggugguacggcuaccaccaccagaacgagcagggguccggcuacgccgccgaccucaagagcacccagaacgccaucgacaagaucacgaacaaggugaacuccgucaucgagaagaugaacacccaguucaccgcggugggcaaggaguucaaccaccuggagaagcgcaucgagaaccugaacaagaaggucgacgacggguuccucgacaucuggaccuacaacgccgagcugcuggugcuccuggagaacgagcggacgcuggacuaccacgacagcaacgugaagaaccucuacgagaagguccgcaaccagcugaagaacaacgccaaggagaucggcaacgggugcuucgaguucuaccacaagugcgacaacacgugcauggaguccgugaagaacggcaccuacgacuaccccaaguacagcgaggaggccaagcugaaccgggaggagaucgacggggugaagcucgaguccacccgcaucuaccagauccuggccaucuacagcaccgucgcguccagccuggugcucguggucucccugggcgccaccagcuucuggaugugcagcaacggcucccugcagugccggaucugcaucuga

SEQ ID NO: 73973 - RNA, 1701 nt, Artificial Sequence; identical to SEQ ID NO: 70891
  derived and/or modified CDS sequence (opt1) from hemagglutinin__InfluenzaA__AGJ73357

SEQ ID NO: 73974 - RNA, 1701 nt, Artificial Sequence
  derived and/or modified CDS sequence (opt1) from hemagglutinin__InfluenzaA__AGJ73361
augaaggccauccuggugguccuccuguacaccuucgccaccgcgaacgccgacacgcugugcaucggcuaccacgccaacaacagcaccgacaccguggacaccgugcucgagaagaacgucacggugacccacuccgugaaccugcuggaggacaagcacaacgggaagcucugcaagcugcgcggcgucgcgccccugcaccucgggaagugcaacaucgccggcuggauccuggggaacccggagugcgagagccuguccaccagcuccagcugguccuacaucguggagaccagcuccagcgacaacggcacgugcuaccccggcgacuucaucgacuacgaggagcuccgggagcagcuguccagcguguccagcuucgagcgcuucgagaucuuccccaagaccuccagcuggcccaaccacgacuccaacaagggggucaccgccgccugcccgcacgccggcgccaagggguucuacaagaaccugaucuggcucgugaagaagggcaacagcuaccccaagcuguccaagagcuacaucaacgacaaggggaaggaggugcugguccucuggggcauccaccaccccagcaccacggcggaccagcagucccuguaccagaacgccgacaccuacguguucgugggcaccagccgguacuccaagaaguucaagcccgagaucgccauccgcccgaagguccgggaccaggaggggcgcaugaacuacuacuggacccugguggagcccggcgacaagaucacguucgaggccaccgggaaccucguggucccccgguacgccuucgcgauggagcgcaacgccggcagcggcaucuucaucuccgacacccccgugcacgacugcaacaccacgugccagaccccgaagggggccaucaacaccagccugcccuuccagaacauccaccccaucaccaucggcaagugccccaaguacgugaaguccacgaagcugcggcucgccaccgggcugcgcaacgucccgagcauccagucccggggccuguucggggccaucgcgggcuucaucgagggcggguggaccggcaugguggacgggugguacggcuaccaccaccagaacgagcaggggagcggcuacgccgccgaccucaaguccacccagaacgccaucgacaagaucacgaacaaggugaacagcgucaucgagaagaugaacacccaguucaccgccgugggcaaggaguucaaccaccuggagaagcgcaucgagaaccugaacaagaaggucgacgacggguuccucgacaucuggaccuacaacgcggagcugcuggugcuccuggagaacgagcggacgcuggacuaccacgacuccaacgugaagaaccucuacgagaagguccgcaaccagcugaagaacaacgccaaggagaucggcaacgggugcuucgaguucuaccacaagugcgacaacacgugcauggagagcgugaagaacggcaccuacgacuaccccaaguacuccgaggaggccaagcugaaccgggaggagaucgacggggugaagcucgagagcacccgcaucuaccagauccuggccaucuacuccaccgucgccagcucccuggugcucguggucagccugggcgcgaucagcuucuggaugugcuccaacggcagccugcagugccggaucugcaucuga

SEQ ID NO: 73975 - RNA, 1701 nt, Artificial Sequence; identical to SEQ ID NO: 71074
  derived and/or modified CDS sequence (opt1) from hemagglutinin__InfluenzaA__AGJ73363

SEQ ID NO: 73976 - RNA, 1701 nt, Artificial Sequence; identical to SEQ ID NO: 70891
  derived and/or modified CDS sequence (opt1) from hemagglutinin__InfluenzaA__AGJ73365

SEQ ID NO: 73977 - RNA, 1701 nt, Artificial Sequence
  derived and/or modified CDS sequence (opt1) from hemagglutinin__InfluenzaA__AGJ73367
augaaggccauccuggugguccuccuguacaccuucgccaccgcgaacgccgacacgcugugcaucggcuaccacgccaacaacagcaccgacaccguggacaccgugcucgagaagaacgucacggugacccacuccgugaaccugcuggaggacaagcacaacgggaagcucugcaagcugcgcggcgucgcgccccugcaccucgggaagugcaacaucgccggcuggauccuggggaacccggagugcgagagccuguccaccgccagcuccuggcccuacaucguggagaccagcuccagcgacaacggcacgugcuaccccggcgacuucaucaacuacgaggagcuccgggagcagcuguccagcguguccagcuucgagcgcuucgagaucuuccccaagaccuccagcuggccgaaccacgacuccaacaagggggucgccgccgccugcccccacgcgggcgccaagagcuucuacaagaaccugaucuggcucgugaagaaggggaacuccuaccccaagcugagcaaguccuacaucaacgacaagggcaaggaggugcugguccucugggggauccaccaccccagcaccagcgccgaccagcagucccuguaccagaacgccgacgccuacguguucgugggcaccagcaaguacuccaagaaguucaagccggagaucgcgguccggcccaaggugcgcgaccaggagggccggaugaacuacuacuggacgcugguggagcccggggacaagaucaccuucgaggccaccggcaaccuccuggucccccgcuacgccuucgccauggagcggaacgccgggagcggcaucaucaucuccgacaccccggugcaggacugcaacacgaccugccagacccccaagggcgcgaucaacaccagccugcccuuccagaacauccaccccaucacgaucgggaagugcccgaaguacgugaaguccaccaagcuccgccuggccaccggccugcggaacguccccagcauccagucccgcggccucuucggggccaucgccggguucaucgagggcggcuggaccgggaugguggacggcugguacggguaccaccaccagaacgagcagggcagcggguacgccgcggaccugaaguccacgcagaacgccaucgacaagaucaccaacaaggugaacagcgucaucgagaagaugaacacccaguucaccgccgugggcaaggaguucaaccaccuggagaagcggaucgagaaccucaacaagaaggucgacgacggcuuccuggacaucuggacguacaacgccgagcugcucgugcugcuggagaacgagcgcacccucgacuaccacgacuccaacgugaagaaccuguacgagaagguccggaaccagcugaagaacaacgccaaggagaucgggaacggcugcuucgaguucuaccacaagugcgacaacacgugcauggagagcgugaagaacgggaccuacgacuaccccaaguacuccgaggaggcgaagcucaaccgcgaggagaucgacggcgugaagcuggagagcacccggaucuaccagauccuggccaucuacuccaccgucgccagcucccucgugcugguggucagccugggggccaucagcuucuggaugugcuccaacggcagccuccagugccgcaucugcaucuga

SEQ ID NO: 73978 - RNA, 1701 nt, Artificial Sequence
  derived and/or modified CDS sequence (opt1) from hemagglutinin__InfluenzaA__AGJ73369
augaaggccauccuggugguccuccuguacaccuucgccaccgcgaacgccgacacgcugugcaucggcuaccacgccaacaacagcaccgacaccguggacaccgugcucgagaagaacgucacggugacccacuccgugaaccugcuggaggacaagcacaacgggaagcucugcaagcugcgcggcgucgcgccccugcaccucgggaagugcaacaucgccggcuggauccuggggaacccggagugcgagagccuguccaccgccagcuccuggagcuacaucguggagaccuccagcuccgacaacggcacgugcuaccccggcgacuucaucgacuacgaggagcuccgggagcagcugagcuccgugagcuccuucgagcgcuucgagaucuuccccaagaccagcuccuggcccaaccacgacagcaacaagggggucaccgccgccugcccgcacgccggcgcgaagggguucuacaagaaccugaucuggcucgugaagaagggcaacuccuaccccaagcugagcaaguccuacaucaacgacaaggggaaggaggugcugguccucuggggcauccaccaccccagcaccacggccgaccagcagagccuguaccagaacgccgacaccuacguguucgugggcaccucccgguacagcaagaaguucaagcccgagaucgccauccgcccgaagguccgggaccaggaggggcgcaugaacuacuacuggacccugguggagcccggcgacaagaucacguucgaggccaccgggaaccucguggucccccgguacgcguucgccauggagcgcaacgccggcuccggcaucaucaucagcgacacccccgugcacgacugcaacaccacgugccagaccccgaagggggccaucaacaccucccugcccuuccagaacauccaccccaucaccaucggcaagugccccaaguacgucaagagcacgaagcugcggcucgccaccgggcugcgcaacgugccguccauccagagccggggccuguucggggcgaucgccggcuucaucgagggcggguggaccggcaugguggacgggugguacggcuaccaccaccagaacgagcagggguccggcuacgccgccgaccucaagagcacccagaacgccaucgacaagaucacgaacaaggugaacuccgucaucgagaagaugaacacccaguucaccgcggugggcaaggaguucaaccaccuggagaagcgcaucgagaaccugaacaagaaggucgacgacggguuccucgacaucuggaccuacaacgccgagcugcuggugcuccuggagaacgagcggacgcuggacuaccacgacagcaacgugaagaaccucuacgagaagguccgcaaccagcugaagaacaacgccaaggagaucggcaacgggugcuucgaguucuaccacaagugcgacaacacgugcauggaguccgugaagaacggcaccuacgacuaccccaaguacagcgccgaggccaagcugaaccgggaggagaucgacggggugaagcucgaguccacccgcaucuaccagauccuggcgaucuacagcaccgucgccuccagccuggugcucguggucucccugggcgccaucagcuucuggaugugcagcaacggcucccugcagugccggaucugcaucuga

SEQ ID NO: 73979 - RNA, 1701 nt, Artificial Sequence; identical to SEQ ID NO: 70478
  derived and/or modified CDS sequence (opt1) from hemagglutinin__InfluenzaA__AGJ73371

SEQ ID NO: 73980 - RNA, 1701 nt, Artificial Sequence
  derived and/or modified CDS sequence (opt1) from hemagglutinin__InfluenzaA__AGJ73373
augaaggccauccuggugguccuccuguacaccuucgccaccgcgaacgccgacacgcugugcaucggcuaccacgccaacaacagcaccgacaccguggacaccgugcucgagaagaacgucacggugacccacuccgugaaccugcuggaggacaagcacaacgggaagcucugcaagcugcgcggcgucgcgccccugcaccucgggaagugcaacaucgccggcuggauccuggggaacccggagugcgagagccuguccaccgccagcuccuggagcuacaucguggagaccuccagcuccgacaacggcacgugcuaccccggcgacuucaucgacuacgaggagcuccgggagcagcugagcuccgugagcuccuucgagcgcuucgagaucuuccccaagaccagcuccuggcccaaccacgacagcaacaagggggucaccgccgccugcccgcacgccggcgcgaagggguucuacaagaaccugaucuggcucgugaagaagggcaacuccuaccccaagcugagcaaguccuacaucaacgacaaggggaaggaggugcugguccucuggggcauccaccaccccagcaccacggccgaccagcagagccuguaccagaacgccgacaccuacguguucgugggcaccucccgguacagcaagaaguucaagcccgagaucgccauccgcccgaagguccgggaccaggaggggcgcaugaacuacuacuggacccugguggagcccggcgacaagaucacguucgaggccaccgggaaccucguggucccccgguacgcguucgccauggagcgcaacgccggcuccggcaucaucaucagcgacacccccgugcacgacugcaacaccacgugccagaccccgaagggggccaucaacaccucccaccccuuccagaacauccaccccaucaccaucggcaagugccccaaguacgucaagagcacgaagcugcggcuggccaccgggcuccgcaacgugccguccauccagagccggggccuguucggggcgaucgccggcuucaucgagggcggguggaccggcaugguggacgggugguacggcuaccaccaccagaacgagcagggguccggcuacgccgccgaccucaagagcacccagaacgccaucgacaagaucacgaacaaggugaacuccgucaucgagaagaugaacacccaguucaccgcggugggcaaggaguucaaccaccuggagaagcgcaucgagaaccugaacaagaaggucgacgacggguuccuggacaucuggaccuacaacgccgagcuccuggugcugcucgagaacgagcggacgcuggacuaccacgacagcaacgugaagaaccuguacgagaagguccgcaaccagcucaagaacaacgccaaggagaucggcaacgggugcuucgaguucuaccacaagugcgacaacacgugcauggaguccgugaagaacggcaccuacgacuaccccaaguacagcgaggaggccaagcugaaccgggaggagaucgacggggugaagcuggaguccacccgcaucuaccagauccucgccaucuacagcaccgucgcguccagccuggugcugguggucucccucggcgccaucagcuucuggaugugcagcaacggcucccugcagugccggaucugcaucuga

SEQ ID NO: 73981 - RNA, 1701 nt, Artificial Sequence
  derived and/or modified CDS sequence (opt1) from hemagglutinin__InfluenzaA__AGJ73375
augaaggccauccuggugguccuccuguacaccuucgccaccgcgaacgccgacacgcugugcaucggcuaccacgccaacaacagcaccgacaccguggacaccgugcucgagaagaacgucacggugacccacuccgugaaccugcuggaggacaagcacaacgggaagcucugcaagcugcgcggcgucgcgccccugcaccucgggaagugcaacaucgccggcuggauccuggggaacccggagugcgagagccuguccaccgccagcuccuggagcuacaucguggagaccuccagcuccgacaacggcacgugcuaccccggcgacuucaucaacuacgaggagcuccgggagcagcugagcuccgugagcuccuucgagcgcuucgagaucuuccccgagaccagcuccuggcccaaccacgacagcaacaagggggucaccgccgccugcccgcacgccggcgcgaaguccuucuacaagaaccugaucuggcucgugaagaaggggaacagcuaccccaagcuguccaagagcuacaucaacgacaagggcaaggaggugcugguccucugggggauccaccaccccagcaccacggccgaccagcagucccuguaccagaacgccgacgccuacguguucgugggcaccagccgguacuccaagaaguucaagcccgagaucgccauccgcccgaagguccgggaccaggagggccgcaugaacuacuacuggacccugaucgagcccggggacaagaucaccuucgaggcgacgggcaaccucguggugccccgguacgccuucgccauggagcgcaacgccgggagcggcaucaucaucuccgacacccccguccacgacugcaacacgaccugccagaccccggagggcgccaucaacaccagccugcccuuccagaacauccaccccaucaccaucgggaagugccccaaguacgugaaguccaccaagcugcggcucgcgacgggccugcgcaacgugccgagcauccagucccgggggcuguucggcgccaucgccggguucaucgagggcggcuggaccgggauggucgacggcugguacggguaccaccaccagaacgagcagggcagcggguacgccgccgaccucaaguccacccagaacgcgaucgacaagaucaccaacaaggugaacagcgugaucgagaagaugaacacgcaguucaccgccgucggcaaggaguucaaccaccuggagaagcgcaucgagaaccugaacaagaagguggacgacggcuuccucgacaucuggaccuacaacgccgagcugcugguccuccuggagaacgagcggacccuggacuaccacgacuccaacgugaagaaccucuacgagaaggugcgcaaccagcugaagaacaacgccaaggagaucgggaacggcugcuucgaguucuaccacaagugcgacaacacgugcauggagagcgucaagaacgggaccuacgacuaccccaaguacuccgaggaggccaagcugaaccgggaggagaucgacggcgugaagcucgagagcacccgcaucuaccagauccuggcgaucuacuccaccguggccagcucccugguccucguggugagccugggggccaucagcuucuggaugugcuccaacggcagccugcagugccggaucugcaucuga

SEQ ID NO: 73982 - RNA, 1701 nt, Artificial Sequence
  derived and/or modified CDS sequence (opt1) from hemagglutinin__InfluenzaA__AGJ73377
augaaggccauccuggugguccuccuguacaccuucgccaccgcgaacgccgacacgcugugcaucggcuaccacgccaacaacagcaccgacaccguggacaccgugcucgagaagaacgucacggugacccacuccgugaaccugcuggaggacaagcacaacgggaagcucugcaagcugcgcggcgucgcgccccugcaccucgggaagugcaacaucgccggcuggauccuggggaacccggagugcgagagccuguccaccgccagcuccuggagcuacaucguggagaccuccagcuccgacaacggcacgugcuaccccggcgacuucaucaacuacgaggagcuccgggagcagcugagcuccgugagcuccuucgagcgcuucgagaucuuccccaagaccagcuccuggcccaaccacgacagcaacaagggggucaccgccuccugcccgcgggccggcgccaagagcuucuacaagaaccugaucuggcucgugaagaaggggaacuccuaccccaagcugagcaagagcuacaucaacgacaagggcaaggaggugcugguccucugggggauccaccaccccuccaccacggcggaccagcagagccuguaccagaacgccgacgccuacguguucgugggcaccucccgcuacagcaagaaguucaagcccgagaucgccauccggccgaagguccgcgaccaggagggccggaugaacuacuacuggacccugguggagcccggggacaagaucaccuucgaggccacgggcaaccuccuggugccccgcuacgcguucgccauggagcggaacgccggguccggcaucaucaucagcgacacccccguccacgacugcaacacgaccugccagaccccgaagggcgccaucaacaccucccugcccuuccagaacauccaccccaucaccaucgggaagugccccaaguacgucaagagcaccaagcuccgccuggccacgggccugcggaacgugccguccauccagagccgcgggcuguucggcgcgaucgccggguucaucgagggcggcuggaccgggaugguggacggcugguacggguaccaccaccagaacgagcagggcuccggguacgccgccgaccucaagagcacccagaacgccaucgacaagaucaccaacaaggugaacuccgugaucgagaagaugaacacgcaguucaccgcggucggcaaggaguucaaccaccuggagaagcggaucgagaaccucaacaagaagguggacgacggcuuccuggacaucuggaccuacaacgccgagcugcucguccugcuggagaacgagcgcacccucgacuaccacgacagcaacgugaagaaccuguacgagaaggugcggaaccagcugaagaacaacgccaaggagaucgggaacggcugcuucgaguucaaccacaagugcgacaacacgugcauggaguccgucaagaacgggaccuacgacuaccccaaguacagcgaggaggccaagcucaacaaggaggagaucgacggcgugaagcuggaguccacccgcaucuaccagauccuggccaucuacagcaccguggcguccagccucguccugguggugagccugggggccaucuccuucuggaugugcagcaacggcucccuccagugccggaucugcaucuga

SEQ ID NO: 73983 - RNA, 1701 nt, Artificial Sequence
  derived and/or modified CDS sequence (opt1) from hemagglutinin__InfluenzaA__AGJ73380
augaaggccauccuggugguccuccuguacaccuucgccaccgcgaacgccgacacgcugugcaucggcuaccacgccaacaacagcaccgacaccguggacaccgugcucgagaagaacgucacggugacccacuccgugaaccugcuggaggacaagcacaacgggaagcucugcaagcugcgcggcgucgcgccccugcaccucgggaagugcaacaucgccggcuggauccuggggaacccggagugcgagagccuguccaccgccagcuccuggagcuacaucguggagaccuccagcuccgacaacggcacgugcuaccccggcgacuucaucaacuacgaggagcuccgggagcagcugagcuccgugagcuccuucgagcgcuucgagaucuuccccaagaccagcuccuggcccaaccacgacagcaacaagggggucaccgccgccugcccgcacgccggcgcgaaguccuucuacaagaaccugaucuggcucgugaagaaggggaacagcuaccccaagcuguccaagagcuacaucaacgacaagggcaaggaggugcugguccucugggggauccaccaccccagcaccacggccgaccagcagucccuguaccagaacgccgacgccuacguguucgugggcaccagccgguacuccaagaaguucaagcccgagaucgccauccgcccgaagguccggggccaggaggggcgcaugaacuacuacuggacccugaucgagcccggcgacaagaucaccuucgaggcgacggggaaccucguggugccccgguacgccuucgccauggagcgcaacgccggcagcggcaucaucaucuccgacacccccguccacgacugcaacagcacgugccagaccccgaagggggccaucaacaccucccugcccuuccagaacauccaccccaucaccaucggcaagugccccaaguacgucaagagcaccaagcugcggcucgcgaccgggcugcgcaacgugccguccauccagagccggggccuguucggggccaucgccggcuucaucgagggcggguggacgggcaugguggacgggugguacggcuaccaccaccagaacgagcagggguccggcuacgccgccgaccucaagagcacccagaacgcgaucgacaagaucaccaacaaggugaacuccgugaucgagaagaugaacacccaguucacggccgucggcaaggaguucaaccaccuggagaagcgcaucgagaaccugaacaagaagguggacgacggguuccucgacaucuggaccuacaacgccgagcuguucguccugcucgagaacgagcggacccuggacuaccacgacagcaacgugaaggaccuguacgagaaggugcgcaaccagcucaagaacaacgccaaggagaucggcaacgggugcuucgaguucuaccacaagugcgacaacacgugcauggaguccgucaagaacggcaccuacgacuaccccaaguacagcgaggaggccaagcugaaccgggagaagaucgacggggugaagcuggaguccacccgcaucuaccagauccucgcgaucuacagcaccguggccuccagccugguccugguggugagccucggcgccaucuccuucuggaugugcagcaacggcucccugcagugccggaucugcaucuga

SEQ ID NO: 73984 - RNA, 1701 nt, Artificial Sequence
  derived and/or modified CDS sequence (opt1) from hemagglutinin__InfluenzaA__AGK62991
augaagaccaucaucgcccugagcuacauccucugccugguguucgcccagaagcugcccggcaacgacaacuccaccgcgacgcucugccuggggcaccacgccgucccgaacggcaccaucgugaagaccaucaccaacgaccagaucgaggugacgaacgccaccgagcugguccagagcuccagcaccggggagaucugcgacagcccccaccagauccucgacggcgagaacugcacccugaucgacgcccugcucggggacccccagugcgacggcuuccagaacaagaagugggaccuguucguggagcgcagcaaggccuacuccaacugcuaccccuacgacgugccggacuacgcgagccugcggucccucgucgccagcuccggcacgcuggaguucaacaacgagagcuucaacuggaccggggugacccagaacggcaccuccagcgccugcauccgccgguccaacagcuccuucuucagccgccugaacuggcucacgcaccugaacuucaaguaccccgcccugaacgugaccaugcccaacaacgagcaguucgacaagcucuacaucuggggcguccaccaccccgggaccgacaaggaccagaucuuccuguacgcgcaggccuccgggcggaucaccgugagcacgaagcgcagccagcaggccgugaucccgaacaucggcucccggccccgcauccggaacauccccagccgcaucuccaucuacuggaccaucgucaagcccggcgacauccugcucaucaacagcaccgggaaccugaucgccccgcggggcuacuucaagauccgcuccgggaaguccuccaucaugcggagcgacgcccccaucggcaagugcaacuccgagugcaucacccccaacggcagcauccccaacgacaagccguuccagaacgugaaccgcaucacguacggggcgugcccccgguacgugaagcaguccacccugaagcucgccaccggcaugcgcaacguccccgagaagcagacccgggggaucuucggcgccaucgccggguucaucgagaacggcugggagggcaugguggacgggugguacggcuuccgccaccagaacagcgaggggcggggccaggccgcggaccugaaguccacgcaggccgccaucgaccagaucaacgggaagcugaaccgccucaucggcaagaccaacgagaaguuccaccagaucgagaaggaguucagcgagguggagggccggauccaggaccuggagaaguacgucgaggacaccaagaucgaccugugguccuacaacgccgagcuccugguggcccuggagaaccagcacaccaucgaccucacggacagcgagaugaacaagcuguucgagaagaccaagaagcagcugcgcgagaacgcggaggacauggggaacggcugcuucaagaucuaccacaagugcgacaacgccugcaucggguccauccgcaacggcaccuacaaccacgacguguaccgggacgaggcccucaacaaccgcuuccagaucaagggggucgagcucaagagcggcuacaaggacuggauccuguggaucuccuucgccaucagcugcuuccugcugugcguggcccugcucggcuucaucaugugggcgugccagaaggggaacauccggugcaacaucugcaucuga

SEQ ID NO: 73985 - RNA, 1701 nt, Artificial Sequence
  derived and/or modified CDS sequence (opt1) from hemagglutinin__InfluenzaA__AGK62993
augaagaccaucaucgcccugagcuacauccucugccugguguucgcccagaagcugcccggcaacgacaacuccaccgcgacgcucugccuggggcaccacgccgucccgaacggcaccaucgugaagaccaucaccaacgaccagaucgaggugacgaacgccaccgagcugguccagagcuccagcaccggggagaucugcaacagcccccaccagauccucgacggcgagaacugcacccugaucgacgcccugcucggggacccccagugcgacggcuuccagaacaagaagugggaccuguucguggagcgcagcaaggcccacuccaacugcuaccccuacgacgugccggacuacgcgagccugcggucccucgucgccagcuccggcacgcuggaguucaacaacgagagcuucaacuggaccggggugacccagaacggcaccuccagcgccugcauccgccgguccaacaacagcuucuucucccgccugaacuggcucacgcaccugaacuucaaguaccccgcccugaacgugaccaugcccaacaacgagcaguucgacaagcucuacaucuggggcguccaccaccccgggaccgacaaggaccagaucuuccuguacgcgcaggccagcgggcggaucaccguguccacgaagcgcagccagcaggccgugaucccgaacaucggcagccggccccgcguccggaacauccccucccgcgugagcaucuacuggaccaucgugaagcccggcgacauccugcucaucaacuccaccgggaaccugaucgccccgcggggcuacuucaagauccgcagcgggaaguccagcaucaugcgguccgacgcccccaucagcaagugcaacuccgcgugcaucaccacgaacggcagcauccccaacgacaagcccuuccagaacgucaaccgcaucaccuacggcgccugcccgcgguacgugaagcagaacacccugaagcucgccaccgggaugcgcaacgugcccgagaagcagacgcggggcaucuucggggccaucgccggcuucaucgagaacgggugggagggcauggucgacggcugguacggguuccgccaccagaacuccgagggccgggggcaggcggccgaccugaaguccacccaggccgccaucgaccagaucaacggcaagcugaaccgccucaucgggaagaccaacgagaaguuccaccagaucgagaaggaguucuccgagguggagggccggauccaggaccuggagaaguacguggaggacaccaagaucgaccuguggagcuacaacgccgagcuccuggucgcgcuggagaaccagcacacgaucgaccucaccgacuccgagaugaacaagcuguucgagaagaccaagaagcagcugcgcgagaacgccgaggacaugggcaacgggugcuucaagaucuaccacaagugcgacaacgccugcaucggcagcauccgcaacgggaccuacgaccacgacguguaccgggacgaggcccucaacaaccgcuuccagaucaagggcguggagcugaaguccggguacaaggacuggauccuguggaucagcuucgccaucuccugcuuccuccugugcgucgcgcugcucggcuucaucauguggagcugccagaagggcaacauccggugcaacaucugcaucuga

SEQ ID NO: 73986 - RNA, 1701 nt, Artificial Sequence
  derived and/or modified CDS sequence (opt1) from hemagglutinin__InfluenzaA__AGK62995
augaagaccaucaucgcccugagcuacauccucugccugguguucgcccagaagcugcccggcaacgacaacuccaccgcgacgcucugccuggggcaccacgccggcccgaacgggaccaucgucaagaccaucaccaacgaccagaucgaggugacgaacgccaccgagcuggugcagagcuccagcaccggcgagaucugcgacagcccccaccagauccucgacggggagaacugcacccugaucgacgcccugcucggcgacccccagugcgacggcuuccagaacaagaagugggaccuguucgucgagcgcagcaaggccuacuccaacugcuaccccuacgacgugccggacuacgcgagccugcggucccucguggccagcuccgggacgcuggaguucaacaacgagagcuucaacuggaccggcgucacccagaacgggaccuccagcgccugcauccgccgguccaacaacagcuucuucucccgccugaacuggcucacgcaccugaacuucaaguaccccgcccugaacgugaccaugcccaacaacgagcaguucgacaagcucuacaucuggggcgugcaccaccccgggaccgacaaggaccagaucuuccuguacgcgcagagcuccggccggaucaccgucagcacgaagcgcagccagcaggccgugaucccgaacaucggcucccggccccgcauccggaacauccccagccgcaucuccaucuacuggaccaucgugaagcccggggacauccugcucaucaacagcaccggcaaccugaucgccccgcggggguacuucaagauccgcuccggcaagagcuccaucaugcggagcgacgcccccaucggcaagugcaacuccgagugcaucacccccaacgggagcauccccaacgacaagccguuccagaacgucaaccgcaucacguacggcgccugcccccgguacgugaagcaguccacccugaagcucgcgaccgggaugcgcaacgugcccgagaagcagacccggggcaucuucggggccaucgccggcuucaucgagaacggcugggaggggauggucgacggcugguacggguuccgccaccagaacagcgagggccgggggcaggccgccgaccugaaguccacgcaggcggccaucgaccagaucaacggcaagcugaaccgccucaucggcaagaccaacgagaaguuccaccagaucgagaaggaguucagcgagguggaggggcggauccaggaccuggagaaguacguggaggacaccaagaucgaccugugguccuacaacgccgagcuccuggucgcccuggagaaccagcacaccaucgaccucacggacagcgagaugaacaagcuguucgagaagaccaagaagcagcugcgcgagaacgccgaggacaugggcaacgggugcuucaagaucuaccacaagugcgacaacgcgugcaucggcuccauccgcaacgggaccuacaaccacgacguguaccgggacgaggcccucaacaaccgcuuccagaucaagggcguggagcugaaguccggcuacaaggacuggauccuguggaucuccuucgccaucagcugcuuccuccugugcgucgcccugcucggguucaucaugugggccugccagaagggcaacauccggugcaacaucugcaucuga

SEQ ID NO: 73987 - RNA, 1701 nt, Artificial Sequence
  derived and/or modified CDS sequence (opt1) from hemagglutinin__InfluenzaA__AGK62997
augaagaccaucaucgcccugagcuacauccucugccugguguucgcccagaagcugcccggcaacgacaacuccaccgcgacgcucugccuggggcaccacgccgucccgaacggcaccaucgugaagaccaucaccaacgaccagaucgaggugacgaacgccaccgagcugguccagagcuccagcaccggggagaucugcaacagcccccaccagauccucgacggcgagaacugcacccugaucgacgcccugcucggggacccccagugcgacggcuuccagaacaagaagugggaccuguucguggagcgcuccaaggcccacuccaacugcuaccccuacgacgugccggacuacgcgagccugcggucccucgucgccagcuccggcacgcuggaguucaacaacgagagcuucaacuggaccggggugacccagaacggcaccuccagcgccugcauccgccgguccaacaacagcuucuucucccgccugaacuggcucacgcaccugaacuucaaguaccccgcccugaacgugaccaugcccaacaacgacaaguucgacaagcucuacaucuggggcguccaccaccccgggaccgacaaggaccagaucuuccuguacgcgcaggccagcgggcggaucaccguguccacgaagcgcagccagcaggccgugaucccgaacaucggcagccggccccgcguccggaacauccccucccgcgugagcaucuacuggaccaucgugaagcccggcgacauccugcucaucaacuccaccgggaaccugaucgccccgcggggcuacuucaagauccgcagcgggaaguccagcaucaugcgguccgacgcccccaucggcaagugcaacagcgcgugcaucacccccaacggcuccauccccaacgacaagccguuccagaacgucaaccgcaucacgugcggggccugcgcccgguacgugaagcagaacacccugaagcucgccaccggcaugcgcaacgugcccgagaagcagacccgggggaucuucggcgccaucgcggucuucaucgagaacgggugggagggcaugguggacggcugguacggguuccgccaccagaacagcgagggccgggagcaggccgccgccuuccaguccacgcaggccgcgaucgaccagaucaucgggaagcugaaccgccugaucggcgagaccaacgagaaguuccaccagaucgagaaggaguucagcgagguggagcggcgcauccaggcccucgagaaguacgucgaggacaccaagaucgaccugugguccuacaacgccgagcugcucguggcccuggagaaccagcacaccaucgaccugacggacagcgagaugaacaagcuguucgagaagaccaagaagcagcuccgcgagaacgccgaggacauggggaacggcugcuucaagaucuaccacaagugcgacaacgcgugcaucggcuccauccggaacgggaccuacgaccacgacguguaccgcgacgaggcccugaacaaccgguuccagaucaagggcgucgagcucaagagcggguacaaggacuggauccuguggaucuccuucgccaucagcugcuuccugcucugcguggcccugcugggcuucaucaugugguccugccagaaggggaacauccgcugcaacaucugcaucuga

SEQ ID NO: 73988 - RNA, 1701 nt, Artificial Sequence
  derived and/or modified CDS sequence (opt1) from hemagglutinin__InfluenzaA__AGK62999
augaagaccaucaucgcccugagcuacauccucugccugguguucgcccagaagcugcccggcaacgacaacuccaccgcgacgcucugccuggggcaccacgccgucccgaacggcaccaucgugaagaccaucaccaacgaccagaucgaggugacgaacgccaccgagcugguccagagcuccagcaccggggagaucugcaacagcccccaccagauccucgacggcgagaacugcacccugaucgacgcccugcucggggacccccagugcgacggcuuccagaacaagaagugggaccuguucguggagcgcagcaaggccuacuccaacugcuaccccuacgacgugccggacuacgcgagccugcggucccucgucgccagcuccggcacgcuggaguucaacaacgagagcuucaacuggaccggggugacccagaacggcaccuccagcgccugcauccgccgguccaacaacagcuucuucucccgccugaacuggcucacgcaccugaacuucaaguaccccgcccugaacgugaccaugcccaacaacgagcaguucgacaagcucuacaucuggggcguccaccaccccgggaccgacaaggaccagaucuuccuguacgcgcaggccagcgggcggaucaccguguccacgaagcgcagccagcaggccgugaucccgaacaucggcagccggccccgcguccggaacauccccucccgcgugagcaucuacuggaccaucgugaagcccggcgacauccugcucaucaacuccaccgggaaccugaucgccccgcggggcuacuucaagauccgcagcgggaaguccagcaucaugcgguccgacgcccccaucggcaagugcaacagcgcgugcaucacccccaacggcuccauccccaacgacaagccguuccagaacgucaaccgcaucacguacggggccugcccccgguacgugaagcagaacacccugaagcucgccaccggcaugcgcaacgugcccgagaagcagacccgggggaucuucggcgccaucgccggguucaucgagaacggcugggagggcauggucgacgggugguacggcuuccgccaccagaacagcgaggggcggggccaggcggccgaccugaaguccacgcaggccgccaucgaccagaucaacgggaagcugaaccgccucaucggcaagaccaacgagaaguuccaccagaucgagaaggaguucagcgagguggagggccggauccaggaccuggagaaguacguggaggacaccaagaucgaccugugguccuacaacgccgagcuccuggucgcgcuggagaaccagcacaccaucgaccucacggacagcgagaugaacaagcuguucgagaagaccaagaagcagcugcgcgagaacgccgaggacauggggaacggcugcuucaagaucuaccacaagugcgacaacgccugcaucggguccauccgcaacggcaccuacgaccacgacguguaccgggacgaggcccucaacaaccgcuuccagaucaaggggguggagcugaaguccggcuacaaggacuggauccuguggaucuccuucgccaucagcugcuuccuccugugcgucgcgcugcucggcuucaucaugugggccugccagaaggggaacauccggugcaacaucugcaucuga

SEQ ID NO: 73989 - RNA, 1701 nt, Artificial Sequence
  derived and/or modified CDS sequence (opt1) from hemagglutinin__InfluenzaA__AGK63001
augaagaccaucaucgcccugagcuacauccucugccugguguucgcccagaagcugcccggcaacgacaacuccaccgcgacgcucugccugguccaccacgccgugccgaacgggaccaucgugaagaccaucaccaacgaccagaucgaggucacgaacgccaccgagcuggugcagagcuccagcaccggcgagaucugcgacagcccccaccagauccucgacggggagaacugcacccugaucgacgcccugcucggcgacccccagugcgacggguuccagaacaaggagugggaccuguucguggagcgcuccaaggccuacuccaacugcuaccccuacgacgucccggacuacgcgagccugcggucccucguggccagcuccggcacgcuggaguucaacaacgagagcuucaacuggaccggcgugacccagaacgggaccuccagcgccugcauccgccgguccaacagcuccuucuucagccgccugaacggccucacgcaccugaacuucaaguaccccgcccugaacgucaccaugcccaacaacgagcaguucgacaagcucuacaucuggggcgugcaccaccccgggaccgacaaggaccagaucuuccuguacgcgcaguccagcgggcggaucaccgugagcacgaagcgcucccagcaggccgucaucccgaacaucggcagccggccccgcauccggaacauccccucccgcaucagcaucuacuggaccaucgugaagcccggcgacauccugcucaucaacuccaccgggaaccugaucgccccgcggggcuacuucaagauccgcagcgggaaguccagcaucaugcgguccgacgcccccaucggcaagugcaacagcgagugcaucacccccaacggcuccauccccaacgacaagccguuccagaacgugaaccgcaucacguacggggccugcccccgguacgucaagcagagcacccugaagcucgcgaccggcaugcgcaacgugcccgagaagcagacccgggggaucuucggcgccaucgccggguucaucgagaacggcugggagggcaugguggacgggugguacggcuuccgccaccagaacuccgaggggcgggagcaggccgccgacuuccagagcacgcaggcggccaucgaccagaucaucggcaagcugaaccgccugaucgggaagaccaacgagaaguuccaccagaucgagaaggaguucuccgaggucgagcggcgcauccaggaccucgagaaguacguggaggacaccaagaucgaccuguggagcuacaacgccgagcugcucguggcccuggagaaccagcacaccaucgaccugacggacuccgagaugaacaagcuguucgagaagaccaagaagcagcuccgcgagaacgccgaggacaugggcaacggcugcuucaagaucuaccacaagugcgacaacgcgugcaucgggagcauccggaacggcaccuacaaccacgacgucuaccgcgacgaggcccugaacaaccgguuccagaucaaggggguggagcucaaguccggcuacaaggacuggauccuguggaucagcuucgccaucagcugcuuccugcucugcguggcccugcugggguucaucaugugguccugccagaagggcaacauccgcugcaacaucugcaucuga

SEQ ID NO: 73990 - RNA, 1701 nt, Artificial Sequence
  derived and/or modified CDS sequence (opt1) from hemagglutinin__InfluenzaA__AGK63003
augaagaccaucaucgcccugagcuacauccucugccugguguucgcccagaagcugcccggcaacgacaacuccaccgcgacgcucugccuggggcaccacgccggcccgaacgggaccaucgucaagaccaucaccaacgaccagaucgaggugacgaacgccaccgagcuggugcagagcuccagcaccggcgagaucugcgacagcccccaccagauccucgacggggagaacugcacccugaucgacgcccugcucggcgacccccagugcgacggcuuccagaacaagaagugggaccuguucaucgagcgcagcaaggccuacuccaacugcuaccccuacgacgucccggacuacgcgagccugcggucccucguggccagcuccgggacgcuggaguucaacaacgagagcuucaacuggaccggcgugacccagaacgggaccuccagcgccugcauccgccgguccaacagcuccuucuucagccgccugaacuggcucacgcaccugaacuucaaguaccccgcccugaacgucaccaugcccaacaacgagcaguucgacaagcucuacaucuggggcgugcaccaccccgggaccgacaaggaccagaucuuccuguacgcgcaguccagcggccggaucaccgugagcacgaagcgcucccagcaggccgucaucccgaacaucggcagccggccccgcauccggaacauccccucccgcaucagcaucuacuggaccaucgugaagcccggggacauccugcucaucaacuccaccggcaaccugaucgccccgcggggguacuucaagauccgcagcggcaaguccagcaucaugcgguccgacgcccccaucggcaagugcaacagcgccugcaucacccccaacggguccauccccaacgacaagccguuccagaacgugaaccgcaucacguacggcgcgugcccccgguacgucaagcagagcacccugaagcucgccaccgggaugcgcaacgugcccgagaagcagacccggggcaucuucggggccaucgccggcuucaucgagaacggcugggaggggaugguggacggcugguacggguuccgccaccagaacuccgagggccgggggcaggccgcggaccugaaguccacgcaggccgccaucgaccagaucaacggcaagcugaaccgccucaucggcaagaccaacgagaaguuccaccagaucgagaaggaguucuccgaggucgaggggcggauccaggaccuggagaaguacguggaggacaccaagaucgaccuguggagcuacaacgccgagcuccugguggcccuggagaaccagcacaccaucgaccucacggacuccgagaugaacaagcuguucgagaagaccaagaagcagcugcgcgagaacgcggaggacaugggcaacgggugcuucaagaucuaccacaagugcgacaacgccugcaucggcagcauccgcaacgggaccuacaaccacgacgucuaccgggacgaggcccucaacaaccgcuuccagaucaagggcguggagcugaaguccggcuacaaggacuggauccuguggaucagcuucgccaucagcugcuuccuccugugcguggcccugcucggguucaucaugugggcgugccagaagggcaacauccggugcaacaucugcaucuga

SEQ ID NO: 73991 - RNA, 1701 nt, Artificial Sequence
  derived and/or modified CDS sequence (opt1) from hemagglutinin__InfluenzaA__AGK63005
augaagaccaucaucgcccugagcuacauccucugccugguguucgcccagaagcugcccggcaacgacaacuccaccgcgacgcucugccugguccaccacgccgugccgaacgggaccaucgugaagaccaucaccaacgaccagaucgaggucacgaacgccaccgagcuggugcagagcuccagcaccggcgagaucugcgacagcccccaccagauccucgacggggagaacugcacccugaucgacgcccugcucggcgacccccagugcgacggguuccagaacaagaagugggaccuguucguggagcgcuccaaggccuacuccaacugcuaccccuacgacgucccggacuacgcgagccugcggucccucguggccagcuccggcacgcuggaguucaacaacgagagcuucaacuggaccggcgugacccagaacgggaccuccagcgccugcauccgccgguccaacagcuccuucuucagccgccugaacggccucacgcaccugaacuucaaguaccccgcccuggacgucaccaugcccaacaacgacaaguucgacaagcucuacaucuggggcgugcaccaccccgggaccgacaaggaccagaucuuccuguacgcgcaguccagcgggcggaucaccgugagcacgaagcgcucccagcaggccgucaucccgaacaucggcagccggccccgcauccggaacauccccucccgcaucagcaucuacuggaccaucgugaagcccggcgacauccugcucaucaacuccaccgggaaccugaucgccccgcggggcuacuucaagauccgcagcgggaaguccagcaucaugcgguccgacgcccccaucggcaagugcaacagcgagugcaucacccccaacggcuccauccccaacgacaagccguuccagaacgugaaccgcaucacguacggggccugcccccgguacgucaagcagagcacccugaagcucgcgaccggcaugcgcaacgugcccgagaagcagacccgggggaucuucggcgccaucgccguguucaucgagaacgggugggagggcauggucgacggcugguacggguuccgccaccagaacuccgagggccgggagcaggccgccgacuuccagagcacgcaggcggccaucgaccagaucaacgggaagcugaaccgccugaucggcaagaccaacgagaaguuccaccagaucgagaaggaguucuccgagguggaggggcggauccaggaccucgagaaguacguggaggacaccaagaucgaccuguggagcuacaacgccgagcugcucgucgcccuggagaaccagcacaccaucgaccugacggacuccgagaugaacaagcuguucgagaagaccaagaagcagcuccgcgagaacgccgaggacaugggcaacggcugcuucaagaucuaccacaagugcgacaacgcgugcaucgggagcauccgcaacggcaccuacaaccacgacguguaccgggacgaggcccugaacaaccgcuuccagaucaaggggguggagcucaaguccggcuacaaggacuggauccuguggaucagcuucgccaucagcugcuuccugcucugcgucgcccugcugggguucaucaugugggccugccagaagggcaacauccggugcaacaucugcaucuga

SEQ ID NO: 73992 - RNA, 1701 nt, Artificial Sequence
  derived and/or modified CDS sequence (opt1) from hemagglutinin__InfluenzaA__AGK63007
augaagaccaucaucgcccugagcuacauccucugccugguguucgcccagaagcugcccggcaacgacaacuccaccgcgacgcucugccuggggcaccacgccgucccgaacggcaccaucgugaagaccaucaccaacgaccagaucgaggugacgaacgccaccgagcugguccagagcuccagcaccggggagaucugcgacagcccccaccagauccucgacggcgagaacugcacccugaucgacgcccugcucggggacccccagugcgacggcuuccagaacaagaagugggaccuguucguggagcgcagcaaggcccacuccaacugcuaccccuacgacgugccggacuacgcgagccugcggucccucgucgccagcuccggcacgcuggaguucaacaacgagagcuucaacuggaccggggugacccagaacggcaccuccagcgccugcauccgccgguccaacaacagcuucuucucccgccugaacuggcucacgcaccugaacuucaaguaccccgcccugaacgugaccaugcccaacaacgagcaguucgacaagcucuacaucuggggcguccaccaccccgggaccgacaaggaccagaucuuccuguacgcgcaggccagcgggcggaucaccguguccacgaagcgcagccagcaggccgugaucccgaacaucggcagccggccccgcguccggaacauccccucccgcgugagcaucuacuggaccaucgugaagcccggcgacauccugcucaucaacuccaccgggaaccugaucgccccgcggggcuacuucaagauccgcagcgggaaguccagcaucaugcgguccgacgcccccaucggcaagugcaacagcgagugcaucacccccaacggcuccauccccaacgacaagccguuccagaacgucaaccgcaucacguacggggcgugcccccgguacgugaagcagaacacccugaagcucgccaccggcaugcgcaacgugcccgagaagcagacccgggggaucuucggcgccaucgccggguucaucgagaacggcugggagggcauggucgacgggugguacggcuuccgccaccagaacagcgaggggcggggccaggccgcggaccugaaguccacgcaggccgccaucgaccagaucaacgggaagcugaaccgccucaucggcaagaccaacgagaaguuccaccagaucgagaaggaguucagcgagguggagggccggauccaggaccuggagaaguacguggaggacaccaagaucgaccugugguccuacaacgccgagcuccuggucgcccuggagaaccagcacaccaucgaccucacggacagcgagaugaacaagcuguucgagaagaccaagaagcagcugcgcgagaacgcggaggacauggggaacggcugcuucaagaucuaccacaagugcgacaacgccugcaucggguccauccgcaacggcaccuacgaccacgacguguaccgggacgaggcccucaacaaccgcuuccagaucaaggggguggagcugaaguccggcuacaaggacuggauccuguggaucuccuucgccaucagcugcuuccuccugugcgucgcccugcucggcuucaucaugugggcgugccagaaggggaacauccggugcaacaucugcaucuga

SEQ ID NO: 73993 - RNA, 1701 nt, Artificial Sequence
  derived and/or modified CDS sequence (opt1) from hemagglutinin__InfluenzaA__AGK63009
augaagaccaucaucgcccugagcuacauccucugccugguguucgcccagaagcugcccggcaacgacaacuccaccgcgacgcucugccuggggcaccacgccgucccgaacggcaccaucgugaagaccaucaccaacgaccagaucgaggugacgaacgccaccgagcugguccagagcuccagcaccggggagaucugcaacagcccccaccagauccucgacggcgagaacugcacccugaucgacgcccugcucggggacccccagugcgacggccugcagaacaagaagugggaccuguucguggagcgcagcaaggcccacuccaacugcuaccccuacgacgugccggacuacgcgagccuccggucccuggucgccagcuccggcacgcuggaguucaacaacgagagcuucaacuggaccggggugacccagaacggcaccuccagcgccugcauccgccgguccaacaacagcuucuucucccgccucaacuggcugacgcaccugaacuucaaguaccccgcccucaacgugaccaugcccaacaacgagcaguucgacaagcuguacaucuggggcguccaccaccccgggaccgacaaggaccagaucuuccuguacgcgcaggccagcgggcggaucaccguguccacgaagcgcagccagcaggccgugaucccgaacaucggcagccggccccgcguccggaacauccccucccgcgugagcaucuacuggaccaucgugaagcccggcgacauccuccugaucaacuccaccgggaaccugaucgccccgcggggcuacuucaagauccgcagcgggaaguccagcaucaugcgguccgacgcccccaucggcaagugcaacagcgcgugcaucacccccaacggcuccauccccaacgacaagccguuccagaacgucaaccgcaucacguacggggccugcccccgguacgugaagcagaacacccucaagcuggccaccggcaugcgcaacgugcccgagaagcagacccgggggaucuucggcgccaucgccggguucaucgagaacggcugggagggcauggucgacgggugguacggcuuccgccaccagaacagcgaggggcggggccaggcggccgaccugaaguccacgcaggccgccaucgaccagaucaacgggaagcucaaccgccugaucggcaagaccaacgagaaguuccaccagaucgagaaggaguucagcgagguggagggccggauccaggaccuggagaaguacguggaggacaccaagaucgaccucugguccuacaacgccgagcugcuggucgcgcucgagaaccagcacaccaucgaccugacggacagcgagaugaacaagcuguucgagaagaccaagaagcagcuccgcgagaacgccgaggacauggggaacggcugcuucaagaucuaccacaagugcgacaacgccugcaucggguccauccgcaacggcaccuacgaccacgacguguaccgggacgaggcccugaacaaccgcuuccagaucaaggggguggagcugaaguccggcuacaaggacuggauccucuggaucuccuucgccaucagcugcuuccugcugugcgucgcgcuccugggcuucaucaugugggccugccagaaggggaacauccggugcaacaucugcaucuga

SEQ ID NO: 73994 - RNA, 1701 nt, Artificial Sequence
  derived and/or modified CDS sequence (opt1) from hemagglutinin__InfluenzaA__AGK63011
augaagaccaucaucgcccugagcuacauccucugccugguguucgcccagaagcugcccggcaacgacaacuccaccgcgacgcucugccuggggcaccacgccgucccgaacggcaccaucgugaagaccaucaccaacgaccagaucgaggugacgaacgccaccgagcugguccagagcuccagcaccggggagaucugcgacagcccccaccagauccucgacggcgagaacugcacccugaucgacgcccugcucggggacccccagugcgacggcuuccagaacaagaagugggaccuguucguggagcgcagcaaggccuacuccaacugcuaccccuacgacgugccggacuacgcgagccugcggucccucgucgccagcuccggcacgcuggaguucaacaacgagagcuucaacuggaccggggugacccagaacggcaccuccagcgccugcauccgccgguccaacaacagcuucuucucccgccugaacuggcucacgcaccugaacuucaaguaccccgcccugaacgugaccaugcccaacaacgagcaguucgacaagcucuacaucuggggcguccaccaccccgggaccgacaaggaccagaucuuccuguacgcgcaggccagcgggcggaucaccguguccacgaagcgcagccagcaggccgugaucccgaacaucggcagccggccccgcguccggaacauccccucccgcaucagcaucuacuggaccaucgugaagcccggcgacauccugcucaucaacuccaccgggaaccugaucgccccgcggggcuacuucaagauccgcagcgggaaguccagcaucaugcgguccgacgcccccaucggcaagugcaacagcgagugcaucacccccaacggcuccauccccaacgacaagccguuccagaacgugaaccgcaucacguacggggcgugcccccgguacgucaagcagagcacccugaagcucgccaccggcaugcgcaacgugcccgagaagcagacccgggggaucuucggcgccaucgccggguucaucgagaacggcugggagggcaugguggacgggugguacggcuuccgccaccagaacuccgaggggcggggccaggccgcggaccugaaguccacgcaggccgccaucgaccagaucaacgggaagcugaaccgccucaucggcaagaccaacgagaaguuccaccagaucgagaaggaguucuccgaggucgagggccggauccaggaccuggagaaguacguggaggacaccaagaucgaccuguggagcuacaacgccgagcuccugguggcccuggagaaccagcacaccaucgaccucacggacuccgagaugaacaagcuguucgagaagaccaagaagcagcugcgcgagaacgcggaggacauggggaacggcugcuucaagaucuaccacaagugcgacaacgccugcaucgggagcauccgcaacggcaccuacgaccacgacgucuaccgggacgaggcccucaacaaccgcuuccagaucaaggggguggagcugaaguccggcuacaaggacuggauccuguggaucagcuucgccaucuccugcuuccuccugugcguggcccugcucggcuucaucaugugggcgugccagaaggggaacauccggugcaacaucugcaucuga

SEQ ID NO: 73995 - RNA, 1701 nt, Artificial Sequence
  derived and/or modified CDS sequence (opt1) from hemagglutinin__InfluenzaA__AGK63013
augaagaccaucaucgcccugagcuacauccucugccugguguucgcccagaagcugcccggcaacgacaacuccaccgcgacgcucugccuggggcaccacgccgucccgaacggcaccaucgugaagaccaucaccaacgaccagaucgaggugacgaacgccaccgagcugguccagagcuccagcaccggggagaucugcaacagcccccaccagauccucgacggcgagaacugcacccugaucgacgcccugcucggggacccccagugcgacggcuuccagaacaagaagugggaccuguucguggagcgcagcaaggcccacuccaacugcuaccccuacgacgugccggacuacgcgagccugcggucccucgucgccagcuccggcacgcuggaguucaacaacgagagcuucaacuggaccggggugacccagaacggcaccuccagcgccugcauccgccgguccaacaacagcuucuucucccgccugaacuggcucacgcaccugaacuucaaguaccccgcccuggacgugaccaugcccaacaacgagcaguucgacaagcucuacaucuggggcguccaccaccccgggaccgacaaggaccagaucuuccuguacgcgcaggccagcgggcggaucaccguguccacgaagcgcagccagcaggccgugaucccgaacaucggcagccggccccgcguccggaacauccccucccgcgugagcaucuacuggaccaucgugaagcccggcgacauccugcucaucaacuccaccgggaaccugaucgccccgcggggcuacuucaagauccgcagcgggaaguccagcaucaugcgguccgacgcccccaucggcaagugcaacagcgcgugcaucacccccaacggcuccauccccaacgacaagccguuccagaacgucaaccgcaucacguacggggccugcgcccgguacgugaagcagaacacccugaagcucgccaccggcaugcgcaacgugcccgagaagcagacccgggggaucuucggcgccaucgcggucuucaucgagaacgggugggagggcaugguggacggcugguacggguuccgccaccagaacagcgagggccgggggcaggccgccgcccugcaguccacgcaggccgcgaucgaccagaucaccggcaagcugaaccgccucaucggggagaccaacgagaaguuccaccagaucgagaaggaguucagcgagguggagggccggauccaggcccuggagaaguacgucgaggacaccaagaucgaccugugguccuacaacgccgagcuccugguggcccuggagaaccagcacacgaucgaccucaccgacagcgagaugaacaagcuguucgagaagaccaagaagcagcugcgcgagaacgccgaggacaugggcaacgggugcuucaagaucuaccacaagugcgacaacgcgugcaucggcuccauccgcaacgggaccuacgaccacgacguguaccgggacgaggcccucaacaaccgcuuccagaucaagggcgucgagcugaaguccggguacaaggacuggauccuguggaucuccuucgccaucagcugcuuccuccugugcguggcccugcucggcuucaucaugugguccugccagaagggcaacauccggugcaacaucugcaucuga

SEQ ID NO: 73996 - RNA, 1701 nt, Artificial Sequence
  derived and/or modified CDS sequence (opt1) from hemagglutinin__InfluenzaA__AGK63015
augaagaccaucaucgcccugagcuacauccucugccugguguucgcccagaagcugcccggcaacgacaacuccaccgcgacgcucugccuggggcaccacgccgucccgaacggcaccaucgugaagaccaucaccaacgaccagaucgaggugacgaacgccaccgagcugguccagagcuccagcaccggggagaucugcgacagcccccaccagauccucgacggcgagaacugcacccugaucgacgcccugcucggggacccccagugcgacggcuuccagaacaagaagugggaccuguucguggagcgcagcaaggccuacuccaacugcuaccccuacgacgugccggacuacgcgagccugcggucccucgucgccagcuccggcacgcuggaguucaacaacgagagcuucaacuggaccggggugacccagaacggcaccuccagcgccugcauccgcaaguccaacagcuccuucuucagccggcugaacuggcucacgcaccugaacuucaaguaccccgcccugaacgugaccaugcccaacaacgagcaguucgacaagcucuacaucuggggcguccaccaccccgggaccgacaaggaccagaucuuccuguacgcgcaguccagcgggcgcaucaccgugagcacgaagcggucccagcaggccgugaucccgaacaucggcagccgcccccggauccgcaacauccccucccggaucagcaucuacuggaccaucgucaagcccggcgacauccugcucaucaacuccaccgggaaccugaucgccccgcgcggcuacuucaagauccggagcgggaaguccagcaucaugcgcuccgacgcccccaucggcaagugcaacagcgagugcaucacccccaacggcuccauccccaacgacaagccguuccagaacgugaaccggaucacguacggggccugcccccgcuacgugaagcagagcacccugaagcucgcgaccggcaugcggaacguccccgagaagcagacccgcgggaucuucggcgccaucgccggguucaucgagaacggcugggagggcaugguggacgggugguacggcuuccggcaccagaacuccgaggggcgcggccaggccgccgaccugaaguccacgcaggcggccaucgaccagaucaacgggaagcugaaccggcucaucggcaagaccaacgagaaguuccaccagaucgagaaggaguucuccgagguggagggccgcauccaggaccuggagaaguacgucgaggacaccaagaucgaccuguggagcuacaacgccgagcuccugguggcccuggagaaccagcacaccaucgaccucacggacuccgagaugaacaagcuguucgagaagaccaagaagcagcugcgggagaacgccgaggacauggggaacggcugcuucaagaucuaccacaagugcgacaacgcgugcaucgggagcauccgcaacggcaccuacaaccacgacguguaccgcgacgaggcccucaacaaccgguuccagaucaagggggucgagcugaaguccggcuacaaggacuggauccuguggaucagcuucgccaucagcugcuuccuccugugcguggcccugcucggcuucaucaugugggccugccagaaggggaacauccgcugcaacaucugcaucuga

SEQ ID NO: 73997 - RNA, 1701 nt, Artificial Sequence; identical to SEQ ID NO: 71006
  derived and/or modified CDS sequence (opt1) from hemagglutinin__InfluenzaA__AGK63017

SEQ ID NO: 73998 - RNA, 1701 nt, Artificial Sequence
  derived and/or modified CDS sequence (opt1) from hemagglutinin__InfluenzaA__AGK63019
augaagaccaucaucgcccugagcuacauccucugccugguguucgcccagaagcugcccggcaacgacaacuccaccgcgacgcucugccuggggcaccacgccgucccgaacggcaccaucgugaagaccaucaccaacgaccagaucgaggugacgaacgccaccgagcugguccagagcuccagcaccggggagaucugcgacagcccccaccagauccucgacggcgagaacugcacccugaucgacgcccugcucggggacccccagugcgacggcuuccagaacaagaagugggaccuguucguggagcgcagcaaggccuacuccaacugcuaccccuacgacgugccggacuacgcgagccugcggucccucgucgccagcuccggcacgcuggaguucaacaacgagagcuucaacuggaccggggugacccagaacggcaccuccagcgccugcauccgccgguccaacagcuccuucuucagccgccugaacuggcucacgcaccugaacuucaaguaccccgcccugaacgugaccaugcccaacaacgagcaguucgacaagcucuacaucuggggcguccaccaccccgggaccgacaaggaccagaucuuccuguacgcgcaguccagcgggcggaucaccgugagcacgaagcgcucccagcaggccgugaucccgaacaucggcagccggccccgcauccggaacauccccucccgcaucagcaucuacuggaccaucgucaagcccggcgacauccugcucaucaacuccaccgggaaccugaucgccccgcggggcuacuucaagauccgcagcgggaaguccagcaucaugcgguccgacgcccccaucggcaagugcaacagcgagugcaucacccccaacggcuccauccccaacgacaagccguuccagaacgugaaccgcaucacguacggggccugcccccgguacgugaagcagagcacccugaagcucgcgaccggcaugcgcaacguccccgagaagcagacccgggggaucuucggcgccaucgccggguucaucgagaacggcugggagggcaugguggacgggugguacggcuuccgccaccagaacuccgaggggcggggccaggccgccgaccugaaguccacgcaggcggccaucgaccagaucaacgggaagcugaaccgccucaucggcaagaccaacgagaaguuccaccagaucgagaaggaguucuccgagguggagggccggauccaggaccuggagaaguacgucgaggacaccaagaucgaccuguggagcuacaacgccgagcuccugguggcccuggagaaccagcacaccaucgaccucacggacuccgagaugaacaagcuguucgagaagaccaagaagcagcugcgcgagaacgccgaggacauggggaacggcugcuucaagaucuaccacaagugcgacaacgcgugcaucgggagcauccgcaacggcaccuacgaccacgacguguaccgggacgaggcccucaacaaccgcuuccagaucaagggggucgagcugaaguccggcuacaaggacuggauccuguggaucagcuucgccaucagcugcuuccuccugugcguggcccugcucggcuucaucaugugggccugccagaaggggaacauccggugcaacaucugcaucuga

SEQ ID NO: 73999 - RNA, 1701 nt, Artificial Sequence; identical to SEQ ID NO: 73873
  derived and/or modified CDS sequence (opt1) from hemagglutinin__InfluenzaA__AGK63021

SEQ ID NO: 74000 - RNA, 1701 nt, Artificial Sequence
  derived and/or modified CDS sequence (opt1) from hemagglutinin__InfluenzaA__AGK63025
augaagaccaucaucgcccugagcuacauccucugccugguguucgcccagaagcugcccggcaacgacaacuccaccgcgacgcucugccuggggcaccacgccgucccgaacggcaccaucgugaagaccaucaccaacgaccagaucgaggugacgaacgccaccgagcugguccagagcuccagcaccggggagaucugcgacagcccccaccagauccucgacggcgagaacugcacccugaucgacgcccugcucggggacccccagugcgacggcuuccagaacaagaagugggaccuguucaucgagcgcagcaaggccuacuccaacugcuaccccuacgacgugccggacuacgcgagccugcggucccucguggccagcuccggcacgcuggaguucaacaacgagagcuucaacuggaccggggucacccagaacggcaccuccagcgccugcauccgcaaguccaacagcuccuucuucagccggcugaacuggcucacgcaccugaacuucaaguaccccgcccugaacgugaccaugcccaacaacgagcaguucgacaagcucuacaucuggggcgugcaccaccccgggaccgacaaggaccagaucuuccuguacgcgcaguccagcgggcgcaucaccgucagcacgaagcggucccagcaggccgugaucccgaacaucggcagccgcccccggauccgcaacauccccucccggaucagcaucuacuggaccaucgugaagcccggcgacauccugcucaucaacuccaccgggaaccugaucgccccgcgcggcuacuucaagauccggagcgggaaguccagcaucaugcgcuccgacgcccccaucggcaagugcaacagcgagugcaucacccccaacggcuccauccccaacgacaagccguuccagaacgucaaccggaucacguacggggccugcccccgcuacgugaagcagagcacccugaagcucgcgaccggcaugcggaacgugcccgagaagcagacccgcgggaucuucggcgccaucgccggguucaucgagaacggcugggagggcauggucgacgggugguacggcuuccggcaccagaacuccgaggggcgcggccaggccgccgaccugaaguccacgcaggcggccaucgaccagaucaacgggaagcugaaccggcucaucggcaagaccaacgagaaguuccaccagaucgagaaggaguucuccgagguggagggccgcauccaggaccuggagaaguacguggaggacaccaagaucgaccuguggagcuacaacgccgagcuccuggucgcccuggagaaccagcacaccaucgaccucacggacuccgagaugaacaagcuguucgagaagaccaagaagcagcugcgggagaacgccgaggacauggggaacggcugcuucaagaucuaccacaagugcgacaacgcgugcaucgggagcauccgcaacggcaccuacaaccacgacguguaccgcgacgaggcccucaacaaccgguuccagaucaaggggguggagcugaaguccggcuacaaggacuggauccuguggaucagcuucgccaucagcugcuuccuccugugcgucgcccugcucggcuucaucaugugggccugccagaaggggaacauccgcugcaacaucugcaucuga

SEQ ID NO: 74001 - RNA, 1701 nt, Artificial Sequence; identical to SEQ ID NO: 73098
  derived and/or modified CDS sequence (opt1) from hemagglutinin__InfluenzaA__AGK63027

SEQ ID NO: 74002 - RNA, 1701 nt, Artificial Sequence
  derived and/or modified CDS sequence (opt1) from hemagglutinin__InfluenzaA__AGK63029
augaagaccaucaucgcccugagcuacauccucugccugguguucgcccagaagcugcccggcaacgacaacuccaccgcgacgcucugccuggggcaccacgccgucccgaacggcaccaucgugaagaccaucaccaacgaccagaucgaggugacgaacgccaccgagcugguccagagcuccagcaccggggagaucugcaacagcccccaccagauccucgacggcgagaacugcacccugaucgacgcccugcucggggacccccagugcgacggcuuccagaacaagaagugggaccuguucguggagcgcagcaaggcccacuccaacugcuaccccuacgacgugccggacuacgcgagccugcggucccucgucgccagcuccggcacgcuggaguucaacaacgagagcuucaacuggaccggggugacccagaacggcaccuccagcgccugcauccgccgguccaacaacagcuucuucucccgccugaacuggcucacgcaccugaacuucaaguaccccgcccugaacgugaccaugcccaacaacgagcaguucgacaagcucuacaucuggggcguccaccaccccgggaccgacaaggaccagaucuuccuguacgcgcaggccagcgggcggaucaccguguccacgaagcgcagccagcaggccgugaucccgaacaucggcagccggccccgcguccggaacauccccucccgcgugagcaucuacuggaccaucgugaagcccggcgacauccugcucaucaacuccaccgggaaccugaucgccccgcggggcuacuucaagauccgcagcgggaaguccagcaucaugcgguccgacgcccccaucggcaagugcaacagcgcgugcaucaccacgaacggcuccauccccaacgacaagcccuuccagaacgucaaccgcaucaccuacggggccugcccgcgguacgugaagcagaacacccugaagcucgccaccggcaugcgcaacgugcccgagaagcagacgcgggggaucuucggcgccaucgccggguucaucgagaacggcugggagggcauggucgacgggugguacggcuuccgccaccagaacagcgaggggcggggccaggcggccgaccugaaguccacccaggccgccaucgaccagaucaacgggaagcugaaccgccucaucggcaagaccaacgagaaguuccaccagaucgagaaggaguucagcgagguggagggccggauccaggaccuggagaaguacguggaggacaccaagaucgaccugugguccuacaacgccgagcuccuggucgcgcuggagaaccagcacacgaucgaccucaccgacagcgagaugaacaagcuguucgagaagaccaagaagcagcugcgcgagaacgccgaggacauggggaacggcugcuucaagaucuaccacaagugcgacaacgccugcaucggguccauccgcaacggcaccuacgaccacgacguguaccgggacgaggcccucaacaaccgcuuccagaucaaggggguggagcugaaguccggcuacaaggacuggauccuguggaucuccuucgccaucagcugcuuccuccugugcgucgcgcugcucggcuucaucaugugggccugccagaaggggaacauccggugcaacaucugcaucuga

SEQ ID NO: 74003 - RNA, 1701 nt, Artificial Sequence
  derived and/or modified CDS sequence (opt1) from hemagglutinin__InfluenzaA__AGK63031
augaagaccaucaucgcccugagcuacauccucugccugguguucgcccagaagcugcccggcaacgacaacuccaccgcgacgcucugccuggggcaccacgccgucccgaacggcaccaucgugaagaccaucaccaacgaccagaucgaggugacgaacgccaccgagcugguccagagcuccagcaccggggagaucugcgacagcccccaccagauccucgacggcgagaacugcacccugaucgacgcccugcucggggacccccagugcgacggcuuccagaagaagaagugggaccuguucguggagcgcuccaaggcccacuccaacugcuaccccuacgacgugccggacuacgcgagccugcggucccucgucgccagcuccggcacgcuggaguucaacaacgagagcuucaacuggaccggggugacccagaacggcaccuccagcgccugcauccgccgguccaacaacagcuucuucucccgccugaacuggcucacgcaccugaacuucaaguaccccgcccugaacgugaucaugcccaacaacgagcaguucgacaagcucuacaucuggggcguccaccaccccgggaccgacaaggaccagaucuuccuguacgcgcaggccagcgggcggaucaccguguccaccaagcgcagccagcaggccgugaucccgaacaucggcagccggccccgcguccggaacauccccucccgcgugagcaucuacuggacgaucgugaagcccggcgacauccugcucaucaacuccaccgggaaccugaucgccccgcggggcuacuucaagauccgcagcgggaaguccagcaucaugcgguccgacgcccccaucggcaagugcaacagcgcgugcaucacccccaacggcuccauccccaacgacaagccguuccagaacgucaaccgcaucaccuacggggccugcccccgguacgugaagcagaacacgcugaagcucgccaccggcaugcgcaacgugcccgagaagcagacccgggggaucuucggcgccaucgccggguucaucgagaacggcugggagggcauggucgacgggugguacggcuuccgccaccagaacagcgaggggcggggccaggcggccgaccugaaguccacccaggccgccaucgaccagaucaacgggaagcugaaccgccucaucggcaagacgaacgagaagcugcaccagaucgagaaggaguucagcgagguggagggccggauccuggaccucgagaaguacguggaggacaccaagaucgaccugugguccuacaacgccgagcugcucgucgcgcuggagaaccagcacaccaucgaccugaccgacagcgagaugaacaagcuguucgagaagacgaagaagcagcuccgcgagaacgccgaggacauggggaacggcugcuucaagaucuaccacaagugcgacaacgccugcaucggguccauccgcaacggcaccuacgaccacgacguguaccgggacgaggcccugaacaaccgcuuccagaucaaggggguggagcucaagagcggcuacaaggacuggauccuguggaucuccuucgccaucagcugcuuccugcucugcgucgcgcugcugggcuucaucaugugggccugccagaaggggaacauccggugcaacaucugcaucuga

SEQ ID NO: 74004 - RNA, 1701 nt, Artificial Sequence
  derived and/or modified CDS sequence (opt1) from hemagglutinin__InfluenzaA__AGK63033
augaagaccaucaucgcccugagcuacauccucugccugguguucgcccagaagcugcccggcaacgacaacuccaccgcgacgcucugccuggggcaccacgccgucccgaacggcaccaucgugaagaccaucaccaacgaccagaucgaggugacgaacgccaccgagcugguccagagcuccagcaccggggagaucugcgacagcccccaccagauccucgacggcgagaacugcacccugaucgacgcccugcucggggacccccagugcgacggcuuccagaacaagaagugggaccugaucguggagcgcagcaaggccuacuccaacugcuaccccuacgacgugccggacuacgcgagccugcggucccucgucgccagcuccggcacgcuggaguucaacaacgagagcuucaacuggaccggggugacccagaacggcaccuccagcgccugcauccgcaaguccaacagcuccuucuucagccggcugaacuggcucacgcaccugaacuucaaguaccccgcccugaacgugaccaugcccaacaacgagcaguucgacaagcucuacaucuggggcguccaccaccccgggaccgacaaggaccagaucuuccuguacgcgcaggccuccgggcgcaucaccgugagcacgaagcggagccagcaggccgugaucccgaacaucggcucccgcccccggauccgcaacauccccagccggaucuccaucuacuggaccaucgucaagcccggcgacauccugcucaucaacagcaccgggaaccugaucgccccgcgcggcuacuucaagauccgguccgggaaguccuccaucaugcgcagcgacgcccccaucggcaagugcaacuccgagugcaucacccccaacggcagcauccccaacgacaagccguuccagaacgugaaccggaucacguacggggcgugcccccgcuacgugaagcaguccacccugaagcucgccaccggcaugcggaacguccccgagaagcagacccgcgggaucuucggcgccaucgccggguucaucgagaacggcugggagggcaugguggacgggugguacggcuuccggcaccagaacagcgaggggcgcggccaggccgcggaccugaaguccacgcaggccgccaucgaccagaucaacgggaagcugaaccggcucaucggcaagaccaacgagaaguuccaccagaucgagaaggaguucagcgagguggagggccgcauccaggaccuggagaaguacgucgaggacaccaagaucgaccugugguccuacaacgccgagcuccugguggcccuggagaaccagcacaccaucgaccucacggacagcgagaugaacaagcuguucgagaagaccaagaagcagcugcgggagaacgcggaggacauggggaacggcugcuucaagaucuaccacaagugcgacaacgccugcaucggguccauccgcaacggcaccuacgaccacgacguguaccgcgacgaggcccucaacaaccgguuccagaucaagggggucgagcucaagagcggcuacaaggacuggauccuguggaucuccuucgccaucagcugcuuccugcugugcguggcccugcucggcuucaucaugugggcgugccagaaggggaacauccgcugcaacaucugcaucuga

SEQ ID NO: 74005 - RNA, 1701 nt, Artificial Sequence
  derived and/or modified CDS sequence (opt1) from hemagglutinin__InfluenzaA__AGK63035
augaagaccaucaucgcccugagcuacauccucugccugguguucgcccagaagcugcccggcaacgacaacuccaccgcgacgcucugccuggggcaccacgccgucccgaacggcaccaucgugaagaccaucaccaacgaccagaucgaggugacgaacgccaccgagcugguccagagcuccagcaccggggagaucugcgacagcccccaccagauccucgacggcgagaacugcacccugaucgacgcccugcucggggacccccagugcgacggcuuccagaacaagaagugggaccuguucguggagcgcagcaaggccuacuccaacugcuaccccuacgacgugccggacuacgcgagccugcggucccucgucgccagcuccggcacgcuggaguucaacaacgagagcuucaacuggaccggggugacccagaacggcaccuccagcgccugcauccgccgguccaacaacagcuucuucucccgccugaacuggcucacgcaccugaacuucaaguaccccgcccugaacgugaccaugcccaacaacgagcaguucgacaagcucuacaucuggggcguccaccaccccgggaccgacaaggaccagaucuuccuguacgcgcaggccagcgggcggaucaccguguccacgaagcgcagccagcaggccgugaucccgaacaucggcagccggccccgcauccggaacauccccucccgcaucagcaucuacuggaccaucgucaagcccggcgacauccugcucaucaacuccaccgggaaccugaucgccccgcggggcuacuucaagauccgcagcgggaaguccagcaucaugcgguccgacgcccccaucggcaagugcaacagcgagugcaucacccccaacggcuccauccccaacgacaagccguuccagaacgugaaccgcaucacguacggggcgugcccccgguacgugaagcagagcacccugaagcucgccaccggcaugcgcaacguccccgagaagcagacccgggggaucuucggcgccaucgccggguucaucgagaacggcugggagggcaugguggacgggugguacggcuuccgccaccagaacuccgaggggcggggccaggccgcggaccugaaguccacgcaggccgccaucgaccagaucaacgggaagcugaaccgccucaucggcaagaccaacgagaaguuccaccagaucgagaaggaguucuccgagguggagggccggauccaggaccuggagaaguacgucgaggacaccaagaucgaccuguggagcuacaacgccgagcuccugguggcccuggagaaccagcacaccaucgaccucacggacuccgagaugaacaagcuguucgagaagaccaagaagcagcugcgcgagaacgcggaggacauggggaacggcugcuucaagaucuaccacaagugcgacaacgccugcaucgggagcauccgcaacggcaccuacgaccacgacguguaccgggacgaggcccucaacaaccgcuuccagaucaagggggucgagcugaaguccggcuacaaggacuggauccuguggaucagcuucgccaucuccugcuuccuccugugcguggcccugcucggcuucaucaugugggcgugccagaaggggaacauccggugcaacaucugcaucuga

SEQ ID NO: 74006 - RNA, 1701 nt, Artificial Sequence
  derived and/or modified CDS sequence (opt1) from hemagglutinin__InfluenzaA__AGK63037
augaagaccaucaucgcccugagcuacauccucugccugguguucgcccaggagcugcccggcaacgacaacuccaccgcgacgcucugccuggggcaccacgccgucccgaacggcaccaucgugaagaccaucaccaacgaccagaucgaggugacgaacgccaccgagcugguccagagcuccagcaccggggagaucugcaacagcccccaccagauccucgacggcgagaacugcacccugaucgacgcccugcucggggacccccagugcgacggcuuccagaacaagaagugggaccuguucguggagcgcagcaaggcccacuccaacugcaaccccuacgacgugccggacuacgcgagccugcggucccucgucgccagcuccggcacgcuggaguucaacaacgagagcuucaacuggaccggggugacccagaacggcaccuccagcgccugcauccgccgguccaacaacagcuucuucucccgccugaacuggcucacgcaccugaacuucaaguaccccgcccugaacgugaccaugcccaacaacgagcaguucgacaagcucuacaucuggggcguccaccaccccgggaccgacaaggaccagaucuuccuguacgcgcaggccagcgggcggaucaccguguccacgaagcgcagccagcaggccgugaucccgaacaucggcagccggccccgcguccggaacauccccucccgcgugagcaucuacuggaccaucgugaagcccggcgacauccugcucaucaacuccaccgggaaccugaucgccccgcggggcuacuucaagauccgcagcgggaaguccagcaucaugcgguccgacgcccccaucggcaagugcaacagcgcgugcaucacccccaacggcuccauccccaacgacaagccguuccagaacgucaaccgcaucacguacggggccugcccccgguacgugaagcagaacacccugaagcucgccaccggcaugcgcaacgugcccgagaagcagacccgggggaucuucggcgccaucgccggguucaucgagaacggcugggagggcauggucgacgggugguacggcuuccgccaccagaacagcgaggggcggggccaggcggccgaccugaaguccacgcaggccgccaucgaccagaucaacgggaagcugaaccgccucaucggcaagaccaacgagaaguuccaccagaucgagaaggaguucagcgagguggagggccggauccaggaccuggagaaguacguggaggacaccaagaucgaccugugguccuacaacgcccagcuccuggucgcgcuggagaaccagcacaccaucgaccucacggacagcgagaugaacaagcuguucgagaagaccaagaagcagcugcgcgagaacgccgaggacauggggaacggcugcuucaagaucuaccacaagugcgacaacgccugcaucggguccauccgcaacggcaccuacgaccacgacguguaccgggacgaggcccucaacaaccgcuuccagaucaaggggguggagcugaaguccggcuacaaggacuggauccuguggaucuccuucgccaucagcugcuuccuccugugcgucgcgcugcucggcuucaucaugugggccugccagaaggggaacauccggugcaacaucugcaucuga

SEQ ID NO: 74007 - RNA, 1701 nt, Artificial Sequence
  derived and/or modified CDS sequence (opt1) from hemagglutinin__InfluenzaA__AGK63039
augaagaccaucaucgcccugagcuacauccucugccugguguucgcccagaagcugcccggcaacgacaacuccaccgcgacgcucugccuggggcaccacgccgucccgaacggcaccaucgugaagaccaucaccaacgaccagaucgaggugacgaacgccaccgagcugguccagagcuccagcaccggggagaucugcaacagcccccaccagauccucgacggcgagaacugcacccugaucgacgcccugcucggggacccccagugcgacggcuuccagaagaagaagugggaccuguucguggagcgcagcaaggcccacuccaacugcuaccccuacgacgugccggacuacgcgagccugcggucccucgucgccagcuccggcacgcuggaguucaacaacgagagcuucaacuggaccggggugacccagaacggcaccuccagcgccugcauccgccgguccaacaacagcuucuucucccgccugaacuggcucacgcaccugaacuucaaguaccccgcccugaacgugacccuccccaacaacgagcaguucgacaagcuguacaucuggggcguccaccaccccgggaccgacaaggaccagaucuuccuguacgcgcaggccagcgggcggaucaccguguccacgaagcgcagccagcaggccgugaucccgaacaucggcagccggccccgcguccggaacauccccucccgcgugagcaucuacuggaccaucgugaagcccggcgacauccuccugaucaacuccaccgggaaccugaucgccccgcggggcuacuucaagauccgcagcgggaaguccagcaucaugcgguccgacgcccccaucagcaagugcaacuccgcgugcaucacccccaacggcagcauccccaacgacaagccguuccagaacgucaaccgcaucacguacggcgccugcccccgguacgugaagcagaacacccucaagcuggccaccgggaugcgcaacgugcccgagaagcagacccggggcaucuucggggccaucgccggcuucaucgagaacgggugggagggcauggucgacggcugguacggguuccgccaccagaacuccgagggccgggggcaggcggccgaccugaaguccacgcaggccgccaucgaccagaucaacggcaagcucaaccgccugaucgggaagaccaacgagaaguuccaccagaucgagaaggaguucuccgagguggagggccggauccaggaccuggagaaguacguggaggacaccaagaucgaccucuggagcuacaacgccgagcugcuggucgcgcucgagaaccagcacaccaucgaccugacggacuccgagaugaacaagcuguucgagaagaccaagaagcagcuccgcgagaacgccgaggacaugggcaacgggugcuucaagaucuaccacaagugcgacaacgccugcaucggcagcauccgcaacgggaccuacgaccacgacguguaccgggacgaggcccugaacaaccgcuuccagaucaagggcguggagcugaaguccggguacaaggacuggauccucuggaucagcuucgccaucuccugcuuccugcugugcgucgcgcuccugggcuucaucauguggagcugccagaagggcaacauccggugcaacaucugcaucuga

SEQ ID NO: 74008 - RNA, 1701 nt, Artificial Sequence
  derived and/or modified CDS sequence (opt1) from hemagglutinin__InfluenzaA__AGK63041
augaagaccaucaucgcccugagcuacauccucugccugguguucgcccagaagcugcccggcaacgacaacuccaccgcgacgcucugccuggggcaccacgccgucccgaacggcaccaucgugaagaccaucaccaacgaccagaucgaggugacgaacgccaccgagcugguccagagcuccagcaccggggagaucugcgacagcccccaccagauccucgacggcgagaacugcacccugaucgacgcccugcucggggacccccagugcgacggccugcagaacaagaagugggaccugaucguggagcgcagcaaggcccacuccuacugcuaccccuacgacgugccggacuacgcgagccuccggucccuggucgccagcuccggcacgcuggaguucaacaacgagagcuucaacuggaccgaggugacccagaacgggaccuccagcgccugcauccgccgguccaacaacagcuucuucucccgccucaacuggcugacgcaccugaacuucaaguaccccgcccucaacgugaccaugcccaacaacgagcaguucgacaagcuguacaucuggggcguccaccaccccgggaccgacaaggaccagaucuuccuguacgcgcaggccagcggccggaucaccguguccacgaagcgcagccagcaggccgugaucccgaacaucgggagccggccccgcguccggaacauccccucccgcgugagcaucuacuggaccaucgugaagcccggcgacauccuccugaucaacuccaccggcaaccugaucgccccgcggggguacuucaagauccgcagcggcaaguccagcaucaugcgguccgacgcccccaucgggaagugcaacagcgcgugcaucacccccaacggcuccauccccaacgacaagccguuccagaacgucaaccgcaucacguacggcgccugcccccgguacgugaagcagaacacccucaagcuggccaccgggaugcgcaacgugcccgagaagcagacccggggcaucuucggggccaucgccggcuucaucgagaacgggugggagggcauggucgacggcugguacggguuccgccaccagaacagcgagggccgggggcaggcggccgaccugaaguccacgcaggccgccaucgaccagaucaacggcaagcucaaccgccugaucgggaagaccaacgagaaguuccaccagaucgagaaggaguucagcgagguggagggccggauccaggaccuggagaaguacguggaggacaccaagaucgaccucugguccuacaacgccgagcugcuggucgcgcucgagaaccagcacaccaucgaccugacggacagcgagaugaacaagcuguucgagaagaccaagaagcagcuccgcgagaacgccgaggacaugggcaacgggugcuucaagaucuaccacaagugcgacaacgccugcaucggcuccauccgcaacgggaccuacgaccacgacguguaccgggacgaggcccugaacaaccgcuuccagaucaagggcguggagcugaaguccggguacaaggacuggauccucuggaucuccuucgccaucagcugcuuccugcugugcgucgcgcuccugggcuucaucaugugggccugccagaagggcaacauccggugcaacaucugcaucuga

SEQ ID NO: 74009 - RNA, 1701 nt, Artificial Sequence
  derived and/or modified CDS sequence (opt1) from hemagglutinin__InfluenzaA__AGK63043
augaagaccaucaucgcccugagcuacauccucugccugguguucgcccagaagcugcccggcaacgacaacuccaccgcgacgcucugccuggggcaccacgccgucccgaacggcaccaucgugaagaccaucaccaacgaccagaucgaggugacgaacgccaccgagcugguccagagcuccagcaccggggagaucugcgacagcccccaccagauccucgacggcgagaacugcacccugaucgacgcccugcucggggacccccagugcgacggcuuccagaacaagaagugggaccuguucguggagcgcagcaaggccuacuccaacugcuaccccuacgacgugccggacuacgcgagccugcggucccucgucgccagcuccggcacgcuggaguucaacaacgagagcuucaacuggaccggggugacccagaacggcaccuccagcgccugcauccgccgguccaacaacagcuucuucucccgccugaacuggcucacgcaccugaacuucaaguaccccgcccugaacgugaccaugcccaacaacgagcaguucgacaagcucuacaucuggggcguccaccaccccgggaccgacaaggaccagaucuuccuguacgcgcaggccagcgggcggaucaccguguccacgaagcgcagccagcaggccgugaucccgaacaucggcagccggccccgcguccggaacauccccucccgcgugagcaucuacuggaccaucgugaagcccggcgacauccugcucaucaacuccaccgggaaccugaucgccccgcggggcuacuucaagauccgcagcgggaaguccagcaucaugcgguccgacgcccccaucggcaagugcaacagcgcgugcaucacccccaacggcuccauccccaacgacaagccguuccagaacgucaaccgcaucacguacggggccugcccccgguacgugaagcagagcacccugaagcucgccaccggcaugcgcaacgugcccgagaagcagacccgggggaucuucggcgccaucgccggguucaucgagaacggcugggagggcauggucgacgggugguacggcuuccgccaccagaacuccgaggggcggggccaggcggccgaccugaaguccacgcaggccgccaucgaccagaucaacgggaagcugaaccgccucaucggcaagaccaacgagaaguuccaccagaucgagaaggaguucuccgagguggagggccggauccaggaccuggagaaguacguggaggacaccaagaucgaccuguggagcuacaacgccgagcuccuggucgcgcuggagaaccagcacaccaucgaccucacggacuccgagaugaacaagcuguucgagaagaccaagaagcagcugcgcgagaacgccgaggacauggggaacggcugcuucaagaucuaccacaagugcgacaacgccugcaucgggagcauccgcaacggcaccuacgaccacgacguguaccgggacgaggcccucaacaaccgcuuccagaucaaggggguggagcugaaguccggcuacaaggacuggauccuguggaucagcuucgccaucuccugcuuccuccugugcgucgcgcugcucggcuucaucaugugggccugccagaaggggaacauccggugcaacaucugcaucuga

SEQ ID NO: 74010 - RNA, 1701 nt, Artificial Sequence
  derived and/or modified CDS sequence (opt1) from hemagglutinin__InfluenzaA__AGK63045
augaagaccaucaucgcccugagcuacauccucugccugguguucgcccagaagcugcccggcaacgacaacuccaccgcgacgcucugccuggggcaccacgccgucccgaacggcaccaucgugaagaccaucaccaacgaccagaucgaggugacgaacgccaccgagcugguccagagcuccagcaccggggagaucugcaacagcccccaccagauccucgacggcgagaacugcacccugaucgacgcccugcucggggacccccagugcgacggcuuccagaagaagaagugggaccuguucguggagcgcagcaaggccuacuccaacugcuaccccuacgacgugccggacuacgcgagccugcggucccucgucgccagcuccggcacgcuggaguucaacaacgagagcuucaacuggaccggggugacccagaacggcaccuccagcgccugcauccgcaaguccaacagcuccuucuucagccggcugaacuggcucacgcaccugaacuucaaguaccccgcccugaacgugaccaugcccaacaacgagcaguucgacaagcucuacaucuggggcguccaccaccccgggaccgacaaggaccagaucuuccuguacgcgcaggccuccgggcgcaucaccgugagcacgaagcggagccagcaggccgugaucccgaacaucggcucccgcccccggauccgcaacauccccagccggaucuccaucuacuggaccaucgucaagcccggcgacauccugcucaucaacagcaccgggaaccugaucgccccgcgcggcuacuucaagauccgguccgggaaguccuccaucaugcgcagcgacgcccccaucggcaagugcaacuccgagugcaucacccccaacggcagcauccccaacgacaagccguuccagaacgugaaccggaucacguacggggcgugcccccgcuacgugaagcaguccacccugaagcucgccaccggcaugcggaacguccccgagaagcagacccgcgggaucuucggcgccaucgccggguucaucgagaacggcugggagggcaugguggacgggugguacggcuuccggcaccagaacagcgaggggcgcggccaggccgcggaccugaaguccacgcaggccgccaucgaccagaucaacgggaagcugaaccggcucaucggcaagaccaacgagaaguuccaccagaucgagaaggaguucagcgagguggagggccgcauccaggaccuggagaaguacgucgaggacaccaagaucgaccugugguccuacaacgcccagcuccugguggcccuggagaaccagcacaccaucgaccucacggacagcgagaugaacaagcuguucgagaagaccaagaagcagcugcgggagaacgcggaggacauggggaacggcugcuucaagaucuaccacaagugcgacaacgccugcaucggguccauccgcaacggcaccuacgaccacgacguguaccgcgacgaggcccucaacaaccgguuccagaucaagggggucgagcucaagagcggcuacaaggacuggauccuguggaucuccuucgccaucagcugcuuccugcugugcguggcccugcucggcuucaucaugugggcgugccagaaggggaacauccgcugcaacaucugcaucuga

SEQ ID NO: 74011 - RNA, 1701 nt, Artificial Sequence
  derived and/or modified CDS sequence (opt1) from hemagglutinin__InfluenzaA__AGK63047
augaaggccauccuggugguccuccuguacaccuucgccaccgcgaacgccgacacgcugugcaucggcuaccacgccaacaacagcaccgacaccguggacaccgugcucgagaagaacgucacggugacccacuccgugaaccugcuggaggacaagcacaacgggaagcucugcaagcugcgcggcgucgcgccccugcaccucgggaagugcaacaucgccggcuggauccuggggaacccggagugcgagagccuguccaccgccagcuccuggagcuacaucguggagaccuccagcuccgacaacggcacgugcuaccccggcgacuucaucaacuacgaggagcuccgggagcagcugagcuccgugagcuccuucgagcgcuucgagaucuuccccaagaccagcuccuggcccaaccacgacagcaacaagggggucaccgccgccugcccgcacgccggcgcgaaguccuucuacaagaaccugaucuggcucgugaagaaggggaacagcuaccccaagcuguccaagagcuacaucaacgacaagggcaaggaggugcugguccucugggggauccaccaccccagcaccacggccgaccagcagucccuguaccagaacgccgacgccuacguguucgugggcaccagccgguacuccaagaaguucaagcccgagaucgccauccgcccgaagguccgggaccgcgagggccggaugaacuacuacuggacccugaucgagcccggggacaagaucaccuucgaggcgacgggcaaccucguggugccccgcuacgccuucgccauggagcggaacgccgggagcggcaucaucaucuccgacacccccguccacgacugcaacaccgccugccagaccccggagggcgcgaucaacacgagccugcccuuccagaacauccaccccaucaccaucgggaagugccccaaguacgugaaguccaccaagcugcgccucgccaccggccugcggaacgugccgagcauccagucccgcgggcuguucggcgccaucgccggguucaucgagggcggcuggacggggauggucgacggcugguacggguaccaccaccagaacgagcagggcagcggguacgccgcggaccucaaguccacccagaacgccaucgacaagaucaccaacaaggugaacagcgugaucgagaagaugaacacccaguucacggccgucggcaaggaguucaaccaccuggagaagcggaucgagaaccugaacaagaagguggacgacggcuuccucgacaucuggaccuacaacgccgagcugcugguccuccuggagaacgagcgcacccuggacuaccacgacuccaacgugaagaaccucuacgagaaggugcggaaccagcugaagaacaacgccaaggagaucgggaacggcugcuucgaguucuaccacaagugcgacaacacgugcauggagagcgucaagaacgggaccuacgacuaccccaaguacuccgaggaggcgaagcugaaccgcgagaagaucgacggcgugaagcucgagagcacccggaucuaccagauccuggccaucuacuccaccguggccagcucccugguccucguggugagccugggggccaucagcuucuggaugugcuccaacggcagccugcagugccgcaucugcaucuga

SEQ ID NO: 74012 - RNA, 1683 nt, Artificial Sequence
  derived and/or modified CDS sequence (opt1) from hemagglutinin__InfluenzaA__AGK82158
augaacacccagauccugguguucgcccucaucgccaucauccccaccaacgcggacaagaucugccugggccaccacgccgucagcaacgggacgaaggugaacacccugaccgagcgcggcguggaggucgugaacgccaccgagacgguggagcggaccaacaucccgcgcaucugcuccaaggggaagcggaccgucgaccucggccagugcgggcugcugggcaccaucacgggcccgccccagugcgaccaguuccucgaguucagcgccgaccugaucaucgagcgccgggagggguccgacgugugcuaccccggcaaguucgugaacgaggaggcccugcgccagauccuccgggagagcgggggcaucgacaaggaggcgaugggguucaccuacuccggcauccgcaccaacggcgccaccagcgccugccggcgcuccgggagcuccuucuacgccgagaugaaguggcugcugagcaacacggacaacgcggccuucccgcagaugaccaaguccuacaagaacacccgcaagagccccgcccucaucgucuggggcauccaccacuccgugagcaccgccgagcagacgaagcuguacggguccggcaacaagcuggugaccgucggcagcuccaacuaccagcagagcuucgugcccucccccggggcccggccccaggugaacggccucagcgggcggaucgacuuccacuggcugaugcugaaccccaacgacaccgucaccuucagcuucaacggcgcguucaucgcccccgaccgcgccuccuuccuccggggcaagagcauggggauccaguccggcguccagguggacgccaacugcgagggggacugcuaccacagcggcgggacgaucaucuccaaccugcccuuccagaacaucgacagccgcgccgugggcaagugcccgcgguacgugaagcagcgcucccugcuccuggcgaccgggaugaagaacgugcccgagauccccaagggccggggccuguucggggccaucgccggcuucaucgagaacgggugggagggccucaucgacgggugguacggcuuccgccaccagaacgcccagggcgaggggaccgccgcggacuacaagagcacccaguccgccaucgaccagaucacgggcaagcugaaccggcugaucgagaagaccaaccagcaguucgagcucaucgacaacgaguucaacgaggucgagaagcagaucgggaacgugaucaacuggacccgcgacagcaucaccgaggugugguccuacaacgccgagcugcuggucgccauggagaaccagcacacgaucgaccucgccgacagcgagauggacaagcuguacgagcgcgugaagcggcagcugcgcgagaacgcggaggaggacggcaccggcugcuucgagaucuuccacaagugcgacgacgacugcauggccuccauccggaacaacaccuacgaccacagcaaguaccgcgaggaggccaugcagaaccggauccagaucgaccccgucaagcucuccagcggguacaaggacgugauccugugguucuccuucggcgccagcugcuucauccugcucgcgaucgugauggggcuggucuucaucugcgugaagaacggcaacaugcgcugcaccaucugcaucuga

SEQ ID NO: 74013 - RNA, 1683 nt, Artificial Sequence
  derived and/or modified CDS sequence (opt1) from hemagglutinin__InfluenzaA__AGK84857
augaacacccagauccugguguucgcccucaucgccaucauccccaccaacgcggacaagaucugccugggccaccacgccgucagcaacgggacgaaggugaacacccugaccgagcgcggcguggaggucgugaacgccaccgagacgguggagcggaccaacaucccgcgcaucugcuccaaggggaagcggaccgucgaccucggccagugcgggcugcugggcaccaucacgggcccgccccagugcgaccaguuccucgaguucagcgccgaccugaucaucgagcgccgggagggguccgacgugugcuaccccggcaaguucgugaacgaggaggcccugcgccagauccuccgggagagcgggggcaucgacaaggaggcgaugggguucaccuacuccggcauccgcaccaacggcgccaccagcgccugccggcgcuccgggagcuccuucuacgccgagaugaaguggcugcugagcaacacggacaacgcggccuucccgcagaucaccaaguccuacaagaacacccgcaagagccccgcccucaucgucuggggcauccaccacuccgugagcaccgccgagcagacgaagcuguacggguccggcaacaagcuggugaccgucggcagcuccaacuaccagcagagcuucgugcccucccccggggcccggccccaggugaacggccucagcgggcggaucgacuuccacuggcugaugcugaaccccaacgacaccgucaccuucagcuucaacggcgcguucaucgcccccgaccgcgccuccuuccuccggggcaagagcauggggauccaguccggcguccagguggacgccaacugcgagggggacugcuaccacagcggcgggacgaucaucuccaaccugcccuuccagaacaucgacagccgcgccgugggcaagugcccgcgguacgugaagcagcgcucccugcuccuggcgaccgggaugaagaacgugcccgagauccccaagggccggggccuguucggggccaucgccggcuucaucgagaacgggugggagggccucaucgacgggugguacggcuuccgccaccagaacgcccagggcgaggggaccgccgcggacuacaagagcacccaguccgccaucgaccagaucacgggcaagcugaaccggcugaucgagaagaccaaccagcaguucgagcucaucgacaacgaguucaacgaggucgagaagcagaucgggaacgugaucaacuggacccgcgacagcaucaccgaggugugguccuacaacgccgagcugcuggucgccauggagaaccagcacacgaucgaccucgccgacagcgagauggacaagcuguacgagcgcgugaagcggcagcugcgcgagaacgcggaggaggacggcaccggcugcuucgagaucuuccacaagugcgacgacgacugcauggccuccauccggaacaacaccuacgaccacagcaaguaccgcgaggaggccaugcagaaccggauccagaucgaccccgucaagcucuccagcggguacaaggacgugauccugugguucuccuucggcgccagcugcuucauccugcucgcgaucgugauggggcuggucuucaucugcgugaagaacggcaacaugcgcugcaccaucugcaucuga

SEQ ID NO: 74014 - RNA, 1683 nt, Artificial Sequence
  derived and/or modified CDS sequence (opt1) from hemagglutinin__InfluenzaA__AGK84860
augaacacccagauccugguguucgcccucaucgccaucauccccaccaacgcggacaagaucugccugggccaccacgccgucagcaacgggacgaaggugaacacccugaccgagcgcggcguggaggucgugaacgccaccgagacgguggagcggaccaacaucccgcgcaucugcuccaaggggaagaugaccgucgaccucggccagugcgggcugcugggcaccaucacgggcccgccccagugcgaccaguuccucgaguucagcgccgaccugaucaucgagcggcgcgagggguccgacgugugcuaccccggcaaguucgugaacgaggaggcccugcggcagauccuccgcgagagcgggggcaucgacaaggaggcgaugggguucaccuacuccggcauccggaccaacggcgccaccagcgccugccgccgguccgggagcuccuucuacgccgagaugaaguggcugcugagcaacacggacaacgcggccuucccgcagaugaccaaguccuacaagaacacccgcaagagccccgcccucaucgucuggggcauccaccacuccgugagcaccgccgagcagacgaagcuguacggguccggcaacaagcuggugaccgucggcagcuccaacuaccagcagagcuucgugcccucccccggggcccggccccaggugaacggccucagcgggcgcaucgacuuccacuggcugaugcugaaccccaacgacaccgucaccuucagcuucaacggcgcguucaucgcccccgaccgggccuccuuccuccgcggcaagagcauggggauccaguccggcguccagguggacgccaacugcgagggggacugcuaccacagcggcgggacgaucaucuccaaccugcccuuccagaacaucgacagccgggccgugggcaagugcccgcgcuacgugaagcagcggucccugcuccuggcgaccgggaugaagaacgugcccgagauccccaagggccgcggccuguucggggccaucgccggcuucaucgagaacgggugggagggccucaucgacgggugguacggcuuccggcaccagaacgcccagggcgaggggaccgccgcggacuacaagagcacccaguccgccaucgaccagaucacgggcaagcugaaccgccugaucgagaagaccaaccagcaguucgagcucaucgacaacgaguucaacgaggucgagaagcagaucgggaacgugaucaacuggacccgggacagcaucaccgaggugugguccuacaacgccgagcugcuggucgccauggagaaccagcacacgaucgaccucgccgacagcgagauggacaagcuguacgagcgcgugaagcgccagcugcgggagaacgcggaggaggacggcaccggcugcuucgagaucuuccacaagugcgacgacgacugcauggccuccauccgcaacaacaccuacgaccacagcaaguaccgggaggaggccaugcagaaccgcauccagaucgaccccgucaagcucuccagcggguacaaggacgugauccugugguucuccuucggcgccagcugcuucauccugcucgcgaucgugauggggcuggucuucaucugcgugaagaacggcaacaugcggugcaccaucugcaucuga

SEQ ID NO: 74015 - RNA, 1683 nt, Artificial Sequence
  derived and/or modified CDS sequence (opt1) from hemagglutinin__InfluenzaA__AGK84863
augaacacccagauccugguguucgcccucaucgccaucauccccaccaacgcggacaagaucugccugggccaccacgccgucagcaacgggacgaaggugaacacccugaccgagcgcggcguggaggucgugaacgccaccgagacgguggagcggaccaacaucccgcgcaucugcuccaaggggaagaagaccgucgaccucggccagugcgggcugcugggcaccaucacgggcccgccccagugcgaccaguuccucgaguucagcgccgaccugaucaucgagcggcgcgagggguccgacgugugcuaccccggcaaguucgugaacgaggaggcccugcggcagauccuccgcgagagcgggggcaucgacaaggaggcgaugggguucaccuacuccggcauccggaccaacggcgccaccagcgccugccgccgguccgggagcuccuucuacgccgagaugaaguggcugcugagcaacacggacaacgcggccuucccgcagaugaccaaguccuacaagaacacccgcaagagccccgcccucaucgucuggggcauccaccacuccgugagcaccgccgagcagacgaagcuguacggguccggcaacaagcuggugaccgucggcagcuccaacuaccagcagagcuucgugcccucccccggggcccggccccaggugaacggccucagcgggcgcaucgacuuccacuggcugaugcugaaccccaacgacaccgucaccuucagcuucaacggcgcguucaucgcccccgaccgggccuccuuccuccgcggcaagagcauggggauccaguccggcguccagguggacgccaacugcgagggggacugcuaccacagcggcgggacgaucaucuccaaccugcccuuccagaacaucgacagccgggccgugggcaagugcccgcgcuacgugaagcagcggucccugcuccuggcgaccgggaugaagaacgugcccgagauccccaagggccgcggccuguucggggccaucgccggcuucaucgagaacgggugggagggccucaucgacgggugguacggcuuccggcaccagaacgcccagggcgaggggaccgccgcggacuacaagagcacccaguccgccaucgaccagaucacgggcaagcugaaccgccugaucgagaagaccaaccagcaguucgagcucaucgacaacgaguucaacgaggucgagaagcagaucgggaacgugaucaacuggacccgggacagcaucaccgaggugugguccuacaacgccgagcugcuggucgccauggagaaccagcacacgaucgaccucgccgacagcgagauggacaagcuguacgagcgcgugaagcgccagcugcgggagaacgcggaggaggacggcaccggcugcuucgagaucuuccacaagugcgacgacgacugcauggccuccauccgcaacaacaccuacgaccacagcaaguaccgggaggaggccaugcagaaccgcauccagaucgaccccgucaagcucuccagcggguacaaggacgugauccugugguucuccuucggcgccagcugcuucauccugcucgcgaucgugauggggcuggucuucaucugcgugaagaacggcaacaugcggugcaccaucugcaucuga

SEQ ID NO: 74016 - RNA, 1701 nt, Artificial Sequence
  derived and/or modified CDS sequence (opt1) from hemagglutinin__InfluenzaA__AGL07713
augaaggccauccuggugguccuccuguacaccuucgccaccgcgaacgccgacacgcugugcaucggcuaccacgccaacaacagcaccgacaccguggacaccgugcucgagaagaacgucacggugacccgcuccgugaaccugcuggaggacaagcacaacgggaagcucugcaagcugcggggcgucgcgccccugcaccucgggaagugcaacaucgccggcuggauccuggggaacccggagugcgagagccuguccaccgccagcuccuggagcuacaucguggagaccuccagcuccgacaacggcacgugcuaccccggcgacuucaucgacuacgaggagcuccgcgagcagcugagcuccgugagcuccuucgagcgguucgagaucuuccccaagaccgggagcuggcccaaccacgacuccaacaagggcgucaccgccgccugcccgcacgccggggcgaagggcuucuacaagaaccugaucuggcucguggagaaggggaacagcuaccccaagcuguccaagagcuacaucaacgacaagggcaaggaggugcugguccucuggggcauccaccaccccuccaccacggccgaccagcagcgccuguaccagaacgccgacaccuacguguucguggggaccagccgguacagcaagaaguucaagcccgagaucgccauccgcccgaagguccgggaccaggagggccgcaugaacuacuacuggacccugguggagcccggggacaagaucacguucgaggccaccggcaaccucguggucccccgguacgcguucgccauggagcgcaacgccggcuccgggaucaucaucagcgacacccccgugcacgacugcaacaccacgugccagaccccgaagggcgccaucaacaccucccugcccuuccagaacauccaccccaucaccaucgggaagugccccaaguacgucaagagcacgaagcugcggcucgccaccggccugcgcaacgugccguccauccagagccgggggcuguucggcgcgaucgccggcuucaucgagggcggguggaccgggaugguggacggcugguacggguaccaccaccagaacgagcagggcuccggcuacgccgccgaccucaagagcacccagaacgccaucgacaagaucacgaacaaggugaacuccgucaucgagaagaugaacacccaguucaccgcgguggggaaggaguucaaccaccuggagaagcgcaucgagaaccugaacaagaaggucgacgacggcuuccucgacaucuggaccuacaacgccgagcugcuggugcuccuggagaacgagcggacgcuggacuaccacgacagcaacgugaagaaccucuacgagaagguccgcaaccagcugaagaacaacgccaaggagaucgggaacggcugcuucgaguucuaccacaagugcgacaacacgugcauggaguccgugaagaacgggaccuacgacuaccccaaguacagcgaggaggccaagcugaaccgggaggagaucgacggcgugaagcucgaguccacccgcaucuaccagauccuggccaucuacagcaccgucgcguccagccuggugcucguggucucccugggcgccaucagcuucuggaugugcuccaacgggagccugcagugccggaucugcaucuga

SEQ ID NO: 74017 - RNA, 1701 nt, Artificial Sequence
  derived and/or modified CDS sequence (opt1) from hemagglutinin__InfluenzaA__AGL09731
augaagaccaucaucgcccugagcuacauccucugccugguguucgcccagaagauccccggcaacgacaacuccaccgcgacgcugugccucgggcaccacgccgucccgaacggcaccaucgugaagaccaucaccaacgaccgcaucgaggugacgaacgccaccgagcugguccagaacagcuccaucggggagaucugcgacagcccccaccagauccuggacggcgagaacugcacccucaucgacgcccugcugggggacccccagugcgacggcuuccagaacaagaagugggaccucuucguggagcgguccaaggccuacagcaacugcuaccccuacgacgugccggacuacgcgucccugcgcagccuggucgccuccagcggcacccucgaguucaacaacgaguccuucaacuggacgggggugacccagaacggcaccagcuccgccugcauccggcgcagcaacuccagcuucuucucccggcugaacuggcugacccaccucaacuucaaguaccccgcccugaacgugacgaugcccaacaacgagcaguucgacaagcuguacaucuggggcguccaccaccccgggaccgacaaggaccagaucuuccucuacgcgcagagcuccgggcgcaucaccgugagcaccaagcggagccagcaggccgugaucccgaacaucggcucccgcccccggauccgcaacauccccagccggaucuccaucuacuggacgaucgucaagcccggcgacauccugcugaucaacagcaccgggaaccucaucgccccgcgcggcuacuucaagauccgguccggcaagagcuccaucaugcgcagcgacgcccccaucgggaagugcaaguccgagugcaucacccccaacggcagcauccccaacgacaagccguuccagaacgugaaccggaucaccuacggggccugcccccgcuacgugaagcaguccacgcugaagcuggcgaccggcaugcggaacguccccgagaagcagacccgcgggaucuucggcgccaucgccggguucaucgagaacggcugggagggcaugguggacgggugguacggcuuccggcaccagaacagcgaggggcgcggccaggccgccgaccucaaguccacccaggcggccaucgaccagaucaacgggaagcugaaccggcugaucggcaagacgaacgagaaguuccaccagaucgagaaggaguucagcgagguggagggccgcauccaggaccucgagaaguacgucgaggacaccaagaucgaccugugguccuacaacgccgagcugcucguggcccuggagaaccagcacaccaucgaccugaccgacagcgagaugaacaagcuguucgagaagacgaagaagcagcuccgcgagaacgccgaggacauggggaacggcugcuucaagaucuaccacaagugcgacaacgcgugcaucggguccauccggaacggcaccuacgaccacgacguguaccgcgacgaggcccugaacaaccgguuccagaucaagggggucgagcucaagagcggcuacaaggacuggauccuguggaucuccuucgccaucagcugcuuccugcucugcguggcccugcugggcuucaucaugugggccugccagaaggggaacauccgcugcaacaucugcaucuga

SEQ ID NO: 74018 - RNA, 1701 nt, Artificial Sequence
  derived and/or modified CDS sequence (opt1) from hemagglutinin__InfluenzaA__AGL09732
augaagaccaucaucgcccugagcuacauccucugccugguguucgcccagaagcugcccggcaacgacaacuccaccgcgacgcucugccuggggcaccacgccgucccgaacggcaccaucgugaagaccaucaccaacgaccgcaucgaggugacgaacgccaccgagcugguccagaacagcuccaucggggagaucugcgacagcccccaccagauccucgacggcgagaacugcacccugaucgacgcccugcucggggacccccagugcgacggcuuccagaacaagaagugggaccuguucguggagcgguccaaggccuacagcaacugcuaccccuacgacgugccggacuacgcgucccugcgcagccucgucgccuccagcggcacccuggaguucaacaacgaguccuucaacugggccggggugacgcagaacggcaccagcuccgccugcauccgggggagcaacuccagcuucuucucccgccugaacuggcucacccaccugaacuucaaguaccccgcgcugaacgugaccaugcccaacaacgagcaguucgacaagcucuacaucuggggcguccaccaccccgggacggacaaggaccagaucuuccuguacgcccagagcuccggccggaucaccgugagcaccaagcgcagccagcaggccgugaucccgaacaucggcucccggccccgcauccggaacauccccagccgcaucuccaucuacuggaccaucgucaagcccggggacauccugcucaucaacagcacgggcaaccugaucgccccgcggggguacuucaagauccgcuccggcaagagcuccaucaugcggagcgacgcccccaucggcaagugcaaguccgagugcaucacccccaacgggagcauccccaacgacaagccguuccagaacgugaaccgcaucaccuacggcgcgugcccccgguacgugaagcaguccacccugaagcucgccacggggaugcgcaacguccccgagaagcagacccggggcaucuucggggccaucgccggcuucaucgagaacggcugggaggggaugguggacggcugguacggguuccgccaccagaacagcgagggccgggggcaggccgcggaccugaaguccacccaggccgccaucgaccagaucaacggcaagcugaaccgccucaucggcaagaccaacgagaaguuccaccagaucgagaaggaguucagcgagguggaggggcggauccaggaccuggagaaguacgucgaggacacgaagaucgaccugugguccuacaacgccgagcuccugguggcccuggagaaccagcacaccaucgaccucaccgacagcgagaugaacaagcuguucgagaagaccaagaagcagcugcgcgagaacgcggaggacaugggcaacgggugcuucaagaucuaccacaagugcgacaacgccugcaucggcuccauccgcaacgggacguacgaccacgacguguaccgggacgaggcccucaacaaccgcuuccagaucaagggcgucgagcucaagagcggcuacaaggacuggauccuguggaucuccuucgccaucagcugcuuccugcugugcguggcccugcucggguucaucaugugggcgugccagaagggcaacauccggugcaacaucugcaucuga

SEQ ID NO: 74019 - RNA, 1701 nt, Artificial Sequence
  derived and/or modified CDS sequence (opt1) from hemagglutinin__InfluenzaA__AGL09734
augaagaccaucaucgcccugagcuacauccucugccugguguucgcccagaaguuccccggcaacgacaacuccaccgcgacgcugugccucgggcaccacgccgucccgaacggcaccaucgugaagaccaucaccaacgaccgcaucgaggugacgaacgccaccgagcugguccagaacagcuccaucggggagaucugcgacagcccccaccagauccuggacggcgagaacugcacccucaucgacgcccugcugggggacccccagugcgacggcuuccagaacaagaagugggaccucuucaucgagcgguccaaggccuacagcaacugcuaccccuacgacgugccggacuacgcgucccugcgcagccugguggccuccagcggcacccucgaguucaacaacgaguccuucaacuggacgggggucacccagaacggcaccagcuccgccugcauccggcgcagcaacuccagcuucuucucccggcugaacuggcugacccaccucaacuucaaguaccccgcccugaacgugacgaugcccaacaacgagcaguucgacaagcuguacaucuggggcgugcaccaccccgggaccgacaaggaccagaucuuccucuacgcgcagagcuccgggcgcaucaccgucagcaccaagcggagccagcaggccgugaucccgaacaucggcucccgcccccggauccgcaacauccccagccggaucuccaucuacuggacgaucgugaagcccggcgacauccugcugaucaacagcaccgggaaccucaucgccccgcgcggcuacuucaagauccgguccggcaagagcuccaucaugcgcagcgacgcccccaucgggaagugcaaguccgagugcaucacccccaacggcagcauccccaacgacaagccguuccagaacgucaaccggaucaccuacggggccugcccccgcuacgugaagcaguccacgcugaagcuggcgaccggcaugcggaacgugcccgagaagcagacccgcgggaucuucggcgccaucgccggguucaucgagaacggcugggagggcauggucgacgggugguacggcuuccggcaccagaacagcgaggggcgcggccaggccgccgaccucaaguccacccaggcggccaucgaccagaucaacgggaagcugaaccggcugaucggcaagacgaacgagaaguuccaccagaucgagaaggaguucagcgagguggagggccgcauccaggaccucgagaaguacguggaggacaccaagaucgaccugugguccuacaacgccgagcugcucgucgcccuggagaaccagcacaccaucgaccugaccgacagcgagaugaacaagcuguucgagaagacgaagaagcagcuccgcgagaacgccgaggacauggggaacggcugcuucaagaucuaccacaagugcgacaacgcgugcaucggguccauccggaacggcaccuacgaccacgacguguaccgcgacgaggcccugaacaaccgguuccagaucaaggggguggagcucaagagcggcuacaaggacuggauccuguggaucuccuucgccaucagcugcuuccugcucugcgucgcccugcugggcuucaucaugugggccugccagaaggggaacauccgcugcaacaucugcaucuga

SEQ ID NO: 74020 - RNA, 1701 nt, Artificial Sequence
  derived and/or modified CDS sequence (opt1) from hemagglutinin__InfluenzaA__AGL09735
augaagaccaucaucgcccugagcuacauccucugccugguguucgcccagaagcugcccggcaacgacaacuccaccgcgacgcucugccuggggcaccacgccgucccgaacggcaccaucgugaagaccaucaccaacgaccgcaucgaggugacgaacgccaccgagcugguccagaacagcuccaucggggagaucugcgacagcccccaccagauccucgacggcgagaacugcacccugaucgacgcccugcucggggacccccagugcgacggcuuccagaacaagaagugggaccuguucguggagcgguccaaggccuacagcaacugcuaccccuacgacgugccggacuacgcgucccugcgcagccucgucgccuccagcggcacccuggaguucaacaacgaguccuucaacugggccggggugacgcagaacggcaccagcuccgccugcauccgggggagcaacuccagcuucuucucccgccugaacuggcucacccaccugaacuucaaguaccccgcgcugaacgugaccaugcccaacaacgagcaguucgacaagcucuacaucuggggcguccaccaccccgggacggacaaggaccagaucuuccuguacgcccagagcuccggccggaucaccgugagcaccaagcgcagccagcaggccgugaucccgaacaucggcucccggccccgcauccggaacauccccagccgcaucuccaucuacuggaccaucgucaagcccggggacauccugcucaucaacagcacgggcaaccugaucgccccgcggggguacuucaagauccgcuccggcaagagcuccaucaugcggagcgacgcccccaucggcaagugcaaguccgagugcaucacccccaacgggagcauccccaacgacaagccguuccagaacgugaaccgcaucaccuacggcgcgugcccccgguacgugaagcaguccacccugaagcucgccacggggaugcgcaacguccccgagaagcagacccggggcaucuucggggccaucgccggcuucaucgagaacggcugggaggggaugguggacggcugguacggguuccgccaccagaacagcgagggccgggggcaggccgcggaccugaaguccacccaggccgccaucgaccagaucaacggcaagcugaaccgccucaucggcaagaccaacgagaaguuccaccagaucgagaaggaguucagcgagguggaggggcggauccaggaccuggagaaguacgucgaggacacgaagaucgaccugugguccuacaacgccgagcuccugguggcccuggagaaccagcacaccaucgaccucaccgacagcgagaugaacaagcuguucgagaagaccaagaagcagcugcgcgagaacgcggaggacaugggcaacgggugcuucaagaucuaccacaagugcgacaacgccugcaucggcuccauccgcaacgggacguacgaccacgacguguaccgggacgaggcccucaacaaccgcuuccagaucaagggcgucgagcucaagagcggcuacaaggacuggauccuguggaucuccuucgccaucagcugcuuccugcugugcguggcccugcucggguucaucaugugggcgugccagaagggcaacauccggugcaacaucagcaucuga

SEQ ID NO: 74021 - RNA, 1701 nt, Artificial Sequence
  derived and/or modified CDS sequence (opt1) from hemagglutinin__InfluenzaA__AGL09736
augaagaccaucaucgcccugagcuacauccucugccugguguucgcccagaagcugcccggcaacgacaacuccaccgcgacgcucugccuggggcaccacgccgucccgaacggcaccaucgugaagaccaucaccaacgaccagaucgaggugacgaacgccaccgagcugguccagaacagcuccaucggggagaucugcgacagcccccaccagauccucgacggcgagaacugcacccugaucgacgcccugcucggggacccccagugcgacggcuuccagaacaagaagugggaccuguucguggagcgcuccaaggccuacagcaacugcuaccccuacgacgugccggacuacgcgucccugcggagccucgucgccuccagcggcacccuggaguucaacaacgaguccuucaacugggccggggugacgcagaacggcaccagcuccgccugcauccgcgggagcaacuccagcuucuucucccggcugaacuggcucacccaccugaacuucaaguaccccgcgcugaacgugaccaugcccaacaacgagcaguucgacaagcucuacaucuggggcguccaccaccccgggacggacaaggaccagaucuuccuguacgcccagagcuccggccgcaucaccgugagcaccaagcggagccagcaggccgugaucccgaacaucggcucccgcccccggauccgcaacauccccagccggaucuccaucuacuggaccaucgucaagcccggggacauccugcucaucaacagcacgggcaaccugaucgccccgcgcggguacuucaagauccgguccggcaagagcuccaucaugcgcagcgacgcccccaucggcaagugcaaguccgagugcaucacccccaacgggagcauccccaacgacaagccguuccagaacgugaaccggaucaccuacggcgcgugcccccgcuacgugaagcaguccacccugaagcucgccacggggaugcggaacguccccgagaagcagacccgcggcaucuucggggccaucgccggcuucaucgagaacggcugggaggggaugguggacggcugguacggguuccggcaccagaacagcgagggccgcgggcaggccgcggaccugaaguccacccaggccgccaucgaccagaucaacggcaagcugaaccggcucaucggcaagaccaacgagaaguuccaccagaucgagaaggaguucagcgagguggaggggcgcauccaggaccuggagaaguacgucgaggacacgaagaucgaccugugguccuacaacgccgagcuccugguggcccuggagaaccagcacaccaucgaccucaccgacagcgagaugaacaagcuguucgagaagaccaagaagcagcugcgggagaacgcggaggacaugggcaacgggugcuucaagaucuaccacaagugcgacaacgccugcaucggcuccauccgcaacgggacguacgaccacgacguguaccgcgacgaggcccucaacaaccgguuccagaucaagggcgucgagcucaagagcggcuacaaggacuggauccuguggaucuccuucgccaucagcugcuuccugcugugcguggcccugcucggguucaucaugugggcgugccagaagggcaacauccgcugcaacaucugcaucuga

SEQ ID NO: 74022 - RNA, 1701 nt, Artificial Sequence; identical to SEQ ID NO: 73907
  derived and/or modified CDS sequence (opt1) from hemagglutinin__InfluenzaA__AGL09737

SEQ ID NO: 74023 - RNA, 1701 nt, Artificial Sequence
  derived and/or modified CDS sequence (opt1) from hemagglutinin__InfluenzaA__AGL09739
augaagaccaucaucgcccugagcuacauccucugccugguguucgcccagaagcugcccggcaacgacaacuccaccgcgacgcucugccuggggcaccacgccgucccgaacggcaccaucgugaagaccaucaccaacgaccgcaucgaggugacgaacgccaccgagcugguccagaacagcuccaucggggagaucugcgacagcccccaccagauccucgacggcgagaacugcacccugaucgacgcccugcucggggacccccagugcgacggcuuccagaacaagaagugggaccuguucguggagcgguccaaggccuacagcuccugcuaccccuacgacgugccggacuacgcgagccugcgcucccucgucgccagcuccggcacccuggaguucaacaacgagagcuucaacuggacgggggugacccagaacggcaccuccagcgccugcauccggcgcuccaacagcuccuucuucagccggcugaacuggcucacccaccugaacuucaaguaccccgcccugaacgugacgaugcccaacaacgagcaguucgacaagcucuacaucuggggcguccaccaccccgggaccgacaaggaccagaucuuccuguacgcgcaguccagcgggcgcaucaccgugagcaccaagcggucccagcaggccgugaucccgaacaucggcagccgcccccggauccgcaacauccccucccggaucagcaucuacuggacgaucgucaagcccggcgacauccugcucaucaacuccaccgggaaccugaucgccccgcgcggcuacuucaagauccggagcgggaaguccagcaucaugcgcuccgacgcccccaucggcaagugcaagagcgagugcaucacccccaacggcuccauccccaacgacaagccguuccagaacgugaaccggaucaccuacggggccugcccccgcuacgugaagcagagcacgcugaagcucgcgaccggcaugcggaacguccccgagaagcagacccgcgggaucuucggcgccaucgccggguucaucgagaacggcugggagggcaugguggacgggugguacggcuuccggcaccagaacuccgaggggcgcggccaggccgccgaccucaagagcacccaggcggccaucgaccagaucaacgggaagcugaaccggcugaucggcaagacgaacgagaaguuccaccagaucgagaaggaguucuccgagguggagggccgcauccaggaccuggagaaguacgucgaggacaccaagaucgaccuguggagcuacaacgccgagcuccugguggcccuggagaaccagcacaccaucgaccucaccgacuccgagaugaacaagcuguucgagaagacgaagaagcagcugcgcgagaacgccgaggacauggggaacggcugcuucaagaucuaccacaagugcgacaacgcgugcaucgggagcauccggaacggcaccuacgaccacaacguguaccgcgacgaggcccucaacaaccgguuccagaucaagggggucgagcugaaguccggcuacaaggacuggauccuguggaucagcuucgccaucagcugcuuccuccugugcguggcccugcucggcuucaucaugugggccugccagaaggggaacauccgcugcaacaucugcaucuga

SEQ ID NO: 74024 - RNA, 1701 nt, Artificial Sequence; identical to SEQ ID NO: 73859
  derived and/or modified CDS sequence (opt1) from hemagglutinin__InfluenzaA__AGL09740

SEQ ID NO: 74025 - RNA, 1701 nt, Artificial Sequence; identical to SEQ ID NO: 73098
  derived and/or modified CDS sequence (opt1) from hemagglutinin__InfluenzaA__AGL09741

SEQ ID NO: 74026 - RNA, 1701 nt, Artificial Sequence
  derived and/or modified CDS sequence (opt1) from hemagglutinin__InfluenzaA__AGL09742
augaagaccaucaucgcccugagcuacauccucugccugguguucgcccaggagcugcccggcaacgacgacuccaccgcgacgcucugccuggggcaccacgccgucccgaacggcaccaucgugaagaccaucaccaacgaccagaucgaggugacgaacgccaccgagcugguccagagcuccagcaccggggagaucugcaacagcccccaccagauccucgacggcgagaacugcacccugaucgacgcccugcucggggacccccagugcgacggcuuccagaacaagaagugggaccuguucguggagcgcuccaaggcccacuccaacugcuaccccuacgacgugccggacuacgcgagccugcggucccucgucgccagcuccggcacgcuggaguucaacaacgagagcuucaacuggaccggggugacccagaacggcaccuccagcgccugcauccgccgguccaacaacagcuucuucucccgccugaacuggcucacgcaccugaacuucaaguaccccgcccugaacgugaccaugcccaacaacgagcaguucgacaagcucuacaucuggggcguccaccaccccgggaccgacaaggaccagaucuuccuguacgcgcaggccagcgggcggaucaccguguccacgaagcgcagccagcaggccgugaucccgaacaucggcagccggccccgcguccggaacauccccucccgcgugagcaucuacuggaccaucgugaagcccggcgacauccugcucaucaacuccaccgggaaccugaucgccccgcggggcuacuucaagauccgcagcgggaaguccagcaucaugcgguccgacgcccccaucggcaagugcaacagcgcgugcaucacccccaacggcuccauccccaacgacaagccguuccagaacgucaaccgcaucacguacggggccugcccccgguacgugaagcagaacacccugaagcucgccaccggcaugcgcaacgugcccgagacccagacgcgggggaucuucggcgccaucgccggguucaucgagaacggcugggagggcauggucgacgggugguacggcuuccgccaccagaacagcgaggggcggggccaggcggccgaccugaaguccacccaggccgccaucgaccagaucaacgggaagcugaaccgccucaucggcaagaccaacgagaaguuccaccagaucgagaaggaguucagcgagguggagggccggauccaggaccuggagaaguacguggaggacaccaagaucgaccugugguccuacaacgccgagcuccuggucgcgcuggagaaccagcacacgaucgaccucaccgacagcgagaugaacaagcuguucgagaagaccaagaagcagcugcgcgagaacgccgaggacauggggaacggcugcuucaagaucuaccacaagugcgacaacgccugcaucggguccauccgcaacggcaccuacgaccacgacguguaccgggacgaggcccucaacaaccgcuuccagaucaaggggguggagcugcggagcggcuacaaggacuggauccuguggaucuccuucgccaucagcugcuuccuccugugcgucgcgcugcucggcuucaucaugugggccugccagaaggggaacauccgcugcuccaucugcaucuga

SEQ ID NO: 74027 - RNA, 1701 nt, Artificial Sequence; identical to SEQ ID NO: 73882
  derived and/or modified CDS sequence (opt1) from hemagglutinin__InfluenzaA__AGL09744

SEQ ID NO: 74028 - RNA, 1701 nt, Artificial Sequence
  derived and/or modified CDS sequence (opt1) from hemagglutinin__InfluenzaA__AGL09745
augaagaccaucaucgcccugagcuacauccucugccugguguucgcccagaagcugcccggcaacgacaacuccaccgcgacccucugccuggggcaccacgccgucccgaacggcaccaucgugaagaccaucaccaacgaccgcaucgaggugacgaacgccaccgagcugguccagaacagcuccaucggggagaucugcgacagcccccaccagauccucgacggcgagaacugcacccugaucgacgcccugcucggggacccccagugcgacggcuuccagaacaagaagugggaccuguucguggagcgguccaaggccuacagcaacugcuaccccuacgacgugccggacuacgcgucccugcgcagccucgucgccuccagcggcacccuggaguucaacaacgaguccuucaacuggacgggggugacccagaacggcaccagcuccgccugcauccggcgcagcaacuccagcuucuucucccggcugaacuggcucacccaccugaacuucaaguaccccgcccugaacgugacgaugcccaacaacgagcaguucgacaagcucuacaucuggggcguccaccaccccgggaccgacaaggaccagaucuuccuguacgcgcagagcuccgggcgcaucaccgugagcaccaagcggagccagcaggccgugaucccgaacaucggcucccgcccccggauccgcaacauccccagccggaucuccaucuacuggacgaucgucaagcccggcgacauccugcucaucaacagcaccgggaaccugaucgccccgcgcggcuacuucaagauccgguccggcaagagcuccaucaugcgcagcgacgcccccaucgggaagugcaaguccgagugcaucacccccaacggcagcauccccaacgacaagccguuccagaacgugaaccggaucaccuacggggccugcccccgcuacgugaagcaguccacgcugaagcucgcgaccggcaugcggaacguccccgagaagcagacccgcgggaucuucggcgccaucgccggguucaucgagaacggcugggagggcaugguggacgggugguacggcuuccggcaccagaacagcgaggggcgcggccaggccgccgaccugaaguccacccaggcggccaucgaccagaucaacgggaagcugaaccggcucaucggcaagacgaacgagaaguuccaccagaucgagaaggaguucagcgagguggagggccgcauccaggaccuggagaaguacgucgaggacaccaagaucgaccugugguccuacaacgccgagcuccugguggcccuggagaaccagcacaccaucgaccucaccgacagcgagaugaacaagcuguucgagaagacgaagaagcagcugcgcgagaacgccgaggacguggggaacggcugcuucaagaucuaccacaagugcgacaacacgugcaucggguccauccggaacggcaccuacgaccacaacgucuaccgcgacgaggcgcucaacaaccgguuccagaucaaggggguggagcucaagagcggcuacaaggacuggauccuguggaucuccuucgccaucagcugcuuccugcugugcguggcccugcucggcuucaucaugugggccugccagaaggggaacauccgcugcaacaucugcaucuga

SEQ ID NO: 74029 - RNA, 1701 nt, Artificial Sequence; identical to SEQ ID NO: 74021
  derived and/or modified CDS sequence (opt1) from hemagglutinin__InfluenzaA__AGL09746

SEQ ID NO: 74030 - RNA, 1701 nt, Artificial Sequence; identical to SEQ ID NO: 73859
  derived and/or modified CDS sequence (opt1) from hemagglutinin__InfluenzaA__AGL09747

SEQ ID NO: 74031 - RNA, 1701 nt, Artificial Sequence; identical to SEQ ID NO: 73882
  derived and/or modified CDS sequence (opt1) from hemagglutinin__InfluenzaA__AGL09748

SEQ ID NO: 74032 - RNA, 1701 nt, Artificial Sequence; identical to SEQ ID NO: 73880
  derived and/or modified CDS sequence (opt1) from hemagglutinin__InfluenzaA__AGL09749

SEQ ID NO: 74033 - RNA, 1701 nt, Artificial Sequence; identical to SEQ ID NO: 74018
  derived and/or modified CDS sequence (opt1) from hemagglutinin__InfluenzaA__AGL09750

SEQ ID NO: 74034 - RNA, 1701 nt, Artificial Sequence; identical to SEQ ID NO: 73859
  derived and/or modified CDS sequence (opt1) from hemagglutinin__InfluenzaA__AGL09751

SEQ ID NO: 74035 - RNA, 1701 nt, Artificial Sequence; identical to SEQ ID NO: 74018
  derived and/or modified CDS sequence (opt1) from hemagglutinin__InfluenzaA__AGL09753

SEQ ID NO: 74036 - RNA, 1701 nt, Artificial Sequence
  derived and/or modified CDS sequence (opt1) from hemagglutinin__InfluenzaA__AGL09754
augaagaccaucaucgcccugagcuacauccucugccugguguucgcccagaagcugcccggcaacgacaacuccaccgcgacgcucugccuggggcaccacgccgucccgaacggcaccaucgugaagaccaucaccaacgaccgcaucgaggugacgaacgccaccgagcugguccagaacagcuccaucggggagaucugcgacagcccccaccagauccucgacggcgagaacugcacccugaucgacgcccugcucggggacccccagugcgacggcuuccagaacaagaagugggaccuguucguggagcgguccaaggccuacagcaacugcuaccccuacgacgugccggacuacgcgucccugcgcagccucgucgccuccagcggcacccuggaguucaacaacgaguccuucaacuggacgggggugacccagaacggcaccagcuccgccugcauccggcgcagcaacuccagcuucuucucccggcugaacuggcucacccaccugaacuucaaguaccccgcccugaacgugacgaugcccaacaacgagcaguucgacaagcucuacaucuggggcguccaccaccccgggaccgacaaggaccagaucuuccuguacgcgcagagcuccgggcgcaucaccgugagcaccaagcggagccagcaggccgugaucccgaacaucggcucccgcccccggauccgcaacauccccagccggaucuccaucuacuggacgaucgucaagcccggcgacauccugcucaucaacagcaccgggaaccugaucgccccgcgcggcuacuucaagauccgguccggcaagagcuccaucaugcgcagcgacgcccccaucgggaagugcaaguccgagugcaucacccccaacggcagcauccccaacgacaagccguuccagaacgugaaccggaucaccuacggggccugcccccgcuacgugaagcaguccacgcugaagcucgcgaccggcaugcggaacguccccgagaagcagacccgcgggaucuucggcgccaucgccggguucaucgagaacggcugggagggcaugguggacgggugguacggcuuccggcaccagaacagcgaggggcgcggccaggccgccgaccugaaguccacccaggcggccaucgaccagaucaacgggaagcugaaccggcucaucggcaagacgaacgagaaguuccaccagaucgagaaggaguucagcgagguggagggccgcauccaggaccuggagaaguacgucgaggacaccaagaucgaccugugguccuacaacgccgagcuccugguggcccuggagaaccagcacaccaucgaccucaccgacagcgagaugaacaagcuguucgagaagacgaagaagcagcugcgcgagaacgccgaggacauggggaacggcugcuucaagaucuaccacaagugcgacaacgcgugcaucggguccauccggaacggcaccuacgaccacaacguguaccgcgacgaggcccucaacaaccgguuccagaucaagggggucgagcucaagagcggcuacaaggacuggauccuguggaucuccuucgccaucagcugccugcugcugugcguggcccuccugggcuucaucaugugggccugccagaaggggaacauccgcugcaacaucugcaucuga

SEQ ID NO: 74037 - RNA, 1701 nt, Artificial Sequence; identical to SEQ ID NO: 74021
  derived and/or modified CDS sequence (opt1) from hemagglutinin__InfluenzaA__AGL09756

SEQ ID NO: 74038 - RNA, 1701 nt, Artificial Sequence
  derived and/or modified CDS sequence (opt1) from hemagglutinin__InfluenzaA__AGL09758
augaaggccauccuggugguccuccuguacaccuucgccaccgcgaacgccgacacgcugugcaucggcuaccacgccaacaacagcaccgacaccguggacaccgugcucgagaagaacgucacggugacccacuccgugaaccugcuggaggacaagcacaacgggaagaucugcaagcuccgcggcgucgcgccccugcaccuggggaagugcaacaucgccggcuggauccucgggaacccggagugcgagagccuguccaccgccagcuccuggagcuacaucguggagaccuccagcuccgacaacggcacgugcuaccccggcgacuucaucgacuacgaggagcugcgggagcagcucagcuccgugagcuccuucgagcgcuucgagaucuuccccaagaccagcuccuggcccaaccacgacagcaacaagggggucaccgccgccugcccgcacgccggcgcgaagggguucuacaagaaccugaucuggcuggugaagaagggcaacuccuaccccaagcucagcaacuccuacaucaacgacaaggggaaggaggugcugguccuguggggcauccaccaccccagcaccacggccgaccagcagagccucuaccagaacgccgacaccuacguguucgugggcaccucccgguacagcaagaaguucaagcccgagaucgccauccgcccgaagguccgggaccaggaggggcgcaugaacuacuacuggacccugguggagcccggcgacaagaucacguucgaggccaccgggaaccugguggucccccgguacgcguucgccauggagcgcaacgccggcuccggcaucaucaucagcgacaccaccgugcacgacugcaacacgaccugccagacccccaagggggccaucaacaccucccucccguuccagaacauccaccccaucacgaucggcaagugccccaaguacgucaagagcaccaagcugcggcuggccaccgggcuccgcaacgugcccuccauccagagccggggccuguucggggcgaucgccggcuucaucgagggcggguggaccggcaugguggacgggugguacggcuaccaccaccagaacgagcagggguccggcuacgccgccgaccucaagagcacgcagaacgccaucgacaagaucaccaacaaggugaacuccgucaucgagaagaugaacacccaguucaccgcggugggcaaggaguucaaccaccuggagaagcgcaucgagaaccugaacaagaaggucgacgacggguuccuggacaucuggacguacaacgccgagcuccuggugcugcucgagaacgagcggacccuggacuaccacgacagcaacgugaagaaccuguacgagaagguccgcaaccagcucaagaacaacgccaaggagaucggcaacgggugcuucgaguucuaccacaagugcgacaacaugugcauggaguccgugaagaacggcaccuacgacuacccgaaguacagcgaggaggccaagcugaaccgggagaagaucgacggggugaagcuggaguccacccgcaucuaccagauccucgccaucuacagcacggucgcguccagccuggugcugguggucucccucggcgccaucagcuucuggaugugcagcaacggcucccugcagugccggaucugcaucuga

SEQ ID NO: 74039 - RNA, 1701 nt, Artificial Sequence
  derived and/or modified CDS sequence (opt1) from hemagglutinin__InfluenzaA__AGL09760
augaagaccaucaucgccgugagcuacauccugugccucgucuucgcccaggagcugcccggcaacgacgacuccaccgcgacgcugugccucgggcaccacgccgugccgaacggcaccaucgugaagaccaucaccaacgaccagaucgaggucacgaacgccaccgagcuggugcagagcuccagcaccggggagaucugcaacagcccccaccagauccuggacggcgagaacugcacccucaucgacgcccugcugggggacccccagugcgacggcuuccagaacaagaagugggaccucuucguggagcgcuccaaggcccacuccaacugcuaccccuacgacgucccggacuacgcgagccugcggucccugguggccagcuccggcacgcucgaguucaacaacgagagcuucaacuggaccggggugacccagaacggcaccuccagcgccugcauccgccgguccaacaacagcuucuucucccgccugaacuggcugacgcaccucaacuucaaguaccccgcccugaacgucaccaugcccaacaacgagcaguucgacaagcuguacaucuggggcgugcaccaccccgggaccgacaaggaccagaucuuccucuacgcgcaggccagcgggcggaucaccguguccacgaagcgcagccagcaggccgucaucccgaacaucggcagccggccccgcgugcggaacauccccucccgcgugagcaucuacuggaccaucgucaagcccggcgacauccugcugaucaacuccaccgggaaccucaucgccccgcggggcuacuucaagauccgcagcgggaaguccagcaucaugcgguccgacgcccccaucggcaagugcaacagcgcgugcaucacccccaacggcuccauccccaacgacaagccguuccagaacgugaaccgcaucacguacggggccugcccccgguacgugaagcagaacacccugaagcuggccaccggcaugcgcaacguccccgagaagcagacccgggggaucuucggcgccaucgccggguucaucgagaacggcugggagggcaugguggacgggugguacggcuuccgccaccagaacagcgaggggcggggccaggcggccgaccucaaguccacgcaggccgccaucgaccagaucaacgggaagcugaaccgccugaucggcaagaccaacgagaaguuccaccagaucgagaaggaguucagcgagguggagggccggauccaggaccucgagaaguacgucgaggacaccaagaucgaccugugguccuacaacgccgagcugcucguggcgcuggagaaccagcacaccaucgaccugacggacagcgagaugaacaagcuguucgagaagaccaagaagcagcuccgcgagaacgccgaggacauggggaacggcugcuucaagaucuaccacaagugcgacaacgccugcaucggguccauccgcaacggcaccuacgaccacgacguguaccgggacgaggcccugaacaaccgcuuccagaucaagggggucgagcucaagagcggcuacaaggacuggauccuguggaucuccuucgccaucagcugcuuccugcucugcguggcgcugcugggcuucaucaugugggccugccagaaggggaacauccggugcaacaucugcaucuga

SEQ ID NO: 74040 - RNA, 1701 nt, Artificial Sequence; identical to SEQ ID NO: 73892
  derived and/or modified CDS sequence (opt1) from hemagglutinin__InfluenzaA__AGL09761

SEQ ID NO: 74041 - RNA, 1701 nt, Artificial Sequence
  derived and/or modified CDS sequence (opt1) from hemagglutinin__InfluenzaA__AGL09762
augaagaccaucaucgcccugagcuacauccucugccugguguucgcccagaagcugcccggcaacgacaacuccaccgcgacgcucugccuggggcaccacgccgucccgaacggcaccaucgugaagaccaucaccaacgaccagaucgaggugacgaacgccaccgagcugguccagaacagcuccaucggggagaucugcgacagcccccaccagauccucgacggcgagaacugcacccugaucgacgcccugcucggggacccccagugcgacggcuuccagaacaagaagugggaccuguucguggagcgcuccaaggccuacagcaacugcuaccccuacgacgugccggacuacgcgucccugcggagccucgucgccuccagcggcacccuggaguucaacaacgaguccuucaacuggacgggggugacccagaacggcaccagcuccgccugcauccgcgggagcaacuccagcuucuucucccggcugaacuggcucacccaccugaacuucaaguaccccgcccugaacgugacgaugcccaacaacgagcaguucgacaagcucuacaucuggggcguccaccaccccgggaccgacaaggaccagaucuuccuguacgcgcagagcuccggccgcaucaccgugagcaccaagcggagccagcaggccgugaucccgaacaucggcucccgcccccggauccgcaacauccccagccggaucuccaucuacuggacgaucgucaagcccggggacauccugcucaucaacagcaccggcaaccugaucgccccgcgcggguacuucaagauccgguccggcaagagcuccaucaugcgcagcgacgcccccaucggcaagugcaaguccgagugcaucacccccaacgggagcauccccaacgacaagccguuccagaacgugaaccggaucaccuacggcgccugcccccgcuacgugaagcaguccacgcugaagcucgcgaccgggaugcggaacguccccgagaagcagacccgcggcaucuucggggccaucgccggcuucaucgagaacggcugggaggggaugguggacggcugguacggguuccggcaccagaacagcgagggccgcgggcaggccgccgaccugaaguccacccaggcggccaucgaccagaucaacggcaagcugaaccggcucaucggcaagacgaacgagaaguuccaccagaucgagaaggaguucagcgagguggaggggcgcauccaggaccuggagaaguacgucgaggacaccaagaucgaccugugguccuacaacgccgagcuccugguggcccuggagaaccagcacaccaucgaccucaccgacagcgagaugaacaagcuguucgagaagacgaagaagcagcugcgggagaacgccgaggacaugggcaacgggugcuucaagaucuaccacaagugcgacaacgcgugcaucggcuccauccgcaacgggaccuacgaccacgacguguaccgcgacgaggcccucaacaaccgguuccagaucaagggcgucgagcucaagagcggcuacaaggacuggauccuguggaucuccuucgccaucagcugcuuccugcugugcguggcccugcucggguucaucaugugggccugccagaagggcaacauccgcugcaacaucugcaucuga

SEQ ID NO: 74042 - RNA, 1701 nt, Artificial Sequence; identical to SEQ ID NO: 74018
  derived and/or modified CDS sequence (opt1) from hemagglutinin__InfluenzaA__AGL09763

SEQ ID NO: 74043 - RNA, 1701 nt, Artificial Sequence
  derived and/or modified CDS sequence (opt1) from hemagglutinin__InfluenzaA__AGL09764
augaagaccaucaucgcccugagcuacauccucugccugguguucgcccagaagauccccggcaacgacaacuccaccgcgacgcugugccucgggcaccacgccgucccgaacggcaccaucgugaagaccaucaccaacgaccagaucgaggugacgaacgccaccgagcugguccagaacagcuccaucggggagaucugcgacagcccccaccagauccuggacggcgagaacugcacccucaucgacgcccugcugggggacccccagugcgacggcuuccagaacaagaagugggaccucuucguggagcgcuccaaggccuacagcaacugcuaccccuacgacgugccggacuacgcgucccugcggagccuggucgccuccagcggcacccucgaguucaacaacgaguccuucaacuggacgggggugacccagaacggcaccagcuccgccugcauccgccggagcaacuccagcuucuucucccgccugaacuggcugacccaccucaacuucaaguaccccgcccugaacgugacgaugcccaacaacgagcaguucgacaagcuguacaucuggggcguccaccaccccgggaccgacaaggaccagaucuuccucuacgcgcagagcuccgggcggaucaccgugagcaccaagcgcagccagcaggccgugaucccgaacaucggcucccggccccgcauccggaacauccccagccgcaucuccaucuacuggacgaucgucaagcccggcgacauccugcugaucaacagcaccgggaaccucaucgccccgcggggcuacuucaagauccgcuccggcaagagcuccaucaugcggagcgacgcccccaucgggaagugcaaguccgagugcaucacccccaacggcagcauccccaacgacaagccguuccagaacgugaaccgcaucaccuacggggccugcccccgguacgugaagcaguccacgcugaagcuggcgaccggcaugcgcaacguccccgagaagcagacccgggggaucuucggcgccaucgccggguucaucgagaacggcugggagggcaugguggacgggugguacggcuuccgccaccagaacagcgaggggcggggccaggccgccgaccucaaguccacccaggcggccaucgaccagaucaacgggaagcugaaccgccugaucggcaagacgaacgagaaguuccaccagaucgagaaggaguucagcgagguggagggccggauccaggaccucgagaaguacgucgaggacaccaagaucgaccugugguccuacaacgccgagcugcucguggcccuggagaaccagcacaccaucgaccugaccgacagcgagaugaacaagcuguucgagaagacgaagaagcagcuccgcgagaacgccgaggacauggggaacggcugcuucaagaucuaccacaagugcgacaacgcgugcaucggguccauccgcaacggcaccuacgaccacgacguguaccgggacgaggcccugaacaaccgcuuccagaucaagggggucgagcucaagagcggcuacaaggacuggauccuguggaucuccuucgccaucagcugcuuccugcucugcguggcccugcugggcuucaucaugugggccugccagaaggggaacauccggugcaacaucugcaucuga

SEQ ID NO: 74044 - RNA, 1701 nt, Artificial Sequence; identical to SEQ ID NO: 73882
  derived and/or modified CDS sequence (opt1) from hemagglutinin__InfluenzaA__AGL09765

SEQ ID NO: 74045 - RNA, 1701 nt, Artificial Sequence
  derived and/or modified CDS sequence (opt1) from hemagglutinin__InfluenzaA__AGL09766
augaagaccaucaucgcccugagcuacauccucugccugguguucgcccagaagcugcccggcaacgacaacuccaccgcgacgcucugccuggggcaccacgccgucccgaacggcaccaucgugaagaccaucaccaacgaccagaucgaggugacgaacgccaccgagcugguccagaacagcuccaucggggagaucugcgacagcccccaccagauccucgacggcgagaacugcacccugaucgacgcccugcucggggacccccagugcgacggcuuccagaacaagaagugggaccuguucguggagcgcuccaaggccuacagcaacugcuaccccuacgacgugccggacuacgcgucccugcggagccucgucgccuccagcggcacccuggaguucaacaacgaguccuucaacugggccggggugacgcagaacggcaccagcuccgccugcauccgcgggagcaacuccagcuucuucucccggcugaacuggcucacccaccugaacuucaaguaccccgcgcugaacgugaccaugcccaacaacgagcaguucgacaagcucuacaucuggggcguccaccaccccgggacggacaaggaccagaucuuccuguacgcccagagcuccggccgcaucaccgugagcaccaagcggagccagcaggccgugaucccgaacaucggcucccgcccccggauccgcaacauccccagccggaucuccaucuacuggaccaucgucaagcccggggacauccugcucaucaacagcacgggcaaccugaucgccccgcgcggguacuucaagauccuguccggcaagagcuccaucaugcggagcgacgcccccaucggcaagugcaaguccgagugcaucacccccaacgggagcauccccaacgacaagccguuccagaacgugaaccgcaucaccuacggcgcgugcccccgguacgugaagcaguccacccucaagcuggccacggggaugcgcaacguccccgagaagcagacccggggcaucuucggggccaucgccggcuucaucgagaacggcugggaggggaugguggacggcugguacggguuccgccaccagaacagcgagggccgggggcaggccgcggaccugaaguccacccaggccgccaucgaccagaucaacggcaagcucaaccgccugaucggcaagaccaacgagaaguuccaccagaucgagaaggaguucagcgagguggaggggcggauccaggaccuggagaaguacgucgaggacacgaagaucgaccucugguccuacaacgccgagcugcugguggcccucgagaaccagcacaccaucgaccugaccgacagcgagaugaacaagcuguucgagaagaccaagaagcagcuccgcgagaacgcggaggacaugggcaacgggugcuucaagaucuaccacaagugcgacaacgccugcaucggcuccauccggaacgggacguacgaccacgacguguaccgcgacgaggcccugaacaaccgcuuccagaucaagggcgucgagcucaagagcggcuacaaggacuggauccuguggaucuccuucgccaucagcugcuuccugcugugcguggcccuccugggguucaucaugugggcgugccagaagggcaacauccggugcaacaucugcaucuga

SEQ ID NO: 74046 - RNA, 1701 nt, Artificial Sequence
  derived and/or modified CDS sequence (opt1) from hemagglutinin__InfluenzaA__AGL09767
augaagaccaucaucgcccugagcuacauccucugccugguguucgcccagaagcugcccggcaacgacaacuccaccgcgacgcucugccuggggcaccacgccgucccgaacggcaccaucgugaagaccaucaccaacgaccgcaucgaggugacgaacgccaccgagcugguccagaacagcuccaucggggagaucugcgacagcccccaccagauccucgacggcgagaacugcacccugaucgacgcccugcucggggacccccagugcgacggcuuccagaacaagaagugggaccuguucguggagcgguccaaggccuacagcaacugcuaccccuacgacgugccggacuacgcgucccugcgcagccucgucgccuccagcggcacccuggaguucaacaacgaguccuucaacugggccggggugacgcagaacggcaccagcuccgccugcauccgggggagcaacuccagcuucuucucccgccugaacuggcucacccaccugaacuucaaguaccccgcgcugaacgugaccaugcccaacaacgagcaguucgacaagcucuacaucuggggcguccaccaccccgggacggacaaggaccagaucuuccuguacgcccagagcuccggccggaucaccgugagcaccaagcgcagccagcaggccgugaucccgaacaucggcucccggccccgcauccggaacauccccagccgcaucuccaucuacuggaccaucgucaagcccggggacauccugcucaucaacagcacgggcaaccugaucgccccgcggggguacuucaagauccgcuccggcaagagcuccaucaugcggagcgacgcccccaucggcaagugcaaguccgagugcaucacccccaacgggagcauccccaacgacaagccguuccagaacgugaaccgcaucaccuacggcgcgugcccccgguacgugaagcaguccacccugaagcucgccacggggaugcgcaacguccccgagaagcagacccggggcaucuucggggccaucgccggcuucaucgagaacggcugggaggggaugguggacggcugguacggguuccgccaccagaacagcgagggccgggggcaggccgcggaccugaaguccacccaggccgccaucgaccagaucaacggcaagcugaaccgccucaucggcaagaccaacgagaaguuccaccagaucgagaaggaguucagcgagguggaggggcggauccaggaccuggagaaguacgucgaggacacgaagaucgaccugugguccuacaacgccgagcuccugguggcccuggagaaccagcacaccaucgaccucaccgacagcgagaugaacaagcuguucgagaagaccaagaagcagcugcgcgagaacgcggaggacaugggcaacgggugcuucaagaucuaccacaagugcgacaacgccugcaucggcuccauccgcaacgggacguacgaccacaacguguaccgggacgaggcccucaacaaccgcuuccagaucaagggcgucgagcucaagagcggcuacaaggacuggauccuguggaucuccuucgccaucagcugcuuccugcugugcguggcccugcucggguucaucaugugggcgugccagaagggcaacauccggugcaacaucugcaucuga

SEQ ID NO: 74047 - RNA, 1701 nt, Artificial Sequence
  derived and/or modified CDS sequence (opt1) from hemagglutinin__InfluenzaA__AGL09769
augaagaccaucaucgcccugagcuacauccucugccugguguucgcccagaagauccccggcaacgacaacuccaccgcgacgcugugccucgggcaccacgccgucccgaacggcaccaucgugaagaccaucaccaacgaccgcaucgaggugacgaacgccaccgagcugguccagaacagcuccaucggggagaucugcgacagcccccaccagauccuggacggcgagaacugcacccucaucgacgcccugcugggggacccccagugcgacggcuuccagaacaagaagugggaccucuucguggagcgguccaaggccuacagcaacugcuaccccuacgacgugccggacuacgcgucccugcgcagccuggucgccuccagcggcacccucgaguucaacaacgaguccuucaacuggacgggggugacccagaacggcaccagcuccgccugcauccgggggagcaacuccagcuucuucucccgccugaacuggcugacccaccucaacuucaaguaccccgcccugaacgugacgaugcccaacaacgagcaguucgacaagcuguacaucuggggcguccaccaccccgggaccgacaaggaccagaucuuccucuacgcgcagagcuccggccggaucaccgugagcaccaagcgcagccagcaggccgugaucccgaacaucggcucccggccccgcauccggaacauccccagccgcaucuccaucuacuggacgaucgucaagcccggggacauccugcugaucaacagcaccggcaaccucaucgccccgcggggguacuucaagauccgcuccggcaagagcuccaucaugcggagcgacgcccccaucggcaagugcaaguccgagugcaucacccccaacgggagcauccccaacgacaagccguuccagaacgugaaccgcaucaccuacggcgccugcccccgguacgugaagcaguccacgcugaagcuggcgaccgggaugcgcaacguccccgagaagcagacccggggcaucuucggggccaucgccggcuucaucgagaacggcugggaggggaugguggacggcugguacggguuccgccaccagaacagcgagggccgggggcaggccgccgaccucaaguccacccaggcggccaucgaccagaucaacggcaagcugaaccgccugaucggcaagacgaacgagaaguuccaccagaucgagaaggaguucagcgagguggaggggcggauccaggaccucgagaaguacgucgaggacaccaagaucgaccugugguccuacaacgccgagcugcucguggcccuggagaaccagcacaccaucgaccugaccgacagcgagaugaacaagcuguucgagaagacgaagaagcagcuccgcgagaacgccgaggacaugggcaacgggugcuucaagaucuaccacaagugcgacaacgcgugcaucggcuccauccgcaacgggaccuacgaccacgacguguaccgggacgaggcccugaacaaccgcuuccagaucaagggcgucgagcucaagagcggcuacaaggacuggauccuguggaucuccuucgccaucagcugcuuccugcucugcguggcccugcugggguucaucaugugggccugccagaagggcaacauccggugcaacaucugcaucuga

SEQ ID NO: 74048 - RNA, 1701 nt, Artificial Sequence; identical to SEQ ID NO: 73882
  derived and/or modified CDS sequence (opt1) from hemagglutinin__InfluenzaA__AGL09770

SEQ ID NO: 74049 - RNA, 1701 nt, Artificial Sequence
  derived and/or modified CDS sequence (opt1) from hemagglutinin__InfluenzaA__AGL09771
augaagaccaucaucgcccugagcuacauccucugccugguguucgcccagaagcugcccggcaacgacaacuccaccgcgacgcucugccuggggcaccacgccgucccgaacggcaccaucgugaagaccaucaccaacgaccgcaucgaggugacgaacgccaccgagcugguccagaacagcuccaucggggagaucugcgacagcccccaccagauccucgacggcgagaacugcacccugaucgacgcccugcucggggacccccagugcgacggcuuccagaacaagaagugggaccuguucguggagcgguccaaggccuacagcaacugcuaccccuacgacgugccggacuacgcgucccugcgcagccucgucgccuccagcggcacccuggaguucaacaacgaguccuucaacugggccggggugacgcagaacggcaccagcuccgccugcauccgggggagcaacuccagcuucuucucccgccugaacuggcucacccaccugaacuucaaguaccccgcgcugaacgugaccaugcccaacaacgagcaguucgacaagcucuacaucuggggcguccaccaccccgggacggacaaggaccagaucuuccuguacgcccagagcuccggccggaucaccgugagcaccaagcgcagccagcaggccgugaucccgaacaucggcucccggccccgcauccggaacauccccagccgcaucuccaucuacuggaccaucgucaagcccggggacauccugcucaucaacagcacgggcaaccugaucgccccgcggggguacuucaagauccgcuccggcaagagcuccaucaugcggagcgacgcccccaucggcaagugcaaguccgagugcaucacccccaacgggagcauccccaacgacaagccguuccagaacgugaaccgcaucaccuacggcgcgugcccccgguacgugaagcaguccacccugaagcucgccacggggaugcgcaacguccccgagaagcagacccggggcaucuucggggccaucgccggcuucaucgagaacggcugggaggggaugguggacggcugguacggguuccgccaccagaacagcgagggccgggggcaggccgcggaccugaaguccacccaggccgccaucgaccagaucaacggcaagcugaaccgccucaucggcaagaccaacgagaaguuccaccagaucgagaaggaguucagcgagguggaggggcggauccaggaccuggagaaguacgucgaggacacgaagaucgaccugugguccuacaacgccgagcuccugguggcccuggagaaccagcacaccaucgaccucaccgacagcgagaugaacaagcuguucgagaagaccaagaagcagcugcgcgagaacgcggaggacaugggcaacgggugcuucaagaucuaccacaagugcgacaacgccugcaucggcuccauccgcaacgggacguacgaccacgacaucuaccgggacgaggcccucaacaaccgcuuccagaucaagggcguggagcucaagagcggcuacaaggacuggauccuguggaucuccuucgccaucagcugcuuccugcugugcgucgcccugcucggguucaucaugugggcgugccagaagggcaacauccggugcaacaucugcaucuga

SEQ ID NO: 74050 - RNA, 1701 nt, Artificial Sequence
  derived and/or modified CDS sequence (opt1) from hemagglutinin__InfluenzaA__AGL09772
augaagaccaucaucgcccugagcuacauccucugccugguguucgcccagaagcugcccggcaacgacaacuccaccgcgacgcucugccuggggcaccacgccgucccgaacggcaccaucgugaagaccaucaccaacgaccagaucgaggugacgaacgccaccgagcugguccagagcuccagcaccggggagaucugcaacagcccccaccagauccucgacggcgagaacugcacccugaucgacgcccugcucggggacccccagugcgacggcuuccagaacaagaagugggaccuguucguggagcgcagcaaggcccacuccaacugcuaccccuacgacgugccggacuacgcgagccugcggucccucgucgccagcuccggcacgcuggaguucaacaacgagagcuucaacuggaccggggugacccagaacggcaccuccagcgccugcauccgccgguccaacaacagcuucuucucccgccugaacuggcucacgcaccugaacuucaaguaccccgcccugaacgugaccaugcccaacaacgagcaguucgacaagcucuacaucuggggcguccaccaccccgggaccgacaaggaccagaucuuccuguacgcgcaggccgccgggcggaucaccgugagcacgaagcgcucccagcaggccgugaucccgaacaucggcagccggccccgcguccggaacauccccagccgcguguccaucuacuggaccaucgugaagcccggcgacauccugcucaucaacagcaccgggaaccugaucgccccgcggggcuacuucaagauccgcuccgggaaguccuccaucaugcggagcgacgcgcccaucggcaagugcaacuccgccugcaucacccccaacggcagcauccccaacgacaagccguuccagaacgucaaccgcaucacguacggggccugcccccgguacgugaagcagaacacccugaagcucgccaccggcaugcgcaacgugcccgagaagcagacccgggggaucuucggcgccaucgcgggguucaucgagaacggcugggagggcauggucgacgggugguacggcuuccgccaccagaacuccgaggggcggggccaggccgccgaccucaagagcacgcaggccgccaucgaccagaucaacgggaagcugaaccgccugaucggcaagaccaacgagaaguuccaccagaucgagaaggaguucuccgagguggagggccggauccaggaccuggagaaguacguggaggacaccaagaucgaccuguggagcuacaacgcggagcuccuggucgcccuggagaaccagcacaccaucgaccucacggacuccgagaugaacaagcuguucgagaagaccaagaagcagcugcgcgagaacgccgaggacauggggaacggcugcuucaagaucuaccacaagugcgacaacgccugcaucgggagcauccgcaacggcaccuacgaccacuacguguaccgggacgaggcccucaacaaccgcuuccagaucaaggggguggagcugaaguccggcuacaaggacuggauccuguggaucagcuucgcgaccuccugcuuccuccugugcgucgcccugcucggcuucaucaugugggccugccagaaggggaacauccggugcaacaucugcaucuga

SEQ ID NO: 74051 - RNA, 1701 nt, Artificial Sequence
  derived and/or modified CDS sequence (opt1) from hemagglutinin__InfluenzaA__AGL09773
augaagaccaucaucgcccugagcuacauccucugccugguguucgcccagaagcugcccggcaacgacaacuccaccgcgacgcucugccuggggcaccacgccgucccgaacggcaccaucgugaagaccaucaccaacgaccagaucgaggugacgaacgccaccgagcugguccagagcuccagcaccggggagaucugcaacagcccccaccagauccucgacggcgagaacugcacccugaucgacgcccugcucggggacccccagugcgacggcuuccagaacaagaagugggaccuguucguggagcgcagcaaggcccacuccaacugcuaccccuacgacgugccggacuacgcgagccugcggucccucgucgccagcuccggcacgcuggaguucaacaacgagagcuucaacuggaccgaggugacccagaacgggaccuccagcgccugcauccgccgguccaacaacagcuucuucucccgccugaacuggcucacgcaccugaacuucaaguaccccgcccugaacgugaccaugcccaacaacgagcaguucgacaagcucuacaucuggggcguccaccaccccgggaccgacaaggaccagaucuuccuguacgcgcaggccgccggccggaucaccgugagcacgaagcgcucccagcaggccgugaucccgaacaucgggagccggccccgcguccggaacauccccagccgcguguccaucuacuggaccaucgugaagcccggcgacauccugcucaucaacagcaccggcaaccugaucgccccgcggggguacuucaagauccgcuccggcaagagcuccaucaugcggagcgacgcgcccaucgggaagugcaacuccgccugcaucacccccaacggcagcauccccaacgacaagccguuccagaacgucaaccgcaucacguacggcgccugcccccgguacgugaagcagaacacccugaagcucgccaccgggaugcgcaacgugcccgagaagcagacccggggcaucuucggggccaucgcgggcuucaucgagaacgggugggagggcauggucgacggcugguacggguuccgccaccagaacuccgagggccgggggcaggccgccgaccugaaguccacgcaggccgccaucgaccagaucaacggcaagcugaaccgccucaucgggaagaccaacgagaaguuccaccagaucgagaaggaguucuccgagguggagggccggauccaggaccuggagaaguacguggaggacaccaagaucgaccuguggagcuacaacgcggagcuccuggucgcccuggagaaccagcacaccaucgaccucacggacuccgagaugaacaagcuguucgagaagaccaagaagcagcugcgcgagaacgccgaggacaugggcaacgggugcuucaagaucuaccacaagugcgacaacgccugcaucggcagcauccgcaacgggaccuacgaccacuacguguaccgggacgaggcccucaacaaccgcuuccagaucaagggcguggagcugaaguccggguacaaggacuggauccuguggaucagcuucgcgaccuccugcuuccuccugugcgucgcccugcucggcuucaucaugugggccugccagaagggcaacauccggugcaacaucugcaucuga

SEQ ID NO: 74052 - RNA, 1701 nt, Artificial Sequence; identical to SEQ ID NO: 74050
  derived and/or modified CDS sequence (opt1) from hemagglutinin__InfluenzaA__AGL09774

SEQ ID NO: 74053 - RNA, 1701 nt, Artificial Sequence; identical to SEQ ID NO: 73892
  derived and/or modified CDS sequence (opt1) from hemagglutinin__InfluenzaA__AGL09775

SEQ ID NO: 74054 - RNA, 1701 nt, Artificial Sequence; identical to SEQ ID NO: 74050
  derived and/or modified CDS sequence (opt1) from hemagglutinin__InfluenzaA__AGL09776

SEQ ID NO: 74055 - RNA, 1701 nt, Artificial Sequence; identical to SEQ ID NO: 74050
  derived and/or modified CDS sequence (opt1) from hemagglutinin__InfluenzaA__AGL09777

SEQ ID NO: 74056 - RNA, 1701 nt, Artificial Sequence
  derived and/or modified CDS sequence (opt1) from hemagglutinin__InfluenzaA__AGL09778
augaagaccaucaucgcccugagcuacauccucugccugaucuucgcccagaagcugcccggcaacgacaacuccaccgcgacgcucugccuggggcaccacgccgugccgaacggcaccaucgucaagaccaucaccaacgaccgcaucgaggugacgaacgccaccgagcuggugcagaacagcuccaucggggagaucugcgacagcccccaccagauccucgacggcgagaacugcacccugaucgacgcccugcucggggacccccagugcgacggcuuccagaacaagaagugggaccuguucgucgagcgguccaaggccuacagcaacugcuaccccuacgacgugccggacuacgcgucccugcgcagccucguggccuccagcggcacccuggaguucaacaacgaguccuucaacugggccggggucacgcagaacggcaccagcuccgccugcauccgggggagcaacuccagcuucuucucccgccugaacuggcucacccaccugaacuucaaguaccccgcgcugaacgugaccaugcccaacaacgagcaguucgacaagcucuacaucuggggcgugcaccaccccgggacggacaaggaccagaucuuccuguacgcccagagcuccggccggaucaccgucagcaccaagcgcagccagcaggccgugaucccgaacaucggcucccggccccgcauccggaacauccccagccgcaucuccaucuacuggaccaucgugaagcccggggacauccugcucaucaacagcacgggcaaccugaucgccccgcggggguacuucaagauccgcuccggcaagagcuccaucaugcggagcgacgcccccaucggcaagugcaaguccgagugcaucacccccaacgggagcauccccaacgacaagccguuccagaacgucaaccgcaucaccuacggcgcgugcccccgguacgugaagcaguccacccugaagcucgccacggggaugcgcaacgugcccgagaagcagacccggggcaucuucggggccaucgccggcuucaucgagaacggcugggaggggaugauggacggcugguacggguuccgccaccagaacagcgagggccgggggcaggccgcggaccugaaguccacccaggccgccaucgaccagaucaacggcaagcugaaccgccucaucggcaagaccaacgagaaguuccaccagaucgagaaggaguucagcgaggucgaggggcggauccaggaccuggagaaguacguggaggacacgaagaucgaccugugguccuacaacgccgagcuccugguggcccuggagaaccagcacaccaucgaccucaccgacagcgagaugaacaagcuguucgagaagaccaagaagcagcugcgcgagaacgcggaggacaugggcaacgggugcuucaagaucuaccacaagugcgacaacgccugcaucggcuccauccgcaacgggacguacgaccacgacgucuaccgggacgaggcccucaacaaccgcuuccagaucaagggcguggagcucaagagcggcuacaaggacuggauccuguggaucuccuucgccaucagcugcuuccugcugugcguggcccugcucggguucaucaugugggcgugccagaagggcaacauccggugcaacaucugcaucuga

SEQ ID NO: 74057 - RNA, 1701 nt, Artificial Sequence
  derived and/or modified CDS sequence (opt1) from hemagglutinin__InfluenzaA__AGL09779
augaagaccaucaucgcccugagcuacauccucugccugguguucgcccagaagcugcccggcaacaacaacuccaccgcgacgcucugccuggggcaccacgccgucccgaacggcaccaucgugaagaccaucaccaacgaccgcaucgaggugacgaacgccaccgagcugguccagaacagcuccaucggggagaucugcgacagcccccaccagauccucgacggcgagaacugcacccugaucgacgcccugcucggggacccccagugcgacggcuuccagaacaagaagugggaccuguucguggagcgguccaaggccuacagcaacugcuaccccuacgacgugccggacuacgcgucccugcgcagccucgucgccuccagcggcacccuggaguucaacaacgaguccuucaacugggccggggugacgcagaacggcaccagcuccgccugcauccgggggagcaacuccagcuucuucucccgccugaacuggcucacccaccugaacuucaaguaccccgcgcugaacgugaccaugcccaacaacgagcaguucgacaagcucuacaucuggggcguccaccaccccgggacggacaaggaccagaucuuccuguacgcccagagcuccggccggaucaccgugagcaccaagcgcagccagcaggccgugaucccgaacaucggcucccggccccgcauccggaacauccccagccgcaucuccaucuacuggaccaucgucaagcccggggacauccugcucaucaacagcacgggcaaccugaucgccccgcggggguacuucaagauccgcuccggcaagagcuccaucaugcggagcgacgcccccaucggcaagugcaaguccgagugcaucacccccaacgggagcauccccaacgacaagccguuccagaacgugaaccgcaucaccuacggcgcgugcccccgguacgugaagcaguccacccugaagcucgccacggggaugcgcaacguccccgagaagcagacccggggcaucuucggggccaucgccggcuucaucgagaacggcugggaggggaugguggacggcugguacggguuccgccaccagaacagcgagggccgggggcaggccgcggaccugaaguccacccaggccgccaucgaccagaucaacggcaagcugaaccgccucaucggcaagaccaacgagaaguuccaccagaucgagaaggaguucagcgagguggaggggcggauccaggaccuggagaaguacgucgaggacacgaagaucgaccugugguccuacaacgccgagcuccugguggcccuggagaaccagcacaccaucgaccucaccgacagcgagaugaacaagcuguucgagaagaccaagaagcagcugcgcgagaacgcggaggacaugggcaacgggugcuucaagaucuaccacaagugcgacaacgccugcaucggcuccauccgcaacgggacguacgaccacgacguguaccgggacgaggcccucaacaaccgcuuccagaucaagggcgucgagcucaagagcggcuacaaggacuggauccuguggaucuccuucgccaucagcugcuuccugcugugcguggcccugcucggguucaucaugugggcgugccagaagggcaacauccggugcaacaucugcaucuga

SEQ ID NO: 74058 - RNA, 1701 nt, Artificial Sequence
  derived and/or modified CDS sequence (opt1) from hemagglutinin__InfluenzaA__AGL09780
augaagaccaucaucgcccugagcuacauccucugccugguguucgcccagaagcugcccggcaacgacaacuccaccgcgacgcucugccuggggcaccacgccgucccgaacggcaccaucgugaagaccaucaccaacgaccgcaucgaggugacgaacgccaccgagcugguccagaacagcuccaucggggagaucugcgacagcccccaccagauccucgacggcgagaacugcacccugaucgacgcccugcucggggacccccagugcgacggcuuccagaacaagaagugggaccuguucguggagcgguccaaggccuacagcaacugcuaccccuacgacgugccggacuacgcgucccugcgcagccucgucgccuccagcggcacccuggaguucgacaacgaguccuucaacugggccggggugacgcagaacggcaccagcuccgccugcauccgggggagcaacuccagcuucuucucccgccugaacuggcucacccaccugaacuucaaguaccccgcgcugaacgugaccaugcccaacaacgagcaguucgacaagcucuacaucuggggcguccaccaccccgggacggacaaggaccagaucagccuguacgcccaguccagcggccggaucaccgugagcaccaagcgcucccagcaggccgugaucccgaacaucggcagccggccccgcauccggaacauccccucccgcaucagcaucuacuggaccaucgucaagcccggggacauccugcucaucaacuccacgggcaaccugaucgccccgcggggguacuucaagauccgcagcggcaaguccagcaucaugcgguccgacgcccccaucggcaagugcaagagcgagugcaucacccccaacggguccauccccaacgacaagccguuccagaacgugaaccgcaucaccuacggcgcgugcccccgguacgugaagcagagcacccugaagcucgccacggggaugcgcaacguccccgagaagcagacccggggcaucuucggggccaucgccggcuucaucgagaacggcugggaggggaugguggacggcugguacggguuccgccaccagaacuccgagggccgggggcaggccgcggaccucaagagcacccaggccgccaucgaccagaucaacggcaagcugaaccgccugaucggcaagaccaacgagaaguuccaccagaucgagaaggaguucuccgagguggaggggcggauccaggaccuggagaaguacgucgaggacacgaagaucgaccuguggagcuacaacgccgagcuccugguggcccuggagaaccagcacaccaucgaccucaccgacuccgagaugaacaagcuguucgagaagaccaagaagcagcugcgcgagaacgcggaggacaugggcaacgggugcuucaagaucuaccacaagugcgacaacgccugcaucggcagcauccgcaacgggacguacgaccacgacguguaccgggacgaggcccucaacaaccgcuuccagaucaagggcgucgagcugaaguccggcuacaaggacuggauccuguggaucagcuucgccaucagcugcuuccuccugugcguggcccugcucggguucaucaugugggcgugccagaagggcaacauccggugcaacaucugcaucuga

SEQ ID NO: 74059 - RNA, 1701 nt, Artificial Sequence; identical to SEQ ID NO: 74017
  derived and/or modified CDS sequence (opt1) from hemagglutinin__InfluenzaA__AGL09781

SEQ ID NO: 74060 - RNA, 1701 nt, Artificial Sequence; identical to SEQ ID NO: 73882
  derived and/or modified CDS sequence (opt1) from hemagglutinin__InfluenzaA__AGL09782

SEQ ID NO: 74061 - RNA, 1701 nt, Artificial Sequence
  derived and/or modified CDS sequence (opt1) from hemagglutinin__InfluenzaA__AGL09783
augaagaccaucaucgcccugagcuacauccucugccugguguucgcccagaagcugcccggcaacgacaacuccaccgcgacgcucugccuggggcaccacgccgucccgaacggcaccguggugaagaccaucaccaacgaccgcaucgaggucacgaacgccaccgagcuggugcagaacagcuccaucggggagaucugcgacagcccccaccagauccucgacggcgagaacugcacccugaucgacgcccugcucggggacccccagugcgacggcuuccagaacaagaagugggaccuguucguggagcgguccaaggccuacagcaacugcuaccccuacgacgucccggacuacgcgucccugcgcagccucguggccuccagcggcacccuggaguucaacaacgaguccuucaacuggacgggggugacccagaacggcaccagcuccgccugcauccggcgcagcaacaacuccuucuucagccggcugaacuggcucacccaccugaacuucaaguaccccgcccugaacgucacgaugcccaacaacgagcaguucgacaagcucuacaucuggggcgugcaccaccccgggaccgacaaggaccagaucuuccuguacgcgcaguccagcgggcgcaucaccguguccaccaagcggagccagcaggccgucaucccgaacaucggcagccgcccccggauccgcaacauccccucccggaucagcaucuacuggacgaucgugaagcccggcgacauccugcucaucaacuccaccgggaaccugaucgccccgcgcggcuacuucaagauccggagcgggaaguccagcaucaugcgcuccgacgcccccaucggcaagugcaagagcgagugcaucacccccaacggcuccauccccaacgacaagccguuccagaacgugaaccggaucaccuacggggccugcccccgcuacgucaagcagagcacgcugaagcucgcgaccggcaugcggaacgugcccgagaagcagacccgcgggaucuucggcgccaucgccggguucaucgagaacggcugggagggcaugguggacgggugguacggcuuccggcaccagaacuccgaggggcgcggccaggccgccgaccucaagagcacccaggcggccaucgaccagaucaacgggaagcugaaccggcugaucggcaagacgaacgagaaguuccaccagaucgagaaggaguucuccgaggucgagggccgcacccagaaccuggagaaguacguggaggacaccaagaucgaccuguggagcuacaacgccgagcuccugguggcccuggagaaccagcacaccaucgaccucacggacuccgagaugaacaagcuguucgagaagaccaagaagcagcugcgcgagaacgccgaggacauggggaacggcugcuucaagaucuaccacaagugcgacaacgcgugcaucgggagcauccggaacggcaccuacgaccacgacgucuaccgcgacgaggcccucaacaaccgguuccagaucaaggggguggagcugaaguccggcuacaaggacuggauccuguggaucagcuucgccaucuccugcuuccuccugugcgugguccugcucggcuucaucaugugggccugccagaaggggaacauccgcugcaacaucugcaucuga

SEQ ID NO: 74062 - RNA, 1701 nt, Artificial Sequence; identical to SEQ ID NO: 73892
  derived and/or modified CDS sequence (opt1) from hemagglutinin__InfluenzaA__AGL09785

SEQ ID NO: 74063 - RNA, 1701 nt, Artificial Sequence
  derived and/or modified CDS sequence (opt1) from hemagglutinin__InfluenzaA__AGL09786
augaagaccaucaucgcccugagcuacauccucugccugguguucgcccagaagcugcccggcaacgacaacuccaccgcgacgcucugccuggggcaccacgccgucccgaacggcaccaucgugaagaccaucaccaacgaccgcaucgaggugacgaacgccaccgagcugguccagaacagcuccaucggggagaucugcgacagcccccaccagauccucgacggcgagaacugcacccugaucgacgcccugcucggggacccccagugcgacggcuuccagaacaagaagugggaccuguucguggagcgguccaaggccuacagcaacugcuaccccuacgacgugccggacuacgcgucccugcgcagccucgucgccuccagcggcacccuggaguucgacaacgaguccuucaacugggccggggugacgcagaacggcaccagcuccgccugcauccgggggagcaaguccagcuucuucucccgccugaacuggcucacccaccugaacuucaaguaccccgcgcugaacgugaccaugcccaacaacgagcaguucgacaagcucuacaucuggggcguccaccaccccgggacggacaaggaccagaucagccuguacgcccaguccagcggccggaucaccgugagcaccaagcgcucccagcaggccgugaucccgaacaucggcagccggccccgcauccggaacauccccucccgcaucagcaucuacuggaccaucgucaagcccggggacauccugcucaucaacuccacgggcaaccugaucgccccgcggggguacuucaagauccgcagcggcaaguccagcaucaugcgguccgacgcccccaucggcaagugcaagagcgagugcaucacccccaacggguccauccccaacgacaagccguuccagaacgugaaccgcaucaccuacggcgcgugcccccgguacgugaagcagagcacccugaagcucgccacggggaugcgcaacguccccgagaagcagacccggggcaucuucggggccaucgccggcuucaucgagaacggcugggaggggaugguggacggcugguacggguuccgccaccagaacuccgagggccgggggcaggccgcggaccucaagagcacccaggccgccaucgaccagaucaacggcaagcugaaccgccugaucggcaagaccaacgagaaguuccaccagaucgagaaggaguucuccgagguggaggggcggauccaggaccuggagaaguacgucgaggacacgaagaucgaccuguggagcuacaacgccgagcuccugguggcccuggagaaccagcacaccaucgaccucaccgacuccgagaugaacaagcuguucgagaagaccaagaagcagcugcgcgagaacgcggaggacaugggcaacgggugcuucaagaucuaccacaagugcgacaacgccugcaucggcagcauccgcaacgggacguacgaccacgacguguaccgggacgaggcccucaacaaccgcuuccagaucaagggcgucgagcugaaguccggcuacaaggacuggauccuguggaucagcuucgccaucagcugcuuccuccugugcguggcccugcucggguucaucaugugggcgugccagaagggcaacauccggugcaacaucugcaucuga

SEQ ID NO: 74064 - RNA, 1701 nt, Artificial Sequence
  derived and/or modified CDS sequence (opt1) from hemagglutinin__InfluenzaA__AGL09787
augaaggccauccuggugguccuccuguacaccuucgccaccgcgaacgccgacacgcugugcaucggcuaccacgccaacaacagcaccgacaccguggacaccgugcucgagaagaacgucacggugacccacuccgugaaccugcuggaggacaagcacaacgggaagcucugcaagcugcgcggcgucgcgccccugcaccucgggaagugcaacaucgccggcuggauccuggggaacccggagugcgagagccuguccaccgccagcuccuggagcuacaucguggagaccuccagcuccgacaacggcacgugcuaccccggcgacuucaucaacuacgaggagcuccgggagcagcugagcuccgugagcuccuucgagcgcuucgagaucuuccccaagaccagcuccuggcccaaccacgacagcaacaagggggucaccgccgccugcccgcacgccggcgcgaaguccuucuacaagaaccugaucuggcucgugaagaaggggaacagcuaccccaagcugucccagagcuacaucaacgacaagggcaaggaggugcugguccucugggggauccaccaccccagcaccacggccgaccagcagucccuguaccagaacgccgacgccuacguguucgugggcaccagccgguacuccaagaaguucaagcccgagaucgccauccgcccgaagguccgggaccaggagggccgcaugaacuacuacuggacccugguggagcccggggacaagaucaccuucgaggcgacgggcaaccucguggucccccgguacgccuucaccauggagcgcaacgccgggagcggcaucaucaucuccgacacccccgugcacgacugcaacaccacgugccagaccccggagggcgccaucaacaccagccugcccuuccagaacauccaccccaucaccaucgggaagugccccaaguacgugaaguccacgaagcugcggcucgccaccggccugcgcaacgucccgagcauccagucccgggggcuguucggcgcgaucgccggguucaucgagggcggcuggaccgggaugguggacggcugguacggguaccaccaccagaacgagcagggcagcggguacgccgccgaccucaaguccacccagaacgccaucgacaagaucacgaacaaggugaacagcgucaucgagaagaugaacacccaguucaccgcggugggcaaggaguucaaccaccuggagaagcgcaucgagaaccugaacaagaaggucgacgacggcuuccucgacaucuggaccuacaacgccgagcugcuggugcuccuggagaacgagcggacgcuggacuaccacgacuccaacgugaagaaccucuacgagaagguccgcaaccagcugaagaacaacgccaaggagaucgggaacggcugcuucgaguucuaccacaagugcgacaacacgugcauggagagcgugaagaacgggaccuacgacuaccccaaguacuccgaggaggccaagcugaaccgggagaagaucgacggcgugaagcucgagagcacccgcaucuaccagauccuggccaucuacuccaccgucgcgagcucccuggugcucguggucagccugggggccaucagcuucuggaugugcuccaacggcagccugcagugccggaucugcaucuga

SEQ ID NO: 74065 - RNA, 1701 nt, Artificial Sequence; identical to SEQ ID NO: 74064
  derived and/or modified CDS sequence (opt1) from hemagglutinin__InfluenzaA__AGL09788

SEQ ID NO: 74066 - RNA, 1701 nt, Artificial Sequence; identical to SEQ ID NO: 74064
  derived and/or modified CDS sequence (opt1) from hemagglutinin__InfluenzaA__AGL09789

SEQ ID NO: 74067 - RNA, 1701 nt, Artificial Sequence; identical to SEQ ID NO: 74018
  derived and/or modified CDS sequence (opt1) from hemagglutinin__InfluenzaA__AGL09790

SEQ ID NO: 74068 - RNA, 1701 nt, Artificial Sequence
  derived and/or modified CDS sequence (opt1) from hemagglutinin__InfluenzaA__AGL09791
augaagaccaucaucgcccugagcuacauccucugccugguguucgcccagaagcugcccggcaacgacaacuccaccgcgacgcucugccuggggcaccacgccgucccgaacggcaccaucgugaagaccaucaccaacgaccgcaucgaggugacgaacgccaccgagcugguccagaacagcuccaucggggagaucugcgacagcccccaccagauccucgacggcgagaacugcacccugaucgacgcccugcucggggacccccagugcgacggcuuccagaacaagaagugggaccuguucguggagcgguccaaggccuacagcaacugcuaccccuacgacgugccggacuacgcgucccugcgcagccucgucgccuccagcggcacccuggaguucaacaacgaguccuucaacuggacgggggugacccagaacggcaccagcuccgccugcauccggcgcagcaacuccagcuucuucucccggcugaacuggcucacccaccugaacuucaaguaccccgcccugaacaugacgaugcccaacaacgagcaguucgacaagcucuacaucuggggcgugcaccaccccgggaccgacaaggaccagaucagccuguacgcgcaguccagcgggcgcaucaccgucagcaccaagcggucccagcaggccgugaucccgaacaucggcagccgcccccggauccgcaacauccccucccggaucagcaucuacuggacgaucgugaagcccggcgacauccugcucaucaacuccaccgggaaccugaucgccccgcgcggcuacuucaagauccggagcgggaaguccagcaucaugcgcuccgacgcccccaucggcaagugcaagagcgagugcaucacccccaacggcuccauccccaacgacaagccguuccagaacgucaaccggaucaccuacggggccugcccccgcuacgugaagcagagcacgcugaagcucgcgaccggcaugcggaacgugcccgagaagcagacccgcgggaucuucggcgccaucgccggguucaucgagaacggcugggagggcauggucgacgggugguacggcuuccggcaccagaacuccgaggggcgcggccaggccgccgaccucaagagcacccaggcggccaucgaccagaucaacgggaagcugaaccggcugaucggcaagacgaacgagaaguuccaccagaucgagaaggaguucuccgagguggagggccgcauccaggaccuggagaaguacguggaggacaccaagaucgaccuguggagcuacaacgccgagcuccuggucgcccuggagaaccagcacaccaucgaccucaccgacuccgagaugaacaagcuguucgagaagacgaagaagcagcugcgcgagaacgccgaggacauggggaacggcugcuucaagaucuaccacaagugcgacaacgcgugcaucgggagcauccggaacggcaccuacgaccacaacguguaccgcgacgaggcccucaacaaccgguuccagaucaaggggguggagcugaaguccggcuacaaggacuggauccuguggaucagcuucgccaucagcugcuuccuccugugcgucgcccugcucggcuucaucaugugggccugccagaaggggaacauccgcugcaacaucugcaucuga

SEQ ID NO: 74069 - RNA, 1701 nt, Artificial Sequence; identical to SEQ ID NO: 74018
  derived and/or modified CDS sequence (opt1) from hemagglutinin__InfluenzaA__AGL09792

SEQ ID NO: 74070 - RNA, 1701 nt, Artificial Sequence
  derived and/or modified CDS sequence (opt1) from hemagglutinin__InfluenzaA__AGL09794
augaagaccaucaucgcccugagcuacauccucugccugguguucgcccagaagcugcccggcaacgacaacuccaccgcgacgcucugccuggggcaccacgccgucccgaacggcaccaucgugaagaccaucaccaacgaccgcaucgaggugacgaacgccaccgagcugguccagaacagcuccaucggggagaucugcgacagcccccaccagauccucgacggcgagaacugcacccugaucgacgcccugcucggggacccccagugcgacggcuuccagaacaagaagugggaccuguucguggagcgguccaaggccuacagcaacugcuaccccuacgacgugccggacuacgcgucccugcgcagccucgucgccuccagcggcacccuggaguucaacaacgaguccuucaacugggccggggugacgcagaacggcaccagcuccgccugcauccgggggagcaacuccagcuucuucucccgccugaacuggcucacccaccugaacuucaaguaccccgcgcugaacgugaccaugcccaacaacgagcaguucgacaagcucuacaucuggggcguccaccaccccgggacggacaaggaccagaucuuccuguacgcccagagcuccggccggaucaccgugagcaccaagcgcagccagcaggccgugaucccgaacaucggcucccggccccgcauccggaacauccccagccgcaucuccaucuacuggaccaucgucaagcccggggacauccugcucaucaacagcacgggcaaccugaucgccccgcggggguacuucaagauccgcuccggcaagagcuccaucaugcggagcgacacccccaucggcaagugcaaguccgagugcaucacccccaacgggagcauccccaacgacaagccguuccagaacgugaaccgcaucaccuacggcgccugcccccgguacgugaagcaguccacgcugaagcucgcgaccgggaugcgcaacguccccgagaagcagacccggggcaucuucggggccaucgccggcuucaucgagaacggcugggaggggaugguggacggcugguacggguuccgccaccagaacagcgagggccgggggcaggccgccgaccugaaguccacccaggcggccaucgaccagaucaacggcaagcugaaccgccucaucggcaagacgaacgagaaguuccaccagaucgagaaggaguucagcgagguggaggggcggauccaggaccuggagaaguacgucgaggacaccaagaucgaccugugguccuacaacgccgagcuccugguggcccuggagaaccagcacaccaucgaccucaccgacagcgagaugaacaagcuguucgagaagacgaagaagcagcugcgcgagaacgccgaggacaugggcaacgggugcuucaagaucuaccacaagugcgacaacgcgugcaucggcuccauccgcaacgggaccuacgaccacgacguguaccgggacgaggcccucaacaaccgcuuccagaucaagggcgucgagcucaagagcggcuacaaggacuggauccuguggaucuccuucgccaucagcugcuuccugcugugcguggcccugcucggguucaucaugugggccugccagaagggcaacauccggugcaacaucugcaucuga

SEQ ID NO: 74071 - RNA, 1701 nt, Artificial Sequence; identical to SEQ ID NO: 74018
  derived and/or modified CDS sequence (opt1) from hemagglutinin__InfluenzaA__AGL09795

SEQ ID NO: 74072 - RNA, 1701 nt, Artificial Sequence
  derived and/or modified CDS sequence (opt1) from hemagglutinin__InfluenzaA__AGL09797
augaagaccaucaucgcccugagcuacauccucugccugguguucucccagaagcugcccggcaacgacaacagcaccgccacgcucugccuggggcaccacgcggucccgaacggcaccaucgugaagaccaucaccaacgaccgcaucgaggugacgaacgccaccgagcugguccagaacuccagcaucggggagaucugcgacagcccccaccagauccucgacggcgagaacugcacccugaucgacgcccugcucggggacccccagugcgacggcuuccagaacaagaagugggaccuguucguggagcggagcaaggccuacuccaacugcuaccccuacgacgugccggacuacgccagccugcgcucccucgucgcgagcuccggcacccuggaguucaacaacgagagcuucaacugggccggggugacgcagaacggcaccuccagcgccugcauccggggguccaacagcuccuucuucagccgccugaacuggcucacccaccugaacuucaaguaccccgcccugaacgugaccaugcccaacaacgagcaguucgacaagcucuacaucuggggcguccaccaccccgggacggacaaggaccagaucuuccuguacgcgcaguccagcggccggaucaccgugagcaccaagcgcucccagcaggccgugaucccgaacaucggcagccggccccgcauccggaacauccccucccgcaucagcaucuacuggaccaucgucaagcccggggacauccugcucaucaacuccacgggcaaccugaucgccccgcggggguacuucaagauccgcagcggcaaguccagcaucaugcgguccgacgcccccaucggcaagugcaagagcgagugcaucacccccaacggguccauccccaacgacaagccguuccagaacgugaaccgcaucaccuacggcgccugcccccgguacgugaagcagagcacccugaagcucgcgacggggaugcgcaacguccccgagaagcagacccggggcaucuucggggccaucgccggcuucaucgagaacggcugggaggggaugguggacggcugguacggguuccgccaccagaacuccgagggccgggggcaggccgccgaccugaaguccacccaggcggccaucgaccagaucaacggcaagcugaaccgccucaucggcaagaccaacgagaaguuccaccagaucgagaaggaguucuccgagguggaggggcggauccaggaccuggagaaguacgucgaggacacgaagaucgaccuguggagcuacaacgccgagcuccugguggcccuggagaaccagcacaccaucgaccucaccgacuccgagaugaacaagcuguucgagaagaccaagaagcagcugcgcgagaacgccgaggacaugggcaacgggugcuucaagaucuaccacaagugcgacaacgcgugcaucggcagcauccgcaacgggacguacgaccacgacguguaccgggacgaggcccucaacaaccgcuuccagaucaagggcgucgagcugaaguccggcuacaaggacuggauccuguggaucagcuucgccaucagcugcuuccuccugugcguggcccugcucggguucaucaugugggccugccagaagggcaacauccggugcaacaucugcaucuga

SEQ ID NO: 74073 - RNA, 1701 nt, Artificial Sequence
  derived and/or modified CDS sequence (opt1) from hemagglutinin__InfluenzaA__AGL09798
augaagaccaucaucgcccugagcuacauccucugccugguguucgcccagaagcugcccggcaacgacaacuccaccgcgacgcucugccuggggcaccacgccgucccgaacggcaccaucgugaagaccaucaccaacgaccgcaucgaggugacgaacgccaccgagcugguccagaacagcuccaucggggagaucugcgacagcccccaccagauccucgacggcgagaacugcacccugaucgacgcccugcucggggacccccagugcgacggcuuccagaacaagaagugggaccuguucguggagcgguccaaggccuacagcaacugcuaccccuacgacgugccggacuacgcgucccugcgcagccucgucgccuccagcggcacccuggaguucaacaacgaguccuucaacugggccggggugacgcagaacggcaccagcuccgccugcauccgggggagcaacuccagcuucuucucccgccugaacuggcucacccaccugaacuucaaguaccccgcgcugaacgugaccaugcccaacaacgagcaguucgacaagcucuacaucuggggcguccaccaccccgggacggacaaggaccagaucuuccuguacgcccagagcuccggccggaucaccgugagcaccaagcgcagccagcaggccgugaucccgaacaucggcucccggccccgcauccggaacauccccagccgcaucuccaucuacuggaccaucgucaagcccggggacauccugcucaucaacagcacgggcaaccugaucgccccgcggggguacuucaagauccgcuccggcaagagcuccaucaugcggagcgacgcccccaucggcaagugcaaguccgagugcaucacccccaacgggagcauccccaacgacaagccguuccagaacgugaaccgcaucaccuacggcgcgugcccccgguacgugaagcaguccacccugaagcucgccacggggaugcgcaacguccccgagaagcagacccggggcaucuucggggccaucgccggcuucaucgagaacggcugggaggggaugguggacggcugguacggguuccgccaccagaacuucgagggccgggggcaggccgcggaccucaagagcacccaggccgccaucgaccagaucaacggcaagcugaaccgccugaucggcaagaccaacgagaaguuccaccagaucgagaaggaguucuccgagguggaggggcggauccaggaccuggagaaguacgucgaggacacgaagaucgaccuguggagcuacaacgccgagcuccugguggcccuggagaaccagcacaccaucgaccucaccgacuccgagaugaacaagcuguucgagaagaccaagaagcagcugcgcgagaacgcggaggacaugggcaacgggugcuucaagaucuaccacaagugcgacaacgccugcaucggcagcauccgcaacgggacguacgaccacuacguguaccgggacgaggcccucaacaaccgcuuccagaucaagggcgucgagcugaaguccggcuacaaggacuggauccuguggaucagcuucgccaucuccugcuuccuccugugcguggcccugcucggguucaucaugugggcgugccagaagggcaacauccggugcaacaucugcaucuga

SEQ ID NO: 74074 - RNA, 1701 nt, Artificial Sequence; identical to SEQ ID NO: 74072
  derived and/or modified CDS sequence (opt1) from hemagglutinin__InfluenzaA__AGL09799

SEQ ID NO: 74075 - RNA, 1701 nt, Artificial Sequence; identical to SEQ ID NO: 74018
  derived and/or modified CDS sequence (opt1) from hemagglutinin__InfluenzaA__AGL09800

SEQ ID NO: 74076 - RNA, 1701 nt, Artificial Sequence; identical to SEQ ID NO: 73882
  derived and/or modified CDS sequence (opt1) from hemagglutinin__InfluenzaA__AGL09801

SEQ ID NO: 74077 - RNA, 1701 nt, Artificial Sequence; identical to SEQ ID NO: 73882
  derived and/or modified CDS sequence (opt1) from hemagglutinin__InfluenzaA__AGL09802

SEQ ID NO: 74078 - RNA, 1701 nt, Artificial Sequence
  derived and/or modified CDS sequence (opt1) from hemagglutinin__InfluenzaA__AGL09803
augaagaccaucaucgcccugagcuacauccucugccugguguucgcccagaagcugcccggcaacgacaacuccaccgcgacgcucugccuggggcaccacgccgucccgaacggcaccaucgugaagaccaucaccaacgaccgcaucgaggugacgaacgccaccgagcugguccagaacagcuccaucggggagaucugcgacagcccccaccagauccucgacggcgagaacugcacccugaucgacgcccugcucggggacccccagugcgacggcuuccagaacaagaagugggaccuguucguggagcgguccaaggccuacagcaacugcuaccccuacgacgugccggacuacgcgucccugcgcagccucgucgccuccagcggcacccuggaguucaacaacgaguccuucaacuggacgggggugacccagaacggcaccagcuccgccugcauccggcgcagcaacuccagcuucuucucccggcugaacuggcucacccaccugaacuucaaguaccccgcccugaacgugacgaugcccaacaacgagcaguucgacaagcucuacaucuggggcguccaccaccccgggaccgacaaggaccagaucuuccuguacgcgcagagcuccgggcgcaucaccgugagcaccaagcggagccagcaggccgugaucccgaacaucggcucccgcccccggauccgcaacauccccagccggaucuccaucuacuggacgaucgucaagcccggcgacauccugcucaucaacagcaccgggaaccugaucgccccgcgcggcuacuucaagauccgguccggcaagagcuccaucaugcgcagcgacgcccccaucgggaagugcaaguccgagugcaucacccccaacggcagcauccccaacgacaagccguuccagaacgugaaccggaucaccuacggggccugcccccgcuacgugaagcagcggacgcugaagcucgcgaccggcaugcgcaacguccccgagaagcagacccgggggaucuucggcgccaucgccggguucaucgagaacggcugggagggcaugguggacgggugguacggcuuccgccaccagaacuccgaggggcggggccaggccgccgaccucaagagcacccaggcggccaucgaccagaucaacgggaagcugaaccgccugaucggcaagacgaacgagaaguuccaccagaucgagaaggaguucuccgagguggagggccgcauccaggaccuggagaaguacgucgaggacaccaagaucgaccuguggagcuacaacgccgagcuccugguggcccuggagaaccagcacaccaucgaccucaccgacuccgagaugaacaagcuguucgagaagacgaagaagcagcugcgggagaacgccgaggacauggggaacggcugcuucaagaucuaccacaagugcgacaacgcgugcaucgggagcauccgcaacggcaccuacgaccacgacguguaccgggacgaggcccucaacaaccgcuuccagaucaagggggucgagcugaaguccggcuacaaggacuggauccuguggaucagcuucgccaucuccugcuuccuccugugcguggcccugcucggcuucaucaugugggccugccagaaggggaacauccggugcaacaucugcaucuga

SEQ ID NO: 74079 - RNA, 1701 nt, Artificial Sequence; identical to SEQ ID NO: 73915
  derived and/or modified CDS sequence (opt1) from hemagglutinin__InfluenzaA__AGL09804

SEQ ID NO: 74080 - RNA, 1701 nt, Artificial Sequence; identical to SEQ ID NO: 74021
  derived and/or modified CDS sequence (opt1) from hemagglutinin__InfluenzaA__AGL09805

SEQ ID NO: 74081 - RNA, 1701 nt, Artificial Sequence; identical to SEQ ID NO: 74050
  derived and/or modified CDS sequence (opt1) from hemagglutinin__InfluenzaA__AGL09806

SEQ ID NO: 74082 - RNA, 1701 nt, Artificial Sequence; identical to SEQ ID NO: 74021
  derived and/or modified CDS sequence (opt1) from hemagglutinin__InfluenzaA__AGL09807

SEQ ID NO: 74083 - RNA, 1701 nt, Artificial Sequence
  derived and/or modified CDS sequence (opt1) from hemagglutinin__InfluenzaA__AGL09808
augaagaccaucaucgcccugagcuacauccucugccugguguucgcccagaagcugcccggcaacgacaacuccaccgcgacgcucugccuggggcaccacgccgucccgaacggcaccaucgugaagaccaucaccaacgaccagaucgaggugacgaacgccaccgagcugguccagaacagcuccaucggggagaucugcgacagcccccaccagauccucgacggcgagaacugcacccugaucgacgcccugcucggggacccccagugcgacggcuuccagaacaagaagugggaccuguucguggagcgcuccaaggccuacagcaacugcuaccccuacgacgugccggacuacgcgucccugcggagccucgucgccuccagcggcacccuggaguucaacaacgaguccuucaacugggccggggugacgcagaacggcaccagcuccgccugcauccgcgggagcaacuccagcuucuucucccggcugaacuggcucacccaccugaacuucaaguaccccgcgcugaacgugaccaugcccaacaacgagcaguucgacaagcucuacaucuggggcguccaccaccccgggacggacaaggaccagaucuuccuguacgcccagagcuccggccgcaucaccgugagcaccaagcggagccagcaggccgugaucccgaacgucggcucccgcccccggauccgcaacauccccagccggaucuccaucuacuggaccaucgugaagcccggggacauccugcucaucaacagcacgggcaaccugaucgccccgcgcggguacuucaagauccgguccggcaagagcuccaucaugcgcagcgacgcccccaucggcaagugcaaguccgagugcaucacccccaacgggagcauccccaacgacaagccguuccagaacgugaaccggaucaccuacggcgcgugcccccgcuacgucaagcaguccacccugaagcucgccacggggaugcggaacgugcccgagaagcagacccgcggcaucuucggggccaucgccggcuucaucgagaacggcugggaggggaugguggacggcugguacggguuccggcaccagaacagcgagggccgcgggcaggccgcggaccugaaguccacccaggccgccaucgaccagaucaacggcaagcugaaccggcucaucggcaagaccaacgagaaguuccaccagaucgagaaggaguucagcgaggucgaggggcgcauccaggaccuggagaaguacguggaggacacgaagaucgaccugugguccuacaacgccgagcuccugguggcccuggagaaccagcacaccaucgaccucaccgacagcgagaugaacaagcuguucgagaagaccaagaagcagcugcgggagaacgcggaggacaugggcaacgggugcuucaagaucuaccacaagugcgacaacgccugcaucggcuccauccgcaacgggacguacgaccacgacgucuaccgcgacgaggcccucaacaaccgguuccagaucaagggcguggagcucaagagcggcuacaaggacuggauccuguggaucuccuucgccaucagcugcuuccugcugugcguggcccugcucggguucaucaugugggcgugccagaagggcaacauccgcugcaacaucugcaucuga

SEQ ID NO: 74084 - RNA, 1701 nt, Artificial Sequence
  derived and/or modified CDS sequence (opt1) from hemagglutinin__InfluenzaA__AGL09809
augaaggccauccugguggucaugcucuacaccuucgccaccgcgaacgccgacacgcugugcaucggcuaccacgccaacaacagcaccgacaccguggacaccgugcuggagaagaacgucacggugacccacuccgugaaccuccuggaggacaagcacaacgggaagcugugcaagcuccgcggcgucgcgccccugcaccuggggaagugcaacaucgccggcuggauccucgggaacccggagugcgagagccuguccaccgccagcuccuggagcuacaucguggagaccuccggcagcgacaacggcacgugcuaccccggggacuucaucgacuacgaggagcugcgggagcagcucuccagcguguccagcuucgagcgcuucgagaucuuccccaagaccuccagcuggcccaaccacgacuccaacaagggcgucaccgccgccugcccgcacgccggggcgaagggcuucuacaagaaccugaucuggcuggugaagaaggggaacagcuaccccaagcucuccaucagcuacaucaacgacaagggcaaggaggugcugguccuguggggcauccaccaccccuccaccacggccgaccagcagagccucuaccagaacgccgacaccuacguguucguggggaccagccgguacuccaagaaguucaagcccgagaucgccauccgcccgaagguccgggaccaggagggccgcaugaacuacuacuggacccugguggagcccggggacaagaucacguucgaggccaccggcaaccugguggucccccgguacgcguucgccauggagcgcaacgccggcagcgggaucaucaucuccgacacccccgugcacgacugcaacaccacgugccagaccccgaagggcgccaucaacaccagccuccccuuccagaacauccaccccaucaccaucgggaagugccccaaguacgugaaguccacgaagcugcggcuggccaccggccuccgcaacgucccgagcauccagucccgggggcuguucggcgcgaucgccggcuucaucgagggcggguggaccgggaugguggacggcugguacggguaccaccaccagaacgagcagggcagcggcuacgccgccgaccugaaguccacccagaacgccaucgacaagaucacgaacaaggugaacagcgucaucgagaagaugaacacccaguucaccgcgguggggaaggaguucaaccaccucgagaagcgcaucgagaaccugaacaagaaggucgacgacggcuuccuggacaucuggaccuacaacgccgagcuccuggugcugcucgagaacgagcggacgcuggacuaccacgacuccaacgugaagaaccuguacgagaagguccgcaaccagcucaagaacaacgccaaggagaucgggaacggcugcuucgaguucuaccacaagugcgacaacacgugcauggagagcgugaagaacgggaccuacgacuaccccaaguacuccgaggaggccaagcugaaccgggaggagaucgacggcgugaagcuggagagcacccgcaucuaccagauccucgccaucuacuccaccgcggccagcucccugguccugguggugagccucggcgccaucuccuucuggaugugcagcaacgggagccugcagugccggaucugcaucuga

SEQ ID NO: 74085 - RNA, 1701 nt, Artificial Sequence
  derived and/or modified CDS sequence (opt1) from hemagglutinin__InfluenzaA__AGL09810
augaagaccaucaucgcccugagcuacauccucugccugguguucgcccagaagcugcccggcaacgacaacuccaccgcgacgcucugccuggggcaccacgccgucccgaacggcaccaucgugaagaccaucaccaacgaccgcaucgaggugacgaacgccaccgagcugguccagaacagcuccaucggggagaucugcgacagcccccaccagauccucgacggcgagaacugcacccugaucgacgcccugcucggggacccccagugcgacggcuuccagaacaagaagugggaccuguucguggagcgguccaaggccuacagcaacugcuaccccuacgacgugccggacuacgcgucccugcgcagccucgucgccuccagcggcacccuggaguucuccaacgagagcuucaacuggacgggggugacccagaacggcaccuccagcgccugcauccggcgcuccaacagcuccuucuucagccggcugaacuggcucacccaccugaacuucaaguaccccgcccugaacgugacgaugcccaacaacgagcaguucgacaagcucuacaucuggggcguccaccaccccgggaccgacaaggaccagaucuuccuguacgcgcaguccagcgggcgcaucaccgugagcaccaagcggucccagcaggccgugaucccgaacaucggcagccgcccccggauccgcaacauccccucccggaucagcaucuacuggacgaucgucaagcccggcgacauccugcucaucaacuccaccgggaaccugaucgccccgcgcggcuacuucaagauccggagcgggaaguccagcaucaugcgcuccgacgcccccaucggcaagugcaagagcgagugcaucacccccaacggcuccauccccaacgacaagccguuccagaacgugaaccggaucaccuacgggacgugcccccgcuacgugaagcagagcacccugaagcucgccaccggcaugcggaacguccccgagaagcagacccgcgggaucuucggcgcgaucgccggguucaucgagaacggcugggagggcaugguggacgggugguacggcuuccggcaccagaacuccgaggggcgcggccaggccgccgaccucaagagcacgcaggccgcgaucgaccagaucaacgggaagcugaaccggcugaucggcaagaccaacgagaaguuccaccagaucgagaaggaguucuccgagguggagggccgcauccaggaccuggagaaguacgucgaggacaccaagaucgaccuguggagcuacaacgccgagcuccugguggcccuggagaaccagcacaccaucgaccucacggacuccgagaugaacaagcuguucgagaagaccaagaagcagcugcgcgagaacgccgaggacauggggaacggcugcuucaagaucuaccacaagugcgacaacgccugcauggggagcauccggaacggcaccuacgaccacgacguguaccgcgacgaggcgcucaacaaccgguuccagaucaagggggucgagcugaaguccggcuacaaggacuggauccuguggaucagcuucgccaucagcugcuuccuccugugcguggcccugcucggcuucaucaugugggccugccagaaggggaacauccgcugcaacaucugcaucuga

SEQ ID NO: 74086 - RNA, 1701 nt, Artificial Sequence; identical to SEQ ID NO: 73882
  derived and/or modified CDS sequence (opt1) from hemagglutinin__InfluenzaA__AGL09811

SEQ ID NO: 74087 - RNA, 1701 nt, Artificial Sequence
  derived and/or modified CDS sequence (opt1) from hemagglutinin__InfluenzaA__AGL09812
augaagaccaucaucgcccugagcuacauccucugccugguguucgcccagaagcugcccggcaacgacaacuccaccgcgacgcucugccuggggcaccacgccgucccgaacggcaccaucgugaagaccaucaccaacgaccgcaucgaggugacgaacgccaccgagcugguccagaacagcuccaucggggagaucugcgacagcccccaccagauccucgacggcgagaacugcacccugaucgacgcccugcucggggacccccagugcgacggcuuccaggacaagaagugggaccuguucguggagcgguccaaggccuacagcaacugcuaccccuacgacgugccggacuacgcgucccugcgcagccucgucgccuccagcggcacccuggaguucaacaacgaguccuucaacugggccggggugacgcagaacggcaccagcuccgccugcauccgggggagcaacuccagcuucuucucccgccugaacuggcucacccaccugaacuucaaguaccccgcgcugaacgugaccaugcccaacaacgagcaguucgacaagcucuacaucuggggcguccaccaccccgggacggacaaggaccagaucuuccuguacgcccagagcuccggccggaucaccgugagcaccaagcgcagccagcaggccgugaucccgaacaucggcucccggccccgcauccggaacauccccagccgcaucuccaucuacuggaccaucgucaagcccggggacauccugcucaucaacagcacgggcaaccugaucgccccgcggggguacuucaagauccgcuccggcaagagcuccaucaugcggagcgacgcccccaucggcaagugcaaguccgagugcaucacccccaacgggagcauccccaacgacaagccguuccagaacgugaaccgcaucaccuacggcgcgugcccccgguacgugaagcaguccacccugaagcucgccacggggaugcgcaacguccccgagaagcagacccggggcaucuucggggccaucgccggcuucaucgagaacggcugggaggggaugguggacggcugguacggguuccgccaccagaacagcgagggccgggggcaggccgcggaccugaaguccacccaggccgccaucgaccagaucaacggcaagcugaaccgccucaucggcaagaccaacgagaaguuccaccagaucgagaaggaguucagcgagguggaggggcggauccaggaccuggagaaguacgucgaggacacgaagaucgaccugugguccuacaacgccgagcuccugguggcccuggagaaccagcacaccaucgaccucaccgacagcgagaugaacaagcuguucgagaagaccaagaagcagcugcgcgagaacgcggaggacaugggcaacgggugcuucaagaucuaccacaagugcgacaacgccugcaucggcuccauccgcaacgggacguacgaccacgacguguaccgggacgaggcccucaacaaccgcuuccagaucaagggcgucgagcucaagagcggcuacaaggacuggauccuguggaucuccuucgccaucagcugcuuccugcugugcguggcccugcucggguucaucaugugggcgugccagaagggcaacauccggugcaacaucugcaucuga

SEQ ID NO: 74088 - RNA, 1701 nt, Artificial Sequence; identical to SEQ ID NO: 73859
  derived and/or modified CDS sequence (opt1) from hemagglutinin__InfluenzaA__AGL09813

SEQ ID NO: 74089 - RNA, 1701 nt, Artificial Sequence; identical to SEQ ID NO: 73907
  derived and/or modified CDS sequence (opt1) from hemagglutinin__InfluenzaA__AGL09814

SEQ ID NO: 74090 - RNA, 1701 nt, Artificial Sequence
  derived and/or modified CDS sequence (opt1) from hemagglutinin__InfluenzaA__AGL09815
augaagaccaucaucgcccugagcuacauccucugccugguguucgcccagaagcugcccggcaacgacaacuccaccgcgacgcucugccuggggcaccacgccgucccgaacggcaccaucgugaagaccaucaccaacgaccgcaucgaggugacgaacgccaccgagcugguccagaacagcuccaucggggagaucugcgacagcccccaccagauccucgacggcgagaacugcacccugaucgacgcccugcucggggacccccagugcgacggcuuccagaacaagaagugggaccuguucguggagcgguccaaggccuacagcaacugcuaccccuacgacgugccggacuacgcgucccugcgcagccucgucgccuccagcggcacccuggaguucaacaacgaguccuucaacuggacgggggugacccagaacggcaccagcuccgccugcauccggcgcagcaacuccagcuucuucucccggcugaacuggcucacccaccugaacuucaaguaccccgcccugaacgugacgaugcccaacaacgagcaguucgacaagcucuacaucuggggcguccaccaccccgggaccgacaaggaccagaucuuccuguacgcgcagagcuccgggcgcaucaccgugagcaccaagcggagccagcaggccgugaucccgaacaucggcucccgcccccggauccgcagcauccccucccggaucagcaucuacuggacgaucgucaagcccggcgacauccugcucaucaacuccaccgggaaccugaucgccccgcgcggcuacuucaagauccggagcgggaaguccagcaucaugcgcuccgacgcccccaucggcaagugcaagagcgagugcaucacccccaacggcuccauccccaacgacaagccguuccagaacgugaaccggaucaccuacggggccugcccccgcuacgugaagcagagcacgcugaagcucgcgaccggcaugcggaacguccccgagaagcagacccgcgggaucuucggcgccaucgccggguucaucgagaacggcugggagggcaugguggacgggugguacggcuuccggcaccagaacuccgaggggcgcggccaggccgccgaccucaagagcacccaggcggccaucgaccagaucaacgggaagcugaaccggcugaucggcaagacgaacgagaaguuccaccagaucgagaaggaguucuccgagguggagggccgcauccaggaccuggagaaguacgucgaggacaccaagaucgaccuguggagcuacaacgccgagcuccugguggcccuggagaaccagcacaccaucgaccucaccgacuccgagaugaacaagcuguucgagaagacgaagaagcagcugcgcgagaacgccgaggacauggggaacggcugcuucaagaucuaccacaagugcgacaacgcgugcaucgggagcauccggaacggcaccuacgaccacgacguguaccgcgacgaggcccucaacaaccgguuccagaucaagggggucgagcugaaguccggcuacaaggacuggauccuguggaucagcuucgccaucagcugcuuccuccugugcguggcccugcucggcuucaucaugugggccugccagaaggggaacauccgcugcaacaucugcaucuga

SEQ ID NO: 74091 - RNA, 1701 nt, Artificial Sequence; identical to SEQ ID NO: 73907
  derived and/or modified CDS sequence (opt1) from hemagglutinin__InfluenzaA__AGL09816

SEQ ID NO: 74092 - RNA, 1701 nt, Artificial Sequence
  derived and/or modified CDS sequence (opt1) from hemagglutinin__InfluenzaA__AGL09817
augaagaccaucaucgcccugagcuacauccucugccugguguucgcccaggagcugcccggcaacgacgacuccaccgcgacgcucugccuggggcaccacgccgucccgaacggcaccaucgugaagaccaucaccaacgaccagaucgaggugacgaacgccaccgagcugguccagagcuccagcaccggggagaucugcaacagcccccaccagauccucgacggcgagaacugcacccugaucgacgcccugcucggggacccccagugcgacggcuuccagaacaagaagugggaccuguucguggagcgcagcaaggcccacuccaacugcuaccccuacgacgugccggacuacgcgagccugcggucccucgucgccagcuccggcacgcuggaguucaacagcgaguccuucaacuggaccggggugacccagaacggcaccagcuccgccugcauccgccggagcaacaacuccuucuucagccgccugaacuggcucacgcaccugaacuucaaguaccccgcccugaacgugaccaugcccaacaacgagcaguucgacaagcucuacaucuggggcguccaccaccccgggaccgacaaggaccagaucuuccuguacgcgcaggccuccgggcggaucaccgugagcacgaagcgcagccagcaggccgugaucccgaacaucggcucccggccccgcguccggaacauccccagccgcguguccaucuacuggaccaucgugaagcccggcgacauccugcucaucaacagcaccgggaaccugaucgccccgcggggcuacuucaagauccgcuccgggaaguccuccaucaugcggagcgacgcccccaucggcaagugcaacuccgcgugcaucacccccaacggcagcauccccaacgacaagccguuccagaacgucaaccgcaucacguacggggccugcccccgguacgugaagcagaacacccugaagcucgccaccggcaugcgcaacgugcccgagaagcagacccgggggaucuucggcgccaucgccggguucaucgagaacggcugggagggcauggucgacgggugguacggcuuccgccaccagaacuccgaggggcggggccaggcggccgaccucaagagcacgcaggccgccaucgaccagaucaacgggaagcugaaccgccugaucggcaagaccaacgagaaguuccaccagaucgagaaggaguucuccgagguggagggccggauccaggaccuggagaaguacguggaggacaccaagaucgaccuguggagcuacaacgccgagcuccuggucgcgcuggagaaccagcacaccaucgaccucacggacuccgagaugaacaagcuguucgagaagaccaagaagcagcugcgcgagaacgccgaggacauggggaacggcugcuucaagaucuaccacaagugcgacaacgccugcaucgggagcauccgcaacggcaccuacgaccacgacguguaccgggacgaggcccucaacaaccgcuuccagaucaaggggguggagcugaaguccggcuacaaggacuggauccuguggaucagcuucgccaucuccugcuuccuccugugcgucgcgcugcucggcuucaucaugugggccugccagaaggggaacauccggugcaacaucugcaucuga

SEQ ID NO: 74093 - RNA, 1701 nt, Artificial Sequence; identical to SEQ ID NO: 73907
  derived and/or modified CDS sequence (opt1) from hemagglutinin__InfluenzaA__AGL09818

SEQ ID NO: 74094 - RNA, 1701 nt, Artificial Sequence; identical to SEQ ID NO: 74018
  derived and/or modified CDS sequence (opt1) from hemagglutinin__InfluenzaA__AGL09819

SEQ ID NO: 74095 - RNA, 1701 nt, Artificial Sequence
  derived and/or modified CDS sequence (opt1) from hemagglutinin__InfluenzaA__AGL09820
augaagaccaucaucgcccugagcuacauccucugccugguguucgcccagaagcugcccggcaacgacaacuccaccgcgacgcucugccuggggcaccacgccgucccgaacggcaccaucgugaagaccaucaccaacgaccagaucgaggugacgaacgccaccgagcugguccagaacagcuccaucggggagaucugcgacagcccccaccagauccucgacggcgagaacugcacccugaucgacgcccugcucggggacccccagugcgacggcuuccagaacaagaagugggaccuguucguggagcgcuccaaggccuacagcaacugcuaccccuacgacgugccggacuacgcgucccugcggagccucgucgccuccagcggcacccuggaguucaacaacgaguccuucaacuggacgggggugacccagaacggcaccagcuccgccugcauccgcgggagcaacuccagcuucuucucccggcugaacuggcucacccaccugaacuucaaguaccccgcccugaacgugacgaugcccaacaacgagcaguucgacaagcucuacaucuggggcguccaccaccccgggaccgacaaggaccagaucuuccuguacgcgcagagcuccggccgcaucaccgugagcaccaagcggagccagcaggccgugaucccgaacaucggcucccgcccccggauccgcaacauccccagccggaucuccaucuacuggacgaucgucaagcccggggacauccugcucaucaacagcaccggcaaccugaucgccccgcgcggguacuucaagauccgguccggcaagagcuccaucaugcgcagcgacgcccccaucggcaagugcaaguccgagugcaucacccccaacgggagcauccccaacgacaagccguuccagaacgugaaccggaucaccuacggcgccugcccccgcuacgugaagcaguccacgcugaagcucgcgaccgggaugcggaacguccccgagaagcagacccgcggcaucuucggggccaucgccggcuucaucgagaacggcugggaggggaugguggacggcugguacggguuccggcaccagaacagcgagggccgcgggcaggccgccgaccugaaguccacccaggcggccaucgaccagaucaacggcaagcugaaccggcucaucggcaagacgaacgagaaguuccaccagaucgagaaggaguucagcgagaucgaggggcgcauccaggaccuggagaaguacguggaggacaccaagaucgaccugugguccuacaacgccgagcuccuggucgcccuggagaaccagcacaccaucgaccucaccgacagcgagaugaacaagcuguucgagaagacgaagaagcagcugcgggagaacgccgaggacaugggcaacgggugcuucaagaucuaccacaagugcgacaacgcgugcaucggcuccauccgcaacgggaccuacgaccacgacguguaccgcgacgaggcccucaacaaccgguuccagaucaagggcguggagcucaagagcggcuacaaggacuggauccuguggaucuccuucgccaucagcugcuuccugcugugcgucgcccugcucggguucaucaugugggccugccagaagggcaacauccgcugcaacaucugcaucuga

SEQ ID NO: 74096 - RNA, 1701 nt, Artificial Sequence
  derived and/or modified CDS sequence (opt1) from hemagglutinin__InfluenzaA__AGL09821
augaagaccaucaucgcccugagcuacauccucugccugguguucgcccagaagcugcccggcaacgacaacuccaccgcgacgcucugccuggggcaccacgccgucccgaacggcaccaucgugaagaccaucaccaacgaccgcaucgaggugacgaacgccaccgagcugguccagaacagcuccaucggggagaucugcgacagcccccaccagauccucgacggcgagaacugcacccugaucgacgcccugcucggggacccccagugcgacggcuuccagaacaagaagugggaccuguucguggagcgguccaaggccuacagcaacugcuaccccuacgacgugccggacuacgcgucccugcgcagccucgucgccuccagcggcacccuggaguucaacaacgaguccuucaacuggacgggggugacccagaacggcaccagcuccgccugcauccggcgcagcaacuccagcuucuucucccggcugaacuggcucacccaccugaacuucaaguaccccgcccugaacgugacgaugcccaacaacgagcaguucgacaagcucuacaucuggggcguccaccaccccgggaccgacaaggaccagaucuuccuguacgcgcagagcuccgggcgcaucaccgugagcaccaagcggagccagcaggccgugaucccgaacaucggcucccgcccccggauccgcaacauccccagccggaucuccaucuacuggacgaucgucaagcccggcgacauccugcucaucaacagcaccgggaaccugaucgccccgcgcggcuacuucaagauccgguccggcaagagcuccaucaugcgcagcgacgcccccaucgggaagugcaaguccgagugcaucacccccaacggcagcauccccaacgacaagccguuccagaacgugaaccggaucaccuacggggccugcccccgcuacgugaagcaguccacgcugaagcucgcgaccggcaugcggaacguccccgagaagcagacccgcgggaucuucggcgccaucgccggguucaucgagaacggcugggagggcaugguggacgggugguacggcuuccggcaccagaacagcgaggggcgcggccaggccgccgaccugaaguccacccaggcggccaucgaccagaucaacgggaagcugaaccggcucaucggcaagacgaacgagaaguuccaccagaucgagaaggaguucagcgagguggagggccgcauccaggaccuggagaaguacgucgaggacaccaagaucgaccugugguccuacaacgccgagcuccugguggcccuggagaaccagcacaccaucgaccucaccgacagcgagaugaacaagcuguucgagaagacgaagaagcagcugcgcgagaacgccgaggacauggggaacggcugcuucaagaucuaccacaagugcgacaacgcgugcaucggguccauccggaacggcaccuacgaccacaacguguaccgcgacgaggcccucaacaaccgguuccagaucaaggggaucgagcucaagagcggcuacaaggacuggauccuguggaucuccuucgccaucagcugcuuccugcugugcgucgcccugcucggcuucaucaugugggccugccagaaggggaacauccgcugcaacaucugcaucuga

SEQ ID NO: 74097 - RNA, 1701 nt, Artificial Sequence; identical to SEQ ID NO: 74021
  derived and/or modified CDS sequence (opt1) from hemagglutinin__InfluenzaA__AGL09822

SEQ ID NO: 74098 - RNA, 1701 nt, Artificial Sequence; identical to SEQ ID NO: 74064
  derived and/or modified CDS sequence (opt1) from hemagglutinin__InfluenzaA__AGL09823

SEQ ID NO: 74099 - RNA, 1701 nt, Artificial Sequence
  derived and/or modified CDS sequence (opt1) from hemagglutinin__InfluenzaA__AGL09824
augaaggccauccuggugguccuccuguacaccuucgccaccgcgaacgccgacacgcugugcaucggcuaccacgccaacaacagcaccgacaccguggacaccgugcucgagaagaacgucacggugacccacuccgugaaccugcuggaggacaagcacaacgggaagcucugcaagcugcgcggcgucgcgccccugcaccucgggaagugcaacaucgccggcuggauccuggggaacccggagugcgagagccuguccaccgccagcuccuggagcuacaucguggagaccuccagcuccgacaacggcacgugcuaccccggcgacuucaucaacuacgaggagcuccgggagcagcugagcuccgugagcuccuucgagcgcuucgagaucuuccccaagaccagcuccuggcccaaccacgacagcaacaagggggucaccgccgccugcccgcacgccggcaccaaguccuucuacaagaaccugaucuggcucgugaagaaggggaacagcuaccccaagcuguccaagagcuacaucaacgacaagggcaaggaggugcugguccucugggggauccaccaccccagcacgaccgcggaccagcagucccuguaccagaacgccgacgccuacguguucgugggcaccagccgguacuccaagaaguucaagcccgagaucgccauccgcccgaagguccgggaccaggagggccgcaugaacuacuacuggacccugaucgagcccggggacaagaucacguucgaggccaccggcaaccucguggugccccgguacgcguucgccauggagcgcaacgccgggagcggcaucaucaucuccgacacccccguccacgacugcaacaccacgugccagaccccggagggcgccaucaacaccagccugcccuuccagaacauccaccccaucaccaucgggaagugccccaaguacgugaaguccacgaagcugcggcucgccaccggccugcgcaacgugccgagcauccagucccgggggcuguucggcgcgaucgccggguucaucgagggcggcuggaccgggauggucgacggcugguacggguaccaccaccagaacgagcagggcagcggguacgccgccgaccucaaguccacccagaacgccaucgacaagaucacgaacaaggugaacagcgugaucgagaagaugaacacccaguucaccgcggucggcaaggaguucaaccaccuggagaagcgcaucgagaaccugaacaagaagguggacgacggcuuccucgacaucuggaccuacaacgccgagcugcugguccuccuggagaacgagcggacgcuggacuaccacgacuccaacgugaagaaccucuacgagaaggugcgcaaccagcugaagaacaacgccaaggagaucgggaacggcugcuucgaguucuaccacaagugcgacaacacgugcauggagagcgucaagaacgggaccuacgacuaccccaaguacuccgaggaggccaagcugaaccgggagaagaucgacggcgugaagcucgagagcacccgcaucuaccagauccuggccaucuacuccaccguggcgagcucccugguccucguggugagccugggggccaucagcuucuggaugugcuccaacggcagccugcagugccggaucugcaucuga

SEQ ID NO: 74100 - RNA, 1701 nt, Artificial Sequence; identical to SEQ ID NO: 74018
  derived and/or modified CDS sequence (opt1) from hemagglutinin__InfluenzaA__AGL09825

SEQ ID NO: 74101 - RNA, 1701 nt, Artificial Sequence; identical to SEQ ID NO: 74099
  derived and/or modified CDS sequence (opt1) from hemagglutinin__InfluenzaA__AGL09826

SEQ ID NO: 74102 - RNA, 1701 nt, Artificial Sequence; identical to SEQ ID NO: 73892
  derived and/or modified CDS sequence (opt1) from hemagglutinin__InfluenzaA__AGL09827

SEQ ID NO: 74103 - RNA, 1701 nt, Artificial Sequence
  derived and/or modified CDS sequence (opt1) from hemagglutinin__InfluenzaA__AGL09828
augaagaccaucaucgcccugagcuacauccucugccugguguucgcccagaagcugcccggcaacgacaacuccaccgcgacgcucugccuggggcaccacgccgucccgaacggcaccaucgugaagaccaucaccaacgaccagaucgaggugacgaacgccaccgagcugguccagaacagcuccaucggggagaucugcgacagcccccaccagauccucgacggcgagaacugcacccugaucgacgcccugcucggggacccccagugcgacggcuuccagaacaagaagugggaccuguucguggagcgcuccaaggccuacagcaacugcuaccccuacgacgugccggacuacgcgucccugcggagccucgucgccuccagcggcacccuggaguucaacaacgaguccuucaacugggccggggugacgcagaacggcaccagcuccgccugcauccgcgggagcaacuccagcuucuucucccggcugaacuggcucacccaccugaacuucaaguaccccgcgcugaacgugaccaugcccaacaacgagcaguucgacaagcucuacaucuggggcguccaccaccccgggacggacaaggaccagaucuuccuguacgcccagagcuccggccgcaucaccgugagcaccaagcggagccagcaggccgugaucccgaacaucggcucccgcccccggauccgcaacauccccagccggaucuccaucuacuggaccaucgucaagcccggggacauccugcucaucaacagcacgggcaaccugaucgccccgcgcggguacuucaagauccgguccggcaagagcuccaucaugcgcagcgacgcccccaucggcaagugcaaguccgagugcaucacccccaacgggagcauccccaacgacaagccguuccagaacgugaaccggaucaccuacggcgcgugcccccgcuacgugaagcaguccacccugaagcucgccacggggaugcggaacguccccgagaagcagacccgcggcaucuucggggccaucgccggcuucaucgagaacggcugggaggggaugguggacggcugguacggguaccggcaccagaacagcgagggccgcgggcaggccgcggaccugaaguccacccaggccgccaucgaccagaucaacggcaagcugaaccggcucaucggcaagaccaacgagaaguuccaccagaucgagaaggaguucagcgagguggaggggcgcauccaggaccuggagaaguacgucgaggacacgaagaucgaccugugguccuacaacgccgagcuccugguggcccuggagaaccagcacaccaucgaccucaccgacagcgagaugaacaagcuguucgagaagaccaagaagcagcugcgggagaacgcggaggacaugggcaacgggugcuucaagaucuaccacaagugcgacaacgccugcaucggcuccauccgcaacgggacguacgaccacgacguguaccgcgacgaggcccucaacaaccgguuccagaucaagggcgucgagcucaagagcggcuacaaggacuggauccuguggaucuccuucgccaucagcugcuuccugcugugcguggcccugcucggguucaucaugugggcgugccagaagggcaacauccgcugcaacaucugcaucuga

SEQ ID NO: 74104 - RNA, 1701 nt, Artificial Sequence
  derived and/or modified CDS sequence (opt1) from hemagglutinin__InfluenzaA__AGL09829
augaagaccaucaucgcccugagcuacauccucugccugguguucgcccagaagcugcccggcaacgacaacuccaccgcgacgcucugccuggggcaccacgccgucccgaacggcaccaucgugaagaccaucaccaacgaccgcaucgaggugacgaacgccaccgagcugguccagaacagcuccaucggggagaucugcgacagcccccaccagauccucgacggcgagaacugcacccugaucgacgcccugcucggggacccccagugcgacggcuuccagaacaagaagugggaccuguucguggagcgguccaaggccuacagcaacugcuaccccuacgacgugccggacuacgcgucccugcgcagccucgucgccuccagcggcacccuggaguucaacaacgaguccuucaacugggccggggugacgcagaacggcaccagcuccgccugcauccgggggagcaacuccagcuucuucucccgccugaacuggcucacccaccugaacuucaaguaccccgcgcugaacgugaccaugcccaacaacgagcaguucgacaagcucuacaucuggggcguccaccaccccgggacggacaaggaccagaucuuccuguacgcccagagcuccggccggaucaccgugagcaccaagcgcagccagcaggccgugaucccgaacaucggcucccggccccgcauccggaacauccccagccgcaucuccaucuacuggaccaucgucaagcccggggacauccugcucaucaacagcacgggcaaccugaucgccccgcggggguacuucaagauccgcuccggcaagagcuccaucaugcggagcgacgcccccaucggcaagugcaaguccgagugcaucacccccaacgggagcauccccaacgacaagccguuccagaacgugaaccgcaucaccuacggcgcgugcccccgguacgugaagcaguccacccugaagcucgccacggggaugcgcaacguccccgagaagcagacccggggcaucuucggggccaucgccggcuucaucgagaacggcugggaggggaugguggacggcugguacggguuccgccaccagaacagcgagggccgggggcaggccgcggaccuggaguccacccaggccgccaucgaccagaucaacggcaagcugaaccgccucaucggcaagaccaacgagaaguuccaccagaucgagaaggaguucagcgagguggaggggcggauccaggaccuggagaaguacgucgaggacacgaagaucgaccugugguccuacaacgccgagcuccugguggcccuggagaaccagcacaccaucgaccucaccgacagcgagaugaacaagcuguucgagaagaccaagaagcagcugcgcgagaacgcggaggacaugggcaacgggugcuucaagaucuaccacaagugcgacaacgccugcaucggcuccauccgcaacgggacguacgaccacgacguguaccgggacgaggcccucaacaaccgcuuccagaucaagggcgucgagcucaagagcggcuacaaggacuggauccuguggaucuccuucgccaucagcugcuuccugcugugcguggcccugcucggguucaucaugugggcgugccagaagggcaacauccggugcaacaucugcaucuga

SEQ ID NO: 74105 - RNA, 1701 nt, Artificial Sequence; identical to SEQ ID NO: 73907
  derived and/or modified CDS sequence (opt1) from hemagglutinin__InfluenzaA__AGL09830

SEQ ID NO: 74106 - RNA, 1701 nt, Artificial Sequence; identical to SEQ ID NO: 74017
  derived and/or modified CDS sequence (opt1) from hemagglutinin__InfluenzaA__AGL09831

SEQ ID NO: 74107 - RNA, 1701 nt, Artificial Sequence
  derived and/or modified CDS sequence (opt1) from hemagglutinin__InfluenzaA__AGL09832
augaagaccaucaucgcccugagcuacauccucugccugguguucgcccagaagcugcccggcaacgacaacuccaccgcgacgcucugccuggggcaccacgccgucccgaacggcaccaucgugaagaccaucaccaacgaccgcaucgaggugacgaacgccaccgagcugguccagaacagcuccaucggggagaucugcgacagcccccaccagauccucgacggcgagaacugcacccugaucgacgcccugcucggggacccccagugcgacggcuuccagaacaagaagugggaccuguucguggagcgguccaaggccuacagcaacugcuaccccuacgacgugccggacuacgcgucccugcgcagccucgucgccuccagcggcacccuggaguucaacaacgaguccuucaacuggacgggggugacccagaacggcaccagcuccgccugcauccggcgcagcaacuccagcuucuucucccggcugaacuggcucacccacagcaacuucaaguaccccgcccugaacgugacgaugcccaacaacgagcaguucgacaagcuguacaucuggggcguccaccaccccgggaccgacaaggaccagaucuuccucuacgcgcaguccagcgggcgcaucaccgugagcaccaagcggucccagcaggccgugaucccgaacaucggcagccgcccccggauccgcaacauccccucccggaucagcaucuacuggacgaucgucaagcccggcgacauccugcugaucaacuccaccgggaaccucaucgccccgcgcggcuacuucaagauccggagcgggaaguccagcaucaugcgcuccgacgcccccaucggcaagugcaagagcgagugcaucacccccaacggcuccauccccaacgacaagccguuccagaacgugaaccggaucaccuacggggccugcccccgcuacgugaagcagagcacgcugaagcuggcgaccggcaugcggaacguccccgagaagcagacccgcgggaucuucggcgccaucgccggguucaucgagaacggcugggagggcaugguggacgggugguacggcuuccggcaccagaacuccgaggggcgcggccaggccgccgaccucaagagcacccaggcggccaucgaccagaucaacgggaagcugaaccggcugaucggcaagacgaacgagaaguuccaccagaucgagaaggaguucuccgagguggagggccgcauccaggaccucgagaaguacgucgaggacaccaagaucgaccuguggagcuacaacgccgagcugcucguggcccuggagaaccagcacaccaucgaccugaccgacuccgagaugaacaagcuguucgagaagacgaagaagcagcuccgcgagaacgccgaggacauggggaacggcugcuucaagaucuaccacaagugcgacaacgcgugcaucgggaccauccggaacggcaccuacgaccacaacguguaccgcgacgaggcccugaacaaccgguuccagaucaagggggucgagcucaagagcggcuacaaggacuggauccuguggaucuccuucgccaucagcugcuuccugcucugcguggcccugcugggcuucaucaugugggccugccagaaggggaacauccgcugcaacaucugcaucuga

SEQ ID NO: 74108 - RNA, 1701 nt, Artificial Sequence; identical to SEQ ID NO: 74018
  derived and/or modified CDS sequence (opt1) from hemagglutinin__InfluenzaA__AGL09833

SEQ ID NO: 74109 - RNA, 1701 nt, Artificial Sequence
  derived and/or modified CDS sequence (opt1) from hemagglutinin__InfluenzaA__AGL09881
augaagaccaucaucgcccugagcuacauccucugccugguguucgcccagaagcugcccggcaacgacaacuccaccgcgacgcucugccuggggcaccacgccgucccgaacggcaccaucgugaagaccaucaccaacgaccgcaucgaggugacgaacgccaccgagcugguccagaacagcuccaucggggagaucugcgacagcccccaccagauccucgacggcgagaacugcacccugaucgacgcccugcucggggacccccagugcgacggcuuccagaacaagaagugggaccuguucguggagcgguccaaggccuacagcaacugcuaccccuacgacgugccggacuacgcgucccugcgcagccucgucgccuccagcggcacccuggaguucaacaacgaguccuucaacugggccggggugacgcagaacggcgccagcuccgcgugcauccgggggagcaacuccagcuucuucucccgccugaacuggcucacccaccugaacuucaaguaccccgcccugaacgugaccaugcccaacaacgagcaguucgacaagcucuacaucuggggcguccaccaccccgggaccgacaaggaccagaucuuccuguacgcccagagcuccggccggaucacggugagcaccaagcgcagccagcaggccgugaucccgaacaucggcucccggccccgcauccggaacauccccagccgcaucuccaucuacuggaccaucgucaagcccggggacauccugcucaucaacagcaccggcaaccugaucgccccgcggggguacuucaagauccgcuccggcaagagcuccaucaugcggagcgacgcgcccaucggcaagugcaaguccgagugcaucacgcccaacgggagcauccccaacgacaagccguuccagaacgugaaccgcaucaccuacggcgccugcccccgguacgugaagcaguccacccugaagcucgccaccgggaugcgcaacguccccgagaagcagacgcggggcaucuucggggccaucgccggcuucaucgagaacggcugggaggggaugguggacggcugguacggguuccgccaccagaacagcgagggccgggggcaggcggccgaccugaaguccacccaggccgccaucgaccagaucaacggcaagcugaaccgccucaucggcaagaccaacgagaaguuccaccagaucgagaaggaguucagcgagguggaggggcggauccaggaccuggagaaguacgucgaggacaccaagaucgaccugugguccuacaacgccgagcuccugguggcgcuggagaaccagcacacgaucgaccucaccgacagcgagaugaacaagcuguucgagaagaccaagaagcagcugcgcgagaacgccgaggacaugggcaacgggugcuucaagaucuaccacaagugcgacaacgccugcaucggcuccauccgcaacgggaccuacgaccacgacguguaccgggacgaggcccucaacaaccgcuuccagaucaagggcgucgagcucaagagcggcuacaaggacuggauccuguggaucuccuucgccaucagcugcuuccugcugugcguggcgcugcucggguucaucaugugggccugccagaagggcaacauccggugcaacaucugcaucuga

SEQ ID NO: 74110 - RNA, 1701 nt, Artificial Sequence; identical to SEQ ID NO: 73882
  derived and/or modified CDS sequence (opt1) from hemagglutinin__InfluenzaA__AGL09882

SEQ ID NO: 74111 - RNA, 1701 nt, Artificial Sequence; identical to SEQ ID NO: 73859
  derived and/or modified CDS sequence (opt1) from hemagglutinin__InfluenzaA__AGL09883

SEQ ID NO: 74112 - RNA, 1701 nt, Artificial Sequence; identical to SEQ ID NO: 73859
  derived and/or modified CDS sequence (opt1) from hemagglutinin__InfluenzaA__AGL09884

SEQ ID NO: 74113 - RNA, 1683 nt, Artificial Sequence; identical to SEQ ID NO: 74012
  derived and/or modified CDS sequence (opt1) from hemagglutinin__InfluenzaA__AGL44438

SEQ ID NO: 74114 - RNA, 1701 nt, Artificial Sequence
  derived and/or modified CDS sequence (opt1) from hemagglutinin__InfluenzaA__AGN69267
augaaggccauccuggugguccuccuguacaccuucaccacgggcaacgccgacacccugugcaucggguaccacgcgaacaacagcaccgacaccguggacacggugcucgagaagaacgucaccgugacccacuccgugaaccugcuggaggaccgccacaacggcaagcucugcaagcugcgcggggucgcgccccugcaccucggcaagugcaacaucgccggguggcugcugggcaacccggagugcgagcuccuguucaccgccagcuccuggagcuacaucguggagacguccaacagcgacaacgggaccugcuaccccggggacuucaucaacuacgaggagcugcgggagcagcucuccagcguguccagcuucgagcgguucgagaucuuccccaaggccuccagcuggcccaaccacgagaccaaccgcggcgucaccgccgccugcccguacgccggggccaacuccuucuaccggaaccugaucuggcuggugaagaagggcaacagcuaccccaagcucuccaagagcuacaucaacaacaaggagaaggaggugcugguccugugggggauccaccacccgcccacguccaccgaccagcagagccucuaccagaacgcggacgccuacguguucgugggcuccagcaaguacagcaagaaguucaagcccgagaucgccacccgccccaagguccggggccaggccgggcgcaugaacuacuacuggacccugguggagcccggcgacacgaucaccuucgaggccaccgggaaccugguggucccccgguacgcguucgccaugaagcgcggcuccggcagcgggaucaucaucuccgacaccccggugcacgacugcaacacgaccugccagacccccaagggcgccaucaacaccagccuccccuuccagaacauccaccccgugacgaucggggagugcccgaaguacgucaaguccaccaagcugcggauggccaccggccugcgcaacauccccagcauccagucccggggccucuucggcgccaucgcgggcuucaucgagggcggguggaccgggaugaucgacggcugguacggguaccaccaccagaacgagcagggcagcggcuacgccgccgaccgcaaguccacgcagaacgccaucgacgggaucaccaacaaggugaacagcgugaucgagaagaugaacacccaguucaccgccgucggcaaggaguucaaccaccuggagaagcggaucgagaaccugaacaagaagguggacgacgggcuccuggacgucuggacguacaacgcggagcugcucgugcugcuggagaacgagcgcacccucgacuaccacgacuccaacgugaagaaccuguacgagaagguccggagccagcugaagaacaacgccaaggagaucggcaacgggugcuucgaguucuaccacaagugcgacgacacgugcauggaguccgugaagaacggcaccuacgacuaccccaaguacagcgaggaggccaagcucaaccgcgaggagaucgacggcgugaagcuggaguccacccggaucuaccagauccuggccaucuacagcaccgucgccuccagccucgugcugcuggugucccucggggcgaucagcuucuggaugugcagcaacggcucccugcagugccgcaucugcaucuga

SEQ ID NO: 74115 - RNA, 1701 nt, Artificial Sequence
  derived and/or modified CDS sequence (opt1) from hemagglutinin__InfluenzaA__AGN69278
augaaggccauccuggugguccuccuguacaccuucaccacggccaacgcggacacccugugcaucggcuaccacgccaacaacagcaccgacaccguggacacggugcucgagaagaacgucaccgugacccacuccgugaaccugcuggaggaccgccacaacgggaagcucugcaagcugcggggcgucgcgccccugcaccucgggaagugcaacaucgccggcuggcugcuggggaacccggagugcgagcuccuguucaccgccagcuccuggagcuacaucguggagacguccaacagcgacaacgggaccugcuaccccggcgacuucaucaacuacgaggagcugcgcgagcagcucuccagcguguccagcuucgagcgguucgagaucuuccccaaggccuccagcuggcccaaccacgagccgaaccgcggcgucaccgccgccugccccuacgccggcgcgaacuccuucuaccggaaccugaucuggcuggugaagaaggggaacagcuaccccaagcucuccaagagcuacaucaacaacaaggagaaggaggugcugguccuguggggcauccaccacccgcccaccuccacggaccagcagagccucuaccagaacgccgacgccuacguguucgugggguccagcaaguacaacaagaaguucaagcccgagaucgccacccgccccaagguccggggccaggccggccgcaugaacuacuacuggacccugguggagcccggggacaccaucacguucgaggcgaccggcaaccugguggucccgcgguacgccuucgccaugaagcgcgggagcggcuccggcaucaucaucagcgacacccccgugcacgacugcaacaccacgugccagacccccaagggggccaucaacaccucccuccccuuccagaacauccacccggugaccaucggcgagugccccaaguacgucaagagcacgaagcugcggauggccaccgggcugcgcaacauccccuccauccagagccggggccucuucggggcgaucgccggcuucaucgagggcggguggaccggcaugaucgacgggugguacggcuaccaccaccagaacgagcagggguccggcuacgccgccgaccgcaagagcacccagaacgccaucgacggcaucacgaacaaggugaacuccgugaucgagaagaugaacacccaguucaccgcggucgggaaggaguucaaccaccuggagaagcggaucgagaaccugaacaagaagguggacgacggccuccuggacgucuggaccuacaacgccgagcugcucgugcugcuggagaacgagcgcacgcucgacuaccacgacagcaacgugaagaaccuguacgagaagguccggucccagcugaagaacaacgccaaggagaucgggaacggcugcuucgaguucuaccacaagugcgacgacacgugcauggagagcgugaagaacgggaccuacgacuaccccaaguacuccgaggaggccaagcucaaccgcgaggagaucgacggcgugaagcuggagagcacccggaucuaccagauccuggccaucuacuccaccgucgcgagcucccucgugcugcuggugagccucggcgccaucuccuucuggaugugcagcaacgggagccugcagugccgcaucugcaucuga

SEQ ID NO: 74116 - RNA, 1701 nt, Artificial Sequence
  derived and/or modified CDS sequence (opt1) from hemagglutinin__InfluenzaA__AGN69302
auggaggccaagcuguucguccucuucugcgccuucaccgcgcugaaggccgacaccaucugcgugggcuaccacgccaacaacagcacggacaccguggacaccauccuggagaagaacgugaccgucacgcacuccgugaaccuccuggagaacagccacaacgggaagcugugcucccucaacggcaagaucccccugcagcuggggaacugcaacguggccggcuggauccucgggaacccgaagugcgaccugcugcucaccgccaacagcugguccuacaucaucgagaccagcaacuccaaggacggcgcgugcuaccccggcgaguucgccgacuacgaggagcugaaggagcagcugagcaccgucuccagcuucgagcgcuucgagaucuuccccaaggccacguccuggcccaaccacgacaccacccgggggaccacgguggccugcagccacuccggcgcgaacagcuucuaccgcaaccuccuguggaucgugaagaaggggaacuccuacccgaagcugagcaaguccuacaccaacaacaagggcaaggagguccucgugaucuggggcgugcaccacccgcccaccgacagcgaccagcagacccuguaccagaacaaccacacguacgucuccguggggagcagcaaguacuacaagcgguucacccccgagaucguggcccgccccaagguccgggagcaggccggccgcaugaacuacuacuggacccugcucgaccagggggacaccaucacguucgaggccaccggcaaccugaucgcccccuggcacgcguucgcccugaagaagggguccagcuccggcaucaugaugagcgacgcccaggugcacaacugcaccaccaagugccagacgccccacggcgcccucaaggggaaccugcccuuccagaacgugcacccggucaccaucggcgagugccccaaguacgugaaguccacccagcugcggauggccaccgggcuccgcaacauccccagcauccagucccggggccuguucggggcgaucgccggcuucaucgagggcggguggacgggcaugguggacgggugguacggcuaccaccaccagaacgagcaggggagcggcuacgccgccgaccagaaguccacccagaucgccaucgacggcaucagcaacaaggucaacuccgugaucgagaagaugaacauccaguucaccagcguggggaaggaguucaacucccuggagaagcgcauggagaaccucaacaagaaggucgacgacggcuuccuggacguguggaccuacaacgcggagcugcucauccugcuggagaacgagcggacgcucgacuuccacgaccugaacgucaagaaccuguacgagaaggucaagagccagcuccgcaacaacgccaaggagaucgggaacggcugcuucgaguucuaccacaagugcgacaacgagugcauggaguccgugaagaacgggaccuacaacuaccccaaguacagcgaggaguccaagcugaaccgggaggagaucgacggcgugaagcuggagagcaugggcauccaccagauccucgccaucuacuccaccguggccagcagccuggugcugcucgucucccugggggccaucagcuucuggaugugcuccaacggcagccugcagugccgcgugugcaucuga

SEQ ID NO: 74117 - RNA, 1701 nt, Artificial Sequence; identical to SEQ ID NO: 74116
  derived and/or modified CDS sequence (opt1) from hemagglutinin__InfluenzaA__AGN69314

SEQ ID NO: 74118 - RNA, 1701 nt, Artificial Sequence; identical to SEQ ID NO: 74116
  derived and/or modified CDS sequence (opt1) from hemagglutinin__InfluenzaA__AGN69326

SEQ ID NO: 74119 - RNA, 1701 nt, Artificial Sequence
  derived and/or modified CDS sequence (opt1) from hemagglutinin__InfluenzaA__AGN69338
auggaggccaagcuguucguccucuucugcgccuucaccgcgcugaaggccgacaccaucugcgugggcuaccacgccaacaacagcacggacaccguggacaccauccuggagaagaacgugaccgucacgcacuccgugaaccuccuggagaacagccacaacgggaagcugugcucccucaacggcaagaucccccugcagcuggggaacugcaacguggccggcuggauccucgggaacccgaagugcgaccugcugcucaccgccaacagcugguccuacaucaucgagaccagcaacuccaagaacggcgcgugcuaccccggcgaguucgccgacuacgaggagcugaaggagcagcugagcaccgucuccagcuucgagcgcuucgagaucuuccccaaggccacguccuggcccaaccacgacaccacccgggggaccacgguggccugcagccacuccggcgcgaacagcuucuaccgcaaccuccuguggaucgugaagaaggggaacuccuacccgaagcugagcaaguccuacaccaacaacaagggcaaggagguccucgugaucuggggcgugcaccacccgcccaccgacagcgaccagcagacccuguaccagaacaaccacacguacgucuccguggggagcagcaaguacuacaagcgguucacccccgagaucguggcccgccccaagguccgggagcaggccggccgcaugaacuacuacuggacccugcuccaccagggggacaccaucacguucgaggccaccggcaaccugaucgcccccuggcacgcguucgcccugaacgagggguccagcuccggcaucaugcggagcgacgcccaggugcacaacugcaccaccaagugccagacgccccacggcgcccucaaggggaaccugcccuuccagaacgugcacccggucaccaucggcgagugccccaaguacgugaaguccacccagcugcgcauggccaccgggcuccggaacauccccagcauccagucccgcggccuguucggggcgaucgccggcuucaucgagggcggguggacgggcaugguggacgggugguacggcuaccaccaccggaacgagcaggggagcggcuacgccgccgaccagaaguccacccagaucgccaucgacggcaucagcaacaaggucaacuccgugaucgagaagaugaacauccaguucaccagcguggggaaggagugcaacucccuggagaagcgcauggagaaccucaacaagaaggucgacgacggcuuccuggacguguggaccuacaacgcggagcugcucauccugcuggagaacgagcggacgcucgacuuccacgaccugaacgucaagaaccuguacgagaaggucaagagccagcuccgcaacaacgccaaggagaucgggaacggcugcuucgaguucuaccacaagugcgacaacgagugcauggaguccgugaagaacgggaccuacaacuaccccaaguacagcgaggaguccaagcugaaccgggaggagaucgacggcgugaagcuggagagcaugggcauccaccagauccucgccaucuacuccaccguggccagcagccuggugcugcucgucucccugggggccaucagcuucuggaugugcuccaacggcagccugcagugccgcgugugcaucuga

SEQ ID NO: 74120 - RNA, 1701 nt, Artificial Sequence
  derived and/or modified CDS sequence (opt1) from hemagglutinin__InfluenzaA__AGO00265
augaaggcccgccugcucgugcugcugugcgccaucgcggccaccgacgccgacaccaucugcaucggcuaccacgccaacaacagcacggacaccgucgacaccauccucgagaagaacgugaccgugacgcacuccgucaaccugcuggaggacagccacaacgggaagcucugccggcugaagggcaucgcgccccugcagcucgggaagugcaacaucgccggcuggauccuggggaacccggagugcgagucccugcucagcgagcgcuccuggagcuacaucguggagacccccaacuccgagaacgggaccugcuaccccggcgacuucaucgacuacgaggagcugcgggagcagcugagcuccgugaccagcuucgagcgcuucgagaucuuccccaaggagacguccuggccgaagcacaacaccaccaagggggucaccgccgccugcagccacgccggcaagugcuccuucuaccggaaccuccuguggcugacggagaaggacgggagcuaccccaaccucaacaacuccuacgugaacaagaagggcaaggaggugcugguccuguggggcgugcaccaccccagcaacaucaaggaccagcagacccucuaccagaaggagaacgcguacguguccgucgugagcuccaacuacaaccgccgguucacccccgagaucgccgagcgcccgaaggugcggggccaggccggccgcaugaacuacuacuggacccugcuggagcccggggacacgaucaucuucgaggccaacggcaaccucaucgcccccugguacgcguucgcccugagccggggguucggcagcggcaucaucaccuccaacgccagcaugcacgagugcaacaccaagugccagacgccccagggggccaucaacuccagccugccguuccagaacauccaccccgucaccaucggcgagugccccaaguacgugcgcuccaccaagcuccggauggugaccgggcugcgcaacauccccagcauccagucccggggccuguucggggccaucgcgggcuucaucgagggcggguggaccggcaugaucgacgggugguacggcuaccaccaccagaacgagcaggggagcggcuacgccgccgaccagaaguccacgcagaacgccaucaacggcaucaccaacaaggucaacagcgugaucgagaagaugaacacccaguucaccgccguggggaaggaguucaacaaccucgagaagcgcauggagaaccugaacaagaaggucgacgacggcuuccuggacaucuggacguacaacgcggagcuccuggugcugcucgagaacgagcggacccuggacuuccacgacuccaacgugaagaaccuguacgagaaggucaagagccagcuccgcaacaacgccaaggagaucgggaacggcugcuucgaguucuaccacaagugcaacaacgagugcauggaguccgugaagaacgggaccuacgacuacccgaaguacagcgaggaguccaagcugaaccgggagaagaucgacggcgucaagcuggagagcaugggcguguaccagauccucgccaucuacuccaccguggccagcucccugguccugcucgugagccugggggccaucagcuucuggaugugcuccaacggcagccugcagugccgcaucugcaucuga

SEQ ID NO: 74121 - RNA, 1701 nt, Artificial Sequence
  derived and/or modified CDS sequence (opt1) from hemagglutinin__InfluenzaA__AGO00277
augaaggccaagcugcucauccugcugugcgcccucagcgcgaccgacgccgacaccaucugcaucggcuaccacgccaacaacuccacggacaccguggacaccguccuggagaagaacgugaccgugacgcacagcgucaaccugcucgaggacucccacaacgggaagcugugccgccugaagggcaucgcgccccuccagcuggggaagugcaacaucgccggcuggauccuggggaacccggagugcgagagccuccuguccaagcggagcugguccuacaucgccgagacccccaacagcgagaacgggaccugcuaccccggcgacuucgccgacuacgaggagcugcgcgagcagcucuccagcguguccagcuucgagcgguucgagaucuuccccaaggagcgcuccuggccgaaccacaacaucaacaucggcgugaccgccgccugcagccacgcgggcaaguccagcuucuacaagaaccugcuguggcucacggagaaggacggguccuaccccaaccugaacaagagcuacgucaacaagaaggagaaggaggugcuggugcucuggggcguccaccaccccuccaacaucgagaaccagaagacccuguaccggaaggagaacgccuacgugagcguggucagcuccaacuacaaccgccgguucacccccgagaucgccgagcgcccgaaggugcgggggcaggccggccgcaugaacuacuacuggacccugcucgagcccggcgacacgaucaucuucgaggccaacgggaaccugaucgcgcccugguacgccuucgcccugagccggggccucggguccggcaucaucaccagcaacgccuccauggacgagugcgacaccaagugccagacgccccagggcgccaucaacagcucccugccguuccagaacauccaccccuucaccaucggggagugccccaaguacgugcgcagcaccaagcugcggauggucaccggccuccgcaacauccccuccauccagagccgggggcuguucggcgcgaucgccggguucaucgagggcggcugggccgggaugaucgacggcugguacggguaccaccaccagaacgagcagggcuccggguacgccgccgaccagaaguccacccagaacgcgaucaacggcaucacgaacaaggugaacagcgugaucgagaagaugaacacccaguucaccgccgucggcaaggaguucaacaagcuggagaagcgcauggagaaccucaacaagaagguggacgacggguuccuggacaucuggaccuacaacgccgagcugcucgugcugcuggagaacgagcggacgcucgacuuccacgacagcaacgucaagaaccuguacgagaaggugaagaaccagcugcgcaacaacgccaaggagaucggcaacgggugcuucgaguucuaccacaagugcaacaacgagugcauggaguccgugaagaacggcaccuacgacuacccgaaguacagcgaggaguccaagcucaaccgggagaagaucgacggggucaagcuggagagcaugggcguguaccagauccuggccaucuacuccaccgucgcgagcagccucgugcugcuggugucccucggcgccaucagcuucuggaugugcuccaacgggagccugcagugccgcaucugcaucuga

SEQ ID NO: 74122 - RNA, 1701 nt, Artificial Sequence; identical to SEQ ID NO: 65658
  derived and/or modified CDS sequence (opt1) from hemagglutinin__InfluenzaA__AGO00289

SEQ ID NO: 74123 - RNA, 1698 nt, Artificial Sequence
  derived and/or modified CDS sequence (opt1) from hemagglutinin__InfluenzaA__AGO00301
augaaggccaagcugcucauccugcugugcgcccucagcgcgaccgacgccgacaccaucugcaucggcuaccacgccaacaacuccacggacaccguggacaccguccuggagaagaacgugaccgugacgcacagcgucaaccugcucgaggacucccacaacgggaagcugugccgccugaagggcaaggcgccccuccagcuggggaacugcaacaucgccggcugggugcuggggaacccggagugcgagagccuccuguccaaccggagcugguccuacaucgccgagacccccaacagcgagaacgggaccugcuaccccggcgacuucgccgacuacgaggagcugcgcgagcagcucuccagcguguccagcuucgagcgguucgagaucuuccccaaggagcgcuccuggccgaaccacaccacgcggggcgucaccgccgccugcccccacgcgcgcaagagcuccuucuacaagaaccugguguggcugaccgaggccaacggcagcuaccccaaccucucccggagcuacgugaacaaccaggagaaggagguccuggugcuguggggcgugcaccaccccuccaacaucgaggagcagcgcgcccucuaccggaaggacaacgccuacgucagcguggugagcuccaacuacaaccgccgguucaccccggagaucgccaagcgccccaagguccgggaccagagcgggcgcaugaacuacuacuggacgcugcuggagcccggggacaccaucaucuucgaggcgaccggcaaccucaucgcccccugguacgccuucgcccugucccggggcccggggagcggcaucaucaccuccaacgcgccccuggacgagugcgacacgaagugccagacgccccagggggccaucaacagcucccuccccuuccagaacauccacccggugaccaucggcgagugccccaaguacgugcgcagcaccaagcugcggauggucaccggccugcgcaacauccccuccgugcagagccggggccucuucggggccaucgccggguucaucgagggcggguggaccggcaugauggacggcugguacggguaccaccaccagaacgagcagggcuccggguacgccgccgaccagaaguccacccagaacgcgaucaacggcaucaccaacaaggugaacagcgucaucgagaagaugaacacgcaguucaccgccguggggaaggaguucaacaagcuggagaagcgcauggagaaccugaacaagaagguggacgacggcuucauggacaucuggaccuacaacgccgagcuccugguccugcucgagaacgagcggacccuggacuuccacgacagcaacgugaagaaccuguacgagaaggucaagaaccagcuccgcaacaacgccaaggagcugggcaacgggugcuucgaguucuaccacaagugcgacaacgagugcauggaguccgugaagaacggcacguacgacuaccccaaguacagcgaggaguccaagcugaaccgcgagaagaucgacggggugaagcucgagagcaugggcgucuaccggauccuggccaucuacuccaccguggcgagcagccuggugcuccuggucucccugggggccaucagcuucuggaugugcuccaacggcagccuccagugccgcaucugcaucuga

SEQ ID NO: 74124 - RNA, 1701 nt, Artificial Sequence
  derived and/or modified CDS sequence (opt1) from hemagglutinin__InfluenzaA__AGO00313
augaagaccaucaucgcccugagcuacaucuucugccaggugcucgcccagaaccugcccggcaacgacaacuccaccgcgacgcugugccucgggcaccacgccgucccgaacggcacccuggugaagaccaucaccaacgaccagaucgaggugacgaacgccaccgagcugguccagagcuccagcaccgggcgcaucugcgacagcccccaccggauccucgacggcaagaacugcacccugaucgacgcccugcucggggacccccacugcgacggcuuccagaacgagaagugggaccuguucguggagcgcuccaaggccuucuccaacugcuaccccuacgacgugccggacuacgcgagccugcggucccucgucgccagcuccggcacgcuggaguucaucaacgagggguucaacuggaccggcgugacccagaacgggggcagcuacgccugcaagcgcgggcccgacaacuccuucuucagccggcugaacuggcucuacaaguccgagagcaccuaccccgugcugaacgucacgaugcccaacaacgacaacuucgacaagcuguacaucuggggcgugcaccacccguccaccgacaaggagcagaccaaccucuacgugcaggccagcggccgcgucaccguguccacgaagcggagccagcagaccaucauccccaacguggggagccgccccuggguccggggccuguccagcgggaucuccaucuacuggaccaucgugaagcccggcgacauccugcucaucaacagcaacggcaaccugaucgcgccgcgcggguacuucaagauccggaccggcaaguccagcaucaugcgcuccgacgcccccaucgggacgugcagcuccgagugcaucacccccaacggcagcauccccaacgacaagccguuccagaacgugaacaagaucaccuacggggccugccccaaguacgucaagcagaacacccugaagcucgccacgggcaugcggaacgugcccgagaagcagacccgcggcaucuucggggccaucgcgggcuucaucgagaacgggugggagggcaugaucgacgggugguacggcuuccggcaccagaacuccgagggcaccgggcaggccgccgaccucaagagcacccaggccgccaucgaccagaucaacggcaagcugaaccgcgugaucgagaagacgaacgagaaguuccaccagaucgagaaggaguucuccgaggucgaggggcggauccaggaccucgagaaguacguggaggacaccaagaucgaccuguggagcuacaacgcggagcugcucguggcccuggagaaccagcacaccaucgaccugaccgacuccgagaugaacaagcuguucgagaagacgcgccggcagcugcgcgagaacgccgaggacaugggcaacgggugcuucaagaucuaccacaagugcgacaacgccugcaucggcagcauccggaacggcaccuacgaccacgacgucuaccgcgacgaggcccugaacaaccgcuuccagaucaaggggguggagcucaaguccggcuacaaggacuggauccuguggaucagcuucgcgaucuccugcuuccugcucugcgucgugcugcugggguucaucaugugggccugccagaagggcaacauccggugcaacaucugcaucuga

SEQ ID NO: 74125 - RNA, 1704 nt, Artificial Sequence; identical to SEQ ID NO: 73121
  derived and/or modified CDS sequence (opt1) from hemagglutinin__InfluenzaA__AGO00325

SEQ ID NO: 74126 - RNA, 1698 nt, Artificial Sequence
  derived and/or modified CDS sequence (opt1) from hemagglutinin__InfluenzaA__AGO00337
augaaggccaaccugcucgugcugcugagcgcccucgcggccgccgacgccgacaccaucugcaucggcuaccacgccaacaacuccaccgacacggucgacaccgugcuggagaagaacgugaccgucacccacagcgugaaccugcucgaggacucccacaacgggaagcugugccgccugaagggcaucgcgccccuccagcuggggaagugcaacaucgccggcuggcugcucgggaacccggagugcgacccccugcugcccgugcggagcugguccuacaucgucgagacgcccaacagcgagaacggcaucugcuacccgggcgacuucaucgacuacgaggagcuccgcgagcagcuguccagcguguccagcuucgagcgguucgagaucuuccccaaggaguccagcuggcccaaccacaacaccaacggggugaccgccgccugcucccacgagggcaagagcuccuucuaccgcaaccugcucuggcugaccgagaaggaggggagcuaccccaagcugaagaacuccuacgucaacaagaagggcaaggaggugcucgugcugugggggauccaccacccgcccaacagcaaggagcagcagaaccuguaccagaacgagaacgcguacgucuccguggugacgagcaacuacaaccggcgcuucacccccgagaucgccgagcggcccaagguccgcgaccaggccggccggaugaacuacuacuggacccuccugaagccgggcgacaccaucaucuucgaggccaacgggaaccugaucgcccccauguacgcguucgcccucagccgcggcuucggguccggcaucaucacgagcaacgccuccaugcacgagugcaacaccaagugccagacgccccugggcgccaucaacagcucccugcccuaccagaacgugcacccggugaccaucggggagugccccaaguacguccggagcgccaagcuccgcauggugaccggccugcggaacacccccuccauccagagccgcgggcuguucggcgcgaucgccggguucaucgagggcggcuggaccgggaugaucgacggcugguacggguaccaccaccagaacgagcagggcuccggguacgccgccgaccagaaguccacccagaacgccaucaacggcaucacgaacaaggugaacaccgucaucgagaagaugaacauccaguucaccgcggugggcaaggaguucaacaagcucgagaagcggauggagaaccugaacaagaagguggacgacggguuccuggacaucuggaccuacaacgccgagcuccugguccugcucgagaacgagcgcacgcuggacuuccacgacagcaacgugaagaaccuguacgagaaggucaagagccagcucaagaacaacgccaaggagaucggcaacgggugcuucgaguucuaccacaagugcgacaacgagugcauggaguccgugcggaacggcaccuacgacuaccccaaguacagcgaggaguccaagcugaaccgcgagaagguggacggggucaagcuggagagcaugggcaucuaccagauccucgccaucuacuccaccguggccagcucccuggugcugcucgucagccugggcgcgaucagcuucuggaugugcuccaacgggagccugcagugccggaucugcaucuga

SEQ ID NO: 74127 - RNA, 1698 nt, Artificial Sequence; identical to SEQ ID NO: 67302
  derived and/or modified CDS sequence (opt1) from hemagglutinin__InfluenzaA__AGO00349

SEQ ID NO: 74128 - RNA, 1698 nt, Artificial Sequence
  derived and/or modified CDS sequence (opt1) from hemagglutinin__InfluenzaA__AGO00373
augaaggccaaccugcucgugcugcugugcgcccucgcggccgccgacgccgacaccaucugcaucggcuaccacgccaacaacagcaccgacacggucgacaccgugcuggagaagaacgugaccgucacccacuccgugaaccugcucgaggacagccacaacgggaagcugugccgccugaagggcaucgcgccccuccagcuggggaagugcaacaucgccggcuggcugcucgggaacccggagugcgacccccugcugcccgugcgguccuggagcuacaucgucgagacgcccaacuccgagaacggcaucugcuacccgggcgacuucaucgacuacgaggagcuccgcgagcagcugagcuccgugagcuccuucgagcgguucgagaucuuccccaaggagagcuccuggcccgaccacaacaccaacggggugaccgccgccugcagccacgagggcaaguccagcuucuaccgcaaccugcucuggcugaccgagaaggaguccagcuaccccaagcugaagaacuccuacgucaacaagaaggggaaggaggugcucgugcuguggggcauccaccacccgcccaacagcaaggagcagcagaaccuguaccagaacgagaacgcguacgucuccguggugacgagcaacuacaaccggcgcuucacccccgagaucgccgagcggcccaagguccgcgaccaggccgggcggaugaacuacuacuggacccuccugaagccgggcgacaccaucaucuucgaggccaacggcaaccugaucgcccccauguacgcguucgcccucagccgcggguucggcuccgggaucaucacgagcaacgccuccaugcacgagugcaacaccaagugccagacgccccugggcgccaucaacagcucccugcccuaccagaacauccacccggugaccaucggcgagugccccaaguacgugcggagcgccaagcuccgcauggucaccgggcugcggaacauccccuccauccagagccgcggccuguucggggcgaucgccggcuucaucgagggcggguggaccggcaugaucgacgggugguacggcuaccaccaccagaacgagcagggguccggcuacgccgccgaccagaaguccacccagaacgccaucaacgggaucaccaacaaggugaacacggugaucgagaagaugaacauccaguucaccgcggucggcaaggaguucaacaagcucgagaagcggauggagaaccugaacaagaagguggacgacggcuuccuggacaucuggaccuacaacgccgagcuccuggugcugcucgagaacgagcgcacccuggacuuccacgacagcaacaugaagaaccuguacgagaaggucaagagccagcucaagaacaacgccaaggagaucgggaacggcugcuucgaguucuaccacaagugcgacaacgagugcauggaguccgugcggaacgggacguacgacuaccccaaguacagcgaggaguccaagcugaaccgcgagaaggucgacggcgugaagcuggagagcauggggaucuaccagauccucgccaucuacuccaccguggccagcucccugguccugcucgugagccugggcgcgaucagcuucuggaugugcuccaacggcagccugcagugccggaucugcaucuga

SEQ ID NO: 74129 - RNA, 1698 nt, Artificial Sequence
  derived and/or modified CDS sequence (opt1) from hemagglutinin__InfluenzaA__AGO00385
augaaggccaaccugcucgugcugcugugcgcccucgcggccgccgacgccgacaccaucugcaucggcuaccacgccaacaacagcaccgacacggucgacaccgugcuggagaagaacgugaccgucacccacuccgugaaccugcucgaggacagccacaacgggaagcugugccgccugaagggcaucgcgccccuccagcuggggaagugcaacaucgccggcuggcugcucgggaacccggagugcgacccccugcugcccgugggcuccuggagcuacaucgucgagacgcccaacuccgagaacggcaucugcuacccgggggacuucaucgacuacgaggagcuccgggagcagcugagcuccgugagcuccuucgagcgcuucgagaucuuccccaaggagagcuccuggcccgaccacaacaccaacggcgugaccgccgccugcagccacgaggggaaguccagcuucuaccggaaccugcucuggcugaccgagaaggaguccagcuaccccaagcugaagaacuccuacgucaacaagaagggcaaggaggugcucgugcugugggggauccaccacccgcccaacagcaaggagcagcagaaccuguaccagaacgagaacgcguacgucuccguggugacgagcaacuacaaccgccgguucacccccgagaucgccgagcgccccaagguccgggaccaggccggccgcaugaacuacuacuggacccuccugaagccgggcgacaccaucaucuucgaggccaacgggaaccugaucgcccccauguacgcguucgcccucagccggggcuucggguccggcaucaucacgagcaacgccuccaugcacgagugcaacaccaagugccagacgccccugggcgccaucaacagcucccugcccuaccagaacauccacccggugaccaucggggagugccccaaguacgugcgcagcgccaagcuccggauggucaccggccugcgcaacauccccuccauccagagccgggggcuguucggcgcgaucgccggguucaucgagggcggcuggaccgggaugaucgacggcugguacggguaccaccaccagaacgagcagggcuccggguacgccgccgaccagaaguccacccagaacgccaucaacggcaucaccaacaaggugaacacggugaucgagaagaugaacauccaguucaccgcggucggcaaggaguucaacaagcucgagaagcgcauggagaaccugaacaagaagguggacgacggguuccuggacaucuggaccuacaacgccgagcuccuggugcugcucgagaacgagcggacccuggacuuccacgacagcaacgucaagaaccuguacgagaaggucaagagccagcucaagaacaacgccaaggagaucggcaacgggugcuucgaguucuaccacaagugcgacaacgagugcauggaguccgugcgcaacggcacguacgacuaccccaaguacagcgaggaguccaagcugaaccgggagaagguggacggggugaagcuggagagcaugggcaucuaccagauccucgccaucuacuccaccgucgccagcucccuggugcugcucgugagccugggcgcgaucagcuucuggaugugcuccaacgggagccugcagugccgcaucugcaucuga

SEQ ID NO: 74130 - RNA, 1698 nt, Artificial Sequence
  derived and/or modified CDS sequence (opt1) from hemagglutinin__InfluenzaA__AGO00397
augaaggccaaccugcucgugcugcugugcgcccucgcggccgccgacgccgacaccaucugcaucggcuaccacgccaacaacagcaccgacacggucgacaccgugcuggagaagaacgugaccgucacccacuccgugaaccugcucgaggacagccacaacgggaagcugugccgccugaagggcaucgcgccccuccagcuggggaagugcaacaucgccggcuggcugcucgggaacccggagugcgacccccugcugcccgugggcuccuggagcuacaucgucgagacgcccaacuccgagaacggcaucugcuacccgggggacuucaucgacuacgaggagcuccgggagcagcugagcuccgugagcuccuucgagcgcuucgagaucuuccccaaggagagcuccuggcccgaccacaacaccaacggcgugaccgccgccugcagccacgaggggaaguccagcuucuaccggaaccugcucuggcugaccgagaaggaguccagcuaccccaagcugaagaacuccuacgucaacaagaagggcaaggaggugcucgugcugugggggauccaccacccgcccaacagcaaggagcagcagaaccuguaccagaacgagaacgcguacgucuccguggugacgagcaacuacaaccgccgguucacccccgagaucgccgagcgccccaaggucaaggaccaggccggccggaugaacuacuacuggacccuccugaagccgggcgacaccaucaucuucgaggccaacgggaaccugaucgcccccauguacgcguucgcccucagccgcggcuucggguccggcaucaucacgagcaacgccuccaugcacgagugcaacaccaagugccagacgccccugggcgccaucaacagcucccugcccuaccagaacauccacccggugaccaucggggagugccccaaguacgugcggagcgccaagcuccgcauggucaccggccugcggaacauccccuccauccagagccgcgggcuguucggcgcgaucgccggguucaucgagggcggcuggaccgggaugaucgacggcugguacggguaccaccaccagaacgagcagggcuccggguacgccgccgaccagaaguccacccagaacgccaucaacggcaucaccaacaaggugaacacggugaucgagaagaugaacauccaguucaccgcggucggcaaggaguucaacaagcucgagaagcggauggagaaccugaacaagaagguggacgacggguuccuggacaucuggaccuacaacgccgagcuccuggugcugcucgagaacgagcgcacccuggacuuccacgacagcaacgucaagaaccuguacgagaaggucaagagccagcucaagaacaacgccaaggagaucggcaacgggugcuucgaguucuaccacaagugcgacaacgagugcauggaguccgugcggaacggcacguacgacuaccccaaguacagcgaggaguccaagcugaaccgcgagaagguggacggggugaagcuggagagcaugggcaucuaccagauccucgccaucuacuccaccgucgccagcucccuggugcugcucgugagccugggcgcgaucagcuucuggaugugcuccaacgggagccugcagugccggaucugcaucuga

SEQ ID NO: 74131 - RNA, 1698 nt, Artificial Sequence
  derived and/or modified CDS sequence (opt1) from hemagglutinin__InfluenzaA__AGO00409
augaaggccaaccugcucgugcugcugugcgcccucgcggccgccgacgccgacaccaucugcaucggcuaccacgccaacaacagcaccgacacggucgacaccgugcuggagaagaacgugaccgucacccacuccgugaaccugcucgaggacagccacaacgggaagcugugccgccugaagggcaucgcgccccuccagcuggggaagugcaacaucgccggcuggcugcucgggaacccggagugcgacccccugcugcccgugggcuccuggagcuacaucgucgagacgcccaacuccgagaacggcaucugcuacccgggggacuucaucgacuacgaggagcuccgggagcagcugagcuccgugagcuccuucgagcgcuucgagaucuuccccaaggagagcuccuggcccgaccacaacaccaacggcgugaccgccgccugcagccacgaggggaagaacuccuucuaccggaaccugcucuggcugaccgagaagaaguccagcuaccccgagcugaagaacagcuacgucaacaagaagggcaaggaggugcucgugcugugggggauccaccacccgcccaacuccaaggagcagcagaaccuguaccagaacgagaacgcguacgucagcguggugacguccaacuacaaccgccgguucacccccgagaucgccgagcgccccaaggucaaggaccaggccggccggaugaacuacuacuggacccuccugaagccgggcgacaccaucaucuucgaggccaacgggaaccugaucgcccccauguacgcguucgcccucagccgcggcuucgggagcggcaucaucacguccaacgccagcaugcacgagugcaacaccaagugccagacgccccugggcgccaucaacuccagccugcccuaccagaacauccacccggugaccaucggggagugccccaaguacgugcgguccgccaagcuccgcauggucaccggccugcggaacauccccagcauccagucccgcgggcuguucggcgcgaucgccggguucaucgagggcggcuggaccgggaugaucgacggcugguacggguaccaccaccagaacgagcagggcagcggguacgccgccgaccagaaguccacccagaacgccaucaacggcaucaccaacaaggugaacacggugaucgagaagaugaacauccaguucaccgcggucggcaaggaguucaacaagcucgagaagcggauggagaaccugaacaagaagguggacgacggguuccuggacaucuggaccuacaacgccgagcuccuggugcugcucgagaacgagcgcacccuggacuuccacgacagcaacgucaagaaccuguacgagaaggugaagucccagcucaagaacaacgccaaggagaucggcaacgggugcuucgaguucuaccacaagugcgacaacgagugcauggagagcguccggaacggcacguacgacuaccccaaguacuccgaggagagcaagcugaaccgcgagaagguggacggggugaagcuggaguccaugggcaucuaccagauccucgccaucuacagcaccgucgccuccagccuggugcugcucgugucccugggcgcgaucagcuucuggaugugcagcaacgggucccugcagugccggaucugcaucuga

SEQ ID NO: 74132 - RNA, 1698 nt, Artificial Sequence
  derived and/or modified CDS sequence (opt1) from hemagglutinin__InfluenzaA__AGO00421
augaaggccaaccugcucgugcugcugugcgcccucgcggccgccgacgccgacaccaucugcaucggcuaccacgccaacaacagcaccgacacggucgacaccgugcuggagaagaacgugaccgucacccacuccgugaaccugcucgaggacagccacaacgggaagcugugcaagcugaagggcaucgcgccccuccagcuggggaagugcaacaucgccggcuggcugcucgggaacccgggcugcgacccccugcugcccgugggcuccuggagcuacaucgucgagacgcccaacuccgagaacgggaucugcuacccgggcgacuucaucgacuacgaggagcuccgcgagcagcugagcuccgugagcuccuucgagcgguucaagaucuuccccaaggagagcuccuggcccgaccacaacaccaccggggugaccgccgccugcagccacgagggcaagaacuccuucuaccgcaaccugcucuggcugacgaagaaggagagcuccuaccccgagcugaagaacagcuacgucaacaagaagcggaaggaggugcucgugcugugggggauccaccacccgcccaacuccaaggagcagcagaaccuguaccagaacgagaacgcguacgucagcguggugaccuccaacuacaaccgccgguucacccccgagaucgccgagcgccccaaggucaagggccaggccggccggaugaacuacuacuggacccuccugaagccgggggacacgaucaucuucgaggccaacggcaaccugaucgcccccauguacgcguucgcccucagccgcggguucggcagcggcaucaucaccuccaacgccagcaugcacgagugcaacaccaagugccagacgccccugggggccaucaacuccagccugcccuaccagaacauccacccggugaccaucggcgagugccccaaguacgugcgguccgccaagcuccgcauggucaccgggcugcggaacauccccagcauccagucccgcggccuguucggggcgaucgccggcuucaucgagggcggguggaccggcaugaucgacgggugguacggcuaccaccaccagaacgagcaggggagcggcuacgccgccgaccagaaguccacccagaacgccaucaacggcaucacgaacaaggugaacaccgugaucgagaagaugaacauccaguucaccgcggucgggaaggaguucaacaagcucgagaagcggauggagaaccugaacaagaagguggacgacggcuuccuggacaucuggaccuacaacgccgagcuccuggugcugcucgagaacgagcgcacgcuggacuuccacgacagcaacgucaagaaccuguacgagaaggugaagucccagcucaagaacaacgccaaggagaucgggaacggcugcuucgaguucuaccacaagugcgacaacgagugcauggagagcguccggaacgggaccuacgacuaccccaaguacuccgaggagagcaagcugaaccgcgagaagguggacggcgugaagcuggaguccaugggcaucuaccagauccucgccaucuacagcaccgucgccuccagccuggugcugcucgugucccugggggcgaucagcuucuggaugugcagcaacggcucccugcagugccggaucugcaucuga

SEQ ID NO: 74133 - RNA, 1698 nt, Artificial Sequence
  derived and/or modified CDS sequence (opt1) from hemagglutinin__InfluenzaA__AGO00433
augaaggccaaccugcucgugcugcugugcgcccucgcggccgccgacgccgacaccaucugcaucggcuaccacgccaacaacagcaccgacacggucgacaccgugcuggagaagaacgugaccgucacccacuccgugaaccugcucgaggacagccacaacgggaagcugugccgccugaagggcaucgcgccccuccagcuggggaagugcaacaucgccggcuggcugcucgggaacccggagugcgacccccugcugcccgugcgguccuggagcuacaucgucgagacgcccaacuccgagaacggcaucugcuacccgggcgacuucaucgacuacgaggagcuccgcgagcagcugagcuccgugagcuccuucgagcgguucgagaucuuccccaaggagagcuccuggcccaaccacaacaccaacggggugaccgccgccugcagccacgagggcaaguccagcuucuaccgcaaccugcucuggcugaccgagaaggagggguccuaccccaagcuggagaacagcuacgucaacaagaagggcaaggaggugcucgugcugugggggauccaccacccgcccaacuccaaggagcagcagaaccuguaccagaacgagaacgcguacgucagcguggugacguccaacuacaaccggcgcuucacccccgagaucgccgagcggcccaagguccgcgaccaggccggccggaugaacuacuacuggacccuccugaagccgggcgacaccaucaucuucgaggccaacgggaaccugaucgcccccauguacgcguucgcccucagccgcggcuucgggagcggcaucaucacguccaacgccagcaugcacgagugcaacaccaagugccagacgccccugggcgccaucaacuccagccugcccuaccagaacauccacccggugaccaucggggagugccccaaguacgugcgguccgccaagcuccgcauggucaccggccugcggaacauccccagcauccagucccgcgggcuguucggcgcgaucgccggguucaucgagggcggcuggaccgggaugaucgacggcugguacggguaccaccaccagaacgagcagggcagcggguacgccgccgaccagaaguccacccagaacgccaucaacggcaucaccaacaaggugaacacggugaucgagaagaugaacauccaguucaccgcggucggcaaggaguucaacaagcucgagaagcggauggagaaccugaacaagaagguggacgacggguuccuggacaucuggaccuacaacgccgagcuccuggugcugcucgagaacgagcgcacccuggacuuccacgacagcaacgucaagaaccuguacgagaaggugaagucccagcucaagaacaacgccaaggagaucggcaacgggugcuucgaguucuaccacaagugcgacaacgagugcauggagagcguccggaacggcacguacgacuaccccaaguacuccgaggagagcaagcugaaccgcgagaagguggacggggugaagcuggaguccaugggcaucuaccagauccucgccaucuacagcaccgucgccuccagccuggugcugcucgugucccugggcgcgaucagcuucuggaugugcagcaacgggucccugcagugccggaucugcaucuga

SEQ ID NO: 74134 - RNA, 1698 nt, Artificial Sequence
  derived and/or modified CDS sequence (opt1) from hemagglutinin__InfluenzaA__AGO00445
augaaggccaaccugcucgugcugcugugcgcccucgcggccgccgacgccgacaccaucugcaucggcuaccacgccaacaacagcaccgacacggucgacaccgugcuggagaagaacgugaccgucacccacuccgugaaccugcucgaggacagccacaacgggaagcugugccgccugaagggcaucgcgccccuccagcuggggaagugcaacaucgccggcuggcugcucgggaacccggagugcgacccccugcugcccgugcgguccuggagcuacaucgucgagacgcccaacuccgagaacggcaucugcuacccgggcgacuucaucgacuacgaggagcuccgcgagcagcugagcuccgugagcuccuucgagcgguucgagaucuuccccaaggagagcuccuggcccaaccacaacaccaacggggugaccgccgccugcagccacgagggcaaguccagcuucuaccgcaaccugcucuggcugaccgagaaggagggguccuaccccacgcugaagaacagcuacgucaacaagaagggcaaggaggugcucgugcugugggggauccaccacccgcccaacuccaaggagcagcagaaccuguaccagaacgagaacgcguacgucagcguggugaccuccaacuacaaccggcgcuucacccccgagaucgccgagcggcccaagguccgcgaccaggccggccggaugaacuacuacuggacccuccugaagccgggcgacacgaucaucuucgaggccaacgggaaccugaucgcccccauguacgcguucgcccucagccgcggcuucgggagcggcaucaucaccuccaacgccagcaugcacgagugcaacaccaagugccagacgccccugggcgccaucaacuccagccugcccuaccagaacauccacccggugaccaucggggagugccccaaguacgugcgguccgccaagcuccgcauggucaccggccugcggaacauccccagcauccagucccgcgggcuguucggcgcgaucgccggguucaucgagggcggcuggaccgggaugaucgacggcugguacggguaccaccaccagaacgagcagggcagcggguacgccgccgaccagaaguccacccagaacgccaucaacggcaucacgaacaaggugaacaccgugaucgagaagaugaacauccaguucaccgcggucggcaaggaguucaacaagcucgagaagcggauggagaaccugaacaagaagguggacgacggguuccuggacaucuggaccuacaacgccgagcuccuggugcugcucgagaacgagcgcacgcuggacuuccacgacagcaacgucaagaaccuguacgagaaggugaagucccagcucaagaacaacgccaaggagaucggcaacgggugcuucgaguucuaccacaagugcgacaacgagugcauggagagcguccggaacggcaccuacgacuaccccaaguacuccgaggagagcaagcugaaccgcgagaagguggacggggugaagcuggaguccaugggcaucuaccagauccucgccaucuacagcaccgucgccuccagccuggugcugcucgugucccugggcgcgaucagcuucuggaugugcagcaacgggucccugcagugccggaucugcaucuga

SEQ ID NO: 74135 - RNA, 1701 nt, Artificial Sequence
  derived and/or modified CDS sequence (opt1) from hemagglutinin__InfluenzaA__AGO02696
augaaggccauccugguggucaugcucuacaccuucgccaccgcgaacgccgacacgcugugcaucggcuaccacgccaacaacagcaccgacaccguggacaccgugcuggagaagaacgucacggugacccacuccgugaaccuccuggaggacaagcacaacgggaagcugugcaagcuccgcggcgucgcgccccugcaccuggggaagugcaacaucgccggcuggauccucgggaacccggagugcgagagccuguccaccgccagcuccuggagcuacaucguggagaccuccagcuccgacaacggcacgugcuaccccggcgacuucaucgacuacgaggagcugcgggagcagcucagcuccgugagcuccuucgagcgcuucgagaucuuccccaagaccagcuccuggcccaaccacgacagcaacaagggggucaccgccgccugcccgcacgccggcgcgaagggguucuacaagaaccugaucuggcuggugaagaagggcaacuccuaccccaagcucagcaucuccuacaucaacgacaaggggaaggaggugcugguccuguggggcauccaccaccccagcaccacggccgaccagcagagccucuaccagaacgccgacaccuacguguucgugggcaccucccgguacagcaagaaguucaagcccgagaucgccauccgcccgaagguccgggaccaggaggggcgcaugaacuacuacuggacccugguggagcccggcgacaagaucacguucgaggccaccgggaaccugguggucccccgguacgcguucgccauggagcgcaacgccggcuccggcaucaucaucagcgacacccccgugcacgacugcaacaccacgugccagaccccgaagggggccaucaacaccucccuccccuuccagaacauccaccccaucaccaucggcaagugccccaaguacgucaagagcacgaagcugcggcuggccaccgggcuccgcaacgugccguccauccagagccggggccuguucggggcgaucgccggcuucaucgagggcggguggaccggcaugguggacgggugguacggcuaccaccaccagaacgagcagggguccggcuacgccgccgaccucaagagcacccagaacgccaucgacaagaucacgaacaaggugaacuccgucaucgagaagaugaacacccaguucaccgcggugggcaaggaguucaaccaccuggagaagcgcaucgagaaccugaacaagaaggucgacgacggguuccuggacaucuggaccuacaacgccgagcuccuggugcugcucgagaacgagcggacgcuggacuaccacgacagcaacgugaagaaccuguacgagaagguccgcaaccagcucaagaacaacgccaaggagaucggcaacgggugcuucgaguucuaccacaagugcgacaacacgugcauggaguccgugaagaacggcaccuacgacuaccccaaguacagcgaggaggccaagcugaaccgggaggagaucgacggggugaagcuggaguccacccgcaucuaccagauccucgccaucuacagcaccgcggccuccagccugguccugguggugucccucggcgccaucagcuucuggaugugcagcaacggcucccugcagugccggaucugcaucuga

SEQ ID NO: 74136 - RNA, 1701 nt, Artificial Sequence; identical to SEQ ID NO: 74064
  derived and/or modified CDS sequence (opt1) from hemagglutinin__InfluenzaA__AGO02697

SEQ ID NO: 74137 - RNA, 1701 nt, Artificial Sequence; identical to SEQ ID NO: 73882
  derived and/or modified CDS sequence (opt1) from hemagglutinin__InfluenzaA__AGO02698

SEQ ID NO: 74138 - RNA, 1701 nt, Artificial Sequence; identical to SEQ ID NO: 73882
  derived and/or modified CDS sequence (opt1) from hemagglutinin__InfluenzaA__AGO02699

SEQ ID NO: 74139 - RNA, 1701 nt, Artificial Sequence
  derived and/or modified CDS sequence (opt1) from hemagglutinin__InfluenzaA__AGO02700
augaaggccauccuggugguccuccuguacaccuucgccaccgcgaacgccgacacgcugugcaucggcuaccacgccaacaacagcaccgacaccguggacaccgugcucgagaagaacgucacggugacccacuccgugaaccugcuggaggacaagcacaacgggaagcucugcaagcugcgcggcgucgcgccccugcaccucgggaagugcaacaucgccggcuggauccuggggaacccggagugcgagagccuguccaccgccagcuccuggagcuacaucguggagaccuccagcuccgacaacggcacgugcuaccccggcgacuucaucaacuacgaggagcuccgggagcagcugagcuccgugagcuccuucgagcgcuucgagaucuuccccaagaccagcuccuggcccaaccacgacagcaacaagggggucaccgccgccugcccgcaggccggcgcgaaguccuucuacaagaaccugaucuggcucgugaagaaggggaacagcuaccccaagcuguccaagagcuacaucaacgacaagggcaaggaggugcugguccucugggggauccaccaccccagcaccuccgccgaccagcagagccuguaccagaacgccgacgccuacguguucgugggcacguccaaguacagcaagaaguucaagcccgagaucgccguccggccgaaggugcgcgaccaggagggccggaugaacuacuacuggacccugguggagcccggggacaagaucaccuucgaggcgaccggcaaccuccuggucccccgcuacgccuucgccauggagcggaacgccggguccggcaucaucaucagcgacacgcccgugcacgacugcaacacgaccugccagaccccgaagggcgccaucaacaccucccugcccuuccagaacauccaccccaucaccaucgggaagugccccaaguacgucaagagcaccaagcuccgccuggcgaccggccugcggaacgugccguccauccagagccgcgggcuguucggcgccaucgccggguucaucgagggcggcuggacggggaugguggacggcugguacggguaccaccaccagaacgcccagggcuccggguacgccgcggaccucaagagcacccagaacgccaucgacaagaucaccaacaaggugaacuccgucaucgagaagaugaacacccaguucacggccgugggcaaggaguucaaccaccuggagaagcggaucgagaaccucaacaagaaggucgacgacggcuuccuggacaucuggaccuacaacgccgagcugcucgugcugcuggagaacgagcgcacccucgacuaccacgacagcaacgugaagaaccuguacgagaagguccggucccagcugaagaacaacgccaaggagaucgggaacggcugcuucgaguucuaccacaagugcgacaacacgugcauggagagcgugaagaacgggaccuacgacuacccccgcuacuccgaggaggcgaagcucaaccgggaggagaucgacggcaucaagcuggagagcacccgcaucuaccagauccuggccaucuacuccaccguggccagcagccucguccugaucgugucccugggggccaucagcuucuggaugugcuccaacggcagccuccagugccggaucugcaucuga

SEQ ID NO: 74140 - RNA, 1701 nt, Artificial Sequence
  derived and/or modified CDS sequence (opt1) from hemagglutinin__InfluenzaA__AGO02701
augaaggccauccuggugguccuccuguacaccuucgccaccgcgaacgccgacacgcugugcaucggcuaccacgccaacaacagcaccgacaccguggacaccgugcucgagaagaacgucacggugacccacuccgugaaccugcuggaggacaagcacaacgggaagcucugcaagcugcgcggcgucgcgccccugcaccucgggaagugcaacaucgccggcuggauccuggggaacccggagugcgagagccuguccaccgcgagcuccuggagcuacaucguggagaccuccagcuccgacaacggcacgugcuaccccggcgacuucaucaacuacgaggagcuccgggagcagcugagcuccgugagccacuucgagcgcuucgagaucuuccccaagaccuccagcuggcccaaccacgacuccaacaagggggucaccgccgccugcccgcacgccggcgccaagagcuucuacaagaaccugaucuggcucgugaagaaggggaacuccuaccccaagcugagcaaguccuacaucaacgacaagggcaaggaggugcugguccucugggggauccaccaccccagcaccagcgccgaccagcagucccuguaccagaacgccgacgccuacguguucgugggcacgagcaaguacuccaagaaguucaagcccgagaucgccguccggccgaaggugcgcgaccaggagggccggaugaacuacuacuggacccugguggagcccggggacaagaucaccuucgaggcgaccggcaaccuccuggucccccgcuacgccuucgccauggagcggaacgccgggagcggcaucaucaucuccgacacgcccgugcacgacugcaacacgaccugccagaccccgaagggcgccaucaacaccagccugcccuuccagaacauccaccccaucaccaucgggaagugccccaaguacgugaaguccaccaagcuccgccuggcgaccggccugcggaacgucccgagcauccagucccgcggccucuucggggccaucgccggguucaucgagggcggcuggacggggaugguggacggcugguacggguaccaccaccagaacggccaggggagcggcuacgccgccgaccugaaguccacccagaacgcgaucgacaagaucaccaacaaggugaacagcgucaucgagaagaugaacacccaguucacggccgugggcaaggaguucaaccaccuggagaagcggaucgagaaccucaacaagaaggucgacgacggguuccuggacaucuggaccuacaacgccgagcugcucgugcugcuggagaacgagcgcacccucgacuaccacgacuccaacgugaagaaccuguacgagaagguccggagccagcugaagaacaacgccaaggagaucggcaacgggugcuucgaguucuaccacaagugcgacaacacgugcauggaguccgugaagaacggcaccuacgacuaccccaaguacagcgaggaggccaagcucaaccgcgaggagaucgacggggugaagcuggaguccacccggaucuaccagauccuggcgaucuacagcaccgucgccuccagccucgugcugguggucagccugggcgccaucuccuucuggaugugcagcaacggcucccuccagugccgcaucugcaucuga

SEQ ID NO: 74141 - RNA, 1683 nt, Artificial Sequence; identical to SEQ ID NO: 74012
  derived and/or modified CDS sequence (opt1) from hemagglutinin__InfluenzaA__AGO51374

SEQ ID NO: 74142 - RNA, 1701 nt, Artificial Sequence
  derived and/or modified CDS sequence (opt1) from hemagglutinin__InfluenzaA__AGO86686
augaagaccaucaucgcccugagcuacauccucugccuggccuucgcgcagaagcugcccggcaacgacaacuccaccgccacgcucugccuggggcaccacgccgugccgaacggcacccuggucaagaccaucaccaacgaccagaucgaggugacgaacgccaccgagcucgugcagagcuccagcaccgggcgcaucugcgacagcccccaccagauccuggacggcgagaacugcacccugaucgacgcccuccugggggacccccacugcgacggcuuccagaacaaggagugggaccuguucgucgagcggagcaaggcguacuccaacugcuaccccuacgacgugccggacuacgccagccuccgcucccugguggccagcuccggcacgcuggaguucaacaacgagagcuucaacuggaccggggucgcccagaacggcaccuccagcgcgugcaagcggcgcuccaucaagagcuucuucucccggcucaacuggcugcaccagcuggagaaccgcuaccccgcccucaacgugaccaugcccaacaacgacaaguucgacaagcuguacaucuggggcgugcaccaccccagcacggacuccgaccagaucagcgucuacgcccaggccagcgggcgggugaccguguccaccaagcgcagccagcagaccgucaucccgaacaucgggucccggcccugggugcgcggcaucagcucccggaucagcaucuacuggacgaucgugaagcccggcgacauccugcucaucaacuccaccgggaaccugaucgcgccccgcggcuacuucaagauccggagcgggaaguccagcaucaugcgcuccgacgccccgaucggcaagugcaacagcgagugcaucacccccaacggcuccauccccaacgacaagcccuuccagaacgucaaccggaucaccuacggggccugcccgcgcuacgugaagcagaacacgcugaagcucgccaccggcaugcggaacgugcccgagaagcagacccgcgggaucuucggcgccaucgccggguucaucgagaacggcugggagggcaugauggacgggugguacggcuuccggcaccagaacagcgaggggaccggccaggcggccgaccugaaguccacgcaggccgccaucaaccagaucaacgggaagcugaacaagcucaucgagaagaccaacgagaaguuccaccagaucgagaaggaguucagcgaggucgagggccgcauccaggaccuggagaaguacguggaggacaccaagaucgaccugugguccuacaacgccgagcuccugguggcgcuggagaaccagcacaccaucgaccucacggacagcgagaugaacaagcuguucgagcggacccgcaagcagcugcgcgagaacgccgaggacaugggcaacgggugcuucaagaccuaccacaagugcgacaacgccugcaucggcuccauccggaacgggaccuacgaccacgacgucuaccgcgacgaggcccucaacaaccgguuccagaucaagggcguggagcugaaguccggguacaaggacuggauccuguggaucagcuucgccaucuccugcuuccuccugugcgugguccugcucggcuucaucaugugggcgugccagaagggcaacauccgcugcaacaucugcaucuga

SEQ ID NO: 74143 - RNA, 1701 nt, Artificial Sequence; identical to SEQ ID NO: 74064
  derived and/or modified CDS sequence (opt1) from hemagglutinin__InfluenzaA__AGQ16240

SEQ ID NO: 74144 - RNA, 1701 nt, Artificial Sequence; identical to SEQ ID NO: 74064
  derived and/or modified CDS sequence (opt1) from hemagglutinin__InfluenzaA__AGQ16241

SEQ ID NO: 74145 - RNA, 1701 nt, Artificial Sequence
  derived and/or modified CDS sequence (opt1) from hemagglutinin__InfluenzaA__AGQ16242
augaaggccauccuggugguccuccuguacaccuucgccaccgcgaacgccgacacgcugugcaucggcuaccacgccaacaacagcaccgacaccguggacaccgugcucgagaagaacgucacggugacccacuccgugaaccugcuggaggacaagcacaacgggaagcucugcaagcugcgcggcgucgcgccccugcaccucgggaagugcaacaucgccggcuggauccuggggaacccggagugcgagagccuguccaccgccagcuccuggagcuacaucguggagaccuccagcuccgacaacggcacgugcuaccccggcgacuucaucaacuacgaggagcuccgggagcagcugagcuccgugagcuccuucgagcgcuucgagaucuuccccaagaccagcuccuggcccaaccacgacagcaacaagggggucaccgccgccugcccgcacgccggcgcgaaguccuucuacaagaaccugaucuggcucgugaagaaggggaacagcuaccccaagcuguccaccagcuacaucaacgacaagggcaaggagauccuggugcucugggggauccaccaccccagcacgaccgccgaccagcagucccuguaccagaacgccgacgccuacgucuucgugggcaccagccgguacuccaagaaguucaagcccgagaucgccauccgcccgaaggugcgggaccaggagggccgcaugaacuacuacuggacccuggucgagcccggggacaagaucacguucgaggcgaccggcaaccucguggugccccgguacgccuucgccauggagcgcaacgccgggagcggcaucaucaucuccgacacccccguccacgacugcaacaccacgugccagaccccggagggcgccaucaacaccagccugcccuuccagaacauccaccccaucaccaucgggaagugccccaaguacgugaaguccacgaagcugcggcucgcgaccggccugcgcaacgugccgagcauccagucccgggggcuguucggcgccaucgccggguucaucgagggcggcuggaccgggauggucgacggcugguacggguaccaccaccagaacgagcagggcagcggguacgccgccgaccucaaguccacccagaacgcgaucgacaagaucacgaacaaggugaacagcgugaucgagaagaugaacacccaguucaccgccgucggcaaggaguucaaccaccuggagaagcgcaucgagaaccugaacaagaagguggacgacggcuuccucgacaucuggaccuacaacgccgagcugcugguccuccuggagaacgagcggacgcuggacuaccacgacuccaacgugaagaaccucuacgagaaggugcgcaaccagcugaagaacaacgccaaggagaucgggaacggcugcuucgaguucuaccacaagugcgacaacacgugcauggagagcgucaagaacgggaccuacgacuaccccaaguacuccgaggaggccaagcugaaccgggagaagaucgacggcgugaagcucgagagcacccgcaucuaccagauccuggcgaucuacuccaccguggccagcucccugguccucguggugagccugggggccaucagcuucuggaugugcuccaacggcagccugcagugccggaucugcaucuga

SEQ ID NO: 74146 - RNA, 1701 nt, Artificial Sequence; identical to SEQ ID NO: 74084
  derived and/or modified CDS sequence (opt1) from hemagglutinin__InfluenzaA__AGQ16243

SEQ ID NO: 74147 - RNA, 1701 nt, Artificial Sequence
  derived and/or modified CDS sequence (opt1) from hemagglutinin__InfluenzaA__AGQ16245
augaaggccauccuggugguccuccuguacaccuucgccaccgcgaacgccgacacgcugugcaucggcuaccacgccaacaacagcaccgacaccguggacaccgugcucgagaagaacgucacggugacccacuccgugaaccugcuggaggacaagcacaacgggaagcucugcaagcugcgcggcgucgcgccccugcaccucgggaagugcaacaucgccggcuggauccuggggaacccggagugcgagagccuguccaccgccagcuccuggagcuacaucguggagaccuccagcuccgacaacggcacgugcuaccccggcgacuucaucaacuacgaggagcuccgggagcagcugagcuccgugagcuccuucgagcgcuucgagaucuuccccaagaccagcuccuggcccaaccacgacagcaacaagggggucaccgccgccugcccgcacgccggcgcgaaguccuucuacaagaaccugaucuggcucgugaagaaggggaacagcuaccccaagcuguccaagagcuacaucaacgacaagggcaaggaggugcugguccucugggggauccaccaccccagcaccacggccgaccagcagucccuguaccagaacgccgacgccuacguguucgugggcaccagccgguacuccaagaaguucaagcccgagaucgccauccgcccgaagguccgggaccaggagggccgcaugaacuacuacuggacccugaucgagcccggggacaagaucaccuucgaggcgacgggcaaccucguggugccccgguacgccuucgccauggagcgcaacgccgggagcggcaucaucaucuccgacacccccguccacgacugcaacacgaccugccagaccccggagggcgccaucaacaccagccugcccuuccagaacauccaccccaucaccaucgggaagugccccaaguacgugaaguccaccaagcugcggcucgcgacgggccugcgcaacgugccgagcauccagucccgggggcuguucggcgccaucgccggguucaucgagggcggcuggaccgggauggucgacggcugguacggguaccaccaccagaacgagcagggcagcggguacgccgccgaccucaaguccacccagaacgcgaucgacaagaucaccaacaaggugaacagcgugaucgagaagaugaacacgcaguucaccgccgucggcaaggaguucaaccaccuggagaagcgcaucgagaaccugaacaagaagguggacgacggcuuccucgacaucuggaccuacaacgccgagcugcugguccuccuggagaacgagcggacccuggacuaccacgacuccaacgugaagaaccucuacgagaaggugcgcaaccagcugaagaacaacgccaaggagaucgggaacggcugcuucgaguucuaccacaagugcgacaacacgugcauggagagcgucaagaacgggaccuacgacuaccccaaguacuccgaggaggccaagcugaaccgggagaagaucgacggcgugaagcucgagagcacccgcaucuaccagauccuggcgaucuacuccaccguggccagcucccugguccucguggugagccugggggccaucagcuucuggaugugcuccaacggcagccugcagugccggaucugcaucuga

SEQ ID NO: 74148 - RNA, 1701 nt, Artificial Sequence; identical to SEQ ID NO: 74084
  derived and/or modified CDS sequence (opt1) from hemagglutinin__InfluenzaA__AGQ16247

SEQ ID NO: 74149 - RNA, 1701 nt, Artificial Sequence
  derived and/or modified CDS sequence (opt1) from hemagglutinin__InfluenzaA__AGQ16248
augcaggccauccuggugguccuccuguacaccuucgccaccgcgacggccgacacccugugcaucggcuaccacgccaacaacagcaccgacaccguggacacggugcucgagaagaacgucaccgugacccacuccgugaaccugcuggaggacaagcacaacgggaagcucugcaagcugcgcggcgucgcgccccugcaccucgggaagugcaacaucgccggcuggauccuggggaacccggagugcgagagccuguccaccgccagcuccuggagcuacaucguggagacguccagcuccgacaacgggaccugcuaccccggcgacuucaucaacuacgaggagcuccgggagcagcugagcuccgugagcuccuucgagcgcuucgagaucuuccccaagaccagcuccuggcccaaccacgacagcaacaagggcgucaccgccgccugcccgcacgccggcgcgaaguccuucuacaagaaccugaucuggcucgugaagaaggggaacagcuaccccaagcugucccagagcuacaucaacgacaagggcaaggaggugcugguccucugggggauccaccaccccagcacgaccgccgaccagcagucccuguaccagaacgccgacgccuacguguucgugggcaccagccgguacuccaagaaguucaagcccgagaucgccauccgcccgaagguccgggaccaggagggccgcaugaacuacuacuggacccugguggagcccggggacaagaucacguucgaggcgaccggcaaccucguggucccccgguacgccuucaccauggagcgcaacgccgggagcggcaucaucaucuccgacacccccauccacgacugcaacacgaccugccagaccccggagggcgccaucaacaccagccugcccuuccagaacauccaccccaucacgaucgggaagugccccaaguacgugaaguccaccaagcugcggcucgccaccggccugcgcaacgugccgagcauccagucccgggggcuguucggcgcgaucgccggguucaucgagggcggcuggaccgggauggucgacggcugguacggguaccaccaccagaacgagcagggcagcggguacgccgccgaccucaaguccacgcagaacgccaucgacaagaucaccaacaaggugaacagcgugaucgagaagaugaacacccaguucaccgcggucggcaaggaguucaaccaccuggagaagcgcaucgagaaccugaacaagaagguggacgacggcuuccucgacaucuggacguacaacgccgagcugcugguccuccuggagaacgagcggacccuggacuaccacgacuccaacgugaagaaccucuacgagaaggugcgcaaccagcugaagaacaacgccaaggagaucgggaacggcugcuucgaguucuaccacaagugcgacaacacgugcauggagagcgucaagaacgggaccuacgacuaccccaaguacuccgaggaggccaagcugaaccgggagaagaucgacggcgugaagcucgagagcacccgcaucuaccagauccuggccaucuacuccaccguggcgagcucccugguccucguggugagccugggggccaucagcuucuggaugugcuccaacggcagccugcagugccggaucugcaucuga

SEQ ID NO: 74150 - RNA, 1701 nt, Artificial Sequence; identical to SEQ ID NO: 73882
  derived and/or modified CDS sequence (opt1) from hemagglutinin__InfluenzaA__AGQ16329

SEQ ID NO: 74151 - RNA, 1701 nt, Artificial Sequence; identical to SEQ ID NO: 73907
  derived and/or modified CDS sequence (opt1) from hemagglutinin__InfluenzaA__AGQ16331

SEQ ID NO: 74152 - RNA, 1701 nt, Artificial Sequence; identical to SEQ ID NO: 73882
  derived and/or modified CDS sequence (opt1) from hemagglutinin__InfluenzaA__AGQ16332

SEQ ID NO: 74153 - RNA, 1701 nt, Artificial Sequence; identical to SEQ ID NO: 73882
  derived and/or modified CDS sequence (opt1) from hemagglutinin__InfluenzaA__AGQ16333

SEQ ID NO: 74154 - RNA, 1701 nt, Artificial Sequence
  derived and/or modified CDS sequence (opt1) from hemagglutinin__InfluenzaA__AGQ16335
augaagaccaucaucgcccugagcuacauccucugccugguguucgcccagaagcugcccggcaacgacaacuccaccgcgacgcucugccuggggcaccacgccgucccgaacggcaccaucgugaagaccaucaccaacgaccgcaucgaggugacgaacgccaccgagcugguccagaacagcuccaucggggagaucugcgacagcccccaccaggugcucgacggcgagaacugcacccugaucgacgcccugcucggggacccccagugcgacggcuuccagaacaagaagugggaccuguucguggagcgguccaaggccuacagcaacugcuaccccuacgacgucccggacuacgcgucccugcgcagccucguggccuccagcggcacccuggaguucaacaacgaguccuucaacuggacgggggugacccagaacggcaccagcuccgccugcauccggcgcagcaacuccagcuucuucucccggcugaacuggcucacccaccugaacuucaaguaccccgcccugaacgucacgaugcccaacaacgagcaguucgacaagcucuacaucuggggcgugcaccaccccgggaccgacaaggaccagaucuuccuguacgcgcagagcuccgggcgcaucaccgugagcaccaagcggagccagcaggccgucaucccgaacaucggcucccgcccccggauccgcaacauccccagccggaucuccaucuacuggacgaucgugaagcccggcgacauccugcucaucaacagcaccgggaaccugaucgccccgcgcggcuacuucaagauccgguccggcaagagcuccaucaugcgcagcgacgcccccaucgggaagugcaaguccgagugcaucacccccaacggcagcauccccaacgacaagccguuccagaacgugaaccggaucaccuacggggccugcccccgcuacgucaagcagaacacgcugaagcucgcgaccggcaugcggaacgugcccgagaagcagacccgcgggaucuucggcgccaucgccggguucaucgagaacggcugggagggcaugguggacgggugguacggcuuccggcaccagaacuccgaggggcgcggccaggccgccgaccucaagagcacccaggcggccaucgaccagaucaacgggaagcugaaccggcugaucggcaagacgaacgagaaguuccaccagaucgagaaggaguucuccgaggucgagggccgcauccaggaccuggagaaguacguggaggacaccaagaucgaccuguggagcuacaacgccgagcuccugguggcccuggagaaccagcacaccaucgaccucaccgacuccgagaugaacaagcuguucgagaagacgaagaagcagcugcgcgagaacgccgaggacauggggaacggcugcuucaagaucuaccacaagugcgacaacgcgugcaucgggagcauccggaacggcaccuacgaccacgacgucuaccgcgacgaggcccucaacaaccgguuccagaucaaggggguggagcugaaguccggcuacaaggacuggauccuguggaucagcuucgccaucuccugcuuccuccugugcguggcccugcucggcuucaucaugugggccugccagaaggggaacauccgcugcaacaucugcaucuga

SEQ ID NO: 74155 - RNA, 1701 nt, Artificial Sequence
  derived and/or modified CDS sequence (opt1) from hemagglutinin__InfluenzaA__AGQ16336
augaagaccaucaucgcccugagcuacauccucugccugguguucgcccagaagcugcccggcaacgacaacuccaccgcgacgcucugccuggggcaccacgccgucccgaacggcaccaucgugaagaccaucaccaacgaccgcaucgaggugacgaacgccaccgagcugguccagaacagcuccaucggggagaucugcgacagcccccaccagauccucgacggcgagaacugcacccugaucgacgcccugcucggggacccccagugcgacggcuuccagaacaagaagugggaccuguucguggagcgguccaaggccuacagcaacugcuaccccuacgacgugccggacuacgcgucccugcgcagccucgucgccuccagcggcacccuggaguucaacaacgaguccuucaacuggacgggggugacccagaacggcaccagcuccgccugcauccggcgcagcaaccgguccuucuucagccgccugaacuggcucacccaccugaacuucaaguaccccgcccugaacgugacgaugcccaacaacgagcaguucgacaagcucuacaucuggggcguccaccaccccgggaccgacaaggaccagaucuuccuguacgcgcaguccagcgggcggaucaccguguccaccaagcgcagccagcaggccgugaucccgaacaucggcagccggccccgcauccggaacauccccucccgcaucagcaucuacuggacgaucgucaagcccggcgacauccugcucaucaacuccaccgggaaccugaucgccccgcggggcuacuucaagauccgcagcgggaaguccagcaucaugcgguccgacgcccccaucggcaagugcaagagcgagugcaucacccccaacggcuccauccccaacgacaagccguuccagaacgugaaccgcaucaccuacggggccugcccccgguacgugaagcagagcacgcugaagcucgcgaccggcaugcgcaacguccccgagaagcagacccgggggaucuucggcgccaucgccggguucaucgagaacggcugggagggcaugguggacgggugguacggcuuccgccaccagaacuccgaggggcggggccaggccgccgaccucaagagcacccaggcggccaucgaccagaucaacgggaagcugaaccgccugaucggcaagacgaacgagaaguuccaccagaucgagaaggaguucuccgagguggagggccgcauccaggaccuggagaaguacgucgaggacaccaagaucgaccuguggagcuacaacgccgagcuccugguggcccuggagaaccagcacaccaucgaccucaccgacuccgagaugaacaagcuguucgagaagacgaagaagcagcugcgggagaacgccgaggacauggggaacggcugcuucaagaucuaccacaagugcgacaacgcgugcaucgggagcauccgcaacggcaccuacgaccacgacguguaccgggacgaggcccucaacaaccgcuuccagaucaagggggucgagcugaaguccggcuacaaggacuggauccuguggaucagcuucgccaucuccugcuuccuccugugcguggcccugcucggcuucaucaugugggccugccagaaggggaacauccggugcaacaucugcaucuga

SEQ ID NO: 74156 - RNA, 1701 nt, Artificial Sequence; identical to SEQ ID NO: 74154
  derived and/or modified CDS sequence (opt1) from hemagglutinin__InfluenzaA__AGQ16337

SEQ ID NO: 74157 - RNA, 1701 nt, Artificial Sequence; identical to SEQ ID NO: 73892
  derived and/or modified CDS sequence (opt1) from hemagglutinin__InfluenzaA__AGQ16338

SEQ ID NO: 74158 - RNA, 1701 nt, Artificial Sequence
  derived and/or modified CDS sequence (opt1) from hemagglutinin__InfluenzaA__AGQ16339
augaagaccaucaucgcccugagcuacauccucugccugguguucgcccagaagcugcccggcaacgacaacuccaccgcgacgcucugccuggggcaccacgccgucccgaacggcaccaucgugaagaccaucaccaacgaccgcaucgaggugacgaacgccaccgagcugguccagaacagcuccaucggggagaucugcgacagcccccaccagauccucgacggcgagaacugcacccugaucgacgcccugcucggggacccccagugcgacggcuuccagaacaagaagugggaccuguucguggagcgguccaaggccuacagcaacugcuaccccuacgacgugccggacuacgcgucccugcgcagccucgucgccuccagcggcacccuggaguucaacaacgaguccuucaacugggccggggugacgcagaacggcaccagcuccgccugcauccgggggagcaacuccagcuucuucucccgccugaacuggcucacccaccugaacuucaaguaccccgcgcugaacgugaccaugcccaacaacgagcaguucgacaagcucuacaucuggggcguccaccaccccgggacggacaaggaccagaucuuccuguacgcccagagcuccggccggaucaccgugagcaccaagcgcagccagcaggccgugaucccgaacaucggcucccggccccgcauccggaacauccccagccgcaucuccaucuacuggaccaucgucaagcccggggacauccugcucaucaacagcacgggcaaccugaucgccccgcggggguacuucaagauccgcuccggcaagagcuccaucaugcggagcgacgcccccaucggcaagugcaaguccgagugcaucacccccaacgggagcauccccaacgacaagccguuccagaacgugaaccgcaucaccuacggcgcgugcccccgguacgugaagcaguccacccugaagcucgccacggggaugcgcaacguccccgagaagcagacccggggcaucuucggggccaucgccggcuucaucgagaacggcugggaggggaugauggacggcugguacggguuccgccaccagaacagcgagggccgggggcaggccgcggaccugaaguccacccaggccgccaucgaccagaucaacggcaagcugaaccgccucaucggcaagaccaacgagaaguuccaccagaucgagaaggaguucagcgagguggaggggcggauccaggaccuggagaaguacguggaggacacgaagaucgaccugugguccuacaacgccgagcuccuggucgcccuggagaaccagcacaccaucgaccucaccgacagcgagaugaacaagcuguucgagaagaccaagaagcagcugcgcgagaacgcggaggacaugggcaacgggugcuucaagaucuaccacaagugcgacaacgccugcaucggcuccauccgcaacgggacguacgaccacgacguguaccgggacgaggcccucaacaaccgcuuccagaucaagggcguggagcucaagagcggcuacaagaacuggauccuguggaucuccuucgccaucagcugcuuccugcugugcgucgcccugcucggguucaucaugugggcgugccagaagggcaacauccggugcaacaucugcaucuga

SEQ ID NO: 74159 - RNA, 1701 nt, Artificial Sequence; identical to SEQ ID NO: 74018
  derived and/or modified CDS sequence (opt1) from hemagglutinin__InfluenzaA__AGQ16340

SEQ ID NO: 74160 - RNA, 1701 nt, Artificial Sequence; identical to SEQ ID NO: 73882
  derived and/or modified CDS sequence (opt1) from hemagglutinin__InfluenzaA__AGQ16341

SEQ ID NO: 74161 - RNA, 1701 nt, Artificial Sequence; identical to SEQ ID NO: 73892
  derived and/or modified CDS sequence (opt1) from hemagglutinin__InfluenzaA__AGQ16342

SEQ ID NO: 74162 - RNA, 1701 nt, Artificial Sequence
  derived and/or modified CDS sequence (opt1) from hemagglutinin__InfluenzaA__AGQ16343
augaagaccaucaucgcccugagcuacauccucugccugguguucgcccagaagcugcccggcaacgacaacuccaccgcgacgcucugccuggggcaccacgccgucccgaacggcaccaucgugaagaccaucaccaacgaccgcaucgaggugacgaacgccaccgagcugguccagaacagcuccaucggggagaucugcgacagcccccaccagauccucgacggcgagaacugcacccugaucgacgcccugcucggggacccccagugcgacggcuuccagaacaagaagugggaccuguucguggagcgguccaaggccuacagcaacugcuaccccuacgacgugccggacuacgcgucccugcgcagccucgucgccuccagcggcacccuggaguucaacaacgaguccuucaacugggccggggugacgcagaacggcaccagcuccgccugcauccgggggagcaacuccagcuucuucucccgccugaacuggcucacccaccugaacuucaaguaccccgcgcugaacgugaccaugcccaacaacgagcaguucgacaagcucuacaucuggggcguccaccaccccgggacggacaaggaccagaucuuccuguacgcccagagcuccggccggaucaccgugagcaccaagcgcagccagcaggccgugaucccgaacaucggcucccggccccgcauccgggacauccccagccgcaucuccaucuacuggaccaucgucaagcccggggacauccugcucaucaacagcacgggcaaccugaucgccccgcggggguacuucaagauccgcuccggcaagagcuccaucaugcggagcgacgcccccaucggcaagugcaaguccgagugcaucacccccaacgggagcauccccaacgacaagccguuccagaacgugaaccgcaucaccuacggcgcgugcccccgguacgugaagcaguccacccugaagcucgccacggggaugcgcaacguccccgagaagcagacccggggcaucuucggggccaucgccggcuucaucgagaacggcugggaggggaugguggacggcugguacggguuccgccaccagaacagcgagggccgggggcaggccgcggaccugaaguccacccaggccgccaucgaccagaucaacggcaagcugaaccgccucaucggcaagaccaacgagaaguuccaccagaucgagaaggaguucagcgagguggaggggcggauccaggaccuggagaaguacgucgaggacacgaagaucgaccugugguccuacaacgccgagcuccugguggcccuggagaaccagcacaccaucgaccucaccgacagcgagaugaacaagcuguucgagaagaccaagaagcagcugcgcgagaacgcggaggacaugggcaacgggugcuucaagaucuaccacaagugcgacaacgccugcaucggcuccauccgcaacgggacguacgaccacgacguguaccgggacgaggcccucaacaaccgcuuccagaucaagggcgucgagcucaagagcggcuacaaggacuggauccuguggaucuccuucgccaucagcugcuuccugcugugcguggcccugcucggguucaucaugugggcgugccagaagggcaacauccggugcaacaucugcaucuga

SEQ ID NO: 74163 - RNA, 1701 nt, Artificial Sequence; identical to SEQ ID NO: 73892
  derived and/or modified CDS sequence (opt1) from hemagglutinin__InfluenzaA__AGQ16344

SEQ ID NO: 74164 - RNA, 1701 nt, Artificial Sequence; identical to SEQ ID NO: 73882
  derived and/or modified CDS sequence (opt1) from hemagglutinin__InfluenzaA__AGQ16345

SEQ ID NO: 74165 - RNA, 1701 nt, Artificial Sequence
  derived and/or modified CDS sequence (opt1) from hemagglutinin__InfluenzaA__AGQ16346
augaagaccaucaucgcccugagcuacauccucugccugguguucgcccagaagcugcccggcaacgacaacuccaccgcgacgcucugccuggggcaccacgccgucccgaacggcaccaucgugaagaccaucaccaacgaccgcaucgaggugacgaacgccaccgagcugguccagaacagcuccaucggggagaucugcgacagcccccaccagauccucgacggcgagaacugcacccugaucgacgcccugcucggggacccccagugcgacggcuuccagaacaagaagugggaccuguucguggagcgguccaaggccuacagcaacugcuaccccuacgacgugccggacuacgcgucccugcgcagccucgucgccuccagcggcacccuggaguucaacaacgaguccuucaacuggacgggggugacccagaacggcaccagcuccgccugcauccggcgcagcaacuccagcuucuucucccggcugaacuggcucacccaccugaacuucaaguaccccgcccugaacgugacgaugcccaacaacgagcaguucgacaagcucuacaucuggggcguccaccaccccgggaccgacaaggaccagaucuuccuguacgcgcagagcuccgggcgcaucaccgugagcaccaagcggagccagcaggccgugaucccgaacaucggcucccgcccccggauccgcaacauccccagccggaucuccaucuacuggacgaucgucaagcccggcgacauccugcucaucaacagcaccgggaaccugaucgccccgcgcggcuacuucaagauccgguccggcaagagcuccaucaugcgcagcgacgcccccaucgggaagugccgguccgagugcaucacccccaacggcagcauccccaacgacaagccguuccagaacgugaaccgcaucaccuacggggccugcccccgguacgugaagcaguccacgcugaagcucgcgaccggcaugcgcaacguccccgagaagcagacccgggggaucuucggcgccaucgccggguucaucgagaacggcugggagggcaugguggacgggugguacggcuuccgccaccagaacagcgaggggcggggccaggccgccgaccugaaguccacccaggcggccaucgaccagaucaacgggaagcugaaccgccucaucggcaagacgaacgagaaguuccaccagaucgagaaggaguucagcgagguggagggccgcauccaggaccuggagaaguacgucgaggacaccaagaucgaccugugguccuacaacgccgagcuccugguggcccuggagaaccagcacaccaucgaccucaccgacagcgagaugaacaagcuguucgagaagacgaagaagcagcugcgggagaacgccgaggacauggggaacggcugcuucaagaucuaccacaagugcgacaacgcgugcaucggguccauccgcaacggcaccuacgaccacaacguguaccgggacgaggcccucaacaaccgcuuccagaucaagggggucgagcucaagagcggcuacaaggacuggauccuguggaucuccuucgccaucagcugcuuccugcugugcguggcccugcucggcuucaucaugugggccugccagaaggggaacauccggugcaacaucugcaucuga

SEQ ID NO: 74166 - RNA, 1701 nt, Artificial Sequence; identical to SEQ ID NO: 73882
  derived and/or modified CDS sequence (opt1) from hemagglutinin__InfluenzaA__AGQ16347

SEQ ID NO: 74167 - RNA, 1701 nt, Artificial Sequence; identical to SEQ ID NO: 74018
  derived and/or modified CDS sequence (opt1) from hemagglutinin__InfluenzaA__AGQ16348

SEQ ID NO: 74168 - RNA, 1701 nt, Artificial Sequence; identical to SEQ ID NO: 73882
  derived and/or modified CDS sequence (opt1) from hemagglutinin__InfluenzaA__AGQ16349

SEQ ID NO: 74169 - RNA, 1701 nt, Artificial Sequence
  derived and/or modified CDS sequence (opt1) from hemagglutinin__InfluenzaA__AGQ16350
augaagaccaucaucgcccugagcuacauccucugccugguguucgcccagaagcugcccggcaacgacaacuccaccgcgacgcucugccuggggcaccacgccgucccgaacggcaccaucgugaagaccaucaccaacgaccgcaucgaggugacgaacgccaccgagcugguccagaacagcuccaucggggagaucugcgacagcccccaccagauccucgacggcgagaacugcacccugaucgacgcccugcucggggacccccagugcgacggcuuccagaacaagaagugggaccuguucguggagcgguccaaggccuacagcaacugcuaccccuacgacgugccggacuacgcgucccugcgcagccucgucgccuccagcggcacccuggaguucaacaacgaguccuucaacuggacgggggugacccagaacggcaccagcuccgccugcauccggcgcagcaacuccagcuucuucucccggcugaacuggcucacccaccugaacuucaaguaccccgcccugaacgugacgaugcccaacaacgagcaguucgacaagcucuacaucuggggcguccaccaccccgggaccgacaaggaccagaucuuccuguacgcgcagagcuccgggcgcaucaccgugagcaccaagcggagccagcaggccgugaucccgaacaucggcucccgcccccggauccgcaacauccccagccggaucuccaucuacuggacgaucgucaagcccggcgacauccugcucaucaacagcaccgggaaccugaucgccccgcgcggcuacuucaagauccgguccggcaagagcuccaucaugcgcagcgacgcccccaucgggaagugcaaguccgagugcaucacccccaacggcagcauccccaacgacaagccguuccagaacgugaaccggaucaccuacggggccugcccccgcuacgugaagcaguccacgcugaagcucgcgaccggcaugcggaacguccccgagaagcagacccgcgggaucuucggcgccaucgccggguucaucgagaacggcugggagggcaugguggacgggugguacggcuuccggcaccagaacagcgaggggcgcggccaggccgccgaccugaaguccacccaggcggccaucgaccagaucaacgggaagcugaaccggcucaucggcaagacgaacgagaaguuccaccagaucgagaaggaguucagcgagguggagggccgcauccaggaccuggagaaguacgucgaggacaccaagaucgaccugugguccuacaacgccgagcuccugguggcccuggagaaccagcacaccaucgaccucaccgacagcgagaugaacaagcuguucgagaagacgaagaagcagcugcgcgagaacgccgaggacauggggaacggcugcuucaagaucuaccacaagugcgacaacgcgugcaucggguccauccggaacggcaccuacgaccacaacguguaccgcgacgaggcccucaacaaccgguuccagaucaagggggucgagcucaagagcggcuacaaggacuggauccuguggaucuccuucgccaucagcugcuuccugcugugcguggcccugcucggcuucaucauguggaccugccagaaggggaacauccgcugcaacaucugcaucuga

SEQ ID NO: 74170 - RNA, 1701 nt, Artificial Sequence
  derived and/or modified CDS sequence (opt1) from hemagglutinin__InfluenzaA__AGQ47719
augaaggccauccugcucgugcugcugugcaccuucaccgccacgaacgcggacacccucugcaucggcuaccacgccaacaacagcaccgacaccgucgacacggugcuggagaagaacgugaccgucacccacuccgugaaccugcucgaggaccgccacaacgggaagcugugcaagcugggcgggaucgcgccccuccaccugggcaagugcaacaucgccggguggcugcucggcaacccggagugcgagcugcuguucaccgugagcuccuggagcuacaucgucgagacguccaacagcgacaacgggaccugcuaccccggcgacuucaucaacuacgaggagcuccgggagcagcuguccagcguguccagcuucgagcgcuucgagaucuuccccaagaccuccagcuggcccgaccacgagaccaaccggggcgugacggccgccugcccguacgccggggccaacuccuucuaccgcaaccugaucuggcucgucaagaagggcaacagcuaccccaagcuguccaagagcuacgugaacaacaaggggaaggaggugcugguccucuggggcauccaccacccgcccaccuccaccgaccagcagagccuguaccagaacgccgacgcguacguguucgugggcuccagcaaguacaaccggaaguucaagcccgagaucgccgcccgccccaagguccgggggcaggccggccgcaugaacuacuacuggacccugaucgagcccggggacacgaucaccuucgaggccaccggcaaccucguggugccccgguacgcguucgccaugaaccgcggcagcggguccggcaucaucaucagcgacgccccgauccacgacugcaacaccaagugccagacgcccaagggggccaucaacaccucccugcccuuccagaacauccaccccgucaccaucggcgagugcccgaaguacgucaagagcaccaagcugcggauggccacggggcuccgcaacauccccuccauccagagccggggccuguucggcgcgaucgccggguucaucgagggcggguggaccggcaugaucgacgggugguacggcuaccaccaccagaacggccagggguccggcuacgccgccgaccagaaguccacccagaacgccaucgacgggaucaccaacaaggugaacagcgugaucgagaagaugaacacgcaguucaccgcggugggcaaggaguucaaccaccuggagaagcgcaucgagaaccucaacaagaagguggacgacggguuccuggacgucuggaccuacaacgccgagcugcucgugcugcuggagaacgagcggacccucgacuuccacgacagcaacgucaagaaccuguacgagaaggugcgcucccagcugcggaacaacgccaaggagaucggcaacggcugcuucgaguucuaccacaagugcgacgacacgugcauggagagcgugaagaacgggaccuacgacuaccccaaguacuccgaggagagcaagcucaaccgcgaggagaucgacggcgucaagcuggaguccacccggaucuaccagauccuggccaucuacagcaccgccgcguccagccucgugcugcuggugucccucggggccaucagcuucuggaugugcagcaacggcucccugcagugccgcaucugcaucuga

SEQ ID NO: 74171 - RNA, 1698 nt, Artificial Sequence; identical to SEQ ID NO: 66139
  derived and/or modified CDS sequence (opt1) from hemagglutinin__InfluenzaA__AGQ47728

SEQ ID NO: 74172 - RNA, 1701 nt, Artificial Sequence
  derived and/or modified CDS sequence (opt1) from hemagglutinin__InfluenzaA__AGQ47740
augaaggcccgccugcucgugcugcugugcgcccucgcggccaccgacgccgacaccaucugcaucggcuaccacgccaacaacagcacggacaccgucgacacccugcuggagaagaacgugaccgugacgcacuccgucaaccuccuggaggacagccacaacgggaagcugugcaagcucaagggcaucgcgccccugcagcuggggaagugcaacaucgccggcuggcuccuggggaacccggagugcgacucccugcuccccgcccggagcugguccuacaucguggagacccccaacagcgagaacggcgccugcuaccccggcgacuucaucgacuacgaggagcugcgcgagcagcuguccagcguguccagccucgagcgguucgagaucuucccgaaggaguccagcuggcccaaccacaacaccaucaagggggucaccgccuccugcagccaccgcggccaguccagcuucuaccggaaccugcuguggcucacgaagaagggggacuccuaccccaagcugaacaacagcuacgugaacaacaagggcaaggaggugcugguccucuggggcgugcaccaccccuccagcagcaacgagcagcagucccuguaccgcaacgagaacgcguacgugagcgucguguccagcaacuacaaccggcgcuucaccccggagaucgccgcccggcccaaggugcgcgaccagaccgggcggaugaacuacuacuggacccugcucgagcccggcgacacgaucauguucgaggccaccgggaaccugaucgcccccugguacgcguucgcccugucccgcggcuucgggagcggcaucaucaccuccaacgccagcaugcacgagugcaacaccaagugccagacgccgcagggcgccaucaacuccagccuccccuuccagaacauccaccccgucaccaucggggagugccccaaguacgugcgguccaccaagcugcgcauggugaccggccugcggaacaucccgagcauccagucccgcggccucuucggggccaucgcgggguucaucgagggcggcuggacggggaugaucgacggcugguacggguaccaccaccagaacgagcagggcagcggguacgccgccgaccagaaguccacccagaacgccaucaacggcaucaccaacaaggucaacagcgugaucgagaagaugaacacccaguucacggccgugggcaaggaguucaacaaccuggagaagcggauggagaaccugaacaagaaggucgacgacggguuccucgacaucuggaccuacaacgcggagcugcuggugcuccuggagaacgagcgcacccuggacuuccacgaccucaacgugaagaaccuguacgagaaggucaagucccagcugaagaacaacgccaaggagaucggcaacgggugcuucgaguucuaccacaagugcgacaacgagugcauggagagcgugcggaacggcaccuacgacuaccccaaguacuccgaggagagcaagcucaaccgcgagaagaucgacggggucaagcuggagagcaugggcguguaccagauccuggccaucuacuccacgguggccagcucccucguccugcuggugagccugggcgccaucuccuucuggaugugcagcaacgggucccuccagugccggaucugcaucuga

SEQ ID NO: 74173 - RNA, 1701 nt, Artificial Sequence
  derived and/or modified CDS sequence (opt1) from hemagglutinin__InfluenzaA__AGQ47752
augaaggccaagcugcucauccugcugugcgcccucagcgcgaccgacgccgacaccaucugcaucggcuaccacgccaacaacuccacggacaccguggacaccguccuggagaagaacgugaccgugacgcacagcgucaaccugcucgaggacucccacaacgggaagcugugccgccugaagggcaaggcgccccuccagcuggggaagugcaacaucgccggcugggugcuggggaacccggagugcgagagccuccuguccaaccggagcugguccuacaucgccgagacccccaacagcgagaacggcaucugcuaccccggcgacuucgccgacuacgaggagcugcgcgagcagcucuccagcguguccagcuucgagcgguucgagaucuuccccaaggagcgcuccuggccgaagcacaacaccauccgcggggucaccgccgccugcagccacgcgggcaaguccagcuucuacaagaaccugguguggcugacggaggccaacggguccuaccccgcccucagcaccuccuacgugaacaaccaggagaaggagguccuggugcuguggggcgugcaccaccccagcaacaucgaggagcagcggacccucuaccggaaggacaacgccuacgucagcgugguguccagcaacuacaaccgccgguucacccccgagaucgccaagcgcccgaagguccgggaccagcccgggcgcaugaacuacuacuggacgcugcuggagcccggcgacaccaucaucuucgaggcgaccggcaaccucaucgcccccugguacgccuucgcccugucccgggggccgggcagcgggaucaucaccuccaacgcccccauggacgagugcgacacgaagugccagacgccccagggcgcgaucaacagcucccugcccuuccagaacauccacccggugaccaucggcgagugccccaaguacgugcgcagcaccaagcuccggauggucaccgggcugcgcaacauccccuccauccagagccggggccuguucggggccaucgccggcuucaucgagggcggguggaccggcaugauggacgggugguacggcuaccaccaccagaacgagcagggguccggcuacgccgccgaccagaaguccacccagaacgcgaucaacgggaucaccaacaaggugaacagcgugaucgagaagaugaacacgcaguucaccgccgucggcaaggaguucaacaagcucgagaagcgcauggagaaccugaacaagaagguggacgacggcuuccuggacaucuggaccuacaacgccgagcuccuggugcugcucgagaacgagcggacccuggacuuccacgacagcaacgucaagaaccuguacgagaaggugaagaaccagcuccgcaacaacgccaaggagcuggggaacggcugcuucgaguucuaccacaagugcgacaacgagugcauggaguccgucaagaacgggacguacgacuaccccaaguacagcgaggaguccaagcugaaccgggagaagaucgacggcgugaagcucgagagcauggggguguaccgcauccuggccaucuacuccaccgucgcgagcagccuggugcuccuggugucccugggcgccaucagcuucuggaugugcuccaacggcagccuccagugccgcaucugcaucuga

SEQ ID NO: 74174 - RNA, 1701 nt, Artificial Sequence
  derived and/or modified CDS sequence (opt1) from hemagglutinin__InfluenzaA__AGQ47764
augaaggccaagcugcucauccugcugugcgcccucaccgcgaccgacgccgacacgaucugcaucggcuaccacgccaacaacagcaccgacaccguggacaccguccuggagaagaacgugacggugacccacuccgucaaccugcucgaggacagccacaacgggaagcugugccgccugaagggcaucgcgccccuccagcuggggaagugcaacaucgccggcuggauccuggggaacccggagugcgagucccuccugagcaagcgguccuggagcuacaucgccgagacccccaacuccgagaacggcgccugcuaccccggcgacuucgccgacuacgaggagcugcgcgagcagcucagcuccgugagcuccuucgagcgguucgagaucuuccccaaggagcgcagcuggccgaagcacaacaucacccgcggggugacggccgcgugcucccacgccggcaagagcuccuucuacaagaaccugcuguggcucaccgagaccgacgggagcuaccccaagcuguccaagagcuacgucaacaacaaggagaaggaggugcuggugcucuggggcguccaccaccccuccaacaucgaggaccagaagacccuguaccggaaggagaacgccuacgugagcguggucagcuccaacuacaaccggcgcuucacgcccgagaucgccgagcggccgaaggugcgcgggcaggccggccggaucaacuacuacuggacccugcucgagcccggcgacaccaucaucuucgaggcgaacgggaaccugaucgcccccugguacgccuucgcccugagccgcgacuucggcuccgggaucaucaccagcaacgccuccauggacgagugcgacacgaagugccagacgccccagggcgcgaucaacagcucccucccguuccagaacauccaccccgugaccaucggcgagugccccaaguacgucaagagcaccaagcugcggauggugaccgggcugcgcaacauccccuccauccagagccggggccucuucggggccaucgccggcuucaucgagggcggguggaccggcaugaucgacgggugguacggcuaccaccaccagaacgagcagggguccggcuacgccgccgaccagaaguccacccagaacgcgaucaacgggaucaccaacaaggugaacagcgucaucgagaagaugaacacgcaguucaccgccgugggcaaggaguucaacaagcuggagaagcgcauggagaaccugaacaagaagguggacgacggcuuccucgacaucuggaccuacaacgccgagcugcugguccuccuggagaacgagcggacccuggacuuccacgacagcaacgugaagaaccucuacgagaaggugaagaaccagcugcgcaacaacgccaaggagaucgggaacggcugcuucgaguucuaccacaagugcaacaacgagugcauggaguccgucaagaacgggacguacgacuacccgaaguacagcgaggaguccaagcugaaccgggagaagaucgacggcgugaagcucgagagcaugggggucuaccagauccuggccaucuacuccaccguggcgagcagccuggugcuccuggucucccugggcgccaucagcuucuggaugugcuccaacggcagccuccagugccgcaucugcaucuga

SEQ ID NO: 74175 - RNA, 1701 nt, Artificial Sequence
  derived and/or modified CDS sequence (opt1) from hemagglutinin__InfluenzaA__AGQ47776
augaaggccaagcugcucauccugcugugcgcccucagcgcgaccgacgccgacaccaucugcaucggcuaccacgccaacaacuccacggacaccguggacaccguccuggagaagaacgugaccgugacgcacagcgucaaccugcucgaggacucccacaacgggaagcugugccgccugaagggcaucgcgccccuccagcuggggaagugcaacaucgccggcuggauccuggggaacccggagugcgagagccuccuguccaagcggagcugguccuacaucgccgagacccccaacagcgagaacgggaccugcuaccccggcgacuucgccgacuacgaggagcugcgcgagcagcucuccagcguguccagcuucgagcgguucgagaucuuccccaaggagcgcuccuggccgaagcacaacaucaacaucggcgugaccgccgccugcagccacgcgggcaaguccagcuucuacaagaaccugcuguggcucacggagaaggacggguccuaccccaaccugaacaagagcuacgucaacaagaaggagaaggaggugcuggugcucuggggcguccaccaccccuccaacaucgaggaccagaagacccuguaccggaaggagaacgccuacgugagcguggucagcuccaacuacaaccgccgguucacccccgagaucgccgagcgcccgaaggugcgggggcaggccggccgcaugaacuacuacuggacccugcucgagcccggcgacacgaucaucuucgaggccaacgggaaccugaucgcgcccugguacgccuucgcccugagccggggccucggguccggcaucaucaccagcaacgccuccauggacgagugcgacaccaagugccagacgccccagggcgccaucaacagcucccugccguuccagaacauccaccccuucaccaucggggagugccccaaguacgugcgcagcaccaagcugcggauggucaccggccuccgcaacauccccuccauccagagccgggggcuguucggcgcgaucgccggguucaucgagggcggcuggaccgggaugaucgacggcugguacggguaccaccaccagaacgagcagggcuccggguacgccgccgaccagaaguccacgcagaacgccaucaacggcaucaccaacaaggugaacagcgugaucgagaagaugaacacccaguucaccgcggucggcaaggaguucaacaagcuggagaagcgcauggagaaccucaacaagaagguggacgacggguuccuggacaucuggacguacaacgccgagcugcucgugcugcuggagaacgagcggacccucgacuuccacgacagcaacgucaagaaccuguacgagaaggugaagaaccagcugcgcaacaacgccaaggagaucggcaacgggugcuucgaguucuaccacaagugcaacaacgagugcauggaguccgugaagaacggcaccuacgacuacccgaaguacagcgaggaguccaagcucaaccgggagaagaucgacggggucaagcuggagagcaugggcguguaccagauccuggccaucuacuccaccgucgccagcagccucgugcugcuggugucccucggcgcgaucagcuucuggaugugcuccaacgggagccugcagugccgcaucugcaucuga

SEQ ID NO: 74176 - RNA, 1701 nt, Artificial Sequence
  derived and/or modified CDS sequence (opt1) from hemagglutinin__InfluenzaA__AGQ47788
augaaggccaagcugcucgugcugcugugcgcccucagcgcgaccgacgccgacaccaucugcaucggcuaccacgccaacaacuccacggacaccgucgacaccgugcuggagaagaacgugaccgucacgcacagcgugaaccugcucgaggacucccacaacgggaagcugugccgccugaagggcaucgcgccccuccagcuggggaagugcaacaucgccggcuggauccuggggaacccggagugcgagagccucuucuccaagaaguccuggagcuacaucgccgagacccccaacagcgagaacgggaccugcuaccccggcuacuucgccgacuacgaggagcugcgggagcagcuguccagcguguccagcuucgagcgcuucgagaucuuccccaaggagcgguccuggccgaagcacaacgucacccgcggcgugacggccgccugcagccacaagggcaaguccagcuucuaccggaaccuccuguggcugaccgagaaggacggguccuaccccaaccucagcaaguccuacgugaacaacaaggagaaggagguccuggugcuguggggcgugcaccaccccagcaacaucgaggaccagaagacccucuaccgcaaggagaacgcguacgucagcgugguguccagcaacuacaaccggcgcuucacccccgagaucgccgagcggccgaagguccgcgggcaggccggccggaucaacuacuacuggacgcugcuggagcccggcgacaccaucaucuucgaggccaacgggaaccucaucgcccccuggcacgcguucgcccugucccgcggcuucgggagcggcaucaucaccuccaacgccagcauggacgagugcgacaccaagugccagacgccccagggcgccaucaacuccagccugccguuccagaacauccaccccgugaccaucggggagugccccaaguacgugcgguccaccaagcuccgcauggucaccggccugcggaacauccccagcauccagucccgcgggcuguucggcgccaucgcgggguucaucgagggcggcuggacggggaugaucgacggcugguacggguaccaccaccagaacgagcagggcagcggguacgccgccgaccagaaguccacccagaacgccaucaacggcaucaccaacaaggugaacagcgugaucgagaagaugaacacccaguucacggccgucggcaaggaguucaacaagcucgagaagcggauggagaaccugaacaagaagguggacgacggguuccuggacaucuggaccuacaacgcggagcuccuggugcugcucgagaacgagcgcacccuggacuuccacgacuccaacgucaagaaccuguacgagaaggucaagagccagcucaagaacaacgccaaggagaucggcaacgggugcuucgaguucuaccacaagugcaacaacgagugcauggaguccgugaagaacggcaccuacgacuacccgaaguacagcgaggaguccaagcugaaccgggagaagaucgacggggugaagcuggagagcaugggcguguaccagauccucgccaucuacagcacggucgccuccagccuggugcugcucgugucccugggcgccaucagcuucuggaugugcuccaacgggagccugcagugccgcaucugcaucuga

SEQ ID NO: 74177 - RNA, 1701 nt, Artificial Sequence
  derived and/or modified CDS sequence (opt1) from hemagglutinin__InfluenzaA__AGQ47800
augaaggcccgccugcucgugcugcugugcgcccucgcggccaccgacgccgacaccaucugcaucggcuaccacgccaacaacagcacggacaccgucgacaccauccuggagaagaacgugaccgugacgcacuccgucaaccugcucgaggacagccacaacgggaagcugugccggcugaagggcaucgcgccccuccagcuggggaagugcaacaucgccggcuggauccuggggaacccggagugcgagucccuccugagcgagcgcuccuggagcuacaucguggagauccccaacuccgagaacgggaccugcuaccccggcgacuucaccgacuacgaggagcugcgggagcagcucagcuccgugagcuccuucgagcgcuucgagaucuuccccaaggagagcuccuggccgaagcacaacaccgcccgcggggucacggccgccugcagccacgcgggcaaguccagcuucuaccggaaccugcuguggcucaccgagaaggacggguccuaccccaaccugaagaacagcuacgugaacaagaagggcaaggaggugcugguccucuggggcgugcaccaccccuccagcaucaaggagcagcagacccuguaccagaaggagaacgccuacgugagcgucguguccagcaacuacaaccggcgcuucacccccgagaucgccgagcggccgaaggugcgcgaccaggccggccggaugaacuacuacuggacgcugcucgagcccggcgacaccaucaucuucgaggccaacgggaaccugaucgcgcccugguacgccuucgcccugucccgcggcuucgggagcggcaucaucaccuccaacgccagcaugcacgagugcgacaccaagugccagacgccccagggcgccaucaacuccagccucccguuccagaacauccaccccgucaccaucggggagugccccaaguacgugcgguccaccaagcugcgcauggugaccggccugcggaacauccccagcauccagucccgcggccucuucggggcgaucgccggguucaucgagggcggcuggacggggaugaucgacggcugguacggguaccaccaccagaacgagcagggcagcggguacgccgccgaccagaaguccacccagaacgccaucaacggcaucaccaacaaggucaacagcgugaucgagaagaugaacacccaguucacggcggugggcaaggaguucaacaaccuggagaagcggauggagaaccugaacaagaaggucgacgacggguuccucgacaucuggaccuacaacgccgagcugcugauccuccuggagaacgagcgcacccuggacuuccacgacuccaacgugaagaaccucuacgagaaggucaagagccagcugcggaacaacgccaaggagaucggcaacgggugcuucgaguucuaccacaagugcaacaacgagugcauggaguccgugaagaacggcaccuacgacuacccgaaguacagcgaggaguccaagcugaaccgcgagaagaucgacggggugaagcucgagagcaugggcgucuaccagauccuggccaucuacagcacgguggccuccagccuggugcuccuggucucccugggcgcgaucagcuucuggaugugcuccaacgggagccuccagugccggaucugcaucuga

SEQ ID NO: 74178 - RNA, 1701 nt, Artificial Sequence
  derived and/or modified CDS sequence (opt1) from hemagglutinin__InfluenzaA__AGQ47811
augaaggccaagcugcucgugcugcugugcgcccucagcgcgaccgacgccgacaccaucugcaucggcuaccacgccaacaacuccacggacaccgucgacaccgugcuggagaagaacgugaccgucacgcacagcgugaaccugcucgaggacucccacaacgggaagcugugccgccugaagggcaucgcgccccuccagcuggggaagugcaacaucgccggcuggauccuggggaacccggagugcgagagccucuucuccaagaaguccuggagcuacaucgccgagacccccaacagcgagaacgggaccugcuaccccggcuucuucgccgacuacgaggagcugcgggagcagcuguccagcguguccagcuucgagcgcuucgagaucuuccccaaggagcgguccuggccgaagcacaacgucacccgcggcgugacggccgccugcagccacaagggcaaguccagcuucuaccggaaccuccuguggcugaccgagaagaacggguccuaccccaaccucagcaaguccuacgugaacaacaaggagaaggagguccuggugcuguggggcgugcaccaccccagcaacaucgaggaccagaagaccaucuaccgcaaggagaacgcguacgucagcgugguguccagcaacuacaaccggcgcuucacccccgagaucgccgagcggccgaagguccgcgggcaggccggccggaucaacuacuacuggacgcuccuggagcccggcgacaccaucaucuucgaggccaacgggaaccugaucgcccccuggcacgcguucgcccucucccgcggcuucgggagcggcaucaucaccuccaacgccagcauggacgagugcgacaccaagugccagacgccccagggcgccaucaacuccagccugccguuccagaacauccaccccgugaccaucggggagugccccaaguacgugcgguccaccaagcugcgcauggucaccggccuccggaacauccccagcauccagucccgcgggcuguucggcgccaucgcgggguucaucgagggcggcuggacggggaugaucgacggcugguacggguaccaccaccagaacgagcagggcagcggguacgccgccgaccagaaguccacccagaacgccaucgacggcaucaccaacaaggugaacagcgugaucgagaagaugaacacccaguucacggccgucggcaaggaguucaacaagcuggagaagcggauggagaaccucaacaagaagguggacgacggguuccuggacaucuggaccuacaacgcggagcugcucgugcugcuggagaacgagcgcacccucgacuuccacgacuccaacgucaagaaccuguacgagaaggucaagagccagcugaagaacaacgccaaggagaucggcaacgggugcuucgaguucuaccacaagugcaacaacgagugcauggaguccgugaagaacggcaccuacgacuacccgaaguacagcgaggaguccaagcucaaccgggagaagaucgacggggugaagcuggagagcaugggcguguaccagauccuggccaucuacagcacggucgccuccagccucgugcugcuggugucccucggcgccaucagcuucuggaugugcuccaacgggagccugcagugccgcaucugcaucuga

SEQ ID NO: 74179 - RNA, 1701 nt, Artificial Sequence
  derived and/or modified CDS sequence (opt1) from hemagglutinin__InfluenzaA__AGQ47823
augaaggccaagcugcucgugcugcugugcgccuucaccgcgaccuacgccgacacgaucugcaucggcuaccacgccaacaacagcaccgacaccgucgacaccgugcucgagaagaacgugacggucacccacuccgugaaccugcuggaggacagccacaacgggaagcucugccgccugaagggcaucgcgccccugcagcucgggaacugcuccguggccggcuggauccuggggaacccgaagugcgagagccuguucuccaaggagagcugguccuacaucgccgagacccccaaccccgagaacgggaccugcuaccccggcuacuucgccgacuacgaggagcuccgggagcagcugagcuccgucagcuccuucgagcgcuucgagaucuucccgaaggagagcuccuggcccaaccacacggugaccaagggcgugaccaccagcugcucccacaacggcaagagcuccuucuaccggaaccugcucuggcugacggagaagaacgggcuguaccccaaccucagcaaguccuacgucaacaacaaggagaaggaggugcuggugcuguggggcguccaccaccccagcaacauccgcgaccagcgggccaucuaccacaccgagaacgccuacgugagcguggucuccagccacuacucccgccgguucaccccggagaucgcgaagcgccccaaggugcgggggcaggagggccgcaucaacuacuacuggacccuccuggagcccggcgacacgaucaucuucgaggccaacgggaaccugaucgcccccugguacgccuucgcccucagccggggcuucggguccggcaucaucaccagcaacgcguccauggacgagugcgacgccaagugccagaccccgcagggcgccaucaacagcucccugcccuuccagaacgugcaccccgucaccaucggggagugccccaaguacgugcgcagcacgaagcugcggauggugaccggccuccgcaacaucccguccauccagagccgggggcuguucggcgccaucgccggguucaucgagggcggcuggaccgggaugaucgacggcugguacggguaccaccaccagaacgagcagggcuccggguacgcggccgaccagaaguccacccagaacgccaucaacggcaucacgaacaaggucaacagcgugaucgagaagaugaacacccaguucaccgccgugggcaaggaguucaacaagcuggagcgccggauggagaaccucaacaagaaggucgacgacggguuccuggacaucuggaccuacaacgccgagcugcucgugcugcuggagaacggccgcacgcucgacuuccacgacagcaacgucaagaaccuguacgagaaggugaagucccagcugaagaacaacgcgaaggagaucgggaacggcugcuucgaguucuaccacaagugcaacaacgagugcauggagagcgugaagaacgggaccuacgacuaccccaaguacuccgaggagagcaagcucaaccggggcaagaucgacggcgucaagcuggagagcauggggguguaccagauccuggccaucuacuccaccguggccagcucccucguccugcuggugagccucggcgccaucuccuucuggaugugcagcaacgggucccugcagugccgcaucugcaucuga

SEQ ID NO: 74180 - RNA, 1701 nt, Artificial Sequence
  derived and/or modified CDS sequence (opt1) from hemagglutinin__InfluenzaA__AGQ47835
augaagaccaucaucgcccugagcuacaucuucugccucgugcugggccaggacuuccccgggaacgacaacuccaccgccacgcugugccucggccaccacgcggucccgaacgggaccaucgugaagaccaucaccaacgaccagaucgaggugacgaacgccaccgagcugguccagagcuccagcaccggcaagaucugcaacaacccccaccgcauccuggacgggaucaacugcacccucaucgacgcccugcugggcgacccccacugcgacggcuuccagaacgagacgugggaccucuucguggagcgguccaaggccuucagcaacugcuaccccuacuacgugccggacuacgccucccugcgcagccuggucgcguccagcgggacccucgaguucaucaacgagggcuucaacuggaccggggugacccagaacggcggguccaacgccugcaagcggggccccaacagcggcuucuucucccgccugaacuggcuguacaagagcgggacgaccuaccccgugcucaacgucaccaugcccaacaacgacaacuucgacaagcuguacaucuggggcgugcaccacccguccaccgaccaggagcagacgaaccuguacgugcaggccagcgggcgggucaccguguccaccaagcgcagccagcagaccaucacgcccaacaucggcucccggcccugggugcgcggccucagcagccggaucuccaucuacuggaccaucgucaagcccggggacauccuggugaucaacagcaacggcaaccugaucgccccgcgcggguacuucaagaugcggaccggcaaguccagcaucaugcgcuccgacgcgcccaucgggaccugcaucagcgagugcaucacgcccaacggcuccauccccaacgacaagccguuccagaacgugaacaagaucaccuacggcgccugccccaaguacgucaagcagaacacccucaagcuggccaccgggaugcggaacgugcccgagaagcagacgcgcggcaucuucggggccaucgccggcuucaucgagaacgggugggagggcaugguggacggcugguacggguuccggcaccagaacagcgagggcaccgggcaggcggccgaccugaaguccacccaggccgccaucgaccagaucaacggcaagcucaaccgcgucaucgagaagaccaacgagaaguuccaccagaucgagaaggaguucagcgagguggaggggcggauccaggaccuggagaaguacguggaggacacgaagaucgaccugugguccuacaacgccgagcuccuggucgcgcuggagaaccagcacaccaucgaccucaccgacagcgagaugaacaagcuguucgagaagacccgccggcagcugcgcgagaacgccgaggacaugggcaacggcugcuucaagaucuaccacaagugcgacaacgccugcaucggguccauccggaacggcacguacgaccacgacguguaccgcgacgaggcccucaacaaccgcuuccagaucaagggggucgagcucaagagcggcuacaaggacuggauccuguggaucuccuucgccaucagcugcuuccugcugugcguggugcugcucggcuucaucaugugggcgugccagaaggggaacauccggugcaacaucugcaucuga

SEQ ID NO: 74181 - RNA, 1701 nt, Artificial Sequence
  derived and/or modified CDS sequence (opt1) from hemagglutinin__InfluenzaA__AGQ47847
augaaggcccgccugcucauccugcugugcgcccucgcggccaccgacgccgacaccaucugcaucggcuaccacgccaacaacagcacggacaccguggacaccguccuggagaagaacgugaccgugacgcacuccgucaaccugcucgaggacagccacaacgggaagcugugccggcugaagggcaucgcgccccuccagcuggggaagugcaacaucgccggcuggcugcucgggaacccggagugcgacucccugcugcccgccagcuccuggagcuacaucguggagacccccaacuccaagaacggcaucugcuaccccggcgacuucaucgacuacgaggagcuccgcgagcagcugagcuccgugagcuccuucgagcgguucgagaucuucccgaaggagagcuccuggcccaagcacaacaccaccaagggggucacggccgccugcagccacgcgggcaaguccagcuucuaccgcaaccugcucuggcugaccaagaaggaggacuccuaccccaagcugagcaacuccuacgugaacaagaaggggaaggaggugcucguccuguggggcgugcaccaccccagcaacagcaaggagcagcagacccuguaccagaacgagaacgccuacguguccgucgugagcuccaacuacaaccggcgcuucaccccggagaucgccgagcggcccaaggugcgcgaccaggccgggcggaugaacuacuacuggacgcuccuggagcccggcgacaccaucaucuucgaggccaacggcaaccugaucgcgcccugguacgccuucgcccucagccgcggguucggcuccgggaucaucaccagcaacgccuccaugcacgagugcaacaccaagugccagacgccgcagggcgccaucaacagcucccugcccuuccagaacauccaccccgucaccaucggcgagugccccaaguacgucaagagcgcgaagcugcggauggugaccgggcuccgcaacaucccguccauccagagccggggccuguucggggccaucgccggcuucaucgagggcggguggaccggcaugaucgacgggugguacggcuaccaccaccagaacgagcagggguccggcuacgccgccgaccagaaguccacgcagaacgcgaucaacgggaucaccaacaaggugaacagcgugaucgagaagaugaacacccaguucaccgccgugggcaaggaguucaacaaccuggagaagcgcauggagaaccucaacaagaaggucgacgacggcuuccuggacaucuggacguacaacgccgagcugcucgugcugcuggagaacgagcggacccucgacuuccacgacagcaacgugaagaaccuguacgagaaggucaagauccagcugaagaacaacgccaaggagaucgggaacggcugcuucgaguucuaccacaagugcgacaacgagugcauggaguccgugcgcaacgggaccuacgacuaccccaaguacagcaaggaguccaagcucaaccgggagaagaucgacggcgucaagcuggagcccauggggguguaccagauccuggccaucuacagcaccguggcgagcucccucguccugcuggugagccucggcgccaucuccuucuggaugugcagcaacggcucccugcagugccgcaucugcaucuga

SEQ ID NO: 74182 - RNA, 1701 nt, Artificial Sequence
  derived and/or modified CDS sequence (opt1) from hemagglutinin__InfluenzaA__AGQ47870
augaaggccauccugcucgugcugcugugcaccuucgccgcgaccaacgccgacacgcucugcaucggcuaccacgccaacaacagcaccgacaccgucgacaccgugcuggagaagaacgugacggucacccacuccgugaaccugcucgaggaccgccacaacgggaagcugugcaagcugggcgggaucgcgccccuccaccugggcaagugcaacaucgccggguggcugcucggcaacccggagugcgagcugcugcucaccgugagcuccuggagcuacaucgucgagaccuccaacagcgacaacggcacgugcuaccccggggacuucaucaacuacgaggagcugcgggagcagcuguccagcguguccagcuucgagcgcuucgagaucuuccccaagaccuccagcuggcccaaccacgagaccaaccggggcgugaccgccgccugcccguacgccggggccaacuccuucuaccgcaaccucaucuggcuggucaagaagggcaacagcuaccccaagcuguccaagagcuacgugaacaacaaggggaaggaggugcucguccuguggggcauccaccacccgcccacguccaccgaccagcagagccuguaccagaacgcggacgccuacguguucgugggcuccagcaaguacaaccggaaguucaagcccgagaucgccgcccgccccaagguccgggggcaggccggccgcaugaacuacuacuggacccucaucgagcccggggacaccaucacguucgaggcgaccggcaaccugguggugccccgguacgccuucgccaugaaccgcggcagcggguccggcaucaucaucagcgacgccccgguccacgacugcaacaccaagugccagacccccaagggggccaucaacacgucccugcccuuccagaacauccaccccgugaccaucggcgagugcccgaaguacgucaagagcaccaagcuccggauggcgaccgggcugcgcaacauccccuccauccagagccggggccuguucggcgccaucgccggguucaucgagggcggguggacgggcaugaucgacgggugguacggcuaccaccaccagaacgagcagggcuccggguacgccgccgaccagcgcagcacccagaacgcgaucgacggcaucaccaacaaggugaacuccgugaucgagaagaugaacacccaguucacggccguggggaaggaguucaaccaccucgagaagcggaucgagaaccugaacaagaaggucgacgacggcuuccuggacaucuggaccuacaacgccgagcuccuggugcugcucgagaacgagcgcacccuggacuuccacgacagcaacgucaagaaccuguacgagaaggugcggucccagcuccgcaacaacgccaaggagaucgggaacggcugcuucgaguucuaccacaagugcgacgacacgugcauggagagcgugaagaacggcaccuacgacuaccccaaguacuccgaggagagcaagcugaaccgggaggagaucgacggggucaagcuggaguccacccgcaucuaccagauccucgccaucuacagcaccguggcguccagccuggugcugcucgucucccugggcgccaucagcuucuggaugugcagcaacgggucccugcagugccggaucugcaucuga

SEQ ID NO: 74183 - RNA, 1701 nt, Artificial Sequence
  derived and/or modified CDS sequence (opt1) from hemagglutinin__InfluenzaA__AGQ47882
augaaggccauccugcucgugcugcugugcaccuucgccgcgaccaacgccgacacgcucugcaucggcuaccacgccaacaacagcaccgacaccgucgacaccgugcuggagaagaacgugacggucacccacuccgugaaccugcucgaggaccgccacaacgggaagcugugcaagcugggcgggaucgcgccccuccaccugggcaagugcaacaucgccggguggcugcucggcaacccggagugcgagcugcugcucaccgugagcuccuggagcuacaucgucgagaccuccaacagcgacaacggcacgugcuaccccggggacuucaucaacuacgaggagcugcgggagcagcuguccagcguguccagcuucgagcgcuucgagaucuuccccaagaccuccagcuggcccaaccacgagaccaaccggggcgugaccgccgccugcccguacgccggggccaacuccuucuaccgcaaccucaucuggcuggucaagaaggagaacagcuaccccaagcuguccaagagcuacgugaacaacaagggcaaggaggugcucguccugugggggauccaccacccgcccacguccaccgaccagcagagccuguaccagaacgcggacgccuacguguucgugggcuccagcaaguacaaccggaaguucaagcccgagaucgccgcccgccccaagguccggggccaggccgggcgcaugaacuacuacuggacccucaucgagcccggcgacaccaucacguucgaggcgaccgggaaccugguggugccccgguacgccuucgccaugaaccgcggcagcggcuccgggaucaucaucagcgacgccccgguccacgacugcaacaccaagugccagacccccaagggcgccaucaacacgucccugcccuuccagaacauccaccccgugaccaucggggagugcccgaaguacgucaagagcaccaagcuccggauggcgaccggccugcgcaacauccccuccauccagagccgggggcuguucggcgccaucgccggcuucaucgagggcggguggacggggaugaucgacggcugguacggguaccaccaccagaacgagcagggcuccggcuacgccgccgaccagcgcagcacccagaacgcgaucgacgggaucaccaacaaggugaacuccgugaucgagaagaugaacacccaguucacggccgugggcaaggaguucaaccaccucgagaagcggaucgagaaccugaacaagaaggucgacgacggguuccuggacaucuggaccuacaacgccgagcuccuggugcugcucgagaacgagcgcacccuggacuuccacgacagcaacgucaagaaccuguacgagaaggugcggucccagcuccgcaacaacgccaaggagaucggcaacgggugcuucgaguucuaccacaagugcgacgacacgugcauggagagcgugaagaacggcaccuacgacuaccccaaguacuccgaggagagcaagcugaaccgggaggagaucgacggcgucaagcuggaguccacccgcaucuaccagauccucgccaucuacagcaccguggcguccagccuggugcugcucgucucccugggggccaucagcuucuggaugugcagcaacggcucccugcagugccggaucugcaucuga

SEQ ID NO: 74184 - RNA, 1701 nt, Artificial Sequence; identical to SEQ ID NO: 73119
  derived and/or modified CDS sequence (opt1) from hemagglutinin__InfluenzaA__AGQ47894

SEQ ID NO: 74185 - RNA, 1701 nt, Artificial Sequence
  derived and/or modified CDS sequence (opt1) from hemagglutinin__InfluenzaA__AGQ47906
augaagaccaucaucgcccugagcuacaucuucugccucgcccugggccaggaccugcccgggaacgacaacuccaccgcgacgcucugccugggccaccacgccgugccgaacgggacccuggucaagaccaucaccgacgaccagaucgaggugacgaacgccaccgagcucgugcagagcuccagcaccggcaagaucugcaacaacccccaccgcauccuggacgggaucgacugcacccugaucgacgcccuccugggcgacccccacugcgacgucuuccagaacgagacgugggaccuguucguggagcgguccaaggccuucagcaacugcuaccccuacgacgugccggacuacgcgucccuccgcagccuggucgccuccagcggcacccuggaguucaucaccgagggguucaccuggacgggcgugacccagaacgggggcuccaacgccugcaagcgggggcccggcagcggcuucuucucccgccucaacuggcugaccaagagcggguccaccuaccccgugcugaacgucacgaugcccaacaacgacaacuucgacaagcucuacaucuggggcauccaccacccgagcaccaaccaggagcagaccucccuguacgugcaggccagcgggcgggugaccgucuccacgcgccggagccagcagaccaucauccccaacaucggcagccgccccugggugcggggccuguccagccgcaucuccaucuacuggaccaucgugaagcccggggacguccucgugaucaacagcaacggcaaccugaucgcgccgcggggguacuucaagaugcgcaccggcaaguccagcaucaugcgguccgacgcccccaucgacacgugcaucagcgagugcaucacccccaacggguccauccccaacgacaagccguuccagaacgugaacaagaucaccuacggcgccugccccaaguacgucaagcagaacacccugaagcucgccacgggcaugcgcaacgugcccgagaagcagacccgggggcuguucggcgccaucgcgggguucaucgagaacggcugggaggggaugaucgacggcugguacggcuuccgccaccagaacagcgaggggaccggccaggccgccgaccugaaguccacccaggccgccaucgaccagaucaacgggaagcucaaccgggugaucgagaagacgaacgagaaguuccaccagaucgagaaggaguucagcgaggucgagggccgcauccaggaccuggagaaguacguggaggacaccaagaucgaccugugguccuacaacgcggagcuccugguggcccuggagaaccagcacaccaucgaccucaccgacagcgagaugaacaagcuguucgagaagacgcggcgccagcugcgggagaacgccgaggacauggggaacggcugcuucaagaucuaccacaagugcgacaacgccugcaucgaguccauccgcaacggcaccuacgaccacgacgucuaccgcgacgaggcccucaacaaccgguuccagaucaaggggguggagcucaagagcggcuacaaggacuggauccuguggaucuccuucgcgaucagcugcuuccugcugugcgucgugcugcucggguucaucaugugggccugccagcgcggcaacauccggugcaacaucugcaucuga

SEQ ID NO: 74186 - RNA, 1701 nt, Artificial Sequence
  derived and/or modified CDS sequence (opt1) from hemagglutinin__InfluenzaA__AGQ47918
augaagaccaucaucgcccugagcuacaucuucugccucgcccugggccaggaccugcccgggaacgacaacaacaccgcgacgcucugccugggccaccacgccgugccgaacgggacccuggucaagaccaucaccgacgaccagaucgaggugacgaacgccaccgagcucgugcaguccagcuccaccggcaagaucugcaacaacccccaccgcauccuggacgggaucgacugcacccugaucgacgcccuccugggcgacccccacugcgacgucuuccagaacgagacgugggaccuguucguggagcggagcaaggccuucuccaacugcuaccccuacgacgugccggacuacgcgagccuccgcucccuggucgccagcuccggcacccuggaguucaucaccgagggguucaccuggacgggcgugacccagaacgggggcagcaacgccugcaagcgggggcccggcuccggcuucuucagccgccucaacuggcugaccaaguccgggagcaccuaccccgugcugaacgucacgaugcccaacaacgacaacuucgacaagcucuacaucuggggcgugcaccacccguccaccaaccaggagcagaccagccuguacgugcaggccuccgggcgggucaccgugagcacgcgccggucccagcagaccaucauccccaacaucggcagccgccccugggugcggggccugagcucccgcaucagcaucuacuggaccaucgucaagcccggggacgugcucgugaucaacuccaacggcaaccugaucgcgccgcggggguacuucaagaugcgcaccggcaagagcuccaucaugcggagcgacgcccccaucgacacgugcaucuccgagugcaucacccccaacgggagcauccccaacgacaagccguuccagaacgucaacaagaucaccuacggcgccugccccaaguacgugaagcagaacacccugaagcucgccacgggcaugcgcaacgugcccgagaagcagacccgggggcuguucggcgccaucgcgggguucaucgagaacggcugggaggggaugaucgacggcugguacggcuuccgccaccagaacuccgaggggaccggccaggccgccgaccucaagagcacccaggccgccaucgaccagaucaacgggaagcugaaccgggucaucgagaagacgaacgagaaguuccaccagaucgagaaggaguucuccgagguggagggccgcauccaggaccuggagaaguacguggaggacaccaagaucgaccuguggagcuacaacgcggagcuccuggucgcccuggagaaccagcacaccaucgaccucaccgacuccgagaugaacaagcuguucgagaagacgcggcgccagcugcgggagaacgccgaggacauggggaacggcugcuucaagaucuaccacaagugcgacaacgccugcaucgagagcauccgcaacggcaccuacgaccacgacguguaccgcgacgaggcccucaacaaccgguuccagaucaagggggucgagcugaaguccggcuacaaggacuggauccuguggaucagcuucgcgaucuccugcuuccuccugugcguggugcugcucggguucaucaugugggccugccagcgcggcaacauccggugcaacaucugcaucuga

SEQ ID NO: 74187 - RNA, 1701 nt, Artificial Sequence
  derived and/or modified CDS sequence (opt1) from hemagglutinin__InfluenzaA__AGQ47930
augaaggccaaccugcucgugcugcugugcgcccucgcggccgccgacgccgacaccaucugcaucggcuaccacgccaacaacagcaccgacacggucgacaccgcgcuggagaagaacgugaccgugacccacuccgucaaccugcucgaggacagccacaacgggaagcugugccgccugaagggcaucgcgccccuccagcuggggaagugcaacaucgccggcuggcugcucgggaacccggagugcgacccccugcugcccgugcgguccuggagcuacaucguggagacgcccaacuccgagaacggcaucugcuacccgggcgacuucaucgacuacgaggagcuccgcgagcagcugagcuccgucagcuccuucgagcgguucgagaucuuccccaaggagagcuccuggcccaaccacaacaccaacaagggggugaccgccgccugcagccacgccggcaaguccagcuucuaccgcaaccugcucuggcugaccgagaaggagggguccuaccccaagcugaagaacagcuacgugaacaagaagggcaaggagguccucgugcugugggggauccaccacccguccaacagcaaggaccagcagaaccuguaccagaacgagaacgccuacguguccgucgugacgagcaacuacaaccggcgcuucacccccgagaucgccgagcggcccaaggugcgcgaccaggccggccggaugaacuacuacuggacccuccugaagcccggcgacaccaucaucuucgaggcgaacgggaaccugaucgccccgauguacgccuucgcccucagccgcggcuucggguccggcaucaucacgagcaacgccuccaugcacgagugcaacaccaagugccagacgccccugggcgcgaucaacagcucccugcccuuccagaacauccaccccgucaccaucggggagugcccgaaguacgugcggagcgccaagcuccgcauggugaccggccugcggaacauccccuccauccagagccgcgggcuguucggcgccaucgccggguucaucgagggcggcuggaccgggaugaucgacggcugguacggguaccaccaccagaacgagcagggcuccggguacgccgcggaccagaaguccacccagaacgccaucaacggcaucaccaacaaggucaacagcgugaucgagaagaugaacauccaguucacggccgugggcaaggaguucaacaagcucgagaagcggauggagaaccugaacaagaaggucgacgacggguuccuggacaucuggaccuacaacgccgagcuccuggugcugcucgagaacgagcgcacccuggacuuccacgacagcaacgugaagaaccuguacgagaaggucaagucccagcucaagaacaacgccaaggagaucggcaacgggugcuucgaguucuaccacaagugcgacaacgagugcauggagagcgugcggaacggcaccuacgacuaccccaaguacuccgaggagagcaagcugaaccgcgagaaggucgacggggugaagcuggaguccaugggcaucuaccagauccucgcgaucuacagcacgguggccuccagccugguccugcucgugagccugggcgccaucuccuucuggaugugcagcaacgggucccugcagugccggaucugcaucuga

SEQ ID NO: 74188 - RNA, 1698 nt, Artificial Sequence; identical to SEQ ID NO: 67302
  derived and/or modified CDS sequence (opt1) from hemagglutinin__InfluenzaA__AGQ47942

SEQ ID NO: 74189 - RNA, 1698 nt, Artificial Sequence
  derived and/or modified CDS sequence (opt1) from hemagglutinin__InfluenzaA__AGQ47954
augaaggccaaccugcucgugcugcugugcgcccucgcggccgccgacgccgacaccaucugcaucggcuaccacgccaacaacagcaccgacacggucgacaccgugcuggagaagaacgugaccgucacccacuccgugaaccugcucgaggacagccacaacgggaagcugugccgccugaagggcaucgcgccccuccagcuggggaagugcaacaucgccggcuggcugcucgggaacccggagugcgacccccugcugcccgugcgguccuggagcuacaucgucgagacgcccaacuccgagaacggcaucugcuacccgggcgacuucaucgacuacgaggagcuccgcgagcagcugagcuccgugagcuccuucgagcgguucgagaucuuccccaaggagagcuccuggcccaaccacaacaccaacggggugaccgccgccugcagccacgagggcaaguccagcuucuaccgcaaccugcucuggcugaccgagaaggagggguccuaccccaagcugaagaacagcuacgucaacaagaagggcaaggaggugcucgugcugugggggauccaccacccgcccaacuccaaggagcagcagaaccuguaccggaacgagaacgcguacgucagcguggugacguccaacuacaaccgccgguucacccccgagaucgccgagcgccccaagguccgggaccaggccggccgcaugaacuacuacuggacccuccugaagccgggcgacaccaucaucuucgaggccaacgggaaccugaucgcccccauguacgcguucgcccucagccggggcuucgggagcggcaucaucacguccaacgccagcaugcacgagugcaacaccaagugccagacgccccugggcgccaucaacuccagccugcccuaccagaacauccacccggugaccaucggggagugccccaaguacgugcgcuccgccaagcuccggauggucaccggccugcgcaacauccccagcauccagucccgggggcuguucggcgcgaucgccggguucaucgagggcggcuggaccgggaugaucgacggcugguacggguaccaccaccagaacgagcagggcagcggguacgccgccgaccagaaguccacccagaacgccaucaacggcaucaccaacaaggugaacacggugaucgagaagaugaacauccaguucaccgcggucggcaaggaguucaacaagcucgagaagcgcauggagaaccugaacaagaagguggacgacggguuccuggacaucuggaccuacaacgccgagcuccuggugcugcucgagaacgagcggacccuggacuuccacgacagcaacgucaagaaccuguacgagaaggugaagucccagcucaagaacaacgccaaggagaucggcaacgggugcuucgaguucuaccacaagugcgacaacgagugcauggagagcguccgcaacggcacguacgacuaccccaaguacuccgaggagagcaagcugaaccgggagaagguggacggggugaagcuggaguccaugggcaucuaccagauccucgccaucuacagcaccgucgccuccagccuggugcugcucgugucccugggcgcgaucagcuucuggaugugcagcaacgggucccugcagugccgcaucugcaucuga

SEQ ID NO: 74190 - RNA, 1698 nt, Artificial Sequence
  derived and/or modified CDS sequence (opt1) from hemagglutinin__InfluenzaA__AGQ47966
augaaggccaaccugcucgugcugcugugcgcccucgcggccgccgacgccgacaccaucugcaucggcuaccacgccaacaacagcaccgacacggucgacaccgugcuggagaagaacgugaccgucacccacuccgugaaccugcucgaggacagccacaacgggaagcugugccgccugaagggcaucgcgccccuccagcuggggaagugcaacaucgccggcuggcugcucgggaacccggagugcgacccccugcugcccgugggcuccuggagcuacaucgucgagacgcccaacuccgagaacggcaucugcuacccgggggacuucaucgacuacgaggagcuccgggagcagcugagcuccgugagcuccuucgagcgcuucgagaucuuccccaaggagagcuccuggcccgaccacaacaccaacggcgugaccgccgccugcagccacgaggggaagaacuccuucuaccggaaccugcucuggcugaccgagaaggagagcuccuaccccaagcugaagaacagcuacgucaacaagaagggcaaggaggugcucgugcugugggggauccaccacccgcccaacuccaaggagcagcagaaccuguaccagaacgagaacgcguacgucagcguggugacguccaacuacaaccgccgguucacccccgagaucgccgagcgccccaaggucaaggaccaggccggccggaugaacuacuacuggacccuccugaagccgggcgacaccaucaucuucgaggccaacgggaaccugaucgcccccauguacgcguucgcccucagccgcggcuucgggagcggcaucaucacguccaacgccagcaugcacgagugcaacaccaagugccagacgccccugggcgccaucaacuccagccugcccuaccagaacauccacccggugaccaucggggagugccccaaguacgugcgguccgccaagcuccgcauggucaccggccugcggaacauccccagcauccagucccgcgggcuguucggcgcgaucgccggguucaucgagggcggcuggaccgggaugaucgacggcugguacggguaccaccaccagaacgagcagggcagcggguacgccgccgaccagaaguccacccagaacgccaucaacggcaucaccaacaaggugaacacggugaucgagaagaugaacauccaguucaccgcggucggcaaggaguucaacaagcucgagaagcggauggagaaccugaacaagaagguggacgacggguuccuggacaucuggaccuacaacgccgagcuccuggugcugcucgagaacgagcgcacccuggacuuccacgacagcaacgucaagaaccuguacgagaaggugaagucccagcucaagaacaacgccaaggagaucggcaacgggugcuucgaguucuaccacaagugcgacaacgagugcauggagagcguccggaacggcacguacgacuaccccaaguacuccgaggagagcaagcugaaccgcgagaagguggacggggugaagcuggaguccaugggcaucuaccagauccucgccaucuacagcaccgucgccuccagccuggugcugcucgugucccugggcgcgaucagcuucuggaugugcagcaacgggucccugcagugccggaucugcaucuga

SEQ ID NO: 74191 - RNA, 1698 nt, Artificial Sequence
  derived and/or modified CDS sequence (opt1) from hemagglutinin__InfluenzaA__AGQ47978
augaaggccaaccugcucgugcugcugugcgcccucgcggccgccgacgccgacaccaucugcaucggcuaccacgccaacaacagcaccgacacggucgacaccgugcuggagaagaacgugaccgucacccacuccgugaaccugcucgaggacagccacaacgggaagcugugccgccugaagggcaucgcgccccuccagcuggggaagugcaacaucgccggcuggcugcucgggaacccggagugcgacccccugcugcccgugggcuccuggagcuacaucgucgagacgcccaacuccgagaacggcaucugcuacccgggggacuucaucgacuacgaggagcuccgggagcagcugagcuccgugagcuccuucgagcgcuucgagaucuuccccaaggagagcuccuggcccgaccacaacaccaacggcgugaccgccgccugcagccacgaggggaagaacuccuucuaccggaaccugcucuggcugaccaagaaggagagcuccuaccccgagcugaagaacagcuacgucaacaagaagggcaaggaggugcucgugcugugggggauccaccacccgcccaacuccaaggagcagcagaaccuguaccagaacgagaacgcguacgucagcguggugacguccaacuacaaccgccgguucacccccgagaucgccgagcgccccaaggucaaggaccaggccggccggaugaacuacuacuggacccuccugaagccgggcgacaccaucaucuucgaggccaacgggaaccugaucgcccccauguacgcguucgcccucagccgcggcuucgggagcggcaucaucacguccaacgccagcaugcacgagugcaacaccaagugccagacgccccugggcgccaucaacuccagccugcccuaccagaacauccacccggugaccaucggggagugccccaaguacgugcgguccgccaagcuccgcauggucaccggccugcggaacauccccagcauccagucccgcgggcuguucggcgcgaucgccggguucaucgagggcggcuggaccgggaugaucgacggcugguacggguaccaccaccagaacgagcagggcagcggguacgccgccgaccagaaguccacccagaacgccaucaacggcaucaccaacaaggugaacacggugaucgagaagaugaacauccaguucaccgcggucggcaaggaguucaacaagcucgagaagcggauggagaaccugaacaagaagguggacgacggguuccuggacaucuggaccuacaacgccgagcuccuggugcugcucgagaacgagcgcacccuggacuuccacgacagcaacgucaagaaccuguacgagaaggugaagucccagcucaagaacaacgccaaggagaucggcaacgggugcuucgaguucuaccacaagugcgacaacgagugcauggagagcguccggaacggcacguacgacuaccccaaguacuccgaggagagcaagcugaaccgcgagaagguggacggggugaagcuggaguccaugggcaucuaccagauccucgccaucuacagcaccgucgccuccagccuggugcugcucgugucccugggcgcgaucagcuucuggaugugcagcaacgggucccugcagugccggaucugcaucuga

SEQ ID NO: 74192 - RNA, 1698 nt, Artificial Sequence
  derived and/or modified CDS sequence (opt1) from hemagglutinin__InfluenzaA__AGQ47990
augaaggccaaccugcucgugcugcugugcgcccucgcggccgccgacgccgacaccaucugcaucggcuaccacgccaacaacagcaccgacacggucgacaccgugcuggagaagaacgugaccgucacccacuccgugaaccugcucgaggacagccacaacgggaagcugugccgccugaagggcaucgcgccccuccagcuggggaagugcaacaucgccggcuggcugcucgggaacccggagugcgacccccugcugcccgugggcuccuggagcuacaucgucgagacgcccaacuccgagaacggcaucugcuacccgggggacuucaucgacuacgaggagcuccgggagcagcugagcuccgugagcuccuucgagcgcuucaagaucuuccccaaggagagcuccuggcccgaccacaacaccaacggcgugaccgccgccugcagccacgaggggaagaacuccuucuaccggaaccugcucuggcugaccaagaaggagagcuccuaccccgagcugaagaacagcuacgucaacaagaagggcaaggaggugcucgugcugugggggauccaccacccgcccaacuccaaggagcagcagaaccuguaccagaacgagaacgcguacgucagcguggugacguccaacuacaaccgccgguucacccccgagaucgccgagcgccccaaggucaaggaccaggccggccggaugaacuacuacuggacccuccugaagccgggcgacaccaucaucuucgaggccaacgggaaccugaucgcccccauguacgcguucgcccucagccgcggcuucgggagcggcaucaucacguccaacgccagcaugcacgagugcaacaccaagugccagacgccccugggcgccaucaacuccagccugcccuaccagaacauccacccggugaccaucggggagugccccaaguacgugcgguccgccaagcuccgcauggucaccggccugcggaacauccccagcauccagucccgcgggcuguucggcgcgaucgccggguucaucgagggcggcuggaccgggaugaucgacggcugguacggguaccaccaccagaacgagcagggcagcggguacgccgccgaccagaaguccacccagaacgccaucaacggcaucaccaacaaggugaacacggugaucgagaagaugaacauccaguucaccgcggucggcaaggaguucaacaagcucgagaagcggauggagaaccugaacaagaagguggacgacggguuccuggacaucuggaccuacaacgccgagcuccuggugcugcucgagaacgagcgcacccuggacuuccacgacagcaacgucaagaaccuguacgagaaggugaagucccagcucaagaacaacgccaaggagaucggcaacgggugcuucgaguucuaccacaagugcgacaacgagugcauggagagcguccggaacggcacguacgacuaccccaaguacuccgaggagagcaagcugaaccgcgagaagguggacggggugaagcuggaguccaugggcaucuaccagauccucgccaucuacagcaccgucgccuccagccuggugcugcucgugucccugggcgcgaucagcuucuggaugugcagcaacgggucccugcagugccggaucugcaucuga

SEQ ID NO: 74193 - RNA, 1698 nt, Artificial Sequence
  derived and/or modified CDS sequence (opt1) from hemagglutinin__InfluenzaA__AGQ48002
augaaggccaaccugcucgugcugcugugcgcccucgcggccgccgacgccgacaccaucugcaucggcuaccacgccaacaacagcaccgacacggucgacaccgugcuggagaagaacgugaccgucacccacuccgugaaccugcucgaggacagccacaacgggaagcugugccgccugaagggcaucgcgccccuccagcuggggaagugcaacaucgccggcuggcugcucgggaacccggagugcgacccccugcugcccgugggcuccuggagcuacaucgucgagacgcccaacuccgagaacggcaucugcuacccgggggacuucaucgacuacgaggagcuccgggagcagcugagcuccgugagcuccuucgagcgcuucaagaucuuccccaaggagagcuccuggcccgaccacaacaccaacggcgugaccgccgccugcagccacgaggggaagaacuccuucuaccggaaccugcucuggcugaccaagaaggagagcuccuaccccgagcugaagaacagcuacgucaacaagaagcgcaaggaggugcucgugcuguggggcauccaccacccgcccaacuccaaggagcagcagaaccuguaccagaacgagaacgcguacgucagcguggugacguccaacuacaaccggcgcuucacccccgagaucgccgagcggcccaaggucaaggaccaggccgggcgcaugaacuacuacuggacccuccugaagccgggcgacaccaucaucuucgaggccaacggcaaccugaucgcccccauguacgcguucgcccucagccggggguucggcagcgggaucaucacguccaacgccagcaugcacgagugcaacaccaagugccagacgccccugggcgccaucaacuccagccugcccuaccagaacauccacccggugaccaucggcgagugccccaaguacgugcgcuccgccaagcuccggauggucaccgggcugcgcaacauccccagcauccagucccggggccuguucggggcgaucgccggcuucaucgagggcggguggaccggcaugaucgacgggugguacggcuaccaccaccagaacgagcaggggagcggcuacgccgccgaccagaaguccacccagaacgccaucaacgggaucaccaacaaggugaacacggugaucgagaagaugaacauccaguucaccgcggucggcaaggaguucaacaagcucgagaagcgcauggagaaccugaacaagaagguggacgacggcuuccuggacaucuggaccuacaacgccgagcuccuggugcugcucgagaacgagcggacccuggacuuccacgacagcaacgucaagaaccuguacgagaaggugaagucccagcucaagaacaacgccaaggagaucgggaacggcugcuucgaguucuaccacaagugcgacaacgagugcauggagagcguccgcaacgggacguacgacuaccccaaguacuccgaggagagcaagcugaaccgggagaagguggacggcgugaagcuggaguccauggggaucuaccagauccucgccaucuacagcaccgucgccuccagccuggugcugcucgugucccugggcgcgaucagcuucuggaugugcagcaacggcucccugcagugccgcaucugcaucuga

SEQ ID NO: 74194 - RNA, 1698 nt, Artificial Sequence
  derived and/or modified CDS sequence (opt1) from hemagglutinin__InfluenzaA__AGQ48014
augaaggccaaccugcucgugcugcugugcgcccucgcggccgccgacgccgacaccaucugcaucggcuaccacgccaacaacagcaccgacacggucgacaccgugcuggagaagaacgugaccgucacccacuccgugaaccugcucgaggacagccacaacgggaagcugugccgccugaagggcaucgcgccccuccagcuggggaagugcaacaucgccggcuggcugcucgggaacccgggcugcgacccccugcugcccgugggcuccuggagcuacaucgucgagacgcccaacuccgagaacgggaucugcuacccgggcgacuucaucgacuacgaggagcuccgggagcagcugagcuccgugagcuccuucgagcgcuucaagaucuuccccaaggagagcuccuggcccgaccacaacaccaacggggugaccgccgccugcagccacgagggcaagaacuccuucuaccggaaccugcucuggcugaccaagaaggagagcuccuaccccgagcugaagaacagcuacgucaacaagaagcgcaaggaggugcucgugcugugggggauccaccacccgcccaacuccaaggagcagcagaaccuguaccagaacgagaacgcguacgucagcguggugacguccaacuacaaccggcgcuucacccccgagaucgccgagcggcccaaggucaaggaccaggccggccgcaugaacuacuacuggacccuccugaagccgggcgacaccaucaucuucgaggccaacgggaaccugaucgcccccauguacgcguucgcccucagccggggcuucgggagcggcaucaucacguccaacgccagcaugcacgagugcaacaccaagugccagacgccccugggcgccaucaacuccagccugcccuaccagaacauccacccggugaccaucggggagugccccaaguacgugcgcuccgccaagcuccggauggucaccggccugcgcaacauccccagcauccagucccgggggcuguucggcgcgaucgccggguucaucgagggcggcuggaccgggaugaucgacggcugguacggguaccaccaccagaacgagcagggcagcggguacgccgccgaccagaaguccacccagaacgccaucaacggcaucaccaacaaggugaacacggugaucgagaagaugaacauccaguucaccgcggucggcaaggaguucaacaagcucgagaagcgcauggagaaccugaacaagaagguggacgacggguuccuggacaucuggaccuacaacgccgagcuccuggugcugcucgagaacgagcggacccuggacuuccacgacagcaacgucaagaaccuguacgagaaggugaagucccagcucaagaacaacgccaaggagaucggcaacgggugcuucgaguucuaccacaagugcgacaacgagugcauggagagcguccgcaacggcacguacgacuaccccaaguacuccgaggagagcaagcugaaccgggagaagguggacggggugaagcuggaguccaugggcaucuaccagauccucgccaucuacagcaccgucgccuccagccuggugcugcucgugucccugggcgcgaucagcuucuggaugugcagcaacgggucccugcagugccgcaucugcaucuga

SEQ ID NO: 74195 - RNA, 1698 nt, Artificial Sequence
  derived and/or modified CDS sequence (opt1) from hemagglutinin__InfluenzaA__AGQ48026
augaaggccaaccugcucgugcugcugugcgcccucgcggccgccgacgccgacaccaucugcaucggcuaccacgccaacaacagcaccgacacggucgacaccgugcuggagaagaacgugaccgucacccacuccgugaaccugcucgaggacagccacaacgggaagcugugcaagcugaagggcaucgcgccccuccagcuggggaagugcaacaucgccggcuggcugcucgggaacccgggcugcgacccccugcugcccgugggcuccuggagcuacaucgucgagacgcccaacuccgagaacgggaucugcuacccgggcgacuucaucgacuacgaggagcuccgcgagcagcugagcuccgugagcuccuucgagcgguucaagaucuuccccaaggagagcuccuggcccgaccacaacaccaacggggugaccgccgccugcagccacgagggcaagaacuccuucuaccgcaaccugcucuggcugaccaagaaggagagcuccuaccccgagcugaagaacagcuacgucaacaagaagcggaaggaggugcucgugcugugggggauccaccacccgcccaacuccaaggagcagcagaaccuguaccagaacgagaacgcguacgucagcguggugacguccaacuacaaccgccgguucacccccgagaucgccgagcgccccaaggucaaggaccaggccggccggaugaacuacuacuggacccuccugaagccgggcgacaccaucaucuucgaggccaacgggaaccugaucgcccccauguacgcguucgcccucagccgcggcuucgggagcggcaucaucacguccaacgccagcaugcacgagugcaacaccaagugccagacgccccugggcgccaucaacuccagccugcccuaccagaacauccacccggugaccaucggggagugccccaaguacgugcgguccgccaagcuccgcauggucaccggccugcggaacauccccagcauccagucccgcgggcuguucggcgcgaucgccggguucaucgagggcggcuggaccgggaugaucgacggcugguacggguaccaccaccagaacgagcagggcagcggguacgccgccgaccagaaguccacccagaacgccaucaacggcaucaccaacaaggugaacacggugaucgagaagaugaacauccaguucaccgcggucggcaaggaguucaacaagcucgagaagcggauggagaaccugaacaagaagguggacgacggguuccuggacaucuggaccuacaacgccgagcuccuggugcugcucgagaacgagcgcacccuggacuuccacgacagcaacgucaagaaccuguacgagaaggugaagucccagcucaagaacaacgccaaggagaucggcaacgggugcuucgaguucuaccacaagugcgacaacgagugcauggagagcguccggaacggcacguacgacuaccccaaguacuccgaggagagcaagcugaaccgcgagaagguggacggggugaagcuggaguccaugggcaucuaccagauccucgccaucuacagcaccgucgccuccagccuggugcugcucgugucccugggcgcgaucagcuucuggaugugcagcaacgggucccugcagugccggaucugcaucuga

SEQ ID NO: 74196 - RNA, 1698 nt, Artificial Sequence
  derived and/or modified CDS sequence (opt1) from hemagglutinin__InfluenzaA__AGQ48038
augaaggccaaccugcucgugcugcugugcgcccucgcggccgccgacgccgacaccaucugcaucggcuaccacgccaacaacagcaccgacacggucgacaccgugcuggagaagaacgugaccgucacccacuccgugaaccugcucgaggacagccacaacgggaagcugugcaagcugaagggcaucgcgccccuccagcuggggaagugcaacaucgccggcuggcugcucgggaacccgggcugcgacccccugcugcccgugggcuccuggagcuacaucgucgagacgcccaacuccgagaacgggaucugcuacccgggcgacuucaucgacuacgaggagcuccgcgagcagcugagcuccgugagcuccuucgagcgguucaagaucuuccccaaggagagcuccuggcccgaccacaacaccaacggggugaccgccgccugcagccacgagggcaagaacuccuucuaccgcaaccugcucuggcugaccaagaaggagagcuccuaccccgagcugaagaacagcuacgucaacaagaagcgggaggaggugcucgugcugugggggauccaccacccgcccaacuccgaggagcagcagaaccuguaccagaacgagaacgcguacgucagcguggugacguccaacuacaaccgccgguucacccccgagaucgccgagcgccccaaggucaagggccaggccggccggaugaacuacuacuggacccuccugaagccgggggacaccaucaucuucgaggccaacggcaaccugaucgcccccauguacgcguucgcccucagccgcggguucggcagcggcaucaucacguccaacgccagcaugcacgagugcaacaccaagugccagacgccccugggggccaucaacuccagccugcccuaccagaacauccacccggugaccaucggcgagugccccaaguacgugcgguccgccaagcuccgcauggucaccgggcugcggaacauccccagcauccagucccgcggccuguucggggcgaucgccggcuucaucgagggcggguggaccggcaugaucgacgggugguacggcuaccaccaccagaacgagcaggggagcggcuacgccgccgaccagaaguccacccagaacgccaucaacggcaucaccaacaaggugaacacggugaucgagaagaugaacauccaguucaccgcggucgggaaggaguucaacaagcucgagaagcggauggagaaccugaacaagaagguggacgacggcuuccuggacaucuggaccuacaacgccgagcuccuggugcugcucgagaacgagcgcacccuggacuuccacgacagcaacgucaagaaccuguacgagaaggugaagucccagcucaagaacaacgccaaggagaucgggaacggcugcuucgaguucuaccacaagugcgacaacgagugcauggagagcguccggaacgggacguacgacuaccccaaguacuccgaggagagcaagcugaaccgcgagaagguggacggcgugaagcuggaguccaugggcaucuaccagauccucgccaucuacagcaccgucgccuccagccuggugcugcucgugucccugggggcgaucagcuucuggaugugcagcaacggcucccugcagugccggaucugcaucuga

SEQ ID NO: 74197 - RNA, 1698 nt, Artificial Sequence
  derived and/or modified CDS sequence (opt1) from hemagglutinin__InfluenzaA__AGQ48050
augaaggccaaccugcucgugcugcugugcgcccucgcggccgccgacgccgacaccaucugcaucggcuaccacgccaacaacagcaccgacacggucgacaccgugcuggagaagaacgugaccgucacccacuccgugaaccugcucgaggacagccacaacgggaagcugugcaagcugaagggcaucgcgccccuccagcuggggaagugcaacaucgccggcuggcugcucgggaacccgggcugcgacccccugcugcccgugggcuccuggagcuacaucgucgagacgcccaacuccgagaacgggaucugcuacccgggcgacuucaucgacuacgaggagcuccgcgagcagcugagcuccgugagcuccuucgagcgguucaagaucuuccccaaggagagcuccuggcccgaccacaacaccaacggggugaccgccgccugcagccacgagggcaagaacuccuucuaccgcaaccugcucuggcugaccaagaaggagagcuccuaccccgagcugaagaacagcuacgucaacaagaagcgggaggaggugcucgugcugugggggauccaccacccgcccgacuccgaggagcagcagaaccuguaccagaacgagaacgcguacgucagcguggugacguccaacuacaaccgccgguucacccccgagaucgccgagcgccccaaggucaagggccaggccggccggaugaacuacuacuggacccuccugaagccgggggacaccaucaucuucaaggccaacggcaaccugaucgcccccauguacgcguucgcccucagccgcggguucggcagcggcaucaucacguccaacgccagcaugcacgagugcaacaccaagugccagacgccccugggggccaucaacuccagccugcccuaccagaacauccacccggugaccaucggcgagugccccaaguacgugcgguccgccaagcuccgcauggucaccgggcugcggaacauccccagcauccagucccgcggccuguucggggcgaucgccggcuucaucgagggcggguggaccggcaugaucgacgggugguacggcuaccaccaccagaacgagcaggggagcggcuacgccgccgaccagaaguccacccagaacgccaucaacggcaucaccaacaaggugaacacggugaucgagaagaugaacauccaguucaccgcggucgggaaggaguucaacaagcucgagaagcggauggagaaccugaacaagaagguggacgacggcuuccuggacaucuggaccuacaacgccgagcuccuggugcugcucgagaacgagcgcacccuggacuuccacgacagcaacgucaagaaccuguacgagaaggugaagucccagcucaagaacaacgccaaggagaucgggaacggcugcuucgaguucuaccacaagugcgacaacgagugcauggagagcguccggaacgggacguacgacuaccccaaguacuccgaggagagcaagcugaaccgcgagaagguggacggcgugaagcuggaguccaugggcaucuaccagauccucgccaucuacagcaccgucgccuccagccuggugcugcucgugucccugggggcgaucagcuucuggaugugcagcaacggcucccugcagugccggaucugcaucuga

SEQ ID NO: 74198 - RNA, 1689 nt, Artificial Sequence
  derived and/or modified CDS sequence (opt1) from hemagglutinin__InfluenzaA__AGQ80946
auggccaucaucuaccugauccuccuguucaccgccgugcgcggcgaccagaucugcaucggguaccacagcaacaacuccaccgagaaggucgacacgauccuggagcggaacgugaccgugacccacgcgcaggacauccucgagaagacccacaacggcaagcugugcaagcugaacgggaucccgccccucgagcugggcgacugcagcaucgccggguggcugcucggcaaccccgagugcgaccgccugcugacgguccccgagugguccuacaucauggagaaggagaacccccggaacggccucugcuacccggggagcuucaacgacuacgaggagcugaagcaccuccuguccagcgugacccacuucgagaaggugaagauccugcccaaggaccgcuggacccagcacaccacgaccggcgggucccgggccugcgccgucagcggcaaccccuccuucuuccgcaacaugguguggcugaccaagaaggggcccaacuacccgguggccaagggcagcuacaacaacaccuccggcgaccagaugcucaucaucuggggcguccaccaccccaacgacgaggcggagcagcggacgcuguaccagaacguggggaccuacgugagcgucgggaccuccacccugaacaagcgcagcgugcccgagaucgccacgcggcccaaggugaacggccagggcgggcgcauggaguucuccuggaccauccucgacguccuggacaccaucaacuucgagagcaccggcaaccugaucgccccggaguacggguucaagaucuccaagcggggcagcuccgggaucaugaagacggagggcacccucgagaacugcgagaccaagugccagacgccccugggcgccaucaacaccacccugcccuuccacaacauccacccccucaccaucggggagugcccgaaguacgucaagagcgagcgccuggugcuggcgaccggccuccggaacgugccccagaucgagagccgcgggcuguucggcgccaucgccggguucaucgagggcggcuggcaggggaugguggacggcugguacggguaccaccacuccaacgaccagggcagcggguacgccgccgacaaggaguccacgcagaaggcgaucgacggcaucaccaacaaggugaacagcgucaucgagaagaugaacacccaguucgaggccgugggcaaggaguucuccaaccuggagaagcggcucgagaaccugaacaagaagauggaggacggguuccuggacguguggaccuacaacgccgagcuccugguccugauggagaacgagcgcacgcucgacuuccacgacagcaacgugaagaaccuguacgacaagguccggaugcagcugcgcgacaacgccaaggagcucggcaacgggugcuucgaguucuaccacaagugcgacgacgagugcaugaacuccgugaagaacggcaccuacgacuaccccaaguacgaggaggagagcaagcugaaccggaacgagaucaagggcgugaagcuguccaacaugggggucuaccagauccucgccaucuacgcgaccguggccggcagccugucccuggccaucaugaucgccgggaucagccucuggaugugcuccaacggcagccugcagugccgcaucugcaucuga

SEQ ID NO: 74199 - RNA, 1689 nt, Artificial Sequence
  derived and/or modified CDS sequence (opt1) from hemagglutinin__InfluenzaA__AGQ80947
auggccaucaucuaccugauccuccuguucgccaccgugcgcggcgaccagaucugcaucggguaccacagcaacaacuccaccgagaaggucgacacgauccuggagcggaacaucaccgugacccacgcgcaggacauccucgagaagacccacaacggcaagcugugcaagcugaacgggaucccgccccucgagcugggcaacugcagcaucgccggguggcugcucggcaaccccgagugcgaccgccugcugacggugcccgagugguccuacaucauggagaaggagaacccccgggacggccucugcuacccggggagcuucaacgacuacgaggagcugaagcaccuccuguccagcgucacccacuucgagaaggugaagauccugcccaaggaccgcuggacccagcacaccacgaccggcgggucccgggccugcgccgugagcggcaaccccuccuucuuccgcaacauggucuggcugaccaagaaggggagcaacuaccccaucgccaagggcuccuacaacaacaccagcggcgagcagaugcucaucaucuggggcgugcaccacccgaacgacgacgcggagcagcggacgcuguaccagaacguggggaccuacgucuccguggggaccagcacccugaacaagcgcuccauccccgagaucgccacgcggcccaaggugaacggccagggcgggcgcauggaguucagcuggaccauccucgacaugcuggacaccaucaacuucgaguccaccggcaaccugaucgcccccgaguacggguucaagaucagcaagcggggcuccagcgggaucaugaagacggagggcacccucgagaacugcgagaccaagugccagaccccgcugggcgccaucaacacgacccugcccuuccacaacauccacccccucaccaucggggagugccccaaguacgucaagagcgagcgccuggugcuggcgaccggccuccggaacgugccgcagaucgagucccgcgggcuguucggcgccaucgccggguucaucgagggcggcuggcaggggauggucgacggcugguacggguaccaccacagcaacgaccagggcuccggguacgccgccgacaaggagagcacgcagaaggcgaucgacggcaucaccaacaaggugaacuccgugaucgagaagaugaacacccaguucgaggccgucggcaaggaguucaacaaccuggagaagcggcucgagaaccugaacaagaagauggaggacggguuccuggacguguggaccuacaacgccgagcuccuggugcugauggagaacgagcgcacgcucgacuuccacgacagcaacgucaagaaccuguacgacaaggugcggaugcagcugaaggacaacgccaaggagcucggcaacgggugcuucgaguucuaccacaagugcgacgacgagugcaugaacuccgugaagaacggcaccuacgacuaccccaaguacgaggaggagagcaagcugaaccgcaacgagaucaagggcgucaagcuguccaacauggggguguaccagauccucgccaucuacgcgaccgucgccggcagccugucccuggccaucaugaucgccggggugagccucuggaugugcuccaacggcagccugcagugccggaucugcaucuga

SEQ ID NO: 74200 - RNA, 1689 nt, Artificial Sequence
  derived and/or modified CDS sequence (opt1) from hemagglutinin__InfluenzaA__AGQ80948
auggccaucaucuaccugauccuccuguucgccgcggugcgcggcgaccagaucugcaucggguaccacagcaacaacuccaccgagaaggucgacaccauccuggagcggaacgugacggugacccacgcccaggacauccucgagaagacccacaacggcaagcugugcaagcugaacgggaucccgccccucgagcugggcaacugcagcaucgccggguggcugcucggcaaccccgagugcgaccgccugcugaccguccccgagugguccuacaucauggagaaggagaacccccggaacggccucugcuacccggggagcuucaacgacuacgaggagcugaagcaccuccuguccagcgugacgcacuucgagaaggugaagauccugcccaaggaccgcuggacccagcacaccaccacgggcgggucccgggccugcgccgucuucggcaaccccagcuucuuccgcaacaugguguggcugaccaagaagggguccaacuaccccaucgcgaagggcagcuacaacaacaccuccggcgagcagaugcucaucaucuggggcgugcaccacccgaacgacgacgccgagcagcggacccuguaccagaacgucgggacguacgugagcguggggaccuccacccugaacaagcgcagcauccccgagaucgccacccggcccaaggucaacggccagggcgggcgcauggaguucuccuggacgauccucgacaugcuggacaccaucaacuucgagagcaccggcaaccugaucgcccccgaguacggguucaagaucuccaagcggggcagcuccgggaucaugaagaccgagggcacgcucgagaacugcgagaccaagugccagaccccgcugggcgcgaucaacaccacgcugcccuuccacaacauccacccccucaccaucggggagugccccaaguacgucaagagcgagcgccuggugcuggccaccggccuccggaacgugccgcagaucgagagccgcgggcuguucggcgccaucgccggguucaucgagggcggcuggcaggggaugguggacggcugguacggguaccaccacuccaacgaccagggcagcggguacgccgcggacaaggaguccacccagaaggccaucgacggcaucacgaacaaggugaacagcgucaucgagaagaugaacacccaguucgaggccgugggcaaggaguucaacaaccuggagaagcggcucgagaaccugaacaagaagauggaggacggguuccuggacguguggaccuacaacgccgagcuccugguccugauggagaacgagcgcacccucgacuuccacgacuccaacgugaagaaccuguacgacaagauccggaugcagcugaaggacaacgccaaggagcucggcaacgggugcuucgaguucuaccacaagugcgacgacgagugcaugaacagcgugaagaacggcacguacgacuaccccaaguacgaggaggaguccaagcugaaccgcaacgagaucaagggcgucaagcugagcaacauggggguguaccagauccucgcgaucuacgccaccgucgccggcucccugagccuggccaucaugaucgccgggaucucccucuggaugugcagcaacggcucccugcagugccggaucugcaucuga

SEQ ID NO: 74201 - RNA, 1689 nt, Artificial Sequence
  derived and/or modified CDS sequence (opt1) from hemagglutinin__InfluenzaA__AGQ80949
auggccaucaucuaccugauccuccuguucgccgcggugcgcggcgaccagaucugcaucggguaccacagcaacaacuccaccgagaaggucgacaccauccuggagcggaacgugacggugacccacgcccaggacauccucgagaagacccacaacggcaagcugugcaagcugaacgggaucccgccccucgagcugggcgacugcagcaucgccggguggcugcucggcaaccccgagugcgaccgccugcugaccguccccgagugguccuacaucauggagaaggagaacccccggaacggccucugcuacccggggagcuucaacgacuacgaggagcugaagcaccuccuguccagcgugacgcacuucgagaaggugaagauccugcccaaggaccgcuggacccagcacaccaccacgggcgggucccgggccugcgccgucagcggcaaccccuccuucuuccgcaacaugguguggcugaccaagaaggggagcaacuaccccaucgcgaagggcuccuacaacaacaccagcggcgagcagaugcucaucaucuggggcgugcaccacccgaacgacgacgccgagcagcggacccuguaccagaacgucgggacguacguguccguggggaccagcacccugaacaagcgcuccauccccgagaucgccacccggcccaaggucaacggccagggcgggcgcauggaguucagcuggacgauccucgacaugcuggacaccaucaacuucgaguccaccggcaaccugaucgcccccgaguacggguucaagaucagcaagcggggcuccagcgggaucaugaagaccgagggcacgcucgagaacugcgagaccaagugccagaccccgcugggcgcgaucaacaccacgcugcccuuccacaacauccacccccucaccaucggggagugccccaaguacgucaagagcgagcgccuggugcuggccaccggccuccggaacgugccgcagaucgagucccgcgggcuguucggcgccaucgccggguucaucgagggcggcuggcaggggaugguggacggcugguacggguaccaccacagcaacgaccagggcuccggguacgccgcggacaaggagagcacccagaaggccaucgacggcaucacgaacaaggugaacuccgucaucgagaagaugaacacccaguucgaggccgugggcaaggaguucaacaaccuggagaagcggcucgagaaccugaacaagaagauggaggacggguuccuggacguguggaccuacaacgccgagcuccugguccugauggagaacgagcgcacccucgacuuccacgacagcaacgugaagaaccuguacgacaagauccggaugcagcugaaggacaacgccaaggagcucggcaacgggugcuucgaguucuaccacaagugcgacgacgagugcaugaacuccgugaagaacggcacguacgacuaccccaaguacgaggaggagagcaagcugaaccgcaacgagaucaagggcgucaagcuguccaacauggggguguaccagauccucgcgaucuacgccaccgucgccggcagccugucccuggccaucaugaucgccgggaucagccucuggaugugcuccaacggcagccugcagugccggaucugcaucuga

SEQ ID NO: 74202 - RNA, 1701 nt, Artificial Sequence
  derived and/or modified CDS sequence (opt1) from hemagglutinin__InfluenzaA__AGQ80950
augaagaccaucaucgcccugagcuacaucuucugccucgccuucggccagaaccugcccgggaacgacuccagcaccgcgacgcugugccucggccaccacgccgugcugaacgggaccaucgucaagaccaucaccgacgaccagaucgaggugacgaacgccaccgagcuggugcaguccagcuccaccggcaagaucugcaacaacccgcacaagauccucgacgggcgcgacugcacccugaucgacgcccugcucggcgacccccacugcgacgucuuccaggacgagacgugggaccuguucguggagcggagcuccgccuucagcaacugcuaccccuacgacgugcccgacuacgcgucccugcgcagccucgucgccuccagcggcacccuggaguucaucaccgagggguucaccuggacgggcgugucccagaacgggggcagcggggccugcaagcggggcccggccaacggcuucuucucccgccugaacuggcucaccaagagcgggaacgcguaccccgugcugaacgucaccaugcccaacuccgacaacuucgacaagcuguacaucuggggcgugcaccaccccagcaccaaccaggagcagacgaaccucuacgugcaggccuccgggcgggucaccgugagcacccgccggagccagcagaccaucaucccgaacaucggcucccgccccugggugcggggccagagcgggcgcaucuccaucuacuggacgaucgucaagcccggcgacgugcuggugaucaacagcaacgggaaccugaucgcgccccggggcuacuucaagaugcgcaccgggaaguccagcaucaugcgguccgacgccccgaucgagaccugcaucagcgagugcaucacccccaacggcuccauccccaacgacaagcccuuccagaacgucaacaagaucacguacggcgccugcccgaaguacgugaagcagaacacccucaagcuggccaccgggaugcgcaacgugcccgagaagcagacccggggccuguucggggccaucgccggcuucaucgagaacgggugggagggcaugaucgacggcugguacggguuccgccaccagaacagcgagggcacggggcaggccgccgaccucaaguccacccaggcggccaucgaccagaucaacggcaagcugaaccgggucaucgagaagaccaacgagaaguuccaccagaucgagaaggaguucagcgagguggaggggcgcauccaggaccuggagaaguacguggaggacaccaagaucgaccucugguccuacaacgccgagcugcuggucgcccucgagaaccagcacacgaucgaccugaccgacagcgagaugaacaagcuguucgagaagacccggcgccagcuccgggagaacgccgaggacaugggcaacggcugcuucaagaucuaccacaagugcgacaacgcgugcaucgaguccauccgcaacgggaccuacgaccacgacaucuaccgcgacgaggcccugaacaaccgguuccagaucaagggcguggagcucaagagcggguacaaggacuggauccuguggaucuccuucgccaucagcugcuuccugcugugcgucgugcuccugggcuucaucaugugggccugccagcgcggcaacauccggugcaacaucugcaucuga

SEQ ID NO: 74203 - RNA, 1695 nt, Artificial Sequence
  derived and/or modified CDS sequence (opt1) from hemagglutinin__InfluenzaA__AGQ80951
augcugagcaucgugauccucuuccugcuggucgccgaguccagcucccagaacuacaccggcaaccccgugaucugcauggggcaccacgccguggcgaacggcaccauggucaagacgcucaccgacgaccagguggagguggucaccgcccaggagcugguggagagccagaaccugccggagcucugccccagcccccugcgccugguggacgggcagaccugcgacaucaucaacggcgcccucgggagccccggcugcgaccaccugaacggcgccgagugggacaucuucaucgagcggccgaacgccauggacacgugcuaccccuucgacguccccgacuaccagucccugcgcagcauccucgcgaacaacgggaaguucgaguucaucgccgaggaguuccagugguccaccgugaagcagaacggcaagagcggggccugcaagcgggccaacgugaacgacuucuucaaccgccugaacuggcuggucaaguccgacggcaacgcguacccccuccagaaccugaccaaggugaacaacggggacuacgcccggcuguacaucuggggcgugcaccacccgagcaccgacacggagcagaccaaccucuacaagaacaaccccggccgcgucaccguguccaccaagacgagccagaccuccgugguccccaacaucgggagccggcccugggugcgcggccaguccgggcggaucagcuucuacuggaccaucguggagccgggcgaccugaucgucuucaacaccaucggcaaccugaucgcgccccgcgggcacuacaagcucaacucccagaagaaguccacgauccugaacaccgccacccccaucggcagcugcguguccaagugccacaccgacaaggggagccuguccacgaccaagcccuuccagaacaucagccggguggccaucggcgacugcccgaaguacgucaagcaggggucccucaagcuggccaccggcaugcgcaacauccccgagaaggccagccggggccuguucggggccaucgccggcuucaucgagaacggguggcagggccucaucgacgggugguacggcuuccgccaccagaacgccgagggcaccgggacggcggccgaccugaaguccacccaggccgccaucgaccagaucaacggcaagcugaaccggcucaucgagaagaccaacgagaaguaccaccagaucgagaaggaguucgagcaggucgaggggcgcauccaggaccuggagaaguacguggaggacaccaagaucgaccuguggagcuacaacgccgagcuccugguggcgcuggagaaccagcacacgaucgacgugaccgacuccgagaugaacaagcuguucgagcggguccgccggcagcuccgcgagaacgccgaggacaagggcaacgggugcuucgagaucuuccacaagugcgacaacaacugcaucgagagcauccggaacggcaccuacgaccacgacguguaccgcaacgaggccaucaacaaccgcuuccagauccagggcgugaagcugacccagggguacaaggacaucauccucuggaucuccuucagcaucuccugcuuccugcuggucgcccuccugcuggccuucauccucugggcgugccagaacggcaacauccggugccagaucugcaucuga

SEQ ID NO: 74204 - RNA, 1683 nt, Artificial Sequence
  derived and/or modified CDS sequence (opt1) from hemagglutinin__InfluenzaA__AGQ80953
augaacacccagauccugguguucgcccucgucgccaucauccccaccaacgcggacaagaucugccugggccaccacgccgugagcaacgggacgaaggugaacacccugaccgagcgcggcgucgagguggugaacgccaccgagacggucgagcggaccuccaucccgcgcaucugcagcaaggggaagcgggccguggaccucggccagugcgggcugcugggcaccaucaccggcccgccccagugcgaccaguuccucgaguucuccgccgaccugaucaucgagcgccgggaggggagcgacgugugcuaccccggcaaguucgucaacgaggaggcgcugcgccagauccuccgggaguccgggggcaucgacaaggagacgaugggguucaccuacagcggcauccgcaccaacggcgccaccuccgccugccggcgcagcggguccagcuucuacgccgagaugaaguggcugcuguccaacacggacaacgcggccuucccccagaccaccaagagcuacaagaacacccggaaggaccccgcccucaucaucuggggcauccaccacuccgggagcacgaccgagcagaccaagcuguacggcuccggcaacaagcugaucaccguggggagcuccaacuaccagcagagcuucgugcccucccccggcgcccgcccgcaggucaacgggcagagcggccggaucgacuuccacuggcucaugcugaaccccaacgacacggugaccuucagcuucaacggggccuucaucgcgcccgaccgcgccuccuuccugcggggcaagagcaugggcauccaguccggggugcaggucgacgccaacugcgagggcgacugcuaccacaacgggggcaccaucaucagcaaccuccccuuccagaacaucaacucccgcgccguggggaagugcccgcgguacgugaagcaggagagccugcugcucgccaccggcaugaagaacguccccgagauccccaagggccgcgggcuguucggcgcgaucgccggguucaucgagaacggcugggaggggcugaucgacggcugguacggcuuccggcaccagaacgcccagggggagggcacggccgccgacuacaaguccacccagagcgcgaucgaccagaucaccgggaagcucaaccgccugaucgagaagaccaaccagcaguucgagcugaucgacaacgaguucacggagguggagcggcagaucggcaacgugaucaacuggacccgcgacuccaugaccgaggucuggagcuacaacgccgagcuccugguggccauggagaaccagcacaccaucgaccuggccgacuccgagaugaacaagcucuacgagcgcgugcggcgccagcugcgggagaacgccgaggaggacggcacggggugcuucgagaucuuccacaagugcgacgacgacugcauggcgagcauccgcaacaacaccuacgaccacuccaaguaccgggaggaggccaugcagaaccgcauccagaucgaccccgucaagcugagcuccggcuacaaggacgugauccucugguucagcuucggggccuccugcuucauccugcuggccaucgcgaugggccucgucuucaucugcgugaagaacgggaacaugcggugcaccaucugcaucuga

SEQ ID NO: 74205 - RNA, 1683 nt, Artificial Sequence; identical to SEQ ID NO: 74204
  derived and/or modified CDS sequence (opt1) from hemagglutinin__InfluenzaA__AGQ80954

SEQ ID NO: 74206 - RNA, 1683 nt, Artificial Sequence; identical to SEQ ID NO: 74204
  derived and/or modified CDS sequence (opt1) from hemagglutinin__InfluenzaA__AGQ80955

SEQ ID NO: 74207 - RNA, 1683 nt, Artificial Sequence; identical to SEQ ID NO: 74204
  derived and/or modified CDS sequence (opt1) from hemagglutinin__InfluenzaA__AGQ80956

SEQ ID NO: 74208 - RNA, 1683 nt, Artificial Sequence; identical to SEQ ID NO: 74204
  derived and/or modified CDS sequence (opt1) from hemagglutinin__InfluenzaA__AGQ80957

SEQ ID NO: 74209 - RNA, 1683 nt, Artificial Sequence; identical to SEQ ID NO: 74204
  derived and/or modified CDS sequence (opt1) from hemagglutinin__InfluenzaA__AGQ80958

SEQ ID NO: 74210 - RNA, 1683 nt, Artificial Sequence
  derived and/or modified CDS sequence (opt1) from hemagglutinin__InfluenzaA__AGQ80959
augaacacccagauccugguguucgcccucaucgccaucauccccaccaacgcggacaagaucugccugggccaccacgccgucagcaacgggacgaaggugaacacccugaccgagcgcggcguggaggucgugaacgccaccgagacgguggagcggaccaacaucccgcgcaucugcuccaaggggaagcggaccgucgaccucggccagugcgggcugcugggcaccaucacgggcccgccccagugcgaccaguuccucgaguucagcgccgaccugaucaucgagcgccgggagggguccgacgugugcuaccccggcaaguucgugaacgaggaggcccugcgccagauccuccgggagagcgggggcaucgacaaggaggcgaugggguucaccuacuccggcauccgcaccaacggcgccaccagcgccugccggcgcuccgggagcuccuucuacgccgagaugaaguggcugcugagcaacacggacaacgcggccuucccccagaugaccaaguccuacaagaacacccggaaggaccccgcccucaucaucuggggcauccaccacagcggguccaccgccgagcagacgaagcuguacggcagcggcaacaagcuggucaccgugggguccagcaacuaccagcaguccuucgugcccagccccggcgcccgcccgcaggucaacgggcaguccggccggaucgacuuccacuggcucaugcugaaccccaacgacaccgugaccuucagcuucaacggggcguucaucgcccccgaccgcgccagcuuccugcggggcaaguccaugggcauccagagcggggugcaggucgacgccaacugcgagggcgacugcuaccacgggggcgggacgaucaucuccaaccuccccuuccagaacaucgacagccgcgccgugggcaagugcccgcgguacgugaagcagaagucccugcugcucgcgaccggcaugaagaacguccccgagagccccaaggggcgcggccuguucggggccaucgccggcuucaucgagaacgggugggagggccugaucgacggcugguacggguuccggcaccagaacgcccagggcgaggggaccgccgcggacuacaaguccacccagagcgccaucgaccagaucacgggcaagcucaaccgccugaucgagaagaccaaccagcaguucgagcugaucgacaacgaguucaccgagguggagaagcagaucggcaacgugaucaacuggacccgggacuccaucacggaggucuggagcuacaacgccgagcuccugguggccauggagaaccagcacaccaucgaccuggccgacuccgagaugaacaagcucuacgagcgcgugaagcgccagcugcgggagaacgcggaggaggacgggaccggcugcuucgagaucuuccacaagugcgacgacgacugcauggccagcauccgcaacaacaccuacgaccacuccaaguaccgggaggaggccaugcagaaccgcauccagaucgaccccgucaagcugagcuccggguacaaggacgugauccucugguucagcuucggcgccuccugcuucauccugcuggcgaucgccauggggcucgucuucaucugcgugaagaacggcaacaugcggugcacgaucugcaucuga

SEQ ID NO: 74211 - RNA, 1683 nt, Artificial Sequence
  derived and/or modified CDS sequence (opt1) from hemagglutinin__InfluenzaA__AGQ80961
augaacacccagauccugguguucgcccucgucgccaucauccccaccaacgcggacaagaucugccugggccaccacgccgugagcaacgggacgaaggugaacacccugaccgagcgcggcgucgagguggugaacgccaccgagacggucgagcggaccaacgugccgaagaucugcuccaaggggaagcgcaccguggaccucggccagugcgggcugcugggcaccaucacgggcccgccccagugcgaccaguuccucgaguucagcgccgaccugaucaucgagcggcgcgagggguccgacgucugcuaccccggcaaguucgugaacgaggagacccugcggcagauccuccgcgagagcgggggcaucgacaaggagaccaugggguucaccuacuccggcauccggacgaacggcgccaccagcgcgugccgccgguccgggagcuccuucuacgccgagaugaaguggcugcugagcaacaccgacaacgccgccuucccgcagaugaccaaguccuacaagaacgcgcgcaaggaccccgcccucaucaucuggggcauccaccacagcggguccacgaccgagcagaccaagcuguacggcagcggcaacaagcugaucaccgugggguccagcaacuaccagcaguccuucguccccagccccggcgcccggccccaggugaacgggcaguccggccgcaucgacuuccacuggcucaugcugaaccccaacgacacggugaccuucagcuucaacggggccuucaucgcccccgaccgggcgugcuuccugcgcggcaagagcaugggcauccaguccgggguccagguggacgccagcugcgagggcgacugcuaccacuccgggggcaccaucaucagcaaccuccccuuccagaacaucaacucccgggccguggggaagugcccgcgcuacgucaagcaggagagccugaugcuggccaccggcaugaagaacgugcccgagauccccaagggccggggccucuucggggccaucgcgggguucaucgagaacggcugggaggggcugaucgacggcugguacggcuuccgccaccagaacgcccagggggagggcacggccgccgacuacaaguccacccagagcgccaucgaccagaucaccgggaagcugaaccggcucaucgagaagaccaaccagcaguucgagcugaucgacaacgaguucacggagguggagaagcagaucggcaacgucaucaacuggacccgcgacuccaugaccgagguguggagcuacaacgcggagcugcucguggccauggagaaccagcacaccaucgaccuggccgacuccgagaugaacaagcuguacgagcgggucaagcgccagcuccgcgagaacgccgaggaggacggcacggggugcuucgagaucuuccacaagugcgacgacgacugcauggccagcauccggaacaacaccuacgaccacuccaaguaccgcgaggaggcgaugcagaaccggaucaagaucgaccccgugaagcugagcuccggcuacaaggacgucauccugugguucagcuucggggccuccugcuucauccuccuggccaucgccaugggccugguguucaucugcgugaagaacgggaacaugcgcugcaccaucugcaucuga

SEQ ID NO: 74212 - RNA, 1683 nt, Artificial Sequence; identical to SEQ ID NO: 74211
  derived and/or modified CDS sequence (opt1) from hemagglutinin__InfluenzaA__AGQ80962

SEQ ID NO: 74213 - RNA, 1683 nt, Artificial Sequence
  derived and/or modified CDS sequence (opt1) from hemagglutinin__InfluenzaA__AGQ80964
augaacacccagauccugguguucgcccucaucgccaucauccccaccaacgcggacaagaucugccugggccaccacgccgucagcaacgggacgaaggugaacacccugaccgagcgcggcguggaggucgugaacgccaccgagacgguggagcggaccaacaucccgcgcaucugcuccaaggggaagcggaccgucgaccucggccagugcgggcugcugggcaccaucacgggcccgccccagugcgaccaguuccucgaguucagcgccgaccugaucaucgagcgccgggagggguccgacgugugcuaccccggcaaguucgugaacgaggaggcccugcgccagauccuccgggagagcgggggcaucgacaaggaggcgaugggguucaccuacuccggcauccgcaccaacggcgccaccagcgccugccggcgcuccgggagcuccuucuacgccgagaugaaguggcugcugagcaacacggacaacgcggccuucccccagaugaccaaguccuacaagaacacccggaaggaccccgcccucaucaucuggggcauccaccacagcggguccaccgccgagcagacgaagcuguacggcagcggcaacaagcuggucaccgugggguccagcaacuaccagcaguccuucgugcccagccccggcgcccgcccgcaggucaacgggcaguccggccggaucgacuuccacuggcucaugcugaaccccaacgacaccgugaccuucagcuucaacggggcguucaucgcccccgaccgcgccagcuuccugcggggcaaguccaugggcauccagagcggggugcaggucgacgccgacugcgagggcgacugcuaccacuccgggggcacgaucaucagcaaccuccccuuccagaacaucgacucccgcgccguggggaagugcccgcgguacgugaagcagcgcagccugcugcucgcgaccggcaugaagaacguccccgagauccccaagggccgggggcuguucggcgccaucgccggguucaucgagaacggcugggaggggcugaucgacggcugguacggcuuccgccaccagaacgcccagggggagggcaccgccgcggacuacaaguccacccagagcgccaucgaccagaucacggggaagcucaaccggcugaucgagaagaccaaccagcaguucgagcugaucgacaacgaguucaccgagguggagaagcagaucggcaacgugaucaacuggacccgcgacuccaucacggaggucuggagcuacaacgccgagcuccugguggccauggagaaccagcacaccaucgaccuggccgacuccgagaugaacaagcucuacgagcgcgugaagcggcagcugcgcgagaacgcggaggaggacggcaccgggugcuucgagaucuuccacaagugcgacgacgacugcauggccagcauccggaacaacaccuacgaccacuccaaguaccgcgaggaggccaugcagaaccggauccagaucgaccccgucaagcugagcuccggcuacaaggacgugauccucugguucagcuucggggccuccugcuucauccugcuggcgaucgccaugggccucgucuucaucugcgugaagaacgggaacaugcgcugcacgaucugcaucuga

SEQ ID NO: 74214 - RNA, 1683 nt, Artificial Sequence; identical to SEQ ID NO: 74204
  derived and/or modified CDS sequence (opt1) from hemagglutinin__InfluenzaA__AGQ80965

SEQ ID NO: 74215 - RNA, 1683 nt, Artificial Sequence; identical to SEQ ID NO: 74204
  derived and/or modified CDS sequence (opt1) from hemagglutinin__InfluenzaA__AGQ80966

SEQ ID NO: 74216 - RNA, 1683 nt, Artificial Sequence; identical to SEQ ID NO: 74204
  derived and/or modified CDS sequence (opt1) from hemagglutinin__InfluenzaA__AGQ80968

SEQ ID NO: 74217 - RNA, 1683 nt, Artificial Sequence
  derived and/or modified CDS sequence (opt1) from hemagglutinin__InfluenzaA__AGQ80970
augaacacccagauccugguguucgcccucgucgccaucauccccaccaacgcggacaagaucugccugggccaccacgccgugagcaacgggacgaaggugaacacccugaccgagcgcggcgucgagguggugaacgccaccgagacggucgagcggaccuccaucccgcgcaucugcagcaaggggaagaaggccguggaccucggccagugcgggcugcugggcaccaucaccggcccgccccagugcgaccaguuccucgaguucuccgccgaccugaucaucgagcggcgcgaggggagcgacgugugcuaccccggcaaguucgucaacgaggaggcgcugcggcagauccuccgcgaguccgggggcaucgacaaggagacgaugggguucaccuacagcggcauccggaccaacggcgccaccuccgccugccgccggagcggguccagcuucuacgccgagaugaaguggcugcuguccaacacggacaacgcggccuucccccagaccaccaagagcuacaagaacacccgcaaggaccccgcccucaucaucuggggcauccaccacuccgggagcacgaccgagcagaccaagcuguacggcuccggcaacaagcugaucaccguggggagcuccaacuaccagcagagcuucgugcccucccccggcgcccggccgcaggucaacgggcagagcggccgcaucgacuuccacuggcucaugcugaaccccaacgacacggugaccuucagcuucaacggggccuucaucgcgcccgaccgggccuccuuccugcgcggcaagagcaugggcauccaguccggggugcaggucgacgccaacugcgagggcgacugcuaccacaacgggggcaccaucaucagcaaccuccccuuccagaacaucaacucccgggccguggggaagugcccgcgcuacgugaagcaggagagccugcugcucgccaccggcaugaagaacguccccgagauccccaagggccgggggcuguucggcgcgaucgccggguucaucgagaacggcugggaggggcugaucgacggcugguacggcuuccgccaccagaacgcccagggggagggcacggccgccgacuacaaguccacccagagcgcgaucgaccagaucaccgggaagcucaaccggcugaucgagaagaccaaccagcaguucgagcugaucgacaacgaguucacggagguggagcgccagaucggcaacgugaucaacuggacccgggacuccaugaccgaggucuggagcuacaacgccgagcuccugguggccauggagaaccagcacaccaucgaccuggccgacuccgagaugaacaagcucuacgagcgcgugcgccggcagcugcgcgagaacgccgaggaggacggcacggggugcuucgagaucuuccacaagugcgacgacgacugcauggcgagcauccggaacaacaccuacgaccacuccaaguaccgcgaggaggccaugcagaaccggauccagaucgaccccgucaagcugagcuccggcuacaaggacgugauccucugguucagcuucggggccuccugcuucauccugcuggccaucgcgaugggccucgucuucaucugcgugaagaacgggaacaugcgcugcaccaucugcaucuga

SEQ ID NO: 74218 - RNA, 1683 nt, Artificial Sequence
  derived and/or modified CDS sequence (opt1) from hemagglutinin__InfluenzaA__AGQ80971
augaacacccagauccugguguucgcccucgucgccaucauccccaccaacgcggacaagaucugccugggccaccacgccgugagcaacgggacgaaggugaacacccugaccgagcgcggcgucgagguggugaacgccaccgagacggucgagcggaccuccaucccgcgcaucugcagcaaggggaagaagaccguggaccucggccagugcgggcugcugggcaccaucacgggcccgccccagugcgaccaguuccucgaguucuccgccgaccugaucaucgagcggcgcgaggggagcgacgugugcuaccccggcaaguucgucaacgaggaggcccugcggcagauccuccgcgaguccgggggcaucgacaaggagaccaugggguucaccuacagcggcauccggaccaacggcgcgacguccgccugccgccggagcggguccagcuucuacgccgagaugaaguggcugcuguccaacaccgacaacgccgcguucccccagaccaccaagagcuacaagaacacgcgcaaggaccccgcccucaucaucuggggcauccaccacuccgggagcaccaccgagcagaccaagcuguacggcuccggcaacaagcugaucacgguggggagcuccaacuaccagcagagcuucgugcccucccccggcgcccggccgcaggucaacgggcagagcggccgcaucgacuuccacuggcucaugcugaaccccaacgacaccgugaccuucagcuucaacggggccuucaucgcccccgaccgggcguccuuccugcgcggcaagagcaugggcauccaguccggggugcaggucgacgccaacugcgagggcgacugcuaccacaacgggggcaccaucaucagcaaccuccccuuccagaacaucaacucccgggccguggggaagugcccgcgcuacgugaagcaggagagccugcugcucgccacgggcaugaagaacguccccgagauccccaagggccgggggcuguucggcgccaucgcgggguucaucgagaacggcugggaggggcugaucgacggcugguacggcuuccgccaccagaacgcccagggggagggcaccgccgccgacuacaaguccacccagagcgccaucgaccagaucaccgggaagcucaaccggcugaucgagaagacgaaccagcaguucgagcugaucgacaacgaguucaccgagguggagcgccagaucggcaacgugaucaacuggacccgggacuccaugaccgaggucuggagcuacaacgcggagcuccugguggccauggagaaccagcacacgaucgaccuggccgacuccgagaugaacaagcucuacgagcgcgugcgccggcagcugcgcgagaacgccgaggaggacggcaccgggugcuucgagaucuuccacaagugcgacgacgacugcauggccagcauccggaacaacaccuacgaccacuccaaguaccgcgaggaggcgaugcagaaccggauccagaucgaccccgucaagcugagcuccggcuacaaggacgugauccucugguucagcuucggggccuccugcuucauccugcuggccaucgccaugggccucgucuucaucugcgugaagaacgggaacaugcgcugcaccaucugcaucuga

SEQ ID NO: 74219 - RNA, 1683 nt, Artificial Sequence
  derived and/or modified CDS sequence (opt1) from hemagglutinin__InfluenzaA__AGQ80974
augaacacccagauccugguguucgcccucgucgccaucauccccaccaacgcggacaagaucugccugggccaccacgccgugagcaacgggacgaaggugaacacccugaccgagcgcggcgucgagguggugaacgccaccgagacggucgagcggaccuccaucccgcgcaucugcagcaaggggaagcgggccguggaccucggccagugcgggcugcugggcaccaucaccggcccgccccagugcgaccaguuccucgaguucuccgccgaccugaucaucgagcgccgggaggggagcgacgugugcuaccccggcaaguucgucaacgaggaggcgcugcgccagauccuccgggaguccgggggcaucgacaaggagacgaugggguucaccuacagcggcauccgcaccaacggcgccaccuccgccugccggcgcagcggguccagcuucuacgccgagaugaaguggcugcuguccaacacggacaacgcggccuucccccagaccaccaagagcuacaagaacacccggaaggaccccgcccucaucaucuggggcauccaccacuccgggagcacgaccgagcagaccaagcuguacggcuccggcaacaagcugaucaccguggggagcuccaacuaccagcagagcuucgugcccucccccggcgcccgcccgcaggucaacgggcagagcggccggaucgacuuccacuggcucaugcugaaccccaacgacacggugaccuucagcuucaacggggccuucaucgcgcccgaccgcgccuccuuccugcggggcaagagcaugggcauccaguccggggugcaggucgacgccaacugcgagggcgacugcuaccacaacgggggcaccaucaucagcaaccuccccuuccagaacaucaacucccgcgccguggggaagugcccgcgguacgugaagcaggagagccugcugcucgccaccggcaugaagaacguccccgagauccccaagggccgcgggcuguucggcgcgaucgccggguucaucgagaacggcugggaggggcugguggacggcugguacggcuuccggcaccagaacgcccagggggagggcacggccgccgacuacaaguccacccagagcgcgaucgaccagaucaccgggaagcucaaccgccugaucgagaagaccaaccagcaguucgagcugaucgacaacgaguucacggagguggagcggcagaucggcaacgucaucaacuggacccgcgacuccaugaccgagguguggagcuacaacgccgagcuccugguggccauggagaaccagcacaccaucgaccuggccgacuccgagaugaacaagcucuacgagcgcguccggcgccagcugcgggagaacgccgaggaggacggcacggggugcuucgagaucuuccacaagugcgacgacgacugcauggcgagcauccgcaacaacaccuacgaccacuccaaguaccgggaggaggccaugcagaaccgcauccagaucgaccccgugaagcugagcuccggcuacaaggacgucauccucugguucagcuucggggccuccugcuucauccugcuggccaucgcgaugggccucguguucaucugcgugaagaacgggaacaugcggugcaccaucugcaucuga

SEQ ID NO: 74220 - RNA, 1683 nt, Artificial Sequence
  derived and/or modified CDS sequence (opt1) from hemagglutinin__InfluenzaA__AGQ80977
augaacacccagauccuggcccucgcccuggcggccaucauccccaccaacgccgacaagaucugccugggccaccacgccgugagcaacgggacgaaggugaacacccucaccgagcgcggcguggagguggucaacgccaccgagacgguggagcggaccuccaucccgcgcaucugcagcaaggggaagcgggcgguggaccugggccagugcgggcugcucggcaccaucaccggcccgccccagugcgaccaguuccuggaguucuccgccgaccugaucaucgagcgccgggaggggagcgacgucugcuaccccggcaaguucgugaacgaggaggcccuccgccagauccugcgggaguccgggggcaucgacaaggagacgaugggguucaccuacagcggcauccgcaccaacggcgccaccuccgcgugccggcgcagcggguccagcuucuacgccgagaugaaguggcugcucuccaacacggacaacgccgccuucccgcagaccaccaagagcuacaagaacacccggaaggaccccgcccugaucaucuggggcgugcaccacuccgggagcacgaccgagcagaccaagcuguacggcuccggcaacaagcucaucaccgucgggagcuccaacuaccagcagagcuucgugcccucccccggcgcgcgcccccaggugaacgggcagagcggccggaucgacuuccacuggcugaugcugaaccccaacgacacggucaccuucagcuucaacggggccuucaucgcccccgaccgcgccuccuuccuccggggcaagagcaugggcauccaguccgggguccagguggacgccaacugcgagggcgacugcuaccacaacgggggcaccaucaucagcaaccugcccuuccagaacaucaacucccgcgcgguggggaagugcccgcgguacgugaagcaggagagccugcuccuggccaccggcaugaagaacgugcccgagauccccaagggccgcgggcuguucggcgccaucgccggguucaucgagaacggcugggaggggcucgucgacggcugguacggcuuccggcaccagaacgcccagggggagggcacggcggccgacuacaaguccacccagagcgccaucgaccagaucaccgggaagcugaaccgccugaucgagaagaccaaccagcaguucgagcucaucgacaacgaguucacggagguggagcggcagaucggcaacgugaucaacuggacccgcgacuccaugaccgaggucuggagcuacaacgccgagcugcugguggccauggagaaccagcacaccaucgaccucgcggacuccgagaugaacaagcuguacgagcgcgugcggcgccagcugcgggagaacgccgaggaggacggcacggggugcuucgagaucuuccacaagugcgacgacgacugcauggccagcauccgcaacaacaccuacgaccacuccaaguaccgggaggaggccaugcagaaccgcauccagaucgaccccgucaagcucagcuccggcuacaaggacgugauccugugguucagcuucggggcguccugcuucauccugcucgccaucgccaugggccuggucuucaucugcgucaagagcgggaacaugcggugcaccaucugcaucuga

SEQ ID NO: 74221 - RNA, 1683 nt, Artificial Sequence
  derived and/or modified CDS sequence (opt1) from hemagglutinin__InfluenzaA__AGQ80978
augaacacccagauccugguguucgcccucgucgccaucauccccaccaacgcggacaagaucugccugggccaccacgccgugagcaacgggacgaaggugaacacccugaccgagcgcggcgucgagguggugaacgccaccgagacggucgagcggaccuccaucccgcgcaucugcagcaaggggaagcgggccguggaccucggccagugcgggcugcugggcaccaucaccggcccgccccagugcgaccaguuccucgaguucuccgccgaccugaucaucgagcgccgggaggggagcgacgugugcuaccccggcaaguucgucaacgaggaggcgcugcgccagauccuccgggaguccgggggcaucgacaaggagacgaugggguucaccuacagcggcauccgcaccaacggcgccaccuccgccugccggcgcagcggguccagcuucuacgccgagaugaaguggcugcuguccaacacggacaacgcggccuucccccagaccaccaagagcuacaagaacacccggaaggaccccgcccucaucaucuggggcauccaccacuccgggagcaucacggagcagaccaagcuguacggcuccggcaacaagcugaucaccguggggagcuccaacuaccagcagagcuucgugcccucccccggcgcccgcccgcaggucaacgggcagagcggccggaucgacuuccacuggcucaugcugaaccccaacgacaccgugacguucagcuucaacggggccuucaucgcgcccgaccgcgccuccuuccugcggggcaagagcaugggcauccaguccggggugcaggucgacgccaacugcgagggcgacugcuaccacaacgggggcaccaucaucagcaaccuccccuuccagaacaucaacucccgcgccguggggaagugcccgcgguacgugaagcaggagagccugcugcucgccaccggcaugaagaacguccccgagauccccaagggccgcgggcuguucggcgcgaucgccggguucaucgagaacggcugggaggggcugguggacggcugguacggcuuccggcaccagaacgcccagggggagggcaccgccgccgacuacaaguccacgcagagcgcgaucgaccagaucaccgggaagcucaaccgccugaucgagaagaccaaccagcaguucgagcugaucgacaacgaguucaccgagguggagcggcagaucggcaacgucaucaacuggacgcgcgacuccaugaccgagguguggagcuacaacgccgagcuccugguggccauggagaaccagcacaccaucgaccuggccgacuccgagaugaacaagcucuacgagcgcguccggcgccagcugcgggagaacgccgaggaggacggcaccgggugcuucgagaucuuccacaagugcgacgacgacugcauggcgagcauccgcaacaacacguacgaccacuccaaguaccgggaggaggccaugcagaaccgcauccagaucgaccccgugaagcugagcuccggcuacaaggacgucauccucugguucagcuucggggccuccugcuucauccugcuggccaucgcgaugggccucguguucaucugcgugaagaacgggaacaugcggugcaccaucugcaucuga

SEQ ID NO: 74222 - RNA, 1683 nt, Artificial Sequence
  derived and/or modified CDS sequence (opt1) from hemagglutinin__InfluenzaA__AGQ80979
augaacacccagauccugguguucgcccucgucgccaucauccccaccaacgcggacaagaucugccugggccaccacgccgugagcaacgggacgaaggugaacacccugaccgagcgcggcgucgagguggugaacgccaccgagacggucgagcggaccuccaucccgcgcaucugcagcaaggggaagcgggccguggaccucggccagugcgggcugcugggcaccaucaccggcccgccccagugcgaccaguuccucgaguucuccgccgaccugaucaucgagcgccgggaggggagcgacgugugcuaccccggcaaguucgucaacgaggaggcgcugcgccagauccuccgggaguccgggggcaucgacaaggagacgaugggguucaccuacagcggcauccgcaccaacggcgccaccuccgccugccggcgcagcggguccagcuucuacgccgagaugaaguggcugcuguccaacacggacaacgcggccuucccccagaccaccaagagcuacaagaacacccggaaggaccccgcccucaucaucuggggcauccaccacuccgggagcacgaccgagcagaccaagcuguacggcuccggcaacaagcugaucaccguggggagcuccaacuaccagcagagcuucgugcccucccccggcgcccgcccgcaggucaacgggcagagcggccggaucgacuuccacuggcucaugcugaaccccaacgacacggugaccuucagcuucaacggggccuucaucgcgcccgaccgcgccuccuuccugcggggcaagagcaucggcauccaguccggggugcaggucgacgccaacugcgagggcgacugcuaccacaacgggggcaccaucaucagcaaccuccccuuccagaacaucaacucccgcgccguggggaagugcccgcgguacgugaagcaggagagccugcugcucgccaccggcaugaagaacguccccgagauccccaagggccgcgggcuguucggcgcgaucgccggguucaucgagaacggcugggaggggcugaucgacggcugguacggcuuccggcaccagaacgcccagggggagggcacggccgccgacuacaaguccacccagagcgcgaucgaccagaucaccgggaagcucaaccgccugaucgagaagaccaaccagcaguucgagcugaucgacaacgaguucacggagguggagcggcagaucggcaacgugaucaacuggacccgcgacuccaugaccgaggucuggagcuacaacgccgagcuccugguggccauggagaaccagcacaccaucgaccuggccgacuccgagaugaacaagcucuacgagcgcgugcggcgccagcugcgggagaacgccgaggaggacggcacggggugcuucgagaucuuccacaagugcgacgacgacugcauggcgagcauccgcaacaacaccuacgaccacuccaaguaccgggaggaggccaugcagaaccgcauccagaucgaccccgucaagcugagcuccggcuacaaggacgugauccucugguucagcuucggggccuccugcuucauccugcuggccaucgcgaugggccucgucuucaucugcgugaagaacgggaacaugcggugcaccaucugcaucuga

SEQ ID NO: 74223 - RNA, 1683 nt, Artificial Sequence; identical to SEQ ID NO: 74219
  derived and/or modified CDS sequence (opt1) from hemagglutinin__InfluenzaA__AGQ80980

SEQ ID NO: 74224 - RNA, 1683 nt, Artificial Sequence; identical to SEQ ID NO: 74204
  derived and/or modified CDS sequence (opt1) from hemagglutinin__InfluenzaA__AGQ80981

SEQ ID NO: 74225 - RNA, 1683 nt, Artificial Sequence; identical to SEQ ID NO: 74204
  derived and/or modified CDS sequence (opt1) from hemagglutinin__InfluenzaA__AGQ80982

SEQ ID NO: 74226 - RNA, 1683 nt, Artificial Sequence; identical to SEQ ID NO: 74204
  derived and/or modified CDS sequence (opt1) from hemagglutinin__InfluenzaA__AGQ80983

SEQ ID NO: 74227 - RNA, 1683 nt, Artificial Sequence; identical to SEQ ID NO: 74204
  derived and/or modified CDS sequence (opt1) from hemagglutinin__InfluenzaA__AGQ80984

SEQ ID NO: 74228 - RNA, 1683 nt, Artificial Sequence; identical to SEQ ID NO: 74204
  derived and/or modified CDS sequence (opt1) from hemagglutinin__InfluenzaA__AGQ80985

SEQ ID NO: 74229 - RNA, 1683 nt, Artificial Sequence; identical to SEQ ID NO: 74204
  derived and/or modified CDS sequence (opt1) from hemagglutinin__InfluenzaA__AGQ80986

SEQ ID NO: 74230 - RNA, 1683 nt, Artificial Sequence; identical to SEQ ID NO: 74204
  derived and/or modified CDS sequence (opt1) from hemagglutinin__InfluenzaA__AGQ80987

SEQ ID NO: 74231 - RNA, 1683 nt, Artificial Sequence; identical to SEQ ID NO: 74204
  derived and/or modified CDS sequence (opt1) from hemagglutinin__InfluenzaA__AGQ80988

SEQ ID NO: 74232 - RNA, 1683 nt, Artificial Sequence
  derived and/or modified CDS sequence (opt1) from hemagglutinin__InfluenzaA__AGQ80990
augaacacccagauccugguguucgcccucgucgccaucauccccaccaacgcggacaagaucugccugggccaccacgccgugagcaacgggacgaaggugaacacccugaccgagcgcggcgucgagguggugaacgccaccgagacggucgagcggaccuccaucccgaagaucugcagcaaggggaagcgcgccguggaccucggccagugcgggcugcugggcaccaucaccggcccgccccagugcgaccaguuccucgaguucuccgccgaccugaucaucgagcggcgcgaggggagcgacgugugcuaccccggcaaguucgucaacgaggaggcgcugcggcagauccuccgcgaguccgggggcaucgacaaggagacgaugggguucaccuacagcggcauccggaccaacggcgccaccuccgccugccgccggagcggguccagcuucuacgccgagaugaaguggcugcuguccaacacggacaacgcggccuucccccagaccaccaagagcuacaagaacacccgcaaggaccccgcccucaucaucuggggcauccaccacuccgggagcacgaccgagcagaccaagcuguacggcuccggcaacaagcugaucaccguggggagcuccaacuaccagcagagcuucgugcccucccccggcgcccggccgcaggucaacgggcagagcggccgcaucgacuuccacuggcucaugcugaaccccaacgacacggugaccuucagcuucaacggggccuucaucgcgcccgaccgggccuccuuccugcgcggcaagagcaugggcauccaguccggggugcaggucgacgccaacugcgagggcgacugcuaccacaacgggggcaccaucaucagcaaccuccccuuccagaacaucaacucccgggccguggggaagugcccgcgcuacgugaagcaggagagccugcugcucgccaccggcaugaagaacguccccgagauccccaagggccgggggcuguucggcgcgaucgccggguucaucgagaacggcugggaggggcugaucgacggcugguacggcuuccgccaccagaacgcccagggggagggcacggccgccgacuacaaguccacccagagcgcgaucgaccagaucaccgggaagcucaaccggcugaucgagaagaccaaccagcaguucgagcugaucgacaacgaguucacggagguggagcgccagaucggcaacgugaucaacuggacccgggacuccaugaccgaggucuggagcuacaacgccgagcuccugguggccauggagaaccagcacaccaucgaccuggccgacuccgagaugaacaagcucuacgagcgcgugcgccggcagcugcgcgagaacgccgaggaggacggcacggggugcuucgagaucuuccacaagugcgacgacgacugcauggcgagcauccggaacaacaccuacgaccacuccaaguaccgcgaggaggccaugcagaaccggauccagaucgaccccgucaagcugagcuccggcuacaaggacgugauccucugguucagcuucggggccuccugcuucauccugcuggccaucgcgaugggccucgucuucaucugcgugaagaacgggaacaugcgcugcaccaucugcaucuga

SEQ ID NO: 74233 - RNA, 1683 nt, Artificial Sequence; identical to SEQ ID NO: 74218
  derived and/or modified CDS sequence (opt1) from hemagglutinin__InfluenzaA__AGQ80991

SEQ ID NO: 74234 - RNA, 1683 nt, Artificial Sequence
  derived and/or modified CDS sequence (opt1) from hemagglutinin__InfluenzaA__AGQ80992
augaacacccagauccugguguucgcccucgucgccaucauccccaccaacgcggacaagaucugccugggccaccacgccgugagcaacgggacgaaggugaacacccugaccgagcgcggcgucgagguggugaacgccaccgagacggucgagcggaccaacgugccgcgcaucugcuccaaggggaagcggaccguggaccucggccagugcgggcugcugggcaccaucacgggcccgccccagugcgaccaguuccucgaguucagcgccgaccugaucaucgagcgccgggagggguccgacgucugcuaccccggcaaguucaugaacgaggaggcccugcgccagauccuccgggagagcgggggcaucgacaaggagaccaugggguucaccuacuccggcauccgcaccaacggcgcgacgagcgccugccggcgcuccgggagcuccuucuacgccgagaugaaguggcugcugagcaacaccgacaacgccgcguucccccagaugaccaaguccuacaagaacacccggaaggaccccgcccucaucaucuggggcauccaccacagcggguccacgaccgagcagaccaagcuguacggcagcggcaacaagcugaucaccgugggguccagcaacuaccagcaguccuucgugcccagccccggcgcccgcccgcaggucaacgggcaguccggccggaucgacuuccacuggcucaugcugaaccccaacgacacggugaccuucagcuucaacggggccuucaucgcccccgaccgcgcgugcuuccugcggggcaagagcaugggcauccaguccggggugcaggucgacgccagcugcgagggcgacugcuaccacuccgggggcaccaucaucagcaaccuccccuuccagaacaucaacucccgcgccguggggaagugcccgcgguacgugaagcaggagagccugaugcuggccaccggcaugaagaacguccccgagauccccaagggccgcggccucuucggggccaucgcgggguucaucgagaacggcugggaggggcugaucgacggcugguacggcuuccggcaccagaacgcccagggggagggcacggccgccgacuacaaguccacccagagcgccaucgaccagaucaccgggaagcugaaccgccucaucgagaagaccaaccagcaguucgagcugaucgacaacgaguucacggagguggagaagcagaucggcaacgugaucaacuggacccgggacuccaugaccgaggucuggagcuacaacgcggagcugcucguggccauggagaaccagcacaccaucgaccuggccgacuccgagaugaacaagcuguacgagcgcgugaagcgccagcuccgggagaacgccgaggaggacggcacggggugcuucgagaucuuccacaagugcgacgacgacugcauggccagcauccgcaacaacaccuacgaccacuccaaguaccgggaggaggcgaugcagaaccgcauccagaucgaccccgucaagcugagcuccggcuacaaggacgugauccugugguucagcuucggggccuccugcuucauccuccuggccaucgccaugggccuggucuucaucugcgugaagaacgggaacaugcggugcaccaucugcaucuga

SEQ ID NO: 74235 - RNA, 1683 nt, Artificial Sequence; identical to SEQ ID NO: 74204
  derived and/or modified CDS sequence (opt1) from hemagglutinin__InfluenzaA__AGQ80993

SEQ ID NO: 74236 - RNA, 1683 nt, Artificial Sequence; identical to SEQ ID NO: 74211
  derived and/or modified CDS sequence (opt1) from hemagglutinin__InfluenzaA__AGQ80994

SEQ ID NO: 74237 - RNA, 1683 nt, Artificial Sequence; identical to SEQ ID NO: 74213
  derived and/or modified CDS sequence (opt1) from hemagglutinin__InfluenzaA__AGQ80995

SEQ ID NO: 74238 - RNA, 1683 nt, Artificial Sequence; identical to SEQ ID NO: 74213
  derived and/or modified CDS sequence (opt1) from hemagglutinin__InfluenzaA__AGQ80996

SEQ ID NO: 74239 - RNA, 1683 nt, Artificial Sequence
  derived and/or modified CDS sequence (opt1) from hemagglutinin__InfluenzaA__AGQ80997
augaacacccagauccugguguucgcccucgucgccaucauccccaccaacgcggacaagaucugccugggccaccacgccgugagcaacgggacgaaggugaacacccugaccgagcgcggcgucgagguggugaacgccaccgagacggucgagcggaccaacaucccgcgcaucugcuccaaggggaagcggaccguggaccucggccagugcgggcugcugggcaccaucacgggcccgccccagugcgaccaguuccucgaguucagcgccgaccugaucaucgagcgccgggagggguccgacgugugcuaccccggcaaguucgucaacgaggaggcccugcgccagauccuccgggagagcgggggcaucgacaaggagaccaugggguucaccuacuccggcauccgcaccgacggcgcgacgagcgccugccggcgcuccgggagcuccuucuacgccgagaugaaguggcugcugagcaacaccgacaacgccgcguucccccagaugaccaaguccuacaagaacacccggaaggaccccgcccucaucaucuggggcauccaccacagcggguccacgaccgagcagaccaagcuguacggcagcggcaacaagcugaucaccgugggguccagcaacuaccagcaguccuucgugcccagccccggcgcccgcccgcaggucaacgggcaguccggccggaucgacuuccacuggcucaugcugaaccccaacgacacggugaccuucagcuucaacggggccuucaucgcccccgaccgcgcgagcuuccugcggggcaaguccaugggcauccagagcggggugcaggucgacgccaacugcgagggcgacugcuaccacuccgggggcaccaucaucagcaaccuccccuuccagaacaucaacucccgcgccguggggaagugcccgcgguacgugaagcaggagagccugcugcucgccaccggcaugaagaacguccccgagauccccaagggccgcgggcuguucggcgccaucgcgggguucaucgagaacggcugggaggggcugaucgacggcugguacggcuuccggcaccagaacucccagggggagggcacggccgccgacuacaagagcacccaguccgccaucgaccagaucaccgggaagcucaaccgccugaucgagaagaccaaccagcaguucgagcugaucgacaacgaguucacggagguggagaagcagaucggcaacgugaucaacuggacccgggacagcaugaccgaggucugguccuacaacgccgagcuccugguggcgauggagaaccagcacaccaucgaccuggccgacagcgagaugaacaagcucuacgagcgcgugaagcgccagcugcgggagaacgccgaggaggacggcacggggugcuucgagaucuuccacaagugcgacgacgacugcauggccuccauccgcaacaacaccuacgaccacagcaaguaccgggaggaggccaugcagaaccgcauccagaucgaccccgucaagcuguccagcggcuacaaggacgugauccucugguucuccuucggggcgagcugcuucauccugcuggccaucgccaugggccucgucuucaucugcgugaagaacgggaacaugcggugcaccaucugcaucuga

SEQ ID NO: 74240 - RNA, 1683 nt, Artificial Sequence
  derived and/or modified CDS sequence (opt1) from hemagglutinin__InfluenzaA__AGQ81000
augaacacccagauccugguguucgcccucgucgccaucauccccaccaacgcggacaagaucugccugggccaccacgccgugagcaacgggacgaaggugaacacccugaccgagcgcggcgucgagguggugaacgccaccgagacggucgagcggaccaacaucccgcgcaucugcuccaaggggaagcggaccguggaccucggccagugcgggcugcugggcaccaucacgggcccgccccagugcgaccaguuccucgaguucagcgccgaccugaucaucgagcgccgggagggguccgacgugugcuaccccggcaaguucgucaacgaggaggcccugcgccagauccuccgggagagcgggggcaucgggaaggagaccaugggcuucaccuacuccggcauccgcaccaacggggcgacgagcgccugccggcgcuccggcagcuccuucuacgccgagaugaaguggcugcugagcaacaccgacaacgccgcguucccccagaugaccaaguccuacaagaacacccggaaggaccccgcccucaucaucugggggauccaccacagcggcuccacgaccgagcagaccaagcuguacggcagcgggaacaagcugaucaccgugggcuccagcaacuaccagaaguccuucgugcccagccccggggcccgcccgcaggucaacggccaguccgggcggaucgacuuccacuggcucaugcugaaccccaacgacacggugaccuucagcuucaacggcgccuucaucgcccccgaccgcgcgagcuuccugcggggcaaguccauggggauccagagcggcgugcaggucgacgccaacugcgagggggacugcuaccacaacggcgggaccaucaucuccaaccuccccuuccagaacaucaacagccgcgccgugggcaagugcccgcgguacgugaagcaggagucccugcugcucgccaccggcaugaagaacguccccgagauccccaaggggcgcggccuguucggggccaucgcgggcuucaucgagaacgggugggagggccugaucgacggcugguacggguuccggcaccagaacgcccagggcgaggggacggccgccgacuacaagagcacccaguccgccaucgaccagaucaccggcaagcucaaccgccugaucgagaagaccaaccagcaguucgagcugaucgacaacgaguucacggagguggagaagcagaucggcaacgugaucaacuggacccgggacagcaugaccgaggucugguccuacaacgcggagcuccugguggccauggagaaccagcacaccaucgaccuggccgacagcgagaugaacaagcucuacgagcgcgugaagcgccagcugcgggagaacgccgaggaggacgggacgggcugcuucgagaucuuccacaagugcgacgacgacugcauggccuccauccgcaacaacaccuacgaccacagcaaguaccgggaggaggcgaugcagaaccgcauccagaucgaccccgucaagcuguccagcggguacaaggacgugauccucugguucuccuucggcgccagcugcuucauccugcuggccaucgccauggggcucgucuucaucugcgugaagaacggcaacaugcggugcaccaucugcaucuga

SEQ ID NO: 74241 - RNA, 1683 nt, Artificial Sequence
  derived and/or modified CDS sequence (opt1) from hemagglutinin__InfluenzaA__AGQ81001
augaacacccagauccugguguucgcccucgucgccaucauccccaccaacgcggacaagaucugccugggccaccacgccgugagcaacgggacgaaggugaacacccugaccgagcgcggcgucgagguggugaacgccaccgagacggucgagcggaccaacaucccgcgcaucugcuccaaggggaagcggaccguggaccucggccagugcgggcugcugggcaccaucacgggcccgccccagugcgaccaguuccucgaguucagcgccgaccugaucaucgagcgccgggagggguccgacgugugcuaccccggcaaguucgucaacgaggaggcccugcgccagauccuccgggagagcgggggcaucgacaaggagaccaugggguucaccuacuccggcauccgcaccaacggcgcgacgagcgccugccggcgcuccgggagcuccuucuacgccgagaugaaguggcugcugagcaacaccgacaacgccgcguucccccagaugaccaaguccuacaagaacacccggaaggaccccgcccucaucaucuggggcauccaccacagcggguccacgaccgagcagaccaagcuguacggcagcggcaacaagcugaucaccguggggacguccaacuaccagcagagcuucgugcccucccccggcgcccgcccgcaggucaacgggcagagcggccggaucgacuuccacuggcucaugcugaaccccaacgacaccgugaccuucuccuucaacggggccuucaucgcccccgaccgcgcgagcuuccugcggggcaagagcaugggcauccaguccggggugcaggucgacgccaacugcgagggcgacugcuaccacaacgggggcaccaucaucagcaaccuccccuuccagaacaucaacucccgcgccguggggaagugcccgcgguacgugaagcaggagagccugcugcucgccacgggcaugaagaacguccccgagauccccaagggccgcgggcuguucggcgccaucgcgggguucaucgagaacggcugggaggggcugaucgacggcugguacggcuuccggcaccagaacgcccagggggagggcaccgccgccgacuacaaguccacccagagcgccaucgaccagaucaccgggaagcucaaccgccugaucgagaagacgaaccagcaguucgagcugaucgacaacgaguucaccgagaucgagaagcagaucggcaacgugaucaacuggacccgggacuccaugaccgagguguggagcuacaacgcggagcuccuggucgccauggagaaccagcacacgaucgaccuggccgacuccgagaugaacaagcucuacgagcgcgugaagcgccagcugcgggagaacgccgaggaggacggcaccgggugcuucgagaucuuccacaagugcgacgacgacugcauggccagcauccgcaacaacaccuacgaccacuccaaguaccgggaggaggcgaugcagaaccgcauccagaucgaccccgugaagcugagcuccggcuacaaggacgucauccucugguucagcuucggggccuccugcuucauccugcuggccaucgccaugggccucguguucaucugcgucaagaacgggaacaugcggugcaccaucugcaucuga

SEQ ID NO: 74242 - RNA, 1683 nt, Artificial Sequence; identical to SEQ ID NO: 74219
  derived and/or modified CDS sequence (opt1) from hemagglutinin__InfluenzaA__AGQ81002

SEQ ID NO: 74243 - RNA, 1683 nt, Artificial Sequence; identical to SEQ ID NO: 74219
  derived and/or modified CDS sequence (opt1) from hemagglutinin__InfluenzaA__AGQ81003

SEQ ID NO: 74244 - RNA, 1683 nt, Artificial Sequence; identical to SEQ ID NO: 74219
  derived and/or modified CDS sequence (opt1) from hemagglutinin__InfluenzaA__AGQ81004

SEQ ID NO: 74245 - RNA, 1683 nt, Artificial Sequence; identical to SEQ ID NO: 74219
  derived and/or modified CDS sequence (opt1) from hemagglutinin__InfluenzaA__AGQ81005

SEQ ID NO: 74246 - RNA, 1683 nt, Artificial Sequence; identical to SEQ ID NO: 74219
  derived and/or modified CDS sequence (opt1) from hemagglutinin__InfluenzaA__AGQ81006

SEQ ID NO: 74247 - RNA, 1683 nt, Artificial Sequence; identical to SEQ ID NO: 74219
  derived and/or modified CDS sequence (opt1) from hemagglutinin__InfluenzaA__AGQ81007

SEQ ID NO: 74248 - RNA, 1683 nt, Artificial Sequence; identical to SEQ ID NO: 74219
  derived and/or modified CDS sequence (opt1) from hemagglutinin__InfluenzaA__AGQ81008

SEQ ID NO: 74249 - RNA, 1683 nt, Artificial Sequence
  derived and/or modified CDS sequence (opt1) from hemagglutinin__InfluenzaA__AGQ81009
augaacacccagauccugguguucgcccucgucgccaucauccccaccaacgcggacaagaucugccugggccaccacgccgugagcaacgggacgaaggugaacacccugaccgagcgcggcgucgagguggugaacgccaccgagacggucgagcggaccuccaucccgcgcaucugcagcaaggggaagcgggccguggaccucggccagugcgggcugcugggcaccaucaccggcccgccccagugcgaccaguuccucgaguucuccgccgaccugaucaucgagcgccaggaggggagcgacgugugcuaccccggcaaguucgucaacgaggaggcgcugcggcagauccuccgcgaguccgggggcaucaacaaggagacgaugggguucaccuacagcggcauccggaccaacggcgccaccuccgccugccgccggagcggguccagcuucuacgccgagaugaaguggcugcuguccaacacggacaacgcggccuucccccagaccaccaagagcuacaagaacacccgcaaggaccccgcccucaucaucuggggcauccaccacuccgggagcacgaccgagcagaccaagcuguacggcuccggcaacaagcugaucaccguggggagcuccaacuaccagcagagcuucgugcccucccccggcgcccggccgcaggucaacgggcagagcggccgcaucgacuuccacuggcucaugcugaaccccaacgacacggugaccuucagcuucaacggggccuucaucgcgcccgaccgggccuccuuccugcgcggcaagagcaugggcauccaguccggggugcaggucgacgccaacugcgagggcgacugcuaccacaacgggggcaccaucaucagcaaccuccccuuccagaacaucaacucccgggccguggggaagugcccgcgcuacgugaagcaggagagccugcugcucgccaccggcaugaagaacguccccgagauccccaagggccgggggcuguucggcgcgaucgccggguucaucgagaacggcugggaggggcugguggacggcugguacggcuuccgccaccagaacgcccagggggagggcacggccgccgacuacaaguccacccagagcgcgaucgaccagaucaccgggaagcucaaccggcugaucgagaagaccaaccagcaguucgagcugaucgacaacgaguucacggagguggagcgccagaucggcaacgucaucaacuggacccgggacuccaugaccgagguguggagcuacaacgccgagcuccugguggccauggagaaccagcacaccaucgaccuggccgacuccgagaugaacaagcucuacgagcgcguccgccggcagcugcgcgagaacgccgaggaggacggcacggggugcuucgagaucuuccacaagugcgacgacgacugcauggcgagcauccggaacaacaccuacgaccacuccaaguaccgcgaggaggccaugcagaaccggauccagaucgaccccgugaagcugagcuccggcuacaaggacgucauccucugguucagcuucggggccuccugcuucauccugcuggccaucgcgaugggccucguguucaucugcgugaagaacgggaacaugcgcugcaccaucugcaucuga

SEQ ID NO: 74250 - RNA, 1683 nt, Artificial Sequence
  derived and/or modified CDS sequence (opt1) from hemagglutinin__InfluenzaA__AGQ81011
augaacacccagauccugguguucgcccucaucgccaucacccccacgaacagcgacaagaucugccugggccaccacgcggucuccaacgggaccaaggugaacacccugaccgagcgcggcguggaggucgugaacgccacggagaccguggagcggaccagcaucccgcgcaucugcuccaaggggaagcggaccgucgaccucggccagugcgggcugcugggcacgaucaccggcccgccccagugcgaccaguuccucgaguucagcgccgaccugaucaucgagcgccgggagggguccgacgugugcuaccccggcaaguucgugaacgaggaggcccugcgccagauccuccgggagagcgggggcaucgacaaggaggccaugggguucaccuacuccggcauccgcaccaacggcgcgacgagcgccugccggcgcuccgagagcuccuucuacgccgagaugaaguggcugcugagcaacaccgacaacgccgcguucccgcccaugaccaaguccuacaagaacacccggaaggcccccgcccucaucaucugggggauccaccacagcggcuccacggccgagcagaccaagcuguacgggagcggcaacaagcuggucaccgugcgcuccagcaacuaccagcaguccuucgugcccagccccggcgccgggcccaaggucaacggccagagcgggcggaucgacuuccacuggcucaugcugaaccccaacgacaccgugacguucuccuucaacggcgcguucaucgcccccgaccgcgccagcuuccugcgggggaaguccaugggcauccagagcggcgugcaggucgacgccaacugcgagggggacugcuaccacuccggcgggaccaucaucagcaaccucccguuccagaacaucgacucccgcguggugggcaagugcccccgguacgucaagcagaagucccugcugcucgccaccgggaugaagaacgugcccgagauccccaagggccgcggccuguucggggcgaucgccggcuucaucgagaacgggugggagggccugaucgacgggugguacggcuuccggcaccagaacgcccagggcgaggggaccgccgccgacuacaagagcacgcagagcgcgaucaaccagaugaccggcaagcucaaccgccugaucgagaagaccaaccagcaguucgagcugaucgacaacgaguucaccgagguggagaagcagaucgggaacgucaucaacuggacgcgggacuccaucaccgagguguggagcuacaacgccgagcuccugguggccauggagaaccagcacaccaucgaccuggccgacuccgagaugaacaagcucuacgagcgcgucaagcgccagcugcgggagaacgccgaggaggacggcaccggcugcuucgagaucuuccacaagugcgacgacgacugcauggcgagcauccgcaacaacacguacgaccacuccaaguaccgggaggaggccaugcagaaccgcauccagaucgacccggugaagcugagcuccggguacaaggacgucauccucugguucagcuucggcgccuccugccugauccugcucgccaucgcgauggggcugguguucaucugcgugaagaacggcaacaugcggugcaccaucugcaucuga

SEQ ID NO: 74251 - RNA, 1683 nt, Artificial Sequence
  derived and/or modified CDS sequence (opt1) from hemagglutinin__InfluenzaA__AGQ81012
augaacacccagauccugguguucgcccucaucgccaucauccccaccaacagcgacaagaucugccugggccaccacgcggucuccaacgggacgaaggugaacacccugaccgagcgcggcguggaggucgugaacgccaccgagacgguggagcggaccagcaucccgcgcaucugcuccaaggggaagcggaccgucgaccucggccagugcgggcugcugggcaccaucacgggcccgccccagugcgaccaguuccucgaguucagcgccgaccugaucaucgagcgccgggagggguccgacgugugcuaccccggcaaguucgugaacgaggaggcccugcgccagauccuccgggagagcgggggcaucaacaaggaggccaugggguucaccuacuccggcauccgcaccaacggcgcgaccagcgccugccggcgcuccgggagcuccuucuacgccgagaugaaguggcugcugagcaacacggacaacgccgcguucccgcccaugaccaaguccuacaagaacacccggaaggcccccgcccucaucaucuggggcauccaccacagcggguccaccgccgagcagacgaagcuguacggcagcggcaacaagcuggucaccgugcgcuccagcaacuaccagcaguccuucgugcccagccccggggccggcccccaggucaacgggcagagcggccggaucgacuuccacuggcucaugcugaaccccaacgacaccgugaccuucuccuucaacggggcguucaucgcccccgaccgcgccagcuuccugcggggcaaguccaugggcauccagagcggggugcaggucgacgccaacugcgagggcgacugcuaccacuccgggggcacgaucaucagcaaccucccguuccagaacaucgacucccgcgugguggggaagugcccccgguacgucaagcagaagucccugcugcucgccaccggcaugaagaacgugcccgagauccccaagggccgcgggcuguucggcgcgaucgccggguucaucgagaacggcugggaggggcugaucgacggcugguacggcuuccggcaccagaacgcccagggggagggcaccgccgccgacuacaagagcacccagagcgcgaucaaccagaugacggggaagcucaaccgccugaucgagaagaccaaccagcaguucgagcugaucgacaacgaguucaccgagguggagaagcagaucggcaacgucaucaacuggacccgggacuccaucacggagguguggagcuacaacgccgagcuccugguggccauggagaaccagcacaccaucgaccuggccgacuccgagaugaacaagcucuacgagcgcgucaagcgccagcugcgggagaacgccgaggaggacggcaccgggugcuucgagaucuuccacaagugcgacgacgacugcauggcgagcauccgcaacaacaccuacgaccacuccaaguaccgggaggaggccaugcagaaccgcauccagaucgacccggugaagcugagcuccggcuacaaggacgucauccucugguucagcuucggggccuccugcuucauccugcuggccaucgcgaugggccucguguucaucugcgugaagaacgggaacaugcggugcacgaucugcaucuga

SEQ ID NO: 74252 - RNA, 1683 nt, Artificial Sequence
  derived and/or modified CDS sequence (opt1) from hemagglutinin__InfluenzaA__AGQ81017
augaacacccagauccugguguucgcccucaucgccaucacccccacgaacagcgacaagaucugccugggccaccacgcggucuccaacgggaccaaggugaacacccugaccgagcgcggcguggaggucgugaacgccacggagaccguggagcggaccagcaucccgcgcaucugcuccaaggggaagcggaccgucgaccucggccagugcgggcugcugggcacgaucaccggcccgccccagugcgaccaguuccucgaguucagcgccgaccugaucaucgagcgccgggagggguccgacgugugcuaccccggcaaguucgugaacgaggaggcccugcgccagauccuccgggagagcgggggcaucgacaaggaggccaugggguucaccuacuccggcauccgcaccaacggcgcgacgagcgccugccggcgcuccgggagcuccuucuacgccgagaugaaguggcugcugagcaacaccgacaacgccgcguucccgcccaugaccaaguccuacaagaacacccggaaggcccccgcccucaucaucuggggcauccaccacagcggguccacggccgagcagaccaagcuguacggcagcggcaacaagcuggucaccgugcgcuccagcaacuaccagcaguccuucgugcccagccccggggccggcccccaggucaacgggcagagcggccggaucgacuuccacuggcucaugcugaaccccaacgacaccgugacguucuccuucaacggggcguucaucgcccccgaccgcgccagcuuccugcggggcaaguccaugggcauccagagcggggugcaggucgacgccaacugcgagggcgacugcuaccacuccgggggcaccaucaucagcaaccucccguuccagaacaucgacucccgcgugguggggaagugcccccgguacgucaagcagaagucccugcugcucgccaccggcaugaagaacgugcccgagauccccaagggccgcgggcuguucggcgcgaucgccggguucaucgagaacggcugggaggggcugaucgacggcugguacggcuuccggcaccagaacgcccagggggagggcaccgccgccgacuacaagagcacgcagagcgcgaucaaccagaugaccgggaagcucaaccgccugaucgagaagaccaaccagcaguucgagcugaucgacaacgaguucaccgagguggagaagcagaucggcaacgucaucaacuggacgcgggacuccaucaccgagguguggagcuacaacgccgagcuccugguggccauggagaaccagcacaccaucgaccuggccgacuccgagaugaacaagcucuacgagcgcgucaagcgccagcugcgggagaacgccgaggaggacggcaccgggugcuucgagaucuuccacaagugcgacgacgacugcauggcgagcauccgcaacaacacguacgaccacuccaaguaccgggaggaggccaugcagaaccgcauccagaucgacccggugaagcugagcuccggcuacaaggacgucauccucugguucagcuucggggccuccugcuucauccugcuggccaucgcgaugggccucguguucaucugcgugaagaacgggaacaugcggugcaccaucugcaucuga

SEQ ID NO: 74253 - RNA, 1683 nt, Artificial Sequence
  derived and/or modified CDS sequence (opt1) from hemagglutinin__InfluenzaA__AGQ81018
augaacacccagauccugguguucgcccucaucgccaucauccccaccaacagcgacaagaucugccugggccaccacgcggucuccaacgggacgaaggugaacacccugaccgagcgcggcguggaggucgugaacgccaccgagacgguggagcggaccagcaucccgcgcaucugcuccaaggggaagcggaccgucgaccucggccagugcgggcugcugggcaccaucacgggcccgccccagugcgaccaguuccucgaguucagcgccgaccugaucaucgagcgccgggagggguccgacgugugcuaccccggcaaguucgugaacgaggaggcccugcgccagauccuccgggagagcgggggcaucgucaaggaggccaugggguucaccuacuccggcauccgcaccaacggcgcgaccagcgccugccggcgcuccgggagcuccuucuacgccgagaugaaguggcugcugagcaacacggacaacgccgcguucccgcccaugaccaaguccuacaagaacacccggaaggcccccgccaucaucaucuggggcauccaccacagcggguccaccgccgagcagacgaagcucuacggcagcggcaacaagcuggugaccgugcgcuccagcaacuaccagcaguccuucguccccagccccggggccggcccccaggugaacgggcagagcggccggaucgacuuccacuggcugaugcucaaccccaacgacaccgugaccuucuccuucaacggggcguucaucgcccccgaccgcgccagcuuccugcggggcaaguccaugggcauccagagcgggguccagguggacgccaacugcgagggcgacugcuaccacucccgcgggacgaucaucagcaaccugccguuccagaacaucgacucccggguggucggcaagugcccccgcuacgugaagcagaagucccuccugcuggccaccgggaugaagaacgugcccgagauccccaagggccggggccucuucggggcgaucgccggcuucaucgagaacgggugggagggccugaucgacgggugguacggcuuccgccaccagaacgcccagggcgaggggaccgccgccgacuacaagagcacccagagcgcgaucaaccagaugacgggcaagcugaaccggcucaucgagaagaccaaccagcaguucgagcugaucgacaacgaguucaccgaggucgagaagcagaucgggaacgugaucaacuggacccgcgacuccaucacggagguguggagcuacaacgccgagcugcucgucgccauggagaaccagcacaccaucgaccuggccgacuccgagaugaacaagcuguacgagcgcgugaagcggcagcuccgcgagaacgccgaggaggacggcaccggcugcuucgagaucuuccacaagugcgacgacgacugcauggcgagcauccggaacaacaccuacgaccacuccaaguaccgcgaggaggccaugcagaaccggauccagaucgacccggucaagcugagcuccggguacaaggacgugauccugugguucagcuucggcgccuccugcuucauccuccuggccaucgcgauggggcugguguucaucugcgucaagaacggcaacaugcgcugcacgaucugcaucuga

SEQ ID NO: 74254 - RNA, 1683 nt, Artificial Sequence; identical to SEQ ID NO: 74253
  derived and/or modified CDS sequence (opt1) from hemagglutinin__InfluenzaA__AGQ81019

SEQ ID NO: 74255 - RNA, 1683 nt, Artificial Sequence; identical to SEQ ID NO: 74252
  derived and/or modified CDS sequence (opt1) from hemagglutinin__InfluenzaA__AGQ81020

SEQ ID NO: 74256 - RNA, 1683 nt, Artificial Sequence; identical to SEQ ID NO: 74253
  derived and/or modified CDS sequence (opt1) from hemagglutinin__InfluenzaA__AGQ81021

SEQ ID NO: 74257 - RNA, 1683 nt, Artificial Sequence; identical to SEQ ID NO: 74252
  derived and/or modified CDS sequence (opt1) from hemagglutinin__InfluenzaA__AGQ81022

SEQ ID NO: 74258 - RNA, 1683 nt, Artificial Sequence; identical to SEQ ID NO: 74253
  derived and/or modified CDS sequence (opt1) from hemagglutinin__InfluenzaA__AGQ81023

SEQ ID NO: 74259 - RNA, 1683 nt, Artificial Sequence
  derived and/or modified CDS sequence (opt1) from hemagglutinin__InfluenzaA__AGQ81025
augaacacccagauccugguguucgcccucaucgccaucauccccaccaacgcggacaagaucugccugggccaccacgccgucagcaacgggacgaaggugaacacccugaccgagcgcggcguggaggucgugaacgccaccgagacgguggagcggaccuccaucccgcgcaucugcagcaaggggaagcggaccgucgaccucggccagugcgggcugcugggcaccaucacgggcccgccccagugcgaccaguuccucgaguucuccgccgaccugaucaucgagcgccgggaggggagcgacgugugcuaccccggcaaguucgugaacgaggaggcccugcgccagauccuccgggaguccgggggcaucgacaaggaggcgaugggguucaccuacagcggcauccgcaccaacggcgucaccuccgccugccggcgcagcggguccagcuucuacgccgagaugaaguggcugcuguccaacacggacaacgccgcguucccgcccaugaccaagagcuacaagaacacccggaaggcccccgcccucaucaucuggggcauccaccacuccgggagcaccgccgagcagacgaagcuguacggcuccggcaacaagcuggugaccgugcgcagcuccaacuaccagcagagcuucguccccucccccggggccggcccccaggugaacgggcagagcggccggaucgacuuccacuggcucaugcugaaccccaacgacaccgugaccuucagcuucaacggggcguucaucgcccccgaccgcgccuccuuccugcggggcaagagcaugggcauccaguccgggguccagguggacgccaacugcgagggcgacugcuaccacagcgggggcacgaucaucuccaaccucccguuccagaacaucgacagccgcguggucgggaagugcccccgguacgugaagcagaagucccugcugcucgccaccggcaugaagaacgugcccgagauccccaagggccgcgggcuguucggcgcgaucgccggguucaucgagaacggcugggaggggcugaucgacggcugguacggcuuccggcaccagaacgcccagggggagggcaccgccgccgacuacaagagcacccaguccgcgaucaaccagaugacggggaagcucaaccgccugaucgagaagaccaaccagcaguucggccugaucgacaacgaguucaccgaggucgagaagcagaucggcaacgugaucaacuggacccgggacagcaucacggaggugugguccuacaacgccgagcuccuggucgccauggagaaccagcacaccaucgaccuggccgacagcgagaugaacaagcucuacgagcgcgugaagcgccagcugcgggagaacgccgaggaggacgggaccggcugcuucgagaucuuccacaagugcgacgacgacugcauggcguccauccgcaacaacaccuacgaccacagcaaguaccgggaggaggccaugcagaaccgcauccagaucgacccggucaagcuguccagcggguacaaggacgugauccucugguucuccuucggcgccagcugcuucauccugcuggccaucgcgauggggcucguggucaucugcgugaagaacggcaacaugcggugcacgaucugcaucuga

SEQ ID NO: 74260 - RNA, 1683 nt, Artificial Sequence
  derived and/or modified CDS sequence (opt1) from hemagglutinin__InfluenzaA__AGQ81026
augaacacccagauccugguguucgcccucaucgccaucauccccaccaacgcggacaagaucugccugggccaccacgccgucagcaacgggacgaaggugaacacccugaccgagcgcggcguggaggucgugaacgccaccgagacgguggagcggaccuccaucccgcgcaucugcagcaaggggaagcggaccgucgaccucggccagugcgggcugcugggcaccaucacgggcccgccccagugcgaccaguuccucgaguucuccgccgaccugaucaucgagcgccgggaggggagcgacgugugcuaccccggcaaguucgugaacgaggaggcccugcgccagauccuccgggaguccgggggcaucgacaaggaggcgaugggguucaccuacagcggcauccgcaccaacggcgccaccuccgccugccggcgcagcggguccagcuucuacgccgagaugaaguggcugcuguccaacacggacaacgcggccuucccgcccaccaccaagagcuacaagaacacccggaaggcccccgcccucaucaucuggggcauccaccacuccgggagcacggccgagcagaccaagcuguacggcuccggcaacaagcuggucaccgugcgcagcuccaacuaccagcagagcuucgugcccucccccggggcgggcccccaggucaacgggcagagcggccggaucgacuuccacuggcucaugcugaaccccaacgacaccgugacguucagcuucaacggggccuucaucgcccccgaccgcgccuccuuccugcggggcaagagcaugggcauccaguccggggugcaggucgacgccaacugcgagggcgacugcuaccacagcgggggcaccaucaucuccaaccucccguuccagaacaucgacagccgcgugguggggaagugcccccgguacgucaagcagaagucccugcugcucgcgaccggcaugaagaacgugcccgagauccccaagggccgcgggcuguucggcgccaucgccggguucaucgagaacggcugggaggggcugaucgacggcugguacggcuuccggcaccagaacgcccagggggagggcaccgccgcggacuacaagagcacgcaguccgccaucaaccagaugaccgggaagcucaaccgccugaucgagaagaccaaccagcaguucgagcugaucgacaacgaguucaccgagguggagaagcagaucggcaacgucaucaacuggacgcgggacagcaucaccgaggugugguccuacaacgccgagcuccugguggccauggagaaccagcacaccaucgaccuggccgacagcgagaugaacaagcucuacgagcgcgucaagcgccagcugcgggagaacgcggaggaggacggcaccgggugcuucgagaucuuccacaagugcgacgacgacugcauggccuccauccgcaacaacacguacgaccacagcaaguaccgggaggaggccaugcagaaccgcauccagaucgacccggugaagcuguccagcggcuacaaggacgucauccucugguucuccuucggggccagcugcuucauccugcuggcgaucgccaugggccucguguucaucugcgugaagaacgggaacaugcggugcaccaucugcaucuga

SEQ ID NO: 74261 - RNA, 1683 nt, Artificial Sequence
  derived and/or modified CDS sequence (opt1) from hemagglutinin__InfluenzaA__AGQ81027
augaacacccagauccugguguucgcccucaucgccaucauccccaccaacgcggacaagaucugccugggccaccacgccgucagcaacgggacgaaggugaacacccugaccgagcgcggcguggaggucgugaacgccaccgagacgguggagcggaccuccaucccgcgcaucugcagcaaggggaagcggaccgucgaccucggccagugcgggcugcugggcaccaucacgggcccgccccagugcgaccaguuccucgaguucuccgccgaccugaucaucgagcgccgggaggggagcgacgugugcuaccccggcaaguucgugaacgaggaggcccugcgccagauccuccgggaguccgggggcaucgacaaggaggcgaugggguucaccuacagcggcauccgcaccaacggcgucaccuccgccugccggcgcagcggguccagcuucuacgccgagaugaaguggcugcuguccaacacggacaacgccgcguucccgcccaugaccaagagcuacaagaacacccggaaggcccccgcccucaucaucuggggcauccaccacuccgggagcaccgccgagcagacgaagcuguacggcuccggcaacaagcuggugaccgugcgcagcuccaacuaccagcagagcuucguccccucccccggggccggcccccaggugaacgggcagagcggccggaucgacuuccacuggcucaugcugaaccccaacgacaccgugaccuucagcuucaacggggcguucaucgcccccgaccgcgccuccuuccugcggggcaagagcaugggcauccaguccgggguccagguggacgccaacugcgagggcgacugcuaccacagcgggggcacgaucaucuccaaccucccguuccagaacaucgacagccgcguggucgggaagugcccccgguacgugaagcagaagucccugcugcucgccaccggcaugaagaacgugcccgagauccccaagggccgcgggcuguucggcgcgaucgccggguucaucgagaacggcugggaggggcugaucgacggcugguacggcuuccggcaccagaacgcccagggggagggcaccgccgccgacuacaagagcacccaguccgcgaucaaccagaugacggggaagcucaaccgccugaucgagaagaccaaccagcaguucgagcugaucgacaacgaguucaccgaggucgagaagcagaucggcaacgugaucaacuggacccgggacagcaucacggaggugugguccuacaacgccgagcuccuggucgccauggagaaccagcacaccaucgaccuggccgacagcgagaugaacaagcucuacgagcgcgugaagcgccagcugcgggagaacgccgaggaggacggcaccgggugcuucgagaucuuccacaagugcgacgacgacugcauggcguccauccgcaacaacaccuacgaccacagcaaguaccgggaggaggccaugcagaaccgcauccagaucgacccggucaagcuguccagcggcuacaaggacgugauccucugguucuccuucggggccagcugcuucauccugcuggccaucgcgaugggccucguguucaucugcgucaagaacgggaacaugcggugcacgaucugcaucuga

SEQ ID NO: 74262 - RNA, 1683 nt, Artificial Sequence
  derived and/or modified CDS sequence (opt1) from hemagglutinin__InfluenzaA__AGQ81028
augaacacccagauccugguguucgcccucaucgccaucauccccaccaacgcggacaagaucugccugggccaccacgccgucagcaacgggacgaaggugaacacccugaccgagcgcggcguggaggucgugaacgccaccgagacgguggagcggaccuccaucccgcgcaucugcagcaaggggaagcggaccgucgaccucggccagugcgggcugcugggcaccaucacgggcccgccccagugcgaccaguuccucgaguucuccgccgaccugaucaucgagcgccgggaggggagcgacgugugcuaccccggcaaguucgugaacgaggaggcccugcgccagauccuccgggaguccgggggcaucgacaaggaggcgaugggguucaccuacagcggcauccgcaccaacggcgccaccuccgccugccggcgcagcggguccagcuucuacgccgagaugaaguggcugcuguccaacacggacaacgcggccuucccgcccaccaccaagagcuacaagaacacccggaaggcccccgcccucaucaucuggggcauccaccacuccgggagcacggccgagcagaccaagcuguacggcuccggcaacaagcuggucaccgugcgcagcuccaacuaccagcagagcuucgugcccucccccggggcgggcccccaggucaacgggcagagcggccggaucgacuuccacuggcucaugcugaaccccaacgacaccgugacguucagcuucaacggggccuucaucgcccccgaccgcgccuccuuccugcggggcaagagcaugggcauccaguccggggugcaggucgacgccaacugcgagggcgacugcuaccacagcgggggcaccaucaucuccaaccucccguuccagaacaucgacagccgcgugguggggaagugcccccgguacgucaagcagaagucccugcugcucgcgaccggcaugaagaacgugcccgagauccccaagggccgcgggcuguucggcgccaucgccggguucaucgagaacggcugggaggggcugaucgacggcugguacggcuuccggcaccagaacgcccagggggagggcaccgccgcggacuacaagagcacgcaguccgccaucaaccagaugaccgggaagcucaaccgccugaucgagaagaccaaccagcaguucgagcugaucgacaacgaguucaccgagguggagaagcagaucggcaacgucaucaacuggacgcgggacagcaucaccgagaugugguccuacaacgccgagcuccugguggccauggagaaccagcacaccaucgaccuggccgacagcgagaugaacaagcucuacgagcgcgugaagcgccagcugcgggagaacgcggaggaggacggcaccgggugcuucgagaucuuccacaagugcgacgacgacugcauggccuccauccgcaacaacacguacgaccacagcaaguaccgggaggaggccaugcagaaccgcauccagaucgacccggucaagcuguccagcggcuacaaggacgugauccucugguucuccuucggggccagcugcuucauccugcuggcgaucgccaugggccucgucuucaucugcgugaagaacgggaacaugcggugcaccaucugcaucuga

SEQ ID NO: 74263 - RNA, 1683 nt, Artificial Sequence
  derived and/or modified CDS sequence (opt1) from hemagglutinin__InfluenzaA__AGQ81029
augaacacccagauccugguguucgcccucaucgccaucauccccaccaacgcggacaagaucugccugggccaccacgccgucagcaacgggacgaaggugaacacccugaccgagcgcggcguggaggucgugaacgccaccgagacgguggagcggaccuccaucccgcgcaucugcagcaaggggaagcggaccgucgaccucggccagugcgggcugcugggcaccaucacgggcccgccccagugcgaccaguuccucgaguucuccgccgaccugaucaucgagcgccgggaggggagcgacgugugcuaccccggcaaguucgugaacgaggaggcccugcgccagauccuccgggaguccgggggcaucgacaaggaggcgaugggguucaccuacagcggcauccgcaccaacggcgucaccuccgccugccggcgcagcggguccagcuucuacgccgagaugaaguggcugcuguccaacacggacaacgccgcguucccgcccaugaccaagagcuacaagaacacccggaaggcccccgcccucaucaucuggggcauccaccacuccgggagcaccgccgagcagacgaagcuguacggcuccggcaacaagcuggugaccgugcgcagcuccaacuaccagcagagcuucaugcccucccccggggccggcccccaggucaacgggcagagcggccggaucgacuuccacuggcucaugcugaaccccaacgacaccgugaccuucagcuucaacggggcguucaucgcccccgaccgcgccuccuuccugcggggcaagagcaugggcauccaguccggggugcaggucgacgccaacugcgagggcgacugcuaccacagcgggggcacgaucaucuccaaccucccguuccagaacaucgacagccgcgugguggggaagugcccccgguacgucaagcagaagucccugcugcucgccaccggcaugaagaacgugcccgagauccccaagggccgcgggcuguucggcgcgaucgccggguucaucgagaacggcugggaggggcugaucgacggcugguacggcuuccggcaccagaacgcccagggggagggcaccgccgccgacuacaagagcacccaguccgcgaucaaccagaugacggggaagcucaaccgccugaucgagaagaccaaccagcaguucgagcugaucgacaacgaguucaccgagguggagaagcagaucggcaacgucaucaacuggacccgggacagcaucacggaggugugguccuacaacgccgagcuccugguggccauggagaaccagcacaccaucgaccuggccgacagcgagaugaacaagcucuacgagcgcgucaagcgccagcugcgggagaacgccgaggaggacggcaccgggugcuucgagaucuuccacaagugcgacgacgacugcauggcguccauccgcaacaacaccuacgaccacagcaaguaccgggaggaggccaugcagaaccgcauccagaucgacccggugaagcuguccagcggcuacaaggacgucauccucugguucuccuucggggccagcugcuucauccugcuggccaucgcgaugggccucguguucaucugcgugaagaacgggaacaugcggugcacgaucugcaucuga

SEQ ID NO: 74264 - RNA, 1683 nt, Artificial Sequence
  derived and/or modified CDS sequence (opt1) from hemagglutinin__InfluenzaA__AGQ81031
augaacacccagauccugguguucgcccucaucgccaucauccccaccaacgcggacaagaucugccugggccaccacgccgucagcaacgggacgaaggugaacacccugaccgagcgcggcguggaggucgugaacgccaccgagacgguggagcggaccuccaucccgcgcaucugcagcaaggggaagcggaccgucgaccucggccagugcgggcugcugggcaccaucacgggcccgccccagugcgaccaguuccucgaguucuccgccgaccugaucaucgagcgccgggaggggagcgacgugugcuaccccggcaaguucgugaacgaggaggcccugcgccagauccuccgggaguccgggggcaucaacaaggaggcgaugggguucaccuacagcggcauccgcaccaacggcgccaccuccgccugccggcgcagcggguccagcuucuacgccgagaugaaguggcugcuguccaacacggacaacgcggccuucccgcccaugaccaagagcuacaagaacacccggaaggcccccgcccucaucaucuggggcauccaccacuccgggagcaccgccgagcagacgaagcuguacggcuccggcaacaagauggucaccgugcgcagcuccaacuaccagcagagcuucgugcccucccccggggcgggcccccaggucaacgggcagagcggccggaucgacuuccacuggcugaugcucaaccccaacgacaccgugaccuucagcuucaacggggccuucaucgcccccgaccgcgccuccuuccugcggggcaagagcaugggcauccaguccggggugcaggucgacgccaacugcgagggcgacugcuaccacagcgggggcacgaucaucuccaaccugccguuccagaacaucgacagccgcgugguggggaagugcccccgguacgucaagcagaagucccuccugcuggcgaccggcaugaagaacgugcccgagauccccaagggccgcggccucuucggggccaucgccggguucaucgagaacggcugggaggggcugaucgacggcugguacggcuuccggcaccagaacgcccagggggagggcaccgccgcggacuacaagagcacccaguccgccaucaaccagaugacggggaagcugaaccgccucaucgagaagaccaaccagcaguucgagcugaucgacaacgaguucaccgagguggagcggcagaucggcaacgucaucaacuggacccgcgacagcaucacggaggugugguccuacaacgccgagcugcucguggccauggagaaccagcacaccaucgaccuggccgacagcgagaugaacaagcuguacgagcgcgucaagcggcagcuccgcgagaacgcggaggaggacggcaccgggugcuucgagaucuuccacaagugcgacgacgacugcauggccuccauccggaacaacaccuacgaccacagcaaguaccgcgaggaggccaugcagaaccggauccagaucgacccggugaagcuguccagcggcuacaaggacgucauccugugguucuccuucggggccagcugcuucauccuccuggcgaucgccaugggccugguguucaucugcgugaagaacgggaacaugcgcugcacgaucugcaucuga

SEQ ID NO: 74265 - RNA, 1683 nt, Artificial Sequence; identical to SEQ ID NO: 74260
  derived and/or modified CDS sequence (opt1) from hemagglutinin__InfluenzaA__AGQ81032

SEQ ID NO: 74266 - RNA, 1683 nt, Artificial Sequence; identical to SEQ ID NO: 74261
  derived and/or modified CDS sequence (opt1) from hemagglutinin__InfluenzaA__AGQ81033

SEQ ID NO: 74267 - RNA, 1683 nt, Artificial Sequence; identical to SEQ ID NO: 74260
  derived and/or modified CDS sequence (opt1) from hemagglutinin__InfluenzaA__AGQ81034

SEQ ID NO: 74268 - RNA, 1683 nt, Artificial Sequence; identical to SEQ ID NO: 74261
  derived and/or modified CDS sequence (opt1) from hemagglutinin__InfluenzaA__AGQ81035

SEQ ID NO: 74269 - RNA, 1683 nt, Artificial Sequence; identical to SEQ ID NO: 74261
  derived and/or modified CDS sequence (opt1) from hemagglutinin__InfluenzaA__AGQ81036

SEQ ID NO: 74270 - RNA, 1683 nt, Artificial Sequence; identical to SEQ ID NO: 74261
  derived and/or modified CDS sequence (opt1) from hemagglutinin__InfluenzaA__AGQ81037

SEQ ID NO: 74271 - RNA, 1683 nt, Artificial Sequence; identical to SEQ ID NO: 74253
  derived and/or modified CDS sequence (opt1) from hemagglutinin__InfluenzaA__AGQ81038

SEQ ID NO: 74272 - RNA, 1683 nt, Artificial Sequence; identical to SEQ ID NO: 74253
  derived and/or modified CDS sequence (opt1) from hemagglutinin__InfluenzaA__AGQ81039

SEQ ID NO: 74273 - RNA, 1683 nt, Artificial Sequence
  derived and/or modified CDS sequence (opt1) from hemagglutinin__InfluenzaA__AGQ81040
augaacacccagauccugguguucgcccucaucgccaucauccccaccaacgcggacaagaucugccugggccaccacgccgucagcaacgggacgaaggugaacacccugaccgagcgcggcguggaggucgugaacgccaccgagacgguggagcggaccaacaucccgcgcaucugcuccaaggggaagcggaccgucgaccucggccagugcgggcugcugggcaccaucacgggcccgccccagugcgaccaguuccucgaguucagcgccgaccugaucaucgagcgccgggagggguccgacgugugcuaccccggcaaguucgugaacgaggaggcccugcgccagauccuccgggagagcgggggcaucgacaaggaggcgaugggguucaccuacuccggcauccgcaccaacggcgccaccagcgccugccggcgcuccgggagcuccuucuacgccgagaugaaguggcugcugagcaacacggacaacgcggccuucccccagaugaccaaguccuacaagaacacccggaaggaccccgcccucaucaucuggggcauccaccacagcggguccaccgccgagcagacgaagcuguacggcagcggcaacaagcuggucaccgugggguccagcaacuaccagcaguccuucgugcccagccccggcgcccgcccgcaggucaacgggcaguccggccggaucgacuuccacuggcucaugcugaaccccaacgacaccgugaccuucagcuucaacggggcguucaucgcccccgaccgcgccagcuuccugcggggcaaguccaugggcauccagagcggggugcagaucgacgccaacugcgagggcgacugcuaccacuccgggggcacgaucaucagcaaccuccccuuccagaacaucgacucccgcgccgucgggaagugcccgcgguacgugaagcagaagucccugcugcucgcgaccggcaugaagaacgugcccgagauccccaagggccgcgggcuguucggcgccaucgccggguucaucgagaacggcugggaggggcugaucgacggcugguacggcuuccggcaccagaacgcccagggggagggcaccgccgcggacuacaagagcacccagagcgccaucgaccagaucacggggaagcucaaccgccugaucgagaagaccaaccagcaguucgagcugaucgacaacgaguucaccgaggucgagaagcagaucggcaacgugaucaacuggacccgggacuccaucacggagguguggagcuacaacgccgagcuccuggucgccauggagaaccagcacaccaucgaccuggccgacuccgagaugaacaagcucuacgagcgcgugaagcgccagcugcgggagaacgcggaggaggacggcaccgggugcuucgagaucuuccacaagugcgacgacgacugcauggccagcauccgcaacaacaccuacgaccacuccaaguaccgggaggaggccaugcagaaccgcauccagaucgaccccgugaagcugagcuccggcuacaaggacgucauccucugguucagcuucggggccuccugcuucauccugcuggcgaucgccaugggccucguguucaucugcgucaagaacgggaacaugcggugcacgaucugcaucuga

SEQ ID NO: 74274 - RNA, 1683 nt, Artificial Sequence
  derived and/or modified CDS sequence (opt1) from hemagglutinin__InfluenzaA__AGQ81041
augaacacccagauccugguguucgcccucaucgccaucauccccaccaacgcggacaagaucugccugggccaccacgccgucagcaacgggacgaaggugaacacccugaccgagcgcggcguggaggucgugaacgccaccgagacgguggagcggaccaacaucccgcgcaucugcuccaaggggaagcggaccgucgaccucggccagugcgggcugcugggcaccaucacgggcccgccccagugcgaccaguuccucgaguucagcgccgaccugaucaucgagcgccgggagggguccgacgugugcuaccccggcaaguucgugaacgaggaggcccugcgccagauccuccgggagagcgggggcaucgacaaggaggcgaugggguucaccuacuccggcauccgcaccaacggcgccaccagcgccugccggcgcuccgggagcuccuucuacgccgagaugaaguggcugcugagcaacacggacaacgcggccuucccccagaccaccaaguccuacaagaacacccggaaggaccccgcccucaucaucuggggcauccaccacagcggguccacggccgagcagaccaagcuguacggcagcggcaacaagcuggucaccgugggguccagcaacuaccagcaguccuucgugcccagccccggcgcccgcccgcaggucaacgggcaguccggccggaucgacuuccacuggcucaugcugaaccccaacgacaccgugacguucagcuucaacggggcguucaucgcccccgaccgcgccagcuuccugcggggcaaguccaugggcauccagagcggggugcaggucgacgccaacugcgagggcgacugcuaccacuccgggggcaccaucaucagcaaccuccccuuccagaacaucgacucccgcgccguggggaagugcccgcgguacgugaagcagaagucccugcugcucgcgaccggcaugaagaacguccccgagauccccaagggccgcgggcuguucggcgccaucgccggguucaucgagaacggcugggaggggcugaucgacggcugguacggcuuccggcaccagaacgcccagggggagggcaccgccgcggacuacaagagcacgcagagcgccaucgaccagaucaccgggaagcucaaccgccugaucgagaagaccaaccagcaguucgagcugaucgacaacgaguucaccgagguggagaagcagaucggcaacgugaucaacuggacgcgggacuccaucaccgaggucuggagcuacaacgccgagcuccugguggccauggagaaccagcacaccaucgaccuggccgacuccgagaugaacaagcucuacgagcgcgugaagcgccagcugcgggagaacgcggaggaggacggcaccgggugcuucgagaucuuccacaagugcgacgacgacugcauggccagcauccgcaacaacacguacgaccacuccaaguaccgggaggaggccaugcagaaccgcauccagaucgaccccgucaagcugagcuccggcuacaaggacgugauccucugguucagcuucggggccuccugcuucauccugcuggcgaucgccaugggccucgucuucaucugcgugaagaacgggaacaugcggugcaccaucugcaucuga

SEQ ID NO: 74275 - RNA, 1683 nt, Artificial Sequence
  derived and/or modified CDS sequence (opt1) from hemagglutinin__InfluenzaA__AGQ81042
augaacacccagauccugguguucgcccucaucgccaucauccccaccaacgcggacaagaucugccugggccaccacgccgucagcaacgggacgaaggugaacacccugaccgagcgcggcguggaggucgugaacgccaccgagacgguggagcggaccaacaucccgcgcaucugcuccaaggggaagcggaccgucgaccucggccagugcgggcugcugggcaccaucacgggcccgccccagugcgaccaguuccucgaguucagcgccgaccugaucaucgagcgccgggagggguccgacgugugcuaccccggcaaguucgugaacgaggaggcccugcgccagauccuccgggagagcgggggcaucgacaaggaggcgaugggguucaccuacuccggcauccgcaccaacggcgccaccagcgccugccggcgcuccgggagcuccuucuacgccgagaugaaguggcugcugagcaacacggacaacgcggccuucccccagaugaccaaguccuacaagaacacccggaaggaccccgcccucaucaucuggggcauccaccacagcggguccaccgccgagcagacgaagcuguacggcagcggcaacaagcuggucaccgugggguccagcaacuaccagcaguccuucgugcccagccccggcgcccgcccgcaggucaacgggcaguccggccggaucgacuuccacuggcucaugcugaaccccaacgacaccgugaccuucagcuucaacggggcguucaucgcccccgaccgcgccagcuuccugcggggcaaguccaugggcauccagagcggggugcaggucgacgccaacugcgagggcgacugcuaccacuccgggggcacgaucaucagcaaccuccccuuccagaacaucgacucccgcgccguggggaagugcccgcgguacgugaagcagaagucccugcugcucgcgaccggcaugaagaacguccccgagauccccaagggccgcgggcuguucggcgccaucgccggguucaucgagaacggcugggaggggcugaucgacggcugguacggcuuccggcaccagaacgcccagggggagggcaccgccgcggacuacaagagcacccagagcgccaucgaccagaucacggggaagcucaaccgccugaucgagaagaccaaccagcaguucgagcugaucgacaacgaguucaccgagguggagaagcagaucggcaacgugaucaacuggacccgggacuccaucacggaggucuggagcuacaacgccgagcuccugguggccauggagaaccagcacaccaucgaccuggccgacuccgagaugaacaagcucuacgagcgcgugaagcgccagcugcgggagaacgcggaggaggacggcaccgggugcuucgagaucuuccacaagugcgacgacgacugcauggccagcauccgcaacaacaccuacgaccacuccaaguaccgggaggaggccaugcagaaccgcauccagaucgaccccgucaagcugagcuccggcuacaaggacgugauccucugguucagcuucggggccuccugcuucauccugcuggcgaucgccaugggccucgucuucaucugcgugaagaacgggaacaugcggugcacgaucugcaucuga

SEQ ID NO: 74276 - RNA, 1683 nt, Artificial Sequence
  derived and/or modified CDS sequence (opt1) from hemagglutinin__InfluenzaA__AGQ81043
augaacacccagauccugguguucgcccucaucgccaucauccccaccaacgcggacaagaucugccugggccaccacgccgucagcaacgggacgaaggugaacacccugaccgagcgcggcguggaggucgugaacgccaccgagacgguggagcggaccaacaucccgcgcaucugcuccaaggggaagcggaccgucgaccucggccagugcgggcugcugggcaccaucacgggcccgccccagugcgaccaguuccucgaguucagcgccgaccugaucaucgagcgccgggagggguccgacgugugcuaccccggcaaguucgugaacgaggaggcccugcgccagauccuccgggagagcgggggcaucgacaaggaggagaugggguucaccuacuccggcauccgcaccaacggcgcgaccagcgccugccggcgcuccgggagcuccuucuacgccgagaugaaguggcugcugagcaacacggacaacgccgcguucccgcagaugaccaaguccuacaagaacacccgcaagagccccgcccucaucgucuggggcauccaccacuccgugagcaccgccgagcagacgaagcuguacggguccggcaacaagcuggugaccgucggcagcuccaacuaccagcagagcuucgugcccucccccggggcccggccccaggugaacggccucagcgggcggaucgacuuccacuggcugaugcugaaccccaacgacaccgucaccuucagcuucaacggcgccuucaucgcgcccgaccgcgccuccuuccuccggggcaagagcauggggauccaguccggcguccagguggacgccaacugcgagggggacugcuaccacagcggcgggacgaucaucuccaaccugcccuuccagaacaucgacagccgcgccgugggcaagugcccgcgguacgugaagcagcgcucccugcuccuggccaccgggaugaagaacgugcccgagauccccaagggccggggccuguucggggcgaucgccggcuucaucgagaacgggugggagggccucaucgacgggugguacggcuuccgccaccagaacgcccagggcgaggggaccgccgccgacuacaagagcacccaguccgcgaucgaccagaucacgggcaagcugaaccggcugaucgagaagaccaaccagcaguucgagcucaucgacaacgaguucaacgaggucgagaagcagaucgggaacgugaucaacuggacccgcgacagcaucaccgaggugugguccuacaacgccgagcugcuggucgccauggagaaccagcacacgaucgaccucgccgacagcgagauggacaagcuguacgagcgcgugaagcggcagcugcgcgagaacgccgaggaggacggcaccggcugcuucgagaucuuccacaagugcgacgacgacugcauggcguccauccggaacaacaccuacgaccacagcaaguaccgcgaggaggccaugcagaaccggauccagaucgaccccgucaagcucuccagcggguacaaggacgugauccugugguucuccuucggcgccagcugcuucauccugcucgccaucgugauggggcuggucuucaucugcgugaagaacggcaacaugcgcugcaccaucugcaucuga

SEQ ID NO: 74277 - RNA, 1683 nt, Artificial Sequence; identical to SEQ ID NO: 74012
  derived and/or modified CDS sequence (opt1) from hemagglutinin__InfluenzaA__AGQ81044

SEQ ID NO: 74278 - RNA, 1683 nt, Artificial Sequence; identical to SEQ ID NO: 74012
  derived and/or modified CDS sequence (opt1) from hemagglutinin__InfluenzaA__AGQ81045

SEQ ID NO: 74279 - RNA, 1683 nt, Artificial Sequence; identical to SEQ ID NO: 74012
  derived and/or modified CDS sequence (opt1) from hemagglutinin__InfluenzaA__AGQ81046

SEQ ID NO: 74280 - RNA, 1683 nt, Artificial Sequence; identical to SEQ ID NO: 74261
  derived and/or modified CDS sequence (opt1) from hemagglutinin__InfluenzaA__AGQ81047

SEQ ID NO: 74281 - RNA, 1683 nt, Artificial Sequence; identical to SEQ ID NO: 74260
  derived and/or modified CDS sequence (opt1) from hemagglutinin__InfluenzaA__AGQ81049

SEQ ID NO: 74282 - RNA, 1683 nt, Artificial Sequence; identical to SEQ ID NO: 74261
  derived and/or modified CDS sequence (opt1) from hemagglutinin__InfluenzaA__AGQ81050

SEQ ID NO: 74283 - RNA, 1683 nt, Artificial Sequence
  derived and/or modified CDS sequence (opt1) from hemagglutinin__InfluenzaA__AGQ81051
augaacacccagauccugguguucgcccucaucgccaucauccccaccaacgcggacaagaucugccugggccaccacgccgucagcaacgggacgaaggugaacacccugaccgagcgcggcguggaggucgugaacgccaccgagacgguggagcggaccuccaucccgcgcaucugcagcaaggggaagcggaccgucgaccucggccagugcgggcugcugggcaccaucacgggcccgccccagugcgaccaguuccucgaguucuccgccgaccugaucaucgagcgccgggaggggagcgacgugugcuaccccggcaaguucgugaacgaggaggcccugcgccagauccuccgggaguccgggggcaucaacaaggaggcgaugggguucaccuacagcggcauccgcaccaacggcgccaccuccgccugccggcgcagcggguccagcuucuacgccgagaugaaguggcugcuguccaacacggacaacgcggccuucccgcccaugaccaagagcuacaagaacacccggaaggcccccgcccucaucaucuggggcauccaccacuccgggagcaccgccgagcagacgaagcuguacggcuccggcaacaagcuggucaccgugcgcagcuccaacuaccagcagagcuucgugcccucccccggggcgggcccccaggucaacgggcagagcggccggaucgacuuccacuggcucaugcugaaccccaacgacaccgugaccuucagcuucaacggggccuucaucgcccccgaccgcgccuccuuccugcggggcaagagcaugggcauccaguccggggugcaggucgacgccaacugcgagggcgacugcuaccacagcgggggcacgaucaucuccaaccucccguuccagaacaucgacagccgcgugguggggaagugcccccgguacgucaagcagaagucccugcugcucgcgaccggcaugaagaacgugcccgagauccccaagggccgcgggcuguucggcgccaucgccggguucaucgagaacggcugggaggggcugaucgacggcugguacggcuuccggcaccagaacgcccagggggagggcaccgccgcggacuacaagagcacccaguccgccaucaaccagaugacggggaagcucaaccgccugaucgagaagaccaaccagcaguucgagcugaucgacaacgaguucaccgagguggagaagcagaucggcaacgucaucaacuggacccgggacagcaucacggaggugugguccuacaacgccgagcuccugguggccauggagaaccagcacaccaucgaccuggccgacagcgagaugaacaagcucuacgagcgcgucaagcgccagcugcgggagaacgcggaggaggacggcaccgggugcuucgagaucuuccacaagugcgacgacgacugcauggccuccauccgcaacaacaccuacgaccacagcaaguaccgggaggaggccaugcagaaccgcauccagaucgacccggugaagcuguccagcggcuacaaggacgucauccucugguucuccuucggggccagcugcuucauccugcuggcgaucgccaugggccucguguucaucugcgugaagaacgggaacaugcggugcacgaucugcaucuga

SEQ ID NO: 74284 - RNA, 1683 nt, Artificial Sequence; identical to SEQ ID NO: 74261
  derived and/or modified CDS sequence (opt1) from hemagglutinin__InfluenzaA__AGQ81052

SEQ ID NO: 74285 - RNA, 1683 nt, Artificial Sequence
  derived and/or modified CDS sequence (opt1) from hemagglutinin__InfluenzaA__AGQ81053
augaacacccagauccugguguucgcccucaucgccaucauccccaccaacgcggacaagaucugccugggccaccacgccgucagcaacgggacgaaggugaacacccugaccgagcgcggcguggaggucgugaacgccaccgagacgguggagcggaccuccaucccgcgcaucugcagcaaggggaagcggaccgucgaccucggccagugcgggcugcugggcaccaucacgggcccgccccagugcgaccaguuccucgaguucuccgccgaccugaucaucgagcgccgggaggggagcgacgugugcuaccccggcaaguucgugaacgaggaggcccugcgccagauccuccgggaguccgggggcaucaacaaggaggcgaugggguucaccuacagcggcauccgcaccaacggcgccaccuccgccugccggcgcagcggguccagcuucuacgccgagaugaaguggcugcuguccaacacggacaacgcggccuucccgcccaugaccaagagcuacaagaacacccggaaggcccccgcccucaucaucuggggcauccaccacuccgggagcaccgccgagcagacgaagcuguacggcuccggcaacaagauggucaccgugcgcagcuccaacuaccagcagagcuucgugcccucccccggggcgggcccccaggucaacgggcagagcggccggaucgacuuccacuggcugaugcucaaccccaacgacaccgugaccuucagcuucaacggggccuucaucgcccccgaccgcgccuccuuccugcggggcaagagcaugggcauccaguccggggugcaggucgacgccaacugcgagggcgacugcuaccacagcgggggcacgaucaucuccaaccugccguuccagaacaucgacagccgcgugguggggaagugcccccgguacgucaagcagaagucccuccugcuggcgaccggcaugaagaacgugcccgagauccccaagggccgcggccucuucggggccaucgccggguucaucgagaacggcugggaggggcugaucgacggcugguacggcuuccggcaccagaacgcccagggggagggcaccgccgcggacuacaagagcacccaguccgccaucaaccagaugacggggaagcugaaccgccucaucgagaagaccaaccagcaguucgagcugaucgacaacgaguucaccgagguggagaagcagaucggcaacgucaucaacuggacccgggacagcaucacggaggugugguccuacaacgccgagcugcucguggccauggagaaccagcacaccaucgaccuggccgacagcgagaugaacaagcuguacgagcgcgucaagcgccagcuccgggagaacgcggaggaggacggcaccgggugcuucgagaucuuccacaagugcgacgacgacugcauggccuccauccgcaacaacaccuacgaccacagcaaguaccggaaggaggccaugcagaaccgcauccagaucgacccggugaagcuguccagcggcuacaaggacgucauccugugguucuccuucggggccagcugcuucauccuccuggcgaucgccaugggccugguguucaucugcgugaagaacgggaacaugcggugcacgaucugcaucuga

SEQ ID NO: 74286 - RNA, 1683 nt, Artificial Sequence; identical to SEQ ID NO: 74261
  derived and/or modified CDS sequence (opt1) from hemagglutinin__InfluenzaA__AGQ81055

SEQ ID NO: 74287 - RNA, 1683 nt, Artificial Sequence; identical to SEQ ID NO: 74261
  derived and/or modified CDS sequence (opt1) from hemagglutinin__InfluenzaA__AGQ81056

SEQ ID NO: 74288 - RNA, 1683 nt, Artificial Sequence; identical to SEQ ID NO: 74261
  derived and/or modified CDS sequence (opt1) from hemagglutinin__InfluenzaA__AGQ81057

SEQ ID NO: 74289 - RNA, 1683 nt, Artificial Sequence; identical to SEQ ID NO: 74261
  derived and/or modified CDS sequence (opt1) from hemagglutinin__InfluenzaA__AGQ81058

SEQ ID NO: 74290 - RNA, 1683 nt, Artificial Sequence; identical to SEQ ID NO: 74012
  derived and/or modified CDS sequence (opt1) from hemagglutinin__InfluenzaA__AGQ81059

SEQ ID NO: 74291 - RNA, 1683 nt, Artificial Sequence; identical to SEQ ID NO: 74012
  derived and/or modified CDS sequence (opt1) from hemagglutinin__InfluenzaA__AGQ81060

SEQ ID NO: 74292 - RNA, 1683 nt, Artificial Sequence; identical to SEQ ID NO: 74012
  derived and/or modified CDS sequence (opt1) from hemagglutinin__InfluenzaA__AGQ81061

SEQ ID NO: 74293 - RNA, 1683 nt, Artificial Sequence
  derived and/or modified CDS sequence (opt1) from hemagglutinin__InfluenzaA__AGQ81081
auggagguggucagccugaucaccauccuccuggugaucaccggcuccaacgccgacaagaucugcaucggguaccagagcacgaacuccaccgagaccguggacacccugacggagaacaacguccccgugacccacgccaaggagcuccugcacaccgagcacaacggcaugcugugcgcgaccaaccucgggcgcccgcugauccuggacacgugcaccaucgagggccucaucuacgggaaccccagcugcgacauccugcugggcggccgggagugguccuacaucguggagcgccccagcgccgucaacgggcucugcuaccccggcaacguggagaaccuggaggagcugcggucccucuucagcuccgccagcuccuaccagcgcauccagaucuucccggacaccaucuggaacgugagcuacuccgggaccagcaaggccugcuccgacagcuucuaccgguccaugcgcuggcugacgcagaagaacaacgccuaccccguccaggacgcgcaguacaccaacaaccggggccgcaacauccuguucaugugggggaucaaccacccgcccaccgacaccgcccagacgaaccucuacacccggaccgacaccacgaccagcguggccaccgaggacaucaaccgcaccuucaagccccugaucggcccccggccccuggugaacggccuccaggggcgcaucgacuacuacugggccguccugcggcccggccagacgcugcgcauccgguccaacgggaaccucaucgcgccgugguacggccacauccugagcggcgagagccacgggcgcauccugaagaccgaccucaacuccggcaacugcguggugcagugccagaccgagcgcgggggccugaacaccacgcugcccuuccacaacgucagcaaguacgccuucgggaacugccccaaguacgugggcgugaagucccucaagcuggccgucggccugcggaacgugcccgcccggagcucccgcggccucuucggggccaucgcgggguucaucgagggcggguggagcggccugguggccggcugguacggguuccagcacuccaacgaccagggcaccgggauggccgccgaccgggacagcacccagaaggccaucgacaagaucaccuccaaggucaacaacaucguggacaagaugaacaagcaguacgagaucaucgaccacgaguucagcgagaucgagacgcgccugaacaugaucaacaacaagaucgacgaccagauccaggacaucugggcguacaacgccgagcuccuggugcugcucgagaaccagaagacccuggacgagcacgacgccaacgucaacaaccuguacaacaaggugaagcgcgcccucggcuccaacgccgucgaggacgggaagggcugcuucgagcuguaccacaagugcgacaaccagugcauggagaccauccggaacggcaccuacaaccgccggaaguacaaggaggagagccgccuggagcggcagaagaucgagggggugaagcucgaguccgagggcacguacaagauccugaccaucuacagcaccguggcguccagccuggucaucgccaugggguucgccgccuuccucuucugggccauguccaacggcagcugccgcugcaacaucugcaucuga

SEQ ID NO: 74294 - RNA, 1683 nt, Artificial Sequence
  derived and/or modified CDS sequence (opt1) from hemagglutinin__InfluenzaA__AGQ81086
auggagguggucagccugaucaccauccuccuggugaucaccggcuccaacgccgacaagaucugcaucggguaccagagcacgaacuccaccgagaccguggacacccugacggagaacaacguccccgugacccacgccaaggagcuccugcacaccgagcacaacggcaugcugugcgcgaccaaccucgggcgcccgcugauccuggacacgugcaccaucgagggccucaucuacgggaaccccagcugcgaccugcugcucggcggccgggagugguccuacaucguggagcgccccagcgccgucaacgggcugugcuaccccggcaacguggagaaccuggaggagcuccggucccuguucagcuccgccagcuccuaccagcgcauccagaucuucccggacaccaucuggaacgugagcuacuccgggaccagcaaggccugcuccgacagcuucuaccgguccaugcgcuggcugacgcagaagaacaacgccuaccccguccaggacgcgcaguacaccaacaaccggggccgcaacauccucuucaugugggggaucaaccacccgcccaccgacaccgcccagacgaaccuguacacccggaccgacaccacgaccagcguggccaccgaggacaucaaccgcaccuucaagccccugaucggcccccggccccucgugaacggccugcaggggcgcaucgacuacuacugggccguccugcggcccggccagacgcuccgcauccgguccaacgggaaccugaucgcgccgugguacggccacauccugagcggcgagagccacgggcgcauccucaagaccgaccugaacuccggcaacugcguggugcagugccagaccgagcgcgggggccugaacaccacgcuccccuuccacaacgucagcaaguacgccuucgggaacugccccaaguacgugggcgugaagucccugaagcuggccgucggccuccggaacgugcccgcccggagcucccgcgggcuguucggcgccaucgcgggguucaucgagggcggguggagcggccugguggccggcugguacggguuccagcacuccaacgaccagggcaccgggauggccgccgaccgggacagcacccagaaggccaucgacaagaucaccuccaaggucaacaacaucguggacaagaugaacaagcaguacgagaucaucgaccacgaguucagcgagaucgagacgcgccucaacaugaucaacaacaagaucgacgaccagauccaggacaucugggcguacaacgccgagcugcuggugcuccuggagaaccagaagacccuggacgagcacgacgccaacgucaacaaccucuacaacaaggugaagcgcgcccugggcuccaacgccgucgaggacgggaagggcugcuucgagcuguaccacaagugcgacaaccagugcauggagaccauccggaacggcaccuacaaccgccggaaguacaaggaggagagccgccucgagcggcagaagaucgagggggugaagcuggaguccgagggcacguacaagauccugaccaucuacagcaccguggcguccagccucgucaucgccaugggguucgccgccuuccuguucugggccauguccaacggcagcugccgcugcaacaucugcaucuga

SEQ ID NO: 74295 - RNA, 1683 nt, Artificial Sequence
  derived and/or modified CDS sequence (opt1) from hemagglutinin__InfluenzaA__AGQ81087
auggagaccgugagccugaucaccaugcuccuggucgccacggugaucaacgccgacaagaucugcaucggcuaccaguccaccaacagcaccgagaccguggacacgcugaccgagaacaacguccccgugacccacgcgaaggagcuccugcacaccgagcacaacgggaugcugugcgccacgaaccucggccacccgcugauccuggacacgugcaccaucgaggggcucaucuacggcaaccccuccugcgaccugcugcucgggggccgcgaguggagcuacaucguggagcggcccuccgccgucaacggccugugcuaccccgggaacguggagaaccuggaggagcuccgcagccuguucuccagcgccuccagcuaccagcggauccagaucuucccggacaccaucuggaacguguccuacagcggcaccuccaaggccugcagcgacuccuucuaccgcagcaugcgguggcugacccagaagaacaacgcguaccccauccaggacgcccaguacaccaacaaccgcgagaagaacauccucuucaugugggggaucaaccacccgcccaccgacacggcccagaccaaccuguacacccggaccgacacgaccaccuccgucgccaccgaggagaucaaccgcacguucaagccccugaucggcccccggccccucgugaacgggcugcagggccgcaucgacuacuacuggagcgugcugaagcccggccagacccuccggauccgcuccaacgggaaccugaucgcgccgugguacggccacauccugagcggggagagccacggccggguccucaagaccgaccugaagcgcggcuccugcaccgugcagugccagacggagaagggcgggcugaacaccacccuccccuuccagaacgugagcaaguacgccuucgggaacugcuccaaguacgucggcgucaagagccugaagcuggccguggggcuccggaacgugcccucccgcagcucccggggccuguucggcgccaucgccggguucaucgagggcggguggagcggccugguggcggggugguacggcuuccagcacuccaacgaccagggcguggggauggccgccgaccgcgacagcacccagaaggccaucgacaagaugacguccaaggucaacaacaucguggacaagaugaacaagcaguacgagaucaucaaccacgaguucagcgagaucgagacccggcucaacaugaucaacaacaagaucgacgaccagauccaggacaucugggccuacaacgcggagcugcuggugcuccuggagaaccagaagacccuggacgagcacgacgccaacgucaacaaccucuacaacaaggugaagcgcgcccugggcuccaacgccgucgaggacgggaagggcugcuucgagcuguaccacaagugcgacgaccagugcauggagaccauccggaacgggacguacaaccgccgccgguaccaggaggagagcaagcucgagcgccagaagaucgagggcgugaagcuggaguccgagggcaccuacaagauccugaccaucuacagcaccguggccuccagccucgucaucgcgaugggguucgccgccuuccuguucugggccauguccaacggcagcugccggugcaacaucugcaucuga

SEQ ID NO: 74296 - RNA, 1683 nt, Artificial Sequence
  derived and/or modified CDS sequence (opt1) from hemagglutinin__InfluenzaA__AGQ81092
auggagguggucagccugaucaccauccuccuggugaucaccggcuccaacgccgacaagaucugcaucggguaccagagcacgaacuccaccgagaccguggacacccugacggagaacaacguccccgugacccacgccaaggagcuccugcacaccgagcacaacggcaugcugugcgcgaccaaccucgggcgcccgcugauccuggacacgugcaccaucgagggccucaucuacgggaaccccagcugcgaccugcugcucggcggccgggagugguccuacaucguggagcgccccagcgccgucaacgggcugugcuaccccggcaacguggagaaccuggaggagcuccggucccuguucagcuccgccagcuccuaccagcgcauccagaucuucccggacaccaucuggaacgugagcuacaccgggacguccaaggccugcagcgacuccuucuaccggagcaugcgcuggcugacccagaagaacaacgccuaccccguccaggacgcgcaguacaccaacaaccggggccgcaacauccucuucaugugggggaucaaccacccgcccaccgacacgacccagaccaaccuguacacccggacggacaccaccaccuccguggccacggaggacaucaaccgcaccuucaagccccugaucggcccccggccccucgugaacggccugcaggggcgcaucgacuacuacugggccguccugcggcccggccagacccuccgcauccggagcaacgggaaccugaucgccccgugguacggccacauccuguccggcgagagccacgggcgcauccucaagaccgaccucaagagcggcaacugcguggugcagugccagacggagcgcgggggccugaacaccacccugcccuuccacaacgucuccaaguacgcguucgggaacugccccaaguacgugggcgucaagagccugaagcuggccgugggccuccggaacgugcccgcccgguccagccgcgggcuguucggcgccaucgccggguucaucgagggcgggugguccggccugguggcgggcugguacggguuccagcacagcaacgaccagggcaccgggauggccgccgaccgggacuccacgcagaaggccaucgacaagaucaccagcaaggucaacaacaucguggacaagaugaacaagcaguacgagaucaucgaccacgaguucuccgagaucgagacccgccucaacaugaucaacaacaagaucgacgaccagauccaggacaucugggccuacaacgcggagcugcuggugcuccuggagaaccagaagacccuggacgagcacgacgccaacgucaacaaccucuacaacaaggugaagcgcgcccugggcagcaacgccgucgaggacgggaagggcugcuucgagcuguaccacaagugcgacaaccagugcauggagacgauccggaacggcaccuacaaccgccggaaguacaaggaggagucccgccucgagcggcagaagaucgagggggugaagcuggagagcgagggcaccuacaagauccugaccaucuacuccaccguggccagcucccucgucaucgcgaugggguucgccgccuuccuguucugggccaugagcaacggcuccugccgcugcaacaucugcaucuga

SEQ ID NO: 74297 - RNA, 1683 nt, Artificial Sequence
  derived and/or modified CDS sequence (opt1) from hemagglutinin__InfluenzaA__AGQ81095
auggagguggucagccugaucaccauccuccuggugaucaccguguccaacgccgacaagaucugcaucggcuaccagagcacgaacuccaccgagaccgucaacacccugacggaggacaacgugcccgugacccacgccaaggagcuccugcacaccgagcacaacgggaugcugugcgcgaccaaccucggccgcccgcugauccuggacacgugcaccaucgaggggcucaucuacggcaaccccagcugcgaccugcugcucgggggccgggagugguccuacaucgucgagcgccccagcgccgugaacggccugugcuaccccgggaacguggagaaccuggaggagcuccggucccuguucagcuccgccagcuccuaccagcgcauccagaucuucccggacaccaucuggaacgucagcuacuccggcaccagcaaggccugcuccgacagcuucuaccgguccaugcgcuggcugacgcagaagaacaacgccuaccccgugcaggacgcgcaguacaccaacaaccgggggcgcaacauccucuucauguggggcaucaaccacccgcccaccgacaccgcccagacgaaccuguacacccggaccgacaccacgaccagcguggccaccgaggacaucaaccgcaccuucaagccccugaucgggccccggccccucgucaacggccugcagggccgcaucgacuacuacugggccgugcugaagcccgggcagacgcuccggauccgcuccaacggcaaccugaucgcgccgugguacgggcacauccugagcggcgagagccacggccggauccucaagaccgaccugaacuccgggaacugcgugguccagugccagagcgagcgcggcgggcugaacaccacccuccccuuccacaacguguccaaguacgccuucggcaacugccccaaguacgugggggucaagagccugaagcuggccgugggccuccggaacgugcccgcccgcuccagccggggccuguucggggccaucgcgggcuucaucgagggcgggugguccgggcuggucgccggcugguacggcuuccagcacagcaacgaccaggggacgggcauggccgccgaccgcgacuccacccagaaggccaucgacaagaucaccagcaaggugaacaacaucguggacaagaugaacaagcaguacgagaucaucgaccacgaguucuccgagaucgagacccggcucaacaugaucaacaacaagaucgacgaccagauccaggacaucugggcguacaacgccgagcugcugguccuccuggagaaccagaagacgcuggacgagcacgacgccaacgugaacaaccucuacaacaaggucaagcgcgcccuggggagcaacgccguggaggacggcaaggggugcuucgagcuguaccacaagugcgacaaccagugcauggagaccauccgcaacggcaccuacgaccggcgcaaguacaaggaggagucccggcucgagcgccagaagaucgagggcgugaagcuggagagcgaggggaccuacaagauccugacgaucuacuccaccgucgcgagcucccucgugaucgccaugggcuucgccgccuuccuguucugggccaugagcaacggguccugccggcgcaacaucugcaucuga

SEQ ID NO: 74298 - RNA, 1683 nt, Artificial Sequence
  derived and/or modified CDS sequence (opt1) from hemagglutinin__InfluenzaA__AGQ81099
auggagaccgugagccugaucaccauccuccugaucgucacgguguccaacgccgacaagaucugcaucggcuaccagagcaccaacuccaccgagaccguggacacgcugaccgagaacaacguccccgugacccacgccaaggagcuccugcacaccgagcacaacgggaugcugugcgcgacgaaccucggccacccgcugauccuggacacgugcaccaucgaggggcucaucuacggcaaccccagcugcgaccugcugcucgggggccgcgagugguccuacaucguggagcggcccagcgccgucaacggccugugcuaccccgggaacguggagaaccuggaggagcuccgcucccuguucagcuccgccaacagcuaccagcggauccagaucuucccggacaccaucuggaacguguccuacagcggcaccuccaaggccugcagcgacuccuucuaccgcagcaugcgguggcugacccagaagaacaacgccuaccccacccaggacgcgcaguacaccaacaaccgcgagaagaacauccucuucaugugggggaucaaccacccgcccacggacaccgcccagaccaaccuguacacccggacggacaccaccaccuccgucgccacggaggagaucaaccgcaccuucaagccccugaucggcccccggccccucgugaacgggcugcagggccgcaucgacuacuacuggagcgugcugaagcccggccagacccuccggauccgcuccaacgggaaccugaucgccccgugguacggccacauccugagcggggagagccacggccggauccucaagaccgaccugaagcgcggcuccugcacgguccagugccagaccgagaagggcgggcugaacaccacccuccccuuccagaacgugagcaaguacgcguucgggaacugcuccaaguacgugggcgucaagagccugaagcuggccguggggcuccggaacgugcccucccgcagcucccggggccuguucggcgccaucgccggguucaucgagggcggguggagcggccuggucgccgggugguacggcuuccagcacuccaacgaccagggcguggggauggcggccgaccgcgacagcacgcagaaggccaucgacaaggugaccuccaaggucaacaacaucguggacaagaugaacaagcaguacgagaucaucgaccacgaguucagcgagguggagacccggcucaacaugaucaacaacaagaucgacgaccagauccaggacaucugggccuacaacgccgagcugcugguccuccuggagaaccagaagacccuggacgagcacgacgcgaacgugaacaaccucuacaacaaggucaagcgcgcccugggcuccaacgccguggaggacgggaagggcugcuucgagcuguaccacaagugcgacgaccagugcauggagacgauccggaacgggaccuacaaccgccgcaaguaccaggaggagagcaagcucgagcggcagaagaucgagggcgugaagcuggaguccgagggcaccuacaagauccugaccaucuacagcaccgucgccuccagccucgugaucgccaugggguucgcggccuuccuguucugggccauguccaacggcagcugccgccggaacaucugcaucuga

SEQ ID NO: 74299 - RNA, 1683 nt, Artificial Sequence
  derived and/or modified CDS sequence (opt1) from hemagglutinin__InfluenzaA__AGQ81100
auggagaccgugagccugaucaccaugcuccuggucgccacggugaucaacgccgacaagaucugcaucggcuaccaguccaccaacagcaccgagaccguggacacgcugaccgagaacaacguccccgugacccacgcgaaggagcuccugcacaccgagcacaacgggaugcugugcgccacgaaccucggccacccgcugauccuggacacgugcaccaucgaggggcucaucuacggcaaccccuccugcgaccugcugcucgggggccgcgaguggagcuacaucguggagcggcccuccgccgucaacggccugugcuaccccgggaacguggagaaccuggaggagcuccgcagccuguucuccagcgccuccagcuaccagcggauccagaucuucccggacaccaucuggaacguguccuacagcggcaccuccaaggccugcagcgacuccuucuaccgcagcaugcgguggcugacccagaagaacaacgcguaccccauccaggacgcccaguacaccaacaaccgcgagaagaacauccucuucaugugggggaucaaccacccgcccaccgacacggcccagaccaaccuguacacccggaccgacacgaccaccuccgucgccaccgaggagaucaaccgcacguucaagccccugaucggcccccggccccucgugaacgggcugcagggccgcaucgacuacuacuggagcgugcugaagcccggccagacccuccggauccgcuccaacgggaaccugaucgcgccgugguacggccacauccugagcggggagagccacggccggauccucaagaccgaccugaagcgcggcuccugcaccguccagugccagacggagaagggcgggcugaacaccacccuccccuuccagaacgugagcaaguacgccuucgggaacugcuccaaguacgugggcgucaagagccugaagcuggccguggggcuccggaacgugcccucccgcagcucccggggccuguucggcgccaucgccggguucaucgagggcggguggagcggccuggucgcggggugguacggcuuccagcacuccaacgaccagggcguggggauggccgccgaccgcgacagcacccagaaggccaucgacaagaucacguccaaggugaacaacaucgucgacaagaugaacaagcaguacgagaucaucgaccacgaguucagcgagguggagacccggcucaacaugaucaacaacaagaucgacgaccagauccaggacaucugggccuacaacgcggagcugcuggugcuccuggagaaccagaagacccuggacgagcacgacgccaacgucaacaaccucuacaacaaggugaagcgcgcccugggcuccaacgccgucgaggacgggaagggcugcuucgagcuguaccacaagugcgacgaccagugcauggagaccauccggaacgggacguacaaccgccgccgguaccaggaggagagcaagcucgagcgccagaagaucgagggcgugaagcuggaguccgagggcaccuacaagauccugaccaucuacagcaccguggccuccagccucgucaucgcgaugggguucgccgccuuccuguucugggccauguccaacggcagcugccggcgcaacaucugcaucuga

SEQ ID NO: 74300 - RNA, 1683 nt, Artificial Sequence
  derived and/or modified CDS sequence (opt1) from hemagglutinin__InfluenzaA__AGQ81123
auggagguggucagccugaucaccauccuccuggugaucaccguguccaacgccgacaagaucugcaucggcuaccagagcacgaacuccaccgagaccgucaacacccugacggaggacaacgugcccgugacccacgccaaggagcuccugcacaccgagcacaacgggaugcugugcgcgaccaaccucggccgcccgcugauccuggacacgugcaccaucgaggggcucaucuacggcaaccccagcugcgaccugcugcucgggggccgggagugguccuacaucgucgagcgccccagcgccgugaacggccugugcuaccccgggaacguggagaaccuggaggagcuccggucccuguucagcuccgccagcuccuaccagcgcauccagaucuucccggacaccaucuggaacgucagcuacuccggcaccagcaaggccugcuccgacagcuucuaccgguccaugcgcuggcugacgcagaagaacaacgccuaccccgugcaggacgcgcaguacaccaacaacaaggggcggaacauccucuucauguggggcaucaaccacccgcccaccgacaccgcccagacgaaccuguacacccgcaccgacaccacgaccagcguggccaccgaggacaucaaccggaccuucaagccccugaucgggccccgcccccucgucaacggccugcagggccggaucgacuacuacugggccgugcugaagcccgggcagacgcuccgcauccgguccaacggcaaccugaucgcgccgugguacgggcacauccugcucggcgagagccacggccgcauccugaagaccgaccugaacagcggggacugcgugguccagugccaguccgagcggggcgggcucaacaccacccugcccuuccacaacgugagcaaguacgccuucggcaacugccccaaguacgugggggucaagucccugaagcucgccgugggccugcgcaacgugcccgcccggagcacgcgcggccuguucggggccaucgcgggcuucaucgagggcgggugguccgggcucgucgccggcugguacggcuuccagcacagcaacgaccaggggaccggcauggccgccgaccgggacuccacccagaaggccaucgacaagaucaccagcaaggugaacaacaucguggacaagaugaacaagcaguacgagaucaucgaccacgaguucuccgagaucgagacgcgccugaacaugaucaacaacaagaucgacgaccagauccaggacaucugggcguacaacgccgagcugcucguccugcuggagaaccagaagacccucgacgagcacgacgccaacgugaacaaccuguacaacaaggucaagcgggcccuggggagcaacgccguggaggacggcaaggggugcuucgagcucuaccacaagugcgacaaccagugcauggagaccauccgcaacggcaccuacgaccgccggaaguacaaggaggagucccgccuggagcggcagaagaucgagggcgugaagcuggagagcgaggggacguacaagauccucaccaucuacuccaccgucgcgagcucccuggugaucgccaugggcuucgccgccuuccuguucugggccaugagcaacggguccugccgcugcaacaucugcaucuga

SEQ ID NO: 74301 - RNA, 1683 nt, Artificial Sequence
  derived and/or modified CDS sequence (opt1) from hemagglutinin__InfluenzaA__AGQ81124
auggagguggccacccugaucaccauccuccuggucaucacgggcagcaacgccgacaagaucugcaucggguaccaguccaccaacagcaccgagaccguggacacgcugaccgagaacaacgugcccgucacccacgcgaaggagcuccugcacaccgagcacaacggcaugcugugcgccacgaaccucgggcgcccgcugauccuggacacgugcaccaucgagggccucaucuacgggaaccccuccugcgaccugccccuggagggccgggaguggagcuacaucguggagcgccccuccgccgugaacggcgucugcuacccggggaacguggagaaccucgaggagcugcggagccuguucuccagcgccuccagcuaccagcgcauccagaucuuccccgacuccaucuggaacgugagcuacuccggcaccagcaaggccugcuccgacagcuucuaccggaacaugcgcuggcucacccagaaggacaacaacuaccccguccaggacgcgcaguacaccaacaaccgggggaagaacauccuguucauguggggcaucaaccacccgcccaccgacaccgcccagacgaaccuguacacccgcaccgacaccacgaccuccguggccaccgaggacaucaaccggaccuucaagccccucaucgggccccgcccccuggugaacggccugcagggccggaucgacuacuacugggccguccucaagccggggcagacgcugcgcgugcggagcaacggcaaccugaucgcgcccugguacgggcacauccuccugggcgagucccacggccgcauccugaagaccgaccucaagagcgggaacugcgugguccagugccagaccgagcggggcgggcugaacaccacgcugcccuuccacaacgugagcaaguacgccuucggcaacugccccaaguacaucggggugaagucccucaagcuggccgucggccugcgcaacgugccggcccggagcucccgcggccucuucggggccaucgcgggcuucaucgagggcggguggagcgggcugguggccggcugguacggcuuccagcacuccaacgaccaggggaccggcauggccgccgaccgggacagcacccagaaggccaucgacaagaucaccuccaaggucaacaacaucguggacaagaugaacaagcaguacgagaucaucgaccacgaguucagcgagaucgagacgcgccugaacaugaucaacgacaagaucgacgaccagauccaggacaucugggcguacaacgccgagcuccuggugcugcucgagaaccagaagacccuggacgagcacgacgccaacgucaacaaccuguacaacaaggugaagcgggcccucggguccaacgccgucgaggacggcaaggggugcuucgaccuguaccacaagugcgacaaccagugcauggagaccauccgcaacggcaccuacaaccgccggaaguaccagaaggagagccgccuggagcggcagaagaucgagggcgugaagcucgaguccgaggggacguacaagauccugaccaucuacagcaccguggcguccagccuggucaucgccaugggcuucgccgccuuccucuucugggccauguccaacgggagcugccgcugcaacaucugcaucuga

SEQ ID NO: 74302 - RNA, 1683 nt, Artificial Sequence
  derived and/or modified CDS sequence (opt1) from hemagglutinin__InfluenzaA__AGQ81125
auggagguggccacccugaucaccauccuccuggucaucacgggcagcaacgccgacaagaucugcaucggguaccaguccaccaacagcaccgagaccguggacacgcugaccgagaacaacgugcccgucacccacgcgaaggagcuccugcacaccgagcacaacggcaugcugugcgccacgaaccucgggcgcccgcugauccuggacacgugcaccaucgagggccucaucuacgggaaccccuccugcgaccugccccuggagggccgggaguggagcuacaucguggagcgccccuccgccgugaacggcgucugcuacccggggaacguggagaaccucgaggagcugcggagccuguucuccagcgccuccagcuaccagcgcauccagaucuuccccgacuccaucuggaacgugagcuacuccggcaccagcaaggccugcuccgacagcuucuaccgguccaugcgcuggcucacccagaaggacaacaacuaccccguccaggacgcgcaguacaccaacaaccgggggaagaacauccuguucauguggggcaucaaccacccgcccaccgacaccgcccagacgaaccuguacacccgcaccgacaccacgaccagcguggccaccgaggacaucaaccggaccuucaagccccucaucgggccccgcccccuggugaacggccugcagggccggaucgacuacuacugggccguccucaagccggggcagacgcugcgcgugcgguccaacggcaaccugaucgcgcccugguacgggcacauccuccugggcgugagccacggccgcauccugaagaccgaccucaagagcgggaacugcgucgugcagugccagaccgagcggggcgggcugaacaccacgcugcccuuccacaacguguccaaguacgccuucggcaacugccccaaguacaucggggucaagagccucaagcuggccgugggccugcgcaacgugccggcccgguccagccgcggccucuucggggccaucgcgggcuucaucgagggcgggugguccgggcuggucgccggcugguacggcuuccagcacagcaacgaccaggggaccggcauggccgccgaccgggacuccacccagaaggccaucgacaagaucaccagcaaggugaacaacaucguggacaagaugaacaagcaguacgagaucaucgaccacgaguucuccgagaucgagacgcgccugaacaugaucaacgacaagaucgacgaccagauccaggacaucugggcguacaacgccgagcuccugguccugcucgagaaccagaagacccuggacgagcacgacgccaacgugaacaaccuguacaacaaggucaagcgggcccucgggagcaacgccguggaggacggcaaggggugcuucgaccuguaccacaagugcgacaaccagugcauggagaccauccgcaacggcaccuacaaccgccggaaguaccaggaggagucccgccuggagcggcagaagaucgagggcgugaagcucgagagcgaggggacguacaagauccugaccaucuacuccaccgucgcgagcucccuggugaucgccaugggcuucgccgccuuccucuucugggccaugagcaacggguccugccgcugcaacaucugcaucuga

SEQ ID NO: 74303 - RNA, 1683 nt, Artificial Sequence
  derived and/or modified CDS sequence (opt1) from hemagglutinin__InfluenzaA__AGQ81126
auggagaccaucagccugaugaccauccuccugaucacgaccgccuccaacgccgacaagaucugcaucggccaccagagcaccaacuccaccgagacgguggacacccugaccgagaccaacguccccgugacgcacgcgaaggagcuccugcagaccgagcacaacgggaugcugugcgccaccaaccucggccacccgcugauccuggacacgugcaccaucgaggggcucaucuacggcaaccccagcugcgaccugcugcucgaggggcgcgagugguccuacaucguggagcggcccagcgccgucaacgggaccugcuaccccggcaacguggagaaccuggaggagcugcgcacccucuucuccagcgccuccagcuaccagcggauccagaucuucccggacaccaucuggaacgugacguacaccggcaccucccgcagcugcuccggcagcuucuaccgguccaugcgcuggcugacccagaaguccggguucuaccccguccaggacgccaaguacacgaacaaccggggcaagaacauccuguucgugugggggauccaccacccccacaccuacaccgaccagaccacgcucuacauccgcaacgacaccaccaccagcgugacgaccgaggagcugaaccggaucuucaagcccgucaucgugccgcgccugcucgugaacggccagcagggccggaucgacuacuacuggagcguccugaagcccgggcagacccugcgcgugcgguccaacggcaaccucaucgcgcccugguacgggcacgugcugagcggcggcagccacgggcgcauccugaagaccgaccucaagggcgggaacugcgucgugcagugccagacggagaagggcggguucaacuccacccugcccuuccacaacaucagcaaguacgccuucgggaccugcccgaaguacgugaaggucaacucccugaagcucgccaucggccugcggaacgugcccgcccgcagcaaccggggccuguucggcgcgaucgccggguucaucgagggcggguggcccggccucguggccggcugguacggguuccagcacuccaacgaccagggcgucgggauggccgccgaccgcgacagcacccagaaggcgguggacaagaucacguccaaggugaacaacaucgucgacaagaugaacaagcaguacgagaucaucgaccacgaguucagcgagguggagacccggcugaacaugaucaacaacaagaucgacgaccagauccaggacaucugggccuacaacgccgagcugcucguccugcuggagaaccagaagacccucgacgagcacgacgccaacgugaacaaccuguacaacaaggugaagcgcgcccugggcuccaacgcgauggaggacgggaagggcugcuucgagcucuaccacaagugcgacgaccagugcauggagaccauccggaacggcaccuacaaccgccgcaaguaccgggaggagagccgccuggagcagcagcggaucgagggggucaagcuggaguccgagggcacguacaagauccucaccaucuacagcaccguggccuccagccuggugcuggccaugggguucgccgccuuccucuucugggcgauguccaacggcagcugccgcugcaacaucugcaucuga

SEQ ID NO: 74304 - RNA, 1683 nt, Artificial Sequence
  derived and/or modified CDS sequence (opt1) from hemagglutinin__InfluenzaA__AGQ81127
auggagguggccacccugaucaccauccuccugcugaucacgggcagcaacgccgacaagaucugcaucggguaccaguccaccaacagcaccgagaccgucgacacgcucaccgagaacaacgugcccgugacccacgcgaaggagcugcugcacaccgagcacaacggcaugcucugcgccacgaaccuggggcgcccgcugauccucgacacgugcaccaucgagggccugaucuacgggaaccccuccugcgaccugccccucgagggccgggaguggagcuacaucgucgagcgccccuccgccgugaacggcgugugcuacccggggaacgucgagaaccuggaggagcugcggagccucuucuccagcgccuccagcuaccagcgcauccagaucuuccccgacuccaucuggaacgugagcuacuccggcaccagcaaggccugcuccgacagcuucuaccgguccaugcgcuggcugacccagaagaacaacaacuaccccgugcaggacgcgcaguacaccaacaaccgggggaagaacauccuguucauguggggcaucaaccacccgcccaccgacaccgcccagacgaaccucuacacccgcaccgacaccacgaccagcgucgccaccgaggacaucaaccggaccuucaagccccugaucgggccccgcccccuggugaacggccuccagggccggaucgacuacuacugggccgugcugaagccggggcagacgcugcgcguccgguccaacggcaaccucaucgcgcccugguacgggcacauccugcugggcgagagccacggccgcauccucaagaccgaccucaagagcgggaacugcguggugcagugccagaccgagcggggcgggcugaacaccacgcugcccuuccacaacgucuccaaguacgccuucggcaacugccccaaguacaucggggucaagagccugaagcuggccgugggccuccgcaacgugccggcccgguccagccgcggccuguucggggccaucgcgggcuucaucgagggcgggugguccgggcugguggccggcugguacggcuuccagcacagcaacgaccaggggaccggcauggccgccgaccgggacuccacccagaaggccaucgacaagaucaccagcaaggugaacaacaucgucgacaagaugaacaagcaguacgagaucaucgaccacgaguucuccgagaucgagacgcgccucaacaugaucaacgacaagaucgacgaccagauccaggacaucugggcguacaacgccgagcugcuggugcuccuggagaaccagaagacccuggacgagcacgacgccaacgugaacaaccucuacaacaaggucaagcgggcccuggggagcaacgccguggaggacggcaaggggugcuucgaccuguaccacaagugcgacaaccagugcauggagaccauccgcaacggcaccuacaaccgccggaaguaccaggaggagucccgccucgagcggcagaagaucgagggcgucaagcuggagagcgaggggacguacaagauccugaccaucuacuccaccguggcgagcucccucgugaucgccaugggcuucgccgccuuccuguucugggccaugagcaacggguccugccgcugcaacaucugcaucuga

SEQ ID NO: 74305 - RNA, 1683 nt, Artificial Sequence
  derived and/or modified CDS sequence (opt1) from hemagglutinin__InfluenzaA__AGQ81128
auggaggccgccaccaucaucaccauccugcucgugaucacgggcagcaacgcggacaagaucugcaucggguaccaguccaccaacagcaccgagaccgucgacacgcugaccgagaacaacgugcccgugacccacgccaaggagcugcuccacaccgagcacaacggcaugcugugcgccacgaaccuggggcgcccgcucauccuggacacgugcaccaucgagggccugaucuacgggaaccccuccugcgaccucccccuggagggccgggaguggagcuacaucgucgagcgccccuccgccgugaacggcgugugcuacccggggaacgucgagaaccuggaggagcuccggagccuguucuccagcgccuccagcuaccagcgcauccagaucuuccccgacuccaucuggaacgugagcuacuccggcaccagcaaggcgugcuccgacagcuucuaccgguccaugcgcuggcugacccagaagaacaacaacuaccccgugcaggacgcccaguacaccaacaaccgggggaagaacauccucuucauguggggcaucaaccacccgcccaccgacaccgcccagacgaaccuguacacccgcaccgacaccacgaccagcgucgccaccgaggacaucaaccggaccuucaagccccugaucgggccccgcccccucgugaacggccugcagggccggaucgacuacuacugggcggugcugaagccggggcagacgcuccgcguccgguccaacggcaaccugaucgcccccugguacgggcacauccugcucggcgagagccacggccgcauccugaagaccgaccucaagagcgggaacugcguggugcagugccagaccgagcggggcgggcugaacaccacgcugcccuuccacaacgucuccaaguacgccuucggcaacugccccaaguacaucggggucaagagccugaagcucgccgugggccugcgcaacgugccggcccgguccagccgcggccuguucggggcgaucgccggcuucaucgagggcgggugguccgggcucguggccggcugguacggcuuccagcacagcaacgaccaggggaccggcauggccgccgaccgggacuccacccagaaggcgaucgacaagaucaccagcaaggugaacaacaucgucgacaagaugaacaagcaguacgacaucaucgaccacgaguucuccgagaucgagacgcgccugaacaugaucaacgacaagaucgacgaccagauccaggacaucugggccuacaacgccgagcugcucgugcugcuggagaaccagaagacccucgacgagcacgacgccaacgugaacaaccuguacaacaaggucaagcgggcccuggggagcaacgcgguggaggacggcaaggggugcuucgaccucuaccacaagugcgacaaccagugcauggagaccauccgcaacggcaccuacaaccgccggaaguaccaggaggagucccgccuggagcggcagaagaucgagggcgucaagcuggagagcgaggggacguacaagauccucaccaucuacuccaccguggccagcucccugguggucgccaugggcuucgccgccuuccuguucugggcgaugagcaacggguccugccgcugcaacaucugcaucuga

SEQ ID NO: 74306 - RNA, 1683 nt, Artificial Sequence
  derived and/or modified CDS sequence (opt1) from hemagglutinin__InfluenzaA__AGQ81130
auggagaccgugagccugaucaccauccuccuggucgugacgaucggcaacgccgacaagaucugcaucggguaccaguccaccaacagcaccgagaccguggacacgcugaccgagaacaacguccccgugacccacgccaaggagcuccugcacaccgagcacaacggcaugcugugcgcgacgucccucgggcacccgcugauccuggacacgugcaccaucgagggccucaucuacgggaaccccagcugcgaccugcugcucggcggccgcgagugguccuacaucguggagcggcccagcgccgucaacgggcugugcuaccccggcaacguggagaaccuggaggagcuccgcucccuguucagcuccgcccggagcuaccagcgcauccagaucuucccggacaccaucuggaacguguccuacagcgggaccuccaaggccugcagcgacuccuucuaccggagcaugcgcuggcugacccagaagaacaacgccuaccccauccaggacgcgcaguacaccaacaaccaggagaagaacauccucuucauguggggcaucaaccacccgcccaccgacacgguccagaccaaccuguacacccggaccgacacgaccaccuccguggccaccgaggagaucaaccgcacguucaagccccugaucgggccccggccccucgugaacggccugcagggccgcaucgacuacuacuggagcguccugaagcccgggcagacccuccggauccgcuccaacggcaaccugaucgccccgugguacgggcacauccugagcggcgagagccacggccggauccucaagaccgaccugaagcgcggguccugcaccgugcagugccagacggagaagggcgggcugaacaccacccuccccuuccagaacgugagcaaguacgccuucggcaacugcuccaaguacaucgggaugaagucccugaagcuggcggucggccuccggaacgugcccagccgcagcucccggggccuguucggggccaucgccggcuucaucgagggcggguggagcgggcugguggccggcugguacggcuuccagcacuccaacgaccagggggucggcauggccgcggaccgcgacagcacccagaaggccaucgacaagaucacguccaaggugaacaacaucguggacaagaugaacaagcaguacgagaucaucgaccacgaguucagcgaggucgagacccggcucaacaugaucaacaacaagaucgacgaccagauccaggacaucugggccuacaacgccgagcugcuggugcuccuggagaaccagaagacccuggacgagcacgacgccaacgugaacaaccucuacaacaaggucaagcgcgcgcugggguucaacgccguggaggacggcaaggggugcuucgagcuguaccacaagugcgacgaccagugcauggagaccauccggaacggcacguacaaccgccgcaaguaccaggaggaguccaagcucgagcggcagaagaucgagggcgucaagcuggagagcgaggggaccuacaagauccugaccaucuacuccaccguggccagcucccucgugaucgccaugggcuucgccgcguuccuguucugggccaugagcaacggguccugccgcugcaacaucugcaucuga

SEQ ID NO: 74307 - RNA, 1683 nt, Artificial Sequence
  derived and/or modified CDS sequence (opt1) from hemagglutinin__InfluenzaA__AGQ81132
auggagaccaucagccugaugaccauccuccugaucacgaccgccuccaacgccgacaagaucugcaucggccaccagagcaccaacuccaccgagacgguggacacccugaccgagaccaacguccccgugacgcacgcgaaggagcuccugcagaccgagcacaacgggaugcugugcgccaccaaccucggccacccgcugauccuggacacgugcaccaucgaggggcucaucuacggcaaccccagcugcgaccugcugcucgaggggcgcgagugguccuacaucguggagcggcccagcgccgucaacgggaccugcuaccccggcaacguggagaaccuggaggagcugcgcacccucuucuccagcgccuccagcuaccagcggauccagaucuucccggacaccaucuggaacgugacguacaccggcaccucccgcagcugcuccggcagcuucuaccgguccaugcgcuggcugacccagaaguccggguucuaccccguccaggacgccaaguacacgaacaaccggggcaagaacauccuguucgugugggggauccaccacccccacaccuacaccgaccagaccacgcucuacauccgcaacgacaccaccaccagcgugacgaccgaggagcugaaccggaucuucaagcccgucaucgugccgcgccugcucgugaacggccagcagggccggaucgacuacuacuggagcguccugaagcccgggcagacccugcgcgugcgguccaacggcaaccucaucgcgcccugguacgggcacgugcugagcggcggcagccacgggcgcauccugaagaccgaccucaagggcgggaacugcgucgugcagugccagacggagaagggcggguucaacuccacccugcccuuccacaacaucagcaaguacgccuucgggaccugcccgaaguacgugaaggucaacucccugaagcucgccaucggccugcggaacgugcccgcccgcagcaaccggggccuguucggcgcgaucgccggguucaucgagggcggguggcccggccucguggccggcugguacggguuccagcacuccaacgaccagggcgucgggauggccgccgaccgcgacagcacccagaaggcgguggacaagaucacguccaaggugaacaacaucgucgacaagaugaaccggcaguacgagaucaucgaccacgaguucagcgagguggagacccgccugaacaugaucaacaacaagaucgacgaccagauccaggacaucugggccuacaacgccgagcugcucguccugcuggagaaccagaagacccucgacgagcacgacgccaacgugaacaaccuguacaacaaggugaagcgggcccugggcuccaacgcgauggaggacgggaagggcugcuucgagcucuaccacaagugcgacgaccagugcauggagaccauccgcaacggcaccuacaaccgccggaaguaccgcgaggagagccggcuggagcagcagcgcaucgagggggucaagcuggaguccgagggcacguacaagauccucaccaucuacagcaccguggccuccagccuggugcuggccaugggguucgccgccuuccucuucugggcgauguccaacggcagcugccggugcaacaucugcaucuga

SEQ ID NO: 74308 - RNA, 1683 nt, Artificial Sequence
  derived and/or modified CDS sequence (opt1) from hemagglutinin__InfluenzaA__AGQ81133
auggagaccaucagccugaugaccauccuccugaucacgaccgccuccaacgccgacaagaucugcaucggccaccagagcaccaacuccaccgagacgguggacacccugaccgagaccaacguccccgugacgcacgcgaaggagcuccugcagaccgagcacaacgggaugcugugcgccaccaaccucggccacccgcugauccuggacacgugcaccaucgaggggcucaucuacggcaaccccagcugcgaccugcugcucgaggggcgcgagugguccuacaucguggagcggcccagcgccgucaacgggaccugcuaccccggcaacguggagaaccuggaggagcugcgcacccucuucuccagcgccuccagcuaccagcggauccagaucuucccggacaccaucuggaacgugacguacaccgggaccucccgcagcugcuccggcagcuucuaccgguccaugcgcuggcugacccagaaguccggguucuaccccguccaggacgccaaguacacgaacaaccggggcaagaacauccuguucgugugggggauccaccacccccacaccuacaccgaccagaccacgcucuacauccgcaacgacaccaccaccagcgugacgaccgaggagcugaaccggaucuucaagcccgucaucgugccgcgccugcucgugaacggccagcagggccggaucgacuacuacuggagcguccugaagcccgggcagacccugcgcgugcgguccaacggcaaccucaucgcgcccugguacgggcacauccugagcggcggcagccacgggcgcauccugaagaccgaccucaaguccggcaacugcgugguccagugccagacggagaagggcggcuucaacagcacccugcccuuccacaacaucuccaaguacgccuucgggaccugcccgaaguacgugaaggugaacagccugaagcucgccaucggccugcggaacguccccgcccgcuccaaccggggccuguucggggcgaucgccggcuucaucgagggcggguggcccgggcucguggccggcugguacggcuuccagcacagcaacgaccagggggugggcauggccgccgaccgcgacuccacccagaaggcggucgacaagaucacgagcaaggugaacaacaucguggacaagaugaacaagcaguacgagaucaucgaccacgaguucuccgaggucgagacccggcugaacaugaucaacaacaagaucgacgaccagauccaggacaucugggccuacaacgccgagcugcucgugcugcuggagaaccagaagacccucgacgagcacgacgccaacgucaacaaccuguacaacaaggugaagcgcgcccuggggagcaacgcgauggaggacggcaaggggugcuucgagcucuaccacaagugcgacgaccagugcauggagaccauccggaacggcaccuacaaccgccgcaaguaccgggaggagucccgccuggagcagcagcggaucgagggcgugaagcuggagagcgaggggacguacaagauccucaccaucuacuccaccgucgccagcucccuggugcuggccaugggcuucgccgccuuccucuucugggcgaugagcaacggguccugccgcugcaacaucugcaucuga

SEQ ID NO: 74309 - RNA, 1683 nt, Artificial Sequence
  derived and/or modified CDS sequence (opt1) from hemagglutinin__InfluenzaA__AGQ81134
auggagaccaucagccugaugaccauccuccugaucacgaccgccuccaacgccgacaagaucugcaucggccaccagagcaccaacuccaccgagacgguggacacccugaccgagaccaacguccccgugacgcacgcgaaggagcuccugcagaccgagcacaacgggaugcugugcgccaccaaccucggccacccgcugauccuggacacgugcaccaucgaggggcucaucuacggcaaccccagcugcgaccugcugcucgaggggcgcgagugguccuacaucguggagcggcccagcgccgccaacgggaccugcuaccccggcaacgucgagaacccggaggagcugcgcacccuguucuccagcgccuccagcuaccagcggauccagaucuuccccgacaccaucuggaacgugacguacaccgggaccucccgcagcugcuccggcagcuucuaccgguccaugcgcuggcucacccagaaguccggguucuaccccgugcaggacgcgaaguacacgaacaaccggggcaagaacauccuguucgucugggggauccaccacccccacaccuacaccgaccagaccacgcuguacauccgcaacgacaccaccaccagcgugacgaccgaggagcucaaccggaucuucaagccggugaucgucccccgccugcuggugaacggccagcagggccggaucgacuacuacuggagcgugcucaagcccgggcagacccugcgcguccgguccaacggcaaccugaucgcccccugguacgggcacgugcucagcggcggcagccacgggcgcauccugaagaccgaccugaaguccggcaacugcgugguccagugccagacggagaagggcggcuucaacagcacccucccguuccacaacaucuccaaguacgccuucgggaccugccccaaguacgugaaggugaacagccugaagcuggccaucggccuccggaacguccccgcgcgcuccaaccggggccuguucggggccaucgccggcuucaucgagggcggguggcccgggcugguggccggcugguacggcuuccagcacagcaacgaccagggggugggcauggccgcggaccgcgacuccacccagaaggccgucgacaagaucacgagcaaggugaacaacaucguggacaagaugaacaagcaguacgagaucaucgaccacgaguucuccgaggucgagacccggcucaacaugaucaacaacaagaucgacgaccagauccaggacaucugggccuacaacgccgagcugcuggugcuccuggagaaccagaagacccuggacgagcacgacgccaacgucaacaaccucuacaacaaggugaagcgcgcgcuggggagcaacgccauggaggacggcaaggggugcuucgagcuguaccacaagugcgacgaccagugcauggagaccauccggaacggcaccuacaaccgccgcaaguaccgggaggagucccgccucgagcagcagcggaucgagggcgugaagcuggagagcgaggggacguacaagauccugaccaucuacuccaccgucgccagcucccucgugcuggccaugggcuucgccgcguuccuguucugggccaugagcaacggguccugccgcugcaacaucugcaucuga

SEQ ID NO: 74310 - RNA, 1683 nt, Artificial Sequence
  derived and/or modified CDS sequence (opt1) from hemagglutinin__InfluenzaA__AGQ81135
auggagguggccaccaucaucaccauccugcucgucaucacgggcagcaacgccgacaagaucugcaucggguaccaguccaccaacagcaccgagaccguggacacgcugaccgagaacaacgugcccgucacccacgcgaaggagcugcuccacaccgagcacaacggcaugcugugcgccacgaaccuggggcgcccgcucauccuggacacgugcaccaucgagggccugaucuacgggaaccccuccugcgaccucccccuggagggccgggaguggagcuacaucguggagcgccccuccgccgugaacggcgucugcuacccggggaacguggagaaccuggaggagcuccggagccuguucuccagcgccuccagcuaccagcgcauccagaucuuccccgacuccaucuggaacgugagcuacuccggcaccagcaaggccugcuccgacagcuucuaccgguccaugcgcuggcugacccagaagaacaacaacuaccccguccaggacgcgcaguacaccaacaaccgggggaagaacauccucuucauguggggcaucaaccacccgcccaccgacaacgcccagaccaaccuguacacgcgcaccgacaccaccacgagcguggccaccgaggacaucaaccggaccuucaagccccugaucgggccccgcccccucgugaacggccugcagggccggaucgacuacuacugggccguccugaagccggggcagacccuccgcgugcgguccaacggcaaccugaucgcgcccugguacgggcacauccugcucggcgagagccacggccgcauccugaagacggaccucaagagcgggaacugcgugguccagugccagaccgagcggggcgggcugaacaccacccugcccuuccacaacguguccaaguacagcuucggcaacugccccaaguacaucggggugaagucccugaagcucgccgucggccugcgcaacgugccggcccggagcucccgcggccuguucggggccaucgccggcuucaucgagggcggguggagcgggcucguggcgggcugguacggcuuccagcacuccaacgaccaggggacgggcauggccgccgaccgggacagcacccagaaggccaucgacaagaucaccuccaaggucaacaacaucguggacaagaugaacaagcaguacgagaucaucgaccacgaguucaacgagaucgagacccgccugaacaugaucaacaacaagaucgacgaccagauccaggacaucugggccuacaacgcggagcugcucgugcugcuggagaaccagaagacgcucgacgagcacgacgccaacgucaacaaccuguacaacaaggugaagcgggcccuggggagcaacgccgucgaggacggcaaggggugcuucgaccucuaccacaagugcgacaaccagugcauggagaccauccgcaacggcaccuacaaccgccggaaguaccaggaggagucccgccuggagcggcagaagaucgagggcgugaagcuggagagcgaggggaccuacaagauccucacgaucuacuccaccguggccagcucccuggucaucgcgaugggcuucgccgccuuccuguucugggccaugagcaacggguccugccgcugcaacaucugcaucuga

SEQ ID NO: 74311 - RNA, 1683 nt, Artificial Sequence
  derived and/or modified CDS sequence (opt1) from hemagglutinin__InfluenzaA__AGQ81136
auggagaccaucagccugaugaccauccuccugaucacgaccgccuccaacgccgacaagaucugcaucggccaccagagcaccaacuccaccgagacgguggacacccugaccgagaccaacguccccgugacgcacgcgaaggagcuccugcagaccgagcacaacgggaugcugugcgccaccaaccucggccacccgcugauccuggacacgugcaccaucgaggggcucaucuacggcaaccccagcugcgaccugcugcucgaggggcgcgagugguccuacaucguggagcggcccagcgccgucaacgggaccugcuaccccggcaacguggagaaccuggaggagcugcgcacccucuucuccagcgccuccagcuaccagcggauccagaucuucccggacaccaucuggaacgugacguacaccggcaccucccgcagcugcuccggcagcuucuaccgguccaugcgcuggcugacccagaaguccggguucuaccccguccaggacgccaaguacacgaacaaccggggcaagaacauccuguucgugugggggauccaccacccccacaccuacaccgaccagaccacgcucuacauccgcaacgacaccaccaccagcgugacgaccgaggagcugaaccggaucuucaagcccgucaucgugccgcgccugcucgugaacggccagcagggccggaucgacuacuacuggagcguccugaagcccgggcagacccugcgcgugcgguccaacggcaaccucaucgcgcccugguacgggcacgugcugagcggcggcagccacgggcgcauccugaagaccgaccucaagggcgggaacugcgucgugcagugccagacggagaagggcggguucaacuccacccugcccuuccacaacaucagcaaguacgccuucgggaccugcccgaaguacgugaaggucaacucccugaagcucgccaucggccugcggaacgugcccgcccgcagcaaccggggccuguucggcgcgaucgccggguucaucgagggcggguggcccggccucguggccggcugguacggguuccagcacuccaacgaccagggcgucgggauggccgccgaccgcgacagcacccagaaggcgguggacaagaucacguccaaggugaacaacaucgucgacaagaugaaccggcaguacgagaucaucgaccacgaguucagcgagguggagacccgccugaacaugaucaacaacaagaucgacgaccagauccaggacaucuggaccuacaacgccgagcugcucguccugcuggagaaccagaagacccucgacgagcacgacgccaacgugaacaaccuguacaacaaggugaagcgggcccugggcuccaacgccauggaggacgggaagggcugcuucgagcucuaccacaagugcgacgaccagugcauggagaccauccgcaacggcacguacaaccgccggaaguaccgcgaggagagccggcuggagcagcagcgcaucgagggggucaagcuggaguccgagggcaccuacaagauccucaccaucuacagcaccguggcguccagccuggugcuggccaugggguucgccgccuuccucuucugggccauguccaacggcagcugccggugcaacaucugcaucuga

SEQ ID NO: 74312 - RNA, 1683 nt, Artificial Sequence; identical to SEQ ID NO: 74307
  derived and/or modified CDS sequence (opt1) from hemagglutinin__InfluenzaA__AGQ81137

SEQ ID NO: 74313 - RNA, 1683 nt, Artificial Sequence
  derived and/or modified CDS sequence (opt1) from hemagglutinin__InfluenzaA__AGQ81138
auggaggccgccaccaucaucaccauccugcucgcgaucacgggcagcaacgccgacaagaucugcaucggguaccaguccaccaacagcaccgagaccguggacacgcugaccgagaacaacguccccgugacccacgccaaggagcugcuccacaccgagcacaacggcaugcugugcgccacgaaccuggggcgcccgcucauccuggacacgugcaccaucgagggccugaucuacgggaaccccuccugcgaccucccccuggagggccgggaguggagcuacaucguggagcgccccuccgccgucaacggcgugugcuacccggggcacguggagaaccuggaggagcuccggagccuguucuccagcgcguccagcuaccagcgcguccagaucuuccccgacuccaucuggaacgugagcuacuccggcaccagcaaggccugcuccgacagcuucuaccgguccaugcgcuggcugacccagaagaacaacaacuaccccgugcaggacgcccaguacaccaacaacaaggggaagaacauccucuucauguggggcaucaaccacccgcccaccgacaccgcccagacgaaccuguacacccggaccgacaccacgaccagcgucgcgaccgaggacaucaaccgcaccuucaagccccugaucgggccccggccccucgugaacggccugcagggccgcaucgacuacuacugggccgugcugaagccggggcagacgcuccggguccgcuccaacggcaaccugaucgcccccugguacgggcacauccugcucggcgagagccacggccggauccugaagaccgaccucaagagcgggaacugcguggugcagugccagaccgagcgcggcgggcugaacaccacgcugcccuuccacaacgucuccaaguacgccuucggcaacugccccaaguacaucggggucaagagccugaagcucgccgugggccugcggaacgugcacgcgcgcuccagccggggccuguucggggccaucgccggcuucaucgagggcgggugguccgggcucguggccggcugguacggcuuccagcacagcaacgaccaggggaccggcauggccgcggaccgcgacuccacccagaaggccaucgacaagaucaccagcaaggugaacaacaucgucgacaagaugaacaagcaguacgagaucaucgaccacgaguucuccgagaucgagacgcggcugaacaugaucaacgacaagaucgacgaccagauccaggacaucugggccuacaacgccgagcugcucgugcugcuggagaaccagaagacccucgacgagcacgacgccaacgugaacaaccuguacaacaaggucaagcgcgcgcuggggagcaacgccguggaggacggcaaggggugcuucgaccucuaccacaagugcgacaaccagugcauggagaccauccggaacggcaccuacaaccgccgcaaguaccaggaggagucccggcuggagcgccagaagaucgagggcgucaagcuggagagcgaggggacguacaagauccucaccaucuacuccaccguggccagcucccuggugaucgccaugggcuucgccgcguuccuguucugggccaugagcaacggguccugccggugcaacaucugcaucuga

SEQ ID NO: 74314 - RNA, 1683 nt, Artificial Sequence
  derived and/or modified CDS sequence (opt1) from hemagglutinin__InfluenzaA__AGQ81139
auggagguggccaccaucaucaccauccugcucgucaucacgggcgggaacgccgacaagaucugcaucggcuaccagagcaccaacuccaccgagaccguggacacgcugaccgagaacaacgugcccgucacccacgcgaaggagcugcuccacaccgagcacaacgggaugcugugcgccacgaaccugggccgcccgcucauccuggacacgugcaccaucgaggggcugaucuacggcaaccccagcugcgaccucccccuggagggccgggagugguccuacaucguggagcgcagcuccgccgugaacggggucugcuaccccggcaacguggagaaccuggaggagcuccggagccuguucuccagcgccuccagcuaccagcgcauccagaucuucccggacuccaucuggaacgugagcuacuccgggaccagcaaggccugcuccgacagcuucuaccgguccaugcgcuggcugacccagaagaacaacaacuaccccguccaggacgcgcaguacaccaacaaccggggcaagaacauccucuucaugugggggaucaaccacccgcccaccgacaacgcccagaccaaccuguacacgcgcaccgacaccaccacgagcguggccaccgaggacaucaaccggaccuucaagccccugaucggcccccgcccccucgugaacggccugcaggggcggaucgacuacuacugggccguccugaagcccggccagacccuccgcgugcgguccaacgggaaccugaucgcgccgugguacggccacauccugcucggcgagagccacgggcgcauccugaagacggaccucaagagcggcaacugcgugguccagugccagaccgagcgcgggggccugaacaccacccugcccuuccacaacguguccaaguacagcuucgggaacugccccaaguacaucggcgugaagucccugaagcucgccgucggccugcggaacgugcccgcccggagcucccgcgggcuguucggcgccaucgccggguucaucgagggcggguggagcggccucguggcgggcugguacggguuccagcacuccaacgaccagggcacggggauggccgccgaccgggacagcacccagaaggccaucgacaagaucaccuccaaggucaacaacaucguggacaagaugaacaagcaguacgagaucaucgaccacgaguucagcgagaucgagacccgccugaacaugaucaacaacaagaucgacgaccagauccaggacaucugggccuacaacgcggagcugcucgugcugcuggagaaccagaagacgcucgacgagcacgacgccaacgucaacaaccuguacaacaaggugaagcgggcccugggcuccaacgccgucgaggacgggaagggcugcuucgaccucuaccacaagugcgacaaccagugcauggagaccauccgcaacggcaccuacaaccgccggaaguaccaggaggagagccgccuggagcggcagaagaucgagggggugaagcuggaguccgagggcaccuacaagauccucacgaucuacagcaccguggccuccagccuggucaucgcgaugggguucgccgccuuccuguucugggccauguccaacggcagcugccgcugcaacaucugcaucuga

SEQ ID NO: 74315 - RNA, 1683 nt, Artificial Sequence
  derived and/or modified CDS sequence (opt1) from hemagglutinin__InfluenzaA__AGQ81141
auggaggccgccaccaucaucaccauccugcucgugaucacgggcagcaacgcggacaagaucugcaucggguaccaguccaccaacagcaccgagaccgucgacacgcugaccgagaacaacgugcccgugacccacgccaaggagcugcuccacaccgagcacaacggcaugcugugcgccacggaccuggggcgcccgcucauccuggacacgugcaccaucgagggccugaucuacgggaaccccuccugcgaccucccccuggagggccgggaguggagcuacaucgucgagcgccccuccgccgugaacggcgugugcuacccggggaacgucgagaaccuggaggagcuccggagccuguucuccagcgccuccagcuaccagcgcauccagaucuuccccgacuccaucuggaacgugagcuacuccggcaccagcaaggcgugcuccgacagcuucuaccgguccaugcgcuggcugacccagaagaacaacaacuaccccgugcaggacgcccaguacaccaacaaccgggggaagaacauccucuucauguggggcaucaaccacccgcccaccgacaccgcccagacgaaccuguacacccgcaccgacaccacgaccagcgucgccaccgaggacaucaaccggaccuucaagccccugaucgggccccgcccccucgugaacggccugcagggccggaucgacuacuacugggcggugcugaagccggggcagacgcuccgcguccgguccaacggcaaccugaucgcccccugguacgggcacauccugcucggcgagagccacggccgcauccugaagaccgaccucaagagcgggaacugcguggugcagugccagaccgagcggggcgggcugaacaccacgcugcccuuccacaacgucuccaaguacgccuucggcaacugccccaaguacaucggggucaagagccugaagcucgccgugggccugcgcaacgugccggcccggucccgccggggccuguucggggcgaucgccggcuucaucgagggcggguggaccgggcucguggccggcugguacggcuuccagcacagcaacgaccaggggaccggcauggccgccgaccgcgacuccacccagaaggcgaucgacaagaucacgagcaaggugaacaacaucgucgacaagaugaacaagcaguacgacaucaucgaccacgaguucuccgagaucgagacccggcugaacaugaucaacgacaagaucgacgaccagauccaggacaucugggccuacaacgccgagcugcucgugcugcuggagaaccagaagacccucgacgagcacgacgccaacgugaacaaccuguacaacaaggucaagggggcccugggcagcaacgcgguggaggacgggaagggcugcuucgaccucuaccacaagugcgacaaccagugcauggagaccauccgcaacggcacguacaaccgccggaaguaccaggaggagucccgccuggagcggcagaagaucgagggggucaagcuggagagcgagggcaccuacaagauccucaccaucuacuccaccguggccagcucccuggugaucgccaugggguucgccgccuuccuguucugggcgaugagcaacggcuccugccgcugcaacaucugcaucuga

SEQ ID NO: 74316 - RNA, 1683 nt, Artificial Sequence
  derived and/or modified CDS sequence (opt1) from hemagglutinin__InfluenzaA__AGQ81143
auggagguggccaccaucaucaccauccugcucgucaucacgggcagcaacgccgacaagaucugcaucggguaccaguccaccaacagcaccgagaccguggacacgcugaccgagaacaacgugcccgucacccacgcgaaggagcugcuccacaccgagcacaacggcaugcugugcgccacgaaccuggggcgcccgcucauccuggacacgugcaccaucgagggccugaucuacgggaaccccuccugcgaccucccccuggagggccgggaguggagcuacaucguggagcgccccuccgccgugaacggcgucugcuacccggggaacguggagaaccuggaggagcuccggagccuguucuccagcgccuccagcuaccagcgcauccagaucuuccccgacuccaucuggaacgugagcuacuccggcaccagcaaggccugcuccgacagcuucuaccgguccaugcgcuggcugacccagaagaacaacaacuaccccguccaggacgcgcaguacaccaacaaccgggggaagaacauccucuucauguggggcaucaaccacccgcccaccgacaacgcccagaccaaccuguacacgcgcaccgacaccaccacgagcguggccaccgaggacaucaaccggaccuucaagccccugaucgggccccgcccccucgugaacggccugcagggccggaucgacuacuacugggccguccugaagccggggcagacccuccgcgugcgguccaacggcaaccugaucgcgcccugguacgggcacauccugcucggcgagagccacggccgcauccugaagacggaccucaagagcgggaacugcgugguccagugccagaccgagcggggcgggcugaacaccacccugcccuuccacaacguguccaaguacagcuucggcaacugccccaaguacaucggggugaagucccugaagcucgccgucggccugcgcaacgugccggcccggagcucccgcggccuguucggggccaucgccggcuucaucgagggcggguggagcgggcucguggcgggcugguacggcuuccagcacuccaacgaccaggggacgggcauggccgccgaccgggacagcacccagaaggccaucgacaagaucaccuccaaggucaacaacaucguggacaagaugaacaagcaguacgagaucaucgaccacgaguucagcgagaucgagacccgccugaacaugaucaacaacaagaucgacgaccagauccaggacaucugggccuacaacgcggagcugcucgugcugcuggagaaccagaagacgcucgacgagcacgacgccaacgucaacaaccuguacaacaaggugaagcgggcccugggguccaacgccgucgaggacggcaaggggugcuucgaccucuaccacaagugcgacaaccagugcauggagaccauccgcaacggcaccuacaaccgccggaaguaccaggaggagagccgccuggagcggcagaagaucgagggcgugaagcuggaguccgaggggaccuacaagauccucacgaucuacagcaccguggccuccagccuggucaucgcgaugggcuucgccgccuuccuguucugggccauguccaacgggagcugccgcugcaacaucugcaucuga

SEQ ID NO: 74317 - RNA, 1683 nt, Artificial Sequence
  derived and/or modified CDS sequence (opt1) from hemagglutinin__InfluenzaA__AGQ81144
auggaggccgccaccaucaucaccauccugcucguggucacgggcagcaacgcggacaagaucugcaucggguaccaguccaccaacagcaccgagaccguggacacgcugaccgagaacaacgugcccgucacccacgccaaggagcugcuccacaccgagcacaacggcaugcugugcgccacgaaccuggggcgcccgcucauccuggacacgugcaccaucgagggccugaucuacgggaaccccuccugcgaccucccccuggagggccgggaguggagcuacaucguggagcgccccuccgccgugaacggcgucugcuacccggggaacguggagaaccuggaggagcuccggagccuguucuccagcgccuccagcuaccagcgcauccagaucuuccccgacuccaucuggaacgugagcuacggcgggaccuccaaggcgugcagcgacuccuucuaccggagcaugcgcuggcugacccagaagaacaacaacuaccccguccaggacgcccaguacaccaacaaccggggcaagaacauccucuucaugugggggaucaaccacccgcccaccgacaccgcccagacgaaccuguacacccgcaccgacaccacgaccuccguggccaccgaggacaucaaccggaccuucaagccccugaucggcccccgcccccucgugaacggccugcaggggcggaucgacuacuacugggcgguccugaagccgggccagacgcuccgcgugcggagcaacgggaaccugaucgcccccugguacggccacauccugcucggcgagucccacgggcgcauccugaagaccgaccucaagagcggcaacugcgugguccagugccagaccgagcgcgggggccugaacaccacgcugcccuuccacaacgugagcaaguacgccuucgggaacugccccaaguacaucggcgugaagucccugaagcucgccgucggccugcggaacaugccggcccggagcucccgcgggcuguucggcgcgaucgccggguucaucgagggcggguggagcggccucguggccggcugguacggguuccagcacuccaacgaccagggcaccgggauggccgccgaccgggacagcacccagaaggcgaucgacaagaucaccuccaaggugaacaacaucgucgacaagaugaacaagcaguacgagaucaucgaccacgaguucagcgagaucgagacgcgccugaacaugaucaacgacaagaucgacgaccagauccaggacaucugggccuacaacgccgagcugcucgugcugcuggagaaccagaagacccucgacgagcacgacgccaacgugaacaaccuguacaacaaggucaagcgggcccugggcuccaacgcgguggaggacgggaagggcugcuucgaccucuaccacaagugcgacaaccagugcauggagaccauccgcaacggcaccuacaaccgccggaaguaccaggaggagagccgccuggagcggcagaagaucgagggggucaagcuggaguccgagggcacguacaagauccucaccaucuacagcaccguggccuccagccuggugaucgccaugggguucgccgccuuccuguucugggcgauguccaacggcagcugccgcugcaacaucugcaucuga

SEQ ID NO: 74318 - RNA, 1683 nt, Artificial Sequence
  derived and/or modified CDS sequence (opt1) from hemagglutinin__InfluenzaA__AGQ81146
auggaggccgccaccaucaucaccauccugcucgugaucacgggcagcaacgcggacaagaucugcaucggguaccaguccaccaacagcaccgagaccgucgacacgcugaccgagaacaacgugcccgugacccacgccaaggagcugcuccacaccgagcacaacggcaugcugugcgccacgaaccuggggcgcccgcucauccuggacacgugcaccaucgagggccugaucuacgggaaccccuccugcgaccucccccuggagggcaaggaguggagcuacaucgucgagcggcccuccgccgugaacggcaugugcuacccggggaacguggagaaccuggaggagcuccgcagccuguucuccagcgccuccagcuaccagcggauccagaucuuccccgacuccaucuggaacgucagcuacuccggcaccagcaaggcgugcuccgacagcuucuaccgcuccaugcgguggcugacccagaagaacaacaacuaccccgugcaggacgcccaguacaccaacaaccgcgggaagaacauccucuucauguggggcaucaaccacccgcccaccgacaccgcccagacgaaccuguacacccggaccgacaccaagacgagcguggccaccgaggagaucaaccgcaccuucaagccccugaucgggccccggccccucgucaacggccugcagggccgcaucgacuacuacugggcggugcugaagccggggcagacccuccgggugcgcuccaacggcaaccugaucgcccccugguacgggcacauccugcucggcgagagccacggccggauccugaagacggaccucaagagcgggaacugcgucgugcagugccagaccgagcgcggcgggcugaacaccacccugcccuuccacaacguguccaaguacgccuucggcaacugccccaaguacaucggggucaagagccugaagcucgccgugggccugcggaacgugccggcccgcuccagccggggccuguucggggcgaucgccggcuucaucgagggcgggugguccgggcucgucgccggcugguacggcuuccagcacagcaacgaccaggggacgggcauggccgccgaccgcgacuccacccagaaggcgaucgacaagaucaccagcaaggugaacaacaucguggacaagaugaacaagcaguacgagaucaucgaccacgaguucuccgagaucgagacccggcugaacaugaucaacgacaagaucgacgaccagauccaggacaucugggccuacaacgccgagcugcucguccugcuggagaaccagaagacgcucgacgagcacgacagcaacgugaacaaccuguacaacaaggugaagcgcgcccugggguccaacgccgucgaggacggcaaggggugcuucgaccucuaccacaagugcgacaaccagugcauggagaccauccggaacggcaccuacaaccgccgcaaguaccaggaggagagccggcuggagcgccagaagaucgagggcgugaagcuggaguccgaggggaccuacaagauccucacgaucuacagcaccgucgcguccagccuggugaucgccaugggcuucgccgccuuccuguucugggccauguccaacgggagcugccggugcaacaucugcaucuga

SEQ ID NO: 74319 - RNA, 1683 nt, Artificial Sequence
  derived and/or modified CDS sequence (opt1) from hemagglutinin__InfluenzaA__AGQ81147
auggaggccgccaccaucaucaccauccugcucgugaucacgggcagcaacgcggacaagaucugcaucggguaccaguccaccaacagcaccgagaccgucgacacgcugaccgagaacaacgugcccgugacccacgccaaggagcugcuccacaccgagcacaacggcaugcugugcgccacgaaccuggggcgcccgcucauccuggacacgugcaccaucgagggccugaucuacgggaaccccuccugcgaccucccccuggagggcaaggaguggagcuacaucgucgagcggcccuccgccgugaacggcaugugcuacccggggaacguggagaaccuggaggagcuccgcagccuguucuccagcgccuccagcuaccagcggauccagaucuuccccgacuccaucuggaacgucagcuacuccggcaccagcaaggcgugcuccgacagcuucuaccgcuccaugcgguggcugacccagaagaacaacaacuaccccgugcaggacgcccaguacaccaacaaccgcgggaagaacauccucuucauguggggcaucaaccacccgcccaccgacaccgugcagacgaaccuguacacccggaccgacaccaagacgagcgucgccaccgaggagaucaaccgcaccuucaagccccugaucgggccccggccccucgugaacggccugcagggccgcaucgacuacuacugggccgugcugaagccggggcagacccuccggguccgcuccaacggcaaccugaucgcgcccugguacgggcacauccugcucggcgagagccacggccggauccugaagacggaccucaagagcgggaacugcguggugcagugccagaccgagcgcggcgggcugaacaccacccugcccuuccacaacgucuccaaguacgccuucggcaacugccccaaguacaucggggucaagagccugaagcucgccgugggccugcggaacgugccggcccgcuccagccggggccuguucggggccaucgcgggcuucaucgagggcgggugguccgggcucguggccggcugguacggcuuccagcacagcaacgaccaggggacgggcauggccgccgaccgcgacuccacccagaaggccaucgacaagaucaccagcaaggugaacaacaucgucgacaagaugaacaagcaguacgagaucaucgaccacgaguucuccgagaucgagacccggcugaacaugaucaacgacaagaucgacgaccagauccaggacaucugggcguacaacgccgagcugcucgugcugcuggagaaccagaagacgcucgacgagcacgacgccaacgugaacaaccuguacaacaaggucaagcgcgcccuggggagcaacgccguggaggacggcaaggggugcuucgaccucuaccacaagugcgacaaccagugcauggagaccauccggaacggcaccuacaaccgccgcaaguaccaggaggagucccggcuggagcgccagaagaucgagggcgucaagcuggagagcgaggggaccuacaagauccucacgaucuacuccaccguggcgagcucccuggugaucgccaugggcuucgccgccuuccuguucugggccaugagcaacggguccugccggugcaacaucugcaucuga

SEQ ID NO: 74320 - RNA, 1683 nt, Artificial Sequence
  derived and/or modified CDS sequence (opt1) from hemagglutinin__InfluenzaA__AGQ81148
auggaggccgccaccaucaucaccauccugcucgugaucacgggcagcaacgcggacaagaucugcaucggguaccaguccaccaacagcaccgagaccgucgacacgcugaccgagaacaacgugcccgugacccacgccaaggagcugcuccacaccgagcacaacggcaugcugugcgccacgaaccuggggcgcccgcucauccuggacacgugcaccaucgagggccugaucuacgggaaccccuccugcgaccucccccuggagggcaaggaguggagcuacaucgucgagcggcccuccgccgugaacggcaugugcuacccggggaacguggagaaccuggaggagcuccgcagccuguucuccagcgccuccagcuaccagcggauccagaucuuccccgacuccaucuggaacgucagcuacuccggcaccagcaaggcgugcuccgacagcuucuaccgcuccaugcgguggcugacccagaagaacaacaacuaccccgugcaggacgcccaguacaccaacaaccgcgggaagaacauccucuucauguggggcaucaaccacccgcccaccgacaccgcccagacgaaccuguacacccggaccgacaccaagacgagcguggccaccgaggagaucaaccgcaccuucaagccccugaucgggccccggccccucgucaacggccugcagggccgcaucgacuacuacugggcggugcugaagccggggcagacccuccgggugcgcuccaacggcaaccugaucgcccccugguacgggcacauccugcucggcgagagccacggccggauccugaagacggaccucaagagcgggaacugcgucgugcagugccagaccgagcgcggcgggcugaacaccacccugcccuuccacaacguguccaaguacgccuucggcaacugccccaaguacaucggggucaagagccugaagcucgccgugggccugcggaacgugccggcccgcuccagccggggccuguucggggcgaucgccggcuucaucgagggcgggugguccgggcucgucgccggcugguacggcuuccagcacagcaacgaccaggggacgggcauggccgccgaccgcgacuccacccagaaggcgaucgacaagaucaccagcaaggugaacaacaucguggacaagaugaacaagcaguacgagaucaucgaccacgaguucuccgagaucgagacccggcugaacaugaucaacgacaagaucgacgaccagauccaggacaucugggccuacaacgccgagcugcucguccugcuggagaaccagaagacgcucgacgagcacgacgccaacgugaacaaccuguacaacaaggugaagcgcgcccuggggagcaacgcggucgaggacggcaaggggugcuucgaccucuaccacaagugcgacaaccagugcauggagaccauccggaacggcaccuacaaccgccgcaaguaccaggaggagucccggcuggagcgccagaagaucgagggcgugaagcuggagagcgaggggaccuacaagauccucacgaucuacuccaccgucgccagcucccuggugaucgccaugggcuucgccgccuuccuguucugggcgaugagcaacggguccugccggugcaacaucugcaucuga

SEQ ID NO: 74321 - RNA, 1683 nt, Artificial Sequence
  derived and/or modified CDS sequence (opt1) from hemagglutinin__InfluenzaA__AGQ81149
auggaggccgccaccaucaucaccauccugcucgugaucacgggcagcaacgcggacaagaucugcaucggguaccaguccaccaacagcaccgagaccgucgacacgcugaccgagaacaacgugcccgugacccacgccaaggagcugcuccacaccggccacaacgggaugcugugcgccacgaaccugggccgcccgcucauccuggacacgugcaccaucgaggggcugaucuacggcaaccccuccugcgaccucccccuggagggccgggaguggagcuacaucgucgagcgccccuccgccaucaacggggugugcuacccgggcaacguggagaaccuggaggagcuccggagccuguucuccagcgccuccagcuaccagcgcauccagaucuuccccgacuccaucuggaacgucagcuacuccgggaccagcaaggcgugcuccgacagcuucuaccgguccaugcgcuggcugacccagaagaacaacaacuaccccgugcaggacgcccaguacaccaacaaccggggcaagaacauccucuucaugugggggaucaaccacccgcccaccgacaccgcccagacgaaccuguacacccgcaccgacaccacgaccagcguggccaccgaggacaucaaccggaccuucaagccccugaucggcccccgcccccucgucaacggccugcaggggcggaucgacuacuacugggcggugcugaagccgggccagacgcuccgcgugcgguccaacgggaaccugaucgcccccugguacggccacauccugcucggcgagagccacgggcgcauccugaagaccgaccucaagagcggcaacugcgucgugcagugccagaccgagcgcgggggccugaacaccacgcugcccuuccacaacguguccaaguacgccuucgggaacugccccaaguacaucggcgucaagagccugaagcucgccgugggccugcggaacgugccggcccgguccagccgcgggcuguucggcgcgaucgccggguucaucgagggcgggugguccggccucgucgccggcugguacggguuccagcacagcaacgaccagggcaccgggauggccgccgaccgggacuccacccagaaggcgaucgacaagaucaccagcaaggugaacaacaucguggacaagaugaacaagcaguacgagaucaucgaccacgaguucuccgagaucgagacgcgccugaacaugaucaacgacaagaucgacgaccagauccaggacaucugggccuacaacgccgagcugcucguccugcuggagaaccagaagacccucgacgagcacgacgccaacgugaacaaccuguacaacaaggugaagcgggcccugggcagcaacgcggucgaggacgggaagggcugcuucgaccucuaccacaagugcgacaaccagugcauggagaccauccgcaacggcaccuacaaccgccggaaguaccaggaggagucccgccuggagcggcagaagaucgagggggugaagcuggagagcgagggcacguacaagauccucaccaucuacuccaccgucgccagcucccuggugaucgccaugggguucgccgccuuccuguucugggcgaugagcaacggcuccugccgcugcaacaucugcaucuga

SEQ ID NO: 74322 - RNA, 1683 nt, Artificial Sequence
  derived and/or modified CDS sequence (opt1) from hemagglutinin__InfluenzaA__AGQ81150
auggaggccgccaccaucaucaccauccugcucgugaucacgggcagcaacgcggacaagaucugcaucggguaccaguccaccaacagcaccgagaccgucgacacgcugaccgagaacaacgugcccgugacccacgccaaggagcugcuccacaccgagcacaacggcaugcugugcgccacggaccuggggcgcccgcucauccuggacacgugcaccaucgagggccugaucuacgggaaccccuccugcgaccucccccuggagggccgggaguggagcuacaucgucgagcgccccuccgccgugaacggcgugugcuacccggggaacgucgagaaccuggaggagcuccggagccuguucuccagcgccuccagcuaccagcgcauccagaucuuccccgacuccaucuggaacgugagcuacuccggcaccagcaaggcgugcuccgacagcuucuaccgguccaugcgcuggcugacccagaagaacaacaacuaccccgugcaggacgcccaguacaccaacgaccgggggaacaacauccucuucauguggggcaucaaccacccgcccaccgacaccguccagacgaaccuguacacccgcaccgacaccacgaccagcguggccaccgaggacaucaaccggaccuucaagccccugaucgggccccgcccccucgugaacggccugcagggccggaucgacuacuacugggccguccugaagccggggcagacgcuccgcgugcgguccaacggcaaccugaucgcgcccugguacgggcacauccugcucggcgagagccacggccgcauccugaagaccgaccucaagagcgggaacugcgugguccagugccagaccgagcggggcgggcugaacaccacgcugcccuuccacaacguguccaaguacgccuucggcaacugccccaaguacaucggggucaagagccugaagcucgccgugggccugcgcaacgugccggcccgguccagccgcggccuguucggggccaucgcgggcuucaucgagggcgggugguccgggcucguggccggcugguacggcuuccagcacagcaacgaccaggggaccggcauggccgccgaccgggacuccacccagaaggccaucgacaagaucaccagcaaggucaacaacaucguggacaagaugaacaagcaguacgacaucaucgaccacgaguucuccgagaucgagacgcgccugaacaugaucaacgacaagaucgacgaccagauccaggacaucugggcguacaacgccgagcugcucgugcugcuggagaaccagaagacccucgacgagcacgacgccaacgucaacaaccuguacaacaaggugaagcgggcccuggggagcaacgccgucgaggacggcaaggggugcuucgaccucuaccacaagugcgacaaccagugcauggagaccauccgcaacggcaccuacaaccgccggaaguaccaggaggagucccgccuggagcggcagaagaucgagggcgugaagcuggagagcgaggggacguacaagauccucaccaucuacuccaccguggcgagcucccuggucaucgccaugggcuucgccgccuuccuguucugggccaugagcaacggguccugccgcugcaacaucugcaucuga

SEQ ID NO: 74323 - RNA, 1683 nt, Artificial Sequence
  derived and/or modified CDS sequence (opt1) from hemagglutinin__InfluenzaA__AGQ81152
auggaggccgccaccaucaucaccauccugcucgugaucacgggcagcaacgcggacaagaucugcaucggguaccaguccaccaacagcaccgagaccgucgacacgcugaccgagaacaacgugcccgugacccacgccaaggagcugcuccacaccgagcacaacggcaugcugugcgccacgaaccuggggcgcccgcucauccuggacacgugcaccaucgagggccugaucuacgggaaccccuccugcgaccucccccuggagggccgggacuggagcuacaucgucgagcgccccuccgccgugaacggcgugugcuacccggggaacgucgagaaccuggaggagcuccggagccuguucuccagcgccuccagcuaccagaagauccagaucuuccccgacuccaucuggaacgugagcuacuccggcaccagcaaggcgugcuccgacagcuucuaccgcuccaugcgguggcugacccagaagaacaacaacuaccccgugcaggacgcccaguacaccaacaaccgcgggaagaacauccucuucauguggggcaucaaccacccgcccaccgacaccguccagacgaaccuguacacccggaccgacaccacgaccagcguggccaccgaggacaucaaccgcaccuucaagccccugaucgggccccggccccucgugaacggccugcagggccgcaucgacuacuacugggccguccugaagccggggcagacgcuccgggugcgcuccaacggcaaccugaucgcgcccugguacgggcacauccugcucggcgagagccacggccggauccugaagaccgaccucaagagcgggaacugcgugguccagugccagaccgagcgcggcgggcugaacaccacgcugcccuuccacaacguguccaaguacgccuucggcaacugccccaaguacaucggggucaagagccugaagcucgccgugggccugcggaacgugccggcccgcuccagccggggccuguucggggccaucgcgggcuucaucgagggcgggugguccgggcucguggccggcugguacggcuuccagcacagcaacgaccaggggaccggcauggccgccgaccgcgacuccacccagaaggccaucgacaagaucaccagcaaggucaacaacaucguggacaagaugaacaagcaguacgagaucaucgaccacgaguucuccgagaucgagacgcggcugaacaugaucaacgacaagaucgacgaccagauccaggacaucugggcguacaacgccgagcugcucgugcugcuggagaaccagaagacccucgacgagcacgacgccaacgucaacaaccuguacaacaaggugaagcgcgcccuggggagcaacgccgucgaggacggcaaggggugcuucgaccucuaccacaagugcgacaaccagugcauggagaccauccggaacggcaccuacaaccgccgcaaguaccaggaggagucccggcuggagcgccagaagaucgagggcgugaagcuggagagcgaggggacguacaagauccucaccaucuacuccaccguggcgagcucccuggucaucgccaugggcuucgccgccuuccuguucugggccaugagcaacggguccugccggugcaacaucugcaucuga

SEQ ID NO: 74324 - RNA, 1683 nt, Artificial Sequence
  derived and/or modified CDS sequence (opt1) from hemagglutinin__InfluenzaA__AGQ81153
auggaggccgccaccaucaucaccauccugcucgugaucacgggcagcaacgcggacaagaucugcaucggguaccaguccaccaacagcaccgagaccgucgacacgcugaccgagaacaacgugcccgugacccacgccaaggagcugcuccacaccgagcacaacggcaugcugugcgccacgaaccuggggcgcccgcucauccuggacacgugcaccaucgagggccugaucuacgggaaccccuccugcgaccucccccuggagggccgggacuggagcuacaucgucgagcgccccuccgccgugaacggcgugugcuacccggggaacgucgagaaccuggaggagcuccggagccuguucuccagcgccuccagcuaccagaagauccagaucuuccccgacuccaucuggaacgugagcuacggcgggaucuccaaggcgugcagcaacuccuucuaccgcagcaugcgguggcugacccagaagaacaacaacuaccccgugcaggacgcccaguacaccaacaaccgcggcaagaacauccucuucaugugggggaucaaccacccgcccaccaacaccacccagacggaccuguacacccggaccgacaccacgaccuccgucgccaccgaggacauccaccgcaccuucaagccccugaucggcccccggccccucgugaacggccugcaggggcgcaucgacuacuacugggccgugcugaagccgggccagacgcuccggguccgcagcaacgggaaccugaucgcgcccugguacggccacauccugcucggcaagucccacgggcggauccugaagaccgaccucaagagcggcaacugcguggugcagugccagaccgagcgcgggggccugaacaccacgcugcccuuccacaacgucagcaaguacgccuucgggaacugccccaaguacaucggcgugaagucccugaagcucgccgugggccugcggaacgucccggcccgcagcucccgggggcuguucggcgccaucgcgggguucaucgagggcggguggagcggccucguggccggcugguacggguuccagcacuccaacgaccagggcaccgggauggccgccgaccgcgacagcacccagaaggccaucgacaagaucaccuccaaggugaacaacaucgucgacaagaugaacaagcaguacgagaucaucgaccacgaguucagcgagaucgagacgcggcugaacaugaucaacgacaagaucgacgaccagauccaggacaucugggcguacaacgccgagcugcucgugcugcuggagaaccagaagacccucgacgagcacgacgccaacgugaacaaccuguacaacaaggucaagcgcgcccugggcuccaacgccguggaggacgggaagggcugcuucgaccucuaccacaagugcgacaaccagugcauggagaccauccggaacggcaccuacaaccgccgcaaguaccaggaggagagccggcuggagcgccagaagaucgagggggucaagcuggaguccgagggcacguacaagauccucaccaucuacagcaccguggcguccagccuggugaucgccaugggguucgccgccuuccuguucugggccauguccaacggcagcugccggugcaacaucugcaucuga

SEQ ID NO: 74325 - RNA, 1683 nt, Artificial Sequence
  derived and/or modified CDS sequence (opt1) from hemagglutinin__InfluenzaA__AGQ81155
auggaggccgccaccaucaucaccauccugcucgugaucacgggcagcaacgcggacaagaucugcaucggguaccaguccaccaacagcaccgagaccgucgacacgcugaccgagaacaacgugcccgugacccacgccaaggagcugcuccacaccgagcacaacggcaugcugugcgccacgaaccuggggcgcccgcucauccuggacacgugcaccaucgagggccugaucuacgggaaccccuccugcgaccucccccuggagggccgggacuggagcuacaucgucgagcgccccuccgccgugaacggcgugugcuacccggggaacgucgagaaccuggaggagcuccggagccuguucuccagcgccuccagcuaccagaagauccagaucuuccccgacuccaucuggaacgugagcuacaacggcaccuccaaggcgugcagcgacuccuucuaccgcagcaugcgguggcugacccagaagaacaacaacuaccccgugcaggacgcccaguacaccaacaaccgcgggaagaacauccucuucauguggggcaucaaccacccgcccaccgacaccacgcagaccaaccuguacacccggaccgacacgaccaccuccgucgccaccgaggacaucaaccgcacguucaagccccugaucgggccccggccccucgugaacggccugcagggccgcaucgacuacuacugggccgugcugaagccggggcagacccuccggguccgcagcaacggcaaccugaucgcgcccugguacgggcacauccugcucggcgagucccacggccggauccugaagaccgaccucaagagcgggaacugcguggugcagugccagaccgagcgcggcgggcugaacacgacccugcccuuccacaacgucagcaaguacgccuucggcgacugccccaaguacaucggggugaagucccugaagcucgccgugggccugcggaacgucccggcccgcagcucccggggccuguucggggccaucgcgggcuucaucgagggcggguggagcgggcucguggccggcugguacggcuuccagcacuccaacgaccaggggaccggcauggccgccgaccgcgacagcacccagaaggccaucgacaagaucacguccaaggugaacaacaucgucgacaagaugaacaagcaguacgagaucaucgaccacgaguucagcgagaucgagacccggcugaacaugaucaacgacaagaucgacgaccagauccaggacaucugggcguacaacgccgagcugcucgugcugcuggagaaccagaagacccucgacgagcacgacgccaacgugaacaaccuguacaacaaggucaagcgcgcccugggguccaacgccguggaggacggcaaggggugcuucgaccucuaccacaagugcgacaaccagugcauggagaccauccggaacggcacguacaaccgccgcaaguaccaggaggagagccggcuggagcgccaggagaucgagggcgucaagcuggaguccgaggggaccuacaagauccucaccaucuacagcaccguggcguccagccuggugaucgccaugggcuucgccgccuuccuguucugggccauguccaacgggagcugccggugcaacaucugcaucuga

SEQ ID NO: 74326 - RNA, 1683 nt, Artificial Sequence
  derived and/or modified CDS sequence (opt1) from hemagglutinin__InfluenzaA__AGQ81156
auggaggccgccaccaucaucaccauccugcucgugaucacgggcagcaacgcggacaagaucugcaucggguaccaguccaccaacagcaccgagaccgucgacacgcugaccgagaacaacgugcccgugacccacgccaaggagcugcuccacaccgagcacaacggcaugcugugcgccacgaaccuggggcgcccgcucauccuggacacgugcaccaucgagggccugaucuacgggaaccccuccugcgaccucccccuggagggccgggacuggagcuacaucgucgagcgccccuccgccgugaacggcgugugcuacccggggaacgucgagaaccuggaggagcuccggagccuguucuccagcgccuccagcuaccagaagauccagaucuuccccgacuccaucuggaacgugagcuacggcgggaucuccaaggcgugcagcaacuccuucuaccgcagcaugcgguggcugacccagaagaacaacaacuaccccgugcaggacgcccaguacaccaacaaccgcggcaagaacauccucuucaugugggggaucaaccacccgcccaccaacaccacccagacggaccuguacacccggaccgacaccacgaccuccgucgccaccgaggacauccaccgcaccuucaagccccugaucggcccccggccccucgugaacggccugcaggggcgcaucgacuacuacugggccgugcugaagccgggccagacgcuccggguccgcagcaacgggaaccugaucgcgcccugguacggccacauccugcucggcgagucccacgggcggauccugaagaccgaccucaagagcggcaacugcguggugcagugccagaccgagcgcgggggccugaacaccacgcugcccuuccacaacgucagcaaguacgccuucgggaacugccccaaguacaucggcgugaagucccugaagcucgccgugggccugcggaacgucccggcccgcagcucccgggggcuguucggcgccaucgcgggguucaucgagggcggguggagcggccucguggccggcugguacggguuccagcacuccaacgaccagggcaccgggauggccgccgaccgcgacagcacccagaaggccaucgacaagaucaccuccaaggugaacaacaucgucgacaagaugaacaagcaguacgagaucaucgaccacgaguucagcgagaucgagacgcggcugaacaugaucaacgacaagaucgacgaccagauccaggacaucugggcguacaacgccgagcugcucgugcugcuggagaaccagaagacccucgacgagcacgacgccaacgugaacaaccuguacaacaaggucaagcgcgcccugggcuccaacgccguggaggacgggaagggcugcuucgaccucuaccacaagugcgacaaccagugcauggagaccauccggaacggcaccuacaaccgccgcaaguaccaggaggagagccggcuggagcgccagaagaucgagggggucaagcuggaguccgagggcacguacaagauccucaccaucuacagcaccguggcguccagccuggugaucgccaugggguucgccgccuuccuguucugggccauguccaacggcagcugccggugcaacaucugcaucuga

SEQ ID NO: 74327 - RNA, 1683 nt, Artificial Sequence
  derived and/or modified CDS sequence (opt1) from hemagglutinin__InfluenzaA__AGQ81157
auggaggccgccaccaucaucaccauccugcucgugaucacgggcaacaacgcggacaagaucugcaucggguaccagagcaccaacuccaccgagaccgucgacacgcugaccgagaacaacgugcccgugacccacgccaaggagcugcuccacaccgagcacaacggcaugcugugcgccacgaaccuggggcgcccgcucauccuggacacgugcaccaucgagggccugaucuacgggaaccccagcugcgaccucccccuggagggccgggacugguccuacaucgucgagcgccccagcgccgugaacggcgugugcuacccggggaacgucgagaaccuggaggagcuccggucccuguucagcuccgccagcuccuaccagaagauccagaucuuccccgacagcaucuggaacguguccuacaacggcaccagcaaggcgugcuccgacagcuucuaccgcuccaugcgguggcugacccagaagaacaacaacuaccccgugcaggacgcccaguacaccaacaaccgcgggaagaacauccucuucauguggggcaucaaccacccgcccaccgacaccacgcagaccaaccuguacacccggaccgacacgaccaccagcgucgccaccgaggacaucaaccgcacguucaagccccugaucgggccccggccccucgugaacggccugcagggccgcaucgacuacuacugggccgugcugaagccggggcagacccuccggguccgcuccaacggcaaccugaucgcgcccugguacgggcacauccugcucggcgagagccacggccggauccugaagaccgaccugaaguccgggaacugcguggugcagugccagaccgagcgcggcgggcucaacacgacccugcccuuccacaacgucagcaaguacgccuucggcgacugccccaaguacaucggggucaagagccugaagcucgccgugggccugcggaacgugccggcccgcuccagccggggccuguucggggccaucgcgggcuucaucgagggcgggugguccgggcucguggccggcugguacggcuuccagcacagcaacgaccaggggaccggcauggccgccgaccgcgacuccacccagaaggccaucgacaagaucacgagcaaggugaacaacaucgucgacaagaugaacaagcaguacgagaucaucgaccacgaguucuccgagaucgagacccggcugaacaugaucaacgacaagaucgacgaccagauccaggacaucugggcguacaacgccgagcugcucgugcugcuggagaaccagaagacccucgacgagcacgacgccaacgugaacaaccuguacaacaaggucaagcgcgcccuggggagcaacgccguggaggacggcaaggggugcuucgaccucuaccacaagugcgacaaccagugcauggagaccauccggaacggcacguacaaccgccgcaaguaccaggaggagucccggcuggagcgccagaagaucgagggcgucaagcuggagagcgaggggaccuacaagauccucaccaucuacuccaccguggcgagcucccuggugaucgccaugggcuucgccgccuuccuguucugggccaugagcaacggguccugccggugcaacaucugcaucuga

SEQ ID NO: 74328 - RNA, 1683 nt, Artificial Sequence
  derived and/or modified CDS sequence (opt1) from hemagglutinin__InfluenzaA__AGQ81158
auggagguggucaccaucaucaccauccugcucgugaucacgcgcagcaacgccgacaagaucugcaucggcuaccaguccaccaacagcaccgagaccguggacacgcugaccgagaacaacguccccgugacccacgccaaggagcugcuccacaccgagcacaacgggaugcugugcgcgacgaaccugggccggccgcucauccuggacacgugcaccaucgaggggcugaucuacggcaaccccuccugcgaccucccccuggaggggcgcgaguggagcuacaucguggagcggcccuccgccgucaacggcgugugcuacccgggcaacguggagaaccuggaggagcuccgcagccuguucuccagcgccuccagcuaccagcggauccagaucuuccccgacuccaucuggaacgucagcuacuccgggaccagcaaggccugcuccgacagcuucuaccgcuccaugcgguggcugacccagaagaacaacaacuaccccgugcaggacgcccaguacaccaacaaccgcggcaagaacauccucuucaugugggggaucaaccacccgcccaccgacaccgcgcagacgaaccuguacacccggaccgacaccacgaccagcguggccaccgaggacaucaaccgcaccuucaagccccugaucggcccccggccccucgucaacgggcugcagggccgcaucgacuacuacugggccgugcugaagccgggccagacgcuccgggugcgcuccaacgggaaccugaucgcccccugguacggccacauccugcucggggagagccacggccggauccugaagaccgaccucaagagcggcuccugcgucgugcagugccagaccgagcgcgggggccugaacaccacgcugcccuuccacaacgugagcaaguacgcguucgggaacugccccaaguacaucggcgucaagucccugaagcucgccguggggcugcggaacgugccggcccgcagcucccggggccuguucggcgccaucgccggguucaucgagggcggguggagcggccucgucgcggggugguacggcuuccagcacuccaacgaccagggcaccgggauggccgccgaccgcgacagcacccagaaggccaucgacaagaucaccuccaaggugaacaacaucguggacaagaugaacaagcaguacgagaucaucaaccacgaguucagcgagaucgagacgcggcugaacaugaucaacgacaagaucgacgaccagauccaggacaucugggccuacaacgcggagcugcucguccugcuggagaaccagaagacccucgacgagcacgacgccaacgugaacaaccuguacaacaaggucaagcgcgcccugggcuccaacgccguggaggacgggaagggcugcuucgaccucuaccacaagugcgacaaccagugcauggagaccauccgcaacgggaccuacaaccggcgcauguaccaggaggagagccggcuggagcgccagaagaucgagggcgugaagcuggaguccgagggcacguacaagauccucaccaucuacagcaccgucgccuccagccuggugaucgcgaugggguucgccgccuuccuguucugggccauguccaacggcagcugccggugcaacaucugcaucuga

SEQ ID NO: 74329 - RNA, 1683 nt, Artificial Sequence
  derived and/or modified CDS sequence (opt1) from hemagglutinin__InfluenzaA__AGQ81159
auggaggccgccaccaucaucaccauccugcucgugaucacgggcagcaacgcggacaagaucugcaucggguaccaguccaccaacagcaccgagaccgucgacacgcugaccgagaacaacgugcccgugacccacgccaaggagcugcuccacaccgagcacaacggcaugcugugcgccacgaaccuggggcgcccgcucauccuggacacgugcaccaucgagggccugaucuacgggaaccccuccugcgaccucccccuggagggccgggacuggagcuacaucgucgagcgccccuccgccgugaacggcgugugcuacccggggaacgucgagaaccuggaggagcuccggagccuguucuccagcgccuccagcuaccagaagauccagaucuuccccgacuccaucuggaacgugagcuacgacggcaucuccaaggcgugcagcaacuccuucuaccgcagcaugcgguggcugaccaagaagaacaacuccuaccccgugcaggacgcccaguacaccaacaacaucgggaagaacauccucuucauguggggcaucaaccacccgcccaccaacaccacccagacggaccuguacacccgcaccgacaccacgaccagcgucgccaccgaggacauccaccggaccuucaagccccugaucgggccccggcccccggugaacggccuccugggccgcaucgacuacuacugggccgugcugaagcccgggcagacgcuccgcguccgguccaacggcaaccugaucgcgcccugguacgggcacauccugcucggcgagagccacggccgcauccugaagaccgaccucaagagcgggaacugcguggugcagugccagaccgagcggggcgggcugaacaccacgcugcccuuccacaacgucuccaaguacgccuucggcaacugcccgaaguacaucggggucaagagccugaagcucgccgugggccugcgcaacgugcccgcccgguccagccgcggccuguucggggccaucgcgggcuucaucgagggcgggugguccgggcucguggccggcugguacggcuuccagcacagcaacgaccaggggaccggcauggccgccgaccgggacuccacccagaaggccaucgacaagaucaccagcaaggugaacaacaucgucgacaagaugaacaagcaguacgagaucaucgaccacgaguucuccgagaucgagacgcgccugaacaugaucaacgacaagaucgacgaccagauccaggacaucugggcguacaacgccgagcugcucgugcugcuggagaaccagaagacccucgacgagcacgacgccaacgugaacaaccuguacaacaaggucaagcgggcccuggggagcaacgccguggaggacggcaaggggugcuucgaccucuaccacaagugcgacaaccagugcauggagaccauccgcaacggcaccuacaaccggcgcaaguaccaggaggagucccgccuggagcggcagaagaucgagggcgucaagcuggagagcgaggggacguacaagauccucaccaucuacuccaccguggcgagcucccuggugaucgccaugggcuucgccgccuuccuguucugggccaugagcaacggguccugccgcugcaacaucugcaucuga

SEQ ID NO: 74330 - RNA, 1683 nt, Artificial Sequence
  derived and/or modified CDS sequence (opt1) from hemagglutinin__InfluenzaA__AGQ81161
auggagaccgugagccugaucaccauccuccuggucgccacgguguccaacgccgacaagaucugcaucggcuaccagagcaccaacuccaccgagaccguggacacgcugaccgagaacaacguccccgugacccacgcgaaggagcuccugcacaccgagcacaacgggaugcugugcgccacgagccucggccagccgcugauccuggacacgugcaccaucgaggggcucaucuacggcaaccccuccugcgacccccugcuggaggggcgcgaguggagcuacaucguggagcggcccuccgccgucaacggccucugcuacccgggcaacguggagaaccuggaggagcugcgcagccucuucuccagcgcccgguccuaccagcgcauccagaucuuccccgacaccaucuggaacgugagcuacgacgggaccuccaaggccugcagcggcuccuucuaccggaacaugcgcuggcugacccagaagaacagcgacuaccccauccaggacgcgcaguacaccaacaaccaggggaagaacauccuguucauguggggcaucaaccacccgcccaccgacacgacccagcgggaccucuacacccgcaccgacacgaccaccuccgucgccaccgaggagaucaaccggaucuucaagccccugaucgggccccgcccccuggugaacggccucaugggccggaucgacuacuacuggagcgugcugaagccggggcagacgcugcgcaucaaguccgacggcaaccucaucgcccccugguacgggcacauccugagcggcgagagccacggccggauccugaagaccgaccucaagaagggguccugcaccguccagugccagaccgagaagggcgggcugaacacgacccugcccuuccagaacgugagcaaguacgccuucggcaacugcuccaaguacaucgggaucaagagccucaagcuggcggugggccugcgcaacguccccucccggagcucccgcggccucuucggggccaucgccggcuucaucgagggcggguggagcgggcugguggccggcugguacggcuuccagcacuccaacgaccagggggugggcauggccgcggaccgggacagcacccagaaggccaucgacaagaucaccuccaaggucaacaacaucguggacaagaugaacaagcaguacgagaucaucgaccacgaguucagcgagguggagacgcgccugaacaugaucaacaacaagaucgacgaccagauccaggacaucugggccuacaacgccgagcuccugguccugcucgagaaccagaagacccuggacgagcacgacgccaacgugaacaaccuguacaacaaggugaagcgggcgcucggguccaacgccgucgaggacggcaaggggugcuucgagcuguaccacaagugcgacgaccagugcauggagaccauccgcaacggcaccuacaaccggcgcaaguaccaggaggagagcaagcuggagcgccagaagaucgagggcgugaagcucgaguccgaggggacguacaagauccugaccaucuacagcaccgucgccuccagccuggugaucgccaugggcuucgccgcguuccucuucugggccauguccaacgggagcugccggugcaacaucugcaucuga

SEQ ID NO: 74331 - RNA, 1683 nt, Artificial Sequence
  derived and/or modified CDS sequence (opt1) from hemagglutinin__InfluenzaA__AGQ81162
auggagaccgugagccugaucaccauccuccuggucgccacgguguccaacgccgacaagaucugcaucggcuaccagagcaccaacuccaccgagaccguggacacgcugaccgagaacaacguccccgugacccacgcgaaggagcuccugcacaccgagcacaacgggaugcugugcgccacgagccucggccagccgcugauccuggacacgugcaccaucgaggggcucaucuacggcaaccccuccugcgaccugcugcucgaggggcgcgaguggagcuacaucguggagcggcccuccgccgucaacggccugugcuaccccggcaacguggagaaccuggaggagcuccgcagccuguucuccagcgcccgguccuaccagcgcauccagaucuucccggacaccaucuggaacgugagcuacgacgggaccuccaaggccugcagcggcuccuucuaccggagcaugcgcuggcugacccagaagaacuccgacuaccccauccaggacgcgcaguacaccaacaaccaggggaagaacauccucuucauguggggcaucaaccacccgcccaccgacacgacccagcgggaccuguacacccgcaccgacacgaccaccagcgucgccaccgaggagaucaaccggaucuucaagccccugaucgggccccgcccccucgugaacggccugaugggccggaucgacuacuacugguccgugcugaagcccgggcagacgcuccgcaucaagagcgacggcaaccugaucgccccgugguacgggcacauccugagcggcgagucccacggccggauccucaagaccgaccugaagaaggggagcugcaccguccagugccagaccgagaagggcgggcugaacacgacccuccccuuccagaacguguccaaguacgccuucggcaacugcagcaaguacaucgggaucaagucccugaagcuggcggugggccuccgcaacguccccagccgguccagccgcggccuguucggggccaucgccggcuucaucgagggcgggugguccgggcugguggccggcugguacggcuuccagcacagcaacgaccagggggugggcauggccgcggaccgggacuccacccagaaggccaucgacaagaucaccagcaaggucaacaacaucguggacaagaugaacaagcaguacgagaucaucgaccacgaguucuccgagguggagacgcgccucaacaugaucaacaacaagaucgacgaccagauccaggacaucugggccuacaacgccgagcugcugguccuccuggagaaccagaagacccuggacgagcacgacgccaacgugaacaaccucuacaacaaggugaagcgggcgcuggggagcaacgccgucgaggacggcaaggggugcuucgagcuguaccacaagugcgacgaccagugcauggagaccauccgcaacggcaccuacaaccggaagaaguaccaggaggaguccaagcucgagcgccagaagaucgagggcgugaagcuggagagcgaggggacguacaagauccugaccaucuacuccaccgucgccagcucccucgugaucgccaugggcuucgccgcguuccuguucugggccaugagcaacgggagcugccgcugcaacaucugcaucuga

SEQ ID NO: 74332 - RNA, 1683 nt, Artificial Sequence
  derived and/or modified CDS sequence (opt1) from hemagglutinin__InfluenzaA__AGQ81164
auggagaccgugagccugaucaccauccuccuggucgccacgguguccaacgccgacaagaucugcaucggcuaccagagcaccaacuccaccgagaccguggacacgcugaccgagaacaacguccccgugacccacgcgaaggagcuccugcacaccgagcacaacgggaugcugugcgccacgagccucggccagccgcugauccuggacacgugcaccaucgaggggcucaucuacggcaaccccuccugcgaccugcugcucgaggggcgcgaguggagcuacaucguggagcggcccuccgccgucaacggccugugcuaccccggcaacguggagaaccuggaggagcuccgcagccuguucuccagcgcccgguccuaccagcgcauccagaucuucccggacaccaucuggaacgugagcuacgacgggaccuccaaggccugcagcggcuccuucuaccggagcaugcgcuggcugacccagaagaacuccgacuaccccauccaggacgcgcaguacaccaacaaccaggggaagaacauccucuucauguggggcaucaaccacccgcccaccgacacgacccagcgggaccuguacacccgcaccgacacgaccaccagcgucgccaccgaggagaucaaccggaucuucaagccccugaucgggccccgcccccucgugaacggccugaugggccggaucgacuacuacugguccgugcugaagcccgggcagacgcuccgcaucaagagcgacggcaaccugaucgccccgugguacgggcacauccugagcggcgagucccacggccggauccucaagaccgaccugaagaaggggagcugcaccguccagugccagaccgagaagggcgggcugaacacgacccuccccuuccagaacguguccaaguacgccuucggcaacugcagcaaguacaucgggaucaagucccugaagcuggcggugggccuccgcaacguccccagccgguccagccgcggccuguucggggccaucgccggcuucaucgagggcgggugguccgggcugguggccggcugguacggcuuccagcacagcaacgaccagggggugggcauggccgcggaccgggacuccacccagaaggccaucgacaagaucaccagcaaggucaacaacaucguggacaagaugaacaagcaguacgagaucaucgaccacgaguucuccgagguggagacgcgccucaacaugaucaacaacaagaucgacgaccagauccaggacaucugggccuacaacgccgagcugcugguccuccuggagaaccagaagacccuggacgagcacgacgccaacgugaacaaccucuacaacaaggugaagcgggcgcuggggagcaacgccgucgaggacggcaaggggugcuucgagcuguaccacaagugcgacgaccagugcauggagaccauccgcaacggcaccuacaaccggcgcaaguaccaggaggaguccaagcucgagcgccagaagaucgagggcgugaagcuggagagcgaggggacguacaagauccugaccaucuacuccaccgucgccagcucccucgugaucgccaugggcuucgccgcguuccuguucugggccaugagcaacgggagcugccggugcaacaucugcaucuga

SEQ ID NO: 74333 - RNA, 1683 nt, Artificial Sequence
  derived and/or modified CDS sequence (opt1) from hemagglutinin__InfluenzaA__AGQ81167
auggagaccgugagccugaucaccauccuccuggucgccacgguguccaacgccgacaagaucugcaucggcuaccagagcaccaacuccaccgagaccguggacacgcugaccgagaacaacguccccgugacccacgcgaaggagcuccugcacaccgagcacaacgggaugcugugcgccacgagccucggccagccgcugauccuggacacgugcaccaucgaggggcucaucuacggcaaccccuccugcgaccugcugcucgaggggcgcgaguggagcuacaucguggagcggcccuccgccgucaacggccugugcuaccccggcaacguggagaaccuggaggagcuccgcagccuguucuccagcgcccgguccuaccagcgcauccagaucuucccggacaccaucuggaacgugagcuacaacgggaccuccaaggccugcagcggcuccuucuaccggagcaugcgcuggcugacccagaagaacuccaacuaccccauccaggacgcgcaguacaccaacaaccaggggaagaacauccucuucauguggggcaucaaccacccgcccaccgacacgacccagcgggaccuguacacccgcaccgacacgaccaccagcgucgccaccgaggagaucaaccggaucuucaagccccugaucgggccccgcccccucgugaacggccugaugggccggaucgacuacuacugguccgugcugaagcccgggcagacgcuccgcaucaagagcgacggcaaccugaucgccccgugguacgggcacauccugagcggcgagucccacggccggauccucaagaccgaccugaagaaggggagcugcaccguccagugccagaccgagaagggcgggcugaacacgacccuccccuuccagaacguguccaaguacgccuucggcaacugcagcaaguacaucgggaucaagucccugaagcuggcggugggccuccgcaacguccccagccgguccagccgcggccuguucggggccaucgccggcuucaucgagggcgggugguccgggcugguggccggcugguacggcuuccagcacagcaacgaccagggggugggcauggccgcggaccgggacuccacccagaaggccaucgacaagaucaccagcaaggucaacaacaucguggacaagaugaacaagcaguacgagaucaucgaccacgaguucuccgagguggagacgcgccucaacaugaucaacaacaagaucgacgaccagauccaggacaucugggccuacaacgccgagcugcugguccuccuggagaaccagaagacccuggacgagcacgacgccaacgugaacaaccucuacaacaaggugaagcgggcgcuggggagcaacgccgucgaggacggcaaggggugcuucgagcuguaccacaagugcgacgaccagugcauggagaccauccgcaacggcaccuacaaccggcgcaaguaccaggaggaguccaagcucgagcgccagaagaucgagggcgugaagcuggagagcgaggggacguacaagauccugaccaucuacuccaccgucgccagcucccucgugaucgccaugggcuucgccgcguuccuguucugggccaugagcaacgggagcugccggugcaacaucugcaucuga

SEQ ID NO: 74334 - RNA, 1683 nt, Artificial Sequence
  derived and/or modified CDS sequence (opt1) from hemagglutinin__InfluenzaA__AGQ81168
auggagaccgugagccugaucaccauccuccuggucgugacgguguccaacgccgacaagaucugcaucggcuaccagagcaccaacuccaccgagaccgucgacacgcugaccgagaacaacgugcccgugacccacgcccgcgagcuccugcacaccgagcacaacgggaugcugugcgcgacgagccucggccacccgcugauccuggacacgugcaccaucgaggggcucaucuacggcaaccccuccugcgaccugcugcucgggggccgggaguggagcuacaucgucgagcgccccuccgccgugaacggccugugcuaccccgggaacguggagaaccuggaggagcuccggagccuguucuccagcgcccgcuccuaccagcggauccagaucuucccggacaccaucuggaacgucagcuacuccggcaccagcaaggccugcuccgacagcuucuaccgcuccaugcgguggcugacccagaaggggaacgccuaccccauccaggacgcgcaguacaccaacaaccagggcaagaacauccucuucaugugggggaucaaccacccgcccaccgacacggcccagaccaaccuguacacccgcaccgacacgaccaccagcguggccaccgaggagaucaaccggacguucaagccccugaucggcccccgcccccucgugaacggccugauggggcggaucaacuacuacugguccguccugaagcccggccagacccuccgcaucaagagcaacgggaaccugaucgccccgugguacggccacauccugagcggcgagucccacgggcggauccucaagaccgaccugaagcgcggcagcugcaccgugcagugccagacggagaagggcgggcugaacaccacccuccccuuccagaacguguccaaguacgcguucgggaacugcagcaaguacaucggcaugaagucccugaagcuggccgucggccuccggaacgugcccagccgcuccagccgggggcuguucggcgccaucgccggguucaucgagggcgggugguccggccugguggccggcugguacggguuccagcacagcaacgaccagggcgucgggauggcggccgaccgcgacuccacccagaaggccaucgacaagaucacgagcaaggugaacaacaucguggacaagaugaacaagcaguacgagaucaucgaccacgaguucuccgaggucgagacccggcucaacaugaucaacaacaagaucgacgaccagauccaggacaucugggccuacaacgccgagcugcuggugcuccuggagaaccagaagacccuggacgagcacgacgcgaacgugaacaaccucuacaacaaggucaagcgcgcccugggcagcaacgccguggaggacgggaagggcugcuucgagcuguaccacaagugcgacgaccagugcauggagaccauccggaacggcacguacaaccgccgcaaguaccaggaggaguccaagcucgagcggcagaagaucgagggggucaagcuggagagcgagggcaccuacaagauccugaccaucuacuccaccguggccagcucccucgugaucgccaugggguucgcggccuuccuguucugggccaugagcaacggcagcugccgcugcaacaucugcaucuga

SEQ ID NO: 74335 - RNA, 1683 nt, Artificial Sequence
  derived and/or modified CDS sequence (opt1) from hemagglutinin__InfluenzaA__AGQ81169
auggagaccgugagccugaucaccauccuccuggucgugacgguguccaacgccgacaagaucugcaucggcuaccagagcaccaacuccaccgagaccgucgacacgcugaccgagaacaacgugcccgugacccacgcccgcgagcuccugcacaccgagcacaacgggaugcugugcgcgacgagccucggccacccgcugauccuggacacgugcaccaucgaggggcucaucuacggcaaccccuccugcgaccugcugcucgggggccgggaguggagcuacaucgucgagcgccccuccgccgugaacggccugugcuaccccgggaacguggagaaccuggaggagcuccggagccuguucuccagcgcccgcuccuaccagcggauccagaucuucccggacaccaucuggaacgucagcuacuccggcaccagcaaggccugcuccgacagcuucuaccgcuccaugcgguggcugacccagaaggacaacgccuaccccauccaggacgcgcaguacaccaacaaccaggagaagaacauccucuucaugugggggaucaaccacccgcccaccgacacggugcagaccaaccuguacacccgcaccgacacgaccaccagcguggccaccgaggagaucaaccggacguucaagccccugaucggcccccgcccccucgucaacgggcugaugggccggaucaacuacuacugguccgugcugaagcccggccagacccuccgcaucaagagcaacgggaaccugaucgccccgugguacggccacauccugagcggggagucccacggccggauccucaagaccgaccugaagcgcggcagcugcaccgugcagugccagacggagaagggcgggcugaacaccacccuccccuuccagaacgucuccaaguacgccuucgggaacugcagcaaguacaucggcaugaagucccugaagcuggcgguggggcuccggaacgugcccagccgcuccagccggggccuguucggcgccaucgccggguucaucgagggcgggugguccggccuggucgccgggugguacggcuuccagcacagcaacgaccagggcguggggauggccgcggaccgcgacuccacccagaaggccaucgacaagaucacgagcaaggugaacaacaucgucgacaagaugaacaagcaguacgagaucaucgaccacgaguucuccgagguggagacccggcucaacaugaucaacaacaagaucgacgaccagauccaggacaucugggccuacaacgccgagcugcuggugcuccuggagaaccagaagacccuggacgagcacgacgccaacgucaacaaccucuacaacaaggugaagcgcgcgcugggcagcaacgccgucgaggacgggaagggcugcuucgagcuguaccacaagugcgacgaccagugcauggagaccauccggaacgggacguacaaccgccgcaaguaccaggaggaguccaagcucgagcggcagaagaucgagggcgugaagcuggagagcgagggcaccuacaagauccugaccaucuacuccaccguggccagcucccucgucaucgccaugggguucgccgcguuccuguucugggccaugagcaacggcagcugccgcugcaacaucugcaucuga

SEQ ID NO: 74336 - RNA, 1683 nt, Artificial Sequence
  derived and/or modified CDS sequence (opt1) from hemagglutinin__InfluenzaA__AGQ81170
auggagaccgugagccugaucaccauccuccuggucgugacgguguccaacgccgacaagaucugcaucggcuaccagagcaccaacuccaccgagaccgucgacacgcugaccgagaacaacgugcccgugacccacgcccgcgagcuccugcacaccgagcacaacgggaugcugugcgcgacgagccucggccacccgcugauccuggacacgugcaccaucgaggggcucaucuacggcaaccccuccugcgaccugcugcucgggggccgggaguggagcuacaucgucgagcgccccuccgccgugaacggccugugcuaccccgggaacguggagaaccuggaggagcuccggagccuguucuccagcgcccgcuccuaccagcggauccagaucuucccggacaccaucuggaacgucagcuacuccggcaccagcaaggccugcuccgacagcuucuaccgcuccaugcgguggcugacccagaaggacaacgccuaccccauccaggacgcgcaguacaccaacaaccaggggaagaacauccucuucauguggggcaucaaccacccgcccaccgacacggcccagaccaaccuguacacccgcaccgacacgaccaccagcguggccaccgaggagaucaaccggacguucaagccccugaucgggccccgcccccucgugaacggccugaugggccggaucaacuacuacugguccguccugaagcccgggcagacccuccgcaucaagagcaacggcaaccugaucgccccgugguacgggcacauccugagcggcgagucccacggccggauccucaagaccgaccugaagcgcgggagcugcaccgugcagugccagacggagaagggcgggcugaacaccacccuccccuuccagaacguguccaaguacgcguucggcaacugcagcaaguacaucgggaugaagucccugaagcuggccgucggccuccggaacgugcccagccgcuccagccggggccuguucggggccaucgccggcuucaucgagggcgggugguccgggcugguggccggcugguacggcuuccagcacagcaacgaccagggggucggcauggcggccgaccgcgacuccacccagaaggccaucgacaagaucacgagcaaggugaacaacaucguggacaagaugaacaagcaguacgagaucaucgaccacgaguucuccgaggucgagacccggcucaacaugaucaacaacaagaucgacgaccagauccaggacaucugggccuacaacgccgagcugcuggugcuccuggagaaccagaagacccuggacgagcacgacgcgaacgugaacaaccucuacaacaaggucaagcgcgcccuggggagcaacgccguggaggacggcaaggggugcuucgagcuguaccacaagugcgacgaccagugcauggagaccauccggaacggcacguacaaccgccgcaaguaccaggaggaguccaagcucgagcggcagaagaucgagggcgucaagcuggagagcgaggggaccuacaagauccugaccaucuacuccaccguggccagcucccucgugaucgccaugggcuucgcggccuuccuguucugggccaugagcaacgggagcugccgcugcaacaucugcaucuga

SEQ ID NO: 74337 - RNA, 1683 nt, Artificial Sequence; identical to SEQ ID NO: 74336
  derived and/or modified CDS sequence (opt1) from hemagglutinin__InfluenzaA__AGQ81171

SEQ ID NO: 74338 - RNA, 1683 nt, Artificial Sequence; identical to SEQ ID NO: 74336
  derived and/or modified CDS sequence (opt1) from hemagglutinin__InfluenzaA__AGQ81172

SEQ ID NO: 74339 - RNA, 1683 nt, Artificial Sequence
  derived and/or modified CDS sequence (opt1) from hemagglutinin__InfluenzaA__AGQ81173
auggagaccgccagccugaucaccauccuccugguggucacgguguccaacgccgacaagaucugcaucggcuaccagagcaccaacuccaccgagaccguggacacgcugaccgagaacaacguccccgugacccacgcgaaggagcuccugcacaccgagcacaacgggaugcugugcgccacgagccucggcaacccgcugauccuggacacgugcaccaucgaggggcucaucuacggcaaccccuccugcgaccugcugcucgggggccgcgaguggagcuacaucguggagcggcccuccgccgucaacggccugugcuaccccgggaacguggagaaccuggaggagcuccgcagccuguucuccagcgcccgguccuaccagcgcauccagaucuucccggacaccaucuggaacgugagcuacuccggcaccagcaaggccugcuccgacagcuucuaccgguccaugcgcuggcugacccagaaggacaacgcguaccccauccaggacgcccaguacaccaacaaccaggggaagaacauccucuucauguggggcaucaaccacccgcccaccgacacggcccagaccaaccuguacacccggaccgacacgaccaccagcgucgccaccgaggagaucaaccgcacguucaagccccugaucgggccccggccccucgugaacggccugaugggccgcaucaacuacuacugguccgugcugaagcccgggcagacccuccggaucaagagcaacggcaaccugaucgcgccgugguacgggcacauccugagcggcgagucccacggccgcauccucaagaccgaccugaagcgggggagcugcaccguccagugccagacggagaagggcgggcugaacaccacccuccccuuccagaacguguccaaguacgccuucggcaacugcagcaaguacaucgggaugaagucccugaagcuggccgugggccuccgcaacguccccagccgguccagccgcggccuguucggggccaucgccggcuucaucgagggcgggugguccgggcugguggcgggcugguacggcuuccagcacagcaacgaccagggggugggcauggccgccgaccgggacuccacccagaaggccaucgacaagaucacgagcaaggucaacaacaucguggacaagaugaacaagcaguacgagaucaucgaccacgaguucuccgagguggagacccgccucaacaugaucaacaacaagaucgacgaccagauccaggacaucugggccuacaacgcggagcugcugguccuccuggagaaccagaagacccuggacgagcacgacgccaacgugaacaaccucuacaacaaggugaagcgggcccuggggagcaacgccgucgaggacggcaaggggugcuucgagcuguaccacaagugcgacgaccagugcauggagaccauccgcaacggcacguacaaccggcgcaaguaccaggaggaguccaagcucgagcgccagaagaucgagggcgugaagcuggagagcgaggggaccuacaagauccugaccaucuacuccaccgucgccagcucccucgugaucgcgaugggcuucgccgccuuccuguucugggccaugagcaacgggagcugccggugcaacaucugcaucuga

SEQ ID NO: 74340 - RNA, 1683 nt, Artificial Sequence; identical to SEQ ID NO: 74336
  derived and/or modified CDS sequence (opt1) from hemagglutinin__InfluenzaA__AGQ81175

SEQ ID NO: 74341 - RNA, 1683 nt, Artificial Sequence
  derived and/or modified CDS sequence (opt1) from hemagglutinin__InfluenzaA__AGQ81177
auggagaccgugagccugaucaccauccuccuggucgccacgguguccaacgccgacaagaucugcaucggcuaccagagcaccaacuccaccgagaccguggacacgcugaccgagaacaacguccccgugacccacgcgaaggagcuccugcacaccgagcacaacgggaugcugugcgccacgagccucggccagccgcugauccuggacacgugcaccaucgaggggcucaucuacggcaaccccuccugcgaccugcugcucgaggggcgcgaguggagcuacaucguggagcggcccuccgccgucaacggccugugcuaccccggcaacguggagaaccuggaggagcuccgcagccuguucuccagcgcccgguccuaccagcgcauccagaucuucccggacaccaucuggaacgugagcuacaacgggaccuccaaggccugcagcggcuccuucuaccggagcaugcgcuggcugacccggaagaacggggacuaccccauccaggacgcgcaguacaccaacaaccagggcaagaacauccucuucaugugggggaucaaccacccgcccaccgacacgacccagcgcgaccuguacacccggaccgacacgaccaccuccgucgccaccgaggagaucaaccgcaucuucaagccccugaucggcccccggccccucgugaacggccugauggggcgcaucgacuacuacuggagcgugcugaagcccggccagacgcuccggaucaaguccgacgggaaccugaucgccccgugguacggccacauccugagcggcgagagccacgggcgcauccucaagaccgaccugaagcggggcuccugcaccguccagugccagaccgagaagggcgggcugaacacgacccuccccuuccagaacgugagcaaguacgccuucgggaacugcuccaaguacaucggcaucaagagccugaagcuggcggugggccuccgcaacguccccucccggagcucccgcgggcuguucggcgccaucgccggguucaucgagggcggguggagcggccugguggccggcugguacggguuccagcacuccaacgaccagggcguggggauggccgcggaccgggacagcacccagaaggccaucgacaagaucaccuccaaggucaacaacaucguggacaagaugaacaagcaguacgagaucaucgaccacgaguucagcgagguggagacgcgccucaacaugaucaacaacaagaucgacgaccagauccaggacaucugggccuacaacgccgagcugcugguccuccuggagaaccagaagacccuggacgagcacgacgccaacgugaacaaccucuacaacaaggugaagcgggcgcugggcuccaacgccgucgaggacgggaagggcugcuucgagcuguaccacaagugcgacgaccagugcauggagaccauccgcaacggcaccuacaaccgccggaaguaccaggaggagagcaagcucgagcgccagaagaucgagggggugaagcuggaguccgagggcacguacaagauccugaccaucuacagcaccgucgccuccagccucgugaucgccaugggguucgccgcguuccuguucugggccauguccaacggcagcugccggugcaacaucugcaucuga

SEQ ID NO: 74342 - RNA, 1683 nt, Artificial Sequence; identical to SEQ ID NO: 74341
  derived and/or modified CDS sequence (opt1) from hemagglutinin__InfluenzaA__AGQ81178

SEQ ID NO: 74343 - RNA, 1683 nt, Artificial Sequence; identical to SEQ ID NO: 74333
  derived and/or modified CDS sequence (opt1) from hemagglutinin__InfluenzaA__AGQ81181

SEQ ID NO: 74344 - RNA, 1683 nt, Artificial Sequence; identical to SEQ ID NO: 74333
  derived and/or modified CDS sequence (opt1) from hemagglutinin__InfluenzaA__AGQ81183

SEQ ID NO: 74345 - RNA, 1683 nt, Artificial Sequence; identical to SEQ ID NO: 74332
  derived and/or modified CDS sequence (opt1) from hemagglutinin__InfluenzaA__AGQ81184

SEQ ID NO: 74346 - RNA, 1683 nt, Artificial Sequence
  derived and/or modified CDS sequence (opt1) from hemagglutinin__InfluenzaA__AGQ81185
auggagaccgccagccugaucaccauccuccugguggccacggucuccaacgcggacaagaucugcaucggcuaccagagcaccaacuccaccgagaccguggacacgcugaccgagaacaacgugcccgucacccacgccaaggagcuccugcacaccgagcacaacgggaugcugugcgccacgagccucggccagccgcugauccuggacacgugcaccaucgaggggcucaucuacggcaaccccuccugcgaccugcugcucgaggggcgcgaguggagcuacaucguggagcggcccuccgccgugaacggccugugcuaccccggcaacgucgagaaccuggaggagcuccgcagccuguucuccagcgcccgguccuaccagcgcauccagaucuucccggacaccaccuggaacgugagcuacaacgggaccuccaaggcgugcagcggcuccuucuaccggagcaugcgcuggcugacccagaagaacuccaacuaccccauccaggacgcccaguacaccaacaaccaggggaagaacauccucuucauguggggcaucaaccacccgcccacggacaccacccagcgggaccuguacacccgcacggacaccaccaccagcguggccacggaggagaucaaccggaucuucaagccccugaucgggccccgcccccucgucaacggccugaugggccggaucgacuacuacugguccgugcugaagcccgggcagacccuccgcaucaagagcgacggcaaccugaucgccccgugguacgggcacauccugagcggcgagucccacggccggauccucaagaccgaccugaagcgcgggagcugcaccgugcagugccagacggagaagggcgggcugaacaccacccuccccuuccagaacgucuccaaguacgcguucggcaacugcagcaaguacaucgggaucaagucccugaagcuggccgugggccuccggaacgugcccagccgcuccagccggggccuguucggggccaucgccggcuucaucgagggcgggugguccgggcuggucgccggcugguacggcuuccagcacagcaacgaccagggggugggcauggcggccgaccgcgacuccacccagaaggccaucgacaagaucacgagcaaggugaacaacaucgucgacaagaugaacaagcaguacgagaucaucgaccacgaguucuccgagguggagacccggcucaacaugaucaacaacaagaucgacgaccagauccaggacaucugggccuacaacgccgagcugcuggugcuccuggagaaccagaagacccuggacgagcacgacgcgaacgucaacaaccucuacaacaaggugaagcgcgcccuggggagcaacgccguggaggacggcaaggggugcuucgagcuguaccacaagugcgacaaccagugcauggagaccauccggaacggcacguacaaccgccgcaaguaccaggaggaguccaagcucgagcggcagaagaucgagggcgucaagcuggagagcgaggggaccuacaagauccugaccaucuacuccaccguggccagcucccucgucaucgccaugggcuucgcggccuuccuguucugggccaugagcaacgggagcugccgcugcaacaucugcaucuga

SEQ ID NO: 74347 - RNA, 1683 nt, Artificial Sequence
  derived and/or modified CDS sequence (opt1) from hemagglutinin__InfluenzaA__AGQ81186
auggagaccgugagccugaucaccauccuccuggucgccacgguguccaacgccgacaagaucugcaucggcuaccagagcaccaacuccaccgagaccguggacacgcugaccgagaacaacguccccgugacccacgcgaaggagcuccugcacaccgagcacaacgggaugcugugcgccacgagccucggccagccgcugauccuggacacgugcaccaucgaggggcucaucuacggcaaccccuccugcgaccugcugcucgaggggcgcgaguggagcuacaucguggagcggcccuccgccgucaacggccugugcuaccccggcaacguggagaaccuggaggagcuccgcagccuguucuccagcgcccgguccuaccagcgcauccagaucuucccggacaccaucuggaacgugagcuacgacgggaccuccaaggccugcagcggcuccuucuaccggagcaugcgcuggcugacccagaagaacuccgacuaccccauccaggacgcgcaguacaccaacaaccaggggaagaacauccucuucauguggggcaucaaccacccgcccaccgacacgacccagcgggaccuguacacccgcaccgacacgaccaccagcgucgccaccgaggagaucaaccggaucuucaagccccugaucgggccccgcccccucgugaacggccugaugggccggaucgacuacuacugguccgugcugaagcccgggcagacgcuccgcaucaagagcgacggcaaccugaucgccccgugguacgggcacauccugagcggcgagucccacggccggauccucaagaccgaccugaagaaggggagcugcaccguccagugccagaccgagaagggcgggcugaacacgacccuccccuuccagaacguguccaaguacgccuucggcaacugcagcaaguacaucgggaucaagucccugaagcuggcgaucggccuccgcaacgugcccagccgguccagccgcggccuguucggggccaucgccggcuucaucgagggcgggugguccgggcuggucgccggcugguacggcuuccagcacagcaacgaccagggggugggcauggccgcggaccgggacuccacccagaaggccaucgacaagaucaccagcaaggugaacaacaucgucgacaagaugaacaagcaguacgagaucaucgaccacgaguucuccgagguggagacgcgccucaacaugaucaacaacaagaucgacgaccagauccaggacaucugggccuacaacgccgagcugcuggugcuccuggagaaccagaagacccuggacgagcacgacgccaacgucaacaaccucuacaacaaggugaagcgggcgcuggggagcaacgccguggaggacggcaaggggugcuucgagcuguaccacaagugcgacgaccagugcauggagaccauccgcaacggcaccuacaaccggaagaaguaccaggaggaguccaagcucgagcgccagaagaucgagggcgucaagcuggagagcgaggggacguacaagauccugaccaucuacuccaccguggccagcucccucgucaucgccaugggcuucgccgcguuccuguucugggccaugagcaacgggagcugccgcugcaacaucugcaucuga

SEQ ID NO: 74348 - RNA, 1683 nt, Artificial Sequence; identical to SEQ ID NO: 74336
  derived and/or modified CDS sequence (opt1) from hemagglutinin__InfluenzaA__AGQ81190

SEQ ID NO: 74349 - RNA, 1683 nt, Artificial Sequence; identical to SEQ ID NO: 74336
  derived and/or modified CDS sequence (opt1) from hemagglutinin__InfluenzaA__AGQ81191

SEQ ID NO: 74350 - RNA, 1683 nt, Artificial Sequence; identical to SEQ ID NO: 74341
  derived and/or modified CDS sequence (opt1) from hemagglutinin__InfluenzaA__AGQ81192

SEQ ID NO: 74351 - RNA, 1683 nt, Artificial Sequence
  derived and/or modified CDS sequence (opt1) from hemagglutinin__InfluenzaA__AGQ81193
auggagaccgugagccugaucaccauccuccuggucgccacgguguccaacgccgacaagaucugcaucggcuaccagagcaccaacuccaccgagaccguggacacgcugaccgagaacaacguccccgugacccacgcgaaggagcuccugcacaccgagcacaacgggaugcugugcgccacgagccucggccagccgcugauccuggacacgugcaccaucgaggggcucaucuacggcaaccccuccugcgaccugcugcucgaggggcgcgaguggagcuacaucguggagcggcccuccgccgucaacggccugugcuaccccggcaacguggagaaccuggaggagcuccgcagccuguucuccagcgcccgguccuaccagcgcauccagaucuucccggacaccaucuggaacgugagcuacaccgggaccuccaaggccugcagcggcuccuucuaccggagcaugcgcuggcugacccagaagaacggggacuaccccauccaggacgcgcaguacaccaacaaccagggcaagaacauccucuucaugugggggaucaaccacccgcccacggacaccacccagcgggaccuguacacccgcacggacaccaccaccuccgucgccacggaggagaucaaccggaucuucaagccccugaucggcccccgcccccucgugaacggccugauggggcggaucgacuacuacuggagcgugcugaagcccggccagacccuccgcaucaaguccgacgggaaccugaucgccccgugguacggccacguccugagcggcgagagccacgggcggauccucaagaccgaccugaagcgcggcuccugcaccgugcagugccagacggagaagggcgggcugaacaccacccuccccuuccagaacgugagcaaguacgccuucgggaacugcuccaaguacaucggcaucaagagccugaagcuggcggucggccuccggaacgugcccucccgcagcucccgggggcuguucggcgccaucgccggguucaucgagggcggguggagcggccugguggccggcugguacggguuccagcacuccaacgaccagggcgucgggauggccgcggaccgcgacagcacccagaaggccaucgacaagaucacguccaaggugaacaacaucguggacaagaugaacaagcaguacgagaucaucgaccacgaguucagcgaggucgagacccggcucaacaugaucaacaacaagaucgacgaccagauccaggacaucugggccuacaacgccgagcugcuggugcuccuggagaaccagaagacccuggacgagcacgacgccaacgugaacaaccucuacaacaaggucaagcgcgcgcugggcuccaacgccguggaggacgggaagggcugcuucgagcuguaccacaagugcgacgaccagugcauggagaccauccggaacggcacguacaaccgccgcaaguaccaggaggagagcaagcucgagcggcagaagaucgagggggucaagcuggaguccgagggcaccuacaagauccugaccaucuacagcaccguggccuccagccucgugaucgccaugggguucgccgcguuccuguucugggccauguccaacggcagcugccgcugcaacaucugcaucuga

SEQ ID NO: 74352 - RNA, 1683 nt, Artificial Sequence; identical to SEQ ID NO: 74336
  derived and/or modified CDS sequence (opt1) from hemagglutinin__InfluenzaA__AGQ81194

SEQ ID NO: 74353 - RNA, 1686 nt, Artificial Sequence
  derived and/or modified CDS sequence (opt1) from hemagglutinin__InfluenzaA__AGQ81195
auguacaagaucguggucaucaucacccugcucggcaccgugaaggggcuggacaagaucugccugggccaccacgccguggccaacgggacgaucgucaagacccucaccaacgagcaggaggaggugaccaacgcgacggagaccguggagggcaagagccugaaccgccugugcaugaaggggcggaaccacaaggaccucggcaacugccaccccaucggcaugcugaucgggaccccggccugcgaccugcaccucaccggcacgugggacacccugaucgagcgcgagaacgccaucgccuacugcuaccccggggccaccaucaacgaggaggcgcugcggcagaagaucauggaguccggcgggaucagcaagaucuccaccggcuucacguacggcagcuccaucaacagcgccgggaccacccgcgccugcaugcggaacggcgggaacuccuucuacgccgagcucaaguggcuggucagcaaguccaagggccagaacuucccccagaccacgaacaccuaccgcaacaccgacaccagcgagcaccugaucauguggggcauccaccaccccuccagcacgcaggagaagaacgaccucuacgggacccagucccugagcaucuccgugggcagcuccaccuaccagaacaacuucgugccggucgugggggcgcggccccaggugaacggccagagcgggcgcaucgacuuccacuggacccugguccagcccggcgacaacaucacguucucccacaacggcgggcucaucgcccccagccgggugagcaagcugaucggccgcgggcugggcauccaguccgacgccagcaucgacaacaacugcgaguccaagugcuucuggcgcgggggcagcaucaacacccggcucccguuccagaaccugagcccccggaccgugggccagugccccaaguacgucaacaagcgcucccugaugcucgccaccgggaugcggaacgugcccgagaucaugcagggccgcgggcuguucggcgccaucgcgggguucaucgagaacggcugggagggcaugguggacgggugguacggcuuccggcaccagaacgcccaggggacgggccaggccgccgacuacaaguccacccaggccgcgaucgaccagaucaccggcaagcugaaccgccucaucgagaagaccaacacggaguucgagagcaucgaguccgaguucagcgagaucgagcaccagaucgggaacgucaucaacuggaccaaggacuccaucaccgacaucuggaccuaccaggccgagcugcugguggccauggagaaccagcacacgaucgacauggccgacagcgagaugcucaaccuguacgagcgggugcgcaagcagcugcggcagaacgccgaggaggacggcaaggggugcuucgagaucuaccacgcgugcgacgacuccugcauggagagcauccgcaacaacaccuacgaccacucccaguaccgcgaggaggcccuccugaaccggcugaacaucaacccggucacccucagcuccggcuacaaggacaucauccugugguucagcuucggggccuccugcuucgugcugcucgccguggucaugggccugguguucuucugccugaagaacggcaacaugcgcugcaccaucugcaucuga

SEQ ID NO: 74354 - RNA, 1686 nt, Artificial Sequence
  derived and/or modified CDS sequence (opt1) from hemagglutinin__InfluenzaA__AGQ81196
auguacaagaucguggucaucaucgcccugcucggcgccgugaaggggcuggacaagaucugccugggccaccacgcgguggccaacgggaccaucgucaagacccucacgaacgagcaggaggaggugaccaacgccaccgagaccguggagagcgccucccugaaccgccugugcaugaagggccggagccacaaggaccucgggaacugccaccccaucggcaugcugaucggcacgccggccugcgaccugcaccucaccgggaccugggacacccugaucgagcgcgagaacgcgaucgccuacugcuaccccggcgccacggucaacgaggaggcccugcggcagaagaucauggaguccgggggcaucagcaagaucuccaccggguucaccuacggcagcuccaucaacagcgcgggcaccacgaaggccugcaugcgcaaccgggggaacuccuucuacgccgagcucaaguggcuggugagcaaguccaagggccagaacuucccccagaccaccaacaccuaccgcaacacggacaccgccgagcaccugaucaugugggggauccaccaccccagcuccacccaggagaagaacgaccucuacggcacccagagccuguccaucagcgugggcuccagcacguaccagaacaacuucgucccgguggugggggcccggccccaggucaacggccaguccgggcgcaucgacuuccacuggacccuggugcagcccggcgacaacaucaccuucagccacaacgggggccucaucgcgcccagccggguguccaagcuggucggccgcgggcugggcauccagagcgacgccccgaucgacaacaacugcgaguccaagugcuucuggcgcgggggcagcaucaacacccggcuccccuuccagaaccugagcccccggacgguggggcagugccccaaguacgugaacaagcgcucccugaugcucgccaccggcaugcggaacgucccggagaucaugcagggccgcgggcuguucggcgccaucgccggguucaucgagaacggcugggaggggaugguggacggcugguacggcuuccggcaccagaacgcgcaggggaccggccaggccgccgacuacaaguccacccagacggccaucgaccagaucaccgggaagcugaaccgccucaucgagaagaccaacaccgaguucgagagcaucgaguccgaguucagcgagaucgagcaccagaucggcaacgugaucaacuggacgaaggacuccaucaccgacaucuggaccuaccaggccgagcugcuggucgcgauggagaaccagcacaccaucgacauggccgacagcgagaugcucaaccuguacgagcgggugcgcaagcagcugcggcagaacgccgaggaggacggcaaggggugcuucgagaucuaccacgccugcgacgacuccugcauggagagcauccgcaacaacacguacgaccacucccaguaccgcgaggaggcccuccugaaccggcugaacaucaaccccgugaagcucagcuccggcuacaaggacaucauccugugguucagcuucggggcguccugcuucguccugcucgccguggucaugggccugguguucuucugccugaagaacgggaacaugcgcugcaccaucugcaucuga

SEQ ID NO: 74355 - RNA, 1686 nt, Artificial Sequence
  derived and/or modified CDS sequence (opt1) from hemagglutinin__InfluenzaA__AGQ81198
auguacaagaucguggucaucaucgcccugcucggcgccgugaaggggcuggacaagaucugccugggccaccacgcgguggccaacgggaccaucgucaagacccucacgaacgagcaggaggaggugaccaacgccaccgagaccguggagagcacgucccugaaccgccugugcaugaagggccggaaccacaaggaccucgggaacugccaccccaucggcaugcugaucggcaccccggccugcgaccugcaccucaccgggaccugggacacgcugaucgagcgcgagaacgccaucgcguacugcuaccccggcgccaccaucaacgaggaggcccugcggcagaagaucauggagagcgggggcaucuccaagaucagcaccggguucaccuacggcuccagcaucaacuccgccggcaacacgaaggcgugcaugcgcaacgggggcaacagcuucuacgccgagcuccgguggcuggucuccaagaacaaggggcagaacuucccccagaccaccaacaccuaccgcaacacggacaccgccgagcaccugaucaucuggggcauccaccaccccagcuccaccaaggagaagaacgaccucuacggcacccagagccuguccaucagcgugggguccagcacguaccagaacaacuucgugccggucgugggcgcccggccccaggugaacgggcaguccggccgcaucgacuuccacuggacccugguccagcccggggacaacaucaccuucagccacaacggcggccucaucgcccccucccgggugagcaagcugaucgggcgcggccuggggauccagagcgacgcgccgaucgacaacaacugcgaguccaagugcuucuggcggggcgggagcaucaacacccgccuccccuuccagaaccugagcccccggacggugggccagugccccaaguacgucaacaagaagucccugaugcucgccaccggcaugcgcaacgugccggagaucaugcaggggcggggccuguucggggccaucgccggcuucaucgagaacgggugggagggcaugguggacggcugguacggguuccgccaccagaacgcccagggcaccgggcaggcggccgacuacaaguccacccaggccgccaucgaccagaucacgggcaagcugaaccggcucaucgagaagaccaacaccgaguucgagagcaucgaguccgaguucagcgagaucgagcaccagaucggcaacgucaucaacuggaccaaggacuccaucacggacaucuggaccuaccaggccgagcugcugguggcgauggagaaccagcacaccaucgacauggccgacagcgagaugcucaaccuguacgagcgcgugcggaagcagcugcgccagaacgccgaggaggacgggaagggcugcuucgagaucuaccacgccugcgacgacuccugcauggagagcauccggaacaacaccuacgaccacucccaguaccgcgaggaggcccuccugaaccgccugaacaucaaccccgucacgcucagcuccggguacaaggacaucauccugugguucagcuucggcgcguccugcuucgugcugcucgccguggucauggggcugguguucuucugccugaagaacggcaacaugcggugcaccaucugcaucuga

SEQ ID NO: 74356 - RNA, 1686 nt, Artificial Sequence
  derived and/or modified CDS sequence (opt1) from hemagglutinin__InfluenzaA__AGQ81199
auguacaagaucguggucaucaucgcccugcucggcgccgugaaggggcuggacaagaucugccugggccaccacgcgguggccaacgggaccaucgucaagacccucacgaacgagcaggaggaggugaccaacgccaccgagaccguggagagcgccucccugaaccgccugugcaugaagggccggagccacaaggaccucgggaacugccaccccaucggcaugcugaucggcacgccggccugcgaccugcaccucaccgggaccugggacacccugaucgagcgcgagaacgcgaucgccuacugcuaccccggcgccacggucaacgaggaggcccugcggcagaagaucauggaguccgggggcaucagcaagaucuccaccggguucaccuacggcagcuccaucaacagcgcgggcaccacgaaggccugcaugcgcaacgggggcaacuccuucuacgccgagcucaaguggcuggugagcaaguccaaggggcagaacuucccccagaccaccaacaccuaccggaacacggacaccgccgagcaccugaucauguggggcauccaccaccccagcuccacccaggagaagaacgaccucuacggcacccagagccuguccaucagcgugggguccagcacguaccagaacaacuucgucccgguggugggcgcccgcccccaggucaacgggcaguccggccggaucgacuuccacuggacccuggugcagcccggggacaacaucaccuucagccacaacggcggccucaucgcgcccagccgcguguccaagcuggucgggcggggccuggggauccagagcgacgccccgaucgacaacaacugcgaguccaagugcuucuggcgcggcgggagcaucaacacccggcuccccuuccagaaccugagcccccgcacggugggccagugccccaaguacgugaacaagcggucccugaugcucgccaccggcaugcgcaacgucccggagaucaugcaggggcggggccuguucggggccaucgccggcuucaucgagaacgggugggagggcaugguggacggcugguacggguuccgccaccagaacgcgcagggcaccgggcaggccgccgacuacaaguccacccagacggccaucgaccagaucaccggcaagcugaaccggcucaucgagaagaccaacaccgaguucgagagcaucgaguccgaguucagcgagaucgagcaccagaucggcaacgugaucaacuggacgaaggacuccaucaccgacaucuggaccuaccaggccgagcugcuggucgcgauggagaaccagcacaccaucgacauggccgacagcgagaugcucaaccuguacgagcgcgugcggaagcagcugcgccagaacgccgaggaggacgggaagggcugcuucgagaucuaccacgccugcgacgacuccugcauggagagcauccggaacaacacguacgaccacucccaguaccgcgaggaggcccuccugaaccgccugaacaucaaccccgugaagcucagcuccggguacaaggacaucauccugugguucagcuucggcgcguccugcuucguccugcucgccguggucauggggcugguguucuucugccugaagaacggcaacaugcggugcaccaucugcaucuga

SEQ ID NO: 74357 - RNA, 1698 nt, Artificial Sequence
  derived and/or modified CDS sequence (opt1) from hemagglutinin__InfluenzaA__AGQ81200
augaagaagacccuccuguucgccgccaucuuccuguacgugaaggcggacgagaucugcaucggcuaccugagcaacaacuccaccgacaaggucgacacgaucaucgagaacaacgugaccgugaccagcuccgucgagcucguggagaccgagcacacggggagcuucugcuccaucaacggcaagcagcccaucgggcugggcgacugcagcuucgccggguggauccugggcaacccgaugugcgacgaccucaucggcaagaccuccuggagcuacaucguggagaagcccaaccccgccaacgggaucugcuaccccggcacccuggagaacgaggaggagcugcgccucaaguucuccgggguccuggaguucagcaaguucgaggccuucaccuccacgggcuggggcgccgugaacagcggggcgggcgugaccgccgccugcaaguucggguccagcaacuccuucuuccggaacauggucuggcugauccaccagagcggcaccuacccggugaucaagcgcaccuucaacaacacgaaggggcgggacgugcucgucguguggggcauccaccaccccgccacccugaaggagcaccaggaccuguacaagaaggacuccagcuacguggcggucggcuccgagaccuacaaccgccgguucauccccgagaucagcacccgccccaaggugaacgggcaggccggccggaugacguucuacuggaccaucgugaagccgggggagagcaucaccuucgaguccaacggcgccuuccucgcgccccgcuacgccuucgagaucgucagcguggggaacggcaagcuguuccgguccgagcugaacaucgagagcugcuccaccaagugccagacggagaucggcgggaucaacaccaacaagagcuuccacuccgugcaccgcaacaccaucggcgacugccccaaguacgucaacgucaagagccucaagcuggccaccgggcugcggaacgugcccgccaucgccucccgcggccucuucggggccaucgccggcuucaucgagggcggguggccgggccugaucaacgggugguacggcuuccagcaccggaacgaggaggggacgggcaucgcggccgacaaggagagcacccagaaggccaucgaccagaucaccuccaaggugaacaacaucguggacaagaugaacaccaacuucgagagcguccagcacgaguucuccgagaucgaggagcgcaucaaccagcugagcaagcacguggacgacuccguggucgacaucuggagcuacaacgcccagcuccuggugcugcucgagaacgagaagacgcuggaccugcacgacuccaacgugcggaaccuccacgagaagguccgccggaugcugaaggacaacgccaaggacgagggcaacgggugcuucaccuucuaccacaagugcgacaacgagugcaucgagcgcgugcggaacggcaccuacgaccacaaggaguucgaggaggagagcaagaucaaccgccaggagaucgagggggugaagcuggacuccagcggcaacgucuacaagauccucagcaucuacuccugcaucgcgagcucccuggugcuggccgcccucaucaugggcuucauccugugggccugcagcaacggguccugccggugcaccaucugcaucuga

SEQ ID NO: 74358 - RNA, 1698 nt, Artificial Sequence
  derived and/or modified CDS sequence (opt1) from hemagglutinin__InfluenzaA__AGQ81202
augaagaagacccuccucuucgccgccaucuuccuguacgugaaggcggacgagaucugcaucggcuaccugagcaacaacuccaccgacaaggucgacacgaucaucgagaacaacgugaccgugaccagcuccgucgagcucguggagaccgagcacacggggagcuucugcuccaucaacggcaagcagcccaucagccugggggacugcuccuucgccggcuggauccuggggaacccgaugugcgacgaccucaucggcaagaccagcugguccuacaucguggagaagcccaaccccgccaacggcaucugcuaccccgggacccuggagaacgaggaggagcugcgccucaaguucagcggcguccuggaguucuccaaguucgaggccuucaccagcaacggguggggcgccgugaacuccggggcgggcgugacggccgccugcaaguucggcagcuccaacagcuucuuccggaacaccgucuggcugauccaccaguccgggaccuacccggugaucaagcgcaccuucaacaacacgaagggccgggacgugcucgucguguggggcgugcaccaccccgccacccugaaggagcaccaggaccuguacaagaaggacagcuccuacgucgcgguggggagcgagaccuacaaccgccgguucauccccgagaucagcacccgccccaaggugaacggccaggccgggcggaugacguucuacuggaccaucgucaagccgggcgaguccaucaccuucgagagcaacggggccuuccucgcgccccgcuacgccuucgagaucguguccgugggcaacgggaagcuguuccggagcgagcugaacaucgaguccugcagcaccaagugccagacggagaucggcggcaucaacaccaacaaguccuuccacagcguccaccgcaacaccaucggggacugccccaaguacgugaacgugaagucccucaagcuggccaccggccugcggaacguccccgccaucgccagccgcgggcuguucggcgccaucgccggguucaucgagggcggcuggccggggcugaucaacggcugguacggguuccagcaccggaacgaggagggcacggggaucgcggccgacaaggaguccacccagaaggccaucgaccagaucaccagcaaggugaacaacaucgucgaccgcaugaacaccaacuucgaguccgugcagcacgagagcuccgagaucgaggagcggaucaaccagcugagcaagcacguggacgacuccauggucgacaucuggagcuacaacgcccagcuccuggugcugcucgagaacgagaagacgcuggaccugcacgacuccaacgugcgcaaccuccacgagaagguccggcgcaugcugaaggacaacgccaaggacgagggcaacggcugcuucaccuucuaccacaagugcgacaacaagugcaucgagcgggugcgcaacgggaccuacgaccacaaggaguucgaggaggagagcaagaucaaccggcaggagaucgagggcgugaagcuggacagcuccgggaacgucuacaagauccucagcaucuacuccugcaucgcgagcucccuggugcuggccgcccucaucaugggcuucauccugugggccugcagcaacggcuccugccgcugcaccaucugcaucuga

SEQ ID NO: 74359 - RNA, 1698 nt, Artificial Sequence
  derived and/or modified CDS sequence (opt1) from hemagglutinin__InfluenzaA__AGQ81203
augaagaagacccuccucuucgccgccaucuuccuguacgugaaggcggacgagaucugcaucggcuaccugagcaacaacuccaccgacaaggucgacacgaucaucgagaacaacgugaccgugaccagcuccgucgagcucguggagaccgagcacacggggagcuucugcuccaucaacggcaagcagcccaucagccugggggacugcuccuucgccggcuggauccuggggaacccgaugugcgacgaccucaucggcaagaccagcugguccuacaucguggagaagcccaaccccgccaacggcaucugcuaccccgggacccuggagaacgaggaggagcugcgccucaaguucagcggcguccuggaguucaacaaguucgaggccuucaccuccaacggguggggcgccgugaacagcggggcgggcgugacggccgccugcaaguucggcuccagcaacuccuucuuccggaacauggucuggcugauccaccagagcgggaccuacccggugaucaagcgcaccuucaacaacaccaagggccgggacgugcucgucgugugggggauccaccaccccgccacgcugaaggagcaccaggaccuguacaagaaggacuccagcuacguggcggucggcuccgagaccuacaaccgccgguucauccccgagaucagcacccgccccaaggugaacggccaggccgggcggaugaccuucuacuggacgaucgugaagccgggcgagagcaucaccuucgaguccaacggggccuuccucgcgccccgcuacgccuucgagaucgucagcgugggcaacgggaagcuguuccgguccgagcugaacaucgagagcugcuccaccaagugccagaccgagaucggcggcaucaacacgaacaagagcuuccacuccgugcaccgcaacaccaucggggacugccccaaguacgucaacgucaagagccucaagcuggccaccggccugcggaacgugcccgccaucgccucccgcgggcuguucggcgccaucgccggguucaucgagggcggcuggccggggcugaucaacggcugguacggguuccagcaccggaacgaggagggcaccgggaucgcggccgacaaggagagcacgcagaaggccaucgaccagaucaccuccaaggugaacaacaucguggaccgcaugaacaccaacuucgagagcguccagcacgaguucuccgagaucgaggagcggaucaaccagcugagcaagcacguggacgacuccguggucgacaucuggagcuacaacgcccagcuccuggugcugcucgagaacgagaagacccuggaccugcacgacuccaacgugcgcaaccuccacgagaagguccggcgcaugcugaaggacaacgccaaggacgagggcaacggcugcuucacguucuaccacaagugcgacaacgagugcaucgagcgggugcgcaacgggaccuacgaccacaaggaguucgaggaggagagcaagaucaaccggcaggagaucgagggcgugaagcuggacuccagcgggaacgucuacaagauccucagcaucuacuccugcaucgcgagcucccuggugcuggccgcccucaucaugggcuucauccugugggccugcagcaacggcuccugccgcugcaccaucugcaucuga

SEQ ID NO: 74360 - RNA, 1698 nt, Artificial Sequence
  derived and/or modified CDS sequence (opt1) from hemagglutinin__InfluenzaA__AGQ81204
augaagaagacccuccucuucgccgccaucuuccuguacgugaaggcggacgagaucugcaucggcuaccugagcaacaacuccaccgacaaggucgacacgaucaucgagaacaacgugaccgugaccagcuccgucgagcucguggagaccgagcacacggggagcuucugcuccaucaacggcaagcagcccaucagccugggggacugcuccuucgccggcuggauccuggggaacccgaugugcgacgaccucaucggcaagaccagcugguccuacaucguggagaagcccaaccccgccaacggcaucugcuaccccgggacccuggagaacgaggaggagcugcgccucaaguucagcggcguccuggaguucaacaaguucgaggccuucaccuccaacggguggggcgccgugaacagcggggcgggcgugacggccgccugcaaguucggcuccagcaacuccuucuuccggaacauggucuggcugauccaccagagcgggaccuacccggugaucaagcgcaccuucaacaacaccaagggccgggacgugcucgucgugugggggauccaccaccccgccacgcugaaggagcaccaggaccuguacaagaaggacuccagcuacguggcggucggcuccgagaccuacaaccgccgguucauccccgagaucagcacccgccccaaggugaacggccaggccgggcggaugaccuucuacuggacgaucgugaagccgggcgagagcaucaccuucgaguccaacggggccuuccucgcgccccgcuacgccuucgagaucgucagcgugggcaacgggaagcuguuccgguccgagcugaacaucgagagcugcuccaccaagugccagaccgagaucggcggcaucaacacgaacaagagcuuccacuccgugcaccgcaacaccaucggggacugccccaaguacgucaacgucaagagccucaagcuggccaccggccugcggaacgugcccgccaucgccucccgcgggcuguucggcgccaucgccggguucaucgagggcggcuggccggggcugaucaacggcugguacggguuccagcaccggaacgaggagggcaccgggaucgcggccgacaaggagagcacgcagaaggccaucgaccagaucaccuccaaggugaacaacaucguggaccgcaugaacaccaacuucggcagcguccagcacgaguucuccgagaucgaggagcggaucaaccagcugagcaagcacguggacgacuccguggucgacaucuggagcuacaacgcccagcuccuggugcugcucgagaacgagaagacccuggaccugcacgacuccaacgugcgcaaccuccacgagaagguccggcgcaugcugaaggacaacgccaaggacgagggcaacgggugcuucacguucuaccacaagugcgacaacgagugcaucgagcgggugcgcaacggcaccuacgaccacaaggaguucgaggaggagagcaagaucaaccggcaggagaucgagggggugaagcuggacuccagcggcaacgucuacaagauccucagcaucuacuccugcaucgcgagcucccuggugcuggccgcccucaucaugggcuucauccugugggccugcagcaacggguccugccgcugcaccaucugcaucuga

SEQ ID NO: 74361 - RNA, 1698 nt, Artificial Sequence
  derived and/or modified CDS sequence (opt1) from hemagglutinin__InfluenzaA__AGQ81205
augaagaagacccuccucuucgccgccaucuuccuguacgugaaggcggacgagaucugcaucggcuaccugagcaacaacuccaccgacaaggucgacacgaucaucgagaacaacgugaccgugaccagcuccgucgagcucguggagaccgagcacacggggagcuucugcuccaucaacggcaagcagcccaucagccugggggacugcuccuucgccggcuggauccuggggaacccgaugugcgacgaccucaucggcaagaccagcugguccuacaucguggagaagcccaaccccgccaacggcaucugcuaccccgggacccuggagaacgaggaggagcugcgccucaaguucagcggcguccuggaguucaacaaguucgaggccuucaccuccaacggguggggcgccgugaacagcggggcgggcgugacggcgaccugcaaguucggcuccagcaacuccuucuuccggaacauggucuggcugauccaccagagcgggaccuacccggugaucaagcgcaccuucaacaacacgaagggccgggacgugcucgucgugugggggauccaccaccccgccacccugaaggagcaccaggaccuguacaagaaggacuccagcuacguggccgucggcuccgagaccuacaaccgccgguucauccccgagaucagcacccgccccaaggugaacggccaggccgggcggaugacguucuacuggaccaucgugaagccgggcgagagcaucaccuucgaguccaacggggccuuccucgcgccccgcuacgccuucgagaucgucagcgugggcaacgggaagcuguuccgguccgagcugaacaucgagagcugcuccaccaagugccagacggagaucggcggcaucaacaccaacaagagcuuccacuccgugcaccgcaacaccaucggggacugccccaaguacgucaacgucaagagccucaagcuggccaccggccugcggaacgugcccgccaucgccucccgcgggcuguucggcgccaucgccggguucaucgagggcggcuggccggggcugaucaacggcugguacggguuccagcaccggaacgaggagggcacggggaucgccgcggacaaggagagcacccagaaggccaucgaccagaucaccuccaaggugaacaacaucguggaccgcaugaacaccaacuucgagagcguccaguacgaguucuccgagaucgaggagcggaucaaccagcugagcaagcacguggacgacuccguggucgacaucuggagcuacaacgcccagcuccuggugcugcucgagaacgagaagacgcuggaccugcacgacuccaacgugcgcaaccuccacgagaagguccggcgcaugcugaaggacaacgccaaggacgagggcaacggcugcuucaccuucuaccacaagugcgacaacgagugcaucgagcgggugcgcaacgggaccuacgaccacaaggaguucgaggaggagagcaagaucaaccggcaggagaucgagggcgugaagcuggacuccagcgggaacgucuacaagauccucagcaucuacuccugcaucgccagcucccuggugcuggcggcccucaucaugggcuucauccugugggccugcagcaacggcuccugccgcugcaccaucugcaucuga

SEQ ID NO: 74362 - RNA, 1698 nt, Artificial Sequence
  derived and/or modified CDS sequence (opt1) from hemagglutinin__InfluenzaA__AGQ81206
augaagaagacccuccucuucgccgccaucuuccuguacgcgaaggccgacgagaucugcaucggcuaccugagcaacaacuccaccgacaagguggacacgaucaucgagaacaacgucaccgugaccagcuccguggagcucgucgagaccgagcacacggggagcuucugcuccaucaacggcaagcagcccaucagccugggggacugcuccuucgccggcuggauccuggggaacccgaugugcgacgaccucaucggcaagaccagcugguccuacaucguggagaagcccaaccccgccaacggcaucugcuaccccgggacccuggagaacgaggaggagcugcgcagcaaguucuccggcgugcucgaguucagcaaguucgaggccuucaccuccaacggguggggcgcggucaacagcggggccggcgugacggccgccugcaaguucggcuccagcaacuccuucuuccggaacaugguguggcugauccaccagagcgggaccuacccggucaucaagcgcaccuucaacaacaccaagggccgggacgugcugguggucugggggauccaccaccccgcgacgcucaaggagcaccaggaccuguacaagaaggacuccagcuacguggccgugggcagcgagaccuacaaccgccgguucauccccgagaucuccacccgccccaaggucaacggccaggccgggcggaugaccuucuacuggacgaucgugaagccggaggagagcaucaccuucgaguccaacggcgccuuccuggcgccccgcuacgccuucgagaucgugagcgucgggaacggcaagcuguuccgguccgagcugaacaucgagagcugcuccaccaagugccagaccgagaucgggggcaucaacacgaacaagagcuuccacuccgugcaccgcaacaccaucggcgacugccccaaguacgugaacgucaagagccugaagcucgccaccgggcugcggaacgugcccgccaucgccucccgcggccuguucggggccaucgcgggcuucaucgagggcggguggccgggccucaucaacgggugguacggcuuccagcaccggaacgaggaggggaccggcaucgccgccgacaaggagagcacgcagaaggccaucgaccagaucaccuccaaggugaacaacaucgucgaccgcaugaacaccaacuucgagagcgugcagcacgaguucuccgagaucgaggagcggaucaaccagcugagcaagcacgucgacgacuccgugguggacaucuggagcuacaacgcccagcugcucguccugcuggagaacgagaagacccucgaccugcacgacuccaacgugcgcaaccugcacgagaaggugcggcgcaugcucaaggacaacgcgaaggacgaggggaacggcugcuucacguucuaccacaagugcgacaacgagugcaucgagcggguccgcaacggcaccuacgaccacaaggaguucgaggaggagagcaagaucaaccggcaggagaucgagggggugaagcuggacagcuccggcaacguguacaagauccugagcaucuacuccugcaucgccagcucccucauccuggccgcccugaucaugggguucauccucugggccugcagcaacggcuccugccgcugcaccaucugcaucuga

SEQ ID NO: 74363 - RNA, 1698 nt, Artificial Sequence
  derived and/or modified CDS sequence (opt1) from hemagglutinin__InfluenzaA__AGQ81209
augaagaagacccuccucuucgccgccaucuuccuguacgugaaggcggacgagaucugcaucggcuaccugagcaacaacuccaccgacaaggucgacacgaucaucgagaacaacgugaccgugaccagcuccgucgagcucguggagaccgagcacacggggagcuucugcuccaucaacggcaagcagcccaucagccugggggacugcuccuucgccggcuggauccuggggaacccgaugugcgacgaccucaucggcaagaccagcugguccuacaucguggagaagcccaaccccgccaacggcaucugcuaccccgggacccuggagaacgaggaggagcugcgccucaaguucagcggcauccuggaguucuccaaguucgaggccuucaccagcaacggguggggcgccgucaacuccggggcgggcgugacggccgccugcaaguucggcagcuccaacagcuucuuccggaacaugguguggcugauccaccaguccgggaccuacccggucaucaagcgcaccuucaacaacaccaagggccgggacgugcucaucgugugggggauccaccaccccgccacgcugaaggagcaccaggaccuguacaagaaggacagcuccuacgucgcggugggcagcgagaccuacaaccgccgguucauccccgagaucagcacccgccccaaggugaacggccaggccgggcggaugaccuucuacuggacgaucgucaagccgggcgaguccaucaccuucgagagcaacggggccuuccucgcgccccgcuacgccuucgagaucguguccgugggcaacgggaagcuguuccggagcgagcugaacaucgaguccugcagcaccaagugccagaccgagaucggcggcaucaacacgaacaaguccuuccacagcguccaccgcaacaccaucggggacugccccaaguacgugaacgugaagucccucaagcuggccaccggccugcggaacguccccgccaucgccagccgcgggcuguucggcgccaucgccggguucaucgagggcggcuggccggggcugaucaacggcugguacggguuccagcaccggaacgaggagggcaccgggaucgcggccgacaaggaguccacgcagaaggccaucgaccagaucaccagcaaggugaacaacaucguggaccgcaugaacaccaacuucgaguccguccagcacgaguucagcgagaucgaggagcggaucaaccagcuguccaagcacguggacgacagcgucguggacaucugguccuacaacgcccagcuccuggugcugcucgagaacgagaagacccuggaccugcacgacagcaacguccgcaaccuccacgagaaggugcggcgcaugcugaaggacaacgccaaggacgagggcaacggcugcuucacguucuaccacaagugcgacaacgagugcaucgagcgggugcgcaacgggaccuacgaccacaaggaguucgaggaggaguccaagaucaaccggcaggagaucgagggcgucaagcuggacagcagcgggaacguguaccgcauccucuccaucuacagcugcaucgcguccagccuggugcuggccgcccucaucaugggcuucauccugugggccugcuccaacggcagcugccgcugcaccaucugcaucuga

SEQ ID NO: 74364 - RNA, 1698 nt, Artificial Sequence
  derived and/or modified CDS sequence (opt1) from hemagglutinin__InfluenzaA__AGQ81211
augaagaagacccuccucuucgccgccaucuuccuguacgugaaggcggacgagaucugcaucggcuaccugagcaacaacuccaccgacaaggucgacacgaucaucgagaacaacgugaccgugaccagcuccgucgagcucguggagaccgagcacacggggagcuucugcuccaucaacggcaagcagcccaucagccugggggacugcuccuucgccggcuggauccuggggaacccgaugugcgacgaccucaucggcaagaccagcugguccuacaucguggagaagcccaaccccgccaacggcaucugcuaccccgggacccuggagaacgaggaggagcugcgccucaaguucagcggcguccuggaguucuccaaguucgaggccuucaccagcaacggguggggcgccgugaacuccggggcgggcgugacggccgccugcaaguucggcagcuccaacagcuucuuccggaacauggucuggcugauccaccaguccgggaccuacccggugaucaagcgcaccuucaacaacaccaagggccgggacgugcucaucgucugggggauccaccaccccgccacgcugaaggagcaccaggaccuguacaagaaggacagcuccuacguggcggugggcagcgagaccuacaaccgccgguucauccccgagaucagcacccgccccaaggucaacggccaggccgggcggaugaccuucuacuggacgaucgugaagccgggcgaguccaucaccuucgagagcaacggggccuuccucgcgccccgcuacgccuucgagaucguguccgucggcaacgggaagcuguuccggagcgagcugaacaucgaguccugcagcaccaagugccagaccgagaucggcggcaucaacacgaacaaguccuuccacagcgugcaccgcaacaccaucggggacugccccaaguacgugaacgucaagucccucaagcuggccaccggccugcggaacgugcccgccaucgccagccgcgggcuguucggcgccaucgccggguucaucgagggcggcuggccggggcugaucaacggcugguacggguuccagcaccggaacgaggagggcaccgggaucgcggccgacaaggaguccacgcagaaggccaucgaccagaucaccagcaaggugaacaacaucgucgaccgcaugaacaccaacuucgaguccgugcagcacgaguucagcgagaucgaggagcggaucaaccagcuguccaagcacgucgacgacagcgugguggacaucugguccuacaacgcccagcuccugguccugcucgagaacgagaagacccuggaccugcacgacuucaacgugcgcaaccuccacgagaaggugcggcgcaugcugaaggacaacgccaaggacgagggcaacggcugcuucacguucuaccacaagugcgacaacgagugcaucgagcggguccgcaacgggaccuacgaccacaaggaguucgaggaggagagcaagaucaaccggcaggagaucgagggcgugaagcuggacuccagcgggaacguguaccgcauccucagcaucuacuccugcaucgcgagcucccugguccuggccgcccucaucaugggcuucauccugugggccugcagcaacggcuccugccgcugcaccaucugcaucuga

SEQ ID NO: 74365 - RNA, 1698 nt, Artificial Sequence
  derived and/or modified CDS sequence (opt1) from hemagglutinin__InfluenzaA__AGQ81213
augaagaagacccuccucuucgccgccaucuuccuguacgugcgcgcggacgagaucugcaucggcuaccugagcaacaacuccaccgacaaggucgacacgaucaucgagaacaacgugaccgugaccagcuccgucgagcucguggagaccgagcacacggggagcuucugcuccaucaacggcaagcagcccaucagccugggggacugcuccuucgccggcuggauccuggggaacccgaugugcgacggccucaucggcaagaccagcugguccuacaucguggagaagcccaaccccgccaacgggaucugcuaccccggcacccuggagaacgaggaggagcugcggcucaaguucagccgcguccuggaguucuccaaguucgaggccuucaccagcaacggguggggcgccgugaacuccggggcgggcgugacggccgccugcaaguucggcagcuccaacagcuucuuccggaacauggucuggcugauccaccaguccgggaccuacccggugaucaagcgcaccuucaacaacaccaagggccgggacgugcucgucgugugggggauccaccaccccgccacgcugaaggagcaccaggaccuguacaagaaggacagcuccuacguggcggucggcagcgagaccuacaaccgccgguucauccccgagaucagcacccgccccaccgugaacggccaggccgggcggaugacguucuacuggaccaucgugaagccgggcgaguccaucaccuucgagagcaacggggccuuccucgcgccccgcuacgccuucgagaucgucuccgugggcaacgggaagcuguuccggagcgagcugaacaucgaguccugcagcaccaagugccagacggagaucggcggcaucaacaccaacaaguccuuccacagcgugcaccgcaacaccaucggggacugccccaaguacgucaacgugaagucccucaagcuggccaccggccugcggaacgugcccgccaucgccagccgcgggcuguucggcgccaucgccggguucaucgagggcggcuggccggggcugaucaacggcugguacggguuccagcaccggaacgaggagggcacggggaucgcggccgacaaggaguccacccagaaggccaucgaccagaucaccagcaaggucaacaacaucguggaccgcaugaacaccaacuucgaguccguccagcacgaguucagcgagaucgaggagcggaucaaccagcuguccaagcacguggacgacagcguggucgacaucugguccuacaacgcccagcuccuggugcugcucgagaacgagaagacgcuggaccugcacgacagcaacgugcgcaaccuccacgagaagguccggcgcaugcugaaggacaacgccaaggacgagggcaacggcugcuucaccuucuaccacaagugcgacaacgagugcaucgagcgggugcgcaacgggaccuacgaccacaaggaguucgaggaggaguccaagaucaaccgccaggagaucgagggcgugaagcuggacagcagcgggaacgucuacaagauccucuccaucuacagcugcaucgcguccagccuggugcuggccgcccucaucaugggcuucauccugugggccugcuccaacggcagcugccggugcaccaucugcaucuga

SEQ ID NO: 74366 - RNA, 1698 nt, Artificial Sequence
  derived and/or modified CDS sequence (opt1) from hemagglutinin__InfluenzaA__AGQ81214
augaagaagacccuccucuucgccgccaucuuccuguacgugaaggcggacgagaucugcaucggcuaccugagcaacaacuccaccgacaaggucgacacgaucaucgagaacaacgugaccgugaccagcuccgucgagcucguggagaccgagcacacggggagcuucugcuccaucaacggcaagcagcccaucagccugggggacugcuccuucgccggcuggauccuggggaacccgaugugcgacgaccucaucggcaagaccagcugguccuacaucguggagaagcccaaccccgccaacggcaucugcuaccccgggacccuggagaacgaggaggagcugcgccucaaguucagcggcguccuggaguucuccaaguucgaggccuucaccagcaacggguggggcgccgugaacuccggggcgggcgugacggccgccugcaaguucggcagcuccaacagcuucuuccggaacauggucuggcugauccaccaguccgggaccuacccggugaucaagcgcaccuucaacaacaccaagggccgggacgugcucaucgucugggggauccaccaccccgccacgcugaaggagcaccaggaccuguacaagaaggacagcuccuacguggcggugggcagcgagaccuacaaccgccgguucauccccgagaucagcacccgccccaaggucaacggccaggccgggcggaugaccuucuacuggacgaucgugaagccgggcgaguccaucaccuucgagagcaacggggccuuccucgcgccccgcuacgccuucgagaucguguccgucggcaacgggaagcuguuccggagcgagcugaacaucgaguccugcagcaccaagugccagaccgagaucggcggcaucaacacgaacaaguccuuccacagcgugcaccgcaacaccaucggggacugccccaaguacgugaacgucaagucccucaagcuggccaccggccugcggaacgugcccgccaucaccagccgcgggcuguucggcgccaucgccggguucaucgagggcggcuggccggggcugaucaacggcugguacggguuccagcaccggaacgaggagggcacggggaucgccgcggacaaggaguccacccagaaggccaucgaccagaucaccagcaaggugaacaacaucgucgaccgcaugaacaccaacuucgaguccgugcagcacgaguucagcgagaucgagggccggaucaaccagcuguccaagcacgucgacgacagcgugguggacaucugguccuacaacgcccagcuccugguccugcucgagaacgagaagacgcuggaccugcacgacagcaacgugcgcaaccuccacgagaaggugcggcgcaugcugaaggacaacgccaaggacgagggcaacgggugcuucaccuucuaccacaagugcgacaacgagugcaucgagcggguccgcaacggcaccuacgaccacaaggaguucgaggaggaguccaagaucaaccggcaggagaucgagggggugaagcuggacagcagcggcaacguguacaagauccucuccaucuacagcugcaucgccuccagccugguccuggcggcccucaucaugggcuucauccugugggccugcuccaacgggagcugccgcugcaccaucugcaucuga

SEQ ID NO: 74367 - RNA, 1698 nt, Artificial Sequence
  derived and/or modified CDS sequence (opt1) from hemagglutinin__InfluenzaA__AGQ81215
augaagaagacccuccuguucgccgccaucuuccuguacgugaaggcggacgagaucugcaucggcuaccugagcaacaacuccaccgacaaggucgacacgaucaucgagaacaacgugaccgugaccagcuccgucgagcucguggagaccgagcacacggggagcuucugcuccaucaacggcaagcagcccaucagccugggggacugcuccuucgccggcuggauccuggggaacccgaugugcgacggccucaucggcaagaccagcugguccuacaucguggagaagcccaaccccgccaacgggaucugcuaccccggcacccuggagaacgaggaggagcugcgccucaaguucagcgggauccuggaguucuccaaguucgaggccuucaccagcaacggcuggggcgccgucaacuccggggcgggcgugacggccgccugcaaguucgggagcuccaacagcuucuuccggcacaugguguggcugauccaccaguccggcaccuacccggucaucaagcgcaccuucaacaacaccaaggggcgggacgugcucguggucuggggcauccaccaccccgccacgcugaaggagcagcaggaccuguacaagaaggacagcuccuacguggcggugggcagcgagaccuacaaccgccgguucauccccgagaucagcacccgccccaaggucaacgggcaggccggccggaugaccuucuacuggacgaucgugaagccgggggaguccaucaccuucgagagcaacggcgccuuccucgcgccccgcuacgccuucgagaucguguccgucgggaacggcaagcuguuccggagcgagcugaacaucgaguccugcagcaccaagugccagaccgagaucggcgggaucaacacgaacaaguccuuccacagcgugcaccgcaacaccaucggcgacugccccaaguacgugaacgucaagucccucaagcuggccaccgggcugcggaacgugcccgccaucgccagccgcggccucuucggggccaucgccggcuucaucgagggcggguggccgggccugaucaacgggugguacggcuuccagcaccggaacgaggaggggaccggcaucgcggccgacaaggaguccacgcagaaggccaucgaccagaucaccagcaaggugaacaacaucgucgaccgcaugaacaccaacuucgaguccgugcagcacgaguucagcgagaucgaggagcggaucaaccagcuguccaagcacgucgacgacagcgugguggacaucugguccuacaacgcccagcuccugguccugcucgagaacgagaagacccuggaccugcacgacagcaacgugcgcaaccuccacgagaaggugcggcgcaugcugaaggacaacgccaaggacgagggcaacgggugcuucacguucuaccacaagugcgacaacgagugcaucgagcggguccgcaacggcaccuacgaccacaaggaguucgaggaggaguccaagaucaaccggcaggagaucgagggggugaagcuggacagcagcggcaacguguacaagauccucuccaucuacagcugcaucgcguccagccugguccuggccgcccucaucaugggcuucauccugugggccugcuccaacgggagcugccgcugcaccaucugcaucuga

SEQ ID NO: 74368 - RNA, 1698 nt, Artificial Sequence
  derived and/or modified CDS sequence (opt1) from hemagglutinin__InfluenzaA__AGQ81216
augaagaagacccuccucuucgccgccaucuuccuguacgugaaggcggacgagaucugcaucggcuaccugagcaacaacuccaccgacaaggucgacacgaucaucgagaacaacgugaccgugaccagcuccgucgagcucguggagaccgagcacacggggagcuucugcuccaucaacggcaagcagcccaucagccugggggacugcuccuucgccggcuggauccuggggaacccgaugugcgacgaccucaucggcaagaccagcugguccuacaucguggagaagcccaaccccgccaacggcaucugcuaccccgggacccuggagaacgaggaggagcugcgccucaaguucagcggcguccuggaguucuccaaguucgaggccuucaccagcaacggguggggcgccgugaacuccggggcgggcgugacggccgccugcaaguucggcagcuccaacagcuucuuccggaacauggucuggcugauccaccaguccgggaccuacccggugaccaagcgcaccuucaacaacacgaagggccgggacgugcucgucgugugggggauccaccaccccgccacccugaaggagcaccaggaccuguacaagaaggacagcuccuacguggcggucggcagcgagaccuacaaccgccgguucacccccgagaucagcacgcgccccaaggugaacggccaggccgggcggaugaccuucuacuggaccaucgugaagccgggcgaguccaucaccuucgagagcaacggggccuuccucgcgccccgcuacgccuucgagaucgucuccgugggcaacgggaagcuguuccggagcgagcugaacaucgaguccugcagcacgaagugccagaccgagaucggcggcaucaacaccaacaaguccuuccacagcgugcaccgcaacaccaucggggacugccccaaguacgucaacgugaagucccucaagcuggccacgggccugcggaacgugcccgccaucgccagcaaggggcuguucggcgccaucgccggguucaucgagggcggcuggccggggcugaucaacggcugguacggguuccagcaccgcaacgaggagggcaccgggaucgcggccgacaaggaguccacccagaaggccaucgaccagaucaccagcaaggucaacaacaucguggaccggaugaacacgaacuucgaguccguccgccacgaguucagcgagaucgaggagcggaucaaccagcuguccaagcacguggacgacagcguggucgacaucugguccuacaacgcccagcuccuggugcugcucgagaacgagaagacccuggaccugcacgacagcaacgugcgcaaccuccacgagcggguccgccggaugcugaaggacaacgccaaggacgagggcaacggcugcuucaccuucuaccacaagugcgacaacgagugcaucgagcgcgugcggaacgggaccuacgaccacaaggaguucgaggaggaguccaagaucaaccgccaggagaucgagggcgugaagcuggacagcagcgggaacgucuacaagauccucuccaucuacagcugcaucgcguccagccuggugcuggccgcccucaucaugggcuucauccugugggccugcggcaacggguccugccgcugcacgaucugcaucuga

SEQ ID NO: 74369 - RNA, 1698 nt, Artificial Sequence
  derived and/or modified CDS sequence (opt1) from hemagglutinin__InfluenzaA__AGQ81217
augaagaagacccuccuguucgccgccaucuuccuguacgcgaaggccgacgagaucugcaucggcuaccugagcaacaacuccaccgacaagguggacacgaucaucgagaacaacgucaccgugaccagcuccguggagcucgucgagaccgagcacacggggagcuucugcuccaucaacggcaagcagcccaucagccugggggacugcuccuucgccggcuggauccuggggaacccgaugugcgacgaccucaucggcaagaccagcugguccuacaucguggagaagcccaaccccgccaacggcaucugcuaccccgggacccuggagaacgaggaggagcugcgccucaaguucagcggcgugcuggaguucucccgguucgaggccuucaccagcaacggguggggcgcggucaacuccggggccggcgugacggccgccugcaaguucggcagcuccaacagcuucuuccgcaacaugguguggcugauccaccaguccgggaccuacccggucaucaagcggaccuucaacaacaccaagggccgcgacgugcucguggucugggggauccaccaccccgcgacgcugaaggagcaccaggaccuguacaagaaggacagcuccuacguggccgugggcagcgagaccuacaaccggcgcuucauccccgagaucagcacccggcccaaggucaacggccaggccgggcgcaugaccuucuacuggacgaucgugaagccggaggaguccaucaccuucgagagcaacggcgccuuccucgcgccccgguacgccuucgagaucguguccgucgggaacggcaagcuguuccgcagcgagcugaacaucgaguccugcagcaccaagugccagaccgagaucgggggcaucaacacgaacaaguccuuccacagcgugcaccggaacaccaucggcgacugccccaaguacgugaacgucaagucccucaagcuggccaccgggcugcgcaacgugcccgccaucgccagccggggccucuucggggccaucgcgggcuucaucgagggcggguggccgggccugaucaacgggugguacggcuuccagcaccgcaacgaggaggggaccggcaucgccgccgacaaggaguccacgcagaaggccaucgaccagaucaccagcaaggugaacaacaucgucgaccggaugaacaccaacuucgaguccgugcagcacgaguucagcgagaucgaggagcgcaucaaccagcuguccaagcacgucgacgacagcgugguggacaucugguccuacaacgcccagcuccugguccugcucgagaacgagaagacccuggaccugcacgacagcaacgugcggaaccuccacgagaaggugcgccggaugcugaaggacaacgcgaaggacgaggggaacggcugcuucacguucuaccacaagugcgacaacgagugcaucgagcgcguccggaacggcaccuacgaccacaaggaguucgaggaggaguccaagaucaaccgccaggagaucgagggggugaagcuggacagcagcggcaacguguacaagauccucuccaucuacagcugcaucgccuccagccugauccuggccgcccucaucaugggguucauccugugggccugcuccaacggcagcugccgcugcaccaucugcaucuga

SEQ ID NO: 74370 - RNA, 1704 nt, Artificial Sequence
  derived and/or modified CDS sequence (opt1) from hemagglutinin__InfluenzaA__AGQ88499
auggagaagaucgugcugcuguucgccaccaucagccuggucaaguccgaccacaucugcaucggcuaccacgccaacaacagcaccgagcaggucgacacgaucauggagaagaacgugaccgugacccacgcgcaggacauccuggagaagacccacaacgggaagcucugcgaccugaacggcgugaagccccugauccucaaggacugcuccguggccggguggcugcugggcaacccgaugugcgacgaguucaucaacguccccgaguggagcuacaucguggagaaggccaaccccgccaacgaccucugcuaccccgggaacuucaacgacuacgaggagcugaagcaccuccucucccgcaucaaccacuucgagaagauccagaucaucccgaaggacagcuggacggaccacgaggccucccugggcgugagcgcggccugccccuaccagggcaacuccagcuucuuccggaacgucguguggcugaucaagaaggacaacgccuaccccaccaucaagaagggguacaacaacaccaaccaggaggaccuccuggugcuguggggcauccaccaccccaacaacgaggccgagcagacccgccucuaccagaacccgacgaccuacaucuccaucgggaccagcacccugaaccagcggcugguccccaagaucgcgacgcgcuccaagaucaacggccagagcgggcggaucgacuucuucuggaccauccucaagcccaacgacgccauccacuucgaguccaacggcaacuucaucgcccccgaguacgccuacaagaucgugaagaagggcgacagcaccaucaugaaguccgagguggaguacgggaacugcaacacccgcugccagacgccgaucggcgccaucaacagcuccaugcccuuccacaacauccacccccugaccaucggggagugccccaaguacgucaagagcaacaagcuggugcucgcgaccggccugcggaacagcccgcagcgcgagcggcgccggaagcgcggccuguucggggccaucgccggcuucaucgagggcggguggcaggggaugguggacggcugguacggcuaccaccacuccaacgagcaggggagcggcuacgccgccgacaaggaguccacccagaaggcgaucgacggggucacgaacaaggugaacagcaucaucgacaagaugaacacccaguucgaggccgugggccgggaguucaacaaccucgagcgccggaucgagaaccugaacaagaagauggaggacggguuccuggacgucuggaccuacaacgccgagcuccuggugcugauggagaacgagcgcacccucgacuaccacgacuccaacgugcggaaccuguacgacaagguccgccugcagcucaaggacaacgccaaggagcugggcaacggcugcuucgaguucuaccacaagugcaacaacgagugcauggagagcgugcggaacgggacguacgacuacccccaguacuccgaggaggcccgccugaagcgggaggagaucagcggcgucaagcucgaguccaucgggaucuaccagauccugagcaucuacuccaccguggcgagcucccuggugcucgccaucaugauggccggccugagccuguggaugugcuccaacgggagccuccagugccgcaucugcaucuga

SEQ ID NO: 74371 - RNA, 1683 nt, Artificial Sequence; identical to SEQ ID NO: 74261
  derived and/or modified CDS sequence (opt1) from hemagglutinin__InfluenzaA__AGR33888

SEQ ID NO: 74372 - RNA, 1683 nt, Artificial Sequence; identical to SEQ ID NO: 74261
  derived and/or modified CDS sequence (opt1) from hemagglutinin__InfluenzaA__AGR33889

SEQ ID NO: 74373 - RNA, 1683 nt, Artificial Sequence
  derived and/or modified CDS sequence (opt1) from hemagglutinin__InfluenzaA__AGR33890
augaacacccagauccugguguucgcccucaucgccaucacccccacgaacagcgacaagaucugccugggccaccacgcggucuccaacgggaccaaggugaacacccugaccgagcgcggcguggaggucgugaacgccacggagaccguggagcggaccagcaucccgcgcaucugcuccaaggggaagcggaccgucgaccucggccagugcgggcugcugggcacgaucaccggcccgccccagugcgaccaguuccucgaguucagcgccgaccugaucaucgagcgccgggagggguccgacgugugcuaccccggcaaguucgugaacgaggaggcccugcgccagauccuccgggagagcgggggcaucgacaaggaggccaugggguucaccuacuccggcauccgcaccaacggcgcgacgagcgccugccggcgcuccgggagcuccuucuacgccgagaugaaguggcugcugagcaacaccgacaacgccgcguucccgcccaugaccaaguccuacaagaacacccggaaggcccccgcccucaucaucuggggcauccaccacagcgucuccacggccgagcagaccaagcuguacgggagcggcaacaagcuggugaccgugcgcuccagcaacuaccagcaguccuucguccccagccccggcgccgggccccaggugaacggccagagcgggcggaucgacuuccacuggcucaugcugaaccccaacgacaccgugacguucuccuucaacggcgcguucaucgcccccgaccgcgccagcuuccugcgggggaaguccaugggcauccagagcggcguccagguggacgccaacugcgagggggacugcuaccacuccggcgggaccaucaucagcaaccucccguuccagaacaucgacucccgcguggucggcaagugcccccgguacgugaagcagaagucccugcugcucgccaccgggaugaagaacgugcccgagauccccaagggccgcggccuguucggggcgaucgccggcuucaucgagaacgggugggagggccugaucgacgggugguacggcuuccggcaccagaacgcccagggcgaggggaccgccgccgacuacaagagcacgcagagcgcgaucaaccagaugaccggcaagcucaaccgccugaucgagaagaccaaccagcaguucgagcugaucgacaacgaguucaccgaggucgagaagcagaucgggaacgugaucaacuggacgcgggacuccaucaccgagguguggagcuacaacgccgagcuccuggucgccauggagaaccagcacaccaucgaccuggccgacuccgagaugaacaagcucuacgagcgcgugaagcgccagcugcgggagaacgccgaggaggacggcaccggcugcuucgagaucuuccacaagugcgacgacgacugcauggcgagcauccgcaacaacacguacgaccacuccaaguaccgggaggaggccaugcagaaccgcauccagaucgacccggucaagcugagcuccggguacaaggacgugauccucugguucagcuucggcgccuccugcuucauccugcuggccaucgcgauggggcucguguucaucugcgucaagaacggcaacaugcggugcaccaucugcaucuga

SEQ ID NO: 74374 - RNA, 1683 nt, Artificial Sequence
  derived and/or modified CDS sequence (opt1) from hemagglutinin__InfluenzaA__AGR33892
augaacacccagauccugguguucgcccucaucgccaucauccccaccaacgcggacaagaucugccugggccaccacgccgucagcaacgggacgaaggugaacacccugaccgagcgcggcguggaggucgugaacgccaccgagacgguggagcggaccuccaucccgcgcaucugcagcaaggggaagcggaccgucgaccucggccagugcgggcugcugggcaccaucacgggcccgccccagugcgaccaguuccucgaguucuccgccgaccugaucaucgagcgccgggaggggagcgacgugugcuaccccggcaaguucgugaacgaggaggcccugcgccagauccuccgggaguccgggggcaucaacaaggaggcgaugggguucaccuacagcggcauccgcaccaacggcgccaccuccgccugccggcgcagcggguccagcuucuacgccgagaugaaguggcugcuguccaacacggacaacgcggccuucccgcccaugaccaagagcuacaagaacacccggaaggcccccgcccucaucaucuggggcauccaccacuccgggagcaccgccgagcagacgaagcuguacggcuccggcaacaagauggucaccgugcgcagcuccaacuaccagcagagcuucgugcccucccccggggcgggcccccaggucaacgggcagagcggccggaucgacuuccacuggcugaugcucaaccccaacgacaccgugaccuucagcuucaacggggccuucaucgcccccgaccgcgccuccuuccugcggggcaagagcaugggcauccaguccggggugcaggucgacgccaacugcgagggcgacugcuaccacagcgggggcacgaucaucuccaaccugccguuccagaacaucgacagccgcgugguggggaagugcccccgguacgucaagcagaagucccuccugcuggcgaccggcaugaagaacgugcccgagauccccaagggccgcggccucuucggggccaucgccggguucaucgagaacggcugggaggggcugaucgacggcugguacggcuuccggcaccagaacgcccagggggagggcaccgccgcggacuacaagagcacccaguccgccaucaaccagaugacggggaagcugaaccgccucaucgagaagaccaaccagcaguucgagcugaucgacaacgaguucaccgagguggagaagcagaucggcaacgucaucaacuggacccgggacagcaucacggaggugugguccuacaacgccgagcugcucguggccauggagaaccagcacaccaucgaccuggccgacagcgagaugaacaagcuguacgagcgcgucaagcgccagcuccgggagaacgcggaggaggacggcaccgggugcuucgagaucuuccacaagugcgacgacgacugcauggccuccauccgcaacaacaccuacgaccacagcaaguaccgggaggaggccaugcagaaccgcauccagaucgacccggugaagcuguccagcggcuacaaggacgucauccugugguucuccuucggggccagcugcuucauccuccuggcgaucgccaugggccugguguucaucugcguggagaacgggaacaugcggugcacgaucugcaucuga

SEQ ID NO: 74375 - RNA, 1683 nt, Artificial Sequence; identical to SEQ ID NO: 74253
  derived and/or modified CDS sequence (opt1) from hemagglutinin__InfluenzaA__AGR33895

SEQ ID NO: 74376 - RNA, 1683 nt, Artificial Sequence; identical to SEQ ID NO: 74332
  derived and/or modified CDS sequence (opt1) from hemagglutinin__InfluenzaA__AGR33897

SEQ ID NO: 74377 - RNA, 1683 nt, Artificial Sequence
  derived and/or modified CDS sequence (opt1) from hemagglutinin__InfluenzaA__AGR33899
auggagaccgugagccugaucaccauccuccuggucgccacgguguccaacgccgacaagaucugcaucggcuaccagagcaccaacuccaccgagaccguggacacgcugaccgagaacaacguccccgugacccacgcgaaggagcuccugcacaccgagcacaacgggaugcugugcgccacgagccucggccagccgcugauccuggacacgugcaccaucgaggggcucaucuacggcaaccccuccugcgaccugcugcucgaggggcgcgaguggagcuacaucguggagcggcccuccgccgucaacggccugugcuaccccggcaacguggagaaccuggaggagcuccgcagccuguucuccagcgcccgguccuaccagcgcauccagaucuucccggacaccaucuggaacgugagcuacaacgggaccuccaaggccugcagcggcuccuucuaccggagcaugcgcuggcugacccagaagaacuccaacuaccccauccaggacgcgcaguacaccaacaaccaggggaagaacauccucuucauguggggcaucaaccacccgcccaccgacacgacccagcgggaccuguacacccgcaccgacacgaccaccagcgucgccaccgaggagaucaaccggaucuucaagccccugaucgggccccgcccccucgugaacggccugaugggccggaucgacuacuacugguccgugcugaagcccgggcagacgcuccgcaucaagagcgacggcaaccugaucgccccgugguacgggcacauccugagcggcgagucccacggccggauccucaagaccgaccugaagaaggggagcugcaccguccagugccagaccgagaagggcgggcugaacacgacccuccccuuccagaacguguccaaguacgccuucggcaacugcagcaaguacaucgggaucaagucccugaagcuggcggugggccuccgcaacguccccagccgguccagccgcggccuguucggggccaucgccggcuucaucgagggcgggugguccgggcugguggccggcugguacggcuuccagcacagcaacgaccagggggugggcauggccgcggaccgggacuccacccagaaggccaucgacaagaucaccagcaaggucaacaacaucguggacaagaugaacaagcaguacgagaucaucgaccacgaguucuccgagguggagacgcgccucaacaugaucaacaacaagaucgacgaccagauccaggacaucugggccuacaacgccgagcugcugguccuccuggagaaccagaagacccuggacgagcacgacgccaacgugaacaaccucuacaacaaggugaagcgggcgcuggggagcaacgccgucgaggacggcaaggggugcuucgagcuguaccacaagugcgacgaccagugcauggagaccauccgcaacggcaccuacaaccgguccaaguaccaggaggagagcaagcucgagcgccagaagaucgagggcgugaagcuggaguccgaggggacguacaagauccugaccaucuacagcaccgucgccuccagccucgugaucgccaugggcuucgccgcguuccuguucugggccaugagcaacggguccugccgcugcaacaucugcaucuga

SEQ ID NO: 74378 - RNA, 1683 nt, Artificial Sequence
  derived and/or modified CDS sequence (opt1) from hemagglutinin__InfluenzaA__AGR33900
auggagaccgugagccugaucaccauccuccuggucgccacgguguccaacgccgacaagaucugcaucggcuaccagagcaccaacuccaccgagaccguggacacgcugaccgagaacaacguccccgugacccacgcgaaggagcuccugcacaccgagcacaacgggaugcugugcgccacgagccucggccagccgcugauccuggacacgugcaccaucgaggggcucaucuacggcaaccccuccugcgaccugcugcucgaggggcgcgaguggagcuacaucguggagcggcccuccgccgucaacggccugugcuaccccggcaacguggagaaccuggaggagcuccgcagccuguucuccagcgcccgguccuaccagcgcauccagaucuucccggacaccaucuggaacgugagcuacaacgggaccuccaaggccugcagcggcuccuucuaccggagcaugcgcuggcugacccagaagaacuccgacuaccccauccaggacgcgcaguacaccaacaaccaggggaagaacauccucuucauguggggcaucaaccacccgcccaccgacacgacccagcgggaccuguacacccgcaccgacacgaccaccagcgucgccaccgaggagaucaaccggaucuucaagccccugaucgggccccgcccccucgugaacggccugaugggccggaucgacuacuacugguccgugcugaagcccgggcagacgcuccgcaucaagagcgacggcaaccugaucgccccgugguacgggcacauccugagcggcgagucccacggccggauccucaagaccgaccugaagaaggggagcugcaccguccagugccagaccgagaagggcgggcugaacacgacccuccccuuccagaacguguccaaguacgccuucggcaacugcagcaaguacaucgggaucaagucccugaagcuggcggugggccuccgcaacguccccagccgguccagccgcggccuguucggggccaucgccggcuucaucgagggcgggugguccgggcugguggccggcugguacggcuuccagcacagcaacgaccagggggugggcauggccgcggaccgggacuccacccagaaggccaucgacaagaucaccagcaaggucaacaacaucguggacaagaugaacaagcaguacgagaucaucgaccacgaguucuccgagguggagacgcgccucaacaugaucaacaacaagaucgacgaccagauccaggacaucugggccuacaacgccgagcugcugguccuccuggagaaccagaagacccuggacgagcacgacgccaacgugaacaaccucuacaacaaggugaagcgggcgcuggggagcaacgccgucgaggacggcaaggggugcuucgaccuguaccacaagugcgacgaccagugcauggagaccauccgcaacggcaccuacaaccggcgcaaguaccaggaggaguccaagcucgagcgccagaagaucgagggcgugaagcuggagagcgaggggacguacaagauccugaccaucuacuccaccgucgccagcucccucgugaucgccaugggcuucgccgcguuccuguucugggccaugagcaacgggagcugccggugcaacaucugcaucuga

SEQ ID NO: 74379 - RNA, 1683 nt, Artificial Sequence
  derived and/or modified CDS sequence (opt1) from hemagglutinin__InfluenzaA__AGR33902
auggagaccgccagccugaucaccauccuccugguggccacggucuccaacgcggacaagaucugcaucggcuaccagagcaccaacuccaccgagaccguggacacgcugaccgagaacaacgugcccgucacccacgccaaggagcuccugcacaccgagcacaacgggaugcugugcgccacgagccucggccagccgcugauccuggacacgugcaccaucgaggggcucaucuacggcaaccccuccugcgaccugcugcucgaggggcgcgaguggagcuacaucguggagcggcccuccgccgugaacggccugugcuaccccggcaacgucgagaaccuggaggagcuccgcagccuguucuccagcgcccgguccuaccagcgcauccagaucuucccggacaccaccuggaacgugagcuacaacgggaucuccaaggcgugcagcggcuccuucuaccggagcaugcgcuggcugacccagaagaacuccaacuaccccauccaggacgcccaguacaccaacaaccaggggaagaacauccucuucauguggggcaucaaccacccgcccaccgacacgacccagcgggaccuguacacccgcaccgacacgaccaccagcguggccaccgaggagaucaaccggaucuucaagccccugaucgggccccgcccccucgucaacggccugaugggccggaucgacuacuacugguccgugcugaagcccgggcagacgcuccgcaucaagagcgacggcaaccugaucgccccgugguacgggcacauccugagcggcgagucccacggccggauccucaagaccgaccugaagcgcgggagcugcaccgugcagugccagaccgagaagggcgggcugaacacgacccuccccuuccagaacgucuccaaguacgcguucggcaacugcagcaaguacaucgggaucaagucccugaagcuggccgugggccuccggaacgugcccagccgcuccagccggggccuguucggggccaucgccggcuucaucgagggcgggugguccgggcuggucgccggcugguacggcuuccagcacagcaacgaccagggggugggcauggcggccgaccgcgacuccacccagaaggccaucgacaagaucaccagcaaggugaacaacaucgucgacaagaugaacaagcaguacgagaucaucgaccacgaguucuccgagguggagacgcggcucaacaugaucaacaacaagaucgacgaccagauccaggacaucugggccuacaacgccgagcugcuggugcuccuggagaaccagaagacccuggacgagcacgacgcgaacgucaacaaccucuacaacaaggugaagcgcgcccuggggagcaacgccguggaggacggcaaggggugcuucgagcuguaccacaagugcgacaaccagugcauggagaccauccggaacggcaccuacaaccgccgcaaguaccaggaggaguccaagcucgagcggcagaagaucgagggcgucaagcuggagagcgaggggacguacaagauccugaccaucuacuccaccguggccagcucccucgucaucgccaugggcuucgcggccuuccuguucugggccaugagcaacgggagcugccgcugcaacaucugcaucuga

SEQ ID NO: 74380 - RNA, 1698 nt, Artificial Sequence; identical to SEQ ID NO: 69537
  derived and/or modified CDS sequence (opt1) from hemagglutinin__InfluenzaA__AGR49817

SEQ ID NO: 74381 - RNA, 1698 nt, Artificial Sequence
  derived and/or modified CDS sequence (opt1) from hemagglutinin__InfluenzaA__AGR49841
augaaggugaagcugcucguccugcugugcaccuucaccgccacguacgccgacaccaucugcaucggcuaccacgcgaacaacagcaccgacaccguggacacggugcucgagaagaacgucaccgugacccacuccgugaaccugcuggagaacagccacaacgggaagcucugccugcugaagggcaucgcgccccuccagcuggggaacugcuccgucgccggcuggauccuggggaacccggagugcgagcuccugaucagcaaggaguccuggagcuacaucguggagaagcccaaccccgagaacgggaccugcuaccccggccacuucgccgacuacgaggagcugcgcgagcagcucuccagcguguccagcuucgagcgguucgagaucuucccgaaggaguccagcuggcccaaccacacggucaccgggguguccgccagcugcucccacaacggcgagagcuccuucuaccgcaaccugcuguggcucaccgggaagaacggccuguaccccaaccugagcaaguccuacgccaacaacaaggagaaggaggugcucguccuguggggcgugcaccacccgcccaacaucguggaccagaagacccuguaccggacggagaacgccuacgucagcguggugagcucccacuacagccgcaaguucacccccgagaucgccaagcggcccaagguccgcgaccaggagggccggaucaacuacuacuggacccuccuggagccccgcgacaccaucaucuucgaggccaacggcaaccugaucgcgccgcgguacgccuucgcccucucccgcggguucggcagcgggaucaucaacuccaacgcccccaugggcaagugcgacgccaagugccagacgccccagggcgcgaucaacagcucccugcccuuccagaacgugcacccggugaccaucggggagugccccaaguacguccggagcgccaagcugcgcauggugaccggccuccggaacauccccuccauccagagccgcgggcuguucggcgccaucgccggguucaucgagggcggcuggaccgggaugguggacggcugguacggguaccaccaccagaacgagcagggcuccggguacgccgcggaccagaaguccacgcagaacgccaucaacggcaucaccaacaaggucaacagcgugaucgagaagaugaacacccaguucaccgccgucggcaaggaguucaacaagcuggagcggcgcauggagaaccucaacaagaagguggacgacggguucaucgacaucuggacguacaacgccgagcugcuggugcuccuggagaacgagcggacccuggacuuccacgacagcaacgucaagaaccucuacgagaaggugaagucccagcugaagaacaacgccaaggagaucggcaacgggugcuucgaguucuaccacaagugcaacgacgagugcauggagagcgugaagaacggcaccuacgacuaccccaaguacuccgaggagagcaagcugaaccgcgagaagaucgacggggucaagcucgaguccaucggcguguaccagauccuggcgaucuacagcaccguggccagcucccugguccuccuggugagccugggcgccaucuccuucuggaugugcagcaacgggucccuccagugccggaucugcaucuga

SEQ ID NO: 74382 - RNA, 1698 nt, Artificial Sequence; identical to SEQ ID NO: 69537
  derived and/or modified CDS sequence (opt1) from hemagglutinin__InfluenzaA__AGR49853

SEQ ID NO: 74383 - RNA, 1698 nt, Artificial Sequence
  derived and/or modified CDS sequence (opt1) from hemagglutinin__InfluenzaA__AGR49865
augaaggugaagcugcucguccugcugugcaccuucaccgccacguacgccgacaccaucugcaucggcuaccacgcgaacaacagcaccgacaccguggacacggugcucgagaagaacgucaccgugacccacuccgugaaccugcuggagaacaaccacaacgggaagcucugccugcugaagggcaucgcgccccuccagcuggggaacugcagcgucgccggcuggauccuggggaacccggagugcgagcuccugaucuccaaggagagcugguccuacaucguggagaagcccaaccccgagaacgggaccugcuaccccggccacuucgccgacuacgaggagcugcgcgagcagcucagcuccgugagcuccuucgagcgguucgagaucuucccgaaggagagcuccuggcccaaccacacggucaccggggugagcgccuccugcagccacaacggcgaguccagcuucuaccgcaaccugcuguggcucaccgggaagaacggccuguaccccaaccuguccaagagcuacgccaacaacaaggagaaggaggugcucguccuguggggcgugcaccacccgcccaacaucgugaaccagaagacccuguaccggacggagaacgccuacgucuccguggugagcagccacuacucccgcaaguucacccccgagaucgccaagcggcccaagguccgcgaccaggagggccggaucaacuacuacuggacccuccuggagcccggcgacaccaucaucuucgaggccaacgggaaccugaucgcgccgcgcuacgccuucgcccucaaccggggcuucgggagcggcaucaucaacuccaacgcccccauggacaagugcgacgccaagugccagacgccccagggcgcgaucaacagcucccugcccuuccagaacgugcacccggugaccaucggggagugccccaaguacguccgcagcgccaagcugcggauggugaccggccuccgcaacauccccuccauccagagccgggggcuguucggcgccaucgccggguucaucgagggcggcuggaccgggaugguggacggcugguacggguaccaccaccagaacgagcagggcuccggguacgccgcggaccagaaguccacgcagaacgccaucaacggcaucaccaacaaggucaacagcgugaucgagaagaugaacacccaguucaccgccgucggcaaggaguucaacaagcuggagcgccggauggagaaccucaacaagaagguggacgacggguucaucgacguguggacguacaacgccgagcugcugguccuccuggagaacgagcgcacccuggacuuccacgacagcaacgugaagaaccucuacgagaaggugaagucccagcugaagaacaacgccaaggagaucggcaacgggugcuucgaguucuaccacaagugcaacgacgagugcauggagagcgucaagaacggcaccuacgacuaccccaaguacuccgaggagagcaagcugaaccgggagaagaucgacggggugaagcucgaguccaugggcguguaccagauccuggcgaucuacagcaccgucgccuccagccuggugcuccuggugagccugggcgccaucuccuucuggaugugcagcaacgggucccuccagugccgcaucugcaucuga

SEQ ID NO: 74384 - RNA, 1701 nt, Artificial Sequence; identical to SEQ ID NO: 66680
  derived and/or modified CDS sequence (opt1) from hemagglutinin__InfluenzaA__AGR49877

SEQ ID NO: 74385 - RNA, 1701 nt, Artificial Sequence; identical to SEQ ID NO: 66458
  derived and/or modified CDS sequence (opt1) from hemagglutinin__InfluenzaA__AGR49888

SEQ ID NO: 74386 - RNA, 1701 nt, Artificial Sequence
  derived and/or modified CDS sequence (opt1) from hemagglutinin__InfluenzaA__AGR49900
augaagaccaucaucgcccugagcuacauccucugccugguguucgcccagaagcugcccggcaacgacaacuccaccgcgacgcucugccuggggcaccacgccgucccgaacggcaccaucgugaagaccaucaccaacgaccagaucgaggugacgaacgccaccgagcugguccagagcuccagcaccggggagaucugcgacagcccccaccagauccucgacggcgagaacugcacccugaucgacgcccugcucggggacccccagugcgacggcuuccagaacaagaagugggaccuguucguggagcgcagcaaggccuacuccaagugcuaccccuacgacgugccggacuacgcgagccugcggucccucgucgccagcuccggcacgcuggaguucaacaacgagagcuucaacuggaccggggugacccagaacggcaccuccagcgccugcauccgccgguccaacaacagcuucuucucccgccugaacuggcucacgcaccugaaguucaaguaccccgcccugaacgugaccaugcccaacaacgagaaguucgacaagcucuacaucuggggcguccaccaccccgggaccgacaacgaccagaucuuccuguacgcgcaggccagcgggcggaucaccguguccacgaagcgcagccagcagaccgugaucccgaacaucggcagccggccccgcguccggaacauccccucccgcaucagcaucuacuggaccaucgugaagcccggcgacauccugcucaucaacuccaccgggaaccugaucgccccgcggggcuacuucaagauccgcagcgggaaguccagcaucaugcgguccgacgcccccaucggcaagugcaacagcgagugcaucacgcccaacggcuccauccccaacgacaagccguuccagaacgugaaccgcaucaccuacggggccugcccccgguacgucaagcagaacacccugaagcucgcgaccggcaugcgcaacgugcccgagaagcagacgcgggggaucuucggcgccaucgccggguucaucgagaacggcugggagggcaugguggacgggugguacggcuuccgccaccagaacagcgaggggaucggccaggccgccgaccugaaguccacccaggcggccaucgaccagaucaacgggaagcugaaccggcucaucggcaagaccaacgagaaguuccaccagaucgagaaggaguucagcgaggucgagggccgcauccaggaccuggagaaguacguggaggacaccaagaucgaccugugguccuacaacgccgagcuccugguggcccuggagaaccagcacacgaucgaccucaccgacagcgagaugaacaagcuguucgagaagaccaagaagcagcugcgggagaacgccgaggacauggggaacggcugcuucaagaucuaccacaagugcgacaacgcgugcaucggguccauccgcaacggcaccuacgaccacgacgucuaccgcgacgaggcccucaacaaccgguuccagaucaaggggguggagcugaaguccggcuacaaggacuggauccuguggaucuccuucgccaucagcugcuuccuccugugcguggcccugcucggcuucaucaugugggccugccagaaggggaacauccgcugcaacaucugcaucuga

SEQ ID NO: 74387 - RNA, 1701 nt, Artificial Sequence
  derived and/or modified CDS sequence (opt1) from hemagglutinin__InfluenzaA__AGR49912
augaagaccaucaucgcccugagcuacauccucugccugguguccgcccagaagcugcccggcaacgacaacagcaccgcgacgcucugccuggggcaccacgccgucccgaacggcaccaucgugaagaccaucaccaacgaccagaucgaggugacgaacgccaccgagcugguccaguccagcuccaccggggagaucugcgacagcccccaccagauccucgacggcgagaacugcacccugaucgacgcccugcucggggacccccagugcgacggcuuccagaacaagaagugggaccuguucguggagcgcuccaaggccuacagcaacugcuaccccuacgacgugccggacuacgcgucccugcggagccucgucgccuccagcggcacgcuggaguucaacaacgaguccuucaacuggaccggggugacccagaacggcaccagcuccgccugcauccgccggagcaacaacuccuucuucagccgccugaacuggcucacgcaccugaaguucaaguaccccgcccugaacgugaccaugcccaacaacgaggaguucgacaagcucuacaucuggggcguccaccaccccgggaccgacaacgaccagaucuuccuguacgcgcaggccuccgggcggaucaccgugagcacgaagcgcagccagcagaccgugaucccgaacaucggcucccggccccgcguccggaacauccccagccgcaucuccaucuacuggaccaucgugaagcccggcgacauccugcucaucaacagcaccgggaaccugaucgccccgcggggcuacuucaagauccgcuccggcaagagcuccaucaugcggagcgacgcccccaucgggaagugcaacuccaagugcaucacgcccaacggcagcauccccaacgacaagccguuccagaacgugaaccgcaucaccuacggggccugcccccgguacgucaagcagaacacccugaagcucgcgaccggcaugcgcaacgugcccgagaagcagacgcgggggaucuucggcgccaucgccggguucaucgagaacggcugggagggcaugguggacgggugguacggcuuccgccaccagaacuccgaggggaucggccaggccgccgaccucaagagcacccaggcggccaucgaccagaucaacgggaagcugaaccggcugaucggcaagaccaacgagaaguuccaccagaucgagaaggaguucuccgaggucgagggccgcauccaggaccuggagaaguacguggaggacaccaagaucgaccuguggagcuacaacgccgagcuccugguggcccuggagaaccagcacacgaucgaccucaccgacuccgagaugaacaagcuguucgagaagaccaagaagcagcugcgggagaacgccgaggacauggggaacggcugcuucaagaucuaccacaagugcgacaacgcgugcaucgggagcauccgcaacggcaccuacgaccacgacgucuaccgcgacgaggcccucaacaaccgguuccagaucaaggggguggagcugaaguccggcuacaaggacuggauccuguggaucagcuucgccaucuccugcuuccuccugugcguggcccugcucggcuucaucaugugggccugccagaaggggaacauccgcugcaacaucugcaucuga

SEQ ID NO: 74388 - RNA, 1701 nt, Artificial Sequence
  derived and/or modified CDS sequence (opt1) from hemagglutinin__InfluenzaA__AGR49924
augaagaccaucaucgcccugagcuacauccucugccugguguccgcccagaagcugcccggcaacgacaacagcaccgcgacgcucugccuggggcaccacgccgucccgaacggcaccaucgugaagaccaucaccaacgaccagaucgaggugacgaacgccaccgagcugguccaguccagcuccaccggggagaucugcgacagcccccaccagauccucgacggcgagaacugcacccugaucgacgcccugcucggggacccccagugcgacggcuuccagaacaagaagugggaccuguucguggagcgcuccaaggccuacagcaacugcuaccccuacgacgugccggacuacgcgucccugcggagccucgucgccuccagcggcacgcuggaguucaacaacgaguccuucaacuggaccggggugacccagaacggcaccagcuccgccugcauccgccggagcaacaacuccuucuucagccgccugaacuggcucacgcaccugaaguucaaguaccccgcccugaacgugaccaugcccaacaacgaggaguucgacaagcucuacaucuggggcguccaccaccccgggaccgacaacgaccagaucuuccuguacgcgcaggccuccgggcggaucaccgugagcacgaagcgcagccagcagaccgugaucccgaacaucggcucccggccccgcguccggaacauccccagccgcaucuccaucuacuggaccaucgugaagcccggcgacauccugcucaucaacagcaccgggaaccugaucgccccgcggggcuacuucaagauccgcuccggcaagagcuccaucaugcggagcgacgcccccaucgggaagugcaacuccaagugcaucacgcccaacggcagcauccccaacgacaagccguuccagaacgugaaccgcaucaccuacggggccugcccccgguacgucaagcagaacacccugaagcucgcgaccggcaugcgcaacgugcccgagaagcagacgcgggggaucuucggcgccaucgccggguucaucgagaacggcugggagggcaugguggacgggugguacggcuuccgccaccagaacuccgaggggaucggccaggccgccgaccucaagagcacccaggcggccgucgaccagaucaacgggaagcugaaccggcugaucggcaagaccaacgagaaguuccaccagaucgagaaggaguucuccgagguggagggccgcauccaggaccuggagaaguacguggaggacaccaagaucgaccuguggagcuacaacgccgagcuccuggucgcccuggagaaccagcacacgaucgaccucaccgacuccgagaugaacaagcuguucgagaagaccaagaagcagcugcgggagaacgccgaggacauggggaacggcugcuucaagaucuaccacaagugcgacaacgcgugcaucgggagcauccgcaacggcaccuacgaccacgacguguaccgcgacgaggcccucaacaaccgguuccagaucaaggggguggagcugaaguccggcuacaaggacuggauccuguggaucagcuucgccaucuccugcuuccuccugugcgucgcccugcucggcuucaucaugugggccugccagaaggggaacauccgcugcaacaucugcaucuga

SEQ ID NO: 74389 - RNA, 1701 nt, Artificial Sequence
  derived and/or modified CDS sequence (opt1) from hemagglutinin__InfluenzaA__AGR49936
augaagaccaucaucgcccugagcuacauccucugccugaucuccgcccagaaguuccccggcaacgacaacagcaccgcgacgcugugccucgggcaccacgccgugccgaacggcaccaucgucaagaccaucaccaacgaccagaucgaggugacgaacgccaccgagcuggugcaguccagcuccaccggggagaucugcgacagcccccaccagauccuggacggcgagaacugcacccucaucgacgcccugcugggggacccccagugcgacggcuuccagaacaagaagugggaccucuucgucgagcgcuccaaggccuacagcaacugcuaccccuacgacgugccgggcuacgcgucccugcggagccugguggccuccagcgggacgcucgaguucaacaacgaguccuucaacuggaccggcgucacccagaacgggaccagcuccgccugcauccgccggagcaacaacuccuucuucagccgccugaacuggcugacgcaccucaaguucaaguaccccgcccugaacgugaccaugcccaacaacgaggaguucgacaagcuguacaucuggggcgugcaccaccccgggaccgacaacgaccagaucuuccucuacgcgcaggccuccggccggaucaccgucagcacgaagcgcagccagcagaccgugaucccgaacaucggcucccggccccgcgugcggaacauccccagccgcaucuccaucuacuggaccaucgucaagcccggggacauccugcugaucaacagcaccggcaaccucaucgccccgcggggguacuucaagauccgcuccggcaagagcuccaucaugcggagcgacgcccccaucggcaagugcaacuccgagugcaucacgcccaacgggagcauccccaacgacaagccguuccagaacgugaaccgcaucaccuacggcgccugcccccgguacgugaagcagaacacccugaagcuggcgaccgggaugcgcaacguccccgagaagcagacgcggggcaucuucggggccaucgccggcuucaucgagaacggcugggaggggaugguggacggcugguacggguuccgccaccagaacuccgagggcaucgggcaggccgccgaccucaagagcacccaggcggccaucgaccagaucaacggcaagcugaaccggcugaucggcaagaccaacgagaaguuccaccagaucgagaaggaguucuccgagguggaggggcgcauccaggaccucgagaaguacgucgaggacaccaagaucgaccuguggagcuacaacgccgagcugcucguggcccuggagaaccagcacacgaucgaccugaccgacuccgagaugaacaagcuguucgagaagaccaagaagcagcuccgggagaacgccgaggacaugggcaacgggugcuucaagaucuaccacaagugcgacaacgcgugcaucggcagcauccgcaacgggaccuacgaccacgacguguaccgcgacgaggcccugaacaaccgguuccagaucaagggcgucgagcucaaguccggcuacaaggacuggauccuguggaucagcuucgccaucuccugcuuccugcucugcguggcccugcugggguucaucaugugggccugccagaagggcaacauccgcugcaacaucugcaucuga

SEQ ID NO: 74390 - RNA, 1701 nt, Artificial Sequence; identical to SEQ ID NO: 71718
  derived and/or modified CDS sequence (opt1) from hemagglutinin__InfluenzaA__AGR49948

SEQ ID NO: 74391 - RNA, 1701 nt, Artificial Sequence; identical to SEQ ID NO: 66551
  derived and/or modified CDS sequence (opt1) from hemagglutinin__InfluenzaA__AGR49960

SEQ ID NO: 74392 - RNA, 1701 nt, Artificial Sequence
  derived and/or modified CDS sequence (opt1) from hemagglutinin__InfluenzaA__AGR49972
augaaggccauccuggugguccuccuguacaccuucgccaccgcgaacgccgacacgcugugcaucggcuaccacgccaacaacagcaccgacaccguggacaccgugcucgagaagaacgucacggugacccacuccgugaaccugcuggaggacaagcacaacgggaagcucugcaagcugcgcggcgucgcgccccugcaccucgggaagugcaacaucgccggcuggauccuggggaacccggagugcgagagccuguccaccgccagcuccuggagcuacaucguggagaccuccagcuccgacaacggcacgugcuaccccggcgacuucaucgacuacgaggagcuccgggagcagcugagcuccgugagcuccuucgagcgcuucgagaucuuccccaagaccagcuccuggcccaaccacgacagcaacaagggggucaccgccgccugcccgcacgccggcgcgaaguccuucuacaagaaccugaucuggcucgugaagaaggggaacagcuaccccaagcuguccaagagcuacaucaacgacaagggcaaggaggugcugguccucugggggauccaccaccccagcaccuccgccgaccagcagagccuguaccagaacgccgacgccuacguguucgugggcuccagccgguacuccaagaaguucaagcccgagaucgccauccgcccgaagguccgggaccaggagggccgcaugaacuacuacuggacgaucguggagcccggggacaagaucaccuucgaggcgaccggcaaccugguggucccccgguacgccuucgccauggagcgcaacgccgggagcggcaucaucaucuccgacacccccgugcacgacugcaacacgaccugccagaccccgaagggcgccaucaacaccagccuccccuuccagaacauccaccccaucacgaucgggaagugccccaaguacgugaaguccaccaagcugcggcuggcgaccggccuccgcaacgucccgagcauccagucccgggggcuguucggcgccaucgccggguucaucgagggcggcuggaccgggaugguggacggcugguacggguaccaccaccagaacgagcagggcagcggguacgccgccgaccugaaguccacgcagaacgcgaucgacgagaucaccaacaaggugaacagcgucaucgagaagaugaacacccaguucaccgccgugggcaaggaguucaaccaccucgagaagcgcaucgagaaccugaacaagaaggucgacgacggcuuccuggacaucuggacguacaacgccgagcuccuggugcugcucgagaacgagcggacccuggacuaccacgacuccaacgugaagaaccuguacgagaagguccgcagccagcucaagaacaacgccaaggagaucgggaacggcugcuucgaguucuaccacaagugcgacaacacgugcauggaguccgugaagaacgggaccuacgacuaccccaaguacagcgaggaggccaagcugaaccgggaggagaucgacggcgugaagcuggaguccacccgcaucuaccagauccucgcgaucuacagcaccgucgccagcucccuggugcugguggucagccucggggccaucuccuucuggaugugcagcaacggcucccugcagugccggaucugcaucuga

SEQ ID NO: 74393 - RNA, 1698 nt, Artificial Sequence; identical to SEQ ID NO: 70722
  derived and/or modified CDS sequence (opt1) from hemagglutinin__InfluenzaA__AGR49983

SEQ ID NO: 74394 - RNA, 1698 nt, Artificial Sequence; identical to SEQ ID NO: 70722
  derived and/or modified CDS sequence (opt1) from hemagglutinin__InfluenzaA__AGR49995

SEQ ID NO: 74395 - RNA, 1701 nt, Artificial Sequence; identical to SEQ ID NO: 66680
  derived and/or modified CDS sequence (opt1) from hemagglutinin__InfluenzaA__AGR50007

SEQ ID NO: 74396 - RNA, 1701 nt, Artificial Sequence; identical to SEQ ID NO: 66680
  derived and/or modified CDS sequence (opt1) from hemagglutinin__InfluenzaA__AGR50018

SEQ ID NO: 74397 - RNA, 1701 nt, Artificial Sequence; identical to SEQ ID NO: 66680
  derived and/or modified CDS sequence (opt1) from hemagglutinin__InfluenzaA__AGR50029

SEQ ID NO: 74398 - RNA, 1701 nt, Artificial Sequence
  derived and/or modified CDS sequence (opt1) from hemagglutinin__InfluenzaA__AGR50040
augaagaccaucaucgcccugagcuacauccucugccugguguucgcccagaagcugcccggcaacgacaacuccaccgcgacgcucugccuggggcaccacgccgucccgaacggcaccaucgugaagaccaucaccaacgaccagaucgaggugacgaacgccaccgagcugguccagagcuccagcaccggggagaucugcgacagcccccaccagauccucgacggcgagaacugcacccugaucgacgcccugcucggggacccccagugcgacggcuuccagaacaagaagugggaccuguucguggagcgcagcaaggccuacuccaacugcuaccccuacgacgugccggacuacgcgagccugcggucccucgucgccagcuccggcacgcuggaguucaacaacgagagcuucaacuggaccggggugacccagaacggcaccuccagcgccugcauccgccgguccaacaacagcuucuucucccgccugaacuggcucacgcaccugaaguucaaguaccccgcccugaacgugaccaugcccaacaacgagcaguucgacaagcucuacaucuggggcguccaccaccccgggaccgacaacgaccagaucuuccuguacgcgcaggccagcgggcggaucaccguguccacgaagcgcagccagcagaccgugaucccgaacaucggcagccggccccgcguccggaacauccccucccgcaucagcaucuacuggaccaucgugaagcccggcgacauccugcucaucaacuccaccgggaaccugaucgccccgcggggcuacuucaagauccgcagcgggaaguccagcaucaugcgguccgacgcccccaucggcaagugcaacagcgagugcaucacgcccaacggcuccauccccaacgacaagccguuccagaacgugaaccgcaucaccuacggggccugcccccgguacgucaagcagaacacccugaagcucgcgaccggcaugcgcaacgugcccgagaagcagacgcgggggaucuucggcgccaucgccggguucaucgagaacggcugggagggcaugguggacgggugguacggcuuccgccaccagaacagcgaggggcggggccaggccgccgaccugaaguccacccaggcggccaucgaccagaucaacgggaagcugaaccgccucaucggcaagaccaacgagaaguuccaccagaucgagaaggaguucagcgaggucgagggccggauccaggaccuggagaaguacguggaggacaccaagaucgaccugugguccuacaacgccgagcuccugguggcccuggagaaccagcacacgaucgaccucaccgacagcgagaugaacaagcuguucgagaagaccaagaagcagcugcgcgagaacgccgaggacauggggaacggcugcuucaagaucuaccacaagugcgacaacgcgugcaugggguccauccgcaacggcaccuacgaccacgacgucuaccgggacgaggcccucaacaaccgcuuccagaucaaggggguggagcugaaguccggcuacaaggacuggauccuguggaucuccuucgccaucagcugcuuccuccugugcguggcccugcucggcuucaucaugugggccugccagaaggggaacauccggugcaacaucugcaucuga

SEQ ID NO: 74399 - RNA, 1701 nt, Artificial Sequence; identical to SEQ ID NO: 66680
  derived and/or modified CDS sequence (opt1) from hemagglutinin__InfluenzaA__AGR50052

SEQ ID NO: 74400 - RNA, 1701 nt, Artificial Sequence; identical to SEQ ID NO: 66680
  derived and/or modified CDS sequence (opt1) from hemagglutinin__InfluenzaA__AGR50063

SEQ ID NO: 74401 - RNA, 1701 nt, Artificial Sequence
  derived and/or modified CDS sequence (opt1) from hemagglutinin__InfluenzaA__AGR50074
augaaggccauccuggugguccuccuguacaccuucgccaccgcgaacgccgacacgcugugcaucggcuaccacgccaacaacagcaccgacaccguggacaccgugcucgagaagaacgucacggugacccacuccgugaaccugcuggaggacaagcacaacgggaagcucugcaagcugcgcggcgucgcgccccugcaccucgggaagugcaacaucgccggcuggauccuggggaacccggagugcgagagccuguccaccgccagcuccuggagcuacaucguggagaccuccagcuccgacaacggcacgugcuaccccggcgacuucaucgacuacgaggagcuccgggagcagcugagcuccgugagcuccuucgagcgcuucgagaucuuccccaagaccagcuccuggcccaaccacgacagcaacaagggggucaccgccgccugcccgcacgccggcgcgaaguccuucuacaagaaccugaucuggcucgugaagaaggggaacagcuaccccaagcuguccaagagcuacaucaacgacaagggcaaggaggugcugguccucugggggauccaccaccccagcaccuccgccgaccagcagagccuguaccagaacgccgacgccuacguguucgugggcuccagccgguacuccaagaaguucaagcccgagaucgccauccgcccgaagguccggaaccaggagggccgcaugaacuacuacuggacgcugguggagcccggggacaagaucaccuucgaggcgaccggcaaccucguggucccccgguacgccuucgccauggagcgcaacgccgggagcggcaucaucaucuccgacacccccgugcacgacugcaacacgaccugccagaccccgaagggcgccaucaacaccagccugcccuuccagaacauccaccccaucacgaucgggaagugccccaaguacgugaaguccaccaagcugcggcucgcgaccggccugcgcaacgucccgagcauccagucccgggggcuguucggcgccaucgccggguucaucgagggcggcuggaccgggaugguggacggcugguacggguaccaccaccagaacgagcagggcagcggguacgccgccgaccucaaguccacgcagaacgcgaucgacgagaucaccaacaaggugaacagcgucaucgagaagaugaacacccaguucaccgccgugggcaaggaguucaaccaccuggagaagcgcaucgagaaccugaacaagaaggucgacgacggcuuccucgacaucuggacguacaacgccgagcugcuggugcuccuggagaacgagcggacccuggacuaccacgacuccaacgugaagaaccucuacgagaagguccgcagccagcugaagaacaacgccaaggagaucgggaacggcugcuucgaguucuaccacaagugcgacaacacgugcauggaguccgugaagaacgggaccuacgacuaccccaaguacagcgaggaggccaagcugaaccgggaggagaucgacggcgugaagcucgaguccacccgcaucuaccagauccuggcgaucuacagcaccgucgccagcucccuggugcucguggucagccugggggccaucuccuucuggaugugcagcaacggcucccugcagugccggaucugcaucuga

SEQ ID NO: 74402 - RNA, 1701 nt, Artificial Sequence; identical to SEQ ID NO: 66680
  derived and/or modified CDS sequence (opt1) from hemagglutinin__InfluenzaA__AGR50085

SEQ ID NO: 74403 - RNA, 1701 nt, Artificial Sequence; identical to SEQ ID NO: 66680
  derived and/or modified CDS sequence (opt1) from hemagglutinin__InfluenzaA__AGR50096

SEQ ID NO: 74404 - RNA, 1701 nt, Artificial Sequence; identical to SEQ ID NO: 66680
  derived and/or modified CDS sequence (opt1) from hemagglutinin__InfluenzaA__AGR50107

SEQ ID NO: 74405 - RNA, 1701 nt, Artificial Sequence; identical to SEQ ID NO: 66873
  derived and/or modified CDS sequence (opt1) from hemagglutinin__InfluenzaA__AGR50118

SEQ ID NO: 74406 - RNA, 1701 nt, Artificial Sequence
  derived and/or modified CDS sequence (opt1) from hemagglutinin__InfluenzaA__AGR50129
augaaggccauccuggugguccuccuguacaccuucgccaccgcgaacgccgacacgcugugcaucggcuaccacgccaacaacagcaccgacaccguggacaccgugcucgagaagaacgucacggugacccacuccgugaaccugcuggaggacaagcacaacgggaagcucugcaagcugcgcggcgucgcgccccugcaccucgggaagugcaacaucgccggcuggauccuggggaacccggagugcgagagccuguccaccgccagcuccuggagcuacaucguggagaccuccagcuccgacaacggcacgugcuaccccggcgacuucaucgacuacgaggagcuccgggagcagcugagcuccgugagcuccuucgagcgcuucgagaucuuccccaagaccagcuccuggcccaaccacgacagcaacaagggggucaccgccgccugcccgcacgccggcgcgaaguccuucuacaagaaccugaucuggcucgugaagaaggggaacagcuaccccaagcuguccaagagcuacaucaacgacaagggcaaggaggugcugguccucugggggauccaccaccccagcaccuccgccgaccagcagagccuguaccagaacgccgacgccuacguguucgugggcuccagccgguacuccaagaaguucaagcccgagaucgccauccgcccgaagguccgggaccaggagggccgcaugaacuacuacuggacgcugguggagcccggggacaagaucaccuucgaggcgaccggcaaccucguggucccccgguacgccuucgccauggagcgcaacgccgggagcggcaucaucaucuccgacacccccgugcacgacugcaacacgaccugccagaccccgaagggcgccaucaacaccagccugcccuuccagaacauccaccccaucacgaucgggcagugccccaaguacgugaaguccaccaagcugcggcucgcgaccggccugcgcaacgucccgagcauccagucccgggggcuguucggcgccaucgccggguucaucgagggcggcuggaccgggaugguggacggcugguacggguaccaccaccagaacgagcagggcagcggguacgccgccgaccucaaguccacgcagaacgcgaucgacgagaucaccaacaaggugaacagcgucaucgagaagaugaacacccaguucaccgccgugggcaaggaguucaaccaccuggagaagcgcaucgagaaccugaacaagaaggucgacgacggcuuccucgacaucuggacguacaacgccgagcugcuggugcuccuggagaacgagcggacccuggacuaccacgacuccaacgugaagaaccucuacgagaagguccgcagccagcugaagaacaacgccaaggagaucgggaacggcugcuucgaguucuaccacaagugcgacaacacgugcauggaguccgugaagaacgggaccuacgacuaccccaaguacagcgaggaggccaagcugaaccgggaggagaucgacggcgugaagcucgaguccacccgcaucuaccagauccuggcgaucuacagcaccgucgccagcucccuggugcucguggucagccugggggccaucuccuucuggaugugcagcaacggcucccugcagugccggaucugcaucuga

SEQ ID NO: 74407 - RNA, 1701 nt, Artificial Sequence; identical to SEQ ID NO: 66680
  derived and/or modified CDS sequence (opt1) from hemagglutinin__InfluenzaA__AGR50140

SEQ ID NO: 74408 - RNA, 1701 nt, Artificial Sequence; identical to SEQ ID NO: 66875
  derived and/or modified CDS sequence (opt1) from hemagglutinin__InfluenzaA__AGR50151

SEQ ID NO: 74409 - RNA, 1698 nt, Artificial Sequence; identical to SEQ ID NO: 70722
  derived and/or modified CDS sequence (opt1) from hemagglutinin__InfluenzaA__AGR50162

SEQ ID NO: 74410 - RNA, 1701 nt, Artificial Sequence; identical to SEQ ID NO: 66680
  derived and/or modified CDS sequence (opt1) from hemagglutinin__InfluenzaA__AGR50174

SEQ ID NO: 74411 - RNA, 1701 nt, Artificial Sequence; identical to SEQ ID NO: 66719
  derived and/or modified CDS sequence (opt1) from hemagglutinin__InfluenzaA__AGR50185

SEQ ID NO: 74412 - RNA, 1701 nt, Artificial Sequence; identical to SEQ ID NO: 66680
  derived and/or modified CDS sequence (opt1) from hemagglutinin__InfluenzaA__AGR50196

SEQ ID NO: 74413 - RNA, 1701 nt, Artificial Sequence
  derived and/or modified CDS sequence (opt1) from hemagglutinin__InfluenzaA__AGR50207
augaaggccauccuggugguccuccuguacaccuucgccaccgcgaacgccgacacgcugugcaucggcuaccacgccaacaacagcaccgacaccguggacaccgugcucgagaagaacgucacggugacccacuccgugaaccugcuggaggacaagcacaacgggaagcucugcaagcugcgcggcgucgcgccccugcaccucgggaagugcaacaucgccggcuggauccuggggaacccggagugcgagagccuguccaccgccagcuccuggagcuacaucguggagaccuccagcuccgacaacggcacgugcuaccccggcgacuucaucgacuacgaggagcuccgggagcagcugagcuccgugagcuccuucgagcgcuucgagaucuuccccaagaccagcuccuggcccaaccacgacagcaacaagggggucaccgccgccugcccgcacgccggcgcgaaguccuucuacaagaaccugaucuggcucgugaagaagggcaagagcuaccccaagcuguccaagagcuacaucaacgacaaggggaaggaggugcugguccucugggggauccaccaccccagcaccuccgccgaccagcagagccuguaccagaacgccgacgccuacguguucgugggcuccagccgguacuccaagaaguucaagcccgagaucgccauccgcccgaagguccgggaccaggagggccgcaugaacuacuacuggacgcugguggagcccggggacaagaucaccuucgaggcgaccggcaaccucguggucccccgguacgccuucgccauggagcgcaacgccgggagcggcaucaucaucuccgacacccccgugcacgacugcaacacgaccugccagaccccgaagggcgccaucaacaccagccugcccuuccagaacauccaccccaucacgaucgggaagugccccaaguacgugaaguccaccaagcugcggcucgcgaccggccugcgcaacgucccgagcauccagucccgggggcuguucggcgccaucgccggguucaucgagggcggcuggaccgggaugguggacggcugguacggguaccaccaccagaacgagcagggcagcggguacgccgccgaccucaaguccacgcagaacgcgaucgacgagaucaccaacaaggugaacagcgucaucgagaagaugaacacccaguucaccgccgugggcaaggaguucaaccaccuggagaagcgcaucgagaaccugaacaagaaggucgacgacggcuuccucgacaucuggacguacaacgccgagcugcuggugcuccuggagaacgagcggacccuggacuaccacgacuccaacgugaagaaccucuacgagaagguccgcagccagcugaagaacaacgccaaggagaucgggaacggcugcuucgaguucuaccacaagugcgacaacacgugcauggaguccgugaagaacgggaccuacgacuaccccaaguacagcgaggaggccaagcugaaccgggaggagaucgacggcgugaagcucgaguccacccgcaucuaccagauccuggcgaucuacagcaccgucgccagcucccuggugcucguggucagccugggggccaucuccuucuggaugugcagcaacggcucccugcagugccggaucugcaucuga

SEQ ID NO: 74414 - RNA, 1701 nt, Artificial Sequence; identical to SEQ ID NO: 66680
  derived and/or modified CDS sequence (opt1) from hemagglutinin__InfluenzaA__AGR50218

SEQ ID NO: 74415 - RNA, 1701 nt, Artificial Sequence; identical to SEQ ID NO: 66680
  derived and/or modified CDS sequence (opt1) from hemagglutinin__InfluenzaA__AGR50229

SEQ ID NO: 74416 - RNA, 1701 nt, Artificial Sequence; identical to SEQ ID NO: 66875
  derived and/or modified CDS sequence (opt1) from hemagglutinin__InfluenzaA__AGR50240

SEQ ID NO: 74417 - RNA, 1701 nt, Artificial Sequence; identical to SEQ ID NO: 66733
  derived and/or modified CDS sequence (opt1) from hemagglutinin__InfluenzaA__AGR50251

SEQ ID NO: 74418 - RNA, 1701 nt, Artificial Sequence
  derived and/or modified CDS sequence (opt1) from hemagglutinin__InfluenzaA__AGR50262
augaaggccauccuggugguccuccuguacaccuucgccaccgcgaacgccgacacgcugugcaucggcuaccacgccaacaacagcaccgacaccguggacaccgugcucgagaagaacgucacggugacccacuccgugaaccugcuggaggacaagcacaacgggaagcucugcaagcugcgcggcgucgcgccccugcaccucgggaagugcaacaucgccggcuggauccuggggaacccggagugcgagagccuguccaccgccagcuccuggagcuacaucguggagaccuccagcuccgacaacggcacgugcuaccccggcgacuucaucgacuacgaggagcuccgggagcagcugagcuccgugagcuccuucgagcgcuucgagaucuuccccaagaccagcuccuggcccaaccacgacagcaacaagggggucaccgccgccugcccgcacgccggcgcgaaguccuucuacaagaaccugaucuggcucgugaagaaggggaacagcuaccccaagcuguccaagagcuacaucaacgacaagggcaaggaggugcugguccucugggggauccaccaccccagcaccuccgccgaccagcagagccuguaccagaacgccgacgccuacguguucgugggcuccagccgguacuccaagaaguucaagcccgagaucgccauccgcccgaagguccgggaccaggagggccgcaugaacuacuacuggacgcugguggagcccggggacaagaucaccuucgaggcgaccggcaaccucguggucccccgguacgccuucgccauggagcgcaacgccgggagcggcaucaucaucuccgacacccccgugcacgacugcaacacgaccugccagaccccgaagggcgccaucaacaccagccugcccuuccagaacauccaccccaucacgaucgggaagugccccaaguacgugaaguccaccaagcugcggcucgcgaccggccugcgcaacgucccgagcauccagucccgggggcuguucggcgccaucgccggguucaucgagggcggcuggaccgggaugguggacggcugguacggguaccaccaccagaacgagcagggcagcggguacgccgccgaccucaaguccacgcagaacgcgaucgacgagaucaccaacaaggugaacagcgucaucgagaagaugaacacccaguucaccgccgugggcaaggaguucaaccaccuggagaagcgcaucgagaaccugaacaagaaggucgacgacggcuuccucgacaucuggacguacaacgccgagcugcuggugcuccuggagaacgagaagacccuggacuaccacgacuccaacgugaagaaccucuacgagaagguccggagccagcugaagaacaacgccaaggagaucgggaacggcugcuucgaguucuaccacaagugcgacaacacgugcauggaguccgugaagaacgggaccuacgacuaccccaaguacagcgaggaggccaagcugaaccgcgaggagaucgacggcgugaagcucgaguccacccggaucuaccagauccuggcgaucuacagcaccgucgccagcucccuggugcucguggucagccugggggccaucuccuucuggaugugcagcaacggcucccugcagugccgcaucugcaucuga

SEQ ID NO: 74419 - RNA, 1701 nt, Artificial Sequence; identical to SEQ ID NO: 66680
  derived and/or modified CDS sequence (opt1) from hemagglutinin__InfluenzaA__AGR50273

SEQ ID NO: 74420 - RNA, 1701 nt, Artificial Sequence
  derived and/or modified CDS sequence (opt1) from hemagglutinin__InfluenzaA__AGR50284
augaaggccauccuggugguccuccuguacaccuucgccaccgcgaacgccgacacgcugugcaucggcuaccacgccaacaacagcaccgacaccguggacaccgugcucgagaagaacgucacggugacccacuccgugaaccugcuggaggacaagcacaacgggaagcucugcaagcugcgcggcgucgcgccccugcaccucgggaagugcaacaucgccggcuggauccuggggaacccggagugcgagagccuguccaccgccagcuccuggagcuacaucguggagaccuccagcuccgacaacggcacgugcuaccccggcgacuucaucgacuacgaggagcuccgggagcagcugagcuccgugagcuccuucgagcgcuucgagaucuuccccaagaccagcuccuggcccaaccacgacagcaacaagggggucaccgccgccugcccgcacgccggcgcgaaguccuucuacaagaaccugaucuggcucgugaagaaggggaacagcuaccccaagcuguccaagagcuacaucaacgacaagggcaaggaggugcugguccucugggggauccaccaccccagcaccuccgccgaccagcagagccuguaccagaacgccgacgccuacguguucgugggcuccagccgguacuccaagaaguucaagcccgagaucgccauccgcccgaagguccgggaccaggagggccgcaugaacuacuacuggacgcugguggagcccggggacaagaucaccuucgaggcgaccggcaaccucguggucccccgguacgccuucgccauggagcgcaacgccgggagcggcaucaucaucuccgacagccccgugcacgacugcaacaccacgugccagaccccgaagggcgccaucaacaccucccugcccuuccagaacauccaccccaucaccaucgggaagugccccaaguacgucaagagcacgaagcugcggcucgcgaccggccugcgcaacgugccguccauccagagccgggggcuguucggcgccaucgccggguucaucgagggcggcuggaccgggaugguggacggcugguacggguaccaccaccagaacgagcagggcuccggguacgccgccgaccucaagagcacccagaacgcgaucgacgagaucacgaacaaggugaacuccgucaucgagaagaugaacacccaguucaccgccgugggcaaggaguucaaccaccuggagaagcgcaucgagaaccugaacaagaaggucgacgacggcuuccucgacaucuggaccuacaacgccgagcugcuggugcuccuggagaacgagcggacgcuggacuaccacgacagcaacgugaagaaccucuacgagaagguccgcucccagcugaagaacaacgccaaggagaucgggaacggcugcuucgaguucuaccacaagugcgacaacacgugcauggagagcgugaagaacgggaccuacgacuaccccaaguacuccgaggaggccaagcugaaccgggaggagaucgacggcgugaagcucgagagcacccgcaucuaccagauccuggcgaucuacagcaccgucgccuccagccuggugcucguggucucccugggggccaucagcuucuggaugugcuccaacggcagccugcagugccggaucugcaucuga

SEQ ID NO: 74421 - RNA, 1701 nt, Artificial Sequence; identical to SEQ ID NO: 67423
  derived and/or modified CDS sequence (opt1) from hemagglutinin__InfluenzaA__AGR50295

SEQ ID NO: 74422 - RNA, 1701 nt, Artificial Sequence; identical to SEQ ID NO: 66680
  derived and/or modified CDS sequence (opt1) from hemagglutinin__InfluenzaA__AGR50306

SEQ ID NO: 74423 - RNA, 1701 nt, Artificial Sequence; identical to SEQ ID NO: 66680
  derived and/or modified CDS sequence (opt1) from hemagglutinin__InfluenzaA__AGR50317

SEQ ID NO: 74424 - RNA, 1701 nt, Artificial Sequence; identical to SEQ ID NO: 74413
  derived and/or modified CDS sequence (opt1) from hemagglutinin__InfluenzaA__AGR50328

SEQ ID NO: 74425 - RNA, 1701 nt, Artificial Sequence
  derived and/or modified CDS sequence (opt1) from hemagglutinin__InfluenzaA__AGR50339
augaaggccauccuggugguccuccuguacaccuucgccaccgcgaacgccgacacgcugugcaucggcuaccacgccaacaacagcaccgacaccguggacaccgugcucgagaagaacgucacggugacccacuccgugaaccugcuggaggacaagcacaacgggaagcucugcaagcugcgcggcgucgcgccccugcaccucgggaagugcaacaucgccggcuggauccuggggaacccggagugcgagagccuguccaccgccagcuccuggagcuacaucguggagaccuccagcuccgacaacggcacgugcuaccccggcgacuucaucgacuacgaggagcuccgggagcagcugagcuccgugagcuccuucgagcgcuucgagaucuuccccaagaccagcuccuggcccaaccacgacagcaacaagggggucaccgccgccugcccgcacgccggcgcgaaguccuucuacaagaaccugaucuggcucgugaagaaggggaacagcuaccccaagcuguccaagagcuacaucaacgacaagggcaaggaggugcugguccucugggggauccaccaccccagcaccuccgccgaccagcagagccuguaccagaacgccgacgccuacguguucgugggcuccagccgguacuccaagaaguucaagcccgagaucgccauccgcccgaagguccgggaccaggagggccgcaugaacuacuacuggacgcugguggagcccggggacaagaucaccuucgaggcgaccggcaaccucguggucccccgguacgccuucgccauggagcgcaacgccgggagcggcaucaucaucuccgacacccccgugcacgacugcaacacgaccugccagaccagcaagggcgccaucaacaccucccugccguuccagaacauccaccccaucacgaucgggaagugccccaaguacgucaagagcaccaagcugcggcucgcgaccggccugcgcaacgugcccuccauccagagccgggggcuguucggcgccaucgccggguucaucgagggcggcuggaccgggaugguggacggcugguacggguaccaccaccagaacgagcagggcuccggguacgccgccgaccucaagagcacgcagaacgcgaucgacgagaucaccaacaaggugaacuccgucaucgagaagaugaacacccaguucaccgccgugggcaaggaguucaaccaccuggagaagcgcaucgagaaccugaacaagaaggucgacgacggcuuccucgacaucuggacguacaacgccgagcugcuggugcuccuggagaacgagcggacccuggacuaccacgacagcaacgugaagaaccucuacgagaagguccgcucccagcugaagaacaacgccaaggagaucgggaacggcugcuucgaguucuaccacaagugcgacaacacgugcauggagagcgugaagaacgggaccuacgacuacccgaaguacuccgaggaggccaagcugaaccgggaggagaucgacggcgugaagcucgagagcacccgcaucuaccagauccuggcgaucuacagcaccgucgccuccagccuggugcucguggucucccugggggccaucagcuucuggaugugcuccaacggcagccugcagugccggaucugcaucuga

SEQ ID NO: 74426 - RNA, 1701 nt, Artificial Sequence
  derived and/or modified CDS sequence (opt1) from hemagglutinin__InfluenzaA__AGR50350
augaaggccauccuggugguccuccuguacaccuucgccaccgcgaacgccgacacgcugugcaucggcuaccacgccaacaacagcaccgacaccguggacaccgugcucgagaagaacgucacggugacccacuccgugaaccugcuggaggacaagcacaacgggaagcucugcaagcugcgcggcgucgcgccccugcaccucgggaagugcaacaucgccggcuggaucauggggaacccggagugcgagagccuguccaccgccagcuccuggagcuacaucguggagaccuccagcuccgacaacggcacgugcuaccccggcgacuucaucgacuacgaggagcugcgggagcagcucagcuccgugagcuccuucgagcgcuucgagaucuuccccaagaccagcuccuggcccaaccacgacagcaacaagggggucaccgccgccugcccgcacgccggcgcgaaguccuucuacaagaaccugaucuggcuggugaagaaggggaacagcuaccccaagcucuccaagagcuacaucaacgacaagggcaaggaggugcugguccugugggggauccaccaccccagcaccuccgccgaccagcagagccucuaccagaacgccgacgccuacguguucgugggcuccagccgguacuccaagaaguucaagcccgagaucgccauccgcccgaagguccgggaccaggagggccgcaugaacuacuacuggacgcugguggagcccggggacaagaucaccuucgaggcgaccggcaaccugguggucccccgguacgccuucgccauggagcgcaacgccgggagcggcaucaucaucuccgacacccccgugcacgacugcaacacgaccugccagaccccgaagggcgccaucaacaccagccuccccuuccagaacauccaccccaucacgaucgggaagugccccaaguacgugaaguccaccaagcugcggcuggcgaccggccuccgcaacgucccgagcauccagucccgggggcuguucggcgccaucgccggguucaucgagggcggcuggaccgggaugguggacggcugguacggguaccaccaccagaacgagcagggcagcggguacgccgccgaccugaaguccacgcagaacgcgaucgacgagaucaccaacaaggugaacagcgucaucgagaagaugaacacccaguucaccgccgugggcaaggaguucaaccaccucgagaagcgcaucgagaaccugaacaagaaggucgacgacggcuuccuggacaucuggacguacaacgccgagcuccuggugcugcucgagaacgagcggacccuggacuaccacgacuccaacgugaagaaccuguacgagaagguccgcagccagcucaagaacaacgccaaggagaucgggaacggcugcuucgaguucuaccacaagugcgacaacacgugcauggaguccgugaagaacgggaccuacgacuaccccaaguacagcgaggaggccaagcugaaccgggaggagaucgacggcgugaagcuggaguccacccgcaucuaccagauccucgcgaucuacagcaccgucgccagcucccuggugcugguggucagccucggggccaucuccuucuggaugugcagcaacggcucccugcagugccggaucugcaucuga

SEQ ID NO: 74427 - RNA, 1698 nt, Artificial Sequence
  derived and/or modified CDS sequence (opt1) from hemagglutinin__InfluenzaA__AGR50361
augaaggugcagcugcucguccugcugugcaccuucaccgccacguacgccgacaccaucugcaucggcuaccacgcgaacaacagcaccgacaccguggacacggugcucgagaagaacgucaccgugacccacuccgugaaccugcuggagaacagccacaacgggaagcucugccugcugaagggcaucgcgccccuccagcuggggaacugcuccgucgccggcuggauccuggggaacccggagugcgagcuccugaucagcaaggaguccuggagcuacaucguggagaagcccaaccccgagaacgggaccugcuaccccggccacuucgccgacuacgaggagcugcgcgagcagcucuccagcguguccagcuucgagcgguucgagaucuucccgaaggaguccagcuggcccaaccacacggucaccgggguguccgccagcugcucccacaacggcgagagcuccuucuaccgcaaccugcuguggcucaccgggaagaacggccuguaccccaaccugagcaaguccuacgccaacaacaaggagaaggaggugcucguccuguggggcgugcaccacccgcccaacaucguggaccagaagacccuguaccggacggagaacgccuacgucagcguggugagcucccacuacagccgcaaguucacccccgagaucgccaagcggcccaagguccgcgaccaggagggccggaucaacuacuacuggacccuccuggagcccggcgacaccaucaucuucgaggccaacgggaaccugaucgcgccgcgcuacgccuucgcccucucccggggcuucgggagcggcaucaucaacuccaacgcccccaugggcaagugcgacgccaagugccagacgccccagggggcgaucaacagcucccugcccuuccagaacgugcacccggugaccaucggcgagugccccaaguacguccgcagcgccaagcugcggauggugaccgggcuccgcaacauccccuccauccagagccggggccuguucggggccaucgccggcuucaucgagggcggguggaccggcaugguggacgggugguacggcuaccaccaccagaacgagcagggguccggcuacgccgcggaccagaaguccacgcagaacgccaucaacggcaucaccaacaaggucaacagcgugaucgagaagaugaacacccaguucaccgccgucgggaaggaguucaacaagcuggagcgccggauggagaaccucaacaagaagguggacgacggcuucaucgacaucuggacguacaacgccgagcugcuggugcuccuggagaacgagcgcacccuggacuuccacgacagcaacgucaagaaccucuacgagaaggugaagucccagcugaagaacaacgccaaggagaucgggaacggcugcuucgaguucuaccacaagugcaacgacgagugcauggagagcgugaagaacgggaccuacgacuaccccaaguacuccgaggagagcaagcugaaccgggagaagaucgacggcgucaagcucgaguccaugggcguguaccagauccuggcgaucuacagcaccguggccagcucccugguccuccuggugagccugggggccaucuccuucuggaugugcagcaacggcucccuccagugccgcaucugcaucuga

SEQ ID NO: 74428 - RNA, 1701 nt, Artificial Sequence
  derived and/or modified CDS sequence (opt1) from hemagglutinin__InfluenzaA__AGT18718
augaaggugauccuggucgugcuccuguacaccuucgccaccgccaacgcggacacgcugugcaucggcuaccacgccaacaacagcaccgacaccguggacaccguccucgagaagaacgugacggugacccacuccgucaaccugcuggaggacaagcacaacgggaagcucugcaagcugcgcggcguggcgccccugcaccucgggaagugcaacaucgccggcuggauccuggggaacccggagugcgagagccuguccaccgccagcuccuggagcuacaucguggagaccuccagcuccgacaacggcacgugcuaccccggcgacuucaucaacuacgaggagcuccgggagcagcugagcuccgucagcuccuucgagcgcuucgagaucuuccccaagaccagcuccuggcccaaccacgacagcaacaagggggugaccgccgccugcccgcacgccggcgccaaguccuucuacaagaaccugaucuggcucgugaagaaggggaacagcuaccccaagcuguccaagagcuacaucaacgacaagggcaaggagguccuggugcucugggggauccaccaccccagcaccacggcggaccagcagucccuguaccagaacgccgacgccuacguguucgucggcaccagccgguacuccaagaaguucaagcccgagaucgccauccgcccgaaggugcgggaccaggagggccgcaugaacuacuacuggacccugaucgagcccggggacaagaucaccuucgaggccacgggcaaccucguggucccccgguacgcguucgccauggagcgcaacgccgggagcggcaucaucaucuccgacacccccgugcacgacugcaacacgaccugccagaccccggagggcgccaucaacaccagccugcccuuccagaacauccaccccaucaccaucgggaagugccccaaguacgugaaguccaccaagcugcggcucgccacgggccugcgcaacgucccgagcauccagucccgggggcuguucggcgcgaucgccggguucaucgagggcggcuggaccgggaugguggacggcugguacggguaccaccaccagaacgagcagggcagcggguacgccgccgaccucaaguccacccagaacgccaucgacaagaucaccaacaaggugaacagcgucaucgagaagaugaacacgcaguucaccgcggugggcaaggaguucaaccaccuggagaagcgcaucgagaaccugaacaagaaggucgacgacggcuuccucgacaucuggaccuacaacgccgagcugcuggugcuccuggagaacgagcggacccuggacuaccacgacuccaacgugaagaaccucuacgagaagguccgcaaccagcugaagaacaacgccaaggagaucgggaacggcugcuucgaguucuaccacaagugcgacaacacgugcauggagagcgugaagaacgggaccuacgacuaccccaaguacuccgaggaggccaagcugaaccgggagaagaucgacggcgugaagcucgagagcacccgcaucuaccagauccuggccaucuacuccaccgucgcgagcucccuggugcucguggucagccugggggccaucagcuucuggaugugcuccaacggcagccugcagugccggaucugcaucuga

SEQ ID NO: 74429 - RNA, 1701 nt, Artificial Sequence
  derived and/or modified CDS sequence (opt1) from hemagglutinin__InfluenzaA__AGT18720
augaaggugauccuggucgugcuccuguacaccuucgccaccgccaacgcggacacgcugugcaucggcuaccacgccaacaacagcaccgacaccguggacaccguccucgagaagaacgugacggugacccacuccgucaaccugcuggaggacaagcacaacgggaagcucugcaagcugcgcggcguggcgccccugcaccucgggaagugcaacaucgccggcuggauccuggggaacccggagugcgagagccuguccaccgccagcuccuggagcuacaucguggagaccuccagcuccgacaacggcacgugcuaccccggcgacuucaucaacuacgaggagcuccgggagcagcugagcuccgucagcuccuucgagcgcuucgagaucuuccccaaggccagcuccuggcccaaccacgacagcaacaagggggugaccgccgccugcccgcacgccggcgcgaaguccuucuacaagaaccugaucuggcucgugaagaaggggaacagcuaccccaagcuguccaagagcuacaucaacgacaagggcaaggagguccuggugcucugggggauccaccaccccaacaccaccgccgaccagcagagccuguaccagaacgccgacgccuacguguucgucggcacgucccgguacagcaagaaguucaagcccgagaucgccauccgcccgaaggugcgggaccaggagcgccggaugaacuacuacuggacccugaucgagcccggcgacaagaucaccuucgaggcgaccgggaaccucguggucccccgcuacgccuucgccauggagcggaacgccggcuccgggaucaucaucagcgacacgcccgugcacgacugcaacacgaccugccagaccccggagggcgccaucaacaccucccugcccuuccagaacauccaccccaucaccaucggcaagugccccaaguacgucaagagcaccaagcugcgccucgcgaccgggcugcggaacgugccguccauccagagccgcggccuguucggggccaucgccggcuucaucgagggcggguggacgggcaugguggacgggugguacggcuaccaccaccagaacgagcagggguccggcuacgccgccgaccucaagagcacccagaacgcgaucgacaagaucaccaacaaggugaacuccgucaucgagaagaugaacacccaguucacggccguggggaaggaguucaaccaccuggagaagcggaucgagaaccugaacaagaaggucgacgacggcuuccucgacaucuggaccuacaacgccgagcugcuggugcuccuggagaacgagcgcacccuggacuaccacgacagcaacgugaagaaccucuacgagaagguccggaaccagcugaagaacaacgccaaggagaucggcaacgggugcuucgaguucuaccacaagugcgacaacacgugcauggaguccgugaagaacggcaccuacgacuaccccaaguacagcgaggaggccaagcugaaccgcgagaagaucgacggggugaagcucgaguccacccggaucuaccagauccuggcgaucuacagcaccgucgccuccagccuggugcucguggucucccugggcgccaucagcuucuggaugugcagcaacgggucccugcagugccgcaucugcaucuga
